United States Patent Application Publication US 2005/0255487 A1 - sequence listing, part 57

SEQ ID NO: 1561897 - RNA, 19 nt, Homo sapiens
  misc_RNA (1)...(19): siRNA sense strand
gcagagccacugagauuug

SEQ ID NO: 1561898 - RNA, 19 nt, Homo sapiens
  misc_RNA (1)...(19): siRNA sense strand
caaccacacugcaggaagu

SEQ ID NO: 1561899 - RNA, 19 nt, Homo sapiens
  misc_RNA (1)...(19): siRNA sense strand
ggauaaagagaacaaugaa

SEQ ID NO: 1561900 - RNA, 19 nt, Homo sapiens
  misc_RNA (1)...(19): siRNA sense strand
ucaaugagcacuuuagcaa

SEQ ID NO: 1561901 - RNA, 19 nt, Homo sapiens
  misc_RNA (1)...(19): siRNA sense strand
ccuauaauccuaagaacuu

SEQ ID NO: 1561902 - RNA, 19 nt, Homo sapiens
  misc_RNA (1)...(19): siRNA sense strand
caagagaagagucggaaga

SEQ ID NO: 1561903 - RNA, 19 nt, Homo sapiens
  misc_RNA (1)...(19): siRNA sense strand
cauccagccuauaauccua

SEQ ID NO: 1561904 - RNA, 19 nt, Homo sapiens
  misc_RNA (1)...(19): siRNA sense strand
ccagggaagcuccauaaau

SEQ ID NO: 1561905 - RNA, 19 nt, Homo sapiens
  misc_RNA (1)...(19): siRNA sense strand
cccaagguauucucuccua

SEQ ID NO: 1561906 - RNA, 19 nt, Homo sapiens
  misc_RNA (1)...(19): siRNA sense strand
gaacaaugaagcgccucua

SEQ ID NO: 1561907 - RNA, 19 nt, Homo sapiens
  misc_RNA (1)...(19): siRNA sense strand
uacugcagcuggagagaaa

SEQ ID NO: 1561908 - RNA, 19 nt, Homo sapiens
  misc_RNA (1)...(19): siRNA sense strand
gcagcaaggcccaggugaa

SEQ ID NO: 1561909 - RNA, 19 nt, Homo sapiens
  misc_RNA (1)...(19): siRNA sense strand
uggauaaagagaacaauga

SEQ ID NO: 1561910 - RNA, 19 nt, Homo sapiens
  misc_RNA (1)...(19): siRNA sense strand
cauggccuuuguucaguuu

SEQ ID NO: 1561911 - RNA, 19 nt, Homo sapiens
  misc_RNA (1)...(19): siRNA sense strand
caucaaggucucacacuuc

SEQ ID NO: 1561912 - RNA, 19 nt, Homo sapiens
  misc_RNA (1)...(19): siRNA sense strand
ccaagguauucucuccuau

SEQ ID NO: 1561913 - RNA, 19 nt, Homo sapiens
  misc_RNA (1)...(19): siRNA sense strand
ggaagcuccauaaauguca

SEQ ID NO: 1561914 - RNA, 19 nt, Homo sapiens
  misc_RNA (1)...(19): siRNA sense strand
ucucuccuauggaaacaaa

SEQ ID NO: 1561915 - RNA, 19 nt, Homo sapiens
  misc_RNA (1)...(19): siRNA sense strand
caagguauucucuccuaug

SEQ ID NO: 1561916 - RNA, 19 nt, Homo sapiens
  misc_RNA (1)...(19): siRNA sense strand
gcaguuuaucccugugaaa

SEQ ID NO: 1561917 - RNA, 19 nt, Homo sapiens
  misc_RNA (1)...(19): siRNA sense strand
agaagacacagaccgguuu

SEQ ID NO: 1561918 - RNA, 19 nt, Homo sapiens
  misc_RNA (1)...(19): siRNA sense strand
cagggcagcugugcagugu

SEQ ID NO: 1561919 - RNA, 19 nt, Homo sapiens
  misc_RNA (1)...(19): siRNA sense strand
gaagacacagaccgguuuc

SEQ ID NO: 1561920 - RNA, 19 nt, Homo sapiens
  misc_RNA (1)...(19): siRNA sense strand
cagccuauaauccuaagaa

SEQ ID NO: 1561921 - RNA, 19 nt, Homo sapiens
  misc_RNA (1)...(19): siRNA sense strand
cuacauggccuuuguucag

SEQ ID NO: 1561922 - RNA, 19 nt, Homo sapiens
  misc_RNA (1)...(19): siRNA sense strand
gauaaagagaacaaugaag

SEQ ID NO: 1561923 - RNA, 19 nt, Homo sapiens
  misc_RNA (1)...(19): siRNA sense strand
acaucaaggucucacacuu

SEQ ID NO: 1561924 - RNA, 19 nt, Homo sapiens
  misc_RNA (1)...(19): siRNA sense strand
gggaagcuccauaaauguc

SEQ ID NO: 1561925 - RNA, 19 nt, Homo sapiens
  misc_RNA (1)...(19): siRNA sense strand
cagagccacugagauuugu

SEQ ID NO: 1561926 - RNA, 19 nt, Homo sapiens
  misc_RNA (1)...(19): siRNA sense strand
gcggcauccuagugagaaa

SEQ ID NO: 1561927 - RNA, 19 nt, Homo sapiens
  misc_RNA (1)...(19): siRNA sense strand
uuccugcccuggauaaaga

SEQ ID NO: 1561928 - RNA, 19 nt, Homo sapiens
  misc_RNA (1)...(19): siRNA sense strand
cuguuggccuuucuucuga

SEQ ID NO: 1561929 - RNA, 19 nt, Homo sapiens
  misc_RNA (1)...(19): siRNA sense strand
gauccaaagaagacacaga

SEQ ID NO: 1561930 - RNA, 19 nt, Homo sapiens
  misc_RNA (1)...(19): siRNA sense strand
gagguguggcggcauccua

SEQ ID NO: 1561931 - RNA, 19 nt, Homo sapiens
  misc_RNA (1)...(19): siRNA sense strand
ggcccacaauaucaaggaa

SEQ ID NO: 1561932 - RNA, 19 nt, Homo sapiens
  misc_RNA (1)...(19): siRNA sense strand
aagguauucucuccuaugg

SEQ ID NO: 1561933 - RNA, 19 nt, Homo sapiens
  misc_RNA (1)...(19): siRNA sense strand
cccacaauaucaaggaaca

SEQ ID NO: 1561934 - RNA, 19 nt, Homo sapiens
  misc_RNA (1)...(19): siRNA sense strand
ucucuuccauggcaauuac

SEQ ID NO: 1561935 - RNA, 19 nt, Homo sapiens
  misc_RNA (1)...(19): siRNA sense strand
cagcaaggcccaggugaag

SEQ ID NO: 1561936 - RNA, 19 nt, Homo sapiens
  misc_RNA (1)...(19): siRNA sense strand
ccucguguguaaggacgua

SEQ ID NO: 1561937 - RNA, 19 nt, Homo sapiens
  misc_RNA (1)...(19): siRNA sense strand
ugccagggaagcuccauaa

SEQ ID NO: 1561938 - RNA, 19 nt, Homo sapiens
  misc_RNA (1)...(19): siRNA sense strand
aacaaugaagcgccucuaa

SEQ ID NO: 1561939 - RNA, 19 nt, Homo sapiens
  misc_RNA (1)...(19): siRNA sense strand
gcaggaaguguugcugaca

SEQ ID NO: 1561940 - RNA, 19 nt, Homo sapiens
  misc_RNA (1)...(19): siRNA sense strand
gagccacugagauuugugu

SEQ ID NO: 1561941 - RNA, 19 nt, Homo sapiens
  misc_RNA (1)...(19): siRNA sense strand
gacacagaccgguuucaag

SEQ ID NO: 1561942 - RNA, 19 nt, Homo sapiens
  misc_RNA (1)...(19): siRNA sense strand
agacacagaccgguuucaa

SEQ ID NO: 1561943 - RNA, 19 nt, Homo sapiens
  misc_RNA (1)...(19): siRNA sense strand
ggaaacagguugcaaguga

SEQ ID NO: 1561944 - RNA, 19 nt, Homo sapiens
  misc_RNA (1)...(19): siRNA sense strand
gguaaggacuucaguuaua

SEQ ID NO: 1561945 - RNA, 19 nt, Homo sapiens
  misc_RNA (1)...(19): siRNA sense strand
gagaaacccuauaaaugua

SEQ ID NO: 1561946 - RNA, 19 nt, Homo sapiens
  misc_RNA (1)...(19): siRNA sense strand
gagagaaacucaauagaug

SEQ ID NO: 1561947 - RNA, 19 nt, Homo sapiens
  misc_RNA (1)...(19): siRNA sense strand
ggagagaagucuuauagau

SEQ ID NO: 1561948 - RNA, 19 nt, Homo sapiens
  misc_RNA (1)...(19): siRNA sense strand
gguaggagcuugaaucuuc

SEQ ID NO: 1561949 - RNA, 19 nt, Homo sapiens
  misc_RNA (1)...(19): siRNA sense strand
gguaaaggcuucagucaga

SEQ ID NO: 1561950 - RNA, 19 nt, Homo sapiens
  misc_RNA (1)...(19): siRNA sense strand
gaagaguucccaguuauua

SEQ ID NO: 1561951 - RNA, 19 nt, Homo sapiens
  misc_RNA (1)...(19): siRNA sense strand
gcacgggucuuaucauuca

SEQ ID NO: 1561952 - RNA, 19 nt, Homo sapiens
  misc_RNA (1)...(19): siRNA sense strand
gagagaaacccuauaaaug

SEQ ID NO: 1561953 - RNA, 19 nt, Homo sapiens
  misc_RNA (1)...(19): siRNA sense strand
gaaaguccauacugguaaa

SEQ ID NO: 1561954 - RNA, 19 nt, Homo sapiens
  misc_RNA (1)...(19): siRNA sense strand
gagagaaacccuauaaaug

SEQ ID NO: 1561955 - RNA, 19 nt, Homo sapiens
  misc_RNA (1)...(19): siRNA sense strand
ggaaugugguaaaugcuuu

SEQ ID NO: 1561956 - RNA, 19 nt, Homo sapiens
  misc_RNA (1)...(19): siRNA sense strand
gagagaagccauacaaaug

SEQ ID NO: 1561957 - RNA, 19 nt, Homo sapiens
  misc_RNA (1)...(19): siRNA sense strand
ggagagaaacccuauaaau

SEQ ID NO: 1561958 - RNA, 19 nt, Homo sapiens
  misc_RNA (1)...(19): siRNA sense strand
ggagagaaacccuauaaau

SEQ ID NO: 1561959 - RNA, 19 nt, Homo sapiens
  misc_RNA (1)...(19): siRNA sense strand
ggacuucaguuauaguuca

SEQ ID NO: 1561960 - RNA, 19 nt, Homo sapiens
  misc_RNA (1)...(19): siRNA sense strand
auacagaucugcauauuca

SEQ ID NO: 1561961 - RNA, 19 nt, Homo sapiens
  misc_RNA (1)...(19): siRNA sense strand
gguaagggcuucagucagu

SEQ ID NO: 1561962 - RNA, 19 nt, Homo sapiens
  misc_RNA (1)...(19): siRNA sense strand
ccacaauucaccauuaaua

SEQ ID NO: 1561963 - RNA, 19 nt, Homo sapiens
  misc_RNA (1)...(19): siRNA sense strand
gaaacagguugcaagugaa

SEQ ID NO: 1561964 - RNA, 19 nt, Homo sapiens
  misc_RNA (1)...(19): siRNA sense strand
gagaagcccuauaaaugug

SEQ ID NO: 1561965 - RNA, 19 nt, Homo sapiens
  misc_RNA (1)...(19): siRNA sense strand
gaguagagguaagcaaauu

SEQ ID NO: 1561966 - RNA, 19 nt, Homo sapiens
  misc_RNA (1)...(19): siRNA sense strand
ggagagaaaccauauagau

SEQ ID NO: 1561967 - RNA, 19 nt, Homo sapiens
  misc_RNA (1)...(19): siRNA sense strand
ggagagaaacucaauagau

SEQ ID NO: 1561968 - RNA, 19 nt, Homo sapiens
  misc_RNA (1)...(19): siRNA sense strand
guaagcaaauugaugugaa

SEQ ID NO: 1561969 - RNA, 19 nt, Homo sapiens
  misc_RNA (1)...(19): siRNA sense strand
cagccacaauucaccauua

SEQ ID NO: 1561970 - RNA, 19 nt, Homo sapiens
  misc_RNA (1)...(19): siRNA sense strand
gagagaaacccuacaagug

SEQ ID NO: 1561971 - RNA, 19 nt, Homo sapiens
  misc_RNA (1)...(19): siRNA sense strand
cugcaaagguaaugaauau

SEQ ID NO: 1561972 - RNA, 19 nt, Homo sapiens
  misc_RNA (1)...(19): siRNA sense strand
guucacgucuuacauauca

SEQ ID NO: 1561973 - RNA, 19 nt, Homo sapiens
  misc_RNA (1)...(19): siRNA sense strand
uuacaaaugugaagagugu

SEQ ID NO: 1561974 - RNA, 19 nt, Homo sapiens
  misc_RNA (1)...(19): siRNA sense strand
gagagaagccauacaagug

SEQ ID NO: 1561975 - RNA, 19 nt, Homo sapiens
  misc_RNA (1)...(19): siRNA sense strand
gugagaagcccuauaaaug

SEQ ID NO: 1561976 - RNA, 19 nt, Homo sapiens
  misc_RNA (1)...(19): siRNA sense strand
ggagagaagccauacaaau

SEQ ID NO: 1561977 - RNA, 19 nt, Homo sapiens
  misc_RNA (1)...(19): siRNA sense strand
ggaaacagaaacccaaaga

SEQ ID NO: 1561978 - RNA, 19 nt, Homo sapiens
  misc_RNA (1)...(19): siRNA sense strand
gaugugaugugugugguaa

SEQ ID NO: 1561979 - RNA, 19 nt, Homo sapiens
  misc_RNA (1)...(19): siRNA sense strand
cagcacgggucuuaucauu

SEQ ID NO: 1561980 - RNA, 19 nt, Homo sapiens
  misc_RNA (1)...(19): siRNA sense strand
gagagaaaccauauagaug

SEQ ID NO: 1561981 - RNA, 19 nt, Homo sapiens
  misc_RNA (1)...(19): siRNA sense strand
gagagaagucuuauagaug

SEQ ID NO: 1561982 - RNA, 19 nt, Homo sapiens
  misc_RNA (1)...(19): siRNA sense strand
gagaaaccauauagaugug

SEQ ID NO: 1561983 - RNA, 19 nt, Homo sapiens
  misc_RNA (1)...(19): siRNA sense strand
gcauauucauuucagaguu

SEQ ID NO: 1561984 - RNA, 19 nt, Homo sapiens
  misc_RNA (1)...(19): siRNA sense strand
gaauuaaccaggugucuuc

SEQ ID NO: 1561985 - RNA, 19 nt, Homo sapiens
  misc_RNA (1)...(19): siRNA sense strand
cgucaccguucacgucuua

SEQ ID NO: 1561986 - RNA, 19 nt, Homo sapiens
  misc_RNA (1)...(19): siRNA sense strand
ggacuuccgucaccguuca

SEQ ID NO: 1561987 - RNA, 19 nt, Homo sapiens
  misc_RNA (1)...(19): siRNA sense strand
agagaaacccuauaaaugu

SEQ ID NO: 1561988 - RNA, 19 nt, Homo sapiens
  misc_RNA (1)...(19): siRNA sense strand
ccaaaacccugcaaaggua

SEQ ID NO: 1561989 - RNA, 19 nt, Homo sapiens
  misc_RNA (1)...(19): siRNA sense strand
auacaaaugugaugugugu

SEQ ID NO: 1561990 - RNA, 19 nt, Homo sapiens
  misc_RNA (1)...(19): siRNA sense strand
guaaggacuucaguuauag

SEQ ID NO: 1561991 - RNA, 19 nt, Homo sapiens
  misc_RNA (1)...(19): siRNA sense strand
gagcuguccugcuggcaaa

SEQ ID NO: 1561992 - RNA, 19 nt, Homo sapiens
  misc_RNA (1)...(19): siRNA sense strand
gagaagccauacaaaugug

SEQ ID NO: 1561993 - RNA, 19 nt, Homo sapiens
  misc_RNA (1)...(19): siRNA sense strand
gagcuucagucaggccaua

SEQ ID NO: 1561994 - RNA, 19 nt, Homo sapiens
  misc_RNA (1)...(19): siRNA sense strand
gguaagggcuucgguugga

SEQ ID NO: 1561995 - RNA, 19 nt, Homo sapiens
  misc_RNA (1)...(19): siRNA sense strand
gaagaaaagcuuuggauga

SEQ ID NO: 1561996 - RNA, 19 nt, Homo sapiens
  misc_RNA (1)...(19): siRNA sense strand
ggucuucaaucccaucaga

SEQ ID NO: 1561997 - RNA, 19 nt, Homo sapiens
  misc_RNA (1)...(19): siRNA sense strand
ccauauagaugugaugugu

SEQ ID NO: 1561998 - RNA, 19 nt, Homo sapiens
  misc_RNA (1)...(19): siRNA sense strand
gcucacaucugcgaacuca

SEQ ID NO: 1561999 - RNA, 19 nt, Homo sapiens
  misc_RNA (1)...(19): siRNA sense strand
gcaaagguaaugaauaugg

SEQ ID NO: 1562000 - RNA, 19 nt, Homo sapiens
  misc_RNA (1)...(19): siRNA sense strand
gaaacagaaacccaaagaa

SEQ ID NO: 1562001 - RNA, 19 nt, Homo sapiens
  misc_RNA (1)...(19): siRNA sense strand
cuacaagugugaugugugu

SEQ ID NO: 1562002 - RNA, 19 nt, Homo sapiens
  misc_RNA (1)...(19): siRNA sense strand
auacaaauguggugucugu

SEQ ID NO: 1562003 - RNA, 19 nt, Homo sapiens
  misc_RNA (1)...(19): siRNA sense strand
ggagaaacgauucaagugu

SEQ ID NO: 1562004 - RNA, 19 nt, Homo sapiens
  misc_RNA (1)...(19): siRNA sense strand
ggauguggcuguggucuuc

SEQ ID NO: 1562005 - RNA, 19 nt, Homo sapiens
  misc_RNA (1)...(19): siRNA sense strand
gaacucaucagagaauuca

SEQ ID NO: 1562006 - RNA, 19 nt, Homo sapiens
  misc_RNA (1)...(19): siRNA sense strand
gugguaaggacuucaguua

SEQ ID NO: 1562007 - RNA, 19 nt, Homo sapiens
  misc_RNA (1)...(19): siRNA sense strand
ggagagaagccauacaagu

SEQ ID NO: 1562008 - RNA, 19 nt, Homo sapiens
  misc_RNA (1)...(19): siRNA sense strand
ggagagaaacccuacaagu

SEQ ID NO: 1562009 - RNA, 19 nt, Homo sapiens
  misc_RNA (1)...(19): siRNA sense strand
ucacucaggcugcacauuu

SEQ ID NO: 1562010 - RNA, 19 nt, Homo sapiens
  misc_RNA (1)...(19): siRNA sense strand
gcagcaagcaucaaaauaa

SEQ ID NO: 1562011 - RNA, 19 nt, Homo sapiens
  misc_RNA (1)...(19): siRNA sense strand
gaaaccauauagaugugau

SEQ ID NO: 1562012 - RNA, 19 nt, Homo sapiens
  misc_RNA (1)...(19): siRNA sense strand
caaccagaaauuacccuua

SEQ ID NO: 1562013 - RNA, 19 nt, Homo sapiens
  misc_RNA (1)...(19): siRNA sense strand
cagaaaguccauacuggua

SEQ ID NO: 1562014 - RNA, 19 nt, Homo sapiens
  misc_RNA (1)...(19): siRNA sense strand
gagaugucaugguggagaa

SEQ ID NO: 1562015 - RNA, 19 nt, Homo sapiens
  misc_RNA (1)...(19): siRNA sense strand
ugagaagcccuauaaaugu

SEQ ID NO: 1562016 - RNA, 19 nt, Homo sapiens
  misc_RNA (1)...(19): siRNA sense strand
gaacucauacuggagagaa

SEQ ID NO: 1562017 - RNA, 19 nt, Homo sapiens
  misc_RNA (1)...(19): siRNA sense strand
cucaauagaugucaugaau

SEQ ID NO: 1562018 - RNA, 19 nt, Homo sapiens
  misc_RNA (1)...(19): siRNA sense strand
ggugagaagcccuauaaau

SEQ ID NO: 1562019 - RNA, 19 nt, Homo sapiens
  misc_RNA (1)...(19): siRNA sense strand
ggcaagggauucaguagca

SEQ ID NO: 1562020 - RNA, 19 nt, Homo sapiens
  misc_RNA (1)...(19): siRNA sense strand
ggaauacauaucugaguga

SEQ ID NO: 1562021 - RNA, 19 nt, Homo sapiens
  misc_RNA (1)...(19): siRNA sense strand
cgaggaaugugguaaaugc

SEQ ID NO: 1562022 - RNA, 19 nt, Homo sapiens
  misc_RNA (1)...(19): siRNA sense strand
gagguaagcaaauugaugu

SEQ ID NO: 1562023 - RNA, 19 nt, Homo sapiens
  misc_RNA (1)...(19): siRNA sense strand
ccaauuggaagcagaagaa

SEQ ID NO: 1562024 - RNA, 19 nt, Homo sapiens
  misc_RNA (1)...(19): siRNA sense strand
ucagucaggccauagauuu

SEQ ID NO: 1562025 - RNA, 19 nt, Homo sapiens
  misc_RNA (1)...(19): siRNA sense strand
aaacagaaacccaaagaag

SEQ ID NO: 1562026 - RNA, 19 nt, Homo sapiens
  misc_RNA (1)...(19): siRNA sense strand
gaaaagccauacaaaugug

SEQ ID NO: 1562027 - RNA, 19 nt, Homo sapiens
  misc_RNA (1)...(19): siRNA sense strand
agaaacgauucaaguguga

SEQ ID NO: 1562028 - RNA, 19 nt, Homo sapiens
  misc_RNA (1)...(19): siRNA sense strand
cauauucauuucagaguuc

SEQ ID NO: 1562029 - RNA, 19 nt, Homo sapiens
  misc_RNA (1)...(19): siRNA sense strand
ggucuuaucauucauuaca

SEQ ID NO: 1562030 - RNA, 19 nt, Homo sapiens
  misc_RNA (1)...(19): siRNA sense strand
gcaaaucuggaaacagguu

SEQ ID NO: 1562031 - RNA, 19 nt, Homo sapiens
  misc_RNA (1)...(19): siRNA sense strand
cgucuuacauaucaucaga

SEQ ID NO: 1562032 - RNA, 19 nt, Homo sapiens
  misc_RNA (1)...(19): siRNA sense strand
agagaaacccuacaagugu

SEQ ID NO: 1562033 - RNA, 19 nt, Homo sapiens
  misc_RNA (1)...(19): siRNA sense strand
guagagguaagcaaauuga

SEQ ID NO: 1562034 - RNA, 19 nt, Homo sapiens
  misc_RNA (1)...(19): siRNA sense strand
gaaacucaauagaugucau

SEQ ID NO: 1562035 - RNA, 19 nt, Homo sapiens
  misc_RNA (1)...(19): siRNA sense strand
ggagagaaaccccauauau

SEQ ID NO: 1562036 - RNA, 19 nt, Homo sapiens
  misc_RNA (1)...(19): siRNA sense strand
ucaggaggcugugacauuc

SEQ ID NO: 1562037 - RNA, 19 nt, Homo sapiens
  misc_RNA (1)...(19): siRNA sense strand
guaauacagaucugcauau

SEQ ID NO: 1562038 - RNA, 19 nt, Homo sapiens
  misc_RNA (1)...(19): siRNA sense strand
caggagagaagucuuauag

SEQ ID NO: 1562039 - RNA, 19 nt, Homo sapiens
  misc_RNA (1)...(19): siRNA sense strand
cuauaaaugugaggaaugu

SEQ ID NO: 1562040 - RNA, 19 nt, Homo sapiens
  misc_RNA (1)...(19): siRNA sense strand
agagaaaccauauagaugu

SEQ ID NO: 1562041 - RNA, 19 nt, Homo sapiens
  misc_RNA (1)...(19): siRNA sense strand
ccauauaugugaggagugu

SEQ ID NO: 1562042 - RNA, 19 nt, Homo sapiens
  misc_RNA (1)...(19): siRNA sense strand
guaauucacacuggagaaa

SEQ ID NO: 1562043 - RNA, 19 nt, Homo sapiens
  misc_RNA (1)...(19): siRNA sense strand
ugaagcagcuggccgaaga

SEQ ID NO: 1562044 - RNA, 19 nt, Homo sapiens
  misc_RNA (1)...(19): siRNA sense strand
cuaagcaguucgcgcguua

SEQ ID NO: 1562045 - RNA, 19 nt, Homo sapiens
  misc_RNA (1)...(19): siRNA sense strand
ccgaagaacgcgaauggua

SEQ ID NO: 1562046 - RNA, 19 nt, Homo sapiens
  misc_RNA (1)...(19): siRNA sense strand
gccaagaugccacagauga

SEQ ID NO: 1562047 - RNA, 19 nt, Homo sapiens
  misc_RNA (1)...(19): siRNA sense strand
caagaugccacagaugauu

SEQ ID NO: 1562048 - RNA, 19 nt, Homo sapiens
  misc_RNA (1)...(19): siRNA sense strand
cagagugcauggccaagau

SEQ ID NO: 1562049 - RNA, 19 nt, Homo sapiens
  misc_RNA (1)...(19): siRNA sense strand
uccaggaccuagagaagaa

SEQ ID NO: 1562050 - RNA, 19 nt, Homo sapiens
  misc_RNA (1)...(19): siRNA sense strand
ggagcuggaggccgaagaa

SEQ ID NO: 1562051 - RNA, 19 nt, Homo sapiens
  misc_RNA (1)...(19): siRNA sense strand
gcagagugcauggccaaga

SEQ ID NO: 1562052 - RNA, 19 nt, Homo sapiens
  misc_RNA (1)...(19): siRNA sense strand
cugcagcuguggcucaaga

SEQ ID NO: 1562053 - RNA, 19 nt, Homo sapiens
  misc_RNA (1)...(19): siRNA sense strand
gcuacgcggcuaagcaguu

SEQ ID NO: 1562054 - RNA, 19 nt, Homo sapiens
  misc_RNA (1)...(19): siRNA sense strand
cuacgcggcuaagcaguuc

SEQ ID NO: 1562055 - RNA, 19 nt, Homo sapiens
  misc_RNA (1)...(19): siRNA sense strand
ccaagaugccacagaugau

SEQ ID NO: 1562056 - RNA, 19 nt, Homo sapiens
  misc_RNA (1)...(19): siRNA sense strand
ggagagggagcagcacauc

SEQ ID NO: 1562057 - RNA, 19 nt, Homo sapiens
  misc_RNA (1)...(19): siRNA sense strand
ggccgaagaacgcgaaugg

SEQ ID NO: 1562058 - RNA, 19 nt, Homo sapiens
  misc_RNA (1)...(19): siRNA sense strand
gagcagcacaucgcagagu

SEQ ID NO: 1562059 - RNA, 19 nt, Homo sapiens
  misc_RNA (1)...(19): siRNA sense strand
aacagaaacggaagaagga

SEQ ID NO: 1562060 - RNA, 19 nt, Homo sapiens
  misc_RNA (1)...(19): siRNA sense strand
gagaaggcccaggcugaca

SEQ ID NO: 1562061 - RNA, 19 nt, Homo sapiens
  misc_RNA (1)...(19): siRNA sense strand
gaagaaagcuaaguuauug

SEQ ID NO: 1562062 - RNA, 19 nt, Homo sapiens
  misc_RNA (1)...(19): siRNA sense strand
agagaaagcugccaacuga

SEQ ID NO: 1562063 - RNA, 19 nt, Homo sapiens
  misc_RNA (1)...(19): siRNA sense strand
caacagugaugauucagaa

SEQ ID NO: 1562064 - RNA, 19 nt, Homo sapiens
  misc_RNA (1)...(19): siRNA sense strand
ccaggaaccuccaauaguu

SEQ ID NO: 1562065 - RNA, 19 nt, Homo sapiens
  misc_RNA (1)...(19): siRNA sense strand
gcagaagauuuguguaaug

SEQ ID NO: 1562066 - RNA, 19 nt, Homo sapiens
  misc_RNA (1)...(19): siRNA sense strand
ggacgaggauuguuacauc

SEQ ID NO: 1562067 - RNA, 19 nt, Homo sapiens
  misc_RNA (1)...(19): siRNA sense strand
cagaagagcuccgaagaga

SEQ ID NO: 1562068 - RNA, 19 nt, Homo sapiens
  misc_RNA (1)...(19): siRNA sense strand
caaagucccuggauguuuc

SEQ ID NO: 1562069 - RNA, 19 nt, Homo sapiens
  misc_RNA (1)...(19): siRNA sense strand
ugacaacgguaaugauuug

SEQ ID NO: 1562070 - RNA, 19 nt, Homo sapiens
  misc_RNA (1)...(19): siRNA sense strand
cagaagagcuccgaagaga

SEQ ID NO: 1562071 - RNA, 19 nt, Homo sapiens
  misc_RNA (1)...(19): siRNA sense strand
ucaaagaaauacucuggaa

SEQ ID NO: 1562072 - RNA, 19 nt, Homo sapiens
  misc_RNA (1)...(19): siRNA sense strand
gaagauuuguguaaugaag

SEQ ID NO: 1562073 - RNA, 19 nt, Homo sapiens
  misc_RNA (1)...(19): siRNA sense strand
gaaguauuaugccaggaaa

SEQ ID NO: 1562074 - RNA, 19 nt, Homo sapiens
  misc_RNA (1)...(19): siRNA sense strand
gagaaucuacgaccuguuu

SEQ ID NO: 1562075 - RNA, 19 nt, Homo sapiens
  misc_RNA (1)...(19): siRNA sense strand
caagugauccugaggcuaa

SEQ ID NO: 1562076 - RNA, 19 nt, Homo sapiens
  misc_RNA (1)...(19): siRNA sense strand
cgacaacagugaugauuca

SEQ ID NO: 1562077 - RNA, 19 nt, Homo sapiens
  misc_RNA (1)...(19): siRNA sense strand
cgacaacagugaugauuca

SEQ ID NO: 1562078 - RNA, 19 nt, Homo sapiens
  misc_RNA (1)...(19): siRNA sense strand
cgacaacagugaugauuca

SEQ ID NO: 1562079 - RNA, 19 nt, Homo sapiens
  misc_RNA (1)...(19): siRNA sense strand
cagaagauuuguguaauga

SEQ ID NO: 1562080 - RNA, 19 nt, Homo sapiens
  misc_RNA (1)...(19): siRNA sense strand
gaaauaaggaugaauuggu

SEQ ID NO: 1562081 - RNA, 19 nt, Homo sapiens
  misc_RNA (1)...(19): siRNA sense strand
ggugaaaacugcuggcuua

SEQ ID NO: 1562082 - RNA, 19 nt, Homo sapiens
  misc_RNA (1)...(19): siRNA sense strand
caauagugaugauuuggaa

SEQ ID NO: 1562083 - RNA, 19 nt, Homo sapiens
  misc_RNA (1)...(19): siRNA sense strand
gaagagcuccgaagagaca

SEQ ID NO: 1562084 - RNA, 19 nt, Homo sapiens
  misc_RNA (1)...(19): siRNA sense strand
ugacaauagugaugauuug

SEQ ID NO: 1562085 - RNA, 19 nt, Homo sapiens
  misc_RNA (1)...(19): siRNA sense strand
gaagagcuccgaagagaca

SEQ ID NO: 1562086 - RNA, 19 nt, Homo sapiens
  misc_RNA (1)...(19): siRNA sense strand
caacgguaaugauuuggaa

SEQ ID NO: 1562087 - RNA, 19 nt, Homo sapiens
  misc_RNA (1)...(19): siRNA sense strand
gcaaagucccuggauguuu

SEQ ID NO: 1562088 - RNA, 19 nt, Homo sapiens
  misc_RNA (1)...(19): siRNA sense strand
gagaagaaagcuaaguuau

SEQ ID NO: 1562089 - RNA, 19 nt, Homo sapiens
  misc_RNA (1)...(19): siRNA sense strand
cagauuggcuugaaagucu

SEQ ID NO: 1562090 - RNA, 19 nt, Homo sapiens
  misc_RNA (1)...(19): siRNA sense strand
gaugacaacgguaaugauu

SEQ ID NO: 1562091 - RNA, 19 nt, Homo sapiens
  misc_RNA (1)...(19): siRNA sense strand
cagcagaagauuuguguaa

SEQ ID NO: 1562092 - RNA, 19 nt, Homo sapiens
  misc_RNA (1)...(19): siRNA sense strand
ugaauguacuggaugcaaa

SEQ ID NO: 1562093 - RNA, 19 nt, Homo sapiens
  misc_RNA (1)...(19): siRNA sense strand
cgaguugcauccuuaaugu

SEQ ID NO: 1562094 - RNA, 19 nt, Homo sapiens
  misc_RNA (1)...(19): siRNA sense strand
acuacaagguccauuauga

SEQ ID NO: 1562095 - RNA, 19 nt, Homo sapiens
  misc_RNA (1)...(19): siRNA sense strand
caggcgaguugcauccuua

SEQ ID NO: 1562096 - RNA, 19 nt, Homo sapiens
  misc_RNA (1)...(19): siRNA sense strand
ggaauaacaagauggugaa

SEQ ID NO: 1562097 - RNA, 19 nt, Homo sapiens
  misc_RNA (1)...(19): siRNA sense strand
ggaaauaaacagcgacgau

SEQ ID NO: 1562098 - RNA, 19 nt, Homo sapiens
  misc_RNA (1)...(19): siRNA sense strand
gaaucuacgaccuguuuaa

SEQ ID NO: 1562099 - RNA, 19 nt, Homo sapiens
  misc_RNA (1)...(19): siRNA sense strand
gccauuaacucagaaagau

SEQ ID NO: 1562100 - RNA, 19 nt, Homo sapiens
  misc_RNA (1)...(19): siRNA sense strand
gauccagauuggcuugaaa

SEQ ID NO: 1562101 - RNA, 19 nt, Homo sapiens
  misc_RNA (1)...(19): siRNA sense strand
gcacuggugagauguggua

SEQ ID NO: 1562102 - RNA, 19 nt, Homo sapiens
  misc_RNA (1)...(19): siRNA sense strand
aaacgaggauuggcugcua

SEQ ID NO: 1562103 - RNA, 19 nt, Homo sapiens
  misc_RNA (1)...(19): siRNA sense strand
gaagacaagagugaugauu

SEQ ID NO: 1562104 - RNA, 19 nt, Homo sapiens
  misc_RNA (1)...(19): siRNA sense strand
agagaagaaagcuaaguua

SEQ ID NO: 1562105 - RNA, 19 nt, Homo sapiens
  misc_RNA (1)...(19): siRNA sense strand
ggaaguauuaugccaggaa

SEQ ID NO: 1562106 - RNA, 19 nt, Homo sapiens
  misc_RNA (1)...(19): siRNA sense strand
caaagaaauacucuggaaa

SEQ ID NO: 1562107 - RNA, 19 nt, Homo sapiens
  misc_RNA (1)...(19): siRNA sense strand
cgcauaggcuggaauaaca

SEQ ID NO: 1562108 - RNA, 19 nt, Homo sapiens
  misc_RNA (1)...(19): siRNA sense strand
caggaaccuccaauaguua

SEQ ID NO: 1562109 - RNA, 19 nt, Homo sapiens
  misc_RNA (1)...(19): siRNA sense strand
aaagaugggacccguauug

SEQ ID NO: 1562110 - RNA, 19 nt, Homo sapiens
  misc_RNA (1)...(19): siRNA sense strand
gaaaacugcuggcuuaugc

SEQ ID NO: 1562111 - RNA, 19 nt, Homo sapiens
  misc_RNA (1)...(19): siRNA sense strand
cgacaagagugaugauucg

SEQ ID NO: 1562112 - RNA, 19 nt, Homo sapiens
  misc_RNA (1)...(19): siRNA sense strand
cgacaagagugaugauucg

SEQ ID NO: 1562113 - RNA, 19 nt, Homo sapiens
  misc_RNA (1)...(19): siRNA sense strand
cgacaacagugaugauucg

SEQ ID NO: 1562114 - RNA, 19 nt, Homo sapiens
  misc_RNA (1)...(19): siRNA sense strand
cgacaacagugaugauucg

SEQ ID NO: 1562115 - RNA, 19 nt, Homo sapiens
  misc_RNA (1)...(19): siRNA sense strand
cgacaacagugaugauucg

SEQ ID NO: 1562116 - RNA, 19 nt, Homo sapiens
  misc_RNA (1)...(19): siRNA sense strand
cgacaacagugaugauucg

SEQ ID NO: 1562117 - RNA, 19 nt, Homo sapiens
  misc_RNA (1)...(19): siRNA sense strand
gguaaugauuuggaaguuc

SEQ ID NO: 1562118 - RNA, 19 nt, Homo sapiens
  misc_RNA (1)...(19): siRNA sense strand
gagaugugguacccaaagu

SEQ ID NO: 1562119 - RNA, 19 nt, Homo sapiens
  misc_RNA (1)...(19): siRNA sense strand
ccagagaaacuacgcauag

SEQ ID NO: 1562120 - RNA, 19 nt, Homo sapiens
  misc_RNA (1)...(19): siRNA sense strand
gaggcuaacccugaaguuu

SEQ ID NO: 1562121 - RNA, 19 nt, Homo sapiens
  misc_RNA (1)...(19): siRNA sense strand
gauugacucugauucugau

SEQ ID NO: 1562122 - RNA, 19 nt, Homo sapiens
  misc_RNA (1)...(19): siRNA sense strand
uuaacuacaagguccauua

SEQ ID NO: 1562123 - RNA, 19 nt, Homo sapiens
  misc_RNA (1)...(19): siRNA sense strand
cgacagcagugaugauucg

SEQ ID NO: 1562124 - RNA, 19 nt, Homo sapiens
  misc_RNA (1)...(19): siRNA sense strand
ggugacgcauggaaguauu

SEQ ID NO: 1562125 - RNA, 19 nt, Homo sapiens
  misc_RNA (1)...(19): siRNA sense strand
gaaacccggugcagcaaaa

SEQ ID NO: 1562126 - RNA, 19 nt, Homo sapiens
  misc_RNA (1)...(19): siRNA sense strand
gagagaaagcugccaacug

SEQ ID NO: 1562127 - RNA, 19 nt, Homo sapiens
  misc_RNA (1)...(19): siRNA sense strand
cgacagcagugaugauucg

SEQ ID NO: 1562128 - RNA, 19 nt, Homo sapiens
  misc_RNA (1)...(19): siRNA sense strand
cgacagcagugaugauucg

SEQ ID NO: 1562129 - RNA, 19 nt, Homo sapiens
  misc_RNA (1)...(19): siRNA sense strand
cgacagcagugaugauucg

SEQ ID NO: 1562130 - RNA, 19 nt, Homo sapiens
  misc_RNA (1)...(19): siRNA sense strand
cgacagcagugaugauucg

SEQ ID NO: 1562131 - RNA, 19 nt, Homo sapiens
  misc_RNA (1)...(19): siRNA sense strand
cgacagcagugaugauucg

SEQ ID NO: 1562132 - RNA, 19 nt, Homo sapiens
  misc_RNA (1)...(19): siRNA sense strand
cgacagcagugaugauucg

SEQ ID NO: 1562133 - RNA, 19 nt, Homo sapiens
  misc_RNA (1)...(19): siRNA sense strand
cgacagcagugaugauucg

SEQ ID NO: 1562134 - RNA, 19 nt, Homo sapiens
  misc_RNA (1)...(19): siRNA sense strand
gcagugaugauucggaugu

SEQ ID NO: 1562135 - RNA, 19 nt, Homo sapiens
  misc_RNA (1)...(19): siRNA sense strand
ggaguguugucaugugaag

SEQ ID NO: 1562136 - RNA, 19 nt, Homo sapiens
  misc_RNA (1)...(19): siRNA sense strand
uaacuacaagguccauuau

SEQ ID NO: 1562137 - RNA, 19 nt, Homo sapiens
  misc_RNA (1)...(19): siRNA sense strand
gcgaaauaaggaugaauug

SEQ ID NO: 1562138 - RNA, 19 nt, Homo sapiens
  misc_RNA (1)...(19): siRNA sense strand
gaaagcuaaguuauuggaa

SEQ ID NO: 1562139 - RNA, 19 nt, Homo sapiens
  misc_RNA (1)...(19): siRNA sense strand
cuacaagguccauuaugaa

SEQ ID NO: 1562140 - RNA, 19 nt, Homo sapiens
  misc_RNA (1)...(19): siRNA sense strand
cgaagagacaggcgaguug

SEQ ID NO: 1562141 - RNA, 19 nt, Homo sapiens
  misc_RNA (1)...(19): siRNA sense strand
gaagagaagaaagcuaagu

SEQ ID NO: 1562142 - RNA, 19 nt, Homo sapiens
  misc_RNA (1)...(19): siRNA sense strand
gcgaguugcauccuuaaug

SEQ ID NO: 1562143 - RNA, 19 nt, Homo sapiens
  misc_RNA (1)...(19): siRNA sense strand
aaacagcgacgaugagagu

SEQ ID NO: 1562144 - RNA, 19 nt, Homo sapiens
  misc_RNA (1)...(19): siRNA sense strand
aaauaaacagcgacgauga

SEQ ID NO: 1562145 - RNA, 19 nt, Homo sapiens
  misc_RNA (1)...(19): siRNA sense strand
gaaagaugggacccguauu

SEQ ID NO: 1562146 - RNA, 19 nt, Homo sapiens
  misc_RNA (1)...(19): siRNA sense strand
gcaggaucuuggugagaau

SEQ ID NO: 1562147 - RNA, 19 nt, Homo sapiens
  misc_RNA (1)...(19): siRNA sense strand
cgacgacaauagugaugau

SEQ ID NO: 1562148 - RNA, 19 nt, Homo sapiens
  misc_RNA (1)...(19): siRNA sense strand
ucacacccaugaagagaag

SEQ ID NO: 1562149 - RNA, 19 nt, Homo sapiens
  misc_RNA (1)...(19): siRNA sense strand
ggaagcuccugacgacaac

SEQ ID NO: 1562150 - RNA, 19 nt, Homo sapiens
  misc_RNA (1)...(19): siRNA sense strand
cgacaauagugaugauucg

SEQ ID NO: 1562151 - RNA, 19 nt, Homo sapiens
  misc_RNA (1)...(19): siRNA sense strand
uaaagcgaaauaaggauga

SEQ ID NO: 1562152 - RNA, 19 nt, Homo sapiens
  misc_RNA (1)...(19): siRNA sense strand
gacgacagcagugaugauu

SEQ ID NO: 1562153 - RNA, 19 nt, Homo sapiens
  misc_RNA (1)...(19): siRNA sense strand
cuacgcauaggcuggaaua

SEQ ID NO: 1562154 - RNA, 19 nt, Homo sapiens
  misc_RNA (1)...(19): siRNA sense strand
agacaagagugaugauucg

SEQ ID NO: 1562155 - RNA, 19 nt, Homo sapiens
  misc_RNA (1)...(19): siRNA sense strand
gacgacagcagugaugauu

SEQ ID NO: 1562156 - RNA, 19 nt, Homo sapiens
  misc_RNA (1)...(19): siRNA sense strand
gacgacagcagugaugauu

SEQ ID NO: 1562157 - RNA, 19 nt, Homo sapiens
  misc_RNA (1)...(19): siRNA sense strand
gacgacagcagugaugauu

SEQ ID NO: 1562158 - RNA, 19 nt, Homo sapiens
  misc_RNA (1)...(19): siRNA sense strand
gacgacagcagugaugauu

SEQ ID NO: 1562159 - RNA, 19 nt, Homo sapiens
  misc_RNA (1)...(19): siRNA sense strand
gacgacagcagugaugauu

SEQ ID NO: 1562160 - RNA, 19 nt, Homo sapiens
  misc_RNA (1)...(19): siRNA sense strand
gacgacagcagugaugauu

SEQ ID NO: 1562161 - RNA, 19 nt, Homo sapiens
  misc_RNA (1)...(19): siRNA sense strand
ccaagaacaucaucaagua

SEQ ID NO: 1562162 - RNA, 19 nt, Homo sapiens
  misc_RNA (1)...(19): siRNA sense strand
gcaaggacaucagcaagua

SEQ ID NO: 1562163 - RNA, 19 nt, Homo sapiens
  misc_RNA (1)...(19): siRNA sense strand
gaaacagccugguggaguu

SEQ ID NO: 1562164 - RNA, 19 nt, Homo sapiens
  misc_RNA (1)...(19): siRNA sense strand
ggacacagcuagaggaaaa

SEQ ID NO: 1562165 - RNA, 19 nt, Homo sapiens
  misc_RNA (1)...(19): siRNA sense strand
ggaucuaugucaccaacua

SEQ ID NO: 1562166 - RNA, 19 nt, Homo sapiens
  misc_RNA (1)...(19): siRNA sense strand
caaggccgcuggaguaaca

SEQ ID NO: 1562167 - RNA, 19 nt, Homo sapiens
  misc_RNA (1)...(19): siRNA sense strand
ggaguaacauguacaagcu

SEQ ID NO: 1562168 - RNA, 19 nt, Homo sapiens
  misc_RNA (1)...(19): siRNA sense strand
gcacaggccacguggugua

SEQ ID NO: 1562169 - RNA, 19 nt, Homo sapiens
  misc_RNA (1)...(19): siRNA sense strand
gcagagaggcgagcuguga

SEQ ID NO: 1562170 - RNA, 19 nt, Homo sapiens
  misc_RNA (1)...(19): siRNA sense strand
ccaaggagcgggugcugua

SEQ ID NO: 1562171 - RNA, 19 nt, Homo sapiens
  misc_RNA (1)...(19): siRNA sense strand
gaaaagcuuugcagacaga

SEQ ID NO: 1562172 - RNA, 19 nt, Homo sapiens
  misc_RNA (1)...(19): siRNA sense strand
ccacccagaucgacuacaa

SEQ ID NO: 1562173 - RNA, 19 nt, Homo sapiens
  misc_RNA (1)...(19): siRNA sense strand
uggagaagcugagaaagga

SEQ ID NO: 1562174 - RNA, 19 nt, Homo sapiens
  misc_RNA (1)...(19): siRNA sense strand
aagcaaggccgcuggagua

SEQ ID NO: 1562175 - RNA, 19 nt, Homo sapiens
  misc_RNA (1)...(19): siRNA sense strand
gagacgacaggaucuaugu

SEQ ID NO: 1562176 - RNA, 19 nt, Homo sapiens
  misc_RNA (1)...(19): siRNA sense strand
guauggcagugugcagaaa

SEQ ID NO: 1562177 - RNA, 19 nt, Homo sapiens
  misc_RNA (1)...(19): siRNA sense strand
cagaaaagcuuugcagaca

SEQ ID NO: 1562178 - RNA, 19 nt, Homo sapiens
  misc_RNA (1)...(19): siRNA sense strand
caacuacuacuauggaaac

SEQ ID NO: 1562179 - RNA, 19 nt, Homo sapiens
  misc_RNA (1)...(19): siRNA sense strand
caucaucaaguacgaccua

SEQ ID NO: 1562180 - RNA, 19 nt, Homo sapiens
  misc_RNA (1)...(19): siRNA sense strand
ccaggucgccuacgcuuuc

SEQ ID NO: 1562181 - RNA, 19 nt, Homo sapiens
  misc_RNA (1)...(19): siRNA sense strand
gggcuucaccuacuacaag

SEQ ID NO: 1562182 - RNA, 19 nt, Homo sapiens
  misc_RNA (1)...(19): siRNA sense strand
gaggacaccacaccuugga

SEQ ID NO: 1562183 - RNA, 19 nt, Homo sapiens
  misc_RNA (1)...(19): siRNA sense strand
ugcccgacgugguauauga

SEQ ID NO: 1562184 - RNA, 19 nt, Homo sapiens
  misc_RNA (1)...(19): siRNA sense strand
gagacaaggcugggaagga

SEQ ID NO: 1562185 - RNA, 19 nt, Homo sapiens
  misc_RNA (1)...(19): siRNA sense strand
ucaccaagaacaucaucaa

SEQ ID NO: 1562186 - RNA, 19 nt, Homo sapiens
  misc_RNA (1)...(19): siRNA sense strand
acacucggacauugacuuu

SEQ ID NO: 1562187 - RNA, 19 nt, Homo sapiens
  misc_RNA (1)...(19): siRNA sense strand
gcgcggacacucggacauu

SEQ ID NO: 1562188 - RNA, 19 nt, Homo sapiens
  misc_RNA (1)...(19): siRNA sense strand
cgagggagccuggaugaag

SEQ ID NO: 1562189 - RNA, 19 nt, Homo sapiens
  misc_RNA (1)...(19): siRNA sense strand
gcggacacucggacauuga

SEQ ID NO: 1562190 - RNA, 19 nt, Homo sapiens
  misc_RNA (1)...(19): siRNA sense strand
ccaacuacuacuauggaaa

SEQ ID NO: 1562191 - RNA, 19 nt, Homo sapiens
  misc_RNA (1)...(19): siRNA sense strand
agacagaggccucccaaaa

SEQ ID NO: 1562192 - RNA, 19 nt, Homo sapiens
  misc_RNA (1)...(19): siRNA sense strand
gaguaacauguacaagcua

SEQ ID NO: 1562193 - RNA, 19 nt, Homo sapiens
  misc_RNA (1)...(19): siRNA sense strand
caaggacaucagcaaguau

SEQ ID NO: 1562194 - RNA, 19 nt, Homo sapiens
  misc_RNA (1)...(19): siRNA sense strand
cgggagaccacguggaaga

SEQ ID NO: 1562195 - RNA, 19 nt, Homo sapiens
  misc_RNA (1)...(19): siRNA sense strand
caccaacuacuacuaugga

SEQ ID NO: 1562196 - RNA, 19 nt, Homo sapiens
  misc_RNA (1)...(19): siRNA sense strand
caccuacacccuccacuuc

SEQ ID NO: 1562197 - RNA, 19 nt, Homo sapiens
  misc_RNA (1)...(19): siRNA sense strand
gcuguacgccugggacaau

SEQ ID NO: 1562198 - RNA, 19 nt, Homo sapiens
  misc_RNA (1)...(19): siRNA sense strand
ggugugcggcauccuguau

SEQ ID NO: 1562199 - RNA, 19 nt, Homo sapiens
  misc_RNA (1)...(19): siRNA sense strand
caagaacaucaucaaguac

SEQ ID NO: 1562200 - RNA, 19 nt, Homo sapiens
  misc_RNA (1)...(19): siRNA sense strand
agaacaucaucaaguacga

SEQ ID NO: 1562201 - RNA, 19 nt, Homo sapiens
  misc_RNA (1)...(19): siRNA sense strand
ggcaaggacaucagcaagu

SEQ ID NO: 1562202 - RNA, 19 nt, Homo sapiens
  misc_RNA (1)...(19): siRNA sense strand
guggagaagcugagaaagg

SEQ ID NO: 1562203 - RNA, 19 nt, Homo sapiens
  misc_RNA (1)...(19): siRNA sense strand
ucaccuacacccuccacuu

SEQ ID NO: 1562204 - RNA, 19 nt, Homo sapiens
  misc_RNA (1)...(19): siRNA sense strand
gccaccagcucaccuacac

SEQ ID NO: 1562205 - RNA, 19 nt, Homo sapiens
  misc_RNA (1)...(19): siRNA sense strand
gcuggaguaacauguacaa

SEQ ID NO: 1562206 - RNA, 19 nt, Homo sapiens
  misc_RNA (1)...(19): siRNA sense strand
cgagguagcugccuucuuc

SEQ ID NO: 1562207 - RNA, 19 nt, Homo sapiens
  misc_RNA (1)...(19): siRNA sense strand
gggacuggcuggucuuuga

SEQ ID NO: 1562208 - RNA, 19 nt, Homo sapiens
  misc_RNA (1)...(19): siRNA sense strand
gcaccgagcugggucacaa

SEQ ID NO: 1562209 - RNA, 19 nt, Homo sapiens
  misc_RNA (1)...(19): siRNA sense strand
aaagugagauuugaagaga

SEQ ID NO: 1562210 - RNA, 19 nt, Homo sapiens
  misc_RNA (1)...(19): siRNA sense strand
caagaugguucugugcauu

SEQ ID NO: 1562211 - RNA, 19 nt, Homo sapiens
  misc_RNA (1)...(19): siRNA sense strand
gcugauggcugcagaacag

SEQ ID NO: 1562212 - RNA, 19 nt, Homo sapiens
  misc_RNA (1)...(19): siRNA sense strand
uggcaaaggugguaaagag

SEQ ID NO: 1562213 - RNA, 19 nt, Homo sapiens
  misc_RNA (1)...(19): siRNA sense strand
agagauugcuuccgugauc

SEQ ID NO: 1562214 - RNA, 19 nt, Homo sapiens
  misc_RNA (1)...(19): siRNA sense strand
cugcugagcuuugacaaug

SEQ ID NO: 1562215 - RNA, 19 nt, Homo sapiens
  misc_RNA (1)...(19): siRNA sense strand
ugaccugggugccauagug

SEQ ID NO: 1562216 - RNA, 19 nt, Homo sapiens
  misc_RNA (1)...(19): siRNA sense strand
agauggagcuggcaaaggu

SEQ ID NO: 1562217 - RNA, 19 nt, Homo sapiens
  misc_RNA (1)...(19): siRNA sense strand
cccgagaccugcugaagga

SEQ ID NO: 1562218 - RNA, 19 nt, Homo sapiens
  misc_RNA (1)...(19): siRNA sense strand
agugagauuugaagagauu

SEQ ID NO: 1562219 - RNA, 19 nt, Homo sapiens
  misc_RNA (1)...(19): siRNA sense strand
cgagcugggucacaagaug

SEQ ID NO: 1562220 - RNA, 19 nt, Homo sapiens
  misc_RNA (1)...(19): siRNA sense strand
caaauugcacagaucaaau

SEQ ID NO: 1562221 - RNA, 19 nt, Homo sapiens
  misc_RNA (1)...(19): siRNA sense strand
ccuaaaguuuggaguguca

SEQ ID NO: 1562222 - RNA, 19 nt, Homo sapiens
  misc_RNA (1)...(19): siRNA sense strand
gaguugguccagcauauug

SEQ ID NO: 1562223 - RNA, 19 nt, Homo sapiens
  misc_RNA (1)...(19): siRNA sense strand
ccaagaccaucguguacca

SEQ ID NO: 1562224 - RNA, 19 nt, Homo sapiens
  misc_RNA (1)...(19): siRNA sense strand
uggcuucccuggcacagaa

SEQ ID NO: 1562225 - RNA, 19 nt, Homo sapiens
  misc_RNA (1)...(19): siRNA sense strand
gaaggagguucugcuagac

SEQ ID NO: 1562226 - RNA, 19 nt, Homo sapiens
  misc_RNA (1)...(19): siRNA sense strand
gagauugcuuccgugauca

SEQ ID NO: 1562227 - RNA, 19 nt, Homo sapiens
  misc_RNA (1)...(19): siRNA sense strand
ccaagaugguucugugcau

SEQ ID NO: 1562228 - RNA, 19 nt, Homo sapiens
  misc_RNA (1)...(19): siRNA sense strand
gcuggucuuugacaacaug

SEQ ID NO: 1562229 - RNA, 19 nt, Homo sapiens
  misc_RNA (1)...(19): siRNA sense strand
ggaguugguccagcauauu

SEQ ID NO: 1562230 - RNA, 19 nt, Homo sapiens
  misc_RNA (1)...(19): siRNA sense strand
cagcaucauugccaagaag

SEQ ID NO: 1562231 - RNA, 19 nt, Homo sapiens
  misc_RNA (1)...(19): siRNA sense strand
cuucaacucaguccuguuu

SEQ ID NO: 1562232 - RNA, 19 nt, Homo sapiens
  misc_RNA (1)...(19): siRNA sense strand
uugcacagaucaaauaugc

SEQ ID NO: 1562233 - RNA, 19 nt, Homo sapiens
  misc_RNA (1)...(19): siRNA sense strand
cugcagaacaggaggauga

SEQ ID NO: 1562234 - RNA, 19 nt, Homo sapiens
  misc_RNA (1)...(19): siRNA sense strand
gggcguguaugggaucuuc

SEQ ID NO: 1562235 - RNA, 19 nt, Homo sapiens
  misc_RNA (1)...(19): siRNA sense strand
gcccaggugugcugaaggu

SEQ ID NO: 1562236 - RNA, 19 nt, Homo sapiens
  misc_RNA (1)...(19): siRNA sense strand
ugaaucggacuuugugaug

SEQ ID NO: 1562237 - RNA, 19 nt, Homo sapiens
  misc_RNA (1)...(19): siRNA sense strand
ugccugagccuaaaguuug

SEQ ID NO: 1562238 - RNA, 19 nt, Homo sapiens
  misc_RNA (1)...(19): siRNA sense strand
gagcuuugacaaugagaug

SEQ ID NO: 1562239 - RNA, 19 nt, Homo sapiens
  misc_RNA (1)...(19): siRNA sense strand
aggcagagauggaguuggu

SEQ ID NO: 1562240 - RNA, 19 nt, Homo sapiens
  misc_RNA (1)...(19): siRNA sense strand
gcuguggcguggacaucuu

SEQ ID NO: 1562241 - RNA, 19 nt, Homo sapiens
  misc_RNA (1)...(19): siRNA sense strand
ggcuuuagcugugccaaca

SEQ ID NO: 1562242 - RNA, 19 nt, Homo sapiens
  misc_RNA (1)...(19): siRNA sense strand
gagugaaucggacuuugug

SEQ ID NO: 1562243 - RNA, 19 nt, Homo sapiens
  misc_RNA (1)...(19): siRNA sense strand
uggaaucccugccaguaag

SEQ ID NO: 1562244 - RNA, 19 nt, Homo sapiens
  misc_RNA (1)...(19): siRNA sense strand
ggaaucccugccaguaaga

SEQ ID NO: 1562245 - RNA, 19 nt, Homo sapiens
  misc_RNA (1)...(19): siRNA sense strand
acucaguccuguuugacaa

SEQ ID NO: 1562246 - RNA, 19 nt, Homo sapiens
  misc_RNA (1)...(19): siRNA sense strand
uguaugggaucuucaacuc

SEQ ID NO: 1562247 - RNA, 19 nt, Homo sapiens
  misc_RNA (1)...(19): siRNA sense strand
ccuccaagaccaucgugua

SEQ ID NO: 1562248 - RNA, 19 nt, Homo sapiens
  misc_RNA (1)...(19): siRNA sense strand
ucagcaucauugccaagaa

SEQ ID NO: 1562249 - RNA, 19 nt, Homo sapiens
  misc_RNA (1)...(19): siRNA sense strand
ccaacaaggcagagaugga

SEQ ID NO: 1562250 - RNA, 19 nt, Homo sapiens
  misc_RNA (1)...(19): siRNA sense strand
gagaccugcugaaggaacu

SEQ ID NO: 1562251 - RNA, 19 nt, Homo sapiens
  misc_RNA (1)...(19): siRNA sense strand
gcugagcuuugacaaugag

SEQ ID NO: 1562252 - RNA, 19 nt, Homo sapiens
  misc_RNA (1)...(19): siRNA sense strand
gaccugggugccauaguga

SEQ ID NO: 1562253 - RNA, 19 nt, Homo sapiens
  misc_RNA (1)...(19): siRNA sense strand
ggagcuggcaaagguggua

SEQ ID NO: 1562254 - RNA, 19 nt, Homo sapiens
  misc_RNA (1)...(19): siRNA sense strand
ugagcugccugagccuaaa

SEQ ID NO: 1562255 - RNA, 19 nt, Homo sapiens
  misc_RNA (1)...(19): siRNA sense strand
acucagccuuggaccugua

SEQ ID NO: 1562256 - RNA, 19 nt, Homo sapiens
  misc_RNA (1)...(19): siRNA sense strand
caggugugcugaagguucu

SEQ ID NO: 1562257 - RNA, 19 nt, Homo sapiens
  misc_RNA (1)...(19): siRNA sense strand
acccaggccugccacauca

SEQ ID NO: 1562258 - RNA, 19 nt, Homo sapiens
  misc_RNA (1)...(19): siRNA sense strand
gucacaagaugcacguucu

SEQ ID NO: 1562259 - RNA, 19 nt, Homo sapiens
  misc_RNA (1)...(19): siRNA sense strand
gaccaucguguaccaccuu

SEQ ID NO: 1562260 - RNA, 19 nt, Homo sapiens
  misc_RNA (1)...(19): siRNA sense strand
ugagugaaucggacuuugu

SEQ ID NO: 1562261 - RNA, 19 nt, Homo sapiens
  misc_RNA (1)...(19): siRNA sense strand
gcacagaaggggccaaagu

SEQ ID NO: 1562262 - RNA, 19 nt, Homo sapiens
  misc_RNA (1)...(19): siRNA sense strand
gugcauugcuaccgaugac

SEQ ID NO: 1562263 - RNA, 19 nt, Homo sapiens
  misc_RNA (1)...(19): siRNA sense strand
gccaaccccuguaagcaaa

SEQ ID NO: 1562264 - RNA, 19 nt, Homo sapiens
  misc_RNA (1)...(19): siRNA sense strand
uggcuggucuuugacaaca

SEQ ID NO: 1562265 - RNA, 19 nt, Homo sapiens
  misc_RNA (1)...(19): siRNA sense strand
guggaggagggcuucagua

SEQ ID NO: 1562266 - RNA, 19 nt, Homo sapiens
  misc_RNA (1)...(19): siRNA sense strand
ugaccucggccuucacugu

SEQ ID NO: 1562267 - RNA, 19 nt, Homo sapiens
  misc_RNA (1)...(19): siRNA sense strand
aaucggacuuugugauggu

SEQ ID NO: 1562268 - RNA, 19 nt, Homo sapiens
  misc_RNA (1)...(19): siRNA sense strand
uuuaugcugucaagugcaa

SEQ ID NO: 1562269 - RNA, 19 nt, Homo sapiens
  misc_RNA (1)...(19): siRNA sense strand
gaagaaggguuacaucgua

SEQ ID NO: 1562270 - RNA, 19 nt, Homo sapiens
  misc_RNA (1)...(19): siRNA sense strand
ggacggaucuacaucauca

SEQ ID NO: 1562271 - RNA, 19 nt, Homo sapiens
  misc_RNA (1)...(19): siRNA sense strand
gaaaacaccuacugacuuu

SEQ ID NO: 1562272 - RNA, 19 nt, Homo sapiens
  misc_RNA (1)...(19): siRNA sense strand
gacaaggacuucaacauca

SEQ ID NO: 1562273 - RNA, 19 nt, Homo sapiens
  misc_RNA (1)...(19): siRNA sense strand
gaucaucgaccgcaagaaa

SEQ ID NO: 1562274 - RNA, 19 nt, Homo sapiens
  misc_RNA (1)...(19): siRNA sense strand
caucaagacuuacgagauc

SEQ ID NO: 1562275 - RNA, 19 nt, Homo sapiens
  misc_RNA (1)...(19): siRNA sense strand
caauguggcugucaagauc

SEQ ID NO: 1562276 - RNA, 19 nt, Homo sapiens
  misc_RNA (1)...(19): siRNA sense strand
gcuccaucaucaagacuua

SEQ ID NO: 1562277 - RNA, 19 nt, Homo sapiens
  misc_RNA (1)...(19): siRNA sense strand
ucaggaagaugcugcguau

SEQ ID NO: 1562278 - RNA, 19 nt, Homo sapiens
  misc_RNA (1)...(19): siRNA sense strand
guaccgcgcugagugcaaa

SEQ ID NO: 1562279 - RNA, 19 nt, Homo sapiens
  misc_RNA (1)...(19): siRNA sense strand
ggaucuacaucaucaugga

SEQ ID NO: 1562280 - RNA, 19 nt, Homo sapiens
  misc_RNA (1)...(19): siRNA sense strand
cgacaaggacuucaacauc

SEQ ID NO: 1562281 - RNA, 19 nt, Homo sapiens
  misc_RNA (1)...(19): siRNA sense strand
acaaggacuucaacaucaa

SEQ ID NO: 1562282 - RNA, 19 nt, Homo sapiens
  misc_RNA (1)...(19): siRNA sense strand
gcaaggguuccuacgcaaa

SEQ ID NO: 1562283 - RNA, 19 nt, Homo sapiens
  misc_RNA (1)...(19): siRNA sense strand
acaucaagcugucugacuu

SEQ ID NO: 1562284 - RNA, 19 nt, Homo sapiens
  misc_RNA (1)...(19): siRNA sense strand
gcggcuccaugcccuauga

SEQ ID NO: 1562285 - RNA, 19 nt, Homo sapiens
  misc_RNA (1)...(19): siRNA sense strand
ggaagaugcugcguaucca

SEQ ID NO: 1562286 - RNA, 19 nt, Homo sapiens
  misc_RNA (1)...(19): siRNA sense strand
ggaagaaggguuacaucgu

SEQ ID NO: 1562287 - RNA, 19 nt, Homo sapiens
  misc_RNA (1)...(19): siRNA sense strand
agacuuacgagaucuuuga

SEQ ID NO: 1562288 - RNA, 19 nt, Homo sapiens
  misc_RNA (1)...(19): siRNA sense strand
aaccacggcuccaucauca

SEQ ID NO: 1562289 - RNA, 19 nt, Homo sapiens
  misc_RNA (1)...(19): siRNA sense strand
ccaaagaccaucacaucuc

SEQ ID NO: 1562290 - RNA, 19 nt, Homo sapiens
  misc_RNA (1)...(19): siRNA sense strand
caucaagcugucugacuuu

SEQ ID NO: 1562291 - RNA, 19 nt, Homo sapiens
  misc_RNA (1)...(19): siRNA sense strand
gcaagaaaacaccuacuga

SEQ ID NO: 1562292 - RNA, 19 nt, Homo sapiens
  misc_RNA (1)...(19): siRNA sense strand
aaacaccuacugacuuugu

SEQ ID NO: 1562293 - RNA, 19 nt, Homo sapiens
  misc_RNA (1)...(19): siRNA sense strand
caaccacggcuccaucauc

SEQ ID NO: 1562294 - RNA, 19 nt, Homo sapiens
  misc_RNA (1)...(19): siRNA sense strand
caucguaggcaucaaucuu

SEQ ID NO: 1562295 - RNA, 19 nt, Homo sapiens
  misc_RNA (1)...(19): siRNA sense strand
ggagcaccguguggacuuc

SEQ ID NO: 1562296 - RNA, 19 nt, Homo sapiens
  misc_RNA (1)...(19): siRNA sense strand
ccuaccagcccaaggugua

SEQ ID NO: 1562297 - RNA, 19 nt, Homo sapiens
  misc_RNA (1)...(19): siRNA sense strand
ucaauguggcugucaagau

SEQ ID NO: 1562298 - RNA, 19 nt, Homo sapiens
  misc_RNA (1)...(19): siRNA sense strand
caaacuggacaccaagaca

SEQ ID NO: 1562299 - RNA, 19 nt, Homo sapiens
  misc_RNA (1)...(19): siRNA sense strand
gcaaugggcgcaucauccu

SEQ ID NO: 1562300 - RNA, 19 nt, Homo sapiens
  misc_RNA (1)...(19): siRNA sense strand
gacgaugccacaguccuaa

SEQ ID NO: 1562301 - RNA, 19 nt, Homo sapiens
  misc_RNA (1)...(19): siRNA sense strand
uaugacgacuccgacauca

SEQ ID NO: 1562302 - RNA, 19 nt, Homo sapiens
  misc_RNA (1)...(19): siRNA sense strand
ccacggcuccaucaucaag

SEQ ID NO: 1562303 - RNA, 19 nt, Homo sapiens
  misc_RNA (1)...(19): siRNA sense strand
agugcaaacuggacaccaa

SEQ ID NO: 1562304 - RNA, 19 nt, Homo sapiens
  misc_RNA (1)...(19): siRNA sense strand
gagcgccucaaguucaaug

SEQ ID NO: 1562305 - RNA, 19 nt, Homo sapiens
  misc_RNA (1)...(19): siRNA sense strand
gccaaagaccaucacaucu

SEQ ID NO: 1562306 - RNA, 19 nt, Homo sapiens
  misc_RNA (1)...(19): siRNA sense strand
uaaggaagaaggguuacau

SEQ ID NO: 1562307 - RNA, 19 nt, Homo sapiens
  misc_RNA (1)...(19): siRNA sense strand
gacggacggaucuacauca

SEQ ID NO: 1562308 - RNA, 19 nt, Homo sapiens
  misc_RNA (1)...(19): siRNA sense strand
gaugcugcguauccagaag

SEQ ID NO: 1562309 - RNA, 19 nt, Homo sapiens
  misc_RNA (1)...(19): siRNA sense strand
gccugggcgugauccugua

SEQ ID NO: 1562310 - RNA, 19 nt, Homo sapiens
  misc_RNA (1)...(19): siRNA sense strand
uuacaucguaggcaucaau

SEQ ID NO: 1562311 - RNA, 19 nt, Homo sapiens
  misc_RNA (1)...(19): siRNA sense strand
ggacagacauuacuuccaa

SEQ ID NO: 1562312 - RNA, 19 nt, Homo sapiens
  misc_RNA (1)...(19): siRNA sense strand
ggaaggagauucacuuugg

SEQ ID NO: 1562313 - RNA, 19 nt, Homo sapiens
  misc_RNA (1)...(19): siRNA sense strand
gaaaccuucuacaagcaua

SEQ ID NO: 1562314 - RNA, 19 nt, Homo sapiens
  misc_RNA (1)...(19): siRNA sense strand
ccagaggccuucuccuuga

SEQ ID NO: 1562315 - RNA, 19 nt, Homo sapiens
  misc_RNA (1)...(19): siRNA sense strand
ggaggugucugaagaagag

SEQ ID NO: 1562316 - RNA, 19 nt, Homo sapiens
  misc_RNA (1)...(19): siRNA sense strand
gcguaugacucucuuaugu

SEQ ID NO: 1562317 - RNA, 19 nt, Homo sapiens
  misc_RNA (1)...(19): siRNA sense strand
ggacacaucuaccaaaauc

SEQ ID NO: 1562318 - RNA, 19 nt, Homo sapiens
  misc_RNA (1)...(19): siRNA sense strand
ggaugagggugaagaguac

SEQ ID NO: 1562319 - RNA, 19 nt, Homo sapiens
  misc_RNA (1)...(19): siRNA sense strand
gaagccagacugcauggaa

SEQ ID NO: 1562320 - RNA, 19 nt, Homo sapiens
  misc_RNA (1)...(19): siRNA sense strand
gugauugacuggaagacuu

SEQ ID NO: 1562321 - RNA, 19 nt, Homo sapiens
  misc_RNA (1)...(19): siRNA sense strand
caacucaagucugcucuca

SEQ ID NO: 1562322 - RNA, 19 nt, Homo sapiens
  misc_RNA (1)...(19): siRNA sense strand
gcaggaaggagauucacuu

SEQ ID NO: 1562323 - RNA, 19 nt, Homo sapiens
  misc_RNA (1)...(19): siRNA sense strand
caaggaggcaggauaagga

SEQ ID NO: 1562324 - RNA, 19 nt, Homo sapiens
  misc_RNA (1)...(19): siRNA sense strand
cauggaagcuguggugcaa

SEQ ID NO: 1562325 - RNA, 19 nt, Homo sapiens
  misc_RNA (1)...(19): siRNA sense strand
ugacaggagccgaguggua

SEQ ID NO: 1562326 - RNA, 19 nt, Homo sapiens
  misc_RNA (1)...(19): siRNA sense strand
gagaggugguggccaugga

SEQ ID NO: 1562327 - RNA, 19 nt, Homo sapiens
  misc_RNA (1)...(19): siRNA sense strand
uagaugugauugacuggaa

SEQ ID NO: 1562328 - RNA, 19 nt, Homo sapiens
  misc_RNA (1)...(19): siRNA sense strand
ccaaaacacuggagcguau

SEQ ID NO: 1562329 - RNA, 19 nt, Homo sapiens
  misc_RNA (1)...(19): siRNA sense strand
gagcaggugauucuucaga

SEQ ID NO: 1562330 - RNA, 19 nt, Homo sapiens
  misc_RNA (1)...(19): siRNA sense strand
gagcguaugacucucuuau

SEQ ID NO: 1562331 - RNA, 19 nt, Homo sapiens
  misc_RNA (1)...(19): siRNA sense strand
gcaaggacaacucaagucu

SEQ ID NO: 1562332 - RNA, 19 nt, Homo sapiens
  misc_RNA (1)...(19): siRNA sense strand
gaagcuguggugcaagaaa

SEQ ID NO: 1562333 - RNA, 19 nt, Homo sapiens
  misc_RNA (1)...(19): siRNA sense strand
gggaugugcucgucuucau

SEQ ID NO: 1562334 - RNA, 19 nt, Homo sapiens
  misc_RNA (1)...(19): siRNA sense strand
ccaggagaaugggaugauu

SEQ ID NO: 1562335 - RNA, 19 nt, Homo sapiens
  misc_RNA (1)...(19): siRNA sense strand
gaacccaggcccaguuucu

SEQ ID NO: 1562336 - RNA, 19 nt, Homo sapiens
  misc_RNA (1)...(19): siRNA sense strand
agucugcucucagcgaaua

SEQ ID NO: 1562337 - RNA, 19 nt, Homo sapiens
  misc_RNA (1)...(19): siRNA sense strand
gacagacauuacuuccaaa

SEQ ID NO: 1562338 - RNA, 19 nt, Homo sapiens
  misc_RNA (1)...(19): siRNA sense strand
gacaggagccgagugguau

SEQ ID NO: 1562339 - RNA, 19 nt, Homo sapiens
  misc_RNA (1)...(19): siRNA sense strand
ggugauagaugugauugac

SEQ ID NO: 1562340 - RNA, 19 nt, Homo sapiens
  misc_RNA (1)...(19): siRNA sense strand
uggaagcuguggugcaaga

SEQ ID NO: 1562341 - RNA, 19 nt, Homo sapiens
  misc_RNA (1)...(19): siRNA sense strand
gcucugugguggcucuguu

SEQ ID NO: 1562342 - RNA, 19 nt, Homo sapiens
  misc_RNA (1)...(19): siRNA sense strand
ccagcgucauccucuguuu

SEQ ID NO: 1562343 - RNA, 19 nt, Homo sapiens
  misc_RNA (1)...(19): siRNA sense strand
ugugguggcucuguugaaa

SEQ ID NO: 1562344 - RNA, 19 nt, Homo sapiens
  misc_RNA (1)...(19): siRNA sense strand
gcccagaggccuucuccuu

SEQ ID NO: 1562345 - RNA, 19 nt, Homo sapiens
  misc_RNA (1)...(19): siRNA sense strand
ggagcuaccgccucaucaa

SEQ ID NO: 1562346 - RNA, 19 nt, Homo sapiens
  misc_RNA (1)...(19): siRNA sense strand
caggaaggagauucacuuu

SEQ ID NO: 1562347 - RNA, 19 nt, Homo sapiens
  misc_RNA (1)...(19): siRNA sense strand
caaaggagacuggguuguc

SEQ ID NO: 1562348 - RNA, 19 nt, Homo sapiens
  misc_RNA (1)...(19): siRNA sense strand
cagccaaggaggcaggaua

SEQ ID NO: 1562349 - RNA, 19 nt, Homo sapiens
  misc_RNA (1)...(19): siRNA sense strand
ugaaguuacucaggagcaa

SEQ ID NO: 1562350 - RNA, 19 nt, Homo sapiens
  misc_RNA (1)...(19): siRNA sense strand
ggaugauuguccacauucu

SEQ ID NO: 1562351 - RNA, 19 nt, Homo sapiens
  misc_RNA (1)...(19): siRNA sense strand
ugggaugauuguccacauu

SEQ ID NO: 1562352 - RNA, 19 nt, Homo sapiens
  misc_RNA (1)...(19): siRNA sense strand
gcuaccgccucaucaagca

SEQ ID NO: 1562353 - RNA, 19 nt, Homo sapiens
  misc_RNA (1)...(19): siRNA sense strand
ugccagagcaugugaggaa

SEQ ID NO: 1562354 - RNA, 19 nt, Homo sapiens
  misc_RNA (1)...(19): siRNA sense strand
cauccucuguuuccaugau

SEQ ID NO: 1562355 - RNA, 19 nt, Homo sapiens
  misc_RNA (1)...(19): siRNA sense strand
gaugauuguccacauucuu

SEQ ID NO: 1562356 - RNA, 19 nt, Homo sapiens
  misc_RNA (1)...(19): siRNA sense strand
aggaugagggugaagagua

SEQ ID NO: 1562357 - RNA, 19 nt, Homo sapiens
  misc_RNA (1)...(19): siRNA sense strand
agacauuacuuccaaaaca

SEQ ID NO: 1562358 - RNA, 19 nt, Homo sapiens
  misc_RNA (1)...(19): siRNA sense strand
gggaugauuguccacauuc

SEQ ID NO: 1562359 - RNA, 19 nt, Homo sapiens
  misc_RNA (1)...(19): siRNA sense strand
caggagaaugggaugauug

SEQ ID NO: 1562360 - RNA, 19 nt, Homo sapiens
  misc_RNA (1)...(19): siRNA sense strand
ugaugaugguggcgauguu

SEQ ID NO: 1562361 - RNA, 19 nt, Homo sapiens
  misc_RNA (1)...(19): siRNA sense strand
gcugggaugcguccugaug

SEQ ID NO: 1562362 - RNA, 19 nt, Homo sapiens
  misc_RNA (1)...(19): siRNA sense strand
gagcuaccgccucaucaag

SEQ ID NO: 1562363 - RNA, 19 nt, Homo sapiens
  misc_RNA (1)...(19): siRNA sense strand
aggagcaggugauucuuca

SEQ ID NO: 1562364 - RNA, 19 nt, Homo sapiens
  misc_RNA (1)...(19): siRNA sense strand
ggcaggagcaggugauucu

SEQ ID NO: 1562365 - RNA, 19 nt, Homo sapiens
  misc_RNA (1)...(19): siRNA sense strand
caccugugcuuugcuguca

SEQ ID NO: 1562366 - RNA, 19 nt, Homo sapiens
  misc_RNA (1)...(19): siRNA sense strand
gaagcgauacaggcacaga

SEQ ID NO: 1562367 - RNA, 19 nt, Homo sapiens
  misc_RNA (1)...(19): siRNA sense strand
ggacuggaagcuggauuuc

SEQ ID NO: 1562368 - RNA, 19 nt, Homo sapiens
  misc_RNA (1)...(19): siRNA sense strand
gguaccgccuggacuuugg

SEQ ID NO: 1562369 - RNA, 19 nt, Homo sapiens
  misc_RNA (1)...(19): siRNA sense strand
cagcaaggacaacucaagu

SEQ ID NO: 1562370 - RNA, 19 nt, Homo sapiens
  misc_RNA (1)...(19): siRNA sense strand
gcaaaggagacuggguugu

SEQ ID NO: 1562371 - RNA, 19 nt, Homo sapiens
  misc_RNA (1)...(19): siRNA sense strand
gaugaugguggcgauguug

SEQ ID NO: 1562372 - RNA, 19 nt, Homo sapiens
  misc_RNA (1)...(19): siRNA sense strand
ugauugacuggaagacuuu

SEQ ID NO: 1562373 - RNA, 19 nt, Homo sapiens
  misc_RNA (1)...(19): siRNA sense strand
uuacucaggagcaacaaga

SEQ ID NO: 1562374 - RNA, 19 nt, Homo sapiens
  misc_RNA (1)...(19): siRNA sense strand
ggacauuccacugguuucu

SEQ ID NO: 1562375 - RNA, 19 nt, Homo sapiens
  misc_RNA (1)...(19): siRNA sense strand
ugguggcucuguugaaauc

SEQ ID NO: 1562376 - RNA, 19 nt, Homo sapiens
  misc_RNA (1)...(19): siRNA sense strand
ggaugugcucgucuucaug

SEQ ID NO: 1562377 - RNA, 19 nt, Homo sapiens
  misc_RNA (1)...(19): siRNA sense strand
acugguuucuggcuaaugu

SEQ ID NO: 1562378 - RNA, 19 nt, Homo sapiens
  misc_RNA (1)...(19): siRNA sense strand
ccacugguuucuggcuaau

SEQ ID NO: 1562379 - RNA, 19 nt, Homo sapiens
  misc_RNA (1)...(19): siRNA sense strand
uaggacacaucuaccaaaa

SEQ ID NO: 1562380 - RNA, 19 nt, Homo sapiens
  misc_RNA (1)...(19): siRNA sense strand
gaugcguccugaugauggu

SEQ ID NO: 1562381 - RNA, 19 nt, Homo sapiens
  misc_RNA (1)...(19): siRNA sense strand
gaugugauugacuggaaga

SEQ ID NO: 1562382 - RNA, 19 nt, Homo sapiens
  misc_RNA (1)...(19): siRNA sense strand
gagcuguacccaucugaac

SEQ ID NO: 1562383 - RNA, 19 nt, Homo sapiens
  misc_RNA (1)...(19): siRNA sense strand
gggaggugucugaagaaga

SEQ ID NO: 1562384 - RNA, 19 nt, Homo sapiens
  misc_RNA (1)...(19): siRNA sense strand
ugcuguggaugaacgauga

SEQ ID NO: 1562385 - RNA, 19 nt, Homo sapiens
  misc_RNA (1)...(19): siRNA sense strand
guucauugcuuucaaguug

SEQ ID NO: 1562386 - RNA, 19 nt, Homo sapiens
  misc_RNA (1)...(19): siRNA sense strand
gaauggagauuguguucau

SEQ ID NO: 1562387 - RNA, 19 nt, Homo sapiens
  misc_RNA (1)...(19): siRNA sense strand
gcaaccaucuuaucuacau

SEQ ID NO: 1562388 - RNA, 19 nt, Homo sapiens
  misc_RNA (1)...(19): siRNA sense strand
gaggagcucugcagaaucu

SEQ ID NO: 1562389 - RNA, 19 nt, Homo sapiens
  misc_RNA (1)...(19): siRNA sense strand
gagauuguguucauugcuu

SEQ ID NO: 1562390 - RNA, 19 nt, Homo sapiens
  misc_RNA (1)...(19): siRNA sense strand
ggugaagccucagugguuu

SEQ ID NO: 1562391 - RNA, 19 nt, Homo sapiens
  misc_RNA (1)...(19): siRNA sense strand
gacagcagguggagagguu

SEQ ID NO: 1562392 - RNA, 19 nt, Homo sapiens
  misc_RNA (1)...(19): siRNA sense strand
gugaaacagugguggaaga

SEQ ID NO: 1562393 - RNA, 19 nt, Homo sapiens
  misc_RNA (1)...(19): siRNA sense strand
gggagacacaguuggauuu

SEQ ID NO: 1562394 - RNA, 19 nt, Homo sapiens
  misc_RNA (1)...(19): siRNA sense strand
caucauugcccuuauuguu

SEQ ID NO: 1562395 - RNA, 19 nt, Homo sapiens
  misc_RNA (1)...(19): siRNA sense strand
acaguuggauuucgagaau

SEQ ID NO: 1562396 - RNA, 19 nt, Homo sapiens
  misc_RNA (1)...(19): siRNA sense strand
ucuaugcucucuuugguau

SEQ ID NO: 1562397 - RNA, 19 nt, Homo sapiens
  misc_RNA (1)...(19): siRNA sense strand
guuaugcuauucuuugcaa

SEQ ID NO: 1562398 - RNA, 19 nt, Homo sapiens
  misc_RNA (1)...(19): siRNA sense strand
ggucuucucugccauugag

SEQ ID NO: 1562399 - RNA, 19 nt, Homo sapiens
  misc_RNA (1)...(19): siRNA sense strand
acaggcugauugacauaua

SEQ ID NO: 1562400 - RNA, 19 nt, Homo sapiens
  misc_RNA (1)...(19): siRNA sense strand
gcucuaugcucucuuuggu

SEQ ID NO: 1562401 - RNA, 19 nt, Homo sapiens
  misc_RNA (1)...(19): siRNA sense strand
caugcucuaugcucucuuu

SEQ ID NO: 1562402 - RNA, 19 nt, Homo sapiens
  misc_RNA (1)...(19): siRNA sense strand
cauccuggcaaccaucuua

SEQ ID NO: 1562403 - RNA, 19 nt, Homo sapiens
  misc_RNA (1)...(19): siRNA sense strand
ucagcaaccuggaugaagu

SEQ ID NO: 1562404 - RNA, 19 nt, Homo sapiens
  misc_RNA (1)...(19): siRNA sense strand
agacacaguuggauuucga

SEQ ID NO: 1562405 - RNA, 19 nt, Homo sapiens
  misc_RNA (1)...(19): siRNA sense strand
uggaggagcucugcagaau

SEQ ID NO: 1562406 - RNA, 19 nt, Homo sapiens
  misc_RNA (1)...(19): siRNA sense strand
aaacuuggcacauguccuu

SEQ ID NO: 1562407 - RNA, 19 nt, Homo sapiens
  misc_RNA (1)...(19): siRNA sense strand
gaugauggagaguuugaga

SEQ ID NO: 1562408 - RNA, 19 nt, Homo sapiens
  misc_RNA (1)...(19): siRNA sense strand
gcugauugacauauacaaa

SEQ ID NO: 1562409 - RNA, 19 nt, Homo sapiens
  misc_RNA (1)...(19): siRNA sense strand
gaaacagaacacacugcaa

SEQ ID NO: 1562410 - RNA, 19 nt, Homo sapiens
  misc_RNA (1)...(19): siRNA sense strand
auggagaguuugagaaguu

SEQ ID NO: 1562411 - RNA, 19 nt, Homo sapiens
  misc_RNA (1)...(19): siRNA sense strand
aaacaggcugauugacaua

SEQ ID NO: 1562412 - RNA, 19 nt, Homo sapiens
  misc_RNA (1)...(19): siRNA sense strand
ugccuucuauuucugcuuu

SEQ ID NO: 1562413 - RNA, 19 nt, Homo sapiens
  misc_RNA (1)...(19): siRNA sense strand
cauacuccaucaucagcaa

SEQ ID NO: 1562414 - RNA, 19 nt, Homo sapiens
  misc_RNA (1)...(19): siRNA sense strand
gauggagaguuugagaagu

SEQ ID NO: 1562415 - RNA, 19 nt, Homo sapiens
  misc_RNA (1)...(19): siRNA sense strand
uggcaaccaucuuaucuac

SEQ ID NO: 1562416 - RNA, 19 nt, Homo sapiens
  misc_RNA (1)...(19): siRNA sense strand
gagcucugcagaaucuuga

SEQ ID NO: 1562417 - RNA, 19 nt, Homo sapiens
  misc_RNA (1)...(19): siRNA sense strand
ggugggugcuguggucuuc

SEQ ID NO: 1562418 - RNA, 19 nt, Homo sapiens
  misc_RNA (1)...(19): siRNA sense strand
cagaugauggagaguuuga

SEQ ID NO: 1562419 - RNA, 19 nt, Homo sapiens
  misc_RNA (1)...(19): siRNA sense strand
agauuguguucauugcuuu

SEQ ID NO: 1562420 - RNA, 19 nt, Homo sapiens
  misc_RNA (1)...(19): siRNA sense strand
ggagacacaguuggauuuc

SEQ ID NO: 1562421 - RNA, 19 nt, Homo sapiens
  misc_RNA (1)...(19): siRNA sense strand
gugaagccucagugguuua

SEQ ID NO: 1562422 - RNA, 19 nt, Homo sapiens
  misc_RNA (1)...(19): siRNA sense strand
ggagcucugcagaaucuug

SEQ ID NO: 1562423 - RNA, 19 nt, Homo sapiens
  misc_RNA (1)...(19): siRNA sense strand
uuccuguucuucuccauuu

SEQ ID NO: 1562424 - RNA, 19 nt, Homo sapiens
  misc_RNA (1)...(19): siRNA sense strand
agcagaugauggagaguuu

SEQ ID NO: 1562425 - RNA, 19 nt, Homo sapiens
  misc_RNA (1)...(19): siRNA sense strand
ugggaagacucucauacuc

SEQ ID NO: 1562426 - RNA, 19 nt, Homo sapiens
  misc_RNA (1)...(19): siRNA sense strand
ucauugcccuuauuguuuu

SEQ ID NO: 1562427 - RNA, 19 nt, Homo sapiens
  misc_RNA (1)...(19): siRNA sense strand
caaaacaggcugauugaca

SEQ ID NO: 1562428 - RNA, 19 nt, Homo sapiens
  misc_RNA (1)...(19): siRNA sense strand
guucuucuccauuuauauc

SEQ ID NO: 1562429 - RNA, 19 nt, Homo sapiens
  misc_RNA (1)...(19): siRNA sense strand
gguggcagcagaugaugga

SEQ ID NO: 1562430 - RNA, 19 nt, Homo sapiens
  misc_RNA (1)...(19): siRNA sense strand
gcuuucaaguuggugcaaa

SEQ ID NO: 1562431 - RNA, 19 nt, Homo sapiens
  misc_RNA (1)...(19): siRNA sense strand
ugaagccucagugguuuaa

SEQ ID NO: 1562432 - RNA, 19 nt, Homo sapiens
  misc_RNA (1)...(19): siRNA sense strand
ggaauggagauuguguuca

SEQ ID NO: 1562433 - RNA, 19 nt, Homo sapiens
  misc_RNA (1)...(19): siRNA sense strand
cagcaaccuggaugaaguu

SEQ ID NO: 1562434 - RNA, 19 nt, Homo sapiens
  misc_RNA (1)...(19): siRNA sense strand
aagccucagugguuuaaca

SEQ ID NO: 1562435 - RNA, 19 nt, Homo sapiens
  misc_RNA (1)...(19): siRNA sense strand
guacuugugcaugcucuau

SEQ ID NO: 1562436 - RNA, 19 nt, Homo sapiens
  misc_RNA (1)...(19): siRNA sense strand
cuguucuucuccauuuaua

SEQ ID NO: 1562437 - RNA, 19 nt, Homo sapiens
  misc_RNA (1)...(19): siRNA sense strand
caaccaucuuaucuacauc

SEQ ID NO: 1562438 - RNA, 19 nt, Homo sapiens
  misc_RNA (1)...(19): siRNA sense strand
ggaggagcucugcagaauc

SEQ ID NO: 1562439 - RNA, 19 nt, Homo sapiens
  misc_RNA (1)...(19): siRNA sense strand
guuuggggauacuguuuua

SEQ ID NO: 1562440 - RNA, 19 nt, Homo sapiens
  misc_RNA (1)...(19): siRNA sense strand
cagcagaugauggagaguu

SEQ ID NO: 1562441 - RNA, 19 nt, Homo sapiens
  misc_RNA (1)...(19): siRNA sense strand
gcagaugauggagaguuug

SEQ ID NO: 1562442 - RNA, 19 nt, Homo sapiens
  misc_RNA (1)...(19): siRNA sense strand
uaacuucuuccuguucuuc

SEQ ID NO: 1562443 - RNA, 19 nt, Homo sapiens
  misc_RNA (1)...(19): siRNA sense strand
ccaucuuaucuacaucuua

SEQ ID NO: 1562444 - RNA, 19 nt, Homo sapiens
  misc_RNA (1)...(19): siRNA sense strand
aucuugaacugcagugaaa

SEQ ID NO: 1562445 - RNA, 19 nt, Homo sapiens
  misc_RNA (1)...(19): siRNA sense strand
aaaacaggcugauugacau

SEQ ID NO: 1562446 - RNA, 19 nt, Homo sapiens
  misc_RNA (1)...(19): siRNA sense strand
gugcaaaacaggcugauug

SEQ ID NO: 1562447 - RNA, 19 nt, Homo sapiens
  misc_RNA (1)...(19): siRNA sense strand
gaaacagugguggaagaca

SEQ ID NO: 1562448 - RNA, 19 nt, Homo sapiens
  misc_RNA (1)...(19): siRNA sense strand
uggaagagauuaagaguaa

SEQ ID NO: 1562449 - RNA, 19 nt, Homo sapiens
  misc_RNA (1)...(19): siRNA sense strand
gcaagcauuucgcagauuu

SEQ ID NO: 1562450 - RNA, 19 nt, Homo sapiens
  misc_RNA (1)...(19): siRNA sense strand
ggcaauaacuacugaauca

SEQ ID NO: 1562451 - RNA, 19 nt, Homo sapiens
  misc_RNA (1)...(19): siRNA sense strand
cggcauaucucuacagcua

SEQ ID NO: 1562452 - RNA, 19 nt, Homo sapiens
  misc_RNA (1)...(19): siRNA sense strand
gcagggccauccauuguga

SEQ ID NO: 1562453 - RNA, 19 nt, Homo sapiens
  misc_RNA (1)...(19): siRNA sense strand
ggccauggcugaacucaau

SEQ ID NO: 1562454 - RNA, 19 nt, Homo sapiens
  misc_RNA (1)...(19): siRNA sense strand
gcagcgaccuguuucuaug

SEQ ID NO: 1562455 - RNA, 19 nt, Homo sapiens
  misc_RNA (1)...(19): siRNA sense strand
caaacucacugaucuugug

SEQ ID NO: 1562456 - RNA, 19 nt, Homo sapiens
  misc_RNA (1)...(19): siRNA sense strand
cuaaugagcaucuuuguga

SEQ ID NO: 1562457 - RNA, 19 nt, Homo sapiens
  misc_RNA (1)...(19): siRNA sense strand
gagcaucuuugugaauauu

SEQ ID NO: 1562458 - RNA, 19 nt, Homo sapiens
  misc_RNA (1)...(19): siRNA sense strand
ucagagaaguugacccuau

SEQ ID NO: 1562459 - RNA, 19 nt, Homo sapiens
  misc_RNA (1)...(19): siRNA sense strand
caugaucucuggcuucguu

SEQ ID NO: 1562460 - RNA, 19 nt, Homo sapiens
  misc_RNA (1)...(19): siRNA sense strand
gaagaggacuacgaauugg

SEQ ID NO: 1562461 - RNA, 19 nt, Homo sapiens
  misc_RNA (1)...(19): siRNA sense strand
gcauuccucuucaaacuca

SEQ ID NO: 1562462 - RNA, 19 nt, Homo sapiens
  misc_RNA (1)...(19): siRNA sense strand
cagaagaggacuacgaauu

SEQ ID NO: 1562463 - RNA, 19 nt, Homo sapiens
  misc_RNA (1)...(19): siRNA sense strand
gggaagaaguggaguugca

SEQ ID NO: 1562464 - RNA, 19 nt, Homo sapiens
  misc_RNA (1)...(19): siRNA sense strand
gcugcucacuggauuguug

SEQ ID NO: 1562465 - RNA, 19 nt, Homo sapiens
  misc_RNA (1)...(19): siRNA sense strand
gguguggacugcagugguu

SEQ ID NO: 1562466 - RNA, 19 nt, Homo sapiens
  misc_RNA (1)...(19): siRNA sense strand
gcauuucucuacauuggau

SEQ ID NO: 1562467 - RNA, 19 nt, Homo sapiens
  misc_RNA (1)...(19): siRNA sense strand
agaagaggacuacgaauug

SEQ ID NO: 1562468 - RNA, 19 nt, Homo sapiens
  misc_RNA (1)...(19): siRNA sense strand
cagagaaguugacccuaug

SEQ ID NO: 1562469 - RNA, 19 nt, Homo sapiens
  misc_RNA (1)...(19): siRNA sense strand
gaacucaaugacaccuaua

SEQ ID NO: 1562470 - RNA, 19 nt, Homo sapiens
  misc_RNA (1)...(19): siRNA sense strand
acuggaagcucacagaaga

SEQ ID NO: 1562471 - RNA, 19 nt, Homo sapiens
  misc_RNA (1)...(19): siRNA sense strand
ccuaagcacccuggauuua

SEQ ID NO: 1562472 - RNA, 19 nt, Homo sapiens
  misc_RNA (1)...(19): siRNA sense strand
cguggucucuggcauuauu

SEQ ID NO: 1562473 - RNA, 19 nt, Homo sapiens
  misc_RNA (1)...(19): siRNA sense strand
gcacagccuggaagagauu

SEQ ID NO: 1562474 - RNA, 19 nt, Homo sapiens
  misc_RNA (1)...(19): siRNA sense strand
cgagguggccaaagauaaa

SEQ ID NO: 1562475 - RNA, 19 nt, Homo sapiens
  misc_RNA (1)...(19): siRNA sense strand
gagcagcgaccuguuucua

SEQ ID NO: 1562476 - RNA, 19 nt, Homo sapiens
  misc_RNA (1)...(19): siRNA sense strand
guucuuggguucgucauga

SEQ ID NO: 1562477 - RNA, 19 nt, Homo sapiens
  misc_RNA (1)...(19): siRNA sense strand
ggaaccacaucucuaagac

SEQ ID NO: 1562478 - RNA, 19 nt, Homo sapiens
  misc_RNA (1)...(19): siRNA sense strand
ggccaaauugucuauguuu

SEQ ID NO: 1562479 - RNA, 19 nt, Homo sapiens
  misc_RNA (1)...(19): siRNA sense strand
ugaggcauuucucuacauu

SEQ ID NO: 1562480 - RNA, 19 nt, Homo sapiens
  misc_RNA (1)...(19): siRNA sense strand
ucacccugaugaugccuua

SEQ ID NO: 1562481 - RNA, 19 nt, Homo sapiens
  misc_RNA (1)...(19): siRNA sense strand
ucugggcucuggaggauuu

SEQ ID NO: 1562482 - RNA, 19 nt, Homo sapiens
  misc_RNA (1)...(19): siRNA sense strand
cccauguccuugcagaaua

SEQ ID NO: 1562483 - RNA, 19 nt, Homo sapiens
  misc_RNA (1)...(19): siRNA sense strand
gguuucgacuguauugcua

SEQ ID NO: 1562484 - RNA, 19 nt, Homo sapiens
  misc_RNA (1)...(19): siRNA sense strand
uaagcacccuggauuuagu

SEQ ID NO: 1562485 - RNA, 19 nt, Homo sapiens
  misc_RNA (1)...(19): siRNA sense strand
uaaugagcaucuuugugaa

SEQ ID NO: 1562486 - RNA, 19 nt, Homo sapiens
  misc_RNA (1)...(19): siRNA sense strand
gcgagguggccaaagauaa

SEQ ID NO: 1562487 - RNA, 19 nt, Homo sapiens
  misc_RNA (1)...(19): siRNA sense strand
ugaacucaaugacaccuau

SEQ ID NO: 1562488 - RNA, 19 nt, Homo sapiens
  misc_RNA (1)...(19): siRNA sense strand
gcugugcuaugcggaguuu

SEQ ID NO: 1562489 - RNA, 19 nt, Homo sapiens
  misc_RNA (1)...(19): siRNA sense strand
ccacuaaugagcaucuuug

SEQ ID NO: 1562490 - RNA, 19 nt, Homo sapiens
  misc_RNA (1)...(19): siRNA sense strand
gaauauccagauuucuuug

SEQ ID NO: 1562491 - RNA, 19 nt, Homo sapiens
  misc_RNA (1)...(19): siRNA sense strand
ccauguccuugcagaauau

SEQ ID NO: 1562492 - RNA, 19 nt, Homo sapiens
  misc_RNA (1)...(19): siRNA sense strand
gggaaccacaucucuaaga

SEQ ID NO: 1562493 - RNA, 19 nt, Homo sapiens
  misc_RNA (1)...(19): siRNA sense strand
ggaaccucauccucuccua

SEQ ID NO: 1562494 - RNA, 19 nt, Homo sapiens
  misc_RNA (1)...(19): siRNA sense strand
ccacuccccuucacuuuaa

SEQ ID NO: 1562495 - RNA, 19 nt, Homo sapiens
  misc_RNA (1)...(19): siRNA sense strand
cgaccuguuucuaugcauu

SEQ ID NO: 1562496 - RNA, 19 nt, Homo sapiens
  misc_RNA (1)...(19): siRNA sense strand
ucaaugacaccuauagcuu

SEQ ID NO: 1562497 - RNA, 19 nt, Homo sapiens
  misc_RNA (1)...(19): siRNA sense strand
ggacccugcuugcuuacuc

SEQ ID NO: 1562498 - RNA, 19 nt, Homo sapiens
  misc_RNA (1)...(19): siRNA sense strand
uaaagcagggccauccauu

SEQ ID NO: 1562499 - RNA, 19 nt, Homo sapiens
  misc_RNA (1)...(19): siRNA sense strand
gaaccucauccucuccuau

SEQ ID NO: 1562500 - RNA, 19 nt, Homo sapiens
  misc_RNA (1)...(19): siRNA sense strand
agacucgccuugccagaug

SEQ ID NO: 1562501 - RNA, 19 nt, Homo sapiens
  misc_RNA (1)...(19): siRNA sense strand
gcucauuauugggaucauu

SEQ ID NO: 1562502 - RNA, 19 nt, Homo sapiens
  misc_RNA (1)...(19): siRNA sense strand
uugggacccugcuugcuua

SEQ ID NO: 1562503 - RNA, 19 nt, Homo sapiens
  misc_RNA (1)...(19): siRNA sense strand
gagaagaagcccagaaucc

SEQ ID NO: 1562504 - RNA, 19 nt, Homo sapiens
  misc_RNA (1)...(19): siRNA sense strand
ucuaugcauuuguugguuu

SEQ ID NO: 1562505 - RNA, 19 nt, Homo sapiens
  misc_RNA (1)...(19): siRNA sense strand
caacuggaagcucacagaa

SEQ ID NO: 1562506 - RNA, 19 nt, Homo sapiens
  misc_RNA (1)...(19): siRNA sense strand
cauccucuccuaugucauu

SEQ ID NO: 1562507 - RNA, 19 nt, Homo sapiens
  misc_RNA (1)...(19): siRNA sense strand
augagcaucuuugugaaua

SEQ ID NO: 1562508 - RNA, 19 nt, Homo sapiens
  misc_RNA (1)...(19): siRNA sense strand
ugcagaauauccagauuuc

SEQ ID NO: 1562509 - RNA, 19 nt, Homo sapiens
  misc_RNA (1)...(19): siRNA sense strand
cagcacagccuggaagaga

SEQ ID NO: 1562510 - RNA, 19 nt, Homo sapiens
  misc_RNA (1)...(19): siRNA sense strand
acuuuaaggugccugcuuu

SEQ ID NO: 1562511 - RNA, 19 nt, Homo sapiens
  misc_RNA (1)...(19): siRNA sense strand
ccaguggucaguuccauug

SEQ ID NO: 1562512 - RNA, 19 nt, Homo sapiens
  misc_RNA (1)...(19): siRNA sense strand
acgcaagucuagagccaaa

SEQ ID NO: 1562513 - RNA, 19 nt, Homo sapiens
  misc_RNA (1)...(19): siRNA sense strand
ggccauccauugugaucug

SEQ ID NO: 1562514 - RNA, 19 nt, Homo sapiens
  misc_RNA (1)...(19): siRNA sense strand
uccacucucuggccaaauu

SEQ ID NO: 1562515 - RNA, 19 nt, Homo sapiens
  misc_RNA (1)...(19): siRNA sense strand
ggcaagcauuucgcagauu

SEQ ID NO: 1562516 - RNA, 19 nt, Homo sapiens
  misc_RNA (1)...(19): siRNA sense strand
ggagaagaagcccagaauc

SEQ ID NO: 1562517 - RNA, 19 nt, Homo sapiens
  misc_RNA (1)...(19): siRNA sense strand
ccagauuucuuugcuuugg

SEQ ID NO: 1562518 - RNA, 19 nt, Homo sapiens
  misc_RNA (1)...(19): siRNA sense strand
ucacagaagaggacuacga

SEQ ID NO: 1562519 - RNA, 19 nt, Homo sapiens
  misc_RNA (1)...(19): siRNA sense strand
uggcugcccugucuucugu

SEQ ID NO: 1562520 - RNA, 19 nt, Homo sapiens
  misc_RNA (1)...(19): siRNA sense strand
gacaaagacuggggaagaa

SEQ ID NO: 1562521 - RNA, 19 nt, Homo sapiens
  misc_RNA (1)...(19): siRNA sense strand
gcuccugcccgcuauguug

SEQ ID NO: 1562522 - RNA, 19 nt, Homo sapiens
  misc_RNA (1)...(19): siRNA sense strand
uggcuuugcuaucuacuuc

SEQ ID NO: 1562523 - RNA, 19 nt, Homo sapiens
  misc_RNA (1)...(19): siRNA sense strand
ccucuccucccacuaauga

SEQ ID NO: 1562524 - RNA, 19 nt, Homo sapiens
  misc_RNA (1)...(19): siRNA sense strand
ugauuggcuuugcuaucua

SEQ ID NO: 1562525 - RNA, 19 nt, Homo sapiens
  misc_RNA (1)...(19): siRNA sense strand
guggagcagcgaccuguuu

SEQ ID NO: 1562526 - RNA, 19 nt, Homo sapiens
  misc_RNA (1)...(19): siRNA sense strand
cugauuggcuuugcuaucu

SEQ ID NO: 1562527 - RNA, 19 nt, Homo sapiens
  misc_RNA (1)...(19): siRNA sense strand
ucaguuccauugcuuucug

SEQ ID NO: 1562528 - RNA, 19 nt, Homo sapiens
  misc_RNA (1)...(19): siRNA sense strand
gaccuguuucuaugcauuu

SEQ ID NO: 1562529 - RNA, 19 nt, Homo sapiens
  misc_RNA (1)...(19): siRNA sense strand
auccagauuucuuugcuuu

SEQ ID NO: 1562530 - RNA, 19 nt, Homo sapiens
  misc_RNA (1)...(19): siRNA sense strand
aaccaacccucacgcaagu

SEQ ID NO: 1562531 - RNA, 19 nt, Homo sapiens
  misc_RNA (1)...(19): siRNA sense strand
uggcaagcauuucgcagau

SEQ ID NO: 1562532 - RNA, 19 nt, Homo sapiens
  misc_RNA (1)...(19): siRNA sense strand
caggaggaggcaauaacua

SEQ ID NO: 1562533 - RNA, 19 nt, Homo sapiens
  misc_RNA (1)...(19): siRNA sense strand
gcaggaggaggcaauaacu

SEQ ID NO: 1562534 - RNA, 19 nt, Homo sapiens
  misc_RNA (1)...(19): siRNA sense strand
gaugggcauugugaucuca

SEQ ID NO: 1562535 - RNA, 19 nt, Homo sapiens
  misc_RNA (1)...(19): siRNA sense strand
cacagaagaggacuacgaa

SEQ ID NO: 1562536 - RNA, 19 nt, Homo sapiens
  misc_RNA (1)...(19): siRNA sense strand
uggcauuccucuucaaacu

SEQ ID NO: 1562537 - RNA, 19 nt, Homo sapiens
  misc_RNA (1)...(19): siRNA sense strand
ccaaaacuguagaccuuga

SEQ ID NO: 1562538 - RNA, 19 nt, Homo sapiens
  misc_RNA (1)...(19): siRNA sense strand
ugagcaucuuugugaauau

SEQ ID NO: 1562539 - RNA, 19 nt, Homo sapiens
  misc_RNA (1)...(19): siRNA sense strand
cuauguuuguuccucauug

SEQ ID NO: 1562540 - RNA, 19 nt, Homo sapiens
  misc_RNA (1)...(19): siRNA sense strand
guggaccucaugucaauug

SEQ ID NO: 1562541 - RNA, 19 nt, Homo sapiens
  misc_RNA (1)...(19): siRNA sense strand
ggcgagguggccaaagaua

SEQ ID NO: 1562542 - RNA, 19 nt, Homo sapiens
  misc_RNA (1)...(19): siRNA sense strand
gauuggcuuugcuaucuac

SEQ ID NO: 1562543 - RNA, 19 nt, Homo sapiens
  misc_RNA (1)...(19): siRNA sense strand
aaagcagggccauccauug

SEQ ID NO: 1562544 - RNA, 19 nt, Homo sapiens
  misc_RNA (1)...(19): siRNA sense strand
guggucaguuccauugcuu

SEQ ID NO: 1562545 - RNA, 19 nt, Homo sapiens
  misc_RNA (1)...(19): siRNA sense strand
uggccaaauugucuauguu

SEQ ID NO: 1562546 - RNA, 19 nt, Homo sapiens
  misc_RNA (1)...(19): siRNA sense strand
gaggcaauaacuacugaau

SEQ ID NO: 1562547 - RNA, 19 nt, Homo sapiens
  misc_RNA (1)...(19): siRNA sense strand
aggaggcaauaacuacuga

SEQ ID NO: 1562548 - RNA, 19 nt, Homo sapiens
  misc_RNA (1)...(19): siRNA sense strand
gcaaacgucuuaacauuga

SEQ ID NO: 1562549 - RNA, 19 nt, Homo sapiens
  misc_RNA (1)...(19): siRNA sense strand
gaggugaacuugaugcuaa

SEQ ID NO: 1562550 - RNA, 19 nt, Homo sapiens
  misc_RNA (1)...(19): siRNA sense strand
gaucaaacgucauggcaaa

SEQ ID NO: 1562551 - RNA, 19 nt, Homo sapiens
  misc_RNA (1)...(19): siRNA sense strand
ggaaggcaguggccaagua

SEQ ID NO: 1562552 - RNA, 19 nt, Homo sapiens
  misc_RNA (1)...(19): siRNA sense strand
caacauugcuuagaagauu

SEQ ID NO: 1562553 - RNA, 19 nt, Homo sapiens
  misc_RNA (1)...(19): siRNA sense strand
agaaauaucuuccaaguca

SEQ ID NO: 1562554 - RNA, 19 nt, Homo sapiens
  misc_RNA (1)...(19): siRNA sense strand
gaucgauucucuaccauuu

SEQ ID NO: 1562555 - RNA, 19 nt, Homo sapiens
  misc_RNA (1)...(19): siRNA sense strand
gcaguuacaugguauaauc

SEQ ID NO: 1562556 - RNA, 19 nt, Homo sapiens
  misc_RNA (1)...(19): siRNA sense strand
gaacaucuuuacaucagaa

SEQ ID NO: 1562557 - RNA, 19 nt, Homo sapiens
  misc_RNA (1)...(19): siRNA sense strand
gaucucagcuuaucaaguc

SEQ ID NO: 1562558 - RNA, 19 nt, Homo sapiens
  misc_RNA (1)...(19): siRNA sense strand
gcagaaauaucuuccaagu

SEQ ID NO: 1562559 - RNA, 19 nt, Homo sapiens
  misc_RNA (1)...(19): siRNA sense strand
ucacagagguaucaaguug

SEQ ID NO: 1562560 - RNA, 19 nt, Homo sapiens
  misc_RNA (1)...(19): siRNA sense strand
caacugggauuuccacuuc

SEQ ID NO: 1562561 - RNA, 19 nt, Homo sapiens
  misc_RNA (1)...(19): siRNA sense strand
gaaauuauucucagcaguu

SEQ ID NO: 1562562 - RNA, 19 nt, Homo sapiens
  misc_RNA (1)...(19): siRNA sense strand
caauguugcucacaguaua

SEQ ID NO: 1562563 - RNA, 19 nt, Homo sapiens
  misc_RNA (1)...(19): siRNA sense strand
gcacgcauaugcuuuagau

SEQ ID NO: 1562564 - RNA, 19 nt, Homo sapiens
  misc_RNA (1)...(19): siRNA sense strand
caaguugggcgaccauuua

SEQ ID NO: 1562565 - RNA, 19 nt, Homo sapiens
  misc_RNA (1)...(19): siRNA sense strand
gaaagaaguguguuuggaa

SEQ ID NO: 1562566 - RNA, 19 nt, Homo sapiens
  misc_RNA (1)...(19): siRNA sense strand
ucaaguugcucccaucaaa

SEQ ID NO: 1562567 - RNA, 19 nt, Homo sapiens
  misc_RNA (1)...(19): siRNA sense strand
ccacaggacucauuuacau

SEQ ID NO: 1562568 - RNA, 19 nt, Homo sapiens
  misc_RNA (1)...(19): siRNA sense strand
aaacagugguuccagauga

SEQ ID NO: 1562569 - RNA, 19 nt, Homo sapiens
  misc_RNA (1)...(19): siRNA sense strand
gagcuuguauugaucgauu

SEQ ID NO: 1562570 - RNA, 19 nt, Homo sapiens
  misc_RNA (1)...(19): siRNA sense strand
caucauagagugacuguuu

SEQ ID NO: 1562571 - RNA, 19 nt, Homo sapiens
  misc_RNA (1)...(19): siRNA sense strand
acuaauggcuucacaauuc

SEQ ID NO: 1562572 - RNA, 19 nt, Homo sapiens
  misc_RNA (1)...(19): siRNA sense strand
gaucugaggcuaaagcauu

SEQ ID NO: 1562573 - RNA, 19 nt, Homo sapiens
  misc_RNA (1)...(19): siRNA sense strand
gagaacagguuuggcaguu

SEQ ID NO: 1562574 - RNA, 19 nt, Homo sapiens
  misc_RNA (1)...(19): siRNA sense strand
gagcagagggagucaaauu

SEQ ID NO: 1562575 - RNA, 19 nt, Homo sapiens
  misc_RNA (1)...(19): siRNA sense strand
ugugaaagauggagagauu

SEQ ID NO: 1562576 - RNA, 19 nt, Homo sapiens
  misc_RNA (1)...(19): siRNA sense strand
guucugagcaugucaauga

SEQ ID NO: 1562577 - RNA, 19 nt, Homo sapiens
  misc_RNA (1)...(19): siRNA sense strand
gaaaaccacucuucucuuc

SEQ ID NO: 1562578 - RNA, 19 nt, Homo sapiens
  misc_RNA (1)...(19): siRNA sense strand
aaagauccauccuguguug

SEQ ID NO: 1562579 - RNA, 19 nt, Homo sapiens
  misc_RNA (1)...(19): siRNA sense strand
uggcaaacgucuuaacauu

SEQ ID NO: 1562580 - RNA, 19 nt, Homo sapiens
  misc_RNA (1)...(19): siRNA sense strand
gagaggagaaggcaauaaa

SEQ ID NO: 1562581 - RNA, 19 nt, Homo sapiens
  misc_RNA (1)...(19): siRNA sense strand
cggaugagcuuguauugau

SEQ ID NO: 1562582 - RNA, 19 nt, Homo sapiens
  misc_RNA (1)...(19): siRNA sense strand
guggugggcuguuauaaug

SEQ ID NO: 1562583 - RNA, 19 nt, Homo sapiens
  misc_RNA (1)...(19): siRNA sense strand
ugaacuugaugcuaaauga

SEQ ID NO: 1562584 - RNA, 19 nt, Homo sapiens
  misc_RNA (1)...(19): siRNA sense strand
cgacauuaaucaagaggaa

SEQ ID NO: 1562585 - RNA, 19 nt, Homo sapiens
  misc_RNA (1)...(19): siRNA sense strand
gugaagcguuuccaucauu

SEQ ID NO: 1562586 - RNA, 19 nt, Homo sapiens
  misc_RNA (1)...(19): siRNA sense strand
gaagaacacauggaucuga

SEQ ID NO: 1562587 - RNA, 19 nt, Homo sapiens
  misc_RNA (1)...(19): siRNA sense strand
uaacucuacucucaaaugu

SEQ ID NO: 1562588 - RNA, 19 nt, Homo sapiens
  misc_RNA (1)...(19): siRNA sense strand
gucuaaagaugcuucagua

SEQ ID NO: 1562589 - RNA, 19 nt, Homo sapiens
  misc_RNA (1)...(19): siRNA sense strand
ggacaauugcaaaguguuu

SEQ ID NO: 1562590 - RNA, 19 nt, Homo sapiens
  misc_RNA (1)...(19): siRNA sense strand
cuacauacaucagggacua

SEQ ID NO: 1562591 - RNA, 19 nt, Homo sapiens
  misc_RNA (1)...(19): siRNA sense strand
gauaagucaucuacaacug

SEQ ID NO: 1562592 - RNA, 19 nt, Homo sapiens
  misc_RNA (1)...(19): siRNA sense strand
ugaauugccuguacaacug

SEQ ID NO: 1562593 - RNA, 19 nt, Homo sapiens
  misc_RNA (1)...(19): siRNA sense strand
acaccaacauugcuuagaa

SEQ ID NO: 1562594 - RNA, 19 nt, Homo sapiens
  misc_RNA (1)...(19): siRNA sense strand
gaagucagagauacuaaug

SEQ ID NO: 1562595 - RNA, 19 nt, Homo sapiens
  misc_RNA (1)...(19): siRNA sense strand
guacauugguucccauucu

SEQ ID NO: 1562596 - RNA, 19 nt, Homo sapiens
  misc_RNA (1)...(19): siRNA sense strand
cagagugccucauaagugu

SEQ ID NO: 1562597 - RNA, 19 nt, Homo sapiens
  misc_RNA (1)...(19): siRNA sense strand
gaccuucgauccuucuguu

SEQ ID NO: 1562598 - RNA, 19 nt, Homo sapiens
  misc_RNA (1)...(19): siRNA sense strand
gggaauuuacucugcuuua

SEQ ID NO: 1562599 - RNA, 19 nt, Homo sapiens
  misc_RNA (1)...(19): siRNA sense strand
ucacagaccaacauucaaa

SEQ ID NO: 1562600 - RNA, 19 nt, Homo sapiens
  misc_RNA (1)...(19): siRNA sense strand
cuaaagaugcuucaguaaa

SEQ ID NO: 1562601 - RNA, 19 nt, Homo sapiens
  misc_RNA (1)...(19): siRNA sense strand
ccucauaaguguauaguac

SEQ ID NO: 1562602 - RNA, 19 nt, Homo sapiens
  misc_RNA (1)...(19): siRNA sense strand
cgucauggcaaacgucuua

SEQ ID NO: 1562603 - RNA, 19 nt, Homo sapiens
  misc_RNA (1)...(19): siRNA sense strand
ggaacauaaugaccuagug

SEQ ID NO: 1562604 - RNA, 19 nt, Homo sapiens
  misc_RNA (1)...(19): siRNA sense strand
acucuuaacucuacucuca

SEQ ID NO: 1562605 - RNA, 19 nt, Homo sapiens
  misc_RNA (1)...(19): siRNA sense strand
ggaauuuacucugcuuuac

SEQ ID NO: 1562606 - RNA, 19 nt, Homo sapiens
  misc_RNA (1)...(19): siRNA sense strand
gaaacucagcgacauuaau

SEQ ID NO: 1562607 - RNA, 19 nt, Homo sapiens
  misc_RNA (1)...(19): siRNA sense strand
cauuuacaguggaacauaa

SEQ ID NO: 1562608 - RNA, 19 nt, Homo sapiens
  misc_RNA (1)...(19): siRNA sense strand
gcaggcaacaccaacauug

SEQ ID NO: 1562609 - RNA, 19 nt, Homo sapiens
  misc_RNA (1)...(19): siRNA sense strand
acucuacucucaaauguga

SEQ ID NO: 1562610 - RNA, 19 nt, Homo sapiens
  misc_RNA (1)...(19): siRNA sense strand
cuuaucaagucaacuguuu

SEQ ID NO: 1562611 - RNA, 19 nt, Homo sapiens
  misc_RNA (1)...(19): siRNA sense strand
auuauuggguguagagaua

SEQ ID NO: 1562612 - RNA, 19 nt, Homo sapiens
  misc_RNA (1)...(19): siRNA sense strand
uggcagcaaugaaauguug

SEQ ID NO: 1562613 - RNA, 19 nt, Homo sapiens
  misc_RNA (1)...(19): siRNA sense strand
ggaagucuacucugaaucu

SEQ ID NO: 1562614 - RNA, 19 nt, Homo sapiens
  misc_RNA (1)...(19): siRNA sense strand
cuacagggauaccgaagau

SEQ ID NO: 1562615 - RNA, 19 nt, Homo sapiens
  misc_RNA (1)...(19): siRNA sense strand
ggacucauuuacauuggau

SEQ ID NO: 1562616 - RNA, 19 nt, Homo sapiens
  misc_RNA (1)...(19): siRNA sense strand
ugaaggcaguugacuuuua

SEQ ID NO: 1562617 - RNA, 19 nt, Homo sapiens
  misc_RNA (1)...(19): siRNA sense strand
caucagaaagccaucauga

SEQ ID NO: 1562618 - RNA, 19 nt, Homo sapiens
  misc_RNA (1)...(19): siRNA sense strand
ucagcgacauuaaucaaga

SEQ ID NO: 1562619 - RNA, 19 nt, Homo sapiens
  misc_RNA (1)...(19): siRNA sense strand
cuagugcucuucagacuuc

SEQ ID NO: 1562620 - RNA, 19 nt, Homo sapiens
  misc_RNA (1)...(19): siRNA sense strand
gaggguuccugaugaguca

SEQ ID NO: 1562621 - RNA, 19 nt, Homo sapiens
  misc_RNA (1)...(19): siRNA sense strand
guaguugaagucagagaua

SEQ ID NO: 1562622 - RNA, 19 nt, Homo sapiens
  misc_RNA (1)...(19): siRNA sense strand
gaacugcagaaauaucuuc

SEQ ID NO: 1562623 - RNA, 19 nt, Homo sapiens
  misc_RNA (1)...(19): siRNA sense strand
gaaguguguuuggaaguca

SEQ ID NO: 1562624 - RNA, 19 nt, Homo sapiens
  misc_RNA (1)...(19): siRNA sense strand
agaaagaaguguguuugga

SEQ ID NO: 1562625 - RNA, 19 nt, Homo sapiens
  misc_RNA (1)...(19): siRNA sense strand
gauguuuacuacugaagau

SEQ ID NO: 1562626 - RNA, 19 nt, Homo sapiens
  misc_RNA (1)...(19): siRNA sense strand
cagcauguguaucuaagug

SEQ ID NO: 1562627 - RNA, 19 nt, Homo sapiens
  misc_RNA (1)...(19): siRNA sense strand
gaaugaaggcaguugacuu

SEQ ID NO: 1562628 - RNA, 19 nt, Homo sapiens
  misc_RNA (1)...(19): siRNA sense strand
guuaggacauugcucuuca

SEQ ID NO: 1562629 - RNA, 19 nt, Homo sapiens
  misc_RNA (1)...(19): siRNA sense strand
ggaacaucuuuacaucaga

SEQ ID NO: 1562630 - RNA, 19 nt, Homo sapiens
  misc_RNA (1)...(19): siRNA sense strand
ggaaacucagcgacauuaa

SEQ ID NO: 1562631 - RNA, 19 nt, Homo sapiens
  misc_RNA (1)...(19): siRNA sense strand
gaaaguguggaucuuggaa

SEQ ID NO: 1562632 - RNA, 19 nt, Homo sapiens
  misc_RNA (1)...(19): siRNA sense strand
auacugaggugaacuugau

SEQ ID NO: 1562633 - RNA, 19 nt, Homo sapiens
  misc_RNA (1)...(19): siRNA sense strand
ggaagccaguggaacaucu

SEQ ID NO: 1562634 - RNA, 19 nt, Homo sapiens
  misc_RNA (1)...(19): siRNA sense strand
uaccugggcuucuggaaau

SEQ ID NO: 1562635 - RNA, 19 nt, Homo sapiens
  misc_RNA (1)...(19): siRNA sense strand
gcucacaguauauuuguau

SEQ ID NO: 1562636 - RNA, 19 nt, Homo sapiens
  misc_RNA (1)...(19): siRNA sense strand
gauuccacaucauuuguau

SEQ ID NO: 1562637 - RNA, 19 nt, Homo sapiens
  misc_RNA (1)...(19): siRNA sense strand
gaaaaguaauaguggagaa

SEQ ID NO: 1562638 - RNA, 19 nt, Homo sapiens
  misc_RNA (1)...(19): siRNA sense strand
gaaggcaguggccaaguau

SEQ ID NO: 1562639 - RNA, 19 nt, Homo sapiens
  misc_RNA (1)...(19): siRNA sense strand
aaugaaggcaguugacuuu

SEQ ID NO: 1562640 - RNA, 19 nt, Homo sapiens
  misc_RNA (1)...(19): siRNA sense strand
acauugaacuugugcaaca

SEQ ID NO: 1562641 - RNA, 19 nt, Homo sapiens
  misc_RNA (1)...(19): siRNA sense strand
caggagacuuugugacugu

SEQ ID NO: 1562642 - RNA, 19 nt, Homo sapiens
  misc_RNA (1)...(19): siRNA sense strand
gaaauaucuuccaagucau

SEQ ID NO: 1562643 - RNA, 19 nt, Homo sapiens
  misc_RNA (1)...(19): siRNA sense strand
caguggaaauuugaaacua

SEQ ID NO: 1562644 - RNA, 19 nt, Homo sapiens
  misc_RNA (1)...(19): siRNA sense strand
cuguguagaugggaauuua

SEQ ID NO: 1562645 - RNA, 19 nt, Homo sapiens
  misc_RNA (1)...(19): siRNA sense strand
caaccacaggacucauuua

SEQ ID NO: 1562646 - RNA, 19 nt, Homo sapiens
  misc_RNA (1)...(19): siRNA sense strand
uacugaagaugcugucaaa

SEQ ID NO: 1562647 - RNA, 19 nt, Homo sapiens
  misc_RNA (1)...(19): siRNA sense strand
gacuuucacuugccacaau

SEQ ID NO: 1562648 - RNA, 19 nt, Homo sapiens
  misc_RNA (1)...(19): siRNA sense strand
ugacccagcuggauguuga

SEQ ID NO: 1562649 - RNA, 19 nt, Homo sapiens
  misc_RNA (1)...(19): siRNA sense strand
ugacgugucuuucauggau

SEQ ID NO: 1562650 - RNA, 19 nt, Homo sapiens
  misc_RNA (1)...(19): siRNA sense strand
gcccagugcuuggccgaaa

SEQ ID NO: 1562651 - RNA, 19 nt, Homo sapiens
  misc_RNA (1)...(19): siRNA sense strand
ugaaggagcugccgcugaa

SEQ ID NO: 1562652 - RNA, 19 nt, Homo sapiens
  misc_RNA (1)...(19): siRNA sense strand
ggagaaagaggucaaguuc

SEQ ID NO: 1562653 - RNA, 19 nt, Homo sapiens
  misc_RNA (1)...(19): siRNA sense strand
gugacuaccuggagaaaga

SEQ ID NO: 1562654 - RNA, 19 nt, Homo sapiens
  misc_RNA (1)...(19): siRNA sense strand
ggacaccuuugaagcaugu

SEQ ID NO: 1562655 - RNA, 19 nt, Homo sapiens
  misc_RNA (1)...(19): siRNA sense strand
ggaauaugaagucaagaaa

SEQ ID NO: 1562656 - RNA, 19 nt, Homo sapiens
  misc_RNA (1)...(19): siRNA sense strand
gcacguccacaccuucuuu

SEQ ID NO: 1562657 - RNA, 19 nt, Homo sapiens
  misc_RNA (1)...(19): siRNA sense strand
gaagaagggcuuuguaucc

SEQ ID NO: 1562658 - RNA, 19 nt, Homo sapiens
  misc_RNA (1)...(19): siRNA sense strand
ggaagaagggcuuuguauc

SEQ ID NO: 1562659 - RNA, 19 nt, Homo sapiens
  misc_RNA (1)...(19): siRNA sense strand
gcaguuacaggauuacaug

SEQ ID NO: 1562660 - RNA, 19 nt, Homo sapiens
  misc_RNA (1)...(19): siRNA sense strand
ugucaggucuuccagauca

SEQ ID NO: 1562661 - RNA, 19 nt, Homo sapiens
  misc_RNA (1)...(19): siRNA sense strand
ggaccagaguauugagugu

SEQ ID NO: 1562662 - RNA, 19 nt, Homo sapiens
  misc_RNA (1)...(19): siRNA sense strand
uggagcaguuacaggauua

SEQ ID NO: 1562663 - RNA, 19 nt, Homo sapiens
  misc_RNA (1)...(19): siRNA sense strand
gggaagaagggcuuuguau

SEQ ID NO: 1562664 - RNA, 19 nt, Homo sapiens
  misc_RNA (1)...(19): siRNA sense strand
aauaugaagucaagaaagg

SEQ ID NO: 1562665 - RNA, 19 nt, Homo sapiens
  misc_RNA (1)...(19): siRNA sense strand
gaauaugaagucaagaaag

SEQ ID NO: 1562666 - RNA, 19 nt, Homo sapiens
  misc_RNA (1)...(19): siRNA sense strand
agaaagaggucaaguuccu

SEQ ID NO: 1562667 - RNA, 19 nt, Homo sapiens
  misc_RNA (1)...(19): siRNA sense strand
ucaccuggcgcgacaauga

SEQ ID NO: 1562668 - RNA, 19 nt, Homo sapiens
  misc_RNA (1)...(19): siRNA sense strand
aggauuacauggucacguu

SEQ ID NO: 1562669 - RNA, 19 nt, Homo sapiens
  misc_RNA (1)...(19): siRNA sense strand
gcucugcagccgcauaaug

SEQ ID NO: 1562670 - RNA, 19 nt, Homo sapiens
  misc_RNA (1)...(19): siRNA sense strand
guccacaccuucuuuccau

SEQ ID NO: 1562671 - RNA, 19 nt, Homo sapiens
  misc_RNA (1)...(19): siRNA sense strand
cuacacauccacaccugaa

SEQ ID NO: 1562672 - RNA, 19 nt, Homo sapiens
  misc_RNA (1)...(19): siRNA sense strand
ccaggacaccuuugaagca

SEQ ID NO: 1562673 - RNA, 19 nt, Homo sapiens
  misc_RNA (1)...(19): siRNA sense strand
caggacaccuuugaagcau

SEQ ID NO: 1562674 - RNA, 19 nt, Homo sapiens
  misc_RNA (1)...(19): siRNA sense strand
gcucccaggacaccuuuga

SEQ ID NO: 1562675 - RNA, 19 nt, Homo sapiens
  misc_RNA (1)...(19): siRNA sense strand
gagcgacggcagacguuca

SEQ ID NO: 1562676 - RNA, 19 nt, Homo sapiens
  misc_RNA (1)...(19): siRNA sense strand
cgaugcugcugcgggagua

SEQ ID NO: 1562677 - RNA, 19 nt, Homo sapiens
  misc_RNA (1)...(19): siRNA sense strand
ccugcgcacucaucuguca

SEQ ID NO: 1562678 - RNA, 19 nt, Homo sapiens
  misc_RNA (1)...(19): siRNA sense strand
gaagucaagaaagggaaga

SEQ ID NO: 1562679 - RNA, 19 nt, Homo sapiens
  misc_RNA (1)...(19): siRNA sense strand
uuggagcaguuacaggauu

SEQ ID NO: 1562680 - RNA, 19 nt, Homo sapiens
  misc_RNA (1)...(19): siRNA sense strand
uggagaaagaggucaaguu

SEQ ID NO: 1562681 - RNA, 19 nt, Homo sapiens
  misc_RNA (1)...(19): siRNA sense strand
ggagaugacugaugacaug

SEQ ID NO: 1562682 - RNA, 19 nt, Homo sapiens
  misc_RNA (1)...(19): siRNA sense strand
caaauaagauggugucaca

SEQ ID NO: 1562683 - RNA, 19 nt, Homo sapiens
  misc_RNA (1)...(19): siRNA sense strand
ccacccagaugaugaauuu

SEQ ID NO: 1562684 - RNA, 19 nt, Homo sapiens
  misc_RNA (1)...(19): siRNA sense strand
gauaagaguggcuacauuu

SEQ ID NO: 1562685 - RNA, 19 nt, Homo sapiens
  misc_RNA (1)...(19): siRNA sense strand
aaacguauaucguauguuc

SEQ ID NO: 1562686 - RNA, 19 nt, Homo sapiens
  misc_RNA (1)...(19): siRNA sense strand
ggauaagaguggcuacauu

SEQ ID NO: 1562687 - RNA, 19 nt, Homo sapiens
  misc_RNA (1)...(19): siRNA sense strand
ugacauggauucauacaca

SEQ ID NO: 1562688 - RNA, 19 nt, Homo sapiens
  misc_RNA (1)...(19): siRNA sense strand
caaagucagugaaaguaga

SEQ ID NO: 1562689 - RNA, 19 nt, Homo sapiens
  misc_RNA (1)...(19): siRNA sense strand
gaagugaacacggaaggua

SEQ ID NO: 1562690 - RNA, 19 nt, Homo sapiens
  misc_RNA (1)...(19): siRNA sense strand
caacauggcacgagugaug

SEQ ID NO: 1562691 - RNA, 19 nt, Homo sapiens
  misc_RNA (1)...(19): siRNA sense strand
gugaaacucccaacuuuaa

SEQ ID NO: 1562692 - RNA, 19 nt, Homo sapiens
  misc_RNA (1)...(19): siRNA sense strand
gagaggagccugcauuaca

SEQ ID NO: 1562693 - RNA, 19 nt, Homo sapiens
  misc_RNA (1)...(19): siRNA sense strand
acacaaacguauaucguau

SEQ ID NO: 1562694 - RNA, 19 nt, Homo sapiens
  misc_RNA (1)...(19): siRNA sense strand
gaugaugaauuugaaagug

SEQ ID NO: 1562695 - RNA, 19 nt, Homo sapiens
  misc_RNA (1)...(19): siRNA sense strand
guuauuauccggccucaaa

SEQ ID NO: 1562696 - RNA, 19 nt, Homo sapiens
  misc_RNA (1)...(19): siRNA sense strand
ugaagacucccgcagauuu

SEQ ID NO: 1562697 - RNA, 19 nt, Homo sapiens
  misc_RNA (1)...(19): siRNA sense strand
cacagaaucuaguuccauu

SEQ ID NO: 1562698 - RNA, 19 nt, Homo sapiens
  misc_RNA (1)...(19): siRNA sense strand
caaacuguguucaaauaag

SEQ ID NO: 1562699 - RNA, 19 nt, Homo sapiens
  misc_RNA (1)...(19): siRNA sense strand
gaagacucccgcagauuug

SEQ ID NO: 1562700 - RNA, 19 nt, Homo sapiens
  misc_RNA (1)...(19): siRNA sense strand
auucugggcugguaaauga

SEQ ID NO: 1562701 - RNA, 19 nt, Homo sapiens
  misc_RNA (1)...(19): siRNA sense strand
ggaaacagagacuccaaau

SEQ ID NO: 1562702 - RNA, 19 nt, Homo sapiens
  misc_RNA (1)...(19): siRNA sense strand
uuacaucucuguguuggaa

SEQ ID NO: 1562703 - RNA, 19 nt, Homo sapiens
  misc_RNA (1)...(19): siRNA sense strand
gcucaaugccuccaguaaa

SEQ ID NO: 1562704 - RNA, 19 nt, Homo sapiens
  misc_RNA (1)...(19): siRNA sense strand
cagaguggcugaggauaau

SEQ ID NO: 1562705 - RNA, 19 nt, Homo sapiens
  misc_RNA (1)...(19): siRNA sense strand
gcaguuugguuucuuugag

SEQ ID NO: 1562706 - RNA, 19 nt, Homo sapiens
  misc_RNA (1)...(19): siRNA sense strand
uaucguauguucuccaaag

SEQ ID NO: 1562707 - RNA, 19 nt, Homo sapiens
  misc_RNA (1)...(19): siRNA sense strand
ccauggacccuucuuguga

SEQ ID NO: 1562708 - RNA, 19 nt, Homo sapiens
  misc_RNA (1)...(19): siRNA sense strand
ggaagcgagggaagaauga

SEQ ID NO: 1562709 - RNA, 19 nt, Homo sapiens
  misc_RNA (1)...(19): siRNA sense strand
acaaacguauaucguaugu

SEQ ID NO: 1562710 - RNA, 19 nt, Homo sapiens
  misc_RNA (1)...(19): siRNA sense strand
cauggacccuucuugugaa

SEQ ID NO: 1562711 - RNA, 19 nt, Homo sapiens
  misc_RNA (1)...(19): siRNA sense strand
ccagcuggaugucucuuau

SEQ ID NO: 1562712 - RNA, 19 nt, Homo sapiens
  misc_RNA (1)...(19): siRNA sense strand
uaagauggugucacaagaa

SEQ ID NO: 1562713 - RNA, 19 nt, Homo sapiens
  misc_RNA (1)...(19): siRNA sense strand
aaacagagacuccaaaucc

SEQ ID NO: 1562714 - RNA, 19 nt, Homo sapiens
  misc_RNA (1)...(19): siRNA sense strand
gaaacagagacuccaaauc

SEQ ID NO: 1562715 - RNA, 19 nt, Homo sapiens
  misc_RNA (1)...(19): siRNA sense strand
agcaggagaugacugauga

SEQ ID NO: 1562716 - RNA, 19 nt, Homo sapiens
  misc_RNA (1)...(19): siRNA sense strand
caucaagcgcugcauagaa

SEQ ID NO: 1562717 - RNA, 19 nt, Homo sapiens
  misc_RNA (1)...(19): siRNA sense strand
gacauggauucauacacaa

SEQ ID NO: 1562718 - RNA, 19 nt, Homo sapiens
  misc_RNA (1)...(19): siRNA sense strand
gaugacugaugacauggau

SEQ ID NO: 1562719 - RNA, 19 nt, Homo sapiens
  misc_RNA (1)...(19): siRNA sense strand
cacgagugauggugcgaua

SEQ ID NO: 1562720 - RNA, 19 nt, Homo sapiens
  misc_RNA (1)...(19): siRNA sense strand
gagccugcauuacaucaag

SEQ ID NO: 1562721 - RNA, 19 nt, Homo sapiens
  misc_RNA (1)...(19): siRNA sense strand
ggauucauacacaaacgua

SEQ ID NO: 1562722 - RNA, 19 nt, Homo sapiens
  misc_RNA (1)...(19): siRNA sense strand
cggaagauauucugaagcu

SEQ ID NO: 1562723 - RNA, 19 nt, Homo sapiens
  misc_RNA (1)...(19): siRNA sense strand
gagcacuccucuugguuac

SEQ ID NO: 1562724 - RNA, 19 nt, Homo sapiens
  misc_RNA (1)...(19): siRNA sense strand
acaagaaggaucugaagug

SEQ ID NO: 1562725 - RNA, 19 nt, Homo sapiens
  misc_RNA (1)...(19): siRNA sense strand
gauggugucacaagaagga

SEQ ID NO: 1562726 - RNA, 19 nt, Homo sapiens
  misc_RNA (1)...(19): siRNA sense strand
uucaaggucucaaggugua

SEQ ID NO: 1562727 - RNA, 19 nt, Homo sapiens
  misc_RNA (1)...(19): siRNA sense strand
gaaucuaguuccauuuuag

SEQ ID NO: 1562728 - RNA, 19 nt, Homo sapiens
  misc_RNA (1)...(19): siRNA sense strand
auaagauggugucacaaga

SEQ ID NO: 1562729 - RNA, 19 nt, Homo sapiens
  misc_RNA (1)...(19): siRNA sense strand
agacaggccacccagauga

SEQ ID NO: 1562730 - RNA, 19 nt, Homo sapiens
  misc_RNA (1)...(19): siRNA sense strand
gaaagugaaacucccaacu

SEQ ID NO: 1562731 - RNA, 19 nt, Homo sapiens
  misc_RNA (1)...(19): siRNA sense strand
gauggugcgauacaugaaa

SEQ ID NO: 1562732 - RNA, 19 nt, Homo sapiens
  misc_RNA (1)...(19): siRNA sense strand
agaggagccugcauuacau

SEQ ID NO: 1562733 - RNA, 19 nt, Homo sapiens
  misc_RNA (1)...(19): siRNA sense strand
ugacugaugacauggauuc

SEQ ID NO: 1562734 - RNA, 19 nt, Homo sapiens
  misc_RNA (1)...(19): siRNA sense strand
aaugaagacucccgcagau

SEQ ID NO: 1562735 - RNA, 19 nt, Homo sapiens
  misc_RNA (1)...(19): siRNA sense strand
aaguggagcuucuaguauc

SEQ ID NO: 1562736 - RNA, 19 nt, Homo sapiens
  misc_RNA (1)...(19): siRNA sense strand
uggaggugcugguggauuc

SEQ ID NO: 1562737 - RNA, 19 nt, Homo sapiens
  misc_RNA (1)...(19): siRNA sense strand
uuacaucaagcgcugcaua

SEQ ID NO: 1562738 - RNA, 19 nt, Homo sapiens
  misc_RNA (1)...(19): siRNA sense strand
gagacaggccacccagaug

SEQ ID NO: 1562739 - RNA, 19 nt, Homo sapiens
  misc_RNA (1)...(19): siRNA sense strand
uacacaaacguauaucgua

SEQ ID NO: 1562740 - RNA, 19 nt, Homo sapiens
  misc_RNA (1)...(19): siRNA sense strand
uauaucguauguucuccaa

SEQ ID NO: 1562741 - RNA, 19 nt, Homo sapiens
  misc_RNA (1)...(19): siRNA sense strand
ggacuugcuacccacagaa

SEQ ID NO: 1562742 - RNA, 19 nt, Homo sapiens
  misc_RNA (1)...(19): siRNA sense strand
gucagaagaauauuccauu

SEQ ID NO: 1562743 - RNA, 19 nt, Homo sapiens
  misc_RNA (1)...(19): siRNA sense strand
ccaaauccaaggucuucaa

SEQ ID NO: 1562744 - RNA, 19 nt, Homo sapiens
  misc_RNA (1)...(19): siRNA sense strand
cagugaaaguagagcauuc

SEQ ID NO: 1562745 - RNA, 19 nt, Homo sapiens
  misc_RNA (1)...(19): siRNA sense strand
gugauggugcgauacauga

SEQ ID NO: 1562746 - RNA, 19 nt, Homo sapiens
  misc_RNA (1)...(19): siRNA sense strand
cccagaugaugaauuugaa

SEQ ID NO: 1562747 - RNA, 19 nt, Homo sapiens
  misc_RNA (1)...(19): siRNA sense strand
cuuggaagcugggcugaga

SEQ ID NO: 1562748 - RNA, 19 nt, Homo sapiens
  misc_RNA (1)...(19): siRNA sense strand
agugaaacucccaacuuua

SEQ ID NO: 1562749 - RNA, 19 nt, Homo sapiens
  misc_RNA (1)...(19): siRNA sense strand
guucaaacuguguucaaau

SEQ ID NO: 1562750 - RNA, 19 nt, Homo sapiens
  misc_RNA (1)...(19): siRNA sense strand
gauauucugaagcucaaug

SEQ ID NO: 1562751 - RNA, 19 nt, Homo sapiens
  misc_RNA (1)...(19): siRNA sense strand
guaccugcaggauccaauu

SEQ ID NO: 1562752 - RNA, 19 nt, Homo sapiens
  misc_RNA (1)...(19): siRNA sense strand
aagauauucugaagcucaa

SEQ ID NO: 1562753 - RNA, 19 nt, Homo sapiens
  misc_RNA (1)...(19): siRNA sense strand
cuggaugucucuuauucug

SEQ ID NO: 1562754 - RNA, 19 nt, Homo sapiens
  misc_RNA (1)...(19): siRNA sense strand
ggcugaggauaauagaguu

SEQ ID NO: 1562755 - RNA, 19 nt, Homo sapiens
  misc_RNA (1)...(19): siRNA sense strand
uacggaagauauucugaag

SEQ ID NO: 1562756 - RNA, 19 nt, Homo sapiens
  misc_RNA (1)...(19): siRNA sense strand
gguguauggcucuguguau

SEQ ID NO: 1562757 - RNA, 19 nt, Homo sapiens
  misc_RNA (1)...(19): siRNA sense strand
ggcaacauggcacgaguga

SEQ ID NO: 1562758 - RNA, 19 nt, Homo sapiens
  misc_RNA (1)...(19): siRNA sense strand
aagauggugucacaagaag

SEQ ID NO: 1562759 - RNA, 19 nt, Homo sapiens
  misc_RNA (1)...(19): siRNA sense strand
ccagaugaugaauuugaaa

SEQ ID NO: 1562760 - RNA, 19 nt, Homo sapiens
  misc_RNA (1)...(19): siRNA sense strand
gcugaggauaauagaguuu

SEQ ID NO: 1562761 - RNA, 19 nt, Homo sapiens
  misc_RNA (1)...(19): siRNA sense strand
auugugagaucguaaacug

SEQ ID NO: 1562762 - RNA, 19 nt, Homo sapiens
  misc_RNA (1)...(19): siRNA sense strand
guguauggcucuguguauc

SEQ ID NO: 1562763 - RNA, 19 nt, Homo sapiens
  misc_RNA (1)...(19): siRNA sense strand
aucguaaacuggaaacaga

SEQ ID NO: 1562764 - RNA, 19 nt, Homo sapiens
  misc_RNA (1)...(19): siRNA sense strand
gaucguaaacuggaaacag

SEQ ID NO: 1562765 - RNA, 19 nt, Homo sapiens
  misc_RNA (1)...(19): siRNA sense strand
gugagaucguaaacuggaa

SEQ ID NO: 1562766 - RNA, 19 nt, Homo sapiens
  misc_RNA (1)...(19): siRNA sense strand
uuacggaagauauucugaa

SEQ ID NO: 1562767 - RNA, 19 nt, Homo sapiens
  misc_RNA (1)...(19): siRNA sense strand
ucacaagaaggaucugaag

SEQ ID NO: 1562768 - RNA, 19 nt, Homo sapiens
  misc_RNA (1)...(19): siRNA sense strand
ccgaaggacaggcaacaug

SEQ ID NO: 1562769 - RNA, 19 nt, Homo sapiens
  misc_RNA (1)...(19): siRNA sense strand
uaaccauggacccuucuug

SEQ ID NO: 1562770 - RNA, 19 nt, Homo sapiens
  misc_RNA (1)...(19): siRNA sense strand
ugagacaggccacccagau

SEQ ID NO: 1562771 - RNA, 19 nt, Homo sapiens
  misc_RNA (1)...(19): siRNA sense strand
ggauccaauuguguccauu

SEQ ID NO: 1562772 - RNA, 19 nt, Homo sapiens
  misc_RNA (1)...(19): siRNA sense strand
acagagacuccaaauccaa

SEQ ID NO: 1562773 - RNA, 19 nt, Homo sapiens
  misc_RNA (1)...(19): siRNA sense strand
aucaagcgcugcauagaag

SEQ ID NO: 1562774 - RNA, 19 nt, Homo sapiens
  misc_RNA (1)...(19): siRNA sense strand
cucaaugccuccaguaaaa

SEQ ID NO: 1562775 - RNA, 19 nt, Homo sapiens
  misc_RNA (1)...(19): siRNA sense strand
ucaaagucagugaaaguag

SEQ ID NO: 1562776 - RNA, 19 nt, Homo sapiens
  misc_RNA (1)...(19): siRNA sense strand
gaggauaauagaguuucuu

SEQ ID NO: 1562777 - RNA, 19 nt, Homo sapiens
  misc_RNA (1)...(19): siRNA sense strand
caaauccaaggucuucaag

SEQ ID NO: 1562778 - RNA, 19 nt, Homo sapiens
  misc_RNA (1)...(19): siRNA sense strand
augagaggagccugcauua

SEQ ID NO: 1562779 - RNA, 19 nt, Homo sapiens
  misc_RNA (1)...(19): siRNA sense strand
uaucagaugguuauuaucc

SEQ ID NO: 1562780 - RNA, 19 nt, Homo sapiens
  misc_RNA (1)...(19): siRNA sense strand
gggauaagaguggcuacau

SEQ ID NO: 1562781 - RNA, 19 nt, Homo sapiens
  misc_RNA (1)...(19): siRNA sense strand
caggacaucuuaacccuuu

SEQ ID NO: 1562782 - RNA, 19 nt, Homo sapiens
  misc_RNA (1)...(19): siRNA sense strand
ggugaucacugugcacuuu

SEQ ID NO: 1562783 - RNA, 19 nt, Homo sapiens
  misc_RNA (1)...(19): siRNA sense strand
ggaaacauuuagcccucua

SEQ ID NO: 1562784 - RNA, 19 nt, Homo sapiens
  misc_RNA (1)...(19): siRNA sense strand
caucuuaacccuuuaugaa

SEQ ID NO: 1562785 - RNA, 19 nt, Homo sapiens
  misc_RNA (1)...(19): siRNA sense strand
gcuguggccugugugaaua

SEQ ID NO: 1562786 - RNA, 19 nt, Homo sapiens
  misc_RNA (1)...(19): siRNA sense strand
gaaguccaggaaacauuua

SEQ ID NO: 1562787 - RNA, 19 nt, Homo sapiens
  misc_RNA (1)...(19): siRNA sense strand
gggcuaaacucuccaagcu

SEQ ID NO: 1562788 - RNA, 19 nt, Homo sapiens
  misc_RNA (1)...(19): siRNA sense strand
cagccacucugaacuuuau

SEQ ID NO: 1562789 - RNA, 19 nt, Homo sapiens
  misc_RNA (1)...(19): siRNA sense strand
aaacuaaucggcuaugguu

SEQ ID NO: 1562790 - RNA, 19 nt, Homo sapiens
  misc_RNA (1)...(19): siRNA sense strand
gagaaguccaggaaacauu

SEQ ID NO: 1562791 - RNA, 19 nt, Homo sapiens
  misc_RNA (1)...(19): siRNA sense strand
caucccggcuguucugauu

SEQ ID NO: 1562792 - RNA, 19 nt, Homo sapiens
  misc_RNA (1)...(19): siRNA sense strand
uaucacgccucucauguuc

SEQ ID NO: 1562793 - RNA, 19 nt, Homo sapiens
  misc_RNA (1)...(19): siRNA sense strand
ccacccggcucuucacguu

SEQ ID NO: 1562794 - RNA, 19 nt, Homo sapiens
  misc_RNA (1)...(19): siRNA sense strand
ccagagaaguccaggaaac

SEQ ID NO: 1562795 - RNA, 19 nt, Homo sapiens
  misc_RNA (1)...(19): siRNA sense strand
cccugaagcuccugcagua

SEQ ID NO: 1562796 - RNA, 19 nt, Homo sapiens
  misc_RNA (1)...(19): siRNA sense strand
ccacuggacccucuacaug

SEQ ID NO: 1562797 - RNA, 19 nt, Homo sapiens
  misc_RNA (1)...(19): siRNA sense strand
cgacuucgguggccuucug

SEQ ID NO: 1562798 - RNA, 19 nt, Homo sapiens
  misc_RNA (1)...(19): siRNA sense strand
gaugguggucuuugccuuu

SEQ ID NO: 1562799 - RNA, 19 nt, Homo sapiens
  misc_RNA (1)...(19): siRNA sense strand
ggacaucuuaacccuuuau

SEQ ID NO: 1562800 - RNA, 19 nt, Homo sapiens
  misc_RNA (1)...(19): siRNA sense strand
ugauagccaugacucucua

SEQ ID NO: 1562801 - RNA, 19 nt, Homo sapiens
  misc_RNA (1)...(19): siRNA sense strand
acauuuagcccucuacuca

SEQ ID NO: 1562802 - RNA, 19 nt, Homo sapiens
  misc_RNA (1)...(19): siRNA sense strand
gauccauuguccagcucua

SEQ ID NO: 1562803 - RNA, 19 nt, Homo sapiens
  misc_RNA (1)...(19): siRNA sense strand
agaaguccaggaaacauuu

SEQ ID NO: 1562804 - RNA, 19 nt, Homo sapiens
  misc_RNA (1)...(19): siRNA sense strand
cuuaacccuuuaugaacua

SEQ ID NO: 1562805 - RNA, 19 nt, Homo sapiens
  misc_RNA (1)...(19): siRNA sense strand
gagcuuggagcgacagugu

SEQ ID NO: 1562806 - RNA, 19 nt, Homo sapiens
  misc_RNA (1)...(19): siRNA sense strand
ccuucuggcugcuagcuuu

SEQ ID NO: 1562807 - RNA, 19 nt, Homo sapiens
  misc_RNA (1)...(19): siRNA sense strand
ugaauagccuggccaugcu

SEQ ID NO: 1562808 - RNA, 19 nt, Homo sapiens
  misc_RNA (1)...(19): siRNA sense strand
cgucaccaccgauccauug

SEQ ID NO: 1562809 - RNA, 19 nt, Homo sapiens
  misc_RNA (1)...(19): siRNA sense strand
cugcuuuggugagaccuua

SEQ ID NO: 1562810 - RNA, 19 nt, Homo sapiens
  misc_RNA (1)...(19): siRNA sense strand
ccucucauguucacaggau

SEQ ID NO: 1562811 - RNA, 19 nt, Homo sapiens
  misc_RNA (1)...(19): siRNA sense strand
acuggacccucuacaugaa

SEQ ID NO: 1562812 - RNA, 19 nt, Homo sapiens
  misc_RNA (1)...(19): siRNA sense strand
ugaagcuccugcaguacug

SEQ ID NO: 1562813 - RNA, 19 nt, Homo sapiens
  misc_RNA (1)...(19): siRNA sense strand
ugcugggacuccaaacuaa

SEQ ID NO: 1562814 - RNA, 19 nt, Homo sapiens
  misc_RNA (1)...(19): siRNA sense strand
gccuuggccuugcugauag

SEQ ID NO: 1562815 - RNA, 19 nt, Homo sapiens
  misc_RNA (1)...(19): siRNA sense strand
ccagccacucugaacuuua

SEQ ID NO: 1562816 - RNA, 19 nt, Homo sapiens
  misc_RNA (1)...(19): siRNA sense strand
ggucuuccuggccaacuuu

SEQ ID NO: 1562817 - RNA, 19 nt, Homo sapiens
  misc_RNA (1)...(19): siRNA sense strand
cacuggacccucuacauga

SEQ ID NO: 1562818 - RNA, 19 nt, Homo sapiens
  misc_RNA (1)...(19): siRNA sense strand
cccagccacucugaacuuu

SEQ ID NO: 1562819 - RNA, 19 nt, Homo sapiens
  misc_RNA (1)...(19): siRNA sense strand
gcagggugcucucuuuucu

SEQ ID NO: 1562820 - RNA, 19 nt, Homo sapiens
  misc_RNA (1)...(19): siRNA sense strand
cacaggauauggguugcuu

SEQ ID NO: 1562821 - RNA, 19 nt, Homo sapiens
  misc_RNA (1)...(19): siRNA sense strand
ccaaacuaaucggcuaugg

SEQ ID NO: 1562822 - RNA, 19 nt, Homo sapiens
  misc_RNA (1)...(19): siRNA sense strand
gugcugggucgcauccuuu

SEQ ID NO: 1562823 - RNA, 19 nt, Homo sapiens
  misc_RNA (1)...(19): siRNA sense strand
cugcugggacuccaaacua

SEQ ID NO: 1562824 - RNA, 19 nt, Homo sapiens
  misc_RNA (1)...(19): siRNA sense strand
caggaaguggagacccuua

SEQ ID NO: 1562825 - RNA, 19 nt, Homo sapiens
  misc_RNA (1)...(19): siRNA sense strand
ucuacucacuggccaucuu

SEQ ID NO: 1562826 - RNA, 19 nt, Homo sapiens
  misc_RNA (1)...(19): siRNA sense strand
ccggauggcccugcuagaa

SEQ ID NO: 1562827 - RNA, 19 nt, Homo sapiens
  misc_RNA (1)...(19): siRNA sense strand
ucuuaacccuuuaugaacu

SEQ ID NO: 1562828 - RNA, 19 nt, Homo sapiens
  misc_RNA (1)...(19): siRNA sense strand
gcucaucccggcuguucug

SEQ ID NO: 1562829 - RNA, 19 nt, Homo sapiens
  misc_RNA (1)...(19): siRNA sense strand
caaacuaaucggcuauggu

SEQ ID NO: 1562830 - RNA, 19 nt, Homo sapiens
  misc_RNA (1)...(19): siRNA sense strand
cagagaaguccaggaaaca

SEQ ID NO: 1562831 - RNA, 19 nt, Homo sapiens
  misc_RNA (1)...(19): siRNA sense strand
ccacucugaacuuuaugaa

SEQ ID NO: 1562832 - RNA, 19 nt, Homo sapiens
  misc_RNA (1)...(19): siRNA sense strand
gcuuucugcuuuggugaga

SEQ ID NO: 1562833 - RNA, 19 nt, Homo sapiens
  misc_RNA (1)...(19): siRNA sense strand
ugauugggaugcuggaaaa

SEQ ID NO: 1562834 - RNA, 19 nt, Homo sapiens
  misc_RNA (1)...(19): siRNA sense strand
caucuucaacucacucuac

SEQ ID NO: 1562835 - RNA, 19 nt, Homo sapiens
  misc_RNA (1)...(19): siRNA sense strand
ucaaagcgcucuccaagaa

SEQ ID NO: 1562836 - RNA, 19 nt, Homo sapiens
  misc_RNA (1)...(19): siRNA sense strand
ugagugaccucuccaagaa

SEQ ID NO: 1562837 - RNA, 19 nt, Homo sapiens
  misc_RNA (1)...(19): siRNA sense strand
agacggagguguacgauga

SEQ ID NO: 1562838 - RNA, 19 nt, Homo sapiens
  misc_RNA (1)...(19): siRNA sense strand
cggaagaaguucaaguuug

SEQ ID NO: 1562839 - RNA, 19 nt, Homo sapiens
  misc_RNA (1)...(19): siRNA sense strand
guacgaugaugucgacuuc

SEQ ID NO: 1562840 - RNA, 19 nt, Homo sapiens
  misc_RNA (1)...(19): siRNA sense strand
gagagggaguuccggaaga

SEQ ID NO: 1562841 - RNA, 19 nt, Homo sapiens
  misc_RNA (1)...(19): siRNA sense strand
ggagaaccaucaggacuuc

SEQ ID NO: 1562842 - RNA, 19 nt, Homo sapiens
  misc_RNA (1)...(19): siRNA sense strand
ugagugacuuucccaagaa

SEQ ID NO: 1562843 - RNA, 19 nt, Homo sapiens
  misc_RNA (1)...(19): siRNA sense strand
acacgaagaugaugaucga

SEQ ID NO: 1562844 - RNA, 19 nt, Homo sapiens
  misc_RNA (1)...(19): siRNA sense strand
ccaagaagccguccaaacu

SEQ ID NO: 1562845 - RNA, 19 nt, Homo sapiens
  misc_RNA (1)...(19): siRNA sense strand
uugaguaccuuucccaaga

SEQ ID NO: 1562846 - RNA, 19 nt, Homo sapiens
  misc_RNA (1)...(19): siRNA sense strand
gagcaucaaagcaaaguuc

SEQ ID NO: 1562847 - RNA, 19 nt, Homo sapiens
  misc_RNA (1)...(19): siRNA sense strand
ccucagagcccgaguucaa

SEQ ID NO: 1562848 - RNA, 19 nt, Homo sapiens
  misc_RNA (1)...(19): siRNA sense strand
ucacugaccuccccaagaa

SEQ ID NO: 1562849 - RNA, 19 nt, Homo sapiens
  misc_RNA (1)...(19): siRNA sense strand
ucacugaccuccccaagaa

SEQ ID NO: 1562850 - RNA, 19 nt, Homo sapiens
  misc_RNA (1)...(19): siRNA sense strand
ucacugaccuccccaagaa

SEQ ID NO: 1562851 - RNA, 19 nt, Homo sapiens
  misc_RNA (1)...(19): siRNA sense strand
gcucagcccuggguuugga

SEQ ID NO: 1562852 - RNA, 19 nt, Homo sapiens
  misc_RNA (1)...(19): siRNA sense strand
ugaguaccuuucccaagaa

SEQ ID NO: 1562853 - RNA, 19 nt, Homo sapiens
  misc_RNA (1)...(19): siRNA sense strand
ucggugaucucccucgaaa

SEQ ID NO: 1562854 - RNA, 19 nt, Homo sapiens
  misc_RNA (1)...(19): siRNA sense strand
cugagugacuuucccaaga

SEQ ID NO: 1562855 - RNA, 19 nt, Homo sapiens
  misc_RNA (1)...(19): siRNA sense strand
caagaagccguccaaacug

SEQ ID NO: 1562856 - RNA, 19 nt, Homo sapiens
  misc_RNA (1)...(19): siRNA sense strand
ggacuuccggagcaucaaa

SEQ ID NO: 1562857 - RNA, 19 nt, Homo sapiens
  misc_RNA (1)...(19): siRNA sense strand
gagaugaagcgcccucagu

SEQ ID NO: 1562858 - RNA, 19 nt, Homo sapiens
  misc_RNA (1)...(19): siRNA sense strand
gaugaagcgcccucaguuc

SEQ ID NO: 1562859 - RNA, 19 nt, Homo sapiens
  misc_RNA (1)...(19): siRNA sense strand
ucgguggccucccuaagaa

SEQ ID NO: 1562860 - RNA, 19 nt, Homo sapiens
  misc_RNA (1)...(19): siRNA sense strand
agagggaguuccggaagaa

SEQ ID NO: 1562861 - RNA, 19 nt, Homo sapiens
  misc_RNA (1)...(19): siRNA sense strand
gcaggucccagaugagauc

SEQ ID NO: 1562862 - RNA, 19 nt, Homo sapiens
  misc_RNA (1)...(19): siRNA sense strand
caaaguuccaggccucuca

SEQ ID NO: 1562863 - RNA, 19 nt, Homo sapiens
  misc_RNA (1)...(19): siRNA sense strand
ccaggaggccaccacaaga

SEQ ID NO: 1562864 - RNA, 19 nt, Homo sapiens
  misc_RNA (1)...(19): siRNA sense strand
gauguggaacccagagaug

SEQ ID NO: 1562865 - RNA, 19 nt, Homo sapiens
  misc_RNA (1)...(19): siRNA sense strand
agccugaguucaacgugua

SEQ ID NO: 1562866 - RNA, 19 nt, Homo sapiens
  misc_RNA (1)...(19): siRNA sense strand
gggagauccuggaggugau

SEQ ID NO: 1562867 - RNA, 19 nt, Homo sapiens
  misc_RNA (1)...(19): siRNA sense strand
ucccgcaggucccagauga

SEQ ID NO: 1562868 - RNA, 19 nt, Homo sapiens
  misc_RNA (1)...(19): siRNA sense strand
gccacuccguuuccaagga

SEQ ID NO: 1562869 - RNA, 19 nt, Homo sapiens
  misc_RNA (1)...(19): siRNA sense strand
gggaguuccggaagaaguu

SEQ ID NO: 1562870 - RNA, 19 nt, Homo sapiens
  misc_RNA (1)...(19): siRNA sense strand
cgagcuguaugacgaugug

SEQ ID NO: 1562871 - RNA, 19 nt, Homo sapiens
  misc_RNA (1)...(19): siRNA sense strand
ccggaagaaguucaaguuu

SEQ ID NO: 1562872 - RNA, 19 nt, Homo sapiens
  misc_RNA (1)...(19): siRNA sense strand
ggagguguacgaugauguc

SEQ ID NO: 1562873 - RNA, 19 nt, Homo sapiens
  misc_RNA (1)...(19): siRNA sense strand
caccagcaaugaggagaug

SEQ ID NO: 1562874 - RNA, 19 nt, Homo sapiens
  misc_RNA (1)...(19): siRNA sense strand
ccgacagccugaagacauc

SEQ ID NO: 1562875 - RNA, 19 nt, Homo sapiens
  misc_RNA (1)...(19): siRNA sense strand
cgaagccugaguuugguaa

SEQ ID NO: 1562876 - RNA, 19 nt, Homo sapiens
  misc_RNA (1)...(19): siRNA sense strand
agaugaagcgcccucaguu

SEQ ID NO: 1562877 - RNA, 19 nt, Homo sapiens
  misc_RNA (1)...(19): siRNA sense strand
ugaucgaguucaccagcaa

SEQ ID NO: 1562878 - RNA, 19 nt, Homo sapiens
  misc_RNA (1)...(19): siRNA sense strand
gugguucacacgaagauga

SEQ ID NO: 1562879 - RNA, 19 nt, Homo sapiens
  misc_RNA (1)...(19): siRNA sense strand
gaagccugaguuugguaaa

SEQ ID NO: 1562880 - RNA, 19 nt, Homo sapiens
  misc_RNA (1)...(19): siRNA sense strand
gcuguaugacgauguggaa

SEQ ID NO: 1562881 - RNA, 19 nt, Homo sapiens
  misc_RNA (1)...(19): siRNA sense strand
gagugacuuucccaagaag

SEQ ID NO: 1562882 - RNA, 19 nt, Homo sapiens
  misc_RNA (1)...(19): siRNA sense strand
gucgguggccucccuaaga

SEQ ID NO: 1562883 - RNA, 19 nt, Homo sapiens
  misc_RNA (1)...(19): siRNA sense strand
guucacacgaagaugauga

SEQ ID NO: 1562884 - RNA, 19 nt, Homo sapiens
  misc_RNA (1)...(19): siRNA sense strand
ucagcgugcuucccaagag

SEQ ID NO: 1562885 - RNA, 19 nt, Homo sapiens
  misc_RNA (1)...(19): siRNA sense strand
gaguaccuuucccaagaag

SEQ ID NO: 1562886 - RNA, 19 nt, Homo sapiens
  misc_RNA (1)...(19): siRNA sense strand
ugagaucuacgagcuguau

SEQ ID NO: 1562887 - RNA, 19 nt, Homo sapiens
  misc_RNA (1)...(19): siRNA sense strand
ggugaucucccucgaaagc

SEQ ID NO: 1562888 - RNA, 19 nt, Homo sapiens
  misc_RNA (1)...(19): siRNA sense strand
cuccagcgccuuucccaaa

SEQ ID NO: 1562889 - RNA, 19 nt, Homo sapiens
  misc_RNA (1)...(19): siRNA sense strand
acgaugaugucgacuucug

SEQ ID NO: 1562890 - RNA, 19 nt, Homo sapiens
  misc_RNA (1)...(19): siRNA sense strand
acccagcgcucaggaagga

SEQ ID NO: 1562891 - RNA, 19 nt, Homo sapiens
  misc_RNA (1)...(19): siRNA sense strand
ccguggauaugcagagcuu

SEQ ID NO: 1562892 - RNA, 19 nt, Homo sapiens
  misc_RNA (1)...(19): siRNA sense strand
guaaagagcuacuccaaag

SEQ ID NO: 1562893 - RNA, 19 nt, Homo sapiens
  misc_RNA (1)...(19): siRNA sense strand
ggcaggagcuguucucuuc

SEQ ID NO: 1562894 - RNA, 19 nt, Homo sapiens
  misc_RNA (1)...(19): siRNA sense strand
gcuguucucuucugcauug

SEQ ID NO: 1562895 - RNA, 19 nt, Homo sapiens
  misc_RNA (1)...(19): siRNA sense strand
uaacagugcucuggacaug

SEQ ID NO: 1562896 - RNA, 19 nt, Homo sapiens
  misc_RNA (1)...(19): siRNA sense strand
gguccuaccugcaccaguu

SEQ ID NO: 1562897 - RNA, 19 nt, Homo sapiens
  misc_RNA (1)...(19): siRNA sense strand
acagugcucuggacaugua

SEQ ID NO: 1562898 - RNA, 19 nt, Homo sapiens
  misc_RNA (1)...(19): siRNA sense strand
gaaacaaagauuccaguca

SEQ ID NO: 1562899 - RNA, 19 nt, Homo sapiens
  misc_RNA (1)...(19): siRNA sense strand
gagcuacuccaaagaagaa

SEQ ID NO: 1562900 - RNA, 19 nt, Homo sapiens
  misc_RNA (1)...(19): siRNA sense strand
cagcagaaguuuaaagaac

SEQ ID NO: 1562901 - RNA, 19 nt, Homo sapiens
  misc_RNA (1)...(19): siRNA sense strand
cacaugcuguccaguuuaa

SEQ ID NO: 1562902 - RNA, 19 nt, Homo sapiens
  misc_RNA (1)...(19): siRNA sense strand
gcagaaguuuaaagaacga

SEQ ID NO: 1562903 - RNA, 19 nt, Homo sapiens
  misc_RNA (1)...(19): siRNA sense strand
gggaguaugaggaugauuu

SEQ ID NO: 1562904 - RNA, 19 nt, Homo sapiens
  misc_RNA (1)...(19): siRNA sense strand
ggacuguacagccucaauu

SEQ ID NO: 1562905 - RNA, 19 nt, Homo sapiens
  misc_RNA (1)...(19): siRNA sense strand
ggacucaucucagguacag

SEQ ID NO: 1562906 - RNA, 19 nt, Homo sapiens
  misc_RNA (1)...(19): siRNA sense strand
cacacaugcuguccaguuu

SEQ ID NO: 1562907 - RNA, 19 nt, Homo sapiens
  misc_RNA (1)...(19): siRNA sense strand
ugaugucgguguuuguaaa

SEQ ID NO: 1562908 - RNA, 19 nt, Homo sapiens
  misc_RNA (1)...(19): siRNA sense strand
aaagagcuacuccaaagaa

SEQ ID NO: 1562909 - RNA, 19 nt, Homo sapiens
  misc_RNA (1)...(19): siRNA sense strand
ggagcucaguauucuggaa

SEQ ID NO: 1562910 - RNA, 19 nt, Homo sapiens
  misc_RNA (1)...(19): siRNA sense strand
gagcuguucucuucugcau

SEQ ID NO: 1562911 - RNA, 19 nt, Homo sapiens
  misc_RNA (1)...(19): siRNA sense strand
uaacagguggagcucagua

SEQ ID NO: 1562912 - RNA, 19 nt, Homo sapiens
  misc_RNA (1)...(19): siRNA sense strand
gaagguuggacucaucuca

SEQ ID NO: 1562913 - RNA, 19 nt, Homo sapiens
  misc_RNA (1)...(19): siRNA sense strand
gaugauuuccagauccaaa

SEQ ID NO: 1562914 - RNA, 19 nt, Homo sapiens
  misc_RNA (1)...(19): siRNA sense strand
acacccagccgguuacaaa

SEQ ID NO: 1562915 - RNA, 19 nt, Homo sapiens
  misc_RNA (1)...(19): siRNA sense strand
gacuguacagccucaauuu

SEQ ID NO: 1562916 - RNA, 19 nt, Homo sapiens
  misc_RNA (1)...(19): siRNA sense strand
gcuauggaguccgguccua

SEQ ID NO: 1562917 - RNA, 19 nt, Homo sapiens
  misc_RNA (1)...(19): siRNA sense strand
ggaguaugaggaugauuuc

SEQ ID NO: 1562918 - RNA, 19 nt, Homo sapiens
  misc_RNA (1)...(19): siRNA sense strand
acacaugcuguccaguuua

SEQ ID NO: 1562919 - RNA, 19 nt, Homo sapiens
  misc_RNA (1)...(19): siRNA sense strand
auccaaagaucaccuaaca

SEQ ID NO: 1562920 - RNA, 19 nt, Homo sapiens
  misc_RNA (1)...(19): siRNA sense strand
ugaggaugauuuccagauc

SEQ ID NO: 1562921 - RNA, 19 nt, Homo sapiens
  misc_RNA (1)...(19): siRNA sense strand
cagccucaauuugggagua

SEQ ID NO: 1562922 - RNA, 19 nt, Homo sapiens
  misc_RNA (1)...(19): siRNA sense strand
gaaguuuaaagaacgaauc

SEQ ID NO: 1562923 - RNA, 19 nt, Homo sapiens
  misc_RNA (1)...(19): siRNA sense strand
uaaagagcuacuccaaaga

SEQ ID NO: 1562924 - RNA, 19 nt, Homo sapiens
  misc_RNA (1)...(19): siRNA sense strand
gcugaugucgguguuugua

SEQ ID NO: 1562925 - RNA, 19 nt, Homo sapiens
  misc_RNA (1)...(19): siRNA sense strand
acacacaugcuguccaguu

SEQ ID NO: 1562926 - RNA, 19 nt, Homo sapiens
  misc_RNA (1)...(19): siRNA sense strand
caggagcuguucucuucug

SEQ ID NO: 1562927 - RNA, 19 nt, Homo sapiens
  misc_RNA (1)...(19): siRNA sense strand
guuggacucaucucaggua

SEQ ID NO: 1562928 - RNA, 19 nt, Homo sapiens
  misc_RNA (1)...(19): siRNA sense strand
uguaaagagcuacuccaaa

SEQ ID NO: 1562929 - RNA, 19 nt, Homo sapiens
  misc_RNA (1)...(19): siRNA sense strand
acgaaucgcagacaccaaa

SEQ ID NO: 1562930 - RNA, 19 nt, Homo sapiens
  misc_RNA (1)...(19): siRNA sense strand
ccagcagaaguuuaaagaa

SEQ ID NO: 1562931 - RNA, 19 nt, Homo sapiens
  misc_RNA (1)...(19): siRNA sense strand
cagguggagcucaguauuc

SEQ ID NO: 1562932 - RNA, 19 nt, Homo sapiens
  misc_RNA (1)...(19): siRNA sense strand
ggcagugggcuuucuugug

SEQ ID NO: 1562933 - RNA, 19 nt, Homo sapiens
  misc_RNA (1)...(19): siRNA sense strand
cugcugaugucgguguuug

SEQ ID NO: 1562934 - RNA, 19 nt, Homo sapiens
  misc_RNA (1)...(19): siRNA sense strand
ggaagaagaugaugaagac

SEQ ID NO: 1562935 - RNA, 19 nt, Homo sapiens
  misc_RNA (1)...(19): siRNA sense strand
gagggaaccuaccacugua

SEQ ID NO: 1562936 - RNA, 19 nt, Homo sapiens
  misc_RNA (1)...(19): siRNA sense strand
ggagggaaccuaccacugu

SEQ ID NO: 1562937 - RNA, 19 nt, Homo sapiens
  misc_RNA (1)...(19): siRNA sense strand
ccacugacgauccugaaua

SEQ ID NO: 1562938 - RNA, 19 nt, Homo sapiens
  misc_RNA (1)...(19): siRNA sense strand
cagaauacacucucucaga

SEQ ID NO: 1562939 - RNA, 19 nt, Homo sapiens
  misc_RNA (1)...(19): siRNA sense strand
ugacgauccugaauaugau

SEQ ID NO: 1562940 - RNA, 19 nt, Homo sapiens
  misc_RNA (1)...(19): siRNA sense strand
agaagaugaugaagaccuu

SEQ ID NO: 1562941 - RNA, 19 nt, Homo sapiens
  misc_RNA (1)...(19): siRNA sense strand
cacugacgauccugaauau

SEQ ID NO: 1562942 - RNA, 19 nt, Homo sapiens
  misc_RNA (1)...(19): siRNA sense strand
cugacgauccugaauauga

SEQ ID NO: 1562943 - RNA, 19 nt, Homo sapiens
  misc_RNA (1)...(19): siRNA sense strand
gggcuacgccagcuuggaa

SEQ ID NO: 1562944 - RNA, 19 nt, Homo sapiens
  misc_RNA (1)...(19): siRNA sense strand
gggaggaggaggaggaaga

SEQ ID NO: 1562945 - RNA, 19 nt, Homo sapiens
  misc_RNA (1)...(19): siRNA sense strand
ccgaagaggaagaagauga

SEQ ID NO: 1562946 - RNA, 19 nt, Homo sapiens
  misc_RNA (1)...(19): siRNA sense strand
ggagaccacugacgauccu

SEQ ID NO: 1562947 - RNA, 19 nt, Homo sapiens
  misc_RNA (1)...(19): siRNA sense strand
gaagaugaugaagaccuuu

SEQ ID NO: 1562948 - RNA, 19 nt, Homo sapiens
  misc_RNA (1)...(19): siRNA sense strand
ggacuccgaagaggaagaa

SEQ ID NO: 1562949 - RNA, 19 nt, Homo sapiens
  misc_RNA (1)...(19): siRNA sense strand
aggaagaggagaccacuga

SEQ ID NO: 1562950 - RNA, 19 nt, Homo sapiens
  misc_RNA (1)...(19): siRNA sense strand
uggaagaagaugaugaaga

SEQ ID NO: 1562951 - RNA, 19 nt, Homo sapiens
  misc_RNA (1)...(19): siRNA sense strand
gagcugcacgggcacuuca

SEQ ID NO: 1562952 - RNA, 19 nt, Homo sapiens
  misc_RNA (1)...(19): siRNA sense strand
aauaugauccuggcuacaa

SEQ ID NO: 1562953 - RNA, 19 nt, Homo sapiens
  misc_RNA (1)...(19): siRNA sense strand
cccgagcauuccucugauu

SEQ ID NO: 1562954 - RNA, 19 nt, Homo sapiens
  misc_RNA (1)...(19): siRNA sense strand
cgaagaggaagaagaugag

SEQ ID NO: 1562955 - RNA, 19 nt, Homo sapiens
  misc_RNA (1)...(19): siRNA sense strand
ggaggaagaggaggaacca

SEQ ID NO: 1562956 - RNA, 19 nt, Homo sapiens
  misc_RNA (1)...(19): siRNA sense strand
acagugagaugcaaaguaa

SEQ ID NO: 1562957 - RNA, 19 nt, Homo sapiens
  misc_RNA (1)...(19): siRNA sense strand
gaucgaaucucgccugcuu

SEQ ID NO: 1562958 - RNA, 19 nt, Homo sapiens
  misc_RNA (1)...(19): siRNA sense strand
ccaugaagcuuacaucguu

SEQ ID NO: 1562959 - RNA, 19 nt, Homo sapiens
  misc_RNA (1)...(19): siRNA sense strand
cggaugaacucaauacuau

SEQ ID NO: 1562960 - RNA, 19 nt, Homo sapiens
  misc_RNA (1)...(19): siRNA sense strand
gcacgaaggcuaaccauuc

SEQ ID NO: 1562961 - RNA, 19 nt, Homo sapiens
  misc_RNA (1)...(19): siRNA sense strand
caucguuucuagaccauua

SEQ ID NO: 1562962 - RNA, 19 nt, Homo sapiens
  misc_RNA (1)...(19): siRNA sense strand
ggaaauugcacugaugaaa

SEQ ID NO: 1562963 - RNA, 19 nt, Homo sapiens
  misc_RNA (1)...(19): siRNA sense strand
ccgaugaccuucuugauca

SEQ ID NO: 1562964 - RNA, 19 nt, Homo sapiens
  misc_RNA (1)...(19): siRNA sense strand
gcugugguguggaucauuu

SEQ ID NO: 1562965 - RNA, 19 nt, Homo sapiens
  misc_RNA (1)...(19): siRNA sense strand
ccacuagacuauuuagcaa

SEQ ID NO: 1562966 - RNA, 19 nt, Homo sapiens
  misc_RNA (1)...(19): siRNA sense strand
gcucugaacaccuuuggua

SEQ ID NO: 1562967 - RNA, 19 nt, Homo sapiens
  misc_RNA (1)...(19): siRNA sense strand
gcaaugcaguagugauauc

SEQ ID NO: 1562968 - RNA, 19 nt, Homo sapiens
  misc_RNA (1)...(19): siRNA sense strand
gaagagcagcaccaucauu

SEQ ID NO: 1562969 - RNA, 19 nt, Homo sapiens
  misc_RNA (1)...(19): siRNA sense strand
caaacugacagcugccuua

SEQ ID NO: 1562970 - RNA, 19 nt, Homo sapiens
  misc_RNA (1)...(19): siRNA sense strand
cuaccucccuguuauuuau

SEQ ID NO: 1562971 - RNA, 19 nt, Homo sapiens
  misc_RNA (1)...(19): siRNA sense strand
gaaccuggccugcacagau

SEQ ID NO: 1562972 - RNA, 19 nt, Homo sapiens
  misc_RNA (1)...(19): siRNA sense strand
gaaaacaucccacucaaga

SEQ ID NO: 1562973 - RNA, 19 nt, Homo sapiens
  misc_RNA (1)...(19): siRNA sense strand
caacaggaccaacagauca

SEQ ID NO: 1562974 - RNA, 19 nt, Homo sapiens
  misc_RNA (1)...(19): siRNA sense strand
aagagcagcaccaucauua

SEQ ID NO: 1562975 - RNA, 19 nt, Homo sapiens
  misc_RNA (1)...(19): siRNA sense strand
gagcagcaccaucauuaug

SEQ ID NO: 1562976 - RNA, 19 nt, Homo sapiens
  misc_RNA (1)...(19): siRNA sense strand
gaaugagccacuagacuau

SEQ ID NO: 1562977 - RNA, 19 nt, Homo sapiens
  misc_RNA (1)...(19): siRNA sense strand
guggaucauuucauuggua

SEQ ID NO: 1562978 - RNA, 19 nt, Homo sapiens
  misc_RNA (1)...(19): siRNA sense strand
gagauuucauguguaaguu

SEQ ID NO: 1562979 - RNA, 19 nt, Homo sapiens
  misc_RNA (1)...(19): siRNA sense strand
gaaaaucaguuacucaaac

SEQ ID NO: 1562980 - RNA, 19 nt, Homo sapiens
  misc_RNA (1)...(19): siRNA sense strand
gcacuaccucccuguuauu

SEQ ID NO: 1562981 - RNA, 19 nt, Homo sapiens
  misc_RNA (1)...(19): siRNA sense strand
gaaauugcacugaugaaaa

SEQ ID NO: 1562982 - RNA, 19 nt, Homo sapiens
  misc_RNA (1)...(19): siRNA sense strand
aagcuuacaucguuucuag

SEQ ID NO: 1562983 - RNA, 19 nt, Homo sapiens
  misc_RNA (1)...(19): siRNA sense strand
gcaccaucauuaugcugaa

SEQ ID NO: 1562984 - RNA, 19 nt, Homo sapiens
  misc_RNA (1)...(19): siRNA sense strand
gaaucucgccugcuuucaa

SEQ ID NO: 1562985 - RNA, 19 nt, Homo sapiens
  misc_RNA (1)...(19): siRNA sense strand
guuguuccauugagaauca

SEQ ID NO: 1562986 - RNA, 19 nt, Homo sapiens
  misc_RNA (1)...(19): siRNA sense strand
uuggagauuucauguguaa

SEQ ID NO: 1562987 - RNA, 19 nt, Homo sapiens
  misc_RNA (1)...(19): siRNA sense strand
cccauggacugcaaacuga

SEQ ID NO: 1562988 - RNA, 19 nt, Homo sapiens
  misc_RNA (1)...(19): siRNA sense strand
gcuacugugugaucauuca

SEQ ID NO: 1562989 - RNA, 19 nt, Homo sapiens
  misc_RNA (1)...(19): siRNA sense strand
ggagauuucauguguaagu

SEQ ID NO: 1562990 - RNA, 19 nt, Homo sapiens
  misc_RNA (1)...(19): siRNA sense strand
cagaaagcacgaaggcuaa

SEQ ID NO: 1562991 - RNA, 19 nt, Homo sapiens
  misc_RNA (1)...(19): siRNA sense strand
uagcugcucugaacaccuu

SEQ ID NO: 1562992 - RNA, 19 nt, Homo sapiens
  misc_RNA (1)...(19): siRNA sense strand
cuucugaucuccccgauua

SEQ ID NO: 1562993 - RNA, 19 nt, Homo sapiens
  misc_RNA (1)...(19): siRNA sense strand
uaagugguacaaccuaauu

SEQ ID NO: 1562994 - RNA, 19 nt, Homo sapiens
  misc_RNA (1)...(19): siRNA sense strand
ccuguuauuuauggcauua

SEQ ID NO: 1562995 - RNA, 19 nt, Homo sapiens
  misc_RNA (1)...(19): siRNA sense strand
caugaagcuuacaucguuu

SEQ ID NO: 1562996 - RNA, 19 nt, Homo sapiens
  misc_RNA (1)...(19): siRNA sense strand
gauauccacuuacauuuuc

SEQ ID NO: 1562997 - RNA, 19 nt, Homo sapiens
  misc_RNA (1)...(19): siRNA sense strand
uggaagagcagcaccauca

SEQ ID NO: 1562998 - RNA, 19 nt, Homo sapiens
  misc_RNA (1)...(19): siRNA sense strand
gguggucagcgacaacuuu

SEQ ID NO: 1562999 - RNA, 19 nt, Homo sapiens
  misc_RNA (1)...(19): siRNA sense strand
gugauauccacuuacauuu

SEQ ID NO: 1563000 - RNA, 19 nt, Homo sapiens
  misc_RNA (1)...(19): siRNA sense strand
ucagauccaugaagcuuac

SEQ ID NO: 1563001 - RNA, 19 nt, Homo sapiens
  misc_RNA (1)...(19): siRNA sense strand
ggcgaaaacuggaucuuug

SEQ ID NO: 1563002 - RNA, 19 nt, Homo sapiens
  misc_RNA (1)...(19): siRNA sense strand
caaaguaagcgggaaccuu

SEQ ID NO: 1563003 - RNA, 19 nt, Homo sapiens
  misc_RNA (1)...(19): siRNA sense strand
gagaaucagauccaugaag

SEQ ID NO: 1563004 - RNA, 19 nt, Homo sapiens
  misc_RNA (1)...(19): siRNA sense strand
ugguguggaucauuucauu

SEQ ID NO: 1563005 - RNA, 19 nt, Homo sapiens
  misc_RNA (1)...(19): siRNA sense strand
ccaaugagcugcuuuucca

SEQ ID NO: 1563006 - RNA, 19 nt, Homo sapiens
  misc_RNA (1)...(19): siRNA sense strand
aggcaaugcaguagugaua

SEQ ID NO: 1563007 - RNA, 19 nt, Homo sapiens
  misc_RNA (1)...(19): siRNA sense strand
aaucucgccugcuuucaau

SEQ ID NO: 1563008 - RNA, 19 nt, Homo sapiens
  misc_RNA (1)...(19): siRNA sense strand
cacgaaggcuaaccauucu

SEQ ID NO: 1563009 - RNA, 19 nt, Homo sapiens
  misc_RNA (1)...(19): siRNA sense strand
ccacgauuauccacacucu

SEQ ID NO: 1563010 - RNA, 19 nt, Homo sapiens
  misc_RNA (1)...(19): siRNA sense strand
cuuuggagauuucaugugu

SEQ ID NO: 1563011 - RNA, 19 nt, Homo sapiens
  misc_RNA (1)...(19): siRNA sense strand
ccgcuacugugugaucauu

SEQ ID NO: 1563012 - RNA, 19 nt, Homo sapiens
  misc_RNA (1)...(19): siRNA sense strand
augagccacuagacuauuu

SEQ ID NO: 1563013 - RNA, 19 nt, Homo sapiens
  misc_RNA (1)...(19): siRNA sense strand
cgcuucagcuuccauuuca

SEQ ID NO: 1563014 - RNA, 19 nt, Homo sapiens
  misc_RNA (1)...(19): siRNA sense strand
accauuagcugcucugaac

SEQ ID NO: 1563015 - RNA, 19 nt, Homo sapiens
  misc_RNA (1)...(19): siRNA sense strand
acgauuauccacacucuga

SEQ ID NO: 1563016 - RNA, 19 nt, Homo sapiens
  misc_RNA (1)...(19): siRNA sense strand
ucggaugaacucaauacua

SEQ ID NO: 1563017 - RNA, 19 nt, Homo sapiens
  misc_RNA (1)...(19): siRNA sense strand
gccacuagacuauuuagca

SEQ ID NO: 1563018 - RNA, 19 nt, Homo sapiens
  misc_RNA (1)...(19): siRNA sense strand
ugcacuaccucccuguuau

SEQ ID NO: 1563019 - RNA, 19 nt, Homo sapiens
  misc_RNA (1)...(19): siRNA sense strand
uucaaucaguuguuccauu

SEQ ID NO: 1563020 - RNA, 19 nt, Homo sapiens
  misc_RNA (1)...(19): siRNA sense strand
gaagcuuacaucguuucua

SEQ ID NO: 1563021 - RNA, 19 nt, Homo sapiens
  misc_RNA (1)...(19): siRNA sense strand
uugagaaucagauccauga

SEQ ID NO: 1563022 - RNA, 19 nt, Homo sapiens
  misc_RNA (1)...(19): siRNA sense strand
ccaacaggaccaacagauc

SEQ ID NO: 1563023 - RNA, 19 nt, Homo sapiens
  misc_RNA (1)...(19): siRNA sense strand
auuaagugguacaaccuaa

SEQ ID NO: 1563024 - RNA, 19 nt, Homo sapiens
  misc_RNA (1)...(19): siRNA sense strand
ccgauuaugcagcugcuuu

SEQ ID NO: 1563025 - RNA, 19 nt, Homo sapiens
  misc_RNA (1)...(19): siRNA sense strand
caaagaaaaucaguuacuc

SEQ ID NO: 1563026 - RNA, 19 nt, Homo sapiens
  misc_RNA (1)...(19): siRNA sense strand
ggaagagcagcaccaucau

SEQ ID NO: 1563027 - RNA, 19 nt, Homo sapiens
  misc_RNA (1)...(19): siRNA sense strand
ugagccacuagacuauuua

SEQ ID NO: 1563028 - RNA, 19 nt, Homo sapiens
  misc_RNA (1)...(19): siRNA sense strand
gcuuccauuucaaccugua

SEQ ID NO: 1563029 - RNA, 19 nt, Homo sapiens
  misc_RNA (1)...(19): siRNA sense strand
gaccauuagcugcucugaa

SEQ ID NO: 1563030 - RNA, 19 nt, Homo sapiens
  misc_RNA (1)...(19): siRNA sense strand
aaccuggccugcacagauc

SEQ ID NO: 1563031 - RNA, 19 nt, Homo sapiens
  misc_RNA (1)...(19): siRNA sense strand
guauagcagcauccucuuc

SEQ ID NO: 1563032 - RNA, 19 nt, Homo sapiens
  misc_RNA (1)...(19): siRNA sense strand
cagcaucuuccgcuacugu

SEQ ID NO: 1563033 - RNA, 19 nt, Homo sapiens
  misc_RNA (1)...(19): siRNA sense strand
gcaaagaaaaucaguuacu

SEQ ID NO: 1563034 - RNA, 19 nt, Homo sapiens
  misc_RNA (1)...(19): siRNA sense strand
ucaguuguuccauugagaa

SEQ ID NO: 1563035 - RNA, 19 nt, Homo sapiens
  misc_RNA (1)...(19): siRNA sense strand
uuauacagcucgcuccuaa

SEQ ID NO: 1563036 - RNA, 19 nt, Homo sapiens
  misc_RNA (1)...(19): siRNA sense strand
gcagucccguuggaaauga

SEQ ID NO: 1563037 - RNA, 19 nt, Homo sapiens
  misc_RNA (1)...(19): siRNA sense strand
guggucauguucauugauu

SEQ ID NO: 1563038 - RNA, 19 nt, Homo sapiens
  misc_RNA (1)...(19): siRNA sense strand
gcuguggucauguucauug

SEQ ID NO: 1563039 - RNA, 19 nt, Homo sapiens
  misc_RNA (1)...(19): siRNA sense strand
gagggcagccuucuuugca

SEQ ID NO: 1563040 - RNA, 19 nt, Homo sapiens
  misc_RNA (1)...(19): siRNA sense strand
caccugggcuguggucaug

SEQ ID NO: 1563041 - RNA, 19 nt, Homo sapiens
  misc_RNA (1)...(19): siRNA sense strand
gcuccuaaagcuccuguug

SEQ ID NO: 1563042 - RNA, 19 nt, Homo sapiens
  misc_RNA (1)...(19): siRNA sense strand
gggcuguggucauguucau

SEQ ID NO: 1563043 - RNA, 19 nt, Homo sapiens
  misc_RNA (1)...(19): siRNA sense strand
gggcugcuggugacgagua

SEQ ID NO: 1563044 - RNA, 19 nt, Homo sapiens
  misc_RNA (1)...(19): siRNA sense strand
acugagggcagccuucuuu

SEQ ID NO: 1563045 - RNA, 19 nt, Homo sapiens
  misc_RNA (1)...(19): siRNA sense strand
ggcuggcacucauccauag

SEQ ID NO: 1563046 - RNA, 19 nt, Homo sapiens
  misc_RNA (1)...(19): siRNA sense strand
gggccaugcacaucacuga

SEQ ID NO: 1563047 - RNA, 19 nt, Homo sapiens
  misc_RNA (1)...(19): siRNA sense strand
ccugggcuguggucauguu

SEQ ID NO: 1563048 - RNA, 19 nt, Homo sapiens
  misc_RNA (1)...(19): siRNA sense strand
caccaucccugugcagucu

SEQ ID NO: 1563049 - RNA, 19 nt, Homo sapiens
  misc_RNA (1)...(19): siRNA sense strand
auacagcucgcuccuaaag

SEQ ID NO: 1563050 - RNA, 19 nt, Homo sapiens
  misc_RNA (1)...(19): siRNA sense strand
ccuguugaccugugugaga

SEQ ID NO: 1563051 - RNA, 19 nt, Homo sapiens
  misc_RNA (1)...(19): siRNA sense strand
uggcuggcacucauccaua

SEQ ID NO: 1563052 - RNA, 19 nt, Homo sapiens
  misc_RNA (1)...(19): siRNA sense strand
caacugcaauuuccaagaa

SEQ ID NO: 1563053 - RNA, 19 nt, Homo sapiens
  misc_RNA (1)...(19): siRNA sense strand
gcugauauauuucauaguc

SEQ ID NO: 1563054 - RNA, 19 nt, Homo sapiens
  misc_RNA (1)...(19): siRNA sense strand
gcgcugucguguauuauuu

SEQ ID NO: 1563055 - RNA, 19 nt, Homo sapiens
  misc_RNA (1)...(19): siRNA sense strand
agaaggagcuggagcagau

SEQ ID NO: 1563056 - RNA, 19 nt, Homo sapiens
  misc_RNA (1)...(19): siRNA sense strand
ucucauugcuguuauucua

SEQ ID NO: 1563057 - RNA, 19 nt, Homo sapiens
  misc_RNA (1)...(19): siRNA sense strand
guaauucucccgcugauau

SEQ ID NO: 1563058 - RNA, 19 nt, Homo sapiens
  misc_RNA (1)...(19): siRNA sense strand
caucugaagucaacauugu

SEQ ID NO: 1563059 - RNA, 19 nt, Homo sapiens
  misc_RNA (1)...(19): siRNA sense strand
ccacaauccuugacaacga

SEQ ID NO: 1563060 - RNA, 19 nt, Homo sapiens
  misc_RNA (1)...(19): siRNA sense strand
caauggaggcuuugcagua

SEQ ID NO: 1563061 - RNA, 19 nt, Homo sapiens
  misc_RNA (1)...(19): siRNA sense strand
gaacacagcaaccucucaa

SEQ ID NO: 1563062 - RNA, 19 nt, Homo sapiens
  misc_RNA (1)...(19): siRNA sense strand
ggaagaucauagaaguuga

SEQ ID NO: 1563063 - RNA, 19 nt, Homo sapiens
  misc_RNA (1)...(19): siRNA sense strand
acaagaggaucacucgauu

SEQ ID NO: 1563064 - RNA, 19 nt, Homo sapiens
  misc_RNA (1)...(19): siRNA sense strand
ccagaaagugggugaaauu

SEQ ID NO: 1563065 - RNA, 19 nt, Homo sapiens
  misc_RNA (1)...(19): siRNA sense strand
guugaagacugggaaauau

SEQ ID NO: 1563066 - RNA, 19 nt, Homo sapiens
  misc_RNA (1)...(19): siRNA sense strand
cagaucaucauguguuaua

SEQ ID NO: 1563067 - RNA, 19 nt, Homo sapiens
  misc_RNA (1)...(19): siRNA sense strand
gaucucaucaggaauaugu

SEQ ID NO: 1563068 - RNA, 19 nt, Homo sapiens
  misc_RNA (1)...(19): siRNA sense strand
caugaucucuuccaguuca

SEQ ID NO: 1563069 - RNA, 19 nt, Homo sapiens
  misc_RNA (1)...(19): siRNA sense strand
gaugucacccugaucauug

SEQ ID NO: 1563070 - RNA, 19 nt, Homo sapiens
  misc_RNA (1)...(19): siRNA sense strand
gaagaucauagaaguugaa

SEQ ID NO: 1563071 - RNA, 19 nt, Homo sapiens
  misc_RNA (1)...(19): siRNA sense strand
aaacuaagcgugaagaagu

SEQ ID NO: 1563072 - RNA, 19 nt, Homo sapiens
  misc_RNA (1)...(19): siRNA sense strand
gggcagaucaucaccauca

SEQ ID NO: 1563073 - RNA, 19 nt, Homo sapiens
  misc_RNA (1)...(19): siRNA sense strand
gggaagaucauagaaguug

SEQ ID NO: 1563074 - RNA, 19 nt, Homo sapiens
  misc_RNA (1)...(19): siRNA sense strand
ggacaaauucugguggauu

SEQ ID NO: 1563075 - RNA, 19 nt, Homo sapiens
  misc_RNA (1)...(19): siRNA sense strand
uguuagaucucaucaggaa

SEQ ID NO: 1563076 - RNA, 19 nt, Homo sapiens
  misc_RNA (1)...(19): siRNA sense strand
gaagucuuaugucaaugga

SEQ ID NO: 1563077 - RNA, 19 nt, Homo sapiens
  misc_RNA (1)...(19): siRNA sense strand
gaccuggacuugggcauug

SEQ ID NO: 1563078 - RNA, 19 nt, Homo sapiens
  misc_RNA (1)...(19): siRNA sense strand
gaucauagaaguugaagac

SEQ ID NO: 1563079 - RNA, 19 nt, Homo sapiens
  misc_RNA (1)...(19): siRNA sense strand
ccugacagcucucaugauc

SEQ ID NO: 1563080 - RNA, 19 nt, Homo sapiens
  misc_RNA (1)...(19): siRNA sense strand
uuagaucucaucaggaaua

SEQ ID NO: 1563081 - RNA, 19 nt, Homo sapiens
  misc_RNA (1)...(19): siRNA sense strand
gugcaacaaucaacaugga

SEQ ID NO: 1563082 - RNA, 19 nt, Homo sapiens
  misc_RNA (1)...(19): siRNA sense strand
ugacagcucucaugaucuc

SEQ ID NO: 1563083 - RNA, 19 nt, Homo sapiens
  misc_RNA (1)...(19): siRNA sense strand
gagaugaacaugacagaag

SEQ ID NO: 1563084 - RNA, 19 nt, Homo sapiens
  misc_RNA (1)...(19): siRNA sense strand
guauucagauggcauaaac

SEQ ID NO: 1563085 - RNA, 19 nt, Homo sapiens
  misc_RNA (1)...(19): siRNA sense strand
gaucacucgauucguguua

SEQ ID NO: 1563086 - RNA, 19 nt, Homo sapiens
  misc_RNA (1)...(19): siRNA sense strand
ggacgggcauuguggaaaa

SEQ ID NO: 1563087 - RNA, 19 nt, Homo sapiens
  misc_RNA (1)...(19): siRNA sense strand
ugacugggcuugcaaucca

SEQ ID NO: 1563088 - RNA, 19 nt, Homo sapiens
  misc_RNA (1)...(19): siRNA sense strand
gaagaauaacuggguguug

SEQ ID NO: 1563089 - RNA, 19 nt, Homo sapiens
  misc_RNA (1)...(19): siRNA sense strand
gaauauguucccugagaau

SEQ ID NO: 1563090 - RNA, 19 nt, Homo sapiens
  misc_RNA (1)...(19): siRNA sense strand
cagaucaucaccaucagua

SEQ ID NO: 1563091 - RNA, 19 nt, Homo sapiens
  misc_RNA (1)...(19): siRNA sense strand
agaugaacaugacagaaga

SEQ ID NO: 1563092 - RNA, 19 nt, Homo sapiens
  misc_RNA (1)...(19): siRNA sense strand
guucagaucaucauguguu

SEQ ID NO: 1563093 - RNA, 19 nt, Homo sapiens
  misc_RNA (1)...(19): siRNA sense strand
gaaaaucguucagaucauc

SEQ ID NO: 1563094 - RNA, 19 nt, Homo sapiens
  misc_RNA (1)...(19): siRNA sense strand
caaaauuguuggcauguau

SEQ ID NO: 1563095 - RNA, 19 nt, Homo sapiens
  misc_RNA (1)...(19): siRNA sense strand
gaucaucauguguuauaug

SEQ ID NO: 1563096 - RNA, 19 nt, Homo sapiens
  misc_RNA (1)...(19): siRNA sense strand
ggaaaggaugcgaguggaa

SEQ ID NO: 1563097 - RNA, 19 nt, Homo sapiens
  misc_RNA (1)...(19): siRNA sense strand
caacacugccugucaccuu

SEQ ID NO: 1563098 - RNA, 19 nt, Homo sapiens
  misc_RNA (1)...(19): siRNA sense strand
cucaugaucucuuccaguu

SEQ ID NO: 1563099 - RNA, 19 nt, Homo sapiens
  misc_RNA (1)...(19): siRNA sense strand
ccgcugauauauuucauag

SEQ ID NO: 1563100 - RNA, 19 nt, Homo sapiens
  misc_RNA (1)...(19): siRNA sense strand
guggauuucuucaaugcuu

SEQ ID NO: 1563101 - RNA, 19 nt, Homo sapiens
  misc_RNA (1)...(19): siRNA sense strand
gaggaugucacccugauca

SEQ ID NO: 1563102 - RNA, 19 nt, Homo sapiens
  misc_RNA (1)...(19): siRNA sense strand
gaucaucaccaucaguauc

SEQ ID NO: 1563103 - RNA, 19 nt, Homo sapiens
  misc_RNA (1)...(19): siRNA sense strand
gacaagaggaucacucgau

SEQ ID NO: 1563104 - RNA, 19 nt, Homo sapiens
  misc_RNA (1)...(19): siRNA sense strand
gaagucaacauugugaauc

SEQ ID NO: 1563105 - RNA, 19 nt, Homo sapiens
  misc_RNA (1)...(19): siRNA sense strand
cacaauccuugacaacgaa

SEQ ID NO: 1563106 - RNA, 19 nt, Homo sapiens
  misc_RNA (1)...(19): siRNA sense strand
gaaguugaagacugggaaa

SEQ ID NO: 1563107 - RNA, 19 nt, Homo sapiens
  misc_RNA (1)...(19): siRNA sense strand
ugucguguauuauuucugu

SEQ ID NO: 1563108 - RNA, 19 nt, Homo sapiens
  misc_RNA (1)...(19): siRNA sense strand
ggaugucacccugaucauu

SEQ ID NO: 1563109 - RNA, 19 nt, Homo sapiens
  misc_RNA (1)...(19): siRNA sense strand
guccugggcuugauugucu

SEQ ID NO: 1563110 - RNA, 19 nt, Homo sapiens
  misc_RNA (1)...(19): siRNA sense strand
caacauugugaaucccuuu

SEQ ID NO: 1563111 - RNA, 19 nt, Homo sapiens
  misc_RNA (1)...(19): siRNA sense strand
guacaaaacuaagcgugaa

SEQ ID NO: 1563112 - RNA, 19 nt, Homo sapiens
  misc_RNA (1)...(19): siRNA sense strand
gauccagagaugaacauga

SEQ ID NO: 1563113 - RNA, 19 nt, Homo sapiens
  misc_RNA (1)...(19): siRNA sense strand
gguguuuauugcacaguug

SEQ ID NO: 1563114 - RNA, 19 nt, Homo sapiens
  misc_RNA (1)...(19): siRNA sense strand
ugaagacugggaaauauuc

SEQ ID NO: 1563115 - RNA, 19 nt, Homo sapiens
  misc_RNA (1)...(19): siRNA sense strand
acagcaaccucucaacucu

SEQ ID NO: 1563116 - RNA, 19 nt, Homo sapiens
  misc_RNA (1)...(19): siRNA sense strand
uauaugccacuagguauuu

SEQ ID NO: 1563117 - RNA, 19 nt, Homo sapiens
  misc_RNA (1)...(19): siRNA sense strand
ucugguggauuucuucaau

SEQ ID NO: 1563118 - RNA, 19 nt, Homo sapiens
  misc_RNA (1)...(19): siRNA sense strand
caugacaacugcaauuucc

SEQ ID NO: 1563119 - RNA, 19 nt, Homo sapiens
  misc_RNA (1)...(19): siRNA sense strand
ccacucucauugcuguuau

SEQ ID NO: 1563120 - RNA, 19 nt, Homo sapiens
  misc_RNA (1)...(19): siRNA sense strand
uuaugucaauggaggcuuu

SEQ ID NO: 1563121 - RNA, 19 nt, Homo sapiens
  misc_RNA (1)...(19): siRNA sense strand
gaaucccuuugccuuggaa

SEQ ID NO: 1563122 - RNA, 19 nt, Homo sapiens
  misc_RNA (1)...(19): siRNA sense strand
uggagcagauggauguuuc

SEQ ID NO: 1563123 - RNA, 19 nt, Homo sapiens
  misc_RNA (1)...(19): siRNA sense strand
gcaguggcagcgguguuua

SEQ ID NO: 1563124 - RNA, 19 nt, Homo sapiens
  misc_RNA (1)...(19): siRNA sense strand
caagcugggccuuuacaug

SEQ ID NO: 1563125 - RNA, 19 nt, Homo sapiens
  misc_RNA (1)...(19): siRNA sense strand
ggagaaaagggacaaauuc

SEQ ID NO: 1563126 - RNA, 19 nt, Homo sapiens
  misc_RNA (1)...(19): siRNA sense strand
gcuguuauucuagguauug

SEQ ID NO: 1563127 - RNA, 19 nt, Homo sapiens
  misc_RNA (1)...(19): siRNA sense strand
ucccagcgauccagagaug

SEQ ID NO: 1563128 - RNA, 19 nt, Homo sapiens
  misc_RNA (1)...(19): siRNA sense strand
gaugccauguuagaucuca

SEQ ID NO: 1563129 - RNA, 19 nt, Homo sapiens
  misc_RNA (1)...(19): siRNA sense strand
cagcaugauuacagguguu

SEQ ID NO: 1563130 - RNA, 19 nt, Homo sapiens
  misc_RNA (1)...(19): siRNA sense strand
aagaacccuuuccgauuug

SEQ ID NO: 1563131 - RNA, 19 nt, Homo sapiens
  misc_RNA (1)...(19): siRNA sense strand
uaauucucccgcugauaua

SEQ ID NO: 1563132 - RNA, 19 nt, Homo sapiens
  misc_RNA (1)...(19): siRNA sense strand
cugggaagaucauagaagu

SEQ ID NO: 1563133 - RNA, 19 nt, Homo sapiens
  misc_RNA (1)...(19): siRNA sense strand
uucagaucaucauguguua

SEQ ID NO: 1563134 - RNA, 19 nt, Homo sapiens
  misc_RNA (1)...(19): siRNA sense strand
gaacaaaacaaaggaauac

SEQ ID NO: 1563135 - RNA, 19 nt, Homo sapiens
  misc_RNA (1)...(19): siRNA sense strand
ugugcgcgcugucguguau

SEQ ID NO: 1563136 - RNA, 19 nt, Homo sapiens
  misc_RNA (1)...(19): siRNA sense strand
ugcgcgcugucguguauua

SEQ ID NO: 1563137 - RNA, 19 nt, Homo sapiens
  misc_RNA (1)...(19): siRNA sense strand
uccgcaagcugggccuuua

SEQ ID NO: 1563138 - RNA, 19 nt, Homo sapiens
  misc_RNA (1)...(19): siRNA sense strand
cagaaagugggugaaauug

SEQ ID NO: 1563139 - RNA, 19 nt, Homo sapiens
  misc_RNA (1)...(19): siRNA sense strand
uguuauaugccacuaggua

SEQ ID NO: 1563140 - RNA, 19 nt, Homo sapiens
  misc_RNA (1)...(19): siRNA sense strand
ugacaacugcaauuuccaa

SEQ ID NO: 1563141 - RNA, 19 nt, Homo sapiens
  misc_RNA (1)...(19): siRNA sense strand
aauggaggcuuugcaguag

SEQ ID NO: 1563142 - RNA, 19 nt, Homo sapiens
  misc_RNA (1)...(19): siRNA sense strand
uggcagcgguguuuauugc

SEQ ID NO: 1563143 - RNA, 19 nt, Homo sapiens
  misc_RNA (1)...(19): siRNA sense strand
uaaugcggaugcugaaacu

SEQ ID NO: 1563144 - RNA, 19 nt, Homo sapiens
  misc_RNA (1)...(19): siRNA sense strand
ccagcgauccagagaugaa

SEQ ID NO: 1563145 - RNA, 19 nt, Homo sapiens
  misc_RNA (1)...(19): siRNA sense strand
augcugaaacucaucauuu

SEQ ID NO: 1563146 - RNA, 19 nt, Homo sapiens
  misc_RNA (1)...(19): siRNA sense strand
guuggcauguauucagaug

SEQ ID NO: 1563147 - RNA, 19 nt, Homo sapiens
  misc_RNA (1)...(19): siRNA sense strand
aauccacuccauuguaauu

SEQ ID NO: 1563148 - RNA, 19 nt, Homo sapiens
  misc_RNA (1)...(19): siRNA sense strand
ucacccagaccucacaguu

SEQ ID NO: 1563149 - RNA, 19 nt, Homo sapiens
  misc_RNA (1)...(19): siRNA sense strand
caacguccuuggugaugcu

SEQ ID NO: 1563150 - RNA, 19 nt, Homo sapiens
  misc_RNA (1)...(19): siRNA sense strand
uuauugcacaguugaauga

SEQ ID NO: 1563151 - RNA, 19 nt, Homo sapiens
  misc_RNA (1)...(19): siRNA sense strand
caagaggaucacucgauuc

SEQ ID NO: 1563152 - RNA, 19 nt, Homo sapiens
  misc_RNA (1)...(19): siRNA sense strand
uaagaucccuacaaaguua

SEQ ID NO: 1563153 - RNA, 19 nt, Homo sapiens
  misc_RNA (1)...(19): siRNA sense strand
uaacauggaucgugaauuc

SEQ ID NO: 1563154 - RNA, 19 nt, Homo sapiens
  misc_RNA (1)...(19): siRNA sense strand
gaaaacagcuggcagauug

SEQ ID NO: 1563155 - RNA, 19 nt, Homo sapiens
  misc_RNA (1)...(19): siRNA sense strand
agacauagguuggagaaua

SEQ ID NO: 1563156 - RNA, 19 nt, Homo sapiens
  misc_RNA (1)...(19): siRNA sense strand
agaaaggucuucagaacua

SEQ ID NO: 1563157 - RNA, 19 nt, Homo sapiens
  misc_RNA (1)...(19): siRNA sense strand
gacauagguuggagaauaa

SEQ ID NO: 1563158 - RNA, 19 nt, Homo sapiens
  misc_RNA (1)...(19): siRNA sense strand
gaagauacagugacuuuga

SEQ ID NO: 1563159 - RNA, 19 nt, Homo sapiens
  misc_RNA (1)...(19): siRNA sense strand
gcagaaaggucuucagaac

SEQ ID NO: 1563160 - RNA, 19 nt, Homo sapiens
  misc_RNA (1)...(19): siRNA sense strand
aaagaggcauugagaauug

SEQ ID NO: 1563161 - RNA, 19 nt, Homo sapiens
  misc_RNA (1)...(19): siRNA sense strand
ccacugcuuuggccacuua

SEQ ID NO: 1563162 - RNA, 19 nt, Homo sapiens
  misc_RNA (1)...(19): siRNA sense strand
aacaacagcuuacagauug

SEQ ID NO: 1563163 - RNA, 19 nt, Homo sapiens
  misc_RNA (1)...(19): siRNA sense strand
ggagaauaaggaagaaaua

SEQ ID NO: 1563164 - RNA, 19 nt, Homo sapiens
  misc_RNA (1)...(19): siRNA sense strand
caaagaauguauagagaag

SEQ ID NO: 1563165 - RNA, 19 nt, Homo sapiens
  misc_RNA (1)...(19): siRNA sense strand
gaucugaggaggaaagaaa

SEQ ID NO: 1563166 - RNA, 19 nt, Homo sapiens
  misc_RNA (1)...(19): siRNA sense strand
uaacaacagcuuacagauu

SEQ ID NO: 1563167 - RNA, 19 nt, Homo sapiens
  misc_RNA (1)...(19): siRNA sense strand
uacagcaacuccaauaauu

SEQ ID NO: 1563168 - RNA, 19 nt, Homo sapiens
  misc_RNA (1)...(19): siRNA sense strand
cacaacaaaucauaucuug

SEQ ID NO: 1563169 - RNA, 19 nt, Homo sapiens
  misc_RNA (1)...(19): siRNA sense strand
gccaaagaauguauagaga

SEQ ID NO: 1563170 - RNA, 19 nt, Homo sapiens
  misc_RNA (1)...(19): siRNA sense strand
aaagacccauuucuaaaga

SEQ ID NO: 1563171 - RNA, 19 nt, Homo sapiens
  misc_RNA (1)...(19): siRNA sense strand
gagaauugccaaagaaugu

SEQ ID NO: 1563172 - RNA, 19 nt, Homo sapiens
  misc_RNA (1)...(19): siRNA sense strand
ucaaacuucugccuucuug

SEQ ID NO: 1563173 - RNA, 19 nt, Homo sapiens
  misc_RNA (1)...(19): siRNA sense strand
caucagggauaucugcauu

SEQ ID NO: 1563174 - RNA, 19 nt, Homo sapiens
  misc_RNA (1)...(19): siRNA sense strand
gaaaggucuucagaacuau

SEQ ID NO: 1563175 - RNA, 19 nt, Homo sapiens
  misc_RNA (1)...(19): siRNA sense strand
ucagcuccauccagaauuu

SEQ ID NO: 1563176 - RNA, 19 nt, Homo sapiens
  misc_RNA (1)...(19): siRNA sense strand
agucuacgcugucuuguga

SEQ ID NO: 1563177 - RNA, 19 nt, Homo sapiens
  misc_RNA (1)...(19): siRNA sense strand
uauuagagguacugaaguu

SEQ ID NO: 1563178 - RNA, 19 nt, Homo sapiens
  misc_RNA (1)...(19): siRNA sense strand
aaaggaacggcuaguguua

SEQ ID NO: 1563179 - RNA, 19 nt, Homo sapiens
  misc_RNA (1)...(19): siRNA sense strand
caacuauuccgcaaacuau

SEQ ID NO: 1563180 - RNA, 19 nt, Homo sapiens
  misc_RNA (1)...(19): siRNA sense strand
caaaggaacggcuaguguu

SEQ ID NO: 1563181 - RNA, 19 nt, Homo sapiens
  misc_RNA (1)...(19): siRNA sense strand
gaucugcucuugaaaauag

SEQ ID NO: 1563182 - RNA, 19 nt, Homo sapiens
  misc_RNA (1)...(19): siRNA sense strand
uagaagauacagugacuuu

SEQ ID NO: 1563183 - RNA, 19 nt, Homo sapiens
  misc_RNA (1)...(19): siRNA sense strand
guacagcaacuccaauaau

SEQ ID NO: 1563184 - RNA, 19 nt, Homo sapiens
  misc_RNA (1)...(19): siRNA sense strand
ccuuacaucuaucggguua

SEQ ID NO: 1563185 - RNA, 19 nt, Homo sapiens
  misc_RNA (1)...(19): siRNA sense strand
cauggaucgugaauucaua

SEQ ID NO: 1563186 - RNA, 19 nt, Homo sapiens
  misc_RNA (1)...(19): siRNA sense strand
gaagagacuaauugaggaa

SEQ ID NO: 1563187 - RNA, 19 nt, Homo sapiens
  misc_RNA (1)...(19): siRNA sense strand
auugugagcugguuaagaa

SEQ ID NO: 1563188 - RNA, 19 nt, Homo sapiens
  misc_RNA (1)...(19): siRNA sense strand
ucaacgugaucacaacaaa

SEQ ID NO: 1563189 - RNA, 19 nt, Homo sapiens
  misc_RNA (1)...(19): siRNA sense strand
aaacaacuauuccgcaaac

SEQ ID NO: 1563190 - RNA, 19 nt, Homo sapiens
  misc_RNA (1)...(19): siRNA sense strand
ccaaagaauguauagagaa

SEQ ID NO: 1563191 - RNA, 19 nt, Homo sapiens
  misc_RNA (1)...(19): siRNA sense strand
uguaugaaaugacuuaugg

SEQ ID NO: 1563192 - RNA, 19 nt, Homo sapiens
  misc_RNA (1)...(19): siRNA sense strand
uuacuaaccacuucugaaa

SEQ ID NO: 1563193 - RNA, 19 nt, Homo sapiens
  misc_RNA (1)...(19): siRNA sense strand
ccaaaagacccauuucuaa

SEQ ID NO: 1563194 - RNA, 19 nt, Homo sapiens
  misc_RNA (1)...(19): siRNA sense strand
gaagagcauucagcgaagu

SEQ ID NO: 1563195 - RNA, 19 nt, Homo sapiens
  misc_RNA (1)...(19): siRNA sense strand
gaaacagauucaccagcau

SEQ ID NO: 1563196 - RNA, 19 nt, Homo sapiens
  misc_RNA (1)...(19): siRNA sense strand
gcagauuguuagaagauac

SEQ ID NO: 1563197 - RNA, 19 nt, Homo sapiens
  misc_RNA (1)...(19): siRNA sense strand
gauacagugacuuugauuu

SEQ ID NO: 1563198 - RNA, 19 nt, Homo sapiens
  misc_RNA (1)...(19): siRNA sense strand
gaacauugaaggaucugau

SEQ ID NO: 1563199 - RNA, 19 nt, Homo sapiens
  misc_RNA (1)...(19): siRNA sense strand
gcuggcagauuguuagaag

SEQ ID NO: 1563200 - RNA, 19 nt, Homo sapiens
  misc_RNA (1)...(19): siRNA sense strand
uuacagaugccauuauuca

SEQ ID NO: 1563201 - RNA, 19 nt, Homo sapiens
  misc_RNA (1)...(19): siRNA sense strand
ucuuacagaugccauuauu

SEQ ID NO: 1563202 - RNA, 19 nt, Homo sapiens
  misc_RNA (1)...(19): siRNA sense strand
agaacuaucucaacgugau

SEQ ID NO: 1563203 - RNA, 19 nt, Homo sapiens
  misc_RNA (1)...(19): siRNA sense strand
ccauggaucugaggaggaa

SEQ ID NO: 1563204 - RNA, 19 nt, Homo sapiens
  misc_RNA (1)...(19): siRNA sense strand
caaaagacccauuucuaaa

SEQ ID NO: 1563205 - RNA, 19 nt, Homo sapiens
  misc_RNA (1)...(19): siRNA sense strand
gaucacaacaaaucauauc

SEQ ID NO: 1563206 - RNA, 19 nt, Homo sapiens
  misc_RNA (1)...(19): siRNA sense strand
ccucagcguugcuaauuag

SEQ ID NO: 1563207 - RNA, 19 nt, Homo sapiens
  misc_RNA (1)...(19): siRNA sense strand
aguuuaagaucccuacaaa

SEQ ID NO: 1563208 - RNA, 19 nt, Homo sapiens
  misc_RNA (1)...(19): siRNA sense strand
ccacuuacuguaugaaaug

SEQ ID NO: 1563209 - RNA, 19 nt, Homo sapiens
  misc_RNA (1)...(19): siRNA sense strand
ggaccuugagaauuccuua

SEQ ID NO: 1563210 - RNA, 19 nt, Homo sapiens
  misc_RNA (1)...(19): siRNA sense strand
aagaggaauuucuguggaa

SEQ ID NO: 1563211 - RNA, 19 nt, Homo sapiens
  misc_RNA (1)...(19): siRNA sense strand
ucacagugcuccgaagauc

SEQ ID NO: 1563212 - RNA, 19 nt, Homo sapiens
  misc_RNA (1)...(19): siRNA sense strand
cauugagaauugccaaaga

SEQ ID NO: 1563213 - RNA, 19 nt, Homo sapiens
  misc_RNA (1)...(19): siRNA sense strand
cgaaagaagucaaaacgau

SEQ ID NO: 1563214 - RNA, 19 nt, Homo sapiens
  misc_RNA (1)...(19): siRNA sense strand
gaucacagugcuccgaaga

SEQ ID NO: 1563215 - RNA, 19 nt, Homo sapiens
  misc_RNA (1)...(19): siRNA sense strand
cagcaacuccaauaauuca

SEQ ID NO: 1563216 - RNA, 19 nt, Homo sapiens
  misc_RNA (1)...(19): siRNA sense strand
ggcagauuguuagaagaua

SEQ ID NO: 1563217 - RNA, 19 nt, Homo sapiens
  misc_RNA (1)...(19): siRNA sense strand
auacugagauugccuugca

SEQ ID NO: 1563218 - RNA, 19 nt, Homo sapiens
  misc_RNA (1)...(19): siRNA sense strand
gauuuuagcucgaaagaag

SEQ ID NO: 1563219 - RNA, 19 nt, Homo sapiens
  misc_RNA (1)...(19): siRNA sense strand
gcucuuacagaugccauua

SEQ ID NO: 1563220 - RNA, 19 nt, Homo sapiens
  misc_RNA (1)...(19): siRNA sense strand
ccuugagaauuccuuauug

SEQ ID NO: 1563221 - RNA, 19 nt, Homo sapiens
  misc_RNA (1)...(19): siRNA sense strand
cuucuuguuugcacccuua

SEQ ID NO: 1563222 - RNA, 19 nt, Homo sapiens
  misc_RNA (1)...(19): siRNA sense strand
ccaaaggaacggcuagugu

SEQ ID NO: 1563223 - RNA, 19 nt, Homo sapiens
  misc_RNA (1)...(19): siRNA sense strand
guuagaagauacagugacu

SEQ ID NO: 1563224 - RNA, 19 nt, Homo sapiens
  misc_RNA (1)...(19): siRNA sense strand
aaaacgaucugcucuugaa

SEQ ID NO: 1563225 - RNA, 19 nt, Homo sapiens
  misc_RNA (1)...(19): siRNA sense strand
cgcaaacuauacugagauu

SEQ ID NO: 1563226 - RNA, 19 nt, Homo sapiens
  misc_RNA (1)...(19): siRNA sense strand
gugagcugguuaagaaguu

SEQ ID NO: 1563227 - RNA, 19 nt, Homo sapiens
  misc_RNA (1)...(19): siRNA sense strand
aaacuucugccuucuuguu

SEQ ID NO: 1563228 - RNA, 19 nt, Homo sapiens
  misc_RNA (1)...(19): siRNA sense strand
uagagaagagacuaauuga

SEQ ID NO: 1563229 - RNA, 19 nt, Homo sapiens
  misc_RNA (1)...(19): siRNA sense strand
gcaaauauuagagguacug

SEQ ID NO: 1563230 - RNA, 19 nt, Homo sapiens
  misc_RNA (1)...(19): siRNA sense strand
cagcguugcuaauuaggau

SEQ ID NO: 1563231 - RNA, 19 nt, Homo sapiens
  misc_RNA (1)...(19): siRNA sense strand
uaccaucucccggcucuua

SEQ ID NO: 1563232 - RNA, 19 nt, Homo sapiens
  misc_RNA (1)...(19): siRNA sense strand
gcucagcuccauccagaau

SEQ ID NO: 1563233 - RNA, 19 nt, Homo sapiens
  misc_RNA (1)...(19): siRNA sense strand
caacuccacccucuacauc

SEQ ID NO: 1563234 - RNA, 19 nt, Homo sapiens
  misc_RNA (1)...(19): siRNA sense strand
caucgaagacugacaagag

SEQ ID NO: 1563235 - RNA, 19 nt, Homo sapiens
  misc_RNA (1)...(19): siRNA sense strand
auagagaagagacuaauug

SEQ ID NO: 1563236 - RNA, 19 nt, Homo sapiens
  misc_RNA (1)...(19): siRNA sense strand
gggccugccuuccuucuac

SEQ ID NO: 1563237 - RNA, 19 nt, Homo sapiens
  misc_RNA (1)...(19): siRNA sense strand
gaaguacagcaacuccaau

SEQ ID NO: 1563238 - RNA, 19 nt, Homo sapiens
  misc_RNA (1)...(19): siRNA sense strand
gaauugccaaagaauguau

SEQ ID NO: 1563239 - RNA, 19 nt, Homo sapiens
  misc_RNA (1)...(19): siRNA sense strand
uuuaagaucccuacaaagu

SEQ ID NO: 1563240 - RNA, 19 nt, Homo sapiens
  misc_RNA (1)...(19): siRNA sense strand
caaacaacuauuccgcaaa

SEQ ID NO: 1563241 - RNA, 19 nt, Homo sapiens
  misc_RNA (1)...(19): siRNA sense strand
gccacuuacuguaugaaau

SEQ ID NO: 1563242 - RNA, 19 nt, Homo sapiens
  misc_RNA (1)...(19): siRNA sense strand
caaacuauacugagauugc

SEQ ID NO: 1563243 - RNA, 19 nt, Homo sapiens
  misc_RNA (1)...(19): siRNA sense strand
ggugguggaaccuuugaaa

SEQ ID NO: 1563244 - RNA, 19 nt, Homo sapiens
  misc_RNA (1)...(19): siRNA sense strand
cgaaguacagcaacuccaa

SEQ ID NO: 1563245 - RNA, 19 nt, Homo sapiens
  misc_RNA (1)...(19): siRNA sense strand
uuaagaucccuacaaaguu

SEQ ID NO: 1563246 - RNA, 19 nt, Homo sapiens
  misc_RNA (1)...(19): siRNA sense strand
auacagugacuuugauuug

SEQ ID NO: 1563247 - RNA, 19 nt, Homo sapiens
  misc_RNA (1)...(19): siRNA sense strand
gaacggcuaguguuaagcu

SEQ ID NO: 1563248 - RNA, 19 nt, Homo sapiens
  misc_RNA (1)...(19): siRNA sense strand
ucaaaacgaucugcucuug

SEQ ID NO: 1563249 - RNA, 19 nt, Homo sapiens
  misc_RNA (1)...(19): siRNA sense strand
auugagaauugccaaagaa

SEQ ID NO: 1563250 - RNA, 19 nt, Homo sapiens
  misc_RNA (1)...(19): siRNA sense strand
aagauacagugacuuugau

SEQ ID NO: 1563251 - RNA, 19 nt, Homo sapiens
  misc_RNA (1)...(19): siRNA sense strand
gugcaaagaggaauuucug

SEQ ID NO: 1563252 - RNA, 19 nt, Homo sapiens
  misc_RNA (1)...(19): siRNA sense strand
gaguggagcucccaucuua

SEQ ID NO: 1563253 - RNA, 19 nt, Homo sapiens
  misc_RNA (1)...(19): siRNA sense strand
cgacauacuugauacauuu

SEQ ID NO: 1563254 - RNA, 19 nt, Homo sapiens
  misc_RNA (1)...(19): siRNA sense strand
ccacaggacuacauuaauu

SEQ ID NO: 1563255 - RNA, 19 nt, Homo sapiens
  misc_RNA (1)...(19): siRNA sense strand
gaauacaccugcaagcauu

SEQ ID NO: 1563256 - RNA, 19 nt, Homo sapiens
  misc_RNA (1)...(19): siRNA sense strand
gaacuacaaagcugaauuu

SEQ ID NO: 1563257 - RNA, 19 nt, Homo sapiens
  misc_RNA (1)...(19): siRNA sense strand
caacgaagcuuggaaaguc

SEQ ID NO: 1563258 - RNA, 19 nt, Homo sapiens
  misc_RNA (1)...(19): siRNA sense strand
ggaaagguguaagaaacua

SEQ ID NO: 1563259 - RNA, 19 nt, Homo sapiens
  misc_RNA (1)...(19): siRNA sense strand
gaaggaaacgugauagaga

SEQ ID NO: 1563260 - RNA, 19 nt, Homo sapiens
  misc_RNA (1)...(19): siRNA sense strand
aaacaugccuaaauugguu

SEQ ID NO: 1563261 - RNA, 19 nt, Homo sapiens
  misc_RNA (1)...(19): siRNA sense strand
gaugauaacuccguuguag

SEQ ID NO: 1563262 - RNA, 19 nt, Homo sapiens
  misc_RNA (1)...(19): siRNA sense strand
ggacaacagcgaugagaaa

SEQ ID NO: 1563263 - RNA, 19 nt, Homo sapiens
  misc_RNA (1)...(19): siRNA sense strand
gaacuugacucagcaggau

SEQ ID NO: 1563264 - RNA, 19 nt, Homo sapiens
  misc_RNA (1)...(19): siRNA sense strand
gaaguuccaaagaugauua

SEQ ID NO: 1563265 - RNA, 19 nt, Homo sapiens
  misc_RNA (1)...(19): siRNA sense strand
guaagaaacuaggaaacaa

SEQ ID NO: 1563266 - RNA, 19 nt, Homo sapiens
  misc_RNA (1)...(19): siRNA sense strand
ccaagcaaauuuguccuua

SEQ ID NO: 1563267 - RNA, 19 nt, Homo sapiens
  misc_RNA (1)...(19): siRNA sense strand
ccgaaaagcugucuauuaa

SEQ ID NO: 1563268 - RNA, 19 nt, Homo sapiens
  misc_RNA (1)...(19): siRNA sense strand
gaaaagcugucuauuaauc

SEQ ID NO: 1563269 - RNA, 19 nt, Homo sapiens
  misc_RNA (1)...(19): siRNA sense strand
aaggaaacaugccuaaauu

SEQ ID NO: 1563270 - RNA, 19 nt, Homo sapiens
  misc_RNA (1)...(19): siRNA sense strand
ugaaugcacucacucuuga

SEQ ID NO: 1563271 - RNA, 19 nt, Homo sapiens
  misc_RNA (1)...(19): siRNA sense strand
caaagaaacccuaaauaag

SEQ ID NO: 1563272 - RNA, 19 nt, Homo sapiens
  misc_RNA (1)...(19): siRNA sense strand
gcacaugacuccagaucgu

SEQ ID NO: 1563273 - RNA, 19 nt, Homo sapiens
  misc_RNA (1)...(19): siRNA sense strand
uagaggagcucaaccaauc

SEQ ID NO: 1563274 - RNA, 19 nt, Homo sapiens
  misc_RNA (1)...(19): siRNA sense strand
ccacaaggucuauggauuu

SEQ ID NO: 1563275 - RNA, 19 nt, Homo sapiens
  misc_RNA (1)...(19): siRNA sense strand
uaaagagugugaugaaucu

SEQ ID NO: 1563276 - RNA, 19 nt, Homo sapiens
  misc_RNA (1)...(19): siRNA sense strand
ggugauggcucagauccua

SEQ ID NO: 1563277 - RNA, 19 nt, Homo sapiens
  misc_RNA (1)...(19): siRNA sense strand
ggacagcuccagaaggaaa

SEQ ID NO: 1563278 - RNA, 19 nt, Homo sapiens
  misc_RNA (1)...(19): siRNA sense strand
gaaagacagcugcauuugu

SEQ ID NO: 1563279 - RNA, 19 nt, Homo sapiens
  misc_RNA (1)...(19): siRNA sense strand
agaaugcugucauauuuga

SEQ ID NO: 1563280 - RNA, 19 nt, Homo sapiens
  misc_RNA (1)...(19): siRNA sense strand
gaucgugcauuugaagauu

SEQ ID NO: 1563281 - RNA, 19 nt, Homo sapiens
  misc_RNA (1)...(19): siRNA sense strand
ucacacgucucaaucucua

SEQ ID NO: 1563282 - RNA, 19 nt, Homo sapiens
  misc_RNA (1)...(19): siRNA sense strand
uagaauacaucaagaagca

SEQ ID NO: 1563283 - RNA, 19 nt, Homo sapiens
  misc_RNA (1)...(19): siRNA sense strand
caaggaaacaugccuaaau

SEQ ID NO: 1563284 - RNA, 19 nt, Homo sapiens
  misc_RNA (1)...(19): siRNA sense strand
gccaggagacguaccuuua

SEQ ID NO: 1563285 - RNA, 19 nt, Homo sapiens
  misc_RNA (1)...(19): siRNA sense strand
uaacaaauuccucuccaaa

SEQ ID NO: 1563286 - RNA, 19 nt, Homo sapiens
  misc_RNA (1)...(19): siRNA sense strand
aaaaggagcuguugaacuu

SEQ ID NO: 1563287 - RNA, 19 nt, Homo sapiens
  misc_RNA (1)...(19): siRNA sense strand
cauccauccugaaauguaa

SEQ ID NO: 1563288 - RNA, 19 nt, Homo sapiens
  misc_RNA (1)...(19): siRNA sense strand
ccacuuccaugacuucuca

SEQ ID NO: 1563289 - RNA, 19 nt, Homo sapiens
  misc_RNA (1)...(19): siRNA sense strand
gaucggagacccacuagug

SEQ ID NO: 1563290 - RNA, 19 nt, Homo sapiens
  misc_RNA (1)...(19): siRNA sense strand
gacguaccuuuaccacaua

SEQ ID NO: 1563291 - RNA, 19 nt, Homo sapiens
  misc_RNA (1)...(19): siRNA sense strand
ggaaacaugccuaaauugg

SEQ ID NO: 1563292 - RNA, 19 nt, Homo sapiens
  misc_RNA (1)...(19): siRNA sense strand
gauccuagagcaucugaaa

SEQ ID NO: 1563293 - RNA, 19 nt, Homo sapiens
  misc_RNA (1)...(19): siRNA sense strand
cagaaagacagcugcauuu

SEQ ID NO: 1563294 - RNA, 19 nt, Homo sapiens
  misc_RNA (1)...(19): siRNA sense strand
ccugaaauguaacaaauuc

SEQ ID NO: 1563295 - RNA, 19 nt, Homo sapiens
  misc_RNA (1)...(19): siRNA sense strand
caagcaaauuuguccuuau

SEQ ID NO: 1563296 - RNA, 19 nt, Homo sapiens
  misc_RNA (1)...(19): siRNA sense strand
gaauacaucaagaagcaaa

SEQ ID NO: 1563297 - RNA, 19 nt, Homo sapiens
  misc_RNA (1)...(19): siRNA sense strand
gauuaaagagugugaugaa

SEQ ID NO: 1563298 - RNA, 19 nt, Homo sapiens
  misc_RNA (1)...(19): siRNA sense strand
gccacaaggucuauggauu

SEQ ID NO: 1563299 - RNA, 19 nt, Homo sapiens
  misc_RNA (1)...(19): siRNA sense strand
ucacagagucaaagacaaa

SEQ ID NO: 1563300 - RNA, 19 nt, Homo sapiens
  misc_RNA (1)...(19): siRNA sense strand
ggaaagucaucacuaagcu

SEQ ID NO: 1563301 - RNA, 19 nt, Homo sapiens
  misc_RNA (1)...(19): siRNA sense strand
gagagugaccgacuucaga

SEQ ID NO: 1563302 - RNA, 19 nt, Homo sapiens
  misc_RNA (1)...(19): siRNA sense strand
guaacaaauuccucuccaa

SEQ ID NO: 1563303 - RNA, 19 nt, Homo sapiens
  misc_RNA (1)...(19): siRNA sense strand
uggaggagcuggaugacuu

SEQ ID NO: 1563304 - RNA, 19 nt, Homo sapiens
  misc_RNA (1)...(19): siRNA sense strand
gaaacgugauagagaugau

SEQ ID NO: 1563305 - RNA, 19 nt, Homo sapiens
  misc_RNA (1)...(19): siRNA sense strand
ggauagccgcagcgucuua

SEQ ID NO: 1563306 - RNA, 19 nt, Homo sapiens
  misc_RNA (1)...(19): siRNA sense strand
agacguaccuuuaccacau

SEQ ID NO: 1563307 - RNA, 19 nt, Homo sapiens
  misc_RNA (1)...(19): siRNA sense strand
aaagugaaccggaaaggaa

SEQ ID NO: 1563308 - RNA, 19 nt, Homo sapiens
  misc_RNA (1)...(19): siRNA sense strand
cuuggaaagucaucacuaa

SEQ ID NO: 1563309 - RNA, 19 nt, Homo sapiens
  misc_RNA (1)...(19): siRNA sense strand
gauggaaagguguaagaaa

SEQ ID NO: 1563310 - RNA, 19 nt, Homo sapiens
  misc_RNA (1)...(19): siRNA sense strand
ggaggcauccauccugaaa

SEQ ID NO: 1563311 - RNA, 19 nt, Homo sapiens
  misc_RNA (1)...(19): siRNA sense strand
gcauccauccugaaaugua

SEQ ID NO: 1563312 - RNA, 19 nt, Homo sapiens
  misc_RNA (1)...(19): siRNA sense strand
gaacccacaggacuacauu

SEQ ID NO: 1563313 - RNA, 19 nt, Homo sapiens
  misc_RNA (1)...(19): siRNA sense strand
gcuguugaauucugugaug

SEQ ID NO: 1563314 - RNA, 19 nt, Homo sapiens
  misc_RNA (1)...(19): siRNA sense strand
ugaccgagaugauggaaag

SEQ ID NO: 1563315 - RNA, 19 nt, Homo sapiens
  misc_RNA (1)...(19): siRNA sense strand
cgucuuaccagaucacuuu

SEQ ID NO: 1563316 - RNA, 19 nt, Homo sapiens
  misc_RNA (1)...(19): siRNA sense strand
ggacuaucacccucugaaa

SEQ ID NO: 1563317 - RNA, 19 nt, Homo sapiens
  misc_RNA (1)...(19): siRNA sense strand
agaaaagaaugcugucaua

SEQ ID NO: 1563318 - RNA, 19 nt, Homo sapiens
  misc_RNA (1)...(19): siRNA sense strand
caucuuaccuccccuugua

SEQ ID NO: 1563319 - RNA, 19 nt, Homo sapiens
  misc_RNA (1)...(19): siRNA sense strand
gaaagugaaccggaaagga

SEQ ID NO: 1563320 - RNA, 19 nt, Homo sapiens
  misc_RNA (1)...(19): siRNA sense strand
gaaacaugccuaaauuggu

SEQ ID NO: 1563321 - RNA, 19 nt, Homo sapiens
  misc_RNA (1)...(19): siRNA sense strand
ucaaagacaaagaaaguga

SEQ ID NO: 1563322 - RNA, 19 nt, Homo sapiens
  misc_RNA (1)...(19): siRNA sense strand
ccagaaagacagcugcauu

SEQ ID NO: 1563323 - RNA, 19 nt, Homo sapiens
  misc_RNA (1)...(19): siRNA sense strand
ggaauacaccugcaagcau

SEQ ID NO: 1563324 - RNA, 19 nt, Homo sapiens
  misc_RNA (1)...(19): siRNA sense strand
ggaacuacaaagcugaauu

SEQ ID NO: 1563325 - RNA, 19 nt, Homo sapiens
  misc_RNA (1)...(19): siRNA sense strand
gacuccagaucgugcauuu

SEQ ID NO: 1563326 - RNA, 19 nt, Homo sapiens
  misc_RNA (1)...(19): siRNA sense strand
ugaagaacccacaggacua

SEQ ID NO: 1563327 - RNA, 19 nt, Homo sapiens
  misc_RNA (1)...(19): siRNA sense strand
ccuuggcacuccaggaaua

SEQ ID NO: 1563328 - RNA, 19 nt, Homo sapiens
  misc_RNA (1)...(19): siRNA sense strand
ccaguguuauucaguucua

SEQ ID NO: 1563329 - RNA, 19 nt, Homo sapiens
  misc_RNA (1)...(19): siRNA sense strand
caaggucuauggauuucau

SEQ ID NO: 1563330 - RNA, 19 nt, Homo sapiens
  misc_RNA (1)...(19): siRNA sense strand
aagcaaauuuguccuuauc

SEQ ID NO: 1563331 - RNA, 19 nt, Homo sapiens
  misc_RNA (1)...(19): siRNA sense strand
ucaaccagcucuccgucaa

SEQ ID NO: 1563332 - RNA, 19 nt, Homo sapiens
  misc_RNA (1)...(19): siRNA sense strand
ggccuuuccuucuuuaaca

SEQ ID NO: 1563333 - RNA, 19 nt, Homo sapiens
  misc_RNA (1)...(19): siRNA sense strand
uaucaagcaucaacaagag

SEQ ID NO: 1563334 - RNA, 19 nt, Homo sapiens
  misc_RNA (1)...(19): siRNA sense strand
ggguggagguuugcaaaug

SEQ ID NO: 1563335 - RNA, 19 nt, Homo sapiens
  misc_RNA (1)...(19): siRNA sense strand
ggagcuggaugacuuugag

SEQ ID NO: 1563336 - RNA, 19 nt, Homo sapiens
  misc_RNA (1)...(19): siRNA sense strand
cuugugcaguugauucaua

SEQ ID NO: 1563337 - RNA, 19 nt, Homo sapiens
  misc_RNA (1)...(19): siRNA sense strand
gaacucauuccaagauuuu

SEQ ID NO: 1563338 - RNA, 19 nt, Homo sapiens
  misc_RNA (1)...(19): siRNA sense strand
gcaaauuuguccuuaucac

SEQ ID NO: 1563339 - RNA, 19 nt, Homo sapiens
  misc_RNA (1)...(19): siRNA sense strand
gaaagugaaggcucuaaaa

SEQ ID NO: 1563340 - RNA, 19 nt, Homo sapiens
  misc_RNA (1)...(19): siRNA sense strand
acuggaggcuguaccauug

SEQ ID NO: 1563341 - RNA, 19 nt, Homo sapiens
  misc_RNA (1)...(19): siRNA sense strand
gagaugauggaaaggugua

SEQ ID NO: 1563342 - RNA, 19 nt, Homo sapiens
  misc_RNA (1)...(19): siRNA sense strand
gggauacgguccagaacca

SEQ ID NO: 1563343 - RNA, 19 nt, Homo sapiens
  misc_RNA (1)...(19): siRNA sense strand
guucuacccaagcaaauuu

SEQ ID NO: 1563344 - RNA, 19 nt, Homo sapiens
  misc_RNA (1)...(19): siRNA sense strand
ucaacgugauccaggacua

SEQ ID NO: 1563345 - RNA, 19 nt, Homo sapiens
  misc_RNA (1)...(19): siRNA sense strand
aacaagagcccaccaagga

SEQ ID NO: 1563346 - RNA, 19 nt, Homo sapiens
  misc_RNA (1)...(19): siRNA sense strand
caugacuucucaguucuuu

SEQ ID NO: 1563347 - RNA, 19 nt, Homo sapiens
  misc_RNA (1)...(19): siRNA sense strand
aagcugaauuugcaucaug

SEQ ID NO: 1563348 - RNA, 19 nt, Homo sapiens
  misc_RNA (1)...(19): siRNA sense strand
gacuucagauucucaacga

SEQ ID NO: 1563349 - RNA, 19 nt, Homo sapiens
  misc_RNA (1)...(19): siRNA sense strand
aaggaaacgugauagagau

SEQ ID NO: 1563350 - RNA, 19 nt, Homo sapiens
  misc_RNA (1)...(19): siRNA sense strand
caacagcgaugagaaaauc

SEQ ID NO: 1563351 - RNA, 19 nt, Homo sapiens
  misc_RNA (1)...(19): siRNA sense strand
uaauauugaugggaagaug

SEQ ID NO: 1563352 - RNA, 19 nt, Homo sapiens
  misc_RNA (1)...(19): siRNA sense strand
ugagauaccugguggauga

SEQ ID NO: 1563353 - RNA, 19 nt, Homo sapiens
  misc_RNA (1)...(19): siRNA sense strand
gcuggaggcugaugcaaau

SEQ ID NO: 1563354 - RNA, 19 nt, Homo sapiens
  misc_RNA (1)...(19): siRNA sense strand
caacaaguuuggcgagauc

SEQ ID NO: 1563355 - RNA, 19 nt, Homo sapiens
  misc_RNA (1)...(19): siRNA sense strand
ggaagcgggugaugaaggu

SEQ ID NO: 1563356 - RNA, 19 nt, Homo sapiens
  misc_RNA (1)...(19): siRNA sense strand
aggaugugcugccuaagua

SEQ ID NO: 1563357 - RNA, 19 nt, Homo sapiens
  misc_RNA (1)...(19): siRNA sense strand
gcaacaaguuuggcgagau

SEQ ID NO: 1563358 - RNA, 19 nt, Homo sapiens
  misc_RNA (1)...(19): siRNA sense strand
gaugugcugccuaaguaua

SEQ ID NO: 1563359 - RNA, 19 nt, Homo sapiens
  misc_RNA (1)...(19): siRNA sense strand
gcagugaccugguguuccu

SEQ ID NO: 1563360 - RNA, 19 nt, Homo sapiens
  misc_RNA (1)...(19): siRNA sense strand
ggacguccgccucaagaug

SEQ ID NO: 1563361 - RNA, 19 nt, Homo sapiens
  misc_RNA (1)...(19): siRNA sense strand
gcuaccgccugcagcacua

SEQ ID NO: 1563362 - RNA, 19 nt, Homo sapiens
  misc_RNA (1)...(19): siRNA sense strand
ccgaaagccugcauuacca

SEQ ID NO: 1563363 - RNA, 19 nt, Homo sapiens
  misc_RNA (1)...(19): siRNA sense strand
ggaggcgugucagcaguga

SEQ ID NO: 1563364 - RNA, 19 nt, Homo sapiens
  misc_RNA (1)...(19): siRNA sense strand
gccacauccucguaaguga

SEQ ID NO: 1563365 - RNA, 19 nt, Homo sapiens
  misc_RNA (1)...(19): siRNA sense strand
gauccgagaguaccagcaa

SEQ ID NO: 1563366 - RNA, 19 nt, Homo sapiens
  misc_RNA (1)...(19): siRNA sense strand
uuugugggcuccuaugaga

SEQ ID NO: 1563367 - RNA, 19 nt, Homo sapiens
  misc_RNA (1)...(19): siRNA sense strand
ugccuaaugucaccaagga

SEQ ID NO: 1563368 - RNA, 19 nt, Homo sapiens
  misc_RNA (1)...(19): siRNA sense strand
gccugcagcacuacuuuaa

SEQ ID NO: 1563369 - RNA, 19 nt, Homo sapiens
  misc_RNA (1)...(19): siRNA sense strand
aagccugcauuaccacuug

SEQ ID NO: 1563370 - RNA, 19 nt, Homo sapiens
  misc_RNA (1)...(19): siRNA sense strand
acccugagcgcaugaauga

SEQ ID NO: 1563371 - RNA, 19 nt, Homo sapiens
  misc_RNA (1)...(19): siRNA sense strand
ccuacccacugccuaaugu

SEQ ID NO: 1563372 - RNA, 19 nt, Homo sapiens
  misc_RNA (1)...(19): siRNA sense strand
ccaagguggccugcucuaa

SEQ ID NO: 1563373 - RNA, 19 nt, Homo sapiens
  misc_RNA (1)...(19): siRNA sense strand
caagguggccugcucuaac

SEQ ID NO: 1563374 - RNA, 19 nt, Homo sapiens
  misc_RNA (1)...(19): siRNA sense strand
gcgggcugcugcucaugau

SEQ ID NO: 1563375 - RNA, 19 nt, Homo sapiens
  misc_RNA (1)...(19): siRNA sense strand
ucaccaaggaggcguguca

SEQ ID NO: 1563376 - RNA, 19 nt, Homo sapiens
  misc_RNA (1)...(19): siRNA sense strand
ccaccucacguccgauuuc

SEQ ID NO: 1563377 - RNA, 19 nt, Homo sapiens
  misc_RNA (1)...(19): siRNA sense strand
aagguggccugcucuaacu

SEQ ID NO: 1563378 - RNA, 19 nt, Homo sapiens
  misc_RNA (1)...(19): siRNA sense strand
ggaugugcugccuaaguau

SEQ ID NO: 1563379 - RNA, 19 nt, Homo sapiens
  misc_RNA (1)...(19): siRNA sense strand
caggaugugcugccuaagu

SEQ ID NO: 1563380 - RNA, 19 nt, Homo sapiens
  misc_RNA (1)...(19): siRNA sense strand
gcugauguuugcggugauc

SEQ ID NO: 1563381 - RNA, 19 nt, Homo sapiens
  misc_RNA (1)...(19): siRNA sense strand
ggcuggaggcugaugcaaa

SEQ ID NO: 1563382 - RNA, 19 nt, Homo sapiens
  misc_RNA (1)...(19): siRNA sense strand
ggguuuggcucccauuaug

SEQ ID NO: 1563383 - RNA, 19 nt, Homo sapiens
  misc_RNA (1)...(19): siRNA sense strand
cauuauggcugugguuaug

SEQ ID NO: 1563384 - RNA, 19 nt, Homo sapiens
  misc_RNA (1)...(19): siRNA sense strand
ggguauggcuguggguuug

SEQ ID NO: 1563385 - RNA, 19 nt, Homo sapiens
  misc_RNA (1)...(19): siRNA sense strand
ggcuauggcuguggauaug

SEQ ID NO: 1563386 - RNA, 19 nt, Homo sapiens
  misc_RNA (1)...(19): siRNA sense strand
gaugcuauucuuccugcua

SEQ ID NO: 1563387 - RNA, 19 nt, Homo sapiens
  misc_RNA (1)...(19): siRNA sense strand
cggcaacuccuguggcuau

SEQ ID NO: 1563388 - RNA, 19 nt, Homo sapiens
  misc_RNA (1)...(19): siRNA sense strand
augcuauucuuccugcuaa

SEQ ID NO: 1563389 - RNA, 19 nt, Homo sapiens
  misc_RNA (1)...(19): siRNA sense strand
ggcuauggcuguggguaug

SEQ ID NO: 1563390 - RNA, 19 nt, Homo sapiens
  misc_RNA (1)...(19): siRNA sense strand
ccauuuugcuuuagaagau

SEQ ID NO: 1563391 - RNA, 19 nt, Homo sapiens
  misc_RNA (1)...(19): siRNA sense strand
gaagugaaguggacuaaau

SEQ ID NO: 1563392 - RNA, 19 nt, Homo sapiens
  misc_RNA (1)...(19): siRNA sense strand
gaaaggacgauucuuauuu

SEQ ID NO: 1563393 - RNA, 19 nt, Homo sapiens
  misc_RNA (1)...(19): siRNA sense strand
caauguaacugcaaaucua

SEQ ID NO: 1563394 - RNA, 19 nt, Homo sapiens
  misc_RNA (1)...(19): siRNA sense strand
gcagucaucuauucauuga

SEQ ID NO: 1563395 - RNA, 19 nt, Homo sapiens
  misc_RNA (1)...(19): siRNA sense strand
cgucaacgcuggacacuuu

SEQ ID NO: 1563396 - RNA, 19 nt, Homo sapiens
  misc_RNA (1)...(19): siRNA sense strand
caaucuggcuguaaacuaa

SEQ ID NO: 1563397 - RNA, 19 nt, Homo sapiens
  misc_RNA (1)...(19): siRNA sense strand
ggacguugcuguucucugu

SEQ ID NO: 1563398 - RNA, 19 nt, Homo sapiens
  misc_RNA (1)...(19): siRNA sense strand
caccaaagcugaucucuca

SEQ ID NO: 1563399 - RNA, 19 nt, Homo sapiens
  misc_RNA (1)...(19): siRNA sense strand
ggccagggcuucccagauu

SEQ ID NO: 1563400 - RNA, 19 nt, Homo sapiens
  misc_RNA (1)...(19): siRNA sense strand
aaaccugcauuauccuuua

SEQ ID NO: 1563401 - RNA, 19 nt, Homo sapiens
  misc_RNA (1)...(19): siRNA sense strand
aaacccaccucaaagagua

SEQ ID NO: 1563402 - RNA, 19 nt, Homo sapiens
  misc_RNA (1)...(19): siRNA sense strand
gaauguuguucuugaggua

SEQ ID NO: 1563403 - RNA, 19 nt, Homo sapiens
  misc_RNA (1)...(19): siRNA sense strand
ugagguaccugauucaaga

SEQ ID NO: 1563404 - RNA, 19 nt, Homo sapiens
  misc_RNA (1)...(19): siRNA sense strand
gagaggaucacuugaggua

SEQ ID NO: 1563405 - RNA, 19 nt, Homo sapiens
  misc_RNA (1)...(19): siRNA sense strand
gucauucagucucuaaaua

SEQ ID NO: 1563406 - RNA, 19 nt, Homo sapiens
  misc_RNA (1)...(19): siRNA sense strand
gaacuuguugaccagauua

SEQ ID NO: 1563407 - RNA, 19 nt, Homo sapiens
  misc_RNA (1)...(19): siRNA sense strand
uaaaguacagccucacaua

SEQ ID NO: 1563408 - RNA, 19 nt, Homo sapiens
  misc_RNA (1)...(19): siRNA sense strand
gcuggacacuuuagccuuu

SEQ ID NO: 1563409 - RNA, 19 nt, Homo sapiens
  misc_RNA (1)...(19): siRNA sense strand
aaaggacgauucuuauuuc

SEQ ID NO: 1563410 - RNA, 19 nt, Homo sapiens
  misc_RNA (1)...(19): siRNA sense strand
caucaucucugugcacuga

SEQ ID NO: 1563411 - RNA, 19 nt, Homo sapiens
  misc_RNA (1)...(19): siRNA sense strand
aaugaaaggacgauucuua

SEQ ID NO: 1563412 - RNA, 19 nt, Homo sapiens
  misc_RNA (1)...(19): siRNA sense strand
cccauuagcugcuggauuc

SEQ ID NO: 1563413 - RNA, 19 nt, Homo sapiens
  misc_RNA (1)...(19): siRNA sense strand
gaaaugaaaggacgauucu

SEQ ID NO: 1563414 - RNA, 19 nt, Homo sapiens
  misc_RNA (1)...(19): siRNA sense strand
caaagcugaucucucauuc

SEQ ID NO: 1563415 - RNA, 19 nt, Homo sapiens
  misc_RNA (1)...(19): siRNA sense strand
ggaaaugaaaggacgauuc

SEQ ID NO: 1563416 - RNA, 19 nt, Homo sapiens
  misc_RNA (1)...(19): siRNA sense strand
aaauagauauggacagcuu

SEQ ID NO: 1563417 - RNA, 19 nt, Homo sapiens
  misc_RNA (1)...(19): siRNA sense strand
gauauggacagcuuacuau

SEQ ID NO: 1563418 - RNA, 19 nt, Homo sapiens
  misc_RNA (1)...(19): siRNA sense strand
caaccaaacuggauauucc

SEQ ID NO: 1563419 - RNA, 19 nt, Homo sapiens
  misc_RNA (1)...(19): siRNA sense strand
gccagggcuucccagauua

SEQ ID NO: 1563420 - RNA, 19 nt, Homo sapiens
  misc_RNA (1)...(19): siRNA sense strand
gcaaucuggcuguaaacua

SEQ ID NO: 1563421 - RNA, 19 nt, Homo sapiens
  misc_RNA (1)...(19): siRNA sense strand
gcgugaauguuguucuuga

SEQ ID NO: 1563422 - RNA, 19 nt, Homo sapiens
  misc_RNA (1)...(19): siRNA sense strand
gaccacaaauagauaugga

SEQ ID NO: 1563423 - RNA, 19 nt, Homo sapiens
  misc_RNA (1)...(19): siRNA sense strand
uaugcaaucuggcuguaaa

SEQ ID NO: 1563424 - RNA, 19 nt, Homo sapiens
  misc_RNA (1)...(19): siRNA sense strand
ccugcauuauccuuuauua

SEQ ID NO: 1563425 - RNA, 19 nt, Homo sapiens
  misc_RNA (1)...(19): siRNA sense strand
cuacugcugcuaaauauga

SEQ ID NO: 1563426 - RNA, 19 nt, Homo sapiens
  misc_RNA (1)...(19): siRNA sense strand
auacacagaugcaggugaa

SEQ ID NO: 1563427 - RNA, 19 nt, Homo sapiens
  misc_RNA (1)...(19): siRNA sense strand
ccaaagcugaucucucauu

SEQ ID NO: 1563428 - RNA, 19 nt, Homo sapiens
  misc_RNA (1)...(19): siRNA sense strand
ugaaaggacgauucuuauu

SEQ ID NO: 1563429 - RNA, 19 nt, Homo sapiens
  misc_RNA (1)...(19): siRNA sense strand
cagcuuacuauucuucaua

SEQ ID NO: 1563430 - RNA, 19 nt, Homo sapiens
  misc_RNA (1)...(19): siRNA sense strand
ggacagcuuacuauucuuc

SEQ ID NO: 1563431 - RNA, 19 nt, Homo sapiens
  misc_RNA (1)...(19): siRNA sense strand
aagcagucaucuauucauu

SEQ ID NO: 1563432 - RNA, 19 nt, Homo sapiens
  misc_RNA (1)...(19): siRNA sense strand
cauaaggggucugggauua

SEQ ID NO: 1563433 - RNA, 19 nt, Homo sapiens
  misc_RNA (1)...(19): siRNA sense strand
gaggccaacucaggaaaug

SEQ ID NO: 1563434 - RNA, 19 nt, Homo sapiens
  misc_RNA (1)...(19): siRNA sense strand
gggcuuugguuauagaagu

SEQ ID NO: 1563435 - RNA, 19 nt, Homo sapiens
  misc_RNA (1)...(19): siRNA sense strand
gcagacuucagauucguuu

SEQ ID NO: 1563436 - RNA, 19 nt, Homo sapiens
  misc_RNA (1)...(19): siRNA sense strand
uaacuucuucuucccguuu

SEQ ID NO: 1563437 - RNA, 19 nt, Homo sapiens
  misc_RNA (1)...(19): siRNA sense strand
ucaucucugugcacugaua

SEQ ID NO: 1563438 - RNA, 19 nt, Homo sapiens
  misc_RNA (1)...(19): siRNA sense strand
aaaggucccuaucacuguu

SEQ ID NO: 1563439 - RNA, 19 nt, Homo sapiens
  misc_RNA (1)...(19): siRNA sense strand
ugaacuuguugaccagauu

SEQ ID NO: 1563440 - RNA, 19 nt, Homo sapiens
  misc_RNA (1)...(19): siRNA sense strand
gcaaacccaccucaaagag

SEQ ID NO: 1563441 - RNA, 19 nt, Homo sapiens
  misc_RNA (1)...(19): siRNA sense strand
ucacggacguugcuguucu

SEQ ID NO: 1563442 - RNA, 19 nt, Homo sapiens
  misc_RNA (1)...(19): siRNA sense strand
ggauuauucagaccacaaa

SEQ ID NO: 1563443 - RNA, 19 nt, Homo sapiens
  misc_RNA (1)...(19): siRNA sense strand
gaggcgagaggaucacuug

SEQ ID NO: 1563444 - RNA, 19 nt, Homo sapiens
  misc_RNA (1)...(19): siRNA sense strand
caaacuauaaaccugcauu

SEQ ID NO: 1563445 - RNA, 19 nt, Homo sapiens
  misc_RNA (1)...(19): siRNA sense strand
acagcaaacccaccucaaa

SEQ ID NO: 1563446 - RNA, 19 nt, Homo sapiens
  misc_RNA (1)...(19): siRNA sense strand
augccaggcugcccuuuaa

SEQ ID NO: 1563447 - RNA, 19 nt, Homo sapiens
  misc_RNA (1)...(19): siRNA sense strand
ggccaacucaggaaaugaa

SEQ ID NO: 1563448 - RNA, 19 nt, Homo sapiens
  misc_RNA (1)...(19): siRNA sense strand
cagcaaacccaccucaaag

SEQ ID NO: 1563449 - RNA, 19 nt, Homo sapiens
  misc_RNA (1)...(19): siRNA sense strand
gacugcagcuccguggauu

SEQ ID NO: 1563450 - RNA, 19 nt, Homo sapiens
  misc_RNA (1)...(19): siRNA sense strand
aagcugaucucucauucgu

SEQ ID NO: 1563451 - RNA, 19 nt, Homo sapiens
  misc_RNA (1)...(19): siRNA sense strand
caaacuggauauuccuacu

SEQ ID NO: 1563452 - RNA, 19 nt, Homo sapiens
  misc_RNA (1)...(19): siRNA sense strand
ucauauguuuccuucacaa

SEQ ID NO: 1563453 - RNA, 19 nt, Homo sapiens
  misc_RNA (1)...(19): siRNA sense strand
ccagaaguaccugaugaaa

SEQ ID NO: 1563454 - RNA, 19 nt, Homo sapiens
  misc_RNA (1)...(19): siRNA sense strand
uaaaccugcauuauccuuu

SEQ ID NO: 1563455 - RNA, 19 nt, Homo sapiens
  misc_RNA (1)...(19): siRNA sense strand
cuaauuucauccuccuuuc

SEQ ID NO: 1563456 - RNA, 19 nt, Homo sapiens
  misc_RNA (1)...(19): siRNA sense strand
ucacuugagguaccugauu

SEQ ID NO: 1563457 - RNA, 19 nt, Homo sapiens
  misc_RNA (1)...(19): siRNA sense strand
ccacugcgguuacuuuugu

SEQ ID NO: 1563458 - RNA, 19 nt, Homo sapiens
  misc_RNA (1)...(19): siRNA sense strand
ggguuccucugcagacuuc

SEQ ID NO: 1563459 - RNA, 19 nt, Homo sapiens
  misc_RNA (1)...(19): siRNA sense strand
aagugaaguggacuaaaua

SEQ ID NO: 1563460 - RNA, 19 nt, Homo sapiens
  misc_RNA (1)...(19): siRNA sense strand
cagauuacguggccccuuu

SEQ ID NO: 1563461 - RNA, 19 nt, Homo sapiens
  misc_RNA (1)...(19): siRNA sense strand
agaaguaccugaugaaaac

SEQ ID NO: 1563462 - RNA, 19 nt, Homo sapiens
  misc_RNA (1)...(19): siRNA sense strand
agauauggacagcuuacua

SEQ ID NO: 1563463 - RNA, 19 nt, Homo sapiens
  misc_RNA (1)...(19): siRNA sense strand
aaucauauguuuccuucac

SEQ ID NO: 1563464 - RNA, 19 nt, Homo sapiens
  misc_RNA (1)...(19): siRNA sense strand
gaaugcugaaucauauguu

SEQ ID NO: 1563465 - RNA, 19 nt, Homo sapiens
  misc_RNA (1)...(19): siRNA sense strand
caacucaggaaaugaaagg

SEQ ID NO: 1563466 - RNA, 19 nt, Homo sapiens
  misc_RNA (1)...(19): siRNA sense strand
gcagccgacucucgucaac

SEQ ID NO: 1563467 - RNA, 19 nt, Homo sapiens
  misc_RNA (1)...(19): siRNA sense strand
ucccugacaucaucucugu

SEQ ID NO: 1563468 - RNA, 19 nt, Homo sapiens
  misc_RNA (1)...(19): siRNA sense strand
cuucgucccugacaucauc

SEQ ID NO: 1563469 - RNA, 19 nt, Homo sapiens
  misc_RNA (1)...(19): siRNA sense strand
ucacaaccaaacuggauau

SEQ ID NO: 1563470 - RNA, 19 nt, Homo sapiens
  misc_RNA (1)...(19): siRNA sense strand
cacuugagguaccugauuc

SEQ ID NO: 1563471 - RNA, 19 nt, Homo sapiens
  misc_RNA (1)...(19): siRNA sense strand
ucucugugucugugacuua

SEQ ID NO: 1563472 - RNA, 19 nt, Homo sapiens
  misc_RNA (1)...(19): siRNA sense strand
gccaaaauagucaauguaa

SEQ ID NO: 1563473 - RNA, 19 nt, Homo sapiens
  misc_RNA (1)...(19): siRNA sense strand
ggcuguaaacuaagacuga

SEQ ID NO: 1563474 - RNA, 19 nt, Homo sapiens
  misc_RNA (1)...(19): siRNA sense strand
uagcacaacugagcaagac

SEQ ID NO: 1563475 - RNA, 19 nt, Homo sapiens
  misc_RNA (1)...(19): siRNA sense strand
auggacagcuuacuauucu

SEQ ID NO: 1563476 - RNA, 19 nt, Homo sapiens
  misc_RNA (1)...(19): siRNA sense strand
caaacccaccucaaagagu

SEQ ID NO: 1563477 - RNA, 19 nt, Homo sapiens
  misc_RNA (1)...(19): siRNA sense strand
ucuaauuucauccuccuuu

SEQ ID NO: 1563478 - RNA, 19 nt, Homo sapiens
  misc_RNA (1)...(19): siRNA sense strand
guacugguucacaccugua

SEQ ID NO: 1563479 - RNA, 19 nt, Homo sapiens
  misc_RNA (1)...(19): siRNA sense strand
ucucugugcacugauaaua

SEQ ID NO: 1563480 - RNA, 19 nt, Homo sapiens
  misc_RNA (1)...(19): siRNA sense strand
gacgggaggacacugaugu

SEQ ID NO: 1563481 - RNA, 19 nt, Homo sapiens
  misc_RNA (1)...(19): siRNA sense strand
guaaaguacagccucacau

SEQ ID NO: 1563482 - RNA, 19 nt, Homo sapiens
  misc_RNA (1)...(19): siRNA sense strand
uccuacugcugcuaaauau

SEQ ID NO: 1563483 - RNA, 19 nt, Homo sapiens
  misc_RNA (1)...(19): siRNA sense strand
uauggacagcuuacuauuc

SEQ ID NO: 1563484 - RNA, 19 nt, Homo sapiens
  misc_RNA (1)...(19): siRNA sense strand
ucagaccacaaauagauau

SEQ ID NO: 1563485 - RNA, 19 nt, Homo sapiens
  misc_RNA (1)...(19): siRNA sense strand
uaaggggucugggauuauu

SEQ ID NO: 1563486 - RNA, 19 nt, Homo sapiens
  misc_RNA (1)...(19): siRNA sense strand
gguaaaguacagccucaca

SEQ ID NO: 1563487 - RNA, 19 nt, Homo sapiens
  misc_RNA (1)...(19): siRNA sense strand
caucgucauucagucucua

SEQ ID NO: 1563488 - RNA, 19 nt, Homo sapiens
  misc_RNA (1)...(19): siRNA sense strand
ccaggcugcccuuuaacuu

SEQ ID NO: 1563489 - RNA, 19 nt, Homo sapiens
  misc_RNA (1)...(19): siRNA sense strand
gcagcuccguggauuucag

SEQ ID NO: 1563490 - RNA, 19 nt, Homo sapiens
  misc_RNA (1)...(19): siRNA sense strand
gaagucaccaaagcugauc

SEQ ID NO: 1563491 - RNA, 19 nt, Homo sapiens
  misc_RNA (1)...(19): siRNA sense strand
gcaaauggcucaacaagga

SEQ ID NO: 1563492 - RNA, 19 nt, Homo sapiens
  misc_RNA (1)...(19): siRNA sense strand
ggagugacuuccagaaaua

SEQ ID NO: 1563493 - RNA, 19 nt, Homo sapiens
  misc_RNA (1)...(19): siRNA sense strand
gaaccaagaauuacagaaa

SEQ ID NO: 1563494 - RNA, 19 nt, Homo sapiens
  misc_RNA (1)...(19): siRNA sense strand
ucagugagcugcccuuuga

SEQ ID NO: 1563495 - RNA, 19 nt, Homo sapiens
  misc_RNA (1)...(19): siRNA sense strand
gaaauauccugacccacaa

SEQ ID NO: 1563496 - RNA, 19 nt, Homo sapiens
  misc_RNA (1)...(19): siRNA sense strand
ggacacugcuugagaagau

SEQ ID NO: 1563497 - RNA, 19 nt, Homo sapiens
  misc_RNA (1)...(19): siRNA sense strand
ggaagaaggaguacauuga

SEQ ID NO: 1563498 - RNA, 19 nt, Homo sapiens
  misc_RNA (1)...(19): siRNA sense strand
ucuaugagguugucuauga

SEQ ID NO: 1563499 - RNA, 19 nt, Homo sapiens
  misc_RNA (1)...(19): siRNA sense strand
uaacuaggcuacaggaaca

SEQ ID NO: 1563500 - RNA, 19 nt, Homo sapiens
  misc_RNA (1)...(19): siRNA sense strand
gcacaacaucuccuuggua

SEQ ID NO: 1563501 - RNA, 19 nt, Homo sapiens
  misc_RNA (1)...(19): siRNA sense strand
agagugagccugaagauuu

SEQ ID NO: 1563502 - RNA, 19 nt, Homo sapiens
  misc_RNA (1)...(19): siRNA sense strand
gaaacugggccaaauguag

SEQ ID NO: 1563503 - RNA, 19 nt, Homo sapiens
  misc_RNA (1)...(19): siRNA sense strand
gcaugcagaugagauguga

SEQ ID NO: 1563504 - RNA, 19 nt, Homo sapiens
  misc_RNA (1)...(19): siRNA sense strand
gaagaaggaguacauugau

SEQ ID NO: 1563505 - RNA, 19 nt, Homo sapiens
  misc_RNA (1)...(19): siRNA sense strand
ucaagaaggucaggaggaa

SEQ ID NO: 1563506 - RNA, 19 nt, Homo sapiens
  misc_RNA (1)...(19): siRNA sense strand
ccacaaggacguaacagaa

SEQ ID NO: 1563507 - RNA, 19 nt, Homo sapiens
  misc_RNA (1)...(19): siRNA sense strand
gcucaaacuuccaacaaag

SEQ ID NO: 1563508 - RNA, 19 nt, Homo sapiens
  misc_RNA (1)...(19): siRNA sense strand
gagugagccugaagauuuc

SEQ ID NO: 1563509 - RNA, 19 nt, Homo sapiens
  misc_RNA (1)...(19): siRNA sense strand
gaagcugggucugaggauu

SEQ ID NO: 1563510 - RNA, 19 nt, Homo sapiens
  misc_RNA (1)...(19): siRNA sense strand
gcagucagcucaggacagu

SEQ ID NO: 1563511 - RNA, 19 nt, Homo sapiens
  misc_RNA (1)...(19): siRNA sense strand
guucuccuaugcucuauga

SEQ ID NO: 1563512 - RNA, 19 nt, Homo sapiens
  misc_RNA (1)...(19): siRNA sense strand
gcacagaaccaagaauuac

SEQ ID NO: 1563513 - RNA, 19 nt, Homo sapiens
  misc_RNA (1)...(19): siRNA sense strand
ggaaacugggccaaaugua

SEQ ID NO: 1563514 - RNA, 19 nt, Homo sapiens
  misc_RNA (1)...(19): siRNA sense strand
gcaaccaguucuccuaugc

SEQ ID NO: 1563515 - RNA, 19 nt, Homo sapiens
  misc_RNA (1)...(19): siRNA sense strand
gaccagcacuuguguuuug

SEQ ID NO: 1563516 - RNA, 19 nt, Homo sapiens
  misc_RNA (1)...(19): siRNA sense strand
caguggagcccagcauuua

SEQ ID NO: 1563517 - RNA, 19 nt, Homo sapiens
  misc_RNA (1)...(19): siRNA sense strand
ggaugcaaauggcucaaca

SEQ ID NO: 1563518 - RNA, 19 nt, Homo sapiens
  misc_RNA (1)...(19): siRNA sense strand
cggagugacuuccagaaau

SEQ ID NO: 1563519 - RNA, 19 nt, Homo sapiens
  misc_RNA (1)...(19): siRNA sense strand
gcauuuauggugccugauu

SEQ ID NO: 1563520 - RNA, 19 nt, Homo sapiens
  misc_RNA (1)...(19): siRNA sense strand
gauaucuucucgacaggau

SEQ ID NO: 1563521 - RNA, 19 nt, Homo sapiens
  misc_RNA (1)...(19): siRNA sense strand
caacccugcugcccuguca

SEQ ID NO: 1563522 - RNA, 19 nt, Homo sapiens
  misc_RNA (1)...(19): siRNA sense strand
cagaccagcacuuguguuu

SEQ ID NO: 1563523 - RNA, 19 nt, Homo sapiens
  misc_RNA (1)...(19): siRNA sense strand
gagguguacugcucagaag

SEQ ID NO: 1563524 - RNA, 19 nt, Homo sapiens
  misc_RNA (1)...(19): siRNA sense strand
aagcugggucugaggauua

SEQ ID NO: 1563525 - RNA, 19 nt, Homo sapiens
  misc_RNA (1)...(19): siRNA sense strand
cacaaggacguaacagaaa

SEQ ID NO: 1563526 - RNA, 19 nt, Homo sapiens
  misc_RNA (1)...(19): siRNA sense strand
ccaguucuccuaugcucua

SEQ ID NO: 1563527 - RNA, 19 nt, Homo sapiens
  misc_RNA (1)...(19): siRNA sense strand
aagaaggaguacauugaug

SEQ ID NO: 1563528 - RNA, 19 nt, Homo sapiens
  misc_RNA (1)...(19): siRNA sense strand
ggguuucccugcccucuca

SEQ ID NO: 1563529 - RNA, 19 nt, Homo sapiens
  misc_RNA (1)...(19): siRNA sense strand
gagccaaggaugcaaaugg

SEQ ID NO: 1563530 - RNA, 19 nt, Homo sapiens
  misc_RNA (1)...(19): siRNA sense strand
gggaaacugggccaaaugu

SEQ ID NO: 1563531 - RNA, 19 nt, Homo sapiens
  misc_RNA (1)...(19): siRNA sense strand
gagagugagccugaagauu

SEQ ID NO: 1563532 - RNA, 19 nt, Homo sapiens
  misc_RNA (1)...(19): siRNA sense strand
gcacuuguguuuugauucu

SEQ ID NO: 1563533 - RNA, 19 nt, Homo sapiens
  misc_RNA (1)...(19): siRNA sense strand
ccaaauguaggccuuaucu

SEQ ID NO: 1563534 - RNA, 19 nt, Homo sapiens
  misc_RNA (1)...(19): siRNA sense strand
ucaguggagcccagcauuu

SEQ ID NO: 1563535 - RNA, 19 nt, Homo sapiens
  misc_RNA (1)...(19): siRNA sense strand
ggaggaaaauccguaacaa

SEQ ID NO: 1563536 - RNA, 19 nt, Homo sapiens
  misc_RNA (1)...(19): siRNA sense strand
ggcaaccaguucuccuaug

SEQ ID NO: 1563537 - RNA, 19 nt, Homo sapiens
  misc_RNA (1)...(19): siRNA sense strand
caacaucuccuugguagcu

SEQ ID NO: 1563538 - RNA, 19 nt, Homo sapiens
  misc_RNA (1)...(19): siRNA sense strand
ucaagagagugagccugaa

SEQ ID NO: 1563539 - RNA, 19 nt, Homo sapiens
  misc_RNA (1)...(19): siRNA sense strand
gcucuaugagguugucuau

SEQ ID NO: 1563540 - RNA, 19 nt, Homo sapiens
  misc_RNA (1)...(19): siRNA sense strand
ggacugcaaggcuggaagu

SEQ ID NO: 1563541 - RNA, 19 nt, Homo sapiens
  misc_RNA (1)...(19): siRNA sense strand
gcccagaccagcacuugug

SEQ ID NO: 1563542 - RNA, 19 nt, Homo sapiens
  misc_RNA (1)...(19): siRNA sense strand
gggcaaccaguucuccuau

SEQ ID NO: 1563543 - RNA, 19 nt, Homo sapiens
  misc_RNA (1)...(19): siRNA sense strand
cagcugcagacgcuaauug

SEQ ID NO: 1563544 - RNA, 19 nt, Homo sapiens
  misc_RNA (1)...(19): siRNA sense strand
ugcacagaaccaagaauua

SEQ ID NO: 1563545 - RNA, 19 nt, Homo sapiens
  misc_RNA (1)...(19): siRNA sense strand
cauuuauggugccugauuc

SEQ ID NO: 1563546 - RNA, 19 nt, Homo sapiens
  misc_RNA (1)...(19): siRNA sense strand
ugcucaaacuuccaacaaa

SEQ ID NO: 1563547 - RNA, 19 nt, Homo sapiens
  misc_RNA (1)...(19): siRNA sense strand
cggaagaaggaguacauug

SEQ ID NO: 1563548 - RNA, 19 nt, Homo sapiens
  misc_RNA (1)...(19): siRNA sense strand
acaaggacguaacagaaaa

SEQ ID NO: 1563549 - RNA, 19 nt, Homo sapiens
  misc_RNA (1)...(19): siRNA sense strand
cugcacagaaccaagaauu

SEQ ID NO: 1563550 - RNA, 19 nt, Homo sapiens
  misc_RNA (1)...(19): siRNA sense strand
aagcaucuccuggcaguga

SEQ ID NO: 1563551 - RNA, 19 nt, Homo sapiens
  misc_RNA (1)...(19): siRNA sense strand
gacgcuaauugcucaaacu

SEQ ID NO: 1563552 - RNA, 19 nt, Homo sapiens
  misc_RNA (1)...(19): siRNA sense strand
caagagagugagccugaag

SEQ ID NO: 1563553 - RNA, 19 nt, Homo sapiens
  misc_RNA (1)...(19): siRNA sense strand
ggcacaacaucuccuuggu

SEQ ID NO: 1563554 - RNA, 19 nt, Homo sapiens
  misc_RNA (1)...(19): siRNA sense strand
ucuggagacccaaguggua

SEQ ID NO: 1563555 - RNA, 19 nt, Homo sapiens
  misc_RNA (1)...(19): siRNA sense strand
caagaaggucaggaggaaa

SEQ ID NO: 1563556 - RNA, 19 nt, Homo sapiens
  misc_RNA (1)...(19): siRNA sense strand
ggcuguggccuucaagaga

SEQ ID NO: 1563557 - RNA, 19 nt, Homo sapiens
  misc_RNA (1)...(19): siRNA sense strand
ccagagguuccgguaacua

SEQ ID NO: 1563558 - RNA, 19 nt, Homo sapiens
  misc_RNA (1)...(19): siRNA sense strand
guggagcccagcauuuaug

SEQ ID NO: 1563559 - RNA, 19 nt, Homo sapiens
  misc_RNA (1)...(19): siRNA sense strand
gaugcaaauggcucaacaa

SEQ ID NO: 1563560 - RNA, 19 nt, Homo sapiens
  misc_RNA (1)...(19): siRNA sense strand
cagagguuccgguaacuag

SEQ ID NO: 1563561 - RNA, 19 nt, Homo sapiens
  misc_RNA (1)...(19): siRNA sense strand
ccuaaagccugaagaagaa

SEQ ID NO: 1563562 - RNA, 19 nt, Homo sapiens
  misc_RNA (1)...(19): siRNA sense strand
gguggacgcugacaacugu

SEQ ID NO: 1563563 - RNA, 19 nt, Homo sapiens
  misc_RNA (1)...(19): siRNA sense strand
gugaggagguggugagaga

SEQ ID NO: 1563564 - RNA, 19 nt, Homo sapiens
  misc_RNA (1)...(19): siRNA sense strand
gaaaccauccaauccaaga

SEQ ID NO: 1563565 - RNA, 19 nt, Homo sapiens
  misc_RNA (1)...(19): siRNA sense strand
gaaaccauccaauccaaga

SEQ ID NO: 1563566 - RNA, 19 nt, Homo sapiens
  misc_RNA (1)...(19): siRNA sense strand
gaagaaaccauccaaucca

SEQ ID NO: 1563567 - RNA, 19 nt, Homo sapiens
  misc_RNA (1)...(19): siRNA sense strand
gaagaaaccauccaaucca

SEQ ID NO: 1563568 - RNA, 19 nt, Homo sapiens
  misc_RNA (1)...(19): siRNA sense strand
gcgaugaccuacccaaguc

SEQ ID NO: 1563569 - RNA, 19 nt, Homo sapiens
  misc_RNA (1)...(19): siRNA sense strand
ugaaagugauccugagcaa

SEQ ID NO: 1563570 - RNA, 19 nt, Homo sapiens
  misc_RNA (1)...(19): siRNA sense strand
gaaaccauccagcccaaga

SEQ ID NO: 1563571 - RNA, 19 nt, Homo sapiens
  misc_RNA (1)...(19): siRNA sense strand
gaagccauccagccuaaga

SEQ ID NO: 1563572 - RNA, 19 nt, Homo sapiens
  misc_RNA (1)...(19): siRNA sense strand
gcaggaccaucagaccauu

SEQ ID NO: 1563573 - RNA, 19 nt, Homo sapiens
  misc_RNA (1)...(19): siRNA sense strand
gggacaaggugaaagugau

SEQ ID NO: 1563574 - RNA, 19 nt, Homo sapiens
  misc_RNA (1)...(19): siRNA sense strand
gcaugaggaugugguguuc

SEQ ID NO: 1563575 - RNA, 19 nt, Homo sapiens
  misc_RNA (1)...(19): siRNA sense strand
gcugguggcuguggacuuc

SEQ ID NO: 1563576 - RNA, 19 nt, Homo sapiens
  misc_RNA (1)...(19): siRNA sense strand
agcagucauugcagaauua

SEQ ID NO: 1563577 - RNA, 19 nt, Homo sapiens
  misc_RNA (1)...(19): siRNA sense strand
cagaagaaaccauccaauc

SEQ ID NO: 1563578 - RNA, 19 nt, Homo sapiens
  misc_RNA (1)...(19): siRNA sense strand
aagcagucauugcagaauu

SEQ ID NO: 1563579 - RNA, 19 nt, Homo sapiens
  misc_RNA (1)...(19): siRNA sense strand
aagaaaccauccaauccaa

SEQ ID NO: 1563580 - RNA, 19 nt, Homo sapiens
  misc_RNA (1)...(19): siRNA sense strand
cagaagaaaccauccaauc

SEQ ID NO: 1563581 - RNA, 19 nt, Homo sapiens
  misc_RNA (1)...(19): siRNA sense strand
aagaaaccauccaauccaa

SEQ ID NO: 1563582 - RNA, 19 nt, Homo sapiens
  misc_RNA (1)...(19): siRNA sense strand
aggaagccauccagccuaa

SEQ ID NO: 1563583 - RNA, 19 nt, Homo sapiens
  misc_RNA (1)...(19): siRNA sense strand
ggaggacuuugaggcauca

SEQ ID NO: 1563584 - RNA, 19 nt, Homo sapiens
  misc_RNA (1)...(19): siRNA sense strand
gagagagugcgccaucaug

SEQ ID NO: 1563585 - RNA, 19 nt, Homo sapiens
  misc_RNA (1)...(19): siRNA sense strand
ggacaaggugaaagugauc

SEQ ID NO: 1563586 - RNA, 19 nt, Homo sapiens
  misc_RNA (1)...(19): siRNA sense strand
gcccaaggagggugacauu

SEQ ID NO: 1563587 - RNA, 19 nt, Homo sapiens
  misc_RNA (1)...(19): siRNA sense strand
caucagaccauucuuccau

SEQ ID NO: 1563588 - RNA, 19 nt, Homo sapiens
  misc_RNA (1)...(19): siRNA sense strand
gcccaaggagggugacauu

SEQ ID NO: 1563589 - RNA, 19 nt, Homo sapiens
  misc_RNA (1)...(19): siRNA sense strand
gcagucauugcagaauuaa

SEQ ID NO: 1563590 - RNA, 19 nt, Homo sapiens
  misc_RNA (1)...(19): siRNA sense strand
aagaagaaacaauggaguu

SEQ ID NO: 1563591 - RNA, 19 nt, Homo sapiens
  misc_RNA (1)...(19): siRNA sense strand
gaccaucagaccauucuuc

SEQ ID NO: 1563592 - RNA, 19 nt, Homo sapiens
  misc_RNA (1)...(19): siRNA sense strand
gagcaaggaggacuuugag

SEQ ID NO: 1563593 - RNA, 19 nt, Homo sapiens
  misc_RNA (1)...(19): siRNA sense strand
gcccaaagagggugacauc

SEQ ID NO: 1563594 - RNA, 19 nt, Homo sapiens
  misc_RNA (1)...(19): siRNA sense strand
cauccuaaagccugaagaa

SEQ ID NO: 1563595 - RNA, 19 nt, Homo sapiens
  misc_RNA (1)...(19): siRNA sense strand
gaagcagucauugcagaau

SEQ ID NO: 1563596 - RNA, 19 nt, Homo sapiens
  misc_RNA (1)...(19): siRNA sense strand
ugucccaaccuuucaguuu

SEQ ID NO: 1563597 - RNA, 19 nt, Homo sapiens
  misc_RNA (1)...(19): siRNA sense strand
gagagugcgccaucaugug

SEQ ID NO: 1563598 - RNA, 19 nt, Homo sapiens
  misc_RNA (1)...(19): siRNA sense strand
ugagcaaggaggacuuuga

SEQ ID NO: 1563599 - RNA, 19 nt, Homo sapiens
  misc_RNA (1)...(19): siRNA sense strand
cccaaguccucagaagaaa

SEQ ID NO: 1563600 - RNA, 19 nt, Homo sapiens
  misc_RNA (1)...(19): siRNA sense strand
gaagccauccagcccaaag

SEQ ID NO: 1563601 - RNA, 19 nt, Homo sapiens
  misc_RNA (1)...(19): siRNA sense strand
ggagguggacgcugacaac

SEQ ID NO: 1563602 - RNA, 19 nt, Homo sapiens
  misc_RNA (1)...(19): siRNA sense strand
gcccaaagagaguaacauc

SEQ ID NO: 1563603 - RNA, 19 nt, Homo sapiens
  misc_RNA (1)...(19): siRNA sense strand
uccuaaagccugaagaaga

SEQ ID NO: 1563604 - RNA, 19 nt, Homo sapiens
  misc_RNA (1)...(19): siRNA sense strand
cuacccaaguccucagcaa

SEQ ID NO: 1563605 - RNA, 19 nt, Homo sapiens
  misc_RNA (1)...(19): siRNA sense strand
ccauccagcccaagaagga

SEQ ID NO: 1563606 - RNA, 19 nt, Homo sapiens
  misc_RNA (1)...(19): siRNA sense strand
ugaagcagucauugcagaa

SEQ ID NO: 1563607 - RNA, 19 nt, Homo sapiens
  misc_RNA (1)...(19): siRNA sense strand
ggaaaagguggaugaacuu

SEQ ID NO: 1563608 - RNA, 19 nt, Homo sapiens
  misc_RNA (1)...(19): siRNA sense strand
ucaugugugucccaaccuu

SEQ ID NO: 1563609 - RNA, 19 nt, Homo sapiens
  misc_RNA (1)...(19): siRNA sense strand
ggagggugacauccuaaag

SEQ ID NO: 1563610 - RNA, 19 nt, Homo sapiens
  misc_RNA (1)...(19): siRNA sense strand
gagggugacaucuccaagu

SEQ ID NO: 1563611 - RNA, 19 nt, Homo sapiens
  misc_RNA (1)...(19): siRNA sense strand
aaacuugaagcagucauug

SEQ ID NO: 1563612 - RNA, 19 nt, Homo sapiens
  misc_RNA (1)...(19): siRNA sense strand
acaggagggcgaugaccua

SEQ ID NO: 1563613 - RNA, 19 nt, Homo sapiens
  misc_RNA (1)...(19): siRNA sense strand
uccaugcccugucugugaa

SEQ ID NO: 1563614 - RNA, 19 nt, Homo sapiens
  misc_RNA (1)...(19): siRNA sense strand
gagggugacauucccaagu

SEQ ID NO: 1563615 - RNA, 19 nt, Homo sapiens
  misc_RNA (1)...(19): siRNA sense strand
gagggugacauucccaagu

SEQ ID NO: 1563616 - RNA, 19 nt, Homo sapiens
  misc_RNA (1)...(19): siRNA sense strand
gucccaaccuuucaguuuu

SEQ ID NO: 1563617 - RNA, 19 nt, Homo sapiens
  misc_RNA (1)...(19): siRNA sense strand
ccagaagaaaccauccaau

SEQ ID NO: 1563618 - RNA, 19 nt, Homo sapiens
  misc_RNA (1)...(19): siRNA sense strand
gugagagagugcgccauca

SEQ ID NO: 1563619 - RNA, 19 nt, Homo sapiens
  misc_RNA (1)...(19): siRNA sense strand
ccaaggagggugacaucuc

SEQ ID NO: 1563620 - RNA, 19 nt, Homo sapiens
  misc_RNA (1)...(19): siRNA sense strand
ccagaagaaaccauccaau

SEQ ID NO: 1563621 - RNA, 19 nt, Homo sapiens
  misc_RNA (1)...(19): siRNA sense strand
agagugcgccaucaugugu

SEQ ID NO: 1563622 - RNA, 19 nt, Homo sapiens
  misc_RNA (1)...(19): siRNA sense strand
gagcuuugauaacaacuac

SEQ ID NO: 1563623 - RNA, 19 nt, Homo sapiens
  misc_RNA (1)...(19): siRNA sense strand
ccagggcuaugccaaagga

SEQ ID NO: 1563624 - RNA, 19 nt, Homo sapiens
  misc_RNA (1)...(19): siRNA sense strand
cccaugguguuaugaaaga

SEQ ID NO: 1563625 - RNA, 19 nt, Homo sapiens
  misc_RNA (1)...(19): siRNA sense strand
agcuauggcuguggucuua

SEQ ID NO: 1563626 - RNA, 19 nt, Homo sapiens
  misc_RNA (1)...(19): siRNA sense strand
gcuacugcccaugguguua

SEQ ID NO: 1563627 - RNA, 19 nt, Homo sapiens
  misc_RNA (1)...(19): siRNA sense strand
ggccagggcuaugccaaag

SEQ ID NO: 1563628 - RNA, 19 nt, Homo sapiens
  misc_RNA (1)...(19): siRNA sense strand
guuaugaaagaucuugguu

SEQ ID NO: 1563629 - RNA, 19 nt, Homo sapiens
  misc_RNA (1)...(19): siRNA sense strand
gaaacgcacucaaauauga

SEQ ID NO: 1563630 - RNA, 19 nt, Homo sapiens
  misc_RNA (1)...(19): siRNA sense strand
gaacuugacgugaaauaua

SEQ ID NO: 1563631 - RNA, 19 nt, Homo sapiens
  misc_RNA (1)...(19): siRNA sense strand
acaaagagauuauccauga

SEQ ID NO: 1563632 - RNA, 19 nt, Homo sapiens
  misc_RNA (1)...(19): siRNA sense strand
gauagaacuugacgugaaa

SEQ ID NO: 1563633 - RNA, 19 nt, Homo sapiens
  misc_RNA (1)...(19): siRNA sense strand
gaagcaaugugguuaggaa

SEQ ID NO: 1563634 - RNA, 19 nt, Homo sapiens
  misc_RNA (1)...(19): siRNA sense strand
caacugaacugggacaugu

SEQ ID NO: 1563635 - RNA, 19 nt, Homo sapiens
  misc_RNA (1)...(19): siRNA sense strand
ggacugaacaugaugaaga

SEQ ID NO: 1563636 - RNA, 19 nt, Homo sapiens
  misc_RNA (1)...(19): siRNA sense strand
caacgagagucuugaugaa

SEQ ID NO: 1563637 - RNA, 19 nt, Homo sapiens
  misc_RNA (1)...(19): siRNA sense strand
agagugaaauccagaaauu

SEQ ID NO: 1563638 - RNA, 19 nt, Homo sapiens
  misc_RNA (1)...(19): siRNA sense strand
gcaaaccacauacauuauu

SEQ ID NO: 1563639 - RNA, 19 nt, Homo sapiens
  misc_RNA (1)...(19): siRNA sense strand
gaauagcaguguugucauc

SEQ ID NO: 1563640 - RNA, 19 nt, Homo sapiens
  misc_RNA (1)...(19): siRNA sense strand
gcaaugugguuaggaaaga

SEQ ID NO: 1563641 - RNA, 19 nt, Homo sapiens
  misc_RNA (1)...(19): siRNA sense strand
caacgggacugaacaugau

SEQ ID NO: 1563642 - RNA, 19 nt, Homo sapiens
  misc_RNA (1)...(19): siRNA sense strand
agaagaagauagaacuuga

SEQ ID NO: 1563643 - RNA, 19 nt, Homo sapiens
  misc_RNA (1)...(19): siRNA sense strand
ugaagaagaucagaaggaa

SEQ ID NO: 1563644 - RNA, 19 nt, Homo sapiens
  misc_RNA (1)...(19): siRNA sense strand
gagagaagcaaugugguua

SEQ ID NO: 1563645 - RNA, 19 nt, Homo sapiens
  misc_RNA (1)...(19): siRNA sense strand
ucuaaaugcucaccaaaga

SEQ ID NO: 1563646 - RNA, 19 nt, Homo sapiens
  misc_RNA (1)...(19): siRNA sense strand
gaaauucauugcagauggu

SEQ ID NO: 1563647 - RNA, 19 nt, Homo sapiens
  misc_RNA (1)...(19): siRNA sense strand
gagaauagcaguguuguca

SEQ ID NO: 1563648 - RNA, 19 nt, Homo sapiens
  misc_RNA (1)...(19): siRNA sense strand
cacaaaggguaaauaauuc

SEQ ID NO: 1563649 - RNA, 19 nt, Homo sapiens
  misc_RNA (1)...(19): siRNA sense strand
ucauagagauuucaaguac

SEQ ID NO: 1563650 - RNA, 19 nt, Homo sapiens
  misc_RNA (1)...(19): siRNA sense strand
gagagcaccuaccggaaug

SEQ ID NO: 1563651 - RNA, 19 nt, Homo sapiens
  misc_RNA (1)...(19): siRNA sense strand
ggacgacauccaccuuuaa

SEQ ID NO: 1563652 - RNA, 19 nt, Homo sapiens
  misc_RNA (1)...(19): siRNA sense strand
gacugaacaugaugaagaa

SEQ ID NO: 1563653 - RNA, 19 nt, Homo sapiens
  misc_RNA (1)...(19): siRNA sense strand
gcaacgggacugaacauga

SEQ ID NO: 1563654 - RNA, 19 nt, Homo sapiens
  misc_RNA (1)...(19): siRNA sense strand
uauaugaacgcaacucuaa

SEQ ID NO: 1563655 - RNA, 19 nt, Homo sapiens
  misc_RNA (1)...(19): siRNA sense strand
cugcagaacuacugaauuc

SEQ ID NO: 1563656 - RNA, 19 nt, Homo sapiens
  misc_RNA (1)...(19): siRNA sense strand
gaacuugucugagaauagc

SEQ ID NO: 1563657 - RNA, 19 nt, Homo sapiens
  misc_RNA (1)...(19): siRNA sense strand
gcauauaccagucccuuga

SEQ ID NO: 1563658 - RNA, 19 nt, Homo sapiens
  misc_RNA (1)...(19): siRNA sense strand
agauagaacuugacgugaa

SEQ ID NO: 1563659 - RNA, 19 nt, Homo sapiens
  misc_RNA (1)...(19): siRNA sense strand
acacgaaguugcuggaaga

SEQ ID NO: 1563660 - RNA, 19 nt, Homo sapiens
  misc_RNA (1)...(19): siRNA sense strand
uugcaaaccacauacauua

SEQ ID NO: 1563661 - RNA, 19 nt, Homo sapiens
  misc_RNA (1)...(19): siRNA sense strand
caaagaaauugaguaugug

SEQ ID NO: 1563662 - RNA, 19 nt, Homo sapiens
  misc_RNA (1)...(19): siRNA sense strand
ccacauacauuauuaucac

SEQ ID NO: 1563663 - RNA, 19 nt, Homo sapiens
  misc_RNA (1)...(19): siRNA sense strand
caaacagaacacaagaaua

SEQ ID NO: 1563664 - RNA, 19 nt, Homo sapiens
  misc_RNA (1)...(19): siRNA sense strand
gcccgacugugacgaauga

SEQ ID NO: 1563665 - RNA, 19 nt, Homo sapiens
  misc_RNA (1)...(19): siRNA sense strand
ugaagaagcagaaagugaa

SEQ ID NO: 1563666 - RNA, 19 nt, Homo sapiens
  misc_RNA (1)...(19): siRNA sense strand
gcaccuaccggaauguuau

SEQ ID NO: 1563667 - RNA, 19 nt, Homo sapiens
  misc_RNA (1)...(19): siRNA sense strand
gagaagaagauagaacuug

SEQ ID NO: 1563668 - RNA, 19 nt, Homo sapiens
  misc_RNA (1)...(19): siRNA sense strand
gggcugcgaaauuuaauaa

SEQ ID NO: 1563669 - RNA, 19 nt, Homo sapiens
  misc_RNA (1)...(19): siRNA sense strand
ccgaaacgcacucaaauau

SEQ ID NO: 1563670 - RNA, 19 nt, Homo sapiens
  misc_RNA (1)...(19): siRNA sense strand
caagcugaguugaagaaga

SEQ ID NO: 1563671 - RNA, 19 nt, Homo sapiens
  misc_RNA (1)...(19): siRNA sense strand
gaacacaaagaaauugagu

SEQ ID NO: 1563672 - RNA, 19 nt, Homo sapiens
  misc_RNA (1)...(19): siRNA sense strand
uuccgaagaucccaguuua

SEQ ID NO: 1563673 - RNA, 19 nt, Homo sapiens
  misc_RNA (1)...(19): siRNA sense strand
gaaaucccaagcugaguug

SEQ ID NO: 1563674 - RNA, 19 nt, Homo sapiens
  misc_RNA (1)...(19): siRNA sense strand
gaagaagaucagaaggaaa

SEQ ID NO: 1563675 - RNA, 19 nt, Homo sapiens
  misc_RNA (1)...(19): siRNA sense strand
ccaaacagaacacaagaau

SEQ ID NO: 1563676 - RNA, 19 nt, Homo sapiens
  misc_RNA (1)...(19): siRNA sense strand
caucaaagugccagagaaa

SEQ ID NO: 1563677 - RNA, 19 nt, Homo sapiens
  misc_RNA (1)...(19): siRNA sense strand
gaaauccagaaauucauug

SEQ ID NO: 1563678 - RNA, 19 nt, Homo sapiens
  misc_RNA (1)...(19): siRNA sense strand
ggagagcaccuaccggaau

SEQ ID NO: 1563679 - RNA, 19 nt, Homo sapiens
  misc_RNA (1)...(19): siRNA sense strand
gccgaaacgcacucaaaua

SEQ ID NO: 1563680 - RNA, 19 nt, Homo sapiens
  misc_RNA (1)...(19): siRNA sense strand
uaaaugcucaccaaagaug

SEQ ID NO: 1563681 - RNA, 19 nt, Homo sapiens
  misc_RNA (1)...(19): siRNA sense strand
aagcugaguugaagaagau

SEQ ID NO: 1563682 - RNA, 19 nt, Homo sapiens
  misc_RNA (1)...(19): siRNA sense strand
gcacucaaauaugaacaca

SEQ ID NO: 1563683 - RNA, 19 nt, Homo sapiens
  misc_RNA (1)...(19): siRNA sense strand
agaaagcuguaaacgcuau

SEQ ID NO: 1563684 - RNA, 19 nt, Homo sapiens
  misc_RNA (1)...(19): siRNA sense strand
ggaagaaaaugagacagaa

SEQ ID NO: 1563685 - RNA, 19 nt, Homo sapiens
  misc_RNA (1)...(19): siRNA sense strand
cgaaguugcuggaagaaaa

SEQ ID NO: 1563686 - RNA, 19 nt, Homo sapiens
  misc_RNA (1)...(19): siRNA sense strand
gacauguccucauagagau

SEQ ID NO: 1563687 - RNA, 19 nt, Homo sapiens
  misc_RNA (1)...(19): siRNA sense strand
aaggauggcuggcucuaug

SEQ ID NO: 1563688 - RNA, 19 nt, Homo sapiens
  misc_RNA (1)...(19): siRNA sense strand
cagaacuacugaauuccaa

SEQ ID NO: 1563689 - RNA, 19 nt, Homo sapiens
  misc_RNA (1)...(19): siRNA sense strand
aagaggcgcuucugcuuuc

SEQ ID NO: 1563690 - RNA, 19 nt, Homo sapiens
  misc_RNA (1)...(19): siRNA sense strand
aggacgacauccaccuuua

SEQ ID NO: 1563691 - RNA, 19 nt, Homo sapiens
  misc_RNA (1)...(19): siRNA sense strand
cuuacagucugcagaacua

SEQ ID NO: 1563692 - RNA, 19 nt, Homo sapiens
  misc_RNA (1)...(19): siRNA sense strand
ggagaagaagauagaacuu

SEQ ID NO: 1563693 - RNA, 19 nt, Homo sapiens
  misc_RNA (1)...(19): siRNA sense strand
ccucaggcuucacccauga

SEQ ID NO: 1563694 - RNA, 19 nt, Homo sapiens
  misc_RNA (1)...(19): siRNA sense strand
ccaucaaagugccagagaa

SEQ ID NO: 1563695 - RNA, 19 nt, Homo sapiens
  misc_RNA (1)...(19): siRNA sense strand
cuaccggaauguuauggaa

SEQ ID NO: 1563696 - RNA, 19 nt, Homo sapiens
  misc_RNA (1)...(19): siRNA sense strand
gagaagcaaugugguuagg

SEQ ID NO: 1563697 - RNA, 19 nt, Homo sapiens
  misc_RNA (1)...(19): siRNA sense strand
cgaaacgcacucaaauaug

SEQ ID NO: 1563698 - RNA, 19 nt, Homo sapiens
  misc_RNA (1)...(19): siRNA sense strand
gugaacuugucugagaaua

SEQ ID NO: 1563699 - RNA, 19 nt, Homo sapiens
  misc_RNA (1)...(19): siRNA sense strand
accagucccuugaucgaua

SEQ ID NO: 1563700 - RNA, 19 nt, Homo sapiens
  misc_RNA (1)...(19): siRNA sense strand
cgagagaagcaaugugguu

SEQ ID NO: 1563701 - RNA, 19 nt, Homo sapiens
  misc_RNA (1)...(19): siRNA sense strand
ucacuuacagucugcagaa

SEQ ID NO: 1563702 - RNA, 19 nt, Homo sapiens
  misc_RNA (1)...(19): siRNA sense strand
caucagcaccgugaacuug

SEQ ID NO: 1563703 - RNA, 19 nt, Homo sapiens
  misc_RNA (1)...(19): siRNA sense strand
uuacgacacccuuucuaaa

SEQ ID NO: 1563704 - RNA, 19 nt, Homo sapiens
  misc_RNA (1)...(19): siRNA sense strand
aaagauaccaaacagaaca

SEQ ID NO: 1563705 - RNA, 19 nt, Homo sapiens
  misc_RNA (1)...(19): siRNA sense strand
gcaccgugaacuugucuga

SEQ ID NO: 1563706 - RNA, 19 nt, Homo sapiens
  misc_RNA (1)...(19): siRNA sense strand
gaaggauggcuggcucuau

SEQ ID NO: 1563707 - RNA, 19 nt, Homo sapiens
  misc_RNA (1)...(19): siRNA sense strand
gaagaagcagaaagugaag

SEQ ID NO: 1563708 - RNA, 19 nt, Homo sapiens
  misc_RNA (1)...(19): siRNA sense strand
ccacaaagagauuauccau

SEQ ID NO: 1563709 - RNA, 19 nt, Homo sapiens
  misc_RNA (1)...(19): siRNA sense strand
cgacacccuuucuaaaugc

SEQ ID NO: 1563710 - RNA, 19 nt, Homo sapiens
  misc_RNA (1)...(19): siRNA sense strand
acgacacccuuucuaaaug

SEQ ID NO: 1563711 - RNA, 19 nt, Homo sapiens
  misc_RNA (1)...(19): siRNA sense strand
gccaagaucggugagauug

SEQ ID NO: 1563712 - RNA, 19 nt, Homo sapiens
  misc_RNA (1)...(19): siRNA sense strand
uagagucuuuggagaaauc

SEQ ID NO: 1563713 - RNA, 19 nt, Homo sapiens
  misc_RNA (1)...(19): siRNA sense strand
ccagagaaaaucaugaaua

SEQ ID NO: 1563714 - RNA, 19 nt, Homo sapiens
  misc_RNA (1)...(19): siRNA sense strand
ugaacaugaugaagaagca

SEQ ID NO: 1563715 - RNA, 19 nt, Homo sapiens
  misc_RNA (1)...(19): siRNA sense strand
caaagagauuauccaugag

SEQ ID NO: 1563716 - RNA, 19 nt, Homo sapiens
  misc_RNA (1)...(19): siRNA sense strand
uuacuucucgucagaguga

SEQ ID NO: 1563717 - RNA, 19 nt, Homo sapiens
  misc_RNA (1)...(19): siRNA sense strand
gcagaacuacugaauucca

SEQ ID NO: 1563718 - RNA, 19 nt, Homo sapiens
  misc_RNA (1)...(19): siRNA sense strand
gaguauguggagaccguua

SEQ ID NO: 1563719 - RNA, 19 nt, Homo sapiens
  misc_RNA (1)...(19): siRNA sense strand
ccagucccuugaucgauau

SEQ ID NO: 1563720 - RNA, 19 nt, Homo sapiens
  misc_RNA (1)...(19): siRNA sense strand
ucugcuuucugguugauaa

SEQ ID NO: 1563721 - RNA, 19 nt, Homo sapiens
  misc_RNA (1)...(19): siRNA sense strand
gcgcuucugcuuucugguu

SEQ ID NO: 1563722 - RNA, 19 nt, Homo sapiens
  misc_RNA (1)...(19): siRNA sense strand
gauuacgacacccuuucua

SEQ ID NO: 1563723 - RNA, 19 nt, Homo sapiens
  misc_RNA (1)...(19): siRNA sense strand
auccugggcugcgaaauuu

SEQ ID NO: 1563724 - RNA, 19 nt, Homo sapiens
  misc_RNA (1)...(19): siRNA sense strand
accgugaacuugucugaga

SEQ ID NO: 1563725 - RNA, 19 nt, Homo sapiens
  misc_RNA (1)...(19): siRNA sense strand
uacgacacccuuucuaaau

SEQ ID NO: 1563726 - RNA, 19 nt, Homo sapiens
  misc_RNA (1)...(19): siRNA sense strand
caaguacccacaagaaacu

SEQ ID NO: 1563727 - RNA, 19 nt, Homo sapiens
  misc_RNA (1)...(19): siRNA sense strand
uagaacuugacgugaaaua

SEQ ID NO: 1563728 - RNA, 19 nt, Homo sapiens
  misc_RNA (1)...(19): siRNA sense strand
gcacuguggcuuugcaaac

SEQ ID NO: 1563729 - RNA, 19 nt, Homo sapiens
  misc_RNA (1)...(19): siRNA sense strand
caagaaggcucccaugaug

SEQ ID NO: 1563730 - RNA, 19 nt, Homo sapiens
  misc_RNA (1)...(19): siRNA sense strand
gcaacucuaugcugacuuu

SEQ ID NO: 1563731 - RNA, 19 nt, Homo sapiens
  misc_RNA (1)...(19): siRNA sense strand
guacagaacuacauaagca

SEQ ID NO: 1563732 - RNA, 19 nt, Homo sapiens
  misc_RNA (1)...(19): siRNA sense strand
gcaagagcccugaguauga

SEQ ID NO: 1563733 - RNA, 19 nt, Homo sapiens
  misc_RNA (1)...(19): siRNA sense strand
gcgaggugcugacaagaaa

SEQ ID NO: 1563734 - RNA, 19 nt, Homo sapiens
  misc_RNA (1)...(19): siRNA sense strand
gagccgaaguuguacagaa

SEQ ID NO: 1563735 - RNA, 19 nt, Homo sapiens
  misc_RNA (1)...(19): siRNA sense strand
ugacuacgauuccaauuca

SEQ ID NO: 1563736 - RNA, 19 nt, Homo sapiens
  misc_RNA (1)...(19): siRNA sense strand
ggaggaagaggaagaagaa

SEQ ID NO: 1563737 - RNA, 19 nt, Homo sapiens
  misc_RNA (1)...(19): siRNA sense strand
ucucagagccgaaguugua

SEQ ID NO: 1563738 - RNA, 19 nt, Homo sapiens
  misc_RNA (1)...(19): siRNA sense strand
gcugaguucuccauucuga

SEQ ID NO: 1563739 - RNA, 19 nt, Homo sapiens
  misc_RNA (1)...(19): siRNA sense strand
ggaggacgaugaagaagag

SEQ ID NO: 1563740 - RNA, 19 nt, Homo sapiens
  misc_RNA (1)...(19): siRNA sense strand
ggaggaggacgaugaagaa

SEQ ID NO: 1563741 - RNA, 19 nt, Homo sapiens
  misc_RNA (1)...(19): siRNA sense strand
gaagaggcgcuuugaagug

SEQ ID NO: 1563742 - RNA, 19 nt, Homo sapiens
  misc_RNA (1)...(19): siRNA sense strand
ggacagcacccaagacaag

SEQ ID NO: 1563743 - RNA, 19 nt, Homo sapiens
  misc_RNA (1)...(19): siRNA sense strand
gaccuggccuccugcaaga

SEQ ID NO: 1563744 - RNA, 19 nt, Homo sapiens
  misc_RNA (1)...(19): siRNA sense strand
acgaagagcucuccuccuu

SEQ ID NO: 1563745 - RNA, 19 nt, Homo sapiens
  misc_RNA (1)...(19): siRNA sense strand
ggaggaagacgaggaagaa

SEQ ID NO: 1563746 - RNA, 19 nt, Homo sapiens
  misc_RNA (1)...(19): siRNA sense strand
cccacaagcugccaaagaa

SEQ ID NO: 1563747 - RNA, 19 nt, Homo sapiens
  misc_RNA (1)...(19): siRNA sense strand
ugaaguguuuggugagauu

SEQ ID NO: 1563748 - RNA, 19 nt, Homo sapiens
  misc_RNA (1)...(19): siRNA sense strand
gcucugugaugucagcaaa

SEQ ID NO: 1563749 - RNA, 19 nt, Homo sapiens
  misc_RNA (1)...(19): siRNA sense strand
gaggugcugacaagaaaua

SEQ ID NO: 1563750 - RNA, 19 nt, Homo sapiens
  misc_RNA (1)...(19): siRNA sense strand
agaggaggaucccuucaaa

SEQ ID NO: 1563751 - RNA, 19 nt, Homo sapiens
  misc_RNA (1)...(19): siRNA sense strand
gcagagggccguguucaga

SEQ ID NO: 1563752 - RNA, 19 nt, Homo sapiens
  misc_RNA (1)...(19): siRNA sense strand
cagauacacugacuacgau

SEQ ID NO: 1563753 - RNA, 19 nt, Homo sapiens
  misc_RNA (1)...(19): siRNA sense strand
ggacgaagcuggggaggaa

SEQ ID NO: 1563754 - RNA, 19 nt, Homo sapiens
  misc_RNA (1)...(19): siRNA sense strand
ucacaaagcgacccaacuu

SEQ ID NO: 1563755 - RNA, 19 nt, Homo sapiens
  misc_RNA (1)...(19): siRNA sense strand
gggaacuucuggcucaaga

SEQ ID NO: 1563756 - RNA, 19 nt, Homo sapiens
  misc_RNA (1)...(19): siRNA sense strand
gugcuagccucaccaaaca

SEQ ID NO: 1563757 - RNA, 19 nt, Homo sapiens
  misc_RNA (1)...(19): siRNA sense strand
ccaagacccuggaugacau

SEQ ID NO: 1563758 - RNA, 19 nt, Homo sapiens
  misc_RNA (1)...(19): siRNA sense strand
gaggcgcuuugaaguguuu

SEQ ID NO: 1563759 - RNA, 19 nt, Homo sapiens
  misc_RNA (1)...(19): siRNA sense strand
ggaagaagaggaggaggaa

SEQ ID NO: 1563760 - RNA, 19 nt, Homo sapiens
  misc_RNA (1)...(19): siRNA sense strand
gggcugaguucuccauucu

SEQ ID NO: 1563761 - RNA, 19 nt, Homo sapiens
  misc_RNA (1)...(19): siRNA sense strand
gacaagaaggcucccauga

SEQ ID NO: 1563762 - RNA, 19 nt, Homo sapiens
  misc_RNA (1)...(19): siRNA sense strand
agucaacggccuuguguua

SEQ ID NO: 1563763 - RNA, 19 nt, Homo sapiens
  misc_RNA (1)...(19): siRNA sense strand
uggcagagcucaccaagac

SEQ ID NO: 1563764 - RNA, 19 nt, Homo sapiens
  misc_RNA (1)...(19): siRNA sense strand
ucaccaagacccuggauga

SEQ ID NO: 1563765 - RNA, 19 nt, Homo sapiens
  misc_RNA (1)...(19): siRNA sense strand
ccagaaggcguccugcaaa

SEQ ID NO: 1563766 - RNA, 19 nt, Homo sapiens
  misc_RNA (1)...(19): siRNA sense strand
gcugagagaccaugagauc

SEQ ID NO: 1563767 - RNA, 19 nt, Homo sapiens
  misc_RNA (1)...(19): siRNA sense strand
aaaccagacaucaagcaua

SEQ ID NO: 1563768 - RNA, 19 nt, Homo sapiens
  misc_RNA (1)...(19): siRNA sense strand
ccagauacacugacuacga

SEQ ID NO: 1563769 - RNA, 19 nt, Homo sapiens
  misc_RNA (1)...(19): siRNA sense strand
gcaacgagcccuccuucca

SEQ ID NO: 1563770 - RNA, 19 nt, Homo sapiens
  misc_RNA (1)...(19): siRNA sense strand
aaccagacaucaagcauag

SEQ ID NO: 1563771 - RNA, 19 nt, Homo sapiens
  misc_RNA (1)...(19): siRNA sense strand
cucaagacgugcucuguga

SEQ ID NO: 1563772 - RNA, 19 nt, Homo sapiens
  misc_RNA (1)...(19): siRNA sense strand
ggaagacgaggaagaagag

SEQ ID NO: 1563773 - RNA, 19 nt, Homo sapiens
  misc_RNA (1)...(19): siRNA sense strand
ucaacggccuuguguuaag

SEQ ID NO: 1563774 - RNA, 19 nt, Homo sapiens
  misc_RNA (1)...(19): siRNA sense strand
ggaggaggaggacgaugaa

SEQ ID NO: 1563775 - RNA, 19 nt, Homo sapiens
  misc_RNA (1)...(19): siRNA sense strand
ggaggaggaagacgaggaa

SEQ ID NO: 1563776 - RNA, 19 nt, Homo sapiens
  misc_RNA (1)...(19): siRNA sense strand
caagcauagucuaggcaaa

SEQ ID NO: 1563777 - RNA, 19 nt, Homo sapiens
  misc_RNA (1)...(19): siRNA sense strand
gaaauaggagaggcgagaa

SEQ ID NO: 1563778 - RNA, 19 nt, Homo sapiens
  misc_RNA (1)...(19): siRNA sense strand
cagaaggcguccugcaaag

SEQ ID NO: 1563779 - RNA, 19 nt, Homo sapiens
  misc_RNA (1)...(19): siRNA sense strand
gagcugaagaggcgcuuug

SEQ ID NO: 1563780 - RNA, 19 nt, Homo sapiens
  misc_RNA (1)...(19): siRNA sense strand
gcaaguaugaagccaugga

SEQ ID NO: 1563781 - RNA, 19 nt, Homo sapiens
  misc_RNA (1)...(19): siRNA sense strand
uccgagcucuuccagauug

SEQ ID NO: 1563782 - RNA, 19 nt, Homo sapiens
  misc_RNA (1)...(19): siRNA sense strand
uuugacagcuuacugaaag

SEQ ID NO: 1563783 - RNA, 19 nt, Homo sapiens
  misc_RNA (1)...(19): siRNA sense strand
aagaggcgcuuugaagugu

SEQ ID NO: 1563784 - RNA, 19 nt, Homo sapiens
  misc_RNA (1)...(19): siRNA sense strand
gacgugcucugugauguca

SEQ ID NO: 1563785 - RNA, 19 nt, Homo sapiens
  misc_RNA (1)...(19): siRNA sense strand
aguaugaagccauggauuu

SEQ ID NO: 1563786 - RNA, 19 nt, Homo sapiens
  misc_RNA (1)...(19): siRNA sense strand
ggaggaggaagaggaagaa

SEQ ID NO: 1563787 - RNA, 19 nt, Homo sapiens
  misc_RNA (1)...(19): siRNA sense strand
uaccagagcccaccaagca

SEQ ID NO: 1563788 - RNA, 19 nt, Homo sapiens
  misc_RNA (1)...(19): siRNA sense strand
caagagcccugaguaugac

SEQ ID NO: 1563789 - RNA, 19 nt, Homo sapiens
  misc_RNA (1)...(19): siRNA sense strand
aagcgucccuucuccuguu

SEQ ID NO: 1563790 - RNA, 19 nt, Homo sapiens
  misc_RNA (1)...(19): siRNA sense strand
aagaagaggaggaggaaga

SEQ ID NO: 1563791 - RNA, 19 nt, Homo sapiens
  misc_RNA (1)...(19): siRNA sense strand
gcccacaagcugccaaaga

SEQ ID NO: 1563792 - RNA, 19 nt, Homo sapiens
  misc_RNA (1)...(19): siRNA sense strand
uagucuaggcaaagaaaua

SEQ ID NO: 1563793 - RNA, 19 nt, Homo sapiens
  misc_RNA (1)...(19): siRNA sense strand
acaagaaggcucccaugau

SEQ ID NO: 1563794 - RNA, 19 nt, Homo sapiens
  misc_RNA (1)...(19): siRNA sense strand
acuccgagcucuuccagau

SEQ ID NO: 1563795 - RNA, 19 nt, Homo sapiens
  misc_RNA (1)...(19): siRNA sense strand
ugaagaggcgcuuugaagu

SEQ ID NO: 1563796 - RNA, 19 nt, Homo sapiens
  misc_RNA (1)...(19): siRNA sense strand
gaccaugagauccgugcua

SEQ ID NO: 1563797 - RNA, 19 nt, Homo sapiens
  misc_RNA (1)...(19): siRNA sense strand
cauagucuaggcaaagaaa

SEQ ID NO: 1563798 - RNA, 19 nt, Homo sapiens
  misc_RNA (1)...(19): siRNA sense strand
caagacgugcucugugaug

SEQ ID NO: 1563799 - RNA, 19 nt, Homo sapiens
  misc_RNA (1)...(19): siRNA sense strand
ugacucggccaccugcuuu

SEQ ID NO: 1563800 - RNA, 19 nt, Homo sapiens
  misc_RNA (1)...(19): siRNA sense strand
guggagacgcucuaucaug

SEQ ID NO: 1563801 - RNA, 19 nt, Homo sapiens
  misc_RNA (1)...(19): siRNA sense strand
gagcagagggccguguuca

SEQ ID NO: 1563802 - RNA, 19 nt, Homo sapiens
  misc_RNA (1)...(19): siRNA sense strand
ggcgauggugcaacucaua

SEQ ID NO: 1563803 - RNA, 19 nt, Homo sapiens
  misc_RNA (1)...(19): siRNA sense strand
ggccacauccuacccaaca

SEQ ID NO: 1563804 - RNA, 19 nt, Homo sapiens
  misc_RNA (1)...(19): siRNA sense strand
gggaggagcaacucuaugc

SEQ ID NO: 1563805 - RNA, 19 nt, Homo sapiens
  misc_RNA (1)...(19): siRNA sense strand
gcggacagcacccaagaca

SEQ ID NO: 1563806 - RNA, 19 nt, Homo sapiens
  misc_RNA (1)...(19): siRNA sense strand
gugcugacaagaaauagga

SEQ ID NO: 1563807 - RNA, 19 nt, Homo sapiens
  misc_RNA (1)...(19): siRNA sense strand
agauugacagugagaauga

SEQ ID NO: 1563808 - RNA, 19 nt, Homo sapiens
  misc_RNA (1)...(19): siRNA sense strand
gcagggaggaagacagaag

SEQ ID NO: 1563809 - RNA, 19 nt, Homo sapiens
  misc_RNA (1)...(19): siRNA sense strand
uggcugacauuugcagaug

SEQ ID NO: 1563810 - RNA, 19 nt, Homo sapiens
  misc_RNA (1)...(19): siRNA sense strand
gagagcagagggccguguu

SEQ ID NO: 1563811 - RNA, 19 nt, Homo sapiens
  misc_RNA (1)...(19): siRNA sense strand
uagccucaccaaacacuuu

SEQ ID NO: 1563812 - RNA, 19 nt, Homo sapiens
  misc_RNA (1)...(19): siRNA sense strand
cagaggaggaucccuucaa

SEQ ID NO: 1563813 - RNA, 19 nt, Homo sapiens
  misc_RNA (1)...(19): siRNA sense strand
gcugacauuugcagaugag

SEQ ID NO: 1563814 - RNA, 19 nt, Homo sapiens
  misc_RNA (1)...(19): siRNA sense strand
gauacacugacuacgauuc

SEQ ID NO: 1563815 - RNA, 19 nt, Homo sapiens
  misc_RNA (1)...(19): siRNA sense strand
uacgcuacaugcacaccua

SEQ ID NO: 1563816 - RNA, 19 nt, Homo sapiens
  misc_RNA (1)...(19): siRNA sense strand
cucaagcucuggcucuuca

SEQ ID NO: 1563817 - RNA, 19 nt, Homo sapiens
  misc_RNA (1)...(19): siRNA sense strand
cagaggaggaagaggaaga

SEQ ID NO: 1563818 - RNA, 19 nt, Homo sapiens
  misc_RNA (1)...(19): siRNA sense strand
ggaggaucccuucaaacca

SEQ ID NO: 1563819 - RNA, 19 nt, Homo sapiens
  misc_RNA (1)...(19): siRNA sense strand
cgucuggccacgccuguuu

SEQ ID NO: 1563820 - RNA, 19 nt, Homo sapiens
  misc_RNA (1)...(19): siRNA sense strand
aaagucaacggccuugugu

SEQ ID NO: 1563821 - RNA, 19 nt, Homo sapiens
  misc_RNA (1)...(19): siRNA sense strand
cugcaguggugcccagaga

SEQ ID NO: 1563822 - RNA, 19 nt, Homo sapiens
  misc_RNA (1)...(19): siRNA sense strand
ggcugacauuugcagauga

SEQ ID NO: 1563823 - RNA, 19 nt, Homo sapiens
  misc_RNA (1)...(19): siRNA sense strand
gagggaacuucuggcucaa

SEQ ID NO: 1563824 - RNA, 19 nt, Homo sapiens
  misc_RNA (1)...(19): siRNA sense strand
gcaacucauacgcuacaug

SEQ ID NO: 1563825 - RNA, 19 nt, Homo sapiens
  misc_RNA (1)...(19): siRNA sense strand
gucaacggccuuguguuaa

SEQ ID NO: 1563826 - RNA, 19 nt, Homo sapiens
  misc_RNA (1)...(19): siRNA sense strand
ccagauugacagugagaau

SEQ ID NO: 1563827 - RNA, 19 nt, Homo sapiens
  misc_RNA (1)...(19): siRNA sense strand
gcugaagaggcgcuuugaa

SEQ ID NO: 1563828 - RNA, 19 nt, Homo sapiens
  misc_RNA (1)...(19): siRNA sense strand
ucuuccagauugacaguga

SEQ ID NO: 1563829 - RNA, 19 nt, Homo sapiens
  misc_RNA (1)...(19): siRNA sense strand
gagagaagcugaaacagaa

SEQ ID NO: 1563830 - RNA, 19 nt, Homo sapiens
  misc_RNA (1)...(19): siRNA sense strand
ggaaagccaucagcagaga

SEQ ID NO: 1563831 - RNA, 19 nt, Homo sapiens
  misc_RNA (1)...(19): siRNA sense strand
gaugagagaagcugaaaca

SEQ ID NO: 1563832 - RNA, 19 nt, Homo sapiens
  misc_RNA (1)...(19): siRNA sense strand
agaaggcuaugcagacaaa

SEQ ID NO: 1563833 - RNA, 19 nt, Homo sapiens
  misc_RNA (1)...(19): siRNA sense strand
gaaagaggaaaguggaauc

SEQ ID NO: 1563834 - RNA, 19 nt, Homo sapiens
  misc_RNA (1)...(19): siRNA sense strand
ugagagaagcugaaacaga

SEQ ID NO: 1563835 - RNA, 19 nt, Homo sapiens
  misc_RNA (1)...(19): siRNA sense strand
aaagaaggcuaugcagaca

SEQ ID NO: 1563836 - RNA, 19 nt, Homo sapiens
  misc_RNA (1)...(19): siRNA sense strand
cuacaucuucgaccucuuu

SEQ ID NO: 1563837 - RNA, 19 nt, Homo sapiens
  misc_RNA (1)...(19): siRNA sense strand
ggaaagaggaaaguggaau

SEQ ID NO: 1563838 - RNA, 19 nt, Homo sapiens
  misc_RNA (1)...(19): siRNA sense strand
gaaucucuguggcccaucu

SEQ ID NO: 1563839 - RNA, 19 nt, Homo sapiens
  misc_RNA (1)...(19): siRNA sense strand
cagaaccgcaugagggaaa

SEQ ID NO: 1563840 - RNA, 19 nt, Homo sapiens
  misc_RNA (1)...(19): siRNA sense strand
gaaagccaucagcagagaa

SEQ ID NO: 1563841 - RNA, 19 nt, Homo sapiens
  misc_RNA (1)...(19): siRNA sense strand
gagaacucuaugaauauug

SEQ ID NO: 1563842 - RNA, 19 nt, Homo sapiens
  misc_RNA (1)...(19): siRNA sense strand
caggauccaccaccagaaa

SEQ ID NO: 1563843 - RNA, 19 nt, Homo sapiens
  misc_RNA (1)...(19): siRNA sense strand
gaaaacccgcuacaucuuc

SEQ ID NO: 1563844 - RNA, 19 nt, Homo sapiens
  misc_RNA (1)...(19): siRNA sense strand
gggaaagaggaaaguggaa

SEQ ID NO: 1563845 - RNA, 19 nt, Homo sapiens
  misc_RNA (1)...(19): siRNA sense strand
ugccugcggugcauucaga

SEQ ID NO: 1563846 - RNA, 19 nt, Homo sapiens
  misc_RNA (1)...(19): siRNA sense strand
aaagaugagagaagcugaa

SEQ ID NO: 1563847 - RNA, 19 nt, Homo sapiens
  misc_RNA (1)...(19): siRNA sense strand
ugauugagcuggaauauug

SEQ ID NO: 1563848 - RNA, 19 nt, Homo sapiens
  misc_RNA (1)...(19): siRNA sense strand
gaaacuggauguuaucaag

SEQ ID NO: 1563849 - RNA, 19 nt, Homo sapiens
  misc_RNA (1)...(19): siRNA sense strand
agaaggaacuguacacuug

SEQ ID NO: 1563850 - RNA, 19 nt, Homo sapiens
  misc_RNA (1)...(19): siRNA sense strand
ccauaaagcuggaauccuu

SEQ ID NO: 1563851 - RNA, 19 nt, Homo sapiens
  misc_RNA (1)...(19): siRNA sense strand
ggaguaaaguacaauuuca

SEQ ID NO: 1563852 - RNA, 19 nt, Homo sapiens
  misc_RNA (1)...(19): siRNA sense strand
ccagugaagucuauauuug

SEQ ID NO: 1563853 - RNA, 19 nt, Homo sapiens
  misc_RNA (1)...(19): siRNA sense strand
ucacacagcugcuauugau

SEQ ID NO: 1563854 - RNA, 19 nt, Homo sapiens
  misc_RNA (1)...(19): siRNA sense strand
gaacaagaaauuagaagga

SEQ ID NO: 1563855 - RNA, 19 nt, Homo sapiens
  misc_RNA (1)...(19): siRNA sense strand
gaaaggagcuggaaaaugc

SEQ ID NO: 1563856 - RNA, 19 nt, Homo sapiens
  misc_RNA (1)...(19): siRNA sense strand
gagggaaccuguaugacaa

SEQ ID NO: 1563857 - RNA, 19 nt, Homo sapiens
  misc_RNA (1)...(19): siRNA sense strand
ggagagagauggaggaaaa

SEQ ID NO: 1563858 - RNA, 19 nt, Homo sapiens
  misc_RNA (1)...(19): siRNA sense strand
gaugggacauuucuguuga

SEQ ID NO: 1563859 - RNA, 19 nt, Homo sapiens
  misc_RNA (1)...(19): siRNA sense strand
ccacuuaaccuguguguga

SEQ ID NO: 1563860 - RNA, 19 nt, Homo sapiens
  misc_RNA (1)...(19): siRNA sense strand
ccacauggcucugauaucu

SEQ ID NO: 1563861 - RNA, 19 nt, Homo sapiens
  misc_RNA (1)...(19): siRNA sense strand
gagcuggaauauuguaaug

SEQ ID NO: 1563862 - RNA, 19 nt, Homo sapiens
  misc_RNA (1)...(19): siRNA sense strand
uaaagugucuggcugaaca

SEQ ID NO: 1563863 - RNA, 19 nt, Homo sapiens
  misc_RNA (1)...(19): siRNA sense strand
ggugaugaguuuaccauug

SEQ ID NO: 1563864 - RNA, 19 nt, Homo sapiens
  misc_RNA (1)...(19): siRNA sense strand
ccaaacaguuguccuuuua

SEQ ID NO: 1563865 - RNA, 19 nt, Homo sapiens
  misc_RNA (1)...(19): siRNA sense strand
caaaguugcuggcccugaa

SEQ ID NO: 1563866 - RNA, 19 nt, Homo sapiens
  misc_RNA (1)...(19): siRNA sense strand
gaaacaaggaagucuauuc

SEQ ID NO: 1563867 - RNA, 19 nt, Homo sapiens
  misc_RNA (1)...(19): siRNA sense strand
uauaagauccguaccauug

SEQ ID NO: 1563868 - RNA, 19 nt, Homo sapiens
  misc_RNA (1)...(19): siRNA sense strand
ucaauaagcugggucugaa

SEQ ID NO: 1563869 - RNA, 19 nt, Homo sapiens
  misc_RNA (1)...(19): siRNA sense strand
gaagaucgugcaaggaauu

SEQ ID NO: 1563870 - RNA, 19 nt, Homo sapiens
  misc_RNA (1)...(19): siRNA sense strand
ccaguacucuuuggaauug

SEQ ID NO: 1563871 - RNA, 19 nt, Homo sapiens
  misc_RNA (1)...(19): siRNA sense strand
gaacucagacagcaaagga

SEQ ID NO: 1563872 - RNA, 19 nt, Homo sapiens
  misc_RNA (1)...(19): siRNA sense strand
gaccaaggcaaaccugaua

SEQ ID NO: 1563873 - RNA, 19 nt, Homo sapiens
  misc_RNA (1)...(19): siRNA sense strand
aagauacccugcccuauga

SEQ ID NO: 1563874 - RNA, 19 nt, Homo sapiens
  misc_RNA (1)...(19): siRNA sense strand
ggaaggaagucgauuugac

SEQ ID NO: 1563875 - RNA, 19 nt, Homo sapiens
  misc_RNA (1)...(19): siRNA sense strand
gcuggaauauuguaaugga

SEQ ID NO: 1563876 - RNA, 19 nt, Homo sapiens
  misc_RNA (1)...(19): siRNA sense strand
caagaaaaccuccagauuu

SEQ ID NO: 1563877 - RNA, 19 nt, Homo sapiens
  misc_RNA (1)...(19): siRNA sense strand
ggaauggaagguuuaauca

SEQ ID NO: 1563878 - RNA, 19 nt, Homo sapiens
  misc_RNA (1)...(19): siRNA sense strand
ggaagcagaccgaggaaug

SEQ ID NO: 1563879 - RNA, 19 nt, Homo sapiens
  misc_RNA (1)...(19): siRNA sense strand
gaaguucccuacacaacgu

SEQ ID NO: 1563880 - RNA, 19 nt, Homo sapiens
  misc_RNA (1)...(19): siRNA sense strand
gaacugcuuaccuuaaaga

SEQ ID NO: 1563881 - RNA, 19 nt, Homo sapiens
  misc_RNA (1)...(19): siRNA sense strand
ggagggaaccuguaugaca

SEQ ID NO: 1563882 - RNA, 19 nt, Homo sapiens
  misc_RNA (1)...(19): siRNA sense strand
cuacuacaaucacuucaug

SEQ ID NO: 1563883 - RNA, 19 nt, Homo sapiens
  misc_RNA (1)...(19): siRNA sense strand
ggacucaaugaauucaaua

SEQ ID NO: 1563884 - RNA, 19 nt, Homo sapiens
  misc_RNA (1)...(19): siRNA sense strand
cgugaugccuugaaugaga

SEQ ID NO: 1563885 - RNA, 19 nt, Homo sapiens
  misc_RNA (1)...(19): siRNA sense strand
ggaauuaucaaccaugaag

SEQ ID NO: 1563886 - RNA, 19 nt, Homo sapiens
  misc_RNA (1)...(19): siRNA sense strand
ccuguggacucaaugaauu

SEQ ID NO: 1563887 - RNA, 19 nt, Homo sapiens
  misc_RNA (1)...(19): siRNA sense strand
cagaagaggauuauuauac

SEQ ID NO: 1563888 - RNA, 19 nt, Homo sapiens
  misc_RNA (1)...(19): siRNA sense strand
ccaugcagcugaacuucuu

SEQ ID NO: 1563889 - RNA, 19 nt, Homo sapiens
  misc_RNA (1)...(19): siRNA sense strand
guaguaacaucacgaacca

SEQ ID NO: 1563890 - RNA, 19 nt, Homo sapiens
  misc_RNA (1)...(19): siRNA sense strand
auaccacgcugcugauuga

SEQ ID NO: 1563891 - RNA, 19 nt, Homo sapiens
  misc_RNA (1)...(19): siRNA sense strand
aggaagagauggaaaugga

SEQ ID NO: 1563892 - RNA, 19 nt, Homo sapiens
  misc_RNA (1)...(19): siRNA sense strand
cugcagaaguugaacaaga

SEQ ID NO: 1563893 - RNA, 19 nt, Homo sapiens
  misc_RNA (1)...(19): siRNA sense strand
agacaaagccuccuaucga

SEQ ID NO: 1563894 - RNA, 19 nt, Homo sapiens
  misc_RNA (1)...(19): siRNA sense strand
ggaauugauccaaaugguu

SEQ ID NO: 1563895 - RNA, 19 nt, Homo sapiens
  misc_RNA (1)...(19): siRNA sense strand
gagauuauggccuagcaaa

SEQ ID NO: 1563896 - RNA, 19 nt, Homo sapiens
  misc_RNA (1)...(19): siRNA sense strand
ugacuuagauucagauucc

SEQ ID NO: 1563897 - RNA, 19 nt, Homo sapiens
  misc_RNA (1)...(19): siRNA sense strand
caaaggaagagauggaaau

SEQ ID NO: 1563898 - RNA, 19 nt, Homo sapiens
  misc_RNA (1)...(19): siRNA sense strand
gcagaugaacuucuagauc

SEQ ID NO: 1563899 - RNA, 19 nt, Homo sapiens
  misc_RNA (1)...(19): siRNA sense strand
gauuauggccuagcaaaga

SEQ ID NO: 1563900 - RNA, 19 nt, Homo sapiens
  misc_RNA (1)...(19): siRNA sense strand
caacauuauugccuacuac

SEQ ID NO: 1563901 - RNA, 19 nt, Homo sapiens
  misc_RNA (1)...(19): siRNA sense strand
aacagaagcuacagcaaga

SEQ ID NO: 1563902 - RNA, 19 nt, Homo sapiens
  misc_RNA (1)...(19): siRNA sense strand
gagaaggaacgucgugaug

SEQ ID NO: 1563903 - RNA, 19 nt, Homo sapiens
  misc_RNA (1)...(19): siRNA sense strand
gcaggucugugcagggaau

SEQ ID NO: 1563904 - RNA, 19 nt, Homo sapiens
  misc_RNA (1)...(19): siRNA sense strand
uaaugcaccuacaaagaga

SEQ ID NO: 1563905 - RNA, 19 nt, Homo sapiens
  misc_RNA (1)...(19): siRNA sense strand
ggaauccuucauagagaua

SEQ ID NO: 1563906 - RNA, 19 nt, Homo sapiens
  misc_RNA (1)...(19): siRNA sense strand
gcaaaggaagagauggaaa

SEQ ID NO: 1563907 - RNA, 19 nt, Homo sapiens
  misc_RNA (1)...(19): siRNA sense strand
aaagauacccugcccuaug

SEQ ID NO: 1563908 - RNA, 19 nt, Homo sapiens
  misc_RNA (1)...(19): siRNA sense strand
caaagcauguggaaaaguu

SEQ ID NO: 1563909 - RNA, 19 nt, Homo sapiens
  misc_RNA (1)...(19): siRNA sense strand
gcugggccauggagacaaa

SEQ ID NO: 1563910 - RNA, 19 nt, Homo sapiens
  misc_RNA (1)...(19): siRNA sense strand
gagaaggaacuguacacuu

SEQ ID NO: 1563911 - RNA, 19 nt, Homo sapiens
  misc_RNA (1)...(19): siRNA sense strand
gaaccagugaagucuauau

SEQ ID NO: 1563912 - RNA, 19 nt, Homo sapiens
  misc_RNA (1)...(19): siRNA sense strand
guaccuauuucagauuguu

SEQ ID NO: 1563913 - RNA, 19 nt, Homo sapiens
  misc_RNA (1)...(19): siRNA sense strand
gcauaccauucucaucguu

SEQ ID NO: 1563914 - RNA, 19 nt, Homo sapiens
  misc_RNA (1)...(19): siRNA sense strand
gaagaggauuauuauacac

SEQ ID NO: 1563915 - RNA, 19 nt, Homo sapiens
  misc_RNA (1)...(19): siRNA sense strand
ccauggaaguugacucuag

SEQ ID NO: 1563916 - RNA, 19 nt, Homo sapiens
  misc_RNA (1)...(19): siRNA sense strand
gugaagaucgugcaaggaa

SEQ ID NO: 1563917 - RNA, 19 nt, Homo sapiens
  misc_RNA (1)...(19): siRNA sense strand
ucugauaucugggcaguug

SEQ ID NO: 1563918 - RNA, 19 nt, Homo sapiens
  misc_RNA (1)...(19): siRNA sense strand
gaaccuguaugacaaaauc

SEQ ID NO: 1563919 - RNA, 19 nt, Homo sapiens
  misc_RNA (1)...(19): siRNA sense strand
ugcagaaguugaacaagaa

SEQ ID NO: 1563920 - RNA, 19 nt, Homo sapiens
  misc_RNA (1)...(19): siRNA sense strand
gggaagggaacaccacuga

SEQ ID NO: 1563921 - RNA, 19 nt, Homo sapiens
  misc_RNA (1)...(19): siRNA sense strand
cagugcaugucgggaauua

SEQ ID NO: 1563922 - RNA, 19 nt, Homo sapiens
  misc_RNA (1)...(19): siRNA sense strand
ugacccggcugucugagaa

SEQ ID NO: 1563923 - RNA, 19 nt, Homo sapiens
  misc_RNA (1)...(19): siRNA sense strand
gaacuucuuccucagcaau

SEQ ID NO: 1563924 - RNA, 19 nt, Homo sapiens
  misc_RNA (1)...(19): siRNA sense strand
gcaaggaggcacuaaacuc

SEQ ID NO: 1563925 - RNA, 19 nt, Homo sapiens
  misc_RNA (1)...(19): siRNA sense strand
uuaaagaggacguuugaug

SEQ ID NO: 1563926 - RNA, 19 nt, Homo sapiens
  misc_RNA (1)...(19): siRNA sense strand
caaaguggccucugaagcu

SEQ ID NO: 1563927 - RNA, 19 nt, Homo sapiens
  misc_RNA (1)...(19): siRNA sense strand
aauggaagguuuaaucagu

SEQ ID NO: 1563928 - RNA, 19 nt, Homo sapiens
  misc_RNA (1)...(19): siRNA sense strand
acacagcugcuauugauga

SEQ ID NO: 1563929 - RNA, 19 nt, Homo sapiens
  misc_RNA (1)...(19): siRNA sense strand
uaucaaccaugaagcauac

SEQ ID NO: 1563930 - RNA, 19 nt, Homo sapiens
  misc_RNA (1)...(19): siRNA sense strand
gaugcuacaaacccacuua

SEQ ID NO: 1563931 - RNA, 19 nt, Homo sapiens
  misc_RNA (1)...(19): siRNA sense strand
gaagggaacaccacugacu

SEQ ID NO: 1563932 - RNA, 19 nt, Homo sapiens
  misc_RNA (1)...(19): siRNA sense strand
gaaagauacccugcccuau

SEQ ID NO: 1563933 - RNA, 19 nt, Homo sapiens
  misc_RNA (1)...(19): siRNA sense strand
agcaguggcuuauccauug

SEQ ID NO: 1563934 - RNA, 19 nt, Homo sapiens
  misc_RNA (1)...(19): siRNA sense strand
ugaagcauaccaugaaguu

SEQ ID NO: 1563935 - RNA, 19 nt, Homo sapiens
  misc_RNA (1)...(19): siRNA sense strand
cuagaucgcccucuucuca

SEQ ID NO: 1563936 - RNA, 19 nt, Homo sapiens
  misc_RNA (1)...(19): siRNA sense strand
aagagauggugguguggua

SEQ ID NO: 1563937 - RNA, 19 nt, Homo sapiens
  misc_RNA (1)...(19): siRNA sense strand
gcaagaaaaccuccagauu

SEQ ID NO: 1563938 - RNA, 19 nt, Homo sapiens
  misc_RNA (1)...(19): siRNA sense strand
gauuauuguugcaguucaa

SEQ ID NO: 1563939 - RNA, 19 nt, Homo sapiens
  misc_RNA (1)...(19): siRNA sense strand
ggacgacuggguuuggauu

SEQ ID NO: 1563940 - RNA, 19 nt, Homo sapiens
  misc_RNA (1)...(19): siRNA sense strand
gcagcacgacaacauuauu

SEQ ID NO: 1563941 - RNA, 19 nt, Homo sapiens
  misc_RNA (1)...(19): siRNA sense strand
uugaacugcuuaccuuaaa

SEQ ID NO: 1563942 - RNA, 19 nt, Homo sapiens
  misc_RNA (1)...(19): siRNA sense strand
acaacauuauugccuacua

SEQ ID NO: 1563943 - RNA, 19 nt, Homo sapiens
  misc_RNA (1)...(19): siRNA sense strand
ggauccaaagccugacuua

SEQ ID NO: 1563944 - RNA, 19 nt, Homo sapiens
  misc_RNA (1)...(19): siRNA sense strand
gcagguggagguugagaga

SEQ ID NO: 1563945 - RNA, 19 nt, Homo sapiens
  misc_RNA (1)...(19): siRNA sense strand
caagaagcgucugggaauc

SEQ ID NO: 1563946 - RNA, 19 nt, Homo sapiens
  misc_RNA (1)...(19): siRNA sense strand
ccaugaaguucccuacaca

SEQ ID NO: 1563947 - RNA, 19 nt, Homo sapiens
  misc_RNA (1)...(19): siRNA sense strand
uaucgaaucucccgaaaug

SEQ ID NO: 1563948 - RNA, 19 nt, Homo sapiens
  misc_RNA (1)...(19): siRNA sense strand
gaucuuguuugaugaaguu

SEQ ID NO: 1563949 - RNA, 19 nt, Homo sapiens
  misc_RNA (1)...(19): siRNA sense strand
cuacuggcauuguggauga

SEQ ID NO: 1563950 - RNA, 19 nt, Homo sapiens
  misc_RNA (1)...(19): siRNA sense strand
gaccuuagcccaucuacug

SEQ ID NO: 1563951 - RNA, 19 nt, Homo sapiens
  misc_RNA (1)...(19): siRNA sense strand
ccugagaucuauguaacua

SEQ ID NO: 1563952 - RNA, 19 nt, Homo sapiens
  misc_RNA (1)...(19): siRNA sense strand
ggggagaucuuguuugaug

SEQ ID NO: 1563953 - RNA, 19 nt, Homo sapiens
  misc_RNA (1)...(19): siRNA sense strand
ugagaucuauguaacuauc

SEQ ID NO: 1563954 - RNA, 19 nt, Homo sapiens
  misc_RNA (1)...(19): siRNA sense strand
gggagaucuuguuugauga

SEQ ID NO: 1563955 - RNA, 19 nt, Homo sapiens
  misc_RNA (1)...(19): siRNA sense strand
ggaauuggaaguccucagu

SEQ ID NO: 1563956 - RNA, 19 nt, Homo sapiens
  misc_RNA (1)...(19): siRNA sense strand
caguaucgguuugucauug

SEQ ID NO: 1563957 - RNA, 19 nt, Homo sapiens
  misc_RNA (1)...(19): siRNA sense strand
ggagaucuuguuugaugaa

SEQ ID NO: 1563958 - RNA, 19 nt, Homo sapiens
  misc_RNA (1)...(19): siRNA sense strand
gucauugaguuggaccuua

SEQ ID NO: 1563959 - RNA, 19 nt, Homo sapiens
  misc_RNA (1)...(19): siRNA sense strand
gaucuugcaucgacuucca

SEQ ID NO: 1563960 - RNA, 19 nt, Homo sapiens
  misc_RNA (1)...(19): siRNA sense strand
ggccuacuccuccaucauu

SEQ ID NO: 1563961 - RNA, 19 nt, Homo sapiens
  misc_RNA (1)...(19): siRNA sense strand
ucagucaucugcaccaaac

SEQ ID NO: 1563962 - RNA, 19 nt, Homo sapiens
  misc_RNA (1)...(19): siRNA sense strand
ucauugaguuggaccuuag

SEQ ID NO: 1563963 - RNA, 19 nt, Homo sapiens
  misc_RNA (1)...(19): siRNA sense strand
gcagucccaccagaugaua

SEQ ID NO: 1563964 - RNA, 19 nt, Homo sapiens
  misc_RNA (1)...(19): siRNA sense strand
caggggagaucuuguuuga

SEQ ID NO: 1563965 - RNA, 19 nt, Homo sapiens
  misc_RNA (1)...(19): siRNA sense strand
cccaggagaugcugcuuca

SEQ ID NO: 1563966 - RNA, 19 nt, Homo sapiens
  misc_RNA (1)...(19): siRNA sense strand
ucgaaucucccgaaauguu

SEQ ID NO: 1563967 - RNA, 19 nt, Homo sapiens
  misc_RNA (1)...(19): siRNA sense strand
gcaguaucgguuugucauu

SEQ ID NO: 1563968 - RNA, 19 nt, Homo sapiens
  misc_RNA (1)...(19): siRNA sense strand
uagcccaucuacuggcauu

SEQ ID NO: 1563969 - RNA, 19 nt, Homo sapiens
  misc_RNA (1)...(19): siRNA sense strand
aguaucgguuugucauuga

SEQ ID NO: 1563970 - RNA, 19 nt, Homo sapiens
  misc_RNA (1)...(19): siRNA sense strand
uggcuugguuccucaguca

SEQ ID NO: 1563971 - RNA, 19 nt, Homo sapiens
  misc_RNA (1)...(19): siRNA sense strand
cgaaucucccgaaauguuc

SEQ ID NO: 1563972 - RNA, 19 nt, Homo sapiens
  misc_RNA (1)...(19): siRNA sense strand
gccuacuccuccaucauug

SEQ ID NO: 1563973 - RNA, 19 nt, Homo sapiens
  misc_RNA (1)...(19): siRNA sense strand
aauuggaaguccucagugu

SEQ ID NO: 1563974 - RNA, 19 nt, Homo sapiens
  misc_RNA (1)...(19): siRNA sense strand
cagccugagaucuauguaa

SEQ ID NO: 1563975 - RNA, 19 nt, Homo sapiens
  misc_RNA (1)...(19): siRNA sense strand
caggagaugcugcuucagu

SEQ ID NO: 1563976 - RNA, 19 nt, Homo sapiens
  misc_RNA (1)...(19): siRNA sense strand
cuuccuggcuuggcaguau

SEQ ID NO: 1563977 - RNA, 19 nt, Homo sapiens
  misc_RNA (1)...(19): siRNA sense strand
gcuuggcaguaucgguuug

SEQ ID NO: 1563978 - RNA, 19 nt, Homo sapiens
  misc_RNA (1)...(19): siRNA sense strand
gguguuccuguuaaugaaa

SEQ ID NO: 1563979 - RNA, 19 nt, Homo sapiens
  misc_RNA (1)...(19): siRNA sense strand
gagaucuuguuugaugaag

SEQ ID NO: 1563980 - RNA, 19 nt, Homo sapiens
  misc_RNA (1)...(19): siRNA sense strand
ggagaugcugcuucagucu

SEQ ID NO: 1563981 - RNA, 19 nt, Homo sapiens
  misc_RNA (1)...(19): siRNA sense strand
gguuugucauugaguugga

SEQ ID NO: 1563982 - RNA, 19 nt, Homo sapiens
  misc_RNA (1)...(19): siRNA sense strand
gaacgaguuucccaugagu

SEQ ID NO: 1563983 - RNA, 19 nt, Homo sapiens
  misc_RNA (1)...(19): siRNA sense strand
guugaggacauguucauuu

SEQ ID NO: 1563984 - RNA, 19 nt, Homo sapiens
  misc_RNA (1)...(19): siRNA sense strand
uagaugacaagaacaguuu

SEQ ID NO: 1563985 - RNA, 19 nt, Homo sapiens
  misc_RNA (1)...(19): siRNA sense strand
ggagcagccgagcgaguua

SEQ ID NO: 1563986 - RNA, 19 nt, Homo sapiens
  misc_RNA (1)...(19): siRNA sense strand
ccaaggacgugggcaacau

SEQ ID NO: 1563987 - RNA, 19 nt, Homo sapiens
  misc_RNA (1)...(19): siRNA sense strand
ggacgugggcaacaucaag

SEQ ID NO: 1563988 - RNA, 19 nt, Homo sapiens
  misc_RNA (1)...(19): siRNA sense strand
ggaccaauuggcuggcauu

SEQ ID NO: 1563989 - RNA, 19 nt, Homo sapiens
  misc_RNA (1)...(19): siRNA sense strand
agaaagaagccagcucugu

SEQ ID NO: 1563990 - RNA, 19 nt, Homo sapiens
  misc_RNA (1)...(19): siRNA sense strand
cuagaugacaagaacaguu

SEQ ID NO: 1563991 - RNA, 19 nt, Homo sapiens
  misc_RNA (1)...(19): siRNA sense strand
uuccuucccuccaugagaa

SEQ ID NO: 1563992 - RNA, 19 nt, Homo sapiens
  misc_RNA (1)...(19): siRNA sense strand
acgaguuucccaugaguaa

SEQ ID NO: 1563993 - RNA, 19 nt, Homo sapiens
  misc_RNA (1)...(19): siRNA sense strand
aaagaagccagcucugucu

SEQ ID NO: 1563994 - RNA, 19 nt, Homo sapiens
  misc_RNA (1)...(19): siRNA sense strand
uugaggacauguucauuuu

SEQ ID NO: 1563995 - RNA, 19 nt, Homo sapiens
  misc_RNA (1)...(19): siRNA sense strand
cagccgagcgaguuagugu

SEQ ID NO: 1563996 - RNA, 19 nt, Homo sapiens
  misc_RNA (1)...(19): siRNA sense strand
gaacaugaguggcuacauu

SEQ ID NO: 1563997 - RNA, 19 nt, Homo sapiens
  misc_RNA (1)...(19): siRNA sense strand
ccaagaacaugaccaauga

SEQ ID NO: 1563998 - RNA, 19 nt, Homo sapiens
  misc_RNA (1)...(19): siRNA sense strand
gcaaggugcuggaugugua

SEQ ID NO: 1563999 - RNA, 19 nt, Homo sapiens
  misc_RNA (1)...(19): siRNA sense strand
ggauguggauuucuucuug

SEQ ID NO: 1564000 - RNA, 19 nt, Homo sapiens
  misc_RNA (1)...(19): siRNA sense strand
ccacccagauuguuaauau

SEQ ID NO: 1564001 - RNA, 19 nt, Homo sapiens
  misc_RNA (1)...(19): siRNA sense strand
gcucaaagcccgagucuuc

SEQ ID NO: 1564002 - RNA, 19 nt, Homo sapiens
  misc_RNA (1)...(19): siRNA sense strand
gagauaccguccacuauag

SEQ ID NO: 1564003 - RNA, 19 nt, Homo sapiens
  misc_RNA (1)...(19): siRNA sense strand
aagacacucugaagcauua

SEQ ID NO: 1564004 - RNA, 19 nt, Homo sapiens
  misc_RNA (1)...(19): siRNA sense strand
gaacaucagcucuucuuca

SEQ ID NO: 1564005 - RNA, 19 nt, Homo sapiens
  misc_RNA (1)...(19): siRNA sense strand
agaaaucccuggagaagga

SEQ ID NO: 1564006 - RNA, 19 nt, Homo sapiens
  misc_RNA (1)...(19): siRNA sense strand
gaacaugaccaaugacaag

SEQ ID NO: 1564007 - RNA, 19 nt, Homo sapiens
  misc_RNA (1)...(19): siRNA sense strand
uggaugagcugcuagagaa

SEQ ID NO: 1564008 - RNA, 19 nt, Homo sapiens
  misc_RNA (1)...(19): siRNA sense strand
caaagaagcccuggagguu

SEQ ID NO: 1564009 - RNA, 19 nt, Homo sapiens
  misc_RNA (1)...(19): siRNA sense strand
ugagauaccguccacuaua

SEQ ID NO: 1564010 - RNA, 19 nt, Homo sapiens
  misc_RNA (1)...(19): siRNA sense strand
ccacuauagucuccaagaa

SEQ ID NO: 1564011 - RNA, 19 nt, Homo sapiens
  misc_RNA (1)...(19): siRNA sense strand
aggcugagaucaagaagaa

SEQ ID NO: 1564012 - RNA, 19 nt, Homo sapiens
  misc_RNA (1)...(19): siRNA sense strand
gaagacacucugaagcauu

SEQ ID NO: 1564013 - RNA, 19 nt, Homo sapiens
  misc_RNA (1)...(19): siRNA sense strand
uagagaagauccuugagau

SEQ ID NO: 1564014 - RNA, 19 nt, Homo sapiens
  misc_RNA (1)...(19): siRNA sense strand
ccucgaaagugucggcuaa

SEQ ID NO: 1564015 - RNA, 19 nt, Homo sapiens
  misc_RNA (1)...(19): siRNA sense strand
ccaaagagagcaguguuaa

SEQ ID NO: 1564016 - RNA, 19 nt, Homo sapiens
  misc_RNA (1)...(19): siRNA sense strand
gagaagcuccagaugcaaa

SEQ ID NO: 1564017 - RNA, 19 nt, Homo sapiens
  misc_RNA (1)...(19): siRNA sense strand
gaagagaacccagagaaac

SEQ ID NO: 1564018 - RNA, 19 nt, Homo sapiens
  misc_RNA (1)...(19): siRNA sense strand
gagaagagaagcuccagau

SEQ ID NO: 1564019 - RNA, 19 nt, Homo sapiens
  misc_RNA (1)...(19): siRNA sense strand
ggagaccaaagccaagaua

SEQ ID NO: 1564020 - RNA, 19 nt, Homo sapiens
  misc_RNA (1)...(19): siRNA sense strand
agcgaacccuuuccacuua

SEQ ID NO: 1564021 - RNA, 19 nt, Homo sapiens
  misc_RNA (1)...(19): siRNA sense strand
cagagaaacaggcaagaaa

SEQ ID NO: 1564022 - RNA, 19 nt, Homo sapiens
  misc_RNA (1)...(19): siRNA sense strand
ggagguuucugcagacgau

SEQ ID NO: 1564023 - RNA, 19 nt, Homo sapiens
  misc_RNA (1)...(19): siRNA sense strand
gagaucaggagcggaauaa

SEQ ID NO: 1564024 - RNA, 19 nt, Homo sapiens
  misc_RNA (1)...(19): siRNA sense strand
aagagaagcuccagaugca

SEQ ID NO: 1564025 - RNA, 19 nt, Homo sapiens
  misc_RNA (1)...(19): siRNA sense strand
uacaaggucuauaaggauu

SEQ ID NO: 1564026 - RNA, 19 nt, Homo sapiens
  misc_RNA (1)...(19): siRNA sense strand
ggaggaggagcugcuauuu

SEQ ID NO: 1564027 - RNA, 19 nt, Homo sapiens
  misc_RNA (1)...(19): siRNA sense strand
ccacaaugaugauguccau

SEQ ID NO: 1564028 - RNA, 19 nt, Homo sapiens
  misc_RNA (1)...(19): siRNA sense strand
aaauguuccuccuccagua

SEQ ID NO: 1564029 - RNA, 19 nt, Homo sapiens
  misc_RNA (1)...(19): siRNA sense strand
gaacggcagcagcagaaga

SEQ ID NO: 1564030 - RNA, 19 nt, Homo sapiens
  misc_RNA (1)...(19): siRNA sense strand
uagagagccugaacugcaa

SEQ ID NO: 1564031 - RNA, 19 nt, Homo sapiens
  misc_RNA (1)...(19): siRNA sense strand
ggaccucaccacccagauu

SEQ ID NO: 1564032 - RNA, 19 nt, Homo sapiens
  misc_RNA (1)...(19): siRNA sense strand
gggaggaaccacagcugua

SEQ ID NO: 1564033 - RNA, 19 nt, Homo sapiens
  misc_RNA (1)...(19): siRNA sense strand
aacaucagcucuucuucaa

SEQ ID NO: 1564034 - RNA, 19 nt, Homo sapiens
  misc_RNA (1)...(19): siRNA sense strand
gacaagaacagccuggaau

SEQ ID NO: 1564035 - RNA, 19 nt, Homo sapiens
  misc_RNA (1)...(19): siRNA sense strand
gaaccacagcuguacuuca

SEQ ID NO: 1564036 - RNA, 19 nt, Homo sapiens
  misc_RNA (1)...(19): siRNA sense strand
aagaagcccuggagguuuc

SEQ ID NO: 1564037 - RNA, 19 nt, Homo sapiens
  misc_RNA (1)...(19): siRNA sense strand
gcagaagcggcaaauguuc

SEQ ID NO: 1564038 - RNA, 19 nt, Homo sapiens
  misc_RNA (1)...(19): siRNA sense strand
caaagagggucaggguaca

SEQ ID NO: 1564039 - RNA, 19 nt, Homo sapiens
  misc_RNA (1)...(19): siRNA sense strand
ugaagagaacccagagaaa

SEQ ID NO: 1564040 - RNA, 19 nt, Homo sapiens
  misc_RNA (1)...(19): siRNA sense strand
gcugagaucaagaagaaga

SEQ ID NO: 1564041 - RNA, 19 nt, Homo sapiens
  misc_RNA (1)...(19): siRNA sense strand
ccaaagccaagauagagaa

SEQ ID NO: 1564042 - RNA, 19 nt, Homo sapiens
  misc_RNA (1)...(19): siRNA sense strand
gaagcucaccuugaccaaa

SEQ ID NO: 1564043 - RNA, 19 nt, Homo sapiens
  misc_RNA (1)...(19): siRNA sense strand
acacacugauggacaagga

SEQ ID NO: 1564044 - RNA, 19 nt, Homo sapiens
  misc_RNA (1)...(19): siRNA sense strand
cagcgaacccuuuccacuu

SEQ ID NO: 1564045 - RNA, 19 nt, Homo sapiens
  misc_RNA (1)...(19): siRNA sense strand
caggauaagcugcuagaga

SEQ ID NO: 1564046 - RNA, 19 nt, Homo sapiens
  misc_RNA (1)...(19): siRNA sense strand
guggcuacauuaagcagaa

SEQ ID NO: 1564047 - RNA, 19 nt, Homo sapiens
  misc_RNA (1)...(19): siRNA sense strand
gcgaacccuuuccacuuau

SEQ ID NO: 1564048 - RNA, 19 nt, Homo sapiens
  misc_RNA (1)...(19): siRNA sense strand
gaucaggagcggaauaagg

SEQ ID NO: 1564049 - RNA, 19 nt, Homo sapiens
  misc_RNA (1)...(19): siRNA sense strand
ggaucaaacaacagucuga

SEQ ID NO: 1564050 - RNA, 19 nt, Homo sapiens
  misc_RNA (1)...(19): siRNA sense strand
gcaaggcgagcuccaugug

SEQ ID NO: 1564051 - RNA, 19 nt, Homo sapiens
  misc_RNA (1)...(19): siRNA sense strand
aggaguggcuugaagaaca

SEQ ID NO: 1564052 - RNA, 19 nt, Homo sapiens
  misc_RNA (1)...(19): siRNA sense strand
caaggucuauaaggauuuc

SEQ ID NO: 1564053 - RNA, 19 nt, Homo sapiens
  misc_RNA (1)...(19): siRNA sense strand
aacaugaguggcuacauua

SEQ ID NO: 1564054 - RNA, 19 nt, Homo sapiens
  misc_RNA (1)...(19): siRNA sense strand
aaagaagcccuggagguuu

SEQ ID NO: 1564055 - RNA, 19 nt, Homo sapiens
  misc_RNA (1)...(19): siRNA sense strand
gaccaaagccaagauagag

SEQ ID NO: 1564056 - RNA, 19 nt, Homo sapiens
  misc_RNA (1)...(19): siRNA sense strand
uggagacgcuggcgaccaa

SEQ ID NO: 1564057 - RNA, 19 nt, Homo sapiens
  misc_RNA (1)...(19): siRNA sense strand
aagcagaagcggcaaaugu

SEQ ID NO: 1564058 - RNA, 19 nt, Homo sapiens
  misc_RNA (1)...(19): siRNA sense strand
caagggcgaucagcaggau

SEQ ID NO: 1564059 - RNA, 19 nt, Homo sapiens
  misc_RNA (1)...(19): siRNA sense strand
gaccucaccacccagauug

SEQ ID NO: 1564060 - RNA, 19 nt, Homo sapiens
  misc_RNA (1)...(19): siRNA sense strand
aagcucaccuugaccaaag

SEQ ID NO: 1564061 - RNA, 19 nt, Homo sapiens
  misc_RNA (1)...(19): siRNA sense strand
ccaugaacaucagcucuuc

SEQ ID NO: 1564062 - RNA, 19 nt, Homo sapiens
  misc_RNA (1)...(19): siRNA sense strand
ggaguggcuugaagaacag

SEQ ID NO: 1564063 - RNA, 19 nt, Homo sapiens
  misc_RNA (1)...(19): siRNA sense strand
aagccaagauagagaagau

SEQ ID NO: 1564064 - RNA, 19 nt, Homo sapiens
  misc_RNA (1)...(19): siRNA sense strand
acuauagucuccaagaaca

SEQ ID NO: 1564065 - RNA, 19 nt, Homo sapiens
  misc_RNA (1)...(19): siRNA sense strand
ugagagcggcugagaagga

SEQ ID NO: 1564066 - RNA, 19 nt, Homo sapiens
  misc_RNA (1)...(19): siRNA sense strand
gaugaccuacuccucgaaa

SEQ ID NO: 1564067 - RNA, 19 nt, Homo sapiens
  misc_RNA (1)...(19): siRNA sense strand
auuacaaggucuauaagga

SEQ ID NO: 1564068 - RNA, 19 nt, Homo sapiens
  misc_RNA (1)...(19): siRNA sense strand
caugagagcggcugagaag

SEQ ID NO: 1564069 - RNA, 19 nt, Homo sapiens
  misc_RNA (1)...(19): siRNA sense strand
gaugucaagcggagagaga

SEQ ID NO: 1564070 - RNA, 19 nt, Homo sapiens
  misc_RNA (1)...(19): siRNA sense strand
aaagagagcaguguuaacu

SEQ ID NO: 1564071 - RNA, 19 nt, Homo sapiens
  misc_RNA (1)...(19): siRNA sense strand
ugaagacacucugaagcau

SEQ ID NO: 1564072 - RNA, 19 nt, Homo sapiens
  misc_RNA (1)...(19): siRNA sense strand
ucaccacccagauuguuaa

SEQ ID NO: 1564073 - RNA, 19 nt, Homo sapiens
  misc_RNA (1)...(19): siRNA sense strand
cgagaaaucccuggagaag

SEQ ID NO: 1564074 - RNA, 19 nt, Homo sapiens
  misc_RNA (1)...(19): siRNA sense strand
gcgcaucagacuucgagaa

SEQ ID NO: 1564075 - RNA, 19 nt, Homo sapiens
  misc_RNA (1)...(19): siRNA sense strand
gacaaaggaccagggauca

SEQ ID NO: 1564076 - RNA, 19 nt, Homo sapiens
  misc_RNA (1)...(19): siRNA sense strand
agauagagaagauccuuga

SEQ ID NO: 1564077 - RNA, 19 nt, Homo sapiens
  misc_RNA (1)...(19): siRNA sense strand
caagauagagaagauccuu

SEQ ID NO: 1564078 - RNA, 19 nt, Homo sapiens
  misc_RNA (1)...(19): siRNA sense strand
ccuggaagcucaccuugac

SEQ ID NO: 1564079 - RNA, 19 nt, Homo sapiens
  misc_RNA (1)...(19): siRNA sense strand
gagggucaggguacaaaga

SEQ ID NO: 1564080 - RNA, 19 nt, Homo sapiens
  misc_RNA (1)...(19): siRNA sense strand
caaaggaccagggaucaag

SEQ ID NO: 1564081 - RNA, 19 nt, Homo sapiens
  misc_RNA (1)...(19): siRNA sense strand
ccagagaaacaggcaagaa

SEQ ID NO: 1564082 - RNA, 19 nt, Homo sapiens
  misc_RNA (1)...(19): siRNA sense strand
cgaugcgggugcaccagaa

SEQ ID NO: 1564083 - RNA, 19 nt, Homo sapiens
  misc_RNA (1)...(19): siRNA sense strand
ugacaagaacagccuggaa

SEQ ID NO: 1564084 - RNA, 19 nt, Homo sapiens
  misc_RNA (1)...(19): siRNA sense strand
gagaggcaggacacuggua

SEQ ID NO: 1564085 - RNA, 19 nt, Homo sapiens
  misc_RNA (1)...(19): siRNA sense strand
guuaauaucaaaggugaga

SEQ ID NO: 1564086 - RNA, 19 nt, Homo sapiens
  misc_RNA (1)...(19): siRNA sense strand
gcgacuacacgaccuggaa

SEQ ID NO: 1564087 - RNA, 19 nt, Homo sapiens
  misc_RNA (1)...(19): siRNA sense strand
uccaaagagagcaguguua

SEQ ID NO: 1564088 - RNA, 19 nt, Homo sapiens
  misc_RNA (1)...(19): siRNA sense strand
ucaccacaaugaugauguc

SEQ ID NO: 1564089 - RNA, 19 nt, Homo sapiens
  misc_RNA (1)...(19): siRNA sense strand
agaccaaagccaagauaga

SEQ ID NO: 1564090 - RNA, 19 nt, Homo sapiens
  misc_RNA (1)...(19): siRNA sense strand
cugaagagaacccagagaa

SEQ ID NO: 1564091 - RNA, 19 nt, Homo sapiens
  misc_RNA (1)...(19): siRNA sense strand
agcauuacaaggucuauaa

SEQ ID NO: 1564092 - RNA, 19 nt, Homo sapiens
  misc_RNA (1)...(19): siRNA sense strand
ggaggaggaggagcugcua

SEQ ID NO: 1564093 - RNA, 19 nt, Homo sapiens
  misc_RNA (1)...(19): siRNA sense strand
aagagaacccagagaaaca

SEQ ID NO: 1564094 - RNA, 19 nt, Homo sapiens
  misc_RNA (1)...(19): siRNA sense strand
ggaggaaccacagcuguac

SEQ ID NO: 1564095 - RNA, 19 nt, Homo sapiens
  misc_RNA (1)...(19): siRNA sense strand
uuacaaggucuauaaggau

SEQ ID NO: 1564096 - RNA, 19 nt, Homo sapiens
  misc_RNA (1)...(19): siRNA sense strand
ggaaggguguuguguccaa

SEQ ID NO: 1564097 - RNA, 19 nt, Homo sapiens
  misc_RNA (1)...(19): siRNA sense strand
gaacauugugcuggcauua

SEQ ID NO: 1564098 - RNA, 19 nt, Homo sapiens
  misc_RNA (1)...(19): siRNA sense strand
gcaccaccaucuccaaauc

SEQ ID NO: 1564099 - RNA, 19 nt, Homo sapiens
  misc_RNA (1)...(19): siRNA sense strand
ugaccaaccuggccuacuu

SEQ ID NO: 1564100 - RNA, 19 nt, Homo sapiens
  misc_RNA (1)...(19): siRNA sense strand
acauugugcuggcauuaua

SEQ ID NO: 1564101 - RNA, 19 nt, Homo sapiens
  misc_RNA (1)...(19): siRNA sense strand
ggaacauugugcuggcauu

SEQ ID NO: 1564102 - RNA, 19 nt, Homo sapiens
  misc_RNA (1)...(19): siRNA sense strand
gaggauggaauuacuugaa

SEQ ID NO: 1564103 - RNA, 19 nt, Homo sapiens
  misc_RNA (1)...(19): siRNA sense strand
ggcaucggcuucaccauca

SEQ ID NO: 1564104 - RNA, 19 nt, Homo sapiens
  misc_RNA (1)...(19): siRNA sense strand
ccacgaccguccuguguca

SEQ ID NO: 1564105 - RNA, 19 nt, Homo sapiens
  misc_RNA (1)...(19): siRNA sense strand
gguguuguguccaaucuag

SEQ ID NO: 1564106 - RNA, 19 nt, Homo sapiens
  misc_RNA (1)...(19): siRNA sense strand
ggacaucuucuccgucauc

SEQ ID NO: 1564107 - RNA, 19 nt, Homo sapiens
  misc_RNA (1)...(19): siRNA sense strand
uuacuugaauuucgucaca

SEQ ID NO: 1564108 - RNA, 19 nt, Homo sapiens
  misc_RNA (1)...(19): siRNA sense strand
gucaaugggucccuguuca

SEQ ID NO: 1564109 - RNA, 19 nt, Homo sapiens
  misc_RNA (1)...(19): siRNA sense strand
gaacugcuacagcgugaag

SEQ ID NO: 1564110 - RNA, 19 nt, Homo sapiens
  misc_RNA (1)...(19): siRNA sense strand
gaacaucacgcugcucaac

SEQ ID NO: 1564111 - RNA, 19 nt, Homo sapiens
  misc_RNA (1)...(19): siRNA sense strand
ucacagaggaaaugaucaa

SEQ ID NO: 1564112 - RNA, 19 nt, Homo sapiens
  misc_RNA (1)...(19): siRNA sense strand
gaauuucgucacagaggaa

SEQ ID NO: 1564113 - RNA, 19 nt, Homo sapiens
  misc_RNA (1)...(19): siRNA sense strand
gaaggguguuguguccaau

SEQ ID NO: 1564114 - RNA, 19 nt, Homo sapiens
  misc_RNA (1)...(19): siRNA sense strand
ccuacaugcuggaggucua

SEQ ID NO: 1564115 - RNA, 19 nt, Homo sapiens
  misc_RNA (1)...(19): siRNA sense strand
aggauggaauuacuugaau

SEQ ID NO: 1564116 - RNA, 19 nt, Homo sapiens
  misc_RNA (1)...(19): siRNA sense strand
caacuucuucagcuucuuc

SEQ ID NO: 1564117 - RNA, 19 nt, Homo sapiens
  misc_RNA (1)...(19): siRNA sense strand
ggcgucauguccuggauca

SEQ ID NO: 1564118 - RNA, 19 nt, Homo sapiens
  misc_RNA (1)...(19): siRNA sense strand
cauccuggccugccucuuc

SEQ ID NO: 1564119 - RNA, 19 nt, Homo sapiens
  misc_RNA (1)...(19): siRNA sense strand
uauggaggauggaauuacu

SEQ ID NO: 1564120 - RNA, 19 nt, Homo sapiens
  misc_RNA (1)...(19): siRNA sense strand
cgaccguccugugucagaa

SEQ ID NO: 1564121 - RNA, 19 nt, Homo sapiens
  misc_RNA (1)...(19): siRNA sense strand
ggaggauggaauuacuuga

SEQ ID NO: 1564122 - RNA, 19 nt, Homo sapiens
  misc_RNA (1)...(19): siRNA sense strand
gacaucuucuccgucauca

SEQ ID NO: 1564123 - RNA, 19 nt, Homo sapiens
  misc_RNA (1)...(19): siRNA sense strand
caucguggcccuggucuuc

SEQ ID NO: 1564124 - RNA, 19 nt, Homo sapiens
  misc_RNA (1)...(19): siRNA sense strand
gagcucggcaccaccaucu

SEQ ID NO: 1564125 - RNA, 19 nt, Homo sapiens
  misc_RNA (1)...(19): siRNA sense strand
gaucgggaaggguguugug

SEQ ID NO: 1564126 - RNA, 19 nt, Homo sapiens
  misc_RNA (1)...(19): siRNA sense strand
ggcccugccuguguucuuc

SEQ ID NO: 1564127 - RNA, 19 nt, Homo sapiens
  misc_RNA (1)...(19): siRNA sense strand
ucaucaacuucuucagcuu

SEQ ID NO: 1564128 - RNA, 19 nt, Homo sapiens
  misc_RNA (1)...(19): siRNA sense strand
caucuucuccgucaucaac

SEQ ID NO: 1564129 - RNA, 19 nt, Homo sapiens
  misc_RNA (1)...(19): siRNA sense strand
cgucacagaggaaaugauc

SEQ ID NO: 1564130 - RNA, 19 nt, Homo sapiens
  misc_RNA (1)...(19): siRNA sense strand
caacggcguggccaucauc

SEQ ID NO: 1564131 - RNA, 19 nt, Homo sapiens
  misc_RNA (1)...(19): siRNA sense strand
gccuauggaggauggaauu

SEQ ID NO: 1564132 - RNA, 19 nt, Homo sapiens
  misc_RNA (1)...(19): siRNA sense strand
uuauacagcggccucuuug

SEQ ID NO: 1564133 - RNA, 19 nt, Homo sapiens
  misc_RNA (1)...(19): siRNA sense strand
ugaaggcaccaaacuggau

SEQ ID NO: 1564134 - RNA, 19 nt, Homo sapiens
  misc_RNA (1)...(19): siRNA sense strand
ccuauggaggauggaauua

SEQ ID NO: 1564135 - RNA, 19 nt, Homo sapiens
  misc_RNA (1)...(19): siRNA sense strand
gaaaugaucaaccccuaca

SEQ ID NO: 1564136 - RNA, 19 nt, Homo sapiens
  misc_RNA (1)...(19): siRNA sense strand
caucaugucuggacuauuu

SEQ ID NO: 1564137 - RNA, 19 nt, Homo sapiens
  misc_RNA (1)...(19): siRNA sense strand
gaacagccaugcccaguau

SEQ ID NO: 1564138 - RNA, 19 nt, Homo sapiens
  misc_RNA (1)...(19): siRNA sense strand
gaaaugcuguugaagauca

SEQ ID NO: 1564139 - RNA, 19 nt, Homo sapiens
  misc_RNA (1)...(19): siRNA sense strand
caaacaagauugagauuag

SEQ ID NO: 1564140 - RNA, 19 nt, Homo sapiens
  misc_RNA (1)...(19): siRNA sense strand
aaacagaccucaauacagu

SEQ ID NO: 1564141 - RNA, 19 nt, Homo sapiens
  misc_RNA (1)...(19): siRNA sense strand
ucuaucagauugagcauua

SEQ ID NO: 1564142 - RNA, 19 nt, Homo sapiens
  misc_RNA (1)...(19): siRNA sense strand
gcacacagacaaaugaauu

SEQ ID NO: 1564143 - RNA, 19 nt, Homo sapiens
  misc_RNA (1)...(19): siRNA sense strand
gaaacucuacugccaaauu

SEQ ID NO: 1564144 - RNA, 19 nt, Homo sapiens
  misc_RNA (1)...(19): siRNA sense strand
cgacagucuuguacaauuu

SEQ ID NO: 1564145 - RNA, 19 nt, Homo sapiens
  misc_RNA (1)...(19): siRNA sense strand
ccacugaacugaagaaacu

SEQ ID NO: 1564146 - RNA, 19 nt, Homo sapiens
  misc_RNA (1)...(19): siRNA sense strand
gaagauagcaucagaaagc

SEQ ID NO: 1564147 - RNA, 19 nt, Homo sapiens
  misc_RNA (1)...(19): siRNA sense strand
ugaacaagcugccuucugu

SEQ ID NO: 1564148 - RNA, 19 nt, Homo sapiens
  misc_RNA (1)...(19): siRNA sense strand
gaagaucccaucacaggaa

SEQ ID NO: 1564149 - RNA, 19 nt, Homo sapiens
  misc_RNA (1)...(19): siRNA sense strand
gaaccgccguccaauuuua

SEQ ID NO: 1564150 - RNA, 19 nt, Homo sapiens
  misc_RNA (1)...(19): siRNA sense strand
gaucaaagagucccuggaa

SEQ ID NO: 1564151 - RNA, 19 nt, Homo sapiens
  misc_RNA (1)...(19): siRNA sense strand
agagugugcugguaccuua

SEQ ID NO: 1564152 - RNA, 19 nt, Homo sapiens
  misc_RNA (1)...(19): siRNA sense strand
aaacucuacugccaaauug

SEQ ID NO: 1564153 - RNA, 19 nt, Homo sapiens
  misc_RNA (1)...(19): siRNA sense strand
gagauuagcauggacugua

SEQ ID NO: 1564154 - RNA, 19 nt, Homo sapiens
  misc_RNA (1)...(19): siRNA sense strand
uggaaugacuucaacuuug

SEQ ID NO: 1564155 - RNA, 19 nt, Homo sapiens
  misc_RNA (1)...(19): siRNA sense strand
caccagcacuuacuucaga

SEQ ID NO: 1564156 - RNA, 19 nt, Homo sapiens
  misc_RNA (1)...(19): siRNA sense strand
gagcugagccgugaauuca

SEQ ID NO: 1564157 - RNA, 19 nt, Homo sapiens
  misc_RNA (1)...(19): siRNA sense strand
gaugaacuguuauacuuac

SEQ ID NO: 1564158 - RNA, 19 nt, Homo sapiens
  misc_RNA (1)...(19): siRNA sense strand
ucacgacagucuuguacaa

SEQ ID NO: 1564159 - RNA, 19 nt, Homo sapiens
  misc_RNA (1)...(19): siRNA sense strand
cccagaugaugaacuguua

SEQ ID NO: 1564160 - RNA, 19 nt, Homo sapiens
  misc_RNA (1)...(19): siRNA sense strand
cgccaugccugucuacaaa

SEQ ID NO: 1564161 - RNA, 19 nt, Homo sapiens
  misc_RNA (1)...(19): siRNA sense strand
gaagauggugcgacaaaca

SEQ ID NO: 1564162 - RNA, 19 nt, Homo sapiens
  misc_RNA (1)...(19): siRNA sense strand
gagccaacauucccaugau

SEQ ID NO: 1564163 - RNA, 19 nt, Homo sapiens
  misc_RNA (1)...(19): siRNA sense strand
cgucagaacacacauggua

SEQ ID NO: 1564164 - RNA, 19 nt, Homo sapiens
  misc_RNA (1)...(19): siRNA sense strand
cagccuauauguucaguuc

SEQ ID NO: 1564165 - RNA, 19 nt, Homo sapiens
  misc_RNA (1)...(19): siRNA sense strand
ggaacagccaugcccagua

SEQ ID NO: 1564166 - RNA, 19 nt, Homo sapiens
  misc_RNA (1)...(19): siRNA sense strand
aagaaacucuacugccaaa

SEQ ID NO: 1564167 - RNA, 19 nt, Homo sapiens
  misc_RNA (1)...(19): siRNA sense strand
guacugcccugacccuuac

SEQ ID NO: 1564168 - RNA, 19 nt, Homo sapiens
  misc_RNA (1)...(19): siRNA sense strand
gaaacagaccucaauacag

SEQ ID NO: 1564169 - RNA, 19 nt, Homo sapiens
  misc_RNA (1)...(19): siRNA sense strand
ucaauacagucuccaucuu

SEQ ID NO: 1564170 - RNA, 19 nt, Homo sapiens
  misc_RNA (1)...(19): siRNA sense strand
ggaaggcggaugaagauag

SEQ ID NO: 1564171 - RNA, 19 nt, Homo sapiens
  misc_RNA (1)...(19): siRNA sense strand
cuuaugaaaugcuguugaa

SEQ ID NO: 1564172 - RNA, 19 nt, Homo sapiens
  misc_RNA (1)...(19): siRNA sense strand
uguagaagaucccaucaca

SEQ ID NO: 1564173 - RNA, 19 nt, Homo sapiens
  misc_RNA (1)...(19): siRNA sense strand
ucagaaacagaccucaaua

SEQ ID NO: 1564174 - RNA, 19 nt, Homo sapiens
  misc_RNA (1)...(19): siRNA sense strand
acaaagaacggugauggua

SEQ ID NO: 1564175 - RNA, 19 nt, Homo sapiens
  misc_RNA (1)...(19): siRNA sense strand
gaugaaccgccguccaauu

SEQ ID NO: 1564176 - RNA, 19 nt, Homo sapiens
  misc_RNA (1)...(19): siRNA sense strand
cagaagauggugcgacaaa

SEQ ID NO: 1564177 - RNA, 19 nt, Homo sapiens
  misc_RNA (1)...(19): siRNA sense strand
gcacuuacuucagaaacag

SEQ ID NO: 1564178 - RNA, 19 nt, Homo sapiens
  misc_RNA (1)...(19): siRNA sense strand
cauccagcguuucguagaa

SEQ ID NO: 1564179 - RNA, 19 nt, Homo sapiens
  misc_RNA (1)...(19): siRNA sense strand
cagcauugucaguuucuua

SEQ ID NO: 1564180 - RNA, 19 nt, Homo sapiens
  misc_RNA (1)...(19): siRNA sense strand
cagaugaugaacuguuaua

SEQ ID NO: 1564181 - RNA, 19 nt, Homo sapiens
  misc_RNA (1)...(19): siRNA sense strand
gaaggcggaugaagauagc

SEQ ID NO: 1564182 - RNA, 19 nt, Homo sapiens
  misc_RNA (1)...(19): siRNA sense strand
cccauugacuugaacuuug

SEQ ID NO: 1564183 - RNA, 19 nt, Homo sapiens
  misc_RNA (1)...(19): siRNA sense strand
gaugaucuggcaagucuga

SEQ ID NO: 1564184 - RNA, 19 nt, Homo sapiens
  misc_RNA (1)...(19): siRNA sense strand
cagcaaguuucggacagua

SEQ ID NO: 1564185 - RNA, 19 nt, Homo sapiens
  misc_RNA (1)...(19): siRNA sense strand
cgacaaacaagauugagau

SEQ ID NO: 1564186 - RNA, 19 nt, Homo sapiens
  misc_RNA (1)...(19): siRNA sense strand
ccauugacuugaacuuugu

SEQ ID NO: 1564187 - RNA, 19 nt, Homo sapiens
  misc_RNA (1)...(19): siRNA sense strand
ggagccaacauucccauga

SEQ ID NO: 1564188 - RNA, 19 nt, Homo sapiens
  misc_RNA (1)...(19): siRNA sense strand
ugacauccaucaagaaacg

SEQ ID NO: 1564189 - RNA, 19 nt, Homo sapiens
  misc_RNA (1)...(19): siRNA sense strand
cagcucauuucucuuggaa

SEQ ID NO: 1564190 - RNA, 19 nt, Homo sapiens
  misc_RNA (1)...(19): siRNA sense strand
gcauggaccagcagauuca

SEQ ID NO: 1564191 - RNA, 19 nt, Homo sapiens
  misc_RNA (1)...(19): siRNA sense strand
gggaugaaccgccguccaa

SEQ ID NO: 1564192 - RNA, 19 nt, Homo sapiens
  misc_RNA (1)...(19): siRNA sense strand
gagaugaguggaaugacuu

SEQ ID NO: 1564193 - RNA, 19 nt, Homo sapiens
  misc_RNA (1)...(19): siRNA sense strand
uggaugaucuggcaagucu

SEQ ID NO: 1564194 - RNA, 19 nt, Homo sapiens
  misc_RNA (1)...(19): siRNA sense strand
uaugaaaugcuguugaaga

SEQ ID NO: 1564195 - RNA, 19 nt, Homo sapiens
  misc_RNA (1)...(19): siRNA sense strand
ccgugagacuuaugaaaug

SEQ ID NO: 1564196 - RNA, 19 nt, Homo sapiens
  misc_RNA (1)...(19): siRNA sense strand
aaacgaagauccccagaug

SEQ ID NO: 1564197 - RNA, 19 nt, Homo sapiens
  misc_RNA (1)...(19): siRNA sense strand
acacagaccacgcgcagaa

SEQ ID NO: 1564198 - RNA, 19 nt, Homo sapiens
  misc_RNA (1)...(19): siRNA sense strand
guggaaugacuucaacuuu

SEQ ID NO: 1564199 - RNA, 19 nt, Homo sapiens
  misc_RNA (1)...(19): siRNA sense strand
gagguugggcuguucauca

SEQ ID NO: 1564200 - RNA, 19 nt, Homo sapiens
  misc_RNA (1)...(19): siRNA sense strand
ccucagcacacaauugaaa

SEQ ID NO: 1564201 - RNA, 19 nt, Homo sapiens
  misc_RNA (1)...(19): siRNA sense strand
cccuggaacucaugcagua

SEQ ID NO: 1564202 - RNA, 19 nt, Homo sapiens
  misc_RNA (1)...(19): siRNA sense strand
gaagauccccagaugauga

SEQ ID NO: 1564203 - RNA, 19 nt, Homo sapiens
  misc_RNA (1)...(19): siRNA sense strand
acgacagucuuguacaauu

SEQ ID NO: 1564204 - RNA, 19 nt, Homo sapiens
  misc_RNA (1)...(19): siRNA sense strand
ccugagcaauuucgacaug

SEQ ID NO: 1564205 - RNA, 19 nt, Homo sapiens
  misc_RNA (1)...(19): siRNA sense strand
ucccacagauugcagcauu

SEQ ID NO: 1564206 - RNA, 19 nt, Homo sapiens
  misc_RNA (1)...(19): siRNA sense strand
caauacagucuccaucuuc

SEQ ID NO: 1564207 - RNA, 19 nt, Homo sapiens
  misc_RNA (1)...(19): siRNA sense strand
agaaacagaccucaauaca

SEQ ID NO: 1564208 - RNA, 19 nt, Homo sapiens
  misc_RNA (1)...(19): siRNA sense strand
gcagcagcaccagcacuua

SEQ ID NO: 1564209 - RNA, 19 nt, Homo sapiens
  misc_RNA (1)...(19): siRNA sense strand
gacaaacaagauugagauu

SEQ ID NO: 1564210 - RNA, 19 nt, Homo sapiens
  misc_RNA (1)...(19): siRNA sense strand
cgagaugaguggaaugacu

SEQ ID NO: 1564211 - RNA, 19 nt, Homo sapiens
  misc_RNA (1)...(19): siRNA sense strand
guauuccacugaacugaag

SEQ ID NO: 1564212 - RNA, 19 nt, Homo sapiens
  misc_RNA (1)...(19): siRNA sense strand
gcagcaaguuucggacagu

SEQ ID NO: 1564213 - RNA, 19 nt, Homo sapiens
  misc_RNA (1)...(19): siRNA sense strand
gagcacacagacaaaugaa

SEQ ID NO: 1564214 - RNA, 19 nt, Homo sapiens
  misc_RNA (1)...(19): siRNA sense strand
augaaaugcuguugaagau

SEQ ID NO: 1564215 - RNA, 19 nt, Homo sapiens
  misc_RNA (1)...(19): siRNA sense strand
agauuagcauggacuguau

SEQ ID NO: 1564216 - RNA, 19 nt, Homo sapiens
  misc_RNA (1)...(19): siRNA sense strand
uacagucuccaucuucaua

SEQ ID NO: 1564217 - RNA, 19 nt, Homo sapiens
  misc_RNA (1)...(19): siRNA sense strand
gccgugagacuuaugaaau

SEQ ID NO: 1564218 - RNA, 19 nt, Homo sapiens
  misc_RNA (1)...(19): siRNA sense strand
acacaugguauccagauga

SEQ ID NO: 1564219 - RNA, 19 nt, Homo sapiens
  misc_RNA (1)...(19): siRNA sense strand
gagacaggaaggcggauga

SEQ ID NO: 1564220 - RNA, 19 nt, Homo sapiens
  misc_RNA (1)...(19): siRNA sense strand
ggacguauuccacugaacu

SEQ ID NO: 1564221 - RNA, 19 nt, Homo sapiens
  misc_RNA (1)...(19): siRNA sense strand
cagcauggaccagcagauu

SEQ ID NO: 1564222 - RNA, 19 nt, Homo sapiens
  misc_RNA (1)...(19): siRNA sense strand
uuacauccagcguuucgua

SEQ ID NO: 1564223 - RNA, 19 nt, Homo sapiens
  misc_RNA (1)...(19): siRNA sense strand
acaggaaggcggaugaaga

SEQ ID NO: 1564224 - RNA, 19 nt, Homo sapiens
  misc_RNA (1)...(19): siRNA sense strand
ugaauucacgacagucuug

SEQ ID NO: 1564225 - RNA, 19 nt, Homo sapiens
  misc_RNA (1)...(19): siRNA sense strand
gcugagccgugaauucaac

SEQ ID NO: 1564226 - RNA, 19 nt, Homo sapiens
  misc_RNA (1)...(19): siRNA sense strand
cagcauaucugggauuuuc

SEQ ID NO: 1564227 - RNA, 19 nt, Homo sapiens
  misc_RNA (1)...(19): siRNA sense strand
augaaccgccguccaauuu

SEQ ID NO: 1564228 - RNA, 19 nt, Homo sapiens
  misc_RNA (1)...(19): siRNA sense strand
uaagcaacagcgcaucaaa

SEQ ID NO: 1564229 - RNA, 19 nt, Homo sapiens
  misc_RNA (1)...(19): siRNA sense strand
agugugggcuccagugaga

SEQ ID NO: 1564230 - RNA, 19 nt, Homo sapiens
  misc_RNA (1)...(19): siRNA sense strand
aauacagucuccaucuuca

SEQ ID NO: 1564231 - RNA, 19 nt, Homo sapiens
  misc_RNA (1)...(19): siRNA sense strand
gaaaguuauuaccgaucca

SEQ ID NO: 1564232 - RNA, 19 nt, Homo sapiens
  misc_RNA (1)...(19): siRNA sense strand
caucagaaagcagcaaguu

SEQ ID NO: 1564233 - RNA, 19 nt, Homo sapiens
  misc_RNA (1)...(19): siRNA sense strand
acccuuacauccagcguuu

SEQ ID NO: 1564234 - RNA, 19 nt, Homo sapiens
  misc_RNA (1)...(19): siRNA sense strand
caggaaggcggaugaagau

SEQ ID NO: 1564235 - RNA, 19 nt, Homo sapiens
  misc_RNA (1)...(19): siRNA sense strand
guugggcuguucaucaugu

SEQ ID NO: 1564236 - RNA, 19 nt, Homo sapiens
  misc_RNA (1)...(19): siRNA sense strand
caagaaagcucgcaaaguc

SEQ ID NO: 1564237 - RNA, 19 nt, Homo sapiens
  misc_RNA (1)...(19): siRNA sense strand
ggaaggagcugggcaaaug

SEQ ID NO: 1564238 - RNA, 19 nt, Homo sapiens
  misc_RNA (1)...(19): siRNA sense strand
aaaagaagcuggaugauga

SEQ ID NO: 1564239 - RNA, 19 nt, Homo sapiens
  misc_RNA (1)...(19): siRNA sense strand
cagcagaucuugcccuuuc

SEQ ID NO: 1564240 - RNA, 19 nt, Homo sapiens
  misc_RNA (1)...(19): siRNA sense strand
gaagcuggaugaugagagu

SEQ ID NO: 1564241 - RNA, 19 nt, Homo sapiens
  misc_RNA (1)...(19): siRNA sense strand
cugaugaccugaaggauga

SEQ ID NO: 1564242 - RNA, 19 nt, Homo sapiens
  misc_RNA (1)...(19): siRNA sense strand
gcaaggcgcagaaagaaca

SEQ ID NO: 1564243 - RNA, 19 nt, Homo sapiens
  misc_RNA (1)...(19): siRNA sense strand
guaaagauaaagacaagga

SEQ ID NO: 1564244 - RNA, 19 nt, Homo sapiens
  misc_RNA (1)...(19): siRNA sense strand
acaaaacccuucccuauga

SEQ ID NO: 1564245 - RNA, 19 nt, Homo sapiens
  misc_RNA (1)...(19): siRNA sense strand
gcaaacgcaaguucucuga

SEQ ID NO: 1564246 - RNA, 19 nt, Homo sapiens
  misc_RNA (1)...(19): siRNA sense strand
ggacaaaacccuucccuau

SEQ ID NO: 1564247 - RNA, 19 nt, Homo sapiens
  misc_RNA (1)...(19): siRNA sense strand
gggcaaaugcaagaacaua

SEQ ID NO: 1564248 - RNA, 19 nt, Homo sapiens
  misc_RNA (1)...(19): siRNA sense strand
ccacgaagacgcauuuagu

SEQ ID NO: 1564249 - RNA, 19 nt, Homo sapiens
  misc_RNA (1)...(19): siRNA sense strand
gaucaagaaagcucgcaaa

SEQ ID NO: 1564250 - RNA, 19 nt, Homo sapiens
  misc_RNA (1)...(19): siRNA sense strand
ccacagcccaugaucaaga

SEQ ID NO: 1564251 - RNA, 19 nt, Homo sapiens
  misc_RNA (1)...(19): siRNA sense strand
gcaaaccgcaauacaccaa

SEQ ID NO: 1564252 - RNA, 19 nt, Homo sapiens
  misc_RNA (1)...(19): siRNA sense strand
cggagauacuuuccaguug

SEQ ID NO: 1564253 - RNA, 19 nt, Homo sapiens
  misc_RNA (1)...(19): siRNA sense strand
acauggaccuggaggaguu

SEQ ID NO: 1564254 - RNA, 19 nt, Homo sapiens
  misc_RNA (1)...(19): siRNA sense strand
gggcaaggcgcagaaagaa

SEQ ID NO: 1564255 - RNA, 19 nt, Homo sapiens
  misc_RNA (1)...(19): siRNA sense strand
gagcugggcaaaugcaaga

SEQ ID NO: 1564256 - RNA, 19 nt, Homo sapiens
  misc_RNA (1)...(19): siRNA sense strand
cacgaagacgcauuuagua

SEQ ID NO: 1564257 - RNA, 19 nt, Homo sapiens
  misc_RNA (1)...(19): siRNA sense strand
gaaaagaagcuggaugaug

SEQ ID NO: 1564258 - RNA, 19 nt, Homo sapiens
  misc_RNA (1)...(19): siRNA sense strand
gcaaaugcaagaacauacu

SEQ ID NO: 1564259 - RNA, 19 nt, Homo sapiens
  misc_RNA (1)...(19): siRNA sense strand
ccugaaggaugacaaguac

SEQ ID NO: 1564260 - RNA, 19 nt, Homo sapiens
  misc_RNA (1)...(19): siRNA sense strand
gcccggaggcugaaagaga

SEQ ID NO: 1564261 - RNA, 19 nt, Homo sapiens
  misc_RNA (1)...(19): siRNA sense strand
caaaugcaagaacauacuu

SEQ ID NO: 1564262 - RNA, 19 nt, Homo sapiens
  misc_RNA (1)...(19): siRNA sense strand
gggccucguuccuggagaa

SEQ ID NO: 1564263 - RNA, 19 nt, Homo sapiens
  misc_RNA (1)...(19): siRNA sense strand
cccggaggcugaaagagaa

SEQ ID NO: 1564264 - RNA, 19 nt, Homo sapiens
  misc_RNA (1)...(19): siRNA sense strand
acgaagacgcauuuaguaa

SEQ ID NO: 1564265 - RNA, 19 nt, Homo sapiens
  misc_RNA (1)...(19): siRNA sense strand
gcgcagaaagaacaacaug

SEQ ID NO: 1564266 - RNA, 19 nt, Homo sapiens
  misc_RNA (1)...(19): siRNA sense strand
ucaccacgaagacgcauuu

SEQ ID NO: 1564267 - RNA, 19 nt, Homo sapiens
  misc_RNA (1)...(19): siRNA sense strand
cacagcccaugaucaagaa

SEQ ID NO: 1564268 - RNA, 19 nt, Homo sapiens
  misc_RNA (1)...(19): siRNA sense strand
gcaaguucucugaggaaga

SEQ ID NO: 1564269 - RNA, 19 nt, Homo sapiens
  misc_RNA (1)...(19): siRNA sense strand
caauacaccaagucccauu

SEQ ID NO: 1564270 - RNA, 19 nt, Homo sapiens
  misc_RNA (1)...(19): siRNA sense strand
gaaagcucgcaaagucuuc

SEQ ID NO: 1564271 - RNA, 19 nt, Homo sapiens
  misc_RNA (1)...(19): siRNA sense strand
gcugaaagagaaccagauc

SEQ ID NO: 1564272 - RNA, 19 nt, Homo sapiens
  misc_RNA (1)...(19): siRNA sense strand
ccuaugacggagauacuuu

SEQ ID NO: 1564273 - RNA, 19 nt, Homo sapiens
  misc_RNA (1)...(19): siRNA sense strand
ugaaggaugacaaguacug

SEQ ID NO: 1564274 - RNA, 19 nt, Homo sapiens
  misc_RNA (1)...(19): siRNA sense strand
caucccaucuccgaacugu

SEQ ID NO: 1564275 - RNA, 19 nt, Homo sapiens
  misc_RNA (1)...(19): siRNA sense strand
ucaagaaagcucgcaaagu

SEQ ID NO: 1564276 - RNA, 19 nt, Homo sapiens
  misc_RNA (1)...(19): siRNA sense strand
gacaaaacccuucccuaug

SEQ ID NO: 1564277 - RNA, 19 nt, Homo sapiens
  misc_RNA (1)...(19): siRNA sense strand
gaggaaggagcugggcaaa

SEQ ID NO: 1564278 - RNA, 19 nt, Homo sapiens
  misc_RNA (1)...(19): siRNA sense strand
agaaagcucgcaaagucuu

SEQ ID NO: 1564279 - RNA, 19 nt, Homo sapiens
  misc_RNA (1)...(19): siRNA sense strand
aaaccgcaauacaccaagu

SEQ ID NO: 1564280 - RNA, 19 nt, Homo sapiens
  misc_RNA (1)...(19): siRNA sense strand
ucccaucuccgaacuguau

SEQ ID NO: 1564281 - RNA, 19 nt, Homo sapiens
  misc_RNA (1)...(19): siRNA sense strand
ccauugauccugacaccau

SEQ ID NO: 1564282 - RNA, 19 nt, Homo sapiens
  misc_RNA (1)...(19): siRNA sense strand
gaagccacagcccaugauc

SEQ ID NO: 1564283 - RNA, 19 nt, Homo sapiens
  misc_RNA (1)...(19): siRNA sense strand
gggaggaacucgaaucauu

SEQ ID NO: 1564284 - RNA, 19 nt, Homo sapiens
  misc_RNA (1)...(19): siRNA sense strand
gcagcuaccucaugacuau

SEQ ID NO: 1564285 - RNA, 19 nt, Homo sapiens
  misc_RNA (1)...(19): siRNA sense strand
gaggaacucgaaucauuua

SEQ ID NO: 1564286 - RNA, 19 nt, Homo sapiens
  misc_RNA (1)...(19): siRNA sense strand
ggaggaacucgaaucauuu

SEQ ID NO: 1564287 - RNA, 19 nt, Homo sapiens
  misc_RNA (1)...(19): siRNA sense strand
gaacaaucacgacaggaaa

SEQ ID NO: 1564288 - RNA, 19 nt, Homo sapiens
  misc_RNA (1)...(19): siRNA sense strand
ugaacaacuugaacaauca

SEQ ID NO: 1564289 - RNA, 19 nt, Homo sapiens
  misc_RNA (1)...(19): siRNA sense strand
cacuagcccuggcaccuua

SEQ ID NO: 1564290 - RNA, 19 nt, Homo sapiens
  misc_RNA (1)...(19): siRNA sense strand
ccgcgcagcuaccucauga

SEQ ID NO: 1564291 - RNA, 19 nt, Homo sapiens
  misc_RNA (1)...(19): siRNA sense strand
ggaacucgaaucauuuaug

SEQ ID NO: 1564292 - RNA, 19 nt, Homo sapiens
  misc_RNA (1)...(19): siRNA sense strand
ugaagacuccaaaguagaa

SEQ ID NO: 1564293 - RNA, 19 nt, Homo sapiens
  misc_RNA (1)...(19): siRNA sense strand
aauugaagacuccaaagua

SEQ ID NO: 1564294 - RNA, 19 nt, Homo sapiens
  misc_RNA (1)...(19): siRNA sense strand
uugaacaacuugaacaauc

SEQ ID NO: 1564295 - RNA, 19 nt, Homo sapiens
  misc_RNA (1)...(19): siRNA sense strand
ugaacaaucacgacaggaa

SEQ ID NO: 1564296 - RNA, 19 nt, Homo sapiens
  misc_RNA (1)...(19): siRNA sense strand
cgacaggaaacaugcaguu

SEQ ID NO: 1564297 - RNA, 19 nt, Homo sapiens
  misc_RNA (1)...(19): siRNA sense strand
ccuggcaccuuaauugaag

SEQ ID NO: 1564298 - RNA, 19 nt, Homo sapiens
  misc_RNA (1)...(19): siRNA sense strand
gcccuggcaccuuaauuga

SEQ ID NO: 1564299 - RNA, 19 nt, Homo sapiens
  misc_RNA (1)...(19): siRNA sense strand
gggaugaugcucaguucga

SEQ ID NO: 1564300 - RNA, 19 nt, Homo sapiens
  misc_RNA (1)...(19): siRNA sense strand
agacuccaaaguagaagua

SEQ ID NO: 1564301 - RNA, 19 nt, Homo sapiens
  misc_RNA (1)...(19): siRNA sense strand
auugaagacuccaaaguag

SEQ ID NO: 1564302 - RNA, 19 nt, Homo sapiens
  misc_RNA (1)...(19): siRNA sense strand
uaauugaagacuccaaagu

SEQ ID NO: 1564303 - RNA, 19 nt, Homo sapiens
  misc_RNA (1)...(19): siRNA sense strand
gacaggaaacaugcaguug

SEQ ID NO: 1564304 - RNA, 19 nt, Homo sapiens
  misc_RNA (1)...(19): siRNA sense strand
acuccaaaguagaaguaaa

SEQ ID NO: 1564305 - RNA, 19 nt, Homo sapiens
  misc_RNA (1)...(19): siRNA sense strand
ccaaaguagaaguaaacaa

SEQ ID NO: 1564306 - RNA, 19 nt, Homo sapiens
  misc_RNA (1)...(19): siRNA sense strand
ucuguuggaucgucgcaau

SEQ ID NO: 1564307 - RNA, 19 nt, Homo sapiens
  misc_RNA (1)...(19): siRNA sense strand
cccaauaucccaggaguca

SEQ ID NO: 1564308 - RNA, 19 nt, Homo sapiens
  misc_RNA (1)...(19): siRNA sense strand
ggauacagcuggucaagaa

SEQ ID NO: 1564309 - RNA, 19 nt, Homo sapiens
  misc_RNA (1)...(19): siRNA sense strand
gcaagcaaguccuaacauu

SEQ ID NO: 1564310 - RNA, 19 nt, Homo sapiens
  misc_RNA (1)...(19): siRNA sense strand
gccaaauacuggaaauaaa

SEQ ID NO: 1564311 - RNA, 19 nt, Homo sapiens
  misc_RNA (1)...(19): siRNA sense strand
caaacuguaugucuugaug

SEQ ID NO: 1564312 - RNA, 19 nt, Homo sapiens
  misc_RNA (1)...(19): siRNA sense strand
ggaagaggaguagaccuua

SEQ ID NO: 1564313 - RNA, 19 nt, Homo sapiens
  misc_RNA (1)...(19): siRNA sense strand
gcacaagcagccauaguug

SEQ ID NO: 1564314 - RNA, 19 nt, Homo sapiens
  misc_RNA (1)...(19): siRNA sense strand
aggaaucaguguuguagua

SEQ ID NO: 1564315 - RNA, 19 nt, Homo sapiens
  misc_RNA (1)...(19): siRNA sense strand
gcagaugacaauaguuuau

SEQ ID NO: 1564316 - RNA, 19 nt, Homo sapiens
  misc_RNA (1)...(19): siRNA sense strand
ggccaaauacuggaaauaa

SEQ ID NO: 1564317 - RNA, 19 nt, Homo sapiens
  misc_RNA (1)...(19): siRNA sense strand
gaagaggaguagaccuuac

SEQ ID NO: 1564318 - RNA, 19 nt, Homo sapiens
  misc_RNA (1)...(19): siRNA sense strand
gcacaguccuaugcagaug

SEQ ID NO: 1564319 - RNA, 19 nt, Homo sapiens
  misc_RNA (1)...(19): siRNA sense strand
gcuaaaacaucaaugaaug

SEQ ID NO: 1564320 - RNA, 19 nt, Homo sapiens
  misc_RNA (1)...(19): siRNA sense strand
ggaaucaguguuguaguaa

SEQ ID NO: 1564321 - RNA, 19 nt, Homo sapiens
  misc_RNA (1)...(19): siRNA sense strand
acacuacaguaaaguuuga

SEQ ID NO: 1564322 - RNA, 19 nt, Homo sapiens
  misc_RNA (1)...(19): siRNA sense strand
aaacaaggccgaccuagca

SEQ ID NO: 1564323 - RNA, 19 nt, Homo sapiens
  misc_RNA (1)...(19): siRNA sense strand
gccaaagaaugaaccacaa

SEQ ID NO: 1564324 - RNA, 19 nt, Homo sapiens
  misc_RNA (1)...(19): siRNA sense strand
aagcagccauaguuguaua

SEQ ID NO: 1564325 - RNA, 19 nt, Homo sapiens
  misc_RNA (1)...(19): siRNA sense strand
caagcaaguccuaacauug

SEQ ID NO: 1564326 - RNA, 19 nt, Homo sapiens
  misc_RNA (1)...(19): siRNA sense strand
aggccgaccuagcaaauaa

SEQ ID NO: 1564327 - RNA, 19 nt, Homo sapiens
  misc_RNA (1)...(19): siRNA sense strand
gaacuucagaggcaagcaa

SEQ ID NO: 1564328 - RNA, 19 nt, Homo sapiens
  misc_RNA (1)...(19): siRNA sense strand
uaaaagagcaguagauuuc

SEQ ID NO: 1564329 - RNA, 19 nt, Homo sapiens
  misc_RNA (1)...(19): siRNA sense strand
gcaaguccuaacauuguaa

SEQ ID NO: 1564330 - RNA, 19 nt, Homo sapiens
  misc_RNA (1)...(19): siRNA sense strand
ccacacaaccaaccaggaa

SEQ ID NO: 1564331 - RNA, 19 nt, Homo sapiens
  misc_RNA (1)...(19): siRNA sense strand
agaguccgcuguuggcaaa

SEQ ID NO: 1564332 - RNA, 19 nt, Homo sapiens
  misc_RNA (1)...(19): siRNA sense strand
ccaaagaaugaaccacaaa

SEQ ID NO: 1564333 - RNA, 19 nt, Homo sapiens
  misc_RNA (1)...(19): siRNA sense strand
ugacacuacaguaaaguuu

SEQ ID NO: 1564334 - RNA, 19 nt, Homo sapiens
  misc_RNA (1)...(19): siRNA sense strand
aaaggccaauuucaugaau

SEQ ID NO: 1564335 - RNA, 19 nt, Homo sapiens
  misc_RNA (1)...(19): siRNA sense strand
uaauagcuuuaucgggaaa

SEQ ID NO: 1564336 - RNA, 19 nt, Homo sapiens
  misc_RNA (1)...(19): siRNA sense strand
agacccaacgggccaaaua

SEQ ID NO: 1564337 - RNA, 19 nt, Homo sapiens
  misc_RNA (1)...(19): siRNA sense strand
caaccaaccaggaaucagu

SEQ ID NO: 1564338 - RNA, 19 nt, Homo sapiens
  misc_RNA (1)...(19): siRNA sense strand
aagcaaguccuaacauugu

SEQ ID NO: 1564339 - RNA, 19 nt, Homo sapiens
  misc_RNA (1)...(19): siRNA sense strand
ugaugacacuacaguaaag

SEQ ID NO: 1564340 - RNA, 19 nt, Homo sapiens
  misc_RNA (1)...(19): siRNA sense strand
cuacagaggagcacaagca

SEQ ID NO: 1564341 - RNA, 19 nt, Homo sapiens
  misc_RNA (1)...(19): siRNA sense strand
gaaucaguguuguaguaac

SEQ ID NO: 1564342 - RNA, 19 nt, Homo sapiens
  misc_RNA (1)...(19): siRNA sense strand
gggaaacaaggccgaccua

SEQ ID NO: 1564343 - RNA, 19 nt, Homo sapiens
  misc_RNA (1)...(19): siRNA sense strand
ggagacauccgcuaaaaca

SEQ ID NO: 1564344 - RNA, 19 nt, Homo sapiens
  misc_RNA (1)...(19): siRNA sense strand
cuugaugacacuacaguaa

SEQ ID NO: 1564345 - RNA, 19 nt, Homo sapiens
  misc_RNA (1)...(19): siRNA sense strand
gacacuacaguaaaguuug

SEQ ID NO: 1564346 - RNA, 19 nt, Homo sapiens
  misc_RNA (1)...(19): siRNA sense strand
caaggccgaccuagcaaau

SEQ ID NO: 1564347 - RNA, 19 nt, Homo sapiens
  misc_RNA (1)...(19): siRNA sense strand
ucauggagacauccgcuaa

SEQ ID NO: 1564348 - RNA, 19 nt, Homo sapiens
  misc_RNA (1)...(19): siRNA sense strand
gggccaaauacuggaaaua

SEQ ID NO: 1564349 - RNA, 19 nt, Homo sapiens
  misc_RNA (1)...(19): siRNA sense strand
agcaaguccuaacauugua

SEQ ID NO: 1564350 - RNA, 19 nt, Homo sapiens
  misc_RNA (1)...(19): siRNA sense strand
uaccauagccuagcaccaa

SEQ ID NO: 1564351 - RNA, 19 nt, Homo sapiens
  misc_RNA (1)...(19): siRNA sense strand
aacccaaacuguaugucuu

SEQ ID NO: 1564352 - RNA, 19 nt, Homo sapiens
  misc_RNA (1)...(19): siRNA sense strand
augcagaugacaauaguuu

SEQ ID NO: 1564353 - RNA, 19 nt, Homo sapiens
  misc_RNA (1)...(19): siRNA sense strand
ggaagcacaguccuaugca

SEQ ID NO: 1564354 - RNA, 19 nt, Homo sapiens
  misc_RNA (1)...(19): siRNA sense strand
gagcacaagcagccauagu

SEQ ID NO: 1564355 - RNA, 19 nt, Homo sapiens
  misc_RNA (1)...(19): siRNA sense strand
guacuacagaggagcacaa

SEQ ID NO: 1564356 - RNA, 19 nt, Homo sapiens
  misc_RNA (1)...(19): siRNA sense strand
gccuagcaccaauguacua

SEQ ID NO: 1564357 - RNA, 19 nt, Homo sapiens
  misc_RNA (1)...(19): siRNA sense strand
aaucaguguuguaguaacu

SEQ ID NO: 1564358 - RNA, 19 nt, Homo sapiens
  misc_RNA (1)...(19): siRNA sense strand
aaagagcaguagauuucca

SEQ ID NO: 1564359 - RNA, 19 nt, Homo sapiens
  misc_RNA (1)...(19): siRNA sense strand
uuucuaacccaaacuguau

SEQ ID NO: 1564360 - RNA, 19 nt, Homo sapiens
  misc_RNA (1)...(19): siRNA sense strand
ccaggaaucaguguuguag

SEQ ID NO: 1564361 - RNA, 19 nt, Homo sapiens
  misc_RNA (1)...(19): siRNA sense strand
guccuaacauuguaauagc

SEQ ID NO: 1564362 - RNA, 19 nt, Homo sapiens
  misc_RNA (1)...(19): siRNA sense strand
gacauccgcuaaaacauca

SEQ ID NO: 1564363 - RNA, 19 nt, Homo sapiens
  misc_RNA (1)...(19): siRNA sense strand
uaacccaaacuguaugucu

SEQ ID NO: 1564364 - RNA, 19 nt, Homo sapiens
  misc_RNA (1)...(19): siRNA sense strand
gaacccacacaaccaacca

SEQ ID NO: 1564365 - RNA, 19 nt, Homo sapiens
  misc_RNA (1)...(19): siRNA sense strand
caaagaaugaaccacaaaa

SEQ ID NO: 1564366 - RNA, 19 nt, Homo sapiens
  misc_RNA (1)...(19): siRNA sense strand
uggcaaaucaagccuagug

SEQ ID NO: 1564367 - RNA, 19 nt, Homo sapiens
  misc_RNA (1)...(19): siRNA sense strand
uagccuagcaccaauguac

SEQ ID NO: 1564368 - RNA, 19 nt, Homo sapiens
  misc_RNA (1)...(19): siRNA sense strand
cauggagacauccgcuaaa

SEQ ID NO: 1564369 - RNA, 19 nt, Homo sapiens
  misc_RNA (1)...(19): siRNA sense strand
cgaccuagcaaauaaaaga

SEQ ID NO: 1564370 - RNA, 19 nt, Homo sapiens
  misc_RNA (1)...(19): siRNA sense strand
cauuggggcugcuuuucua

SEQ ID NO: 1564371 - RNA, 19 nt, Homo sapiens
  misc_RNA (1)...(19): siRNA sense strand
caagcagccauaguuguau

SEQ ID NO: 1564372 - RNA, 19 nt, Homo sapiens
  misc_RNA (1)...(19): siRNA sense strand
aaacuguaugucuugauga

SEQ ID NO: 1564373 - RNA, 19 nt, Homo sapiens
  misc_RNA (1)...(19): siRNA sense strand
gcaaauaaaagagcaguag

SEQ ID NO: 1564374 - RNA, 19 nt, Homo sapiens
  misc_RNA (1)...(19): siRNA sense strand
cagaggcaagcaaguccua

SEQ ID NO: 1564375 - RNA, 19 nt, Homo sapiens
  misc_RNA (1)...(19): siRNA sense strand
uugaugacacuacaguaaa

SEQ ID NO: 1564376 - RNA, 19 nt, Homo sapiens
  misc_RNA (1)...(19): siRNA sense strand
gaaagaagauaugaccuau

SEQ ID NO: 1564377 - RNA, 19 nt, Homo sapiens
  misc_RNA (1)...(19): siRNA sense strand
uaacuuaccuccagacauc

SEQ ID NO: 1564378 - RNA, 19 nt, Homo sapiens
  misc_RNA (1)...(19): siRNA sense strand
ggaaagaagauaugaccua

SEQ ID NO: 1564379 - RNA, 19 nt, Homo sapiens
  misc_RNA (1)...(19): siRNA sense strand
gcacuggugucguggaguu

SEQ ID NO: 1564380 - RNA, 19 nt, Homo sapiens
  misc_RNA (1)...(19): siRNA sense strand
ugaagcaggugauguaugu

SEQ ID NO: 1564381 - RNA, 19 nt, Homo sapiens
  misc_RNA (1)...(19): siRNA sense strand
gggagaaacugccuacauc

SEQ ID NO: 1564382 - RNA, 19 nt, Homo sapiens
  misc_RNA (1)...(19): siRNA sense strand
gauaugaccuaugcaguuc

SEQ ID NO: 1564383 - RNA, 19 nt, Homo sapiens
  misc_RNA (1)...(19): siRNA sense strand
gcccagaaguccaaguuau

SEQ ID NO: 1564384 - RNA, 19 nt, Homo sapiens
  misc_RNA (1)...(19): siRNA sense strand
gaggacguguucuacaaau

SEQ ID NO: 1564385 - RNA, 19 nt, Homo sapiens
  misc_RNA (1)...(19): siRNA sense strand
ucucgaagccguagucgua

SEQ ID NO: 1564386 - RNA, 19 nt, Homo sapiens
  misc_RNA (1)...(19): siRNA sense strand
cgacaucgaccucaagaau

SEQ ID NO: 1564387 - RNA, 19 nt, Homo sapiens
  misc_RNA (1)...(19): siRNA sense strand
aagaagauaugaccuaugc

SEQ ID NO: 1564388 - RNA, 19 nt, Homo sapiens
  misc_RNA (1)...(19): siRNA sense strand
caucuacguggguaacuua

SEQ ID NO: 1564389 - RNA, 19 nt, Homo sapiens
  misc_RNA (1)...(19): siRNA sense strand
cuggauaacacuaaguuua

SEQ ID NO: 1564390 - RNA, 19 nt, Homo sapiens
  misc_RNA (1)...(19): siRNA sense strand
cgacggcuaugauuacgau

SEQ ID NO: 1564391 - RNA, 19 nt, Homo sapiens
  misc_RNA (1)...(19): siRNA sense strand
ggacauugaggacguguuc

SEQ ID NO: 1564392 - RNA, 19 nt, Homo sapiens
  misc_RNA (1)...(19): siRNA sense strand
gcgugaagcaggugaugua

SEQ ID NO: 1564393 - RNA, 19 nt, Homo sapiens
  misc_RNA (1)...(19): siRNA sense strand
aagcaggugauguauguua

SEQ ID NO: 1564394 - RNA, 19 nt, Homo sapiens
  misc_RNA (1)...(19): siRNA sense strand
gucgggagguggugugauu

SEQ ID NO: 1564395 - RNA, 19 nt, Homo sapiens
  misc_RNA (1)...(19): siRNA sense strand
ggacguguucuacaaauac

SEQ ID NO: 1564396 - RNA, 19 nt, Homo sapiens
  misc_RNA (1)...(19): siRNA sense strand
guacggaaagaagauauga

SEQ ID NO: 1564397 - RNA, 19 nt, Homo sapiens
  misc_RNA (1)...(19): siRNA sense strand
gaaaacuggauaacacuaa

SEQ ID NO: 1564398 - RNA, 19 nt, Homo sapiens
  misc_RNA (1)...(19): siRNA sense strand
gcaucuacguggguaacuu

SEQ ID NO: 1564399 - RNA, 19 nt, Homo sapiens
  misc_RNA (1)...(19): siRNA sense strand
cuacauccggguuaaaguu

SEQ ID NO: 1564400 - RNA, 19 nt, Homo sapiens
  misc_RNA (1)...(19): siRNA sense strand
gcugauguuuaccgagaug

SEQ ID NO: 1564401 - RNA, 19 nt, Homo sapiens
  misc_RNA (1)...(19): siRNA sense strand
ccaaggagaagcagaggau

SEQ ID NO: 1564402 - RNA, 19 nt, Homo sapiens
  misc_RNA (1)...(19): siRNA sense strand
uugaggacguguucuacaa

SEQ ID NO: 1564403 - RNA, 19 nt, Homo sapiens
  misc_RNA (1)...(19): siRNA sense strand
cagaggaucaccacgcuau

SEQ ID NO: 1564404 - RNA, 19 nt, Homo sapiens
  misc_RNA (1)...(19): siRNA sense strand
ugauguauguuaugcugau

SEQ ID NO: 1564405 - RNA, 19 nt, Homo sapiens
  misc_RNA (1)...(19): siRNA sense strand
aggacguguucuacaaaua

SEQ ID NO: 1564406 - RNA, 19 nt, Homo sapiens
  misc_RNA (1)...(19): siRNA sense strand
gaggaucaccacgcuauuc

SEQ ID NO: 1564407 - RNA, 19 nt, Homo sapiens
  misc_RNA (1)...(19): siRNA sense strand
agauaugaccuaugcaguu

SEQ ID NO: 1564408 - RNA, 19 nt, Homo sapiens
  misc_RNA (1)...(19): siRNA sense strand
cagcaggagucgcaguuac

SEQ ID NO: 1564409 - RNA, 19 nt, Homo sapiens
  misc_RNA (1)...(19): siRNA sense strand
cuacaaauacggcgcuauc

SEQ ID NO: 1564410 - RNA, 19 nt, Homo sapiens
  misc_RNA (1)...(19): siRNA sense strand
gcaggugauguauguuaug

SEQ ID NO: 1564411 - RNA, 19 nt, Homo sapiens
  misc_RNA (1)...(19): siRNA sense strand
ccgcagggaacaacgauug

SEQ ID NO: 1564412 - RNA, 19 nt, Homo sapiens
  misc_RNA (1)...(19): siRNA sense strand
ggucgcgacggcuaugauu

SEQ ID NO: 1564413 - RNA, 19 nt, Homo sapiens
  misc_RNA (1)...(19): siRNA sense strand
ggcccagaaguccaaguua

SEQ ID NO: 1564414 - RNA, 19 nt, Homo sapiens
  misc_RNA (1)...(19): siRNA sense strand
uguauguuaugcugauguu

SEQ ID NO: 1564415 - RNA, 19 nt, Homo sapiens
  misc_RNA (1)...(19): siRNA sense strand
gacaucgaccucaagaauc

SEQ ID NO: 1564416 - RNA, 19 nt, Homo sapiens
  misc_RNA (1)...(19): siRNA sense strand
gaucucgcucucguacaua

SEQ ID NO: 1564417 - RNA, 19 nt, Homo sapiens
  misc_RNA (1)...(19): siRNA sense strand
cggguggaguuuccucgaa

SEQ ID NO: 1564418 - RNA, 19 nt, Homo sapiens
  misc_RNA (1)...(19): siRNA sense strand
gcagaagccguagcagaag

SEQ ID NO: 1564419 - RNA, 19 nt, Homo sapiens
  misc_RNA (1)...(19): siRNA sense strand
acaucgaccucaagaaucg

SEQ ID NO: 1564420 - RNA, 19 nt, Homo sapiens
  misc_RNA (1)...(19): siRNA sense strand
ugaggacguguucuacaaa

SEQ ID NO: 1564421 - RNA, 19 nt, Homo sapiens
  misc_RNA (1)...(19): siRNA sense strand
agaucucgcucucguacau

SEQ ID NO: 1564422 - RNA, 19 nt, Homo sapiens
  misc_RNA (1)...(19): siRNA sense strand
agcagaagccguagcagaa

SEQ ID NO: 1564423 - RNA, 19 nt, Homo sapiens
  misc_RNA (1)...(19): siRNA sense strand
gggcccagaaguccaaguu

SEQ ID NO: 1564424 - RNA, 19 nt, Homo sapiens
  misc_RNA (1)...(19): siRNA sense strand
gaugggcccagaaguccaa

SEQ ID NO: 1564425 - RNA, 19 nt, Homo sapiens
  misc_RNA (1)...(19): siRNA sense strand
ugaccuaugcaguucgaaa

SEQ ID NO: 1564426 - RNA, 19 nt, Homo sapiens
  misc_RNA (1)...(19): siRNA sense strand
gauguauguuaugcugaug

SEQ ID NO: 1564427 - RNA, 19 nt, Homo sapiens
  misc_RNA (1)...(19): siRNA sense strand
cguggaguuuguacggaaa

SEQ ID NO: 1564428 - RNA, 19 nt, Homo sapiens
  misc_RNA (1)...(19): siRNA sense strand
acauugaggacguguucua

SEQ ID NO: 1564429 - RNA, 19 nt, Homo sapiens
  misc_RNA (1)...(19): siRNA sense strand
ccagaaguccaaguuaugg

SEQ ID NO: 1564430 - RNA, 19 nt, Homo sapiens
  misc_RNA (1)...(19): siRNA sense strand
cauccgaaccaaggacauu

SEQ ID NO: 1564431 - RNA, 19 nt, Homo sapiens
  misc_RNA (1)...(19): siRNA sense strand
caacgauugccgcaucuac

SEQ ID NO: 1564432 - RNA, 19 nt, Homo sapiens
  misc_RNA (1)...(19): siRNA sense strand
ggccacaucuaccauaaga

SEQ ID NO: 1564433 - RNA, 19 nt, Homo sapiens
  misc_RNA (1)...(19): siRNA sense strand
ggcagcagguauauuguga

SEQ ID NO: 1564434 - RNA, 19 nt, Homo sapiens
  misc_RNA (1)...(19): siRNA sense strand
ccacaucuaccauaagaga

SEQ ID NO: 1564435 - RNA, 19 nt, Homo sapiens
  misc_RNA (1)...(19): siRNA sense strand
gugaaaagguuuaaucgaa

SEQ ID NO: 1564436 - RNA, 19 nt, Homo sapiens
  misc_RNA (1)...(19): siRNA sense strand
cagcagguauauugugaug

SEQ ID NO: 1564437 - RNA, 19 nt, Homo sapiens
  misc_RNA (1)...(19): siRNA sense strand
uaagccguguccagaguuu

SEQ ID NO: 1564438 - RNA, 19 nt, Homo sapiens
  misc_RNA (1)...(19): siRNA sense strand
cagcagcagcuaugugaaa

SEQ ID NO: 1564439 - RNA, 19 nt, Homo sapiens
  misc_RNA (1)...(19): siRNA sense strand
gcagcuaugugaaaagguu

SEQ ID NO: 1564440 - RNA, 19 nt, Homo sapiens
  misc_RNA (1)...(19): siRNA sense strand
cuuccgaguccacauguua

SEQ ID NO: 1564441 - RNA, 19 nt, Homo sapiens
  misc_RNA (1)...(19): siRNA sense strand
aauaagccguguccagagu

SEQ ID NO: 1564442 - RNA, 19 nt, Homo sapiens
  misc_RNA (1)...(19): siRNA sense strand
ugggccacaucuaccauaa

SEQ ID NO: 1564443 - RNA, 19 nt, Homo sapiens
  misc_RNA (1)...(19): siRNA sense strand
ggacuccuccagcugcaau

SEQ ID NO: 1564444 - RNA, 19 nt, Homo sapiens
  misc_RNA (1)...(19): siRNA sense strand
gagcagcagcagcuaugug

SEQ ID NO: 1564445 - RNA, 19 nt, Homo sapiens
  misc_RNA (1)...(19): siRNA sense strand
aaagggaagggcagauuca

SEQ ID NO: 1564446 - RNA, 19 nt, Homo sapiens
  misc_RNA (1)...(19): siRNA sense strand
ggaagggcagauucaaggu

SEQ ID NO: 1564447 - RNA, 19 nt, Homo sapiens
  misc_RNA (1)...(19): siRNA sense strand
uaagccguguccagaguuu

SEQ ID NO: 1564448 - RNA, 19 nt, Homo sapiens
  misc_RNA (1)...(19): siRNA sense strand
cuuccgaguccacauguua

SEQ ID NO: 1564449 - RNA, 19 nt, Homo sapiens
  misc_RNA (1)...(19): siRNA sense strand
aauaagccguguccagagu

SEQ ID NO: 1564450 - RNA, 19 nt, Homo sapiens
  misc_RNA (1)...(19): siRNA sense strand
ggacuccuccagcugcaau

SEQ ID NO: 1564451 - RNA, 19 nt, Homo sapiens
  misc_RNA (1)...(19): siRNA sense strand
gaaccaggcuuuggcaaga

SEQ ID NO: 1564452 - RNA, 19 nt, Homo sapiens
  misc_RNA (1)...(19): siRNA sense strand
guaaagagggagagaagga

SEQ ID NO: 1564453 - RNA, 19 nt, Homo sapiens
  misc_RNA (1)...(19): siRNA sense strand
gacagacaaugccggcaaa

SEQ ID NO: 1564454 - RNA, 19 nt, Homo sapiens
  misc_RNA (1)...(19): siRNA sense strand
gaacugcagcuuacacucu

SEQ ID NO: 1564455 - RNA, 19 nt, Homo sapiens
  misc_RNA (1)...(19): siRNA sense strand
ccaccgaacugcagcuuac

SEQ ID NO: 1564456 - RNA, 19 nt, Homo sapiens
  misc_RNA (1)...(19): siRNA sense strand
caucaccacuucacagcau

SEQ ID NO: 1564457 - RNA, 19 nt, Homo sapiens
  misc_RNA (1)...(19): siRNA sense strand
gagaaggaaccaggcuuug

SEQ ID NO: 1564458 - RNA, 19 nt, Homo sapiens
  misc_RNA (1)...(19): siRNA sense strand
agagaaggaaccaggcuuu

SEQ ID NO: 1564459 - RNA, 19 nt, Homo sapiens
  misc_RNA (1)...(19): siRNA sense strand
agaacacaguggaagacuu

SEQ ID NO: 1564460 - RNA, 19 nt, Homo sapiens
  misc_RNA (1)...(19): siRNA sense strand
uaaagagggagagaaggaa

SEQ ID NO: 1564461 - RNA, 19 nt, Homo sapiens
  misc_RNA (1)...(19): siRNA sense strand
cagagaacacaguggaaga

SEQ ID NO: 1564462 - RNA, 19 nt, Homo sapiens
  misc_RNA (1)...(19): siRNA sense strand
aggcagccaucaccacuuc

SEQ ID NO: 1564463 - RNA, 19 nt, Homo sapiens
  misc_RNA (1)...(19): siRNA sense strand
gguccuggagcccaagaaa

SEQ ID NO: 1564464 - RNA, 19 nt, Homo sapiens
  misc_RNA (1)...(19): siRNA sense strand
cuucacagcauccgacaga

SEQ ID NO: 1564465 - RNA, 19 nt, Homo sapiens
  misc_RNA (1)...(19): siRNA sense strand
gaacucacaucucccauca

SEQ ID NO: 1564466 - RNA, 19 nt, Homo sapiens
  misc_RNA (1)...(19): siRNA sense strand
gaucaggcuucuacuauug

SEQ ID NO: 1564467 - RNA, 19 nt, Homo sapiens
  misc_RNA (1)...(19): siRNA sense strand
uaacucagcugaacucaca

SEQ ID NO: 1564468 - RNA, 19 nt, Homo sapiens
  misc_RNA (1)...(19): siRNA sense strand
ggaucaggcuucuacuauu

SEQ ID NO: 1564469 - RNA, 19 nt, Homo sapiens
  misc_RNA (1)...(19): siRNA sense strand
caaccuacuuggcuucuag

SEQ ID NO: 1564470 - RNA, 19 nt, Homo sapiens
  misc_RNA (1)...(19): siRNA sense strand
cagaccaacuuguggauca

SEQ ID NO: 1564471 - RNA, 19 nt, Homo sapiens
  misc_RNA (1)...(19): siRNA sense strand
ucuaggagcugccagucuu

SEQ ID NO: 1564472 - RNA, 19 nt, Homo sapiens
  misc_RNA (1)...(19): siRNA sense strand
ucacaucucccaucaacau

SEQ ID NO: 1564473 - RNA, 19 nt, Homo sapiens
  misc_RNA (1)...(19): siRNA sense strand
ccaucaacauguccuacaa

SEQ ID NO: 1564474 - RNA, 19 nt, Homo sapiens
  misc_RNA (1)...(19): siRNA sense strand
ucagaucccuggguuaugg

SEQ ID NO: 1564475 - RNA, 19 nt, Homo sapiens
  misc_RNA (1)...(19): siRNA sense strand
ccagucuucuugcuacaga

SEQ ID NO: 1564476 - RNA, 19 nt, Homo sapiens
  misc_RNA (1)...(19): siRNA sense strand
ggagcugccagucuucuug

SEQ ID NO: 1564477 - RNA, 19 nt, Homo sapiens
  misc_RNA (1)...(19): siRNA sense strand
uacaacugcugcucuggaa

SEQ ID NO: 1564478 - RNA, 19 nt, Homo sapiens
  misc_RNA (1)...(19): siRNA sense strand
cugcugcucuggaaacuuc

SEQ ID NO: 1564479 - RNA, 19 nt, Homo sapiens
  misc_RNA (1)...(19): siRNA sense strand
caugcaaacucagaaucuu

SEQ ID NO: 1564480 - RNA, 19 nt, Homo sapiens
  misc_RNA (1)...(19): siRNA sense strand
gcaugcaaacucagaaucu

SEQ ID NO: 1564481 - RNA, 19 nt, Homo sapiens
  misc_RNA (1)...(19): siRNA sense strand
cagcuggguuccucucucu

SEQ ID NO: 1564482 - RNA, 19 nt, Homo sapiens
  misc_RNA (1)...(19): siRNA sense strand
cuggguuccucucucuaua

SEQ ID NO: 1564483 - RNA, 19 nt, Homo sapiens
  misc_RNA (1)...(19): siRNA sense strand
acucacaucucccaucaac

SEQ ID NO: 1564484 - RNA, 19 nt, Homo sapiens
  misc_RNA (1)...(19): siRNA sense strand
uggaucaggcuucuacuau

SEQ ID NO: 1564485 - RNA, 19 nt, Homo sapiens
  misc_RNA (1)...(19): siRNA sense strand
caacugcugcucuggaaac

SEQ ID NO: 1564486 - RNA, 19 nt, Homo sapiens
  misc_RNA (1)...(19): siRNA sense strand
guggaucaggcuucuacua

SEQ ID NO: 1564487 - RNA, 19 nt, Homo sapiens
  misc_RNA (1)...(19): siRNA sense strand
gggcuauggcguuggauuc

SEQ ID NO: 1564488 - RNA, 19 nt, Homo sapiens
  misc_RNA (1)...(19): siRNA sense strand
gcuggguuccucucucuau

SEQ ID NO: 1564489 - RNA, 19 nt, Homo sapiens
  misc_RNA (1)...(19): siRNA sense strand
caucucccaucaacauguc

SEQ ID NO: 1564490 - RNA, 19 nt, Homo sapiens
  misc_RNA (1)...(19): siRNA sense strand
gcuauggcguuggauucug

SEQ ID NO: 1564491 - RNA, 19 nt, Homo sapiens
  misc_RNA (1)...(19): siRNA sense strand
caacuuacucugggucucu

SEQ ID NO: 1564492 - RNA, 19 nt, Homo sapiens
  misc_RNA (1)...(19): siRNA sense strand
gaacuugaaucaucuagga

SEQ ID NO: 1564493 - RNA, 19 nt, Homo sapiens
  misc_RNA (1)...(19): siRNA sense strand
gaagaagaaaccaacagua

SEQ ID NO: 1564494 - RNA, 19 nt, Homo sapiens
  misc_RNA (1)...(19): siRNA sense strand
agaacaagcuacugaauca

SEQ ID NO: 1564495 - RNA, 19 nt, Homo sapiens
  misc_RNA (1)...(19): siRNA sense strand
ggcaaaagcuucuaucauu

SEQ ID NO: 1564496 - RNA, 19 nt, Homo sapiens
  misc_RNA (1)...(19): siRNA sense strand
ggagggaacauucugcuuu

SEQ ID NO: 1564497 - RNA, 19 nt, Homo sapiens
  misc_RNA (1)...(19): siRNA sense strand
gcaaaagcuucuaucauuu

SEQ ID NO: 1564498 - RNA, 19 nt, Homo sapiens
  misc_RNA (1)...(19): siRNA sense strand
gaaucagugucccuuuauu

SEQ ID NO: 1564499 - RNA, 19 nt, Homo sapiens
  misc_RNA (1)...(19): siRNA sense strand
gaaaccaacaguaacuaaa

SEQ ID NO: 1564500 - RNA, 19 nt, Homo sapiens
  misc_RNA (1)...(19): siRNA sense strand
uaucacagcuggcuuacug

SEQ ID NO: 1564501 - RNA, 19 nt, Homo sapiens
  misc_RNA (1)...(19): siRNA sense strand
uaaugaaucuggucagcuu

SEQ ID NO: 1564502 - RNA, 19 nt, Homo sapiens
  misc_RNA (1)...(19): siRNA sense strand
cccauaaccugaugacauu

SEQ ID NO: 1564503 - RNA, 19 nt, Homo sapiens
  misc_RNA (1)...(19): siRNA sense strand
gagcuuaccuuuugaacuu

SEQ ID NO: 1564504 - RNA, 19 nt, Homo sapiens
  misc_RNA (1)...(19): siRNA sense strand
cagugucccuuuauuacua

SEQ ID NO: 1564505 - RNA, 19 nt, Homo sapiens
  misc_RNA (1)...(19): siRNA sense strand
gaagaaaccaacaguaacu

SEQ ID NO: 1564506 - RNA, 19 nt, Homo sapiens
  misc_RNA (1)...(19): siRNA sense strand
aagaagaaaccaacaguaa

SEQ ID NO: 1564507 - RNA, 19 nt, Homo sapiens
  misc_RNA (1)...(19): siRNA sense strand
gaagaacaagcuacugaau

SEQ ID NO: 1564508 - RNA, 19 nt, Homo sapiens
  misc_RNA (1)...(19): siRNA sense strand
ccacauuucccgccuguuu

SEQ ID NO: 1564509 - RNA, 19 nt, Homo sapiens
  misc_RNA (1)...(19): siRNA sense strand
ccacauugcuggagcuuac

SEQ ID NO: 1564510 - RNA, 19 nt, Homo sapiens
  misc_RNA (1)...(19): siRNA sense strand
uguguuagcuguuagaauc

SEQ ID NO: 1564511 - RNA, 19 nt, Homo sapiens
  misc_RNA (1)...(19): siRNA sense strand
gaacucuacuuccagaaaa

SEQ ID NO: 1564512 - RNA, 19 nt, Homo sapiens
  misc_RNA (1)...(19): siRNA sense strand
caccagcugugaagaagaa

SEQ ID NO: 1564513 - RNA, 19 nt, Homo sapiens
  misc_RNA (1)...(19): siRNA sense strand
gaagguggagggaacauuc

SEQ ID NO: 1564514 - RNA, 19 nt, Homo sapiens
  misc_RNA (1)...(19): siRNA sense strand
aaucagugucccuuuauua

SEQ ID NO: 1564515 - RNA, 19 nt, Homo sapiens
  misc_RNA (1)...(19): siRNA sense strand
gcacauucauucucaucuc

SEQ ID NO: 1564516 - RNA, 19 nt, Homo sapiens
  misc_RNA (1)...(19): siRNA sense strand
cagaagaacaagcuacuga

SEQ ID NO: 1564517 - RNA, 19 nt, Homo sapiens
  misc_RNA (1)...(19): siRNA sense strand
acuauggcaucaaagauuu

SEQ ID NO: 1564518 - RNA, 19 nt, Homo sapiens
  misc_RNA (1)...(19): siRNA sense strand
gaagcuggauuucaguacu

SEQ ID NO: 1564519 - RNA, 19 nt, Homo sapiens
  misc_RNA (1)...(19): siRNA sense strand
cuuacuggcuucaugcuuu

SEQ ID NO: 1564520 - RNA, 19 nt, Homo sapiens
  misc_RNA (1)...(19): siRNA sense strand
cgaaugcacuucuccaaaa

SEQ ID NO: 1564521 - RNA, 19 nt, Homo sapiens
  misc_RNA (1)...(19): siRNA sense strand
gcuaguggcgauaauuauu

SEQ ID NO: 1564522 - RNA, 19 nt, Homo sapiens
  misc_RNA (1)...(19): siRNA sense strand
aaaggcagaucuucuaaaa

SEQ ID NO: 1564523 - RNA, 19 nt, Homo sapiens
  misc_RNA (1)...(19): siRNA sense strand
gcgaaugcacuucuccaaa

SEQ ID NO: 1564524 - RNA, 19 nt, Homo sapiens
  misc_RNA (1)...(19): siRNA sense strand
gagggaacauucugcuuuu

SEQ ID NO: 1564525 - RNA, 19 nt, Homo sapiens
  misc_RNA (1)...(19): siRNA sense strand
cacagcaaguuuaaugaau

SEQ ID NO: 1564526 - RNA, 19 nt, Homo sapiens
  misc_RNA (1)...(19): siRNA sense strand
acuggaaacuucaaugugu

SEQ ID NO: 1564527 - RNA, 19 nt, Homo sapiens
  misc_RNA (1)...(19): siRNA sense strand
guacuggaaacuucaaugu

SEQ ID NO: 1564528 - RNA, 19 nt, Homo sapiens
  misc_RNA (1)...(19): siRNA sense strand
cagcaaguuuaaugaaucu

SEQ ID NO: 1564529 - RNA, 19 nt, Homo sapiens
  misc_RNA (1)...(19): siRNA sense strand
uaaaggcagaucuucuaaa

SEQ ID NO: 1564530 - RNA, 19 nt, Homo sapiens
  misc_RNA (1)...(19): siRNA sense strand
acagcaaguuuaaugaauc

SEQ ID NO: 1564531 - RNA, 19 nt, Homo sapiens
  misc_RNA (1)...(19): siRNA sense strand
gaaaauggugugaauggaa

SEQ ID NO: 1564532 - RNA, 19 nt, Homo sapiens
  misc_RNA (1)...(19): siRNA sense strand
uucaauguguuagcuguua

SEQ ID NO: 1564533 - RNA, 19 nt, Homo sapiens
  misc_RNA (1)...(19): siRNA sense strand
acauaucacagcuggcuua

SEQ ID NO: 1564534 - RNA, 19 nt, Homo sapiens
  misc_RNA (1)...(19): siRNA sense strand
cuuagugcguucuaccuuu

SEQ ID NO: 1564535 - RNA, 19 nt, Homo sapiens
  misc_RNA (1)...(19): siRNA sense strand
gcacuucuccaaaacaaaa

SEQ ID NO: 1564536 - RNA, 19 nt, Homo sapiens
  misc_RNA (1)...(19): siRNA sense strand
cuaaaggcagaucuucuaa

SEQ ID NO: 1564537 - RNA, 19 nt, Homo sapiens
  misc_RNA (1)...(19): siRNA sense strand
acucaggcauuuaugaugu

SEQ ID NO: 1564538 - RNA, 19 nt, Homo sapiens
  misc_RNA (1)...(19): siRNA sense strand
caagaguauauguuggaua

SEQ ID NO: 1564539 - RNA, 19 nt, Homo sapiens
  misc_RNA (1)...(19): siRNA sense strand
agaaaccaacaguaacuaa

SEQ ID NO: 1564540 - RNA, 19 nt, Homo sapiens
  misc_RNA (1)...(19): siRNA sense strand
aaagauuuggcuacuguuu

SEQ ID NO: 1564541 - RNA, 19 nt, Homo sapiens
  misc_RNA (1)...(19): siRNA sense strand
acuaaaggcagaucuucua

SEQ ID NO: 1564542 - RNA, 19 nt, Homo sapiens
  misc_RNA (1)...(19): siRNA sense strand
ugauguggaaguucauuaa

SEQ ID NO: 1564543 - RNA, 19 nt, Homo sapiens
  misc_RNA (1)...(19): siRNA sense strand
uggaaacuucaauguguua

SEQ ID NO: 1564544 - RNA, 19 nt, Homo sapiens
  misc_RNA (1)...(19): siRNA sense strand
agacccaacuaucuuaugg

SEQ ID NO: 1564545 - RNA, 19 nt, Homo sapiens
  misc_RNA (1)...(19): siRNA sense strand
acacagcaaguuuaaugaa

SEQ ID NO: 1564546 - RNA, 19 nt, Homo sapiens
  misc_RNA (1)...(19): siRNA sense strand
gcaaugaaaaguaucagaa

SEQ ID NO: 1564547 - RNA, 19 nt, Homo sapiens
  misc_RNA (1)...(19): siRNA sense strand
ugaacucuacuuccagaaa

SEQ ID NO: 1564548 - RNA, 19 nt, Homo sapiens
  misc_RNA (1)...(19): siRNA sense strand
ugaaucaucuaggacuugu

SEQ ID NO: 1564549 - RNA, 19 nt, Homo sapiens
  misc_RNA (1)...(19): siRNA sense strand
uaacuaaaggcagaucuuc

SEQ ID NO: 1564550 - RNA, 19 nt, Homo sapiens
  misc_RNA (1)...(19): siRNA sense strand
ugccguaauucaagaguau

SEQ ID NO: 1564551 - RNA, 19 nt, Homo sapiens
  misc_RNA (1)...(19): siRNA sense strand
gcaacagaagaacaagcua

SEQ ID NO: 1564552 - RNA, 19 nt, Homo sapiens
  misc_RNA (1)...(19): siRNA sense strand
guaacuaaaggcagaucuu

SEQ ID NO: 1564553 - RNA, 19 nt, Homo sapiens
  misc_RNA (1)...(19): siRNA sense strand
uuuaugauguggaaguuca

SEQ ID NO: 1564554 - RNA, 19 nt, Homo sapiens
  misc_RNA (1)...(19): siRNA sense strand
gcauuuaugauguggaagu

SEQ ID NO: 1564555 - RNA, 19 nt, Homo sapiens
  misc_RNA (1)...(19): siRNA sense strand
gcuguucuggcauccauuu

SEQ ID NO: 1564556 - RNA, 19 nt, Homo sapiens
  misc_RNA (1)...(19): siRNA sense strand
cagaagcuggauuucagua

SEQ ID NO: 1564557 - RNA, 19 nt, Homo sapiens
  misc_RNA (1)...(19): siRNA sense strand
cauucauucucaucucuga

SEQ ID NO: 1564558 - RNA, 19 nt, Homo sapiens
  misc_RNA (1)...(19): siRNA sense strand
agacuucugacuuuaauuc

SEQ ID NO: 1564559 - RNA, 19 nt, Homo sapiens
  misc_RNA (1)...(19): siRNA sense strand
ugaaucagugucccuuuau

SEQ ID NO: 1564560 - RNA, 19 nt, Homo sapiens
  misc_RNA (1)...(19): siRNA sense strand
gauguggaaguucauuaau

SEQ ID NO: 1564561 - RNA, 19 nt, Homo sapiens
  misc_RNA (1)...(19): siRNA sense strand
aaaccaacaguaacuaaag

SEQ ID NO: 1564562 - RNA, 19 nt, Homo sapiens
  misc_RNA (1)...(19): siRNA sense strand
agauauuccucgucagcuu

SEQ ID NO: 1564563 - RNA, 19 nt, Homo sapiens
  misc_RNA (1)...(19): siRNA sense strand
aggcauuuaugauguggaa

SEQ ID NO: 1564564 - RNA, 19 nt, Homo sapiens
  misc_RNA (1)...(19): siRNA sense strand
cuuuaccucuuccacauug

SEQ ID NO: 1564565 - RNA, 19 nt, Homo sapiens
  misc_RNA (1)...(19): siRNA sense strand
acauuggucuuuaccucuu

SEQ ID NO: 1564566 - RNA, 19 nt, Homo sapiens
  misc_RNA (1)...(19): siRNA sense strand
uaguggcgauaauuauuca

SEQ ID NO: 1564567 - RNA, 19 nt, Homo sapiens
  misc_RNA (1)...(19): siRNA sense strand
aaacuucaauguguuagcu

SEQ ID NO: 1564568 - RNA, 19 nt, Homo sapiens
  misc_RNA (1)...(19): siRNA sense strand
cuggaaacuucaauguguu

SEQ ID NO: 1564569 - RNA, 19 nt, Homo sapiens
  misc_RNA (1)...(19): siRNA sense strand
ucucagacccaacuaucuu

SEQ ID NO: 1564570 - RNA, 19 nt, Homo sapiens
  misc_RNA (1)...(19): siRNA sense strand
uacuauggcaucaaagauu

SEQ ID NO: 1564571 - RNA, 19 nt, Homo sapiens
  misc_RNA (1)...(19): siRNA sense strand
ugaagaagaaaccaacagu

SEQ ID NO: 1564572 - RNA, 19 nt, Homo sapiens
  misc_RNA (1)...(19): siRNA sense strand
cauuuaugauguggaaguu

SEQ ID NO: 1564573 - RNA, 19 nt, Homo sapiens
  misc_RNA (1)...(19): siRNA sense strand
agaagaacaagcuacugaa

SEQ ID NO: 1564574 - RNA, 19 nt, Homo sapiens
  misc_RNA (1)...(19): siRNA sense strand
gaacagaaaauggugugaa

SEQ ID NO: 1564575 - RNA, 19 nt, Homo sapiens
  misc_RNA (1)...(19): siRNA sense strand
guuacucaggcauuuauga

SEQ ID NO: 1564576 - RNA, 19 nt, Homo sapiens
  misc_RNA (1)...(19): siRNA sense strand
caucuaggacuuguucuuc

SEQ ID NO: 1564577 - RNA, 19 nt, Homo sapiens
  misc_RNA (1)...(19): siRNA sense strand
ucaagaguauauguuggau

SEQ ID NO: 1564578 - RNA, 19 nt, Homo sapiens
  misc_RNA (1)...(19): siRNA sense strand
guucuucuggugcuacauu

SEQ ID NO: 1564579 - RNA, 19 nt, Homo sapiens
  misc_RNA (1)...(19): siRNA sense strand
aaacaaaacacagcaaguu

SEQ ID NO: 1564580 - RNA, 19 nt, Homo sapiens
  misc_RNA (1)...(19): siRNA sense strand
gcaccagcugugaagaaga

SEQ ID NO: 1564581 - RNA, 19 nt, Homo sapiens
  misc_RNA (1)...(19): siRNA sense strand
ggcaccagcugugaagaag

SEQ ID NO: 1564582 - RNA, 19 nt, Homo sapiens
  misc_RNA (1)...(19): siRNA sense strand
gcguuacucaggcauuuau

SEQ ID NO: 1564583 - RNA, 19 nt, Homo sapiens
  misc_RNA (1)...(19): siRNA sense strand
ucaauguguuagcuguuag

SEQ ID NO: 1564584 - RNA, 19 nt, Homo sapiens
  misc_RNA (1)...(19): siRNA sense strand
ugaaaaguaucagaaagga

SEQ ID NO: 1564585 - RNA, 19 nt, Homo sapiens
  misc_RNA (1)...(19): siRNA sense strand
augcuaguggcgauaauua

SEQ ID NO: 1564586 - RNA, 19 nt, Homo sapiens
  misc_RNA (1)...(19): siRNA sense strand
ggugcuacauuauuuuguu

SEQ ID NO: 1564587 - RNA, 19 nt, Homo sapiens
  misc_RNA (1)...(19): siRNA sense strand
gaaucuggucagcuuagug

SEQ ID NO: 1564588 - RNA, 19 nt, Homo sapiens
  misc_RNA (1)...(19): siRNA sense strand
gcuguuagaaucgcuguuc

SEQ ID NO: 1564589 - RNA, 19 nt, Homo sapiens
  misc_RNA (1)...(19): siRNA sense strand
caucucagacccaacuauc

SEQ ID NO: 1564590 - RNA, 19 nt, Homo sapiens
  misc_RNA (1)...(19): siRNA sense strand
ucuaggacuuguucuucug

SEQ ID NO: 1564591 - RNA, 19 nt, Homo sapiens
  misc_RNA (1)...(19): siRNA sense strand
uugcguuacucaggcauuu

SEQ ID NO: 1564592 - RNA, 19 nt, Homo sapiens
  misc_RNA (1)...(19): siRNA sense strand
gaaagaagcucuggaagca

SEQ ID NO: 1564593 - RNA, 19 nt, Homo sapiens
  misc_RNA (1)...(19): siRNA sense strand
ggacaaugaugaagacgaa

SEQ ID NO: 1564594 - RNA, 19 nt, Homo sapiens
  misc_RNA (1)...(19): siRNA sense strand
gcuaacaacuuugcaauga

SEQ ID NO: 1564595 - RNA, 19 nt, Homo sapiens
  misc_RNA (1)...(19): siRNA sense strand
gaaugaagaggaagaagua

SEQ ID NO: 1564596 - RNA, 19 nt, Homo sapiens
  misc_RNA (1)...(19): siRNA sense strand
gaagaaggacaaagacaaa

SEQ ID NO: 1564597 - RNA, 19 nt, Homo sapiens
  misc_RNA (1)...(19): siRNA sense strand
aagaagcucuggaagcaua

SEQ ID NO: 1564598 - RNA, 19 nt, Homo sapiens
  misc_RNA (1)...(19): siRNA sense strand
aagaaaggcuggaagaaga

SEQ ID NO: 1564599 - RNA, 19 nt, Homo sapiens
  misc_RNA (1)...(19): siRNA sense strand
ggaagaagaagaacagaau

SEQ ID NO: 1564600 - RNA, 19 nt, Homo sapiens
  misc_RNA (1)...(19): siRNA sense strand
ggaagaaguagacaacuga

SEQ ID NO: 1564601 - RNA, 19 nt, Homo sapiens
  misc_RNA (1)...(19): siRNA sense strand
gaaggaggccucagagcaa

SEQ ID NO: 1564602 - RNA, 19 nt, Homo sapiens
  misc_RNA (1)...(19): siRNA sense strand
gcaagaaggaggccucaga

SEQ ID NO: 1564603 - RNA, 19 nt, Homo sapiens
  misc_RNA (1)...(19): siRNA sense strand
gagcagggaugaggacaau

SEQ ID NO: 1564604 - RNA, 19 nt, Homo sapiens
  misc_RNA (1)...(19): siRNA sense strand
gcagggaugaggacaauga

SEQ ID NO: 1564605 - RNA, 19 nt, Homo sapiens
  misc_RNA (1)...(19): siRNA sense strand
gaagaaaggcuggaagaag

SEQ ID NO: 1564606 - RNA, 19 nt, Homo sapiens
  misc_RNA (1)...(19): siRNA sense strand
gggaugaggacaaugauga

SEQ ID NO: 1564607 - RNA, 19 nt, Homo sapiens
  misc_RNA (1)...(19): siRNA sense strand
gaccuaaaccugcccaaug

SEQ ID NO: 1564608 - RNA, 19 nt, Homo sapiens
  misc_RNA (1)...(19): siRNA sense strand
ucaccaggaucaucaagga

SEQ ID NO: 1564609 - RNA, 19 nt, Homo sapiens
  misc_RNA (1)...(19): siRNA sense strand
gaagaagaagaacagaaug

SEQ ID NO: 1564610 - RNA, 19 nt, Homo sapiens
  misc_RNA (1)...(19): siRNA sense strand
gaagaagaacagaaugaag

SEQ ID NO: 1564611 - RNA, 19 nt, Homo sapiens
  misc_RNA (1)...(19): siRNA sense strand
cuaacaacuuugcaaugaa

SEQ ID NO: 1564612 - RNA, 19 nt, Homo sapiens
  misc_RNA (1)...(19): siRNA sense strand
aagaagaacagaaugaaga

SEQ ID NO: 1564613 - RNA, 19 nt, Homo sapiens
  misc_RNA (1)...(19): siRNA sense strand
agaacagaaugaagaggaa

SEQ ID NO: 1564614 - RNA, 19 nt, Homo sapiens
  misc_RNA (1)...(19): siRNA sense strand
gcgguucguuaucccauug

SEQ ID NO: 1564615 - RNA, 19 nt, Homo sapiens
  misc_RNA (1)...(19): siRNA sense strand
cauauaggcgggagcagaa

SEQ ID NO: 1564616 - RNA, 19 nt, Homo sapiens
  misc_RNA (1)...(19): siRNA sense strand
ggaugaggacaaugaugaa

SEQ ID NO: 1564617 - RNA, 19 nt, Homo sapiens
  misc_RNA (1)...(19): siRNA sense strand
aagaagaagaacagaauga

SEQ ID NO: 1564618 - RNA, 19 nt, Homo sapiens
  misc_RNA (1)...(19): siRNA sense strand
agaagaaggacaaagacaa

SEQ ID NO: 1564619 - RNA, 19 nt, Homo sapiens
  misc_RNA (1)...(19): siRNA sense strand
cgaagaaaggcuggaagaa

SEQ ID NO: 1564620 - RNA, 19 nt, Homo sapiens
  misc_RNA (1)...(19): siRNA sense strand
gaguuccagcgguucguua

SEQ ID NO: 1564621 - RNA, 19 nt, Homo sapiens
  misc_RNA (1)...(19): siRNA sense strand
aggaagaaguagacaacug

SEQ ID NO: 1564622 - RNA, 19 nt, Homo sapiens
  misc_RNA (1)...(19): siRNA sense strand
agaagaagaacagaaugaa

SEQ ID NO: 1564623 - RNA, 19 nt, Homo sapiens
  misc_RNA (1)...(19): siRNA sense strand
gaagcucuggaagcauaua

SEQ ID NO: 1564624 - RNA, 19 nt, Homo sapiens
  misc_RNA (1)...(19): siRNA sense strand
guuaucccauugaaagaag

SEQ ID NO: 1564625 - RNA, 19 nt, Homo sapiens
  misc_RNA (1)...(19): siRNA sense strand
caaugaugaagacgaagaa

SEQ ID NO: 1564626 - RNA, 19 nt, Homo sapiens
  misc_RNA (1)...(19): siRNA sense strand
aaaagaagaaggacaaaga

SEQ ID NO: 1564627 - RNA, 19 nt, Homo sapiens
  misc_RNA (1)...(19): siRNA sense strand
aaggaggccucagagcaaa

SEQ ID NO: 1564628 - RNA, 19 nt, Homo sapiens
  misc_RNA (1)...(19): siRNA sense strand
ugaggacaaugaugaagac

SEQ ID NO: 1564629 - RNA, 19 nt, Homo sapiens
  misc_RNA (1)...(19): siRNA sense strand
ggaccuaaaccugcccaau

SEQ ID NO: 1564630 - RNA, 19 nt, Homo sapiens
  misc_RNA (1)...(19): siRNA sense strand
gugucaacaucuccaagga

SEQ ID NO: 1564631 - RNA, 19 nt, Homo sapiens
  misc_RNA (1)...(19): siRNA sense strand
agaaaggcuggaagaagaa

SEQ ID NO: 1564632 - RNA, 19 nt, Homo sapiens
  misc_RNA (1)...(19): siRNA sense strand
cggaagagcaagacaagag

SEQ ID NO: 1564633 - RNA, 19 nt, Homo sapiens
  misc_RNA (1)...(19): siRNA sense strand
ugaugaagacgaagaaagg

SEQ ID NO: 1564634 - RNA, 19 nt, Homo sapiens
  misc_RNA (1)...(19): siRNA sense strand
gaagaggaagaaguagaca

SEQ ID NO: 1564635 - RNA, 19 nt, Homo sapiens
  misc_RNA (1)...(19): siRNA sense strand
acaaugaugaagacgaaga

SEQ ID NO: 1564636 - RNA, 19 nt, Homo sapiens
  misc_RNA (1)...(19): siRNA sense strand
gcugaaugccagugaugug

SEQ ID NO: 1564637 - RNA, 19 nt, Homo sapiens
  misc_RNA (1)...(19): siRNA sense strand
auccugugcuaacaacuuu

SEQ ID NO: 1564638 - RNA, 19 nt, Homo sapiens
  misc_RNA (1)...(19): siRNA sense strand
agaaugaagaggaagaagu

SEQ ID NO: 1564639 - RNA, 19 nt, Homo sapiens
  misc_RNA (1)...(19): siRNA sense strand
gugcuaacaacuuugcaau

SEQ ID NO: 1564640 - RNA, 19 nt, Homo sapiens
  misc_RNA (1)...(19): siRNA sense strand
gagaggcccgaggaccuaa

SEQ ID NO: 1564641 - RNA, 19 nt, Homo sapiens
  misc_RNA (1)...(19): siRNA sense strand
gaaugacaguuggcaauuu

SEQ ID NO: 1564642 - RNA, 19 nt, Homo sapiens
  misc_RNA (1)...(19): siRNA sense strand
gcacaacugacaaaugcaa

SEQ ID NO: 1564643 - RNA, 19 nt, Homo sapiens
  misc_RNA (1)...(19): siRNA sense strand
ccagggcaguggcagaaug

SEQ ID NO: 1564644 - RNA, 19 nt, Homo sapiens
  misc_RNA (1)...(19): siRNA sense strand
aaugacaguuggcaauuuc

SEQ ID NO: 1564645 - RNA, 19 nt, Homo sapiens
  misc_RNA (1)...(19): siRNA sense strand
cugcacaacugacaaaugc

SEQ ID NO: 1564646 - RNA, 19 nt, Homo sapiens
  misc_RNA (1)...(19): siRNA sense strand
cagaaugacaguuggcaau

SEQ ID NO: 1564647 - RNA, 19 nt, Homo sapiens
  misc_RNA (1)...(19): siRNA sense strand
caggaugacugcgcuaucg

SEQ ID NO: 1564648 - RNA, 19 nt, Homo sapiens
  misc_RNA (1)...(19): siRNA sense strand
agaaugacaguuggcaauu

SEQ ID NO: 1564649 - RNA, 19 nt, Homo sapiens
  misc_RNA (1)...(19): siRNA sense strand
gcugcacaacugacaaaug

SEQ ID NO: 1564650 - RNA, 19 nt, Homo sapiens
  misc_RNA (1)...(19): siRNA sense strand
guaccucugcaacaggaaa

SEQ ID NO: 1564651 - RNA, 19 nt, Homo sapiens
  misc_RNA (1)...(19): siRNA sense strand
gccgagugcuacgccugua

SEQ ID NO: 1564652 - RNA, 19 nt, Homo sapiens
  misc_RNA (1)...(19): siRNA sense strand
gacaguuggcaauuucuca

SEQ ID NO: 1564653 - RNA, 19 nt, Homo sapiens
  misc_RNA (1)...(19): siRNA sense strand
gauuauaccuccaauguuc

SEQ ID NO: 1564654 - RNA, 19 nt, Homo sapiens
  misc_RNA (1)...(19): siRNA sense strand
ccacaugacucugaaauau

SEQ ID NO: 1564655 - RNA, 19 nt, Homo sapiens
  misc_RNA (1)...(19): siRNA sense strand
ggucauguauggaauguug

SEQ ID NO: 1564656 - RNA, 19 nt, Homo sapiens
  misc_RNA (1)...(19): siRNA sense strand
auacagcuguugcauauuu

SEQ ID NO: 1564657 - RNA, 19 nt, Homo sapiens
  misc_RNA (1)...(19): siRNA sense strand
gaugaacucccaaugauau

SEQ ID NO: 1564658 - RNA, 19 nt, Homo sapiens
  misc_RNA (1)...(19): siRNA sense strand
acaugacucugaaauauga

SEQ ID NO: 1564659 - RNA, 19 nt, Homo sapiens
  misc_RNA (1)...(19): siRNA sense strand
gauauacagcuguugcaua

SEQ ID NO: 1564660 - RNA, 19 nt, Homo sapiens
  misc_RNA (1)...(19): siRNA sense strand
uaacuggccuugguuccua

SEQ ID NO: 1564661 - RNA, 19 nt, Homo sapiens
  misc_RNA (1)...(19): siRNA sense strand
ugaguaaccugaucaugau

SEQ ID NO: 1564662 - RNA, 19 nt, Homo sapiens
  misc_RNA (1)...(19): siRNA sense strand
aaaugcagcuauuggauga

SEQ ID NO: 1564663 - RNA, 19 nt, Homo sapiens
  misc_RNA (1)...(19): siRNA sense strand
gugaguaaccugaucauga

SEQ ID NO: 1564664 - RNA, 19 nt, Homo sapiens
  misc_RNA (1)...(19): siRNA sense strand
ccaaugauauacagcuguu

SEQ ID NO: 1564665 - RNA, 19 nt, Homo sapiens
  misc_RNA (1)...(19): siRNA sense strand
ggaugaacucccaaugaua

SEQ ID NO: 1564666 - RNA, 19 nt, Homo sapiens
  misc_RNA (1)...(19): siRNA sense strand
aacgguacauugcuucuua

SEQ ID NO: 1564667 - RNA, 19 nt, Homo sapiens
  misc_RNA (1)...(19): siRNA sense strand
uauggaauguuggucuuua

SEQ ID NO: 1564668 - RNA, 19 nt, Homo sapiens
  misc_RNA (1)...(19): siRNA sense strand
ggccagugauccuguuuga

SEQ ID NO: 1564669 - RNA, 19 nt, Homo sapiens
  misc_RNA (1)...(19): siRNA sense strand
gaacacuuuaccugagaua

SEQ ID NO: 1564670 - RNA, 19 nt, Homo sapiens
  misc_RNA (1)...(19): siRNA sense strand
guaaccugaucaugauuau

SEQ ID NO: 1564671 - RNA, 19 nt, Homo sapiens
  misc_RNA (1)...(19): siRNA sense strand
acacuuuaccugagauaua

SEQ ID NO: 1564672 - RNA, 19 nt, Homo sapiens
  misc_RNA (1)...(19): siRNA sense strand
ugaaguuucucuuuggaau

SEQ ID NO: 1564673 - RNA, 19 nt, Homo sapiens
  misc_RNA (1)...(19): siRNA sense strand
ggacuggguuauacaucau

SEQ ID NO: 1564674 - RNA, 19 nt, Homo sapiens
  misc_RNA (1)...(19): siRNA sense strand
gcuguugcauauuugugua

SEQ ID NO: 1564675 - RNA, 19 nt, Homo sapiens
  misc_RNA (1)...(19): siRNA sense strand
gaucaagaacucaguaaac

SEQ ID NO: 1564676 - RNA, 19 nt, Homo sapiens
  misc_RNA (1)...(19): siRNA sense strand
uggaugaacucccaaugau

SEQ ID NO: 1564677 - RNA, 19 nt, Homo sapiens
  misc_RNA (1)...(19): siRNA sense strand
caagaucaagaacucagua

SEQ ID NO: 1564678 - RNA, 19 nt, Homo sapiens
  misc_RNA (1)...(19): siRNA sense strand
caagaacucaguaaacuac

SEQ ID NO: 1564679 - RNA, 19 nt, Homo sapiens
  misc_RNA (1)...(19): siRNA sense strand
guaaacuaccaucugcuuu

SEQ ID NO: 1564680 - RNA, 19 nt, Homo sapiens
  misc_RNA (1)...(19): siRNA sense strand
uuuggaaucuggccaguga

SEQ ID NO: 1564681 - RNA, 19 nt, Homo sapiens
  misc_RNA (1)...(19): siRNA sense strand
guuggucuuuacauuagua

SEQ ID NO: 1564682 - RNA, 19 nt, Homo sapiens
  misc_RNA (1)...(19): siRNA sense strand
caucaggucauguauggaa

SEQ ID NO: 1564683 - RNA, 19 nt, Homo sapiens
  misc_RNA (1)...(19): siRNA sense strand
gguacauugcuucuuauuu

SEQ ID NO: 1564684 - RNA, 19 nt, Homo sapiens
  misc_RNA (1)...(19): siRNA sense strand
ggccuugguuccuaucuuc

SEQ ID NO: 1564685 - RNA, 19 nt, Homo sapiens
  misc_RNA (1)...(19): siRNA sense strand
ucaagaacucaguaaacua

SEQ ID NO: 1564686 - RNA, 19 nt, Homo sapiens
  misc_RNA (1)...(19): siRNA sense strand
ccuuaguucuauucaguuu

SEQ ID NO: 1564687 - RNA, 19 nt, Homo sapiens
  misc_RNA (1)...(19): siRNA sense strand
aagaacacuuuaccugaga

SEQ ID NO: 1564688 - RNA, 19 nt, Homo sapiens
  misc_RNA (1)...(19): siRNA sense strand
gaacucccaaugauauaca

SEQ ID NO: 1564689 - RNA, 19 nt, Homo sapiens
  misc_RNA (1)...(19): siRNA sense strand
uaccuuaguucuauucagu

SEQ ID NO: 1564690 - RNA, 19 nt, Homo sapiens
  misc_RNA (1)...(19): siRNA sense strand
gcauauuuguguacugcau

SEQ ID NO: 1564691 - RNA, 19 nt, Homo sapiens
  misc_RNA (1)...(19): siRNA sense strand
gaaauaugaaaugcagcua

SEQ ID NO: 1564692 - RNA, 19 nt, Homo sapiens
  misc_RNA (1)...(19): siRNA sense strand
caauucagaguguuagaga

SEQ ID NO: 1564693 - RNA, 19 nt, Homo sapiens
  misc_RNA (1)...(19): siRNA sense strand
gguaaaagagccaauauuc

SEQ ID NO: 1564694 - RNA, 19 nt, Homo sapiens
  misc_RNA (1)...(19): siRNA sense strand
ggugcaauucagaguguua

SEQ ID NO: 1564695 - RNA, 19 nt, Homo sapiens
  misc_RNA (1)...(19): siRNA sense strand
cacuuuaccugagauauag

SEQ ID NO: 1564696 - RNA, 19 nt, Homo sapiens
  misc_RNA (1)...(19): siRNA sense strand
ucacugaggaacuuucgaa

SEQ ID NO: 1564697 - RNA, 19 nt, Homo sapiens
  misc_RNA (1)...(19): siRNA sense strand
uuagaggacuggguuauac

SEQ ID NO: 1564698 - RNA, 19 nt, Homo sapiens
  misc_RNA (1)...(19): siRNA sense strand
ggaauacagugaguaaccu

SEQ ID NO: 1564699 - RNA, 19 nt, Homo sapiens
  misc_RNA (1)...(19): siRNA sense strand
ccugguacaucgccgaguu

SEQ ID NO: 1564700 - RNA, 19 nt, Homo sapiens
  misc_RNA (1)...(19): siRNA sense strand
guacugcauguuugaaugu

SEQ ID NO: 1564701 - RNA, 19 nt, Homo sapiens
  misc_RNA (1)...(19): siRNA sense strand
cauuaguacuucgaucuau

SEQ ID NO: 1564702 - RNA, 19 nt, Homo sapiens
  misc_RNA (1)...(19): siRNA sense strand
gaauguuucaagaucaaga

SEQ ID NO: 1564703 - RNA, 19 nt, Homo sapiens
  misc_RNA (1)...(19): siRNA sense strand
ggucuuuacauuaguacuu

SEQ ID NO: 1564704 - RNA, 19 nt, Homo sapiens
  misc_RNA (1)...(19): siRNA sense strand
gagccucucaggaagcauu

SEQ ID NO: 1564705 - RNA, 19 nt, Homo sapiens
  misc_RNA (1)...(19): siRNA sense strand
gaacucaguaaacuaccau

SEQ ID NO: 1564706 - RNA, 19 nt, Homo sapiens
  misc_RNA (1)...(19): siRNA sense strand
gaaguuucucuuuggaauc

SEQ ID NO: 1564707 - RNA, 19 nt, Homo sapiens
  misc_RNA (1)...(19): siRNA sense strand
aguaaccugaucaugauua

SEQ ID NO: 1564708 - RNA, 19 nt, Homo sapiens
  misc_RNA (1)...(19): siRNA sense strand
uguacugcauguuugaaug

SEQ ID NO: 1564709 - RNA, 19 nt, Homo sapiens
  misc_RNA (1)...(19): siRNA sense strand
ugaaaugcagcuauuggau

SEQ ID NO: 1564710 - RNA, 19 nt, Homo sapiens
  misc_RNA (1)...(19): siRNA sense strand
aggacuggguuauacauca

SEQ ID NO: 1564711 - RNA, 19 nt, Homo sapiens
  misc_RNA (1)...(19): siRNA sense strand
cugcauguuugaauguuuc

SEQ ID NO: 1564712 - RNA, 19 nt, Homo sapiens
  misc_RNA (1)...(19): siRNA sense strand
guuuauccauggcuuagag

SEQ ID NO: 1564713 - RNA, 19 nt, Homo sapiens
  misc_RNA (1)...(19): siRNA sense strand
aauauuccaucaggucaug

SEQ ID NO: 1564714 - RNA, 19 nt, Homo sapiens
  misc_RNA (1)...(19): siRNA sense strand
uaaacuaccaucugcuuuu

SEQ ID NO: 1564715 - RNA, 19 nt, Homo sapiens
  misc_RNA (1)...(19): siRNA sense strand
guucuggaauacagugagu

SEQ ID NO: 1564716 - RNA, 19 nt, Homo sapiens
  misc_RNA (1)...(19): siRNA sense strand
guuucaagaucaagaacuc

SEQ ID NO: 1564717 - RNA, 19 nt, Homo sapiens
  misc_RNA (1)...(19): siRNA sense strand
ucuggaauacagugaguaa

SEQ ID NO: 1564718 - RNA, 19 nt, Homo sapiens
  misc_RNA (1)...(19): siRNA sense strand
ucacauccuuuucaguuug

SEQ ID NO: 1564719 - RNA, 19 nt, Homo sapiens
  misc_RNA (1)...(19): siRNA sense strand
cacaugacucugaaauaug

SEQ ID NO: 1564720 - RNA, 19 nt, Homo sapiens
  misc_RNA (1)...(19): siRNA sense strand
guuccuaucuucacauccu

SEQ ID NO: 1564721 - RNA, 19 nt, Homo sapiens
  misc_RNA (1)...(19): siRNA sense strand
acuacuccgugaccuggua

SEQ ID NO: 1564722 - RNA, 19 nt, Homo sapiens
  misc_RNA (1)...(19): siRNA sense strand
uguauggaauguuggucuu

SEQ ID NO: 1564723 - RNA, 19 nt, Homo sapiens
  misc_RNA (1)...(19): siRNA sense strand
uaaaagagccaauauucca

SEQ ID NO: 1564724 - RNA, 19 nt, Homo sapiens
  misc_RNA (1)...(19): siRNA sense strand
gcaauucagaguguuagag

SEQ ID NO: 1564725 - RNA, 19 nt, Homo sapiens
  misc_RNA (1)...(19): siRNA sense strand
gauauaggccaaaagugaa

SEQ ID NO: 1564726 - RNA, 19 nt, Homo sapiens
  misc_RNA (1)...(19): siRNA sense strand
gccgaguucuggaauacag

SEQ ID NO: 1564727 - RNA, 19 nt, Homo sapiens
  misc_RNA (1)...(19): siRNA sense strand
cuuagaggacuggguuaua

SEQ ID NO: 1564728 - RNA, 19 nt, Homo sapiens
  misc_RNA (1)...(19): siRNA sense strand
aaccugaucaugauuauac

SEQ ID NO: 1564729 - RNA, 19 nt, Homo sapiens
  misc_RNA (1)...(19): siRNA sense strand
aagugaaguuucucuuugg

SEQ ID NO: 1564730 - RNA, 19 nt, Homo sapiens
  misc_RNA (1)...(19): siRNA sense strand
ggccaaaagugaaguuucu

SEQ ID NO: 1564731 - RNA, 19 nt, Homo sapiens
  misc_RNA (1)...(19): siRNA sense strand
guauggaauguuggucuuu

SEQ ID NO: 1564732 - RNA, 19 nt, Homo sapiens
  misc_RNA (1)...(19): siRNA sense strand
caggucauguauggaaugu

SEQ ID NO: 1564733 - RNA, 19 nt, Homo sapiens
  misc_RNA (1)...(19): siRNA sense strand
ccaauguucggugcaauuc

SEQ ID NO: 1564734 - RNA, 19 nt, Homo sapiens
  misc_RNA (1)...(19): siRNA sense strand
guauuaccacacaauuuca

SEQ ID NO: 1564735 - RNA, 19 nt, Homo sapiens
  misc_RNA (1)...(19): siRNA sense strand
ucggugcaauucagagugu

SEQ ID NO: 1564736 - RNA, 19 nt, Homo sapiens
  misc_RNA (1)...(19): siRNA sense strand
gaagaucuguccaucaaga

SEQ ID NO: 1564737 - RNA, 19 nt, Homo sapiens
  misc_RNA (1)...(19): siRNA sense strand
uggcuaagcuccuguguga

SEQ ID NO: 1564738 - RNA, 19 nt, Homo sapiens
  misc_RNA (1)...(19): siRNA sense strand
ucucugagguggucaaaga

SEQ ID NO: 1564739 - RNA, 19 nt, Homo sapiens
  misc_RNA (1)...(19): siRNA sense strand
caaagaugccuacgacaug

SEQ ID NO: 1564740 - RNA, 19 nt, Homo sapiens
  misc_RNA (1)...(19): siRNA sense strand
cagcaaugccugugagaaa

SEQ ID NO: 1564741 - RNA, 19 nt, Homo sapiens
  misc_RNA (1)...(19): siRNA sense strand
aggaagaucuguccaucaa

SEQ ID NO: 1564742 - RNA, 19 nt, Homo sapiens
  misc_RNA (1)...(19): siRNA sense strand
caacccagcccaucccaaa

SEQ ID NO: 1564743 - RNA, 19 nt, Homo sapiens
  misc_RNA (1)...(19): siRNA sense strand
gcacggagcccaagaacac

SEQ ID NO: 1564744 - RNA, 19 nt, Homo sapiens
  misc_RNA (1)...(19): siRNA sense strand
ccaaacagccgauucacau

SEQ ID NO: 1564745 - RNA, 19 nt, Homo sapiens
  misc_RNA (1)...(19): siRNA sense strand
gcuccugugugacaaguau

SEQ ID NO: 1564746 - RNA, 19 nt, Homo sapiens
  misc_RNA (1)...(19): siRNA sense strand
ugaagcaguuucuggacuu

SEQ ID NO: 1564747 - RNA, 19 nt, Homo sapiens
  misc_RNA (1)...(19): siRNA sense strand
ccacguaccgcgucagcua

SEQ ID NO: 1564748 - RNA, 19 nt, Homo sapiens
  misc_RNA (1)...(19): siRNA sense strand
ugugggcgcugcugaagaa

SEQ ID NO: 1564749 - RNA, 19 nt, Homo sapiens
  misc_RNA (1)...(19): siRNA sense strand
cagcacacccucaucuuug

SEQ ID NO: 1564750 - RNA, 19 nt, Homo sapiens
  misc_RNA (1)...(19): siRNA sense strand
gcuaagcuccugugugaca

SEQ ID NO: 1564751 - RNA, 19 nt, Homo sapiens
  misc_RNA (1)...(19): siRNA sense strand
uggccaacaucaugaaaga

SEQ ID NO: 1564752 - RNA, 19 nt, Homo sapiens
  misc_RNA (1)...(19): siRNA sense strand
ccagcacacccucaucuuu

SEQ ID NO: 1564753 - RNA, 19 nt, Homo sapiens
  misc_RNA (1)...(19): siRNA sense strand
ggacuucggauccagcaau

SEQ ID NO: 1564754 - RNA, 19 nt, Homo sapiens
  misc_RNA (1)...(19): siRNA sense strand
gccaacaucaugaaagaga

SEQ ID NO: 1564755 - RNA, 19 nt, Homo sapiens
  misc_RNA (1)...(19): siRNA sense strand
caaugcagccaacuccaaa

SEQ ID NO: 1564756 - RNA, 19 nt, Homo sapiens
  misc_RNA (1)...(19): siRNA sense strand
ccaaccagaacauccagua

SEQ ID NO: 1564757 - RNA, 19 nt, Homo sapiens
  misc_RNA (1)...(19): siRNA sense strand
gaaagagaucaaccugcuu

SEQ ID NO: 1564758 - RNA, 19 nt, Homo sapiens
  misc_RNA (1)...(19): siRNA sense strand
ucauggaguuccuggacaa

SEQ ID NO: 1564759 - RNA, 19 nt, Homo sapiens
  misc_RNA (1)...(19): siRNA sense strand
ucaaagaugccuacgacau

SEQ ID NO: 1564760 - RNA, 19 nt, Homo sapiens
  misc_RNA (1)...(19): siRNA sense strand
acauagagcacuucagcaa

SEQ ID NO: 1564761 - RNA, 19 nt, Homo sapiens
  misc_RNA (1)...(19): siRNA sense strand
gggcgcugcugaagaaugc

SEQ ID NO: 1564762 - RNA, 19 nt, Homo sapiens
  misc_RNA (1)...(19): siRNA sense strand
gaggaagaucuguccauca

SEQ ID NO: 1564763 - RNA, 19 nt, Homo sapiens
  misc_RNA (1)...(19): siRNA sense strand
ucuaccacaugcucuuuga

SEQ ID NO: 1564764 - RNA, 19 nt, Homo sapiens
  misc_RNA (1)...(19): siRNA sense strand
ccaacaucaugaaagagau

SEQ ID NO: 1564765 - RNA, 19 nt, Homo sapiens
  misc_RNA (1)...(19): siRNA sense strand
ccaaacacaucggcagcau

SEQ ID NO: 1564766 - RNA, 19 nt, Homo sapiens
  misc_RNA (1)...(19): siRNA sense strand
gacuucggauccagcaaug

SEQ ID NO: 1564767 - RNA, 19 nt, Homo sapiens
  misc_RNA (1)...(19): siRNA sense strand
gauccagcaaugccuguga

SEQ ID NO: 1564768 - RNA, 19 nt, Homo sapiens
  misc_RNA (1)...(19): siRNA sense strand
gcgccugccugucuacaac

SEQ ID NO: 1564769 - RNA, 19 nt, Homo sapiens
  misc_RNA (1)...(19): siRNA sense strand
ggccuugggugaggaagau

SEQ ID NO: 1564770 - RNA, 19 nt, Homo sapiens
  misc_RNA (1)...(19): siRNA sense strand
caaacagccgauucacaug

SEQ ID NO: 1564771 - RNA, 19 nt, Homo sapiens
  misc_RNA (1)...(19): siRNA sense strand
accagaacauccaguacuu

SEQ ID NO: 1564772 - RNA, 19 nt, Homo sapiens
  misc_RNA (1)...(19): siRNA sense strand
agggagaccugcagcucuu

SEQ ID NO: 1564773 - RNA, 19 nt, Homo sapiens
  misc_RNA (1)...(19): siRNA sense strand
caacaucaugaaagagauc

SEQ ID NO: 1564774 - RNA, 19 nt, Homo sapiens
  misc_RNA (1)...(19): siRNA sense strand
uugagcgacucuucagcua

SEQ ID NO: 1564775 - RNA, 19 nt, Homo sapiens
  misc_RNA (1)...(19): siRNA sense strand
gcgccuggccaacaucaug

SEQ ID NO: 1564776 - RNA, 19 nt, Homo sapiens
  misc_RNA (1)...(19): siRNA sense strand
ucaaugcagccaacuccaa

SEQ ID NO: 1564777 - RNA, 19 nt, Homo sapiens
  misc_RNA (1)...(19): siRNA sense strand
caugagggcgacuguggaa

SEQ ID NO: 1564778 - RNA, 19 nt, Homo sapiens
  misc_RNA (1)...(19): siRNA sense strand
aaggcgugcuugaguacaa

SEQ ID NO: 1564779 - RNA, 19 nt, Homo sapiens
  misc_RNA (1)...(19): siRNA sense strand
gcagcucuucuccauggaa

SEQ ID NO: 1564780 - RNA, 19 nt, Homo sapiens
  misc_RNA (1)...(19): siRNA sense strand
ccaacugcaacgucucuga

SEQ ID NO: 1564781 - RNA, 19 nt, Homo sapiens
  misc_RNA (1)...(19): siRNA sense strand
agcacacccucaucuuuga

SEQ ID NO: 1564782 - RNA, 19 nt, Homo sapiens
  misc_RNA (1)...(19): siRNA sense strand
cgauucacauggucuacgu

SEQ ID NO: 1564783 - RNA, 19 nt, Homo sapiens
  misc_RNA (1)...(19): siRNA sense strand
gcacacccucaucuuugau

SEQ ID NO: 1564784 - RNA, 19 nt, Homo sapiens
  misc_RNA (1)...(19): siRNA sense strand
uggagcgccugccugucua

SEQ ID NO: 1564785 - RNA, 19 nt, Homo sapiens
  misc_RNA (1)...(19): siRNA sense strand
gcaaacaguuccagaguga

SEQ ID NO: 1564786 - RNA, 19 nt, Homo sapiens
  misc_RNA (1)...(19): siRNA sense strand
gggcacaccuucucccuaa

SEQ ID NO: 1564787 - RNA, 19 nt, Homo sapiens
  misc_RNA (1)...(19): siRNA sense strand
gaaccuggaugaccauuac

SEQ ID NO: 1564788 - RNA, 19 nt, Homo sapiens
  misc_RNA (1)...(19): siRNA sense strand
ugucaggccucuccucugu

SEQ ID NO: 1564789 - RNA, 19 nt, Homo sapiens
  misc_RNA (1)...(19): siRNA sense strand
caucgucucuccacauguc

SEQ ID NO: 1564790 - RNA, 19 nt, Homo sapiens
  misc_RNA (1)...(19): siRNA sense strand
gagcaaagccccacuucaa

SEQ ID NO: 1564791 - RNA, 19 nt, Homo sapiens
  misc_RNA (1)...(19): siRNA sense strand
gcuaugagucccuauugga

SEQ ID NO: 1564792 - RNA, 19 nt, Homo sapiens
  misc_RNA (1)...(19): siRNA sense strand
ggcagaguagggaccauua

SEQ ID NO: 1564793 - RNA, 19 nt, Homo sapiens
  misc_RNA (1)...(19): siRNA sense strand
ccagucagguguccuucau

SEQ ID NO: 1564794 - RNA, 19 nt, Homo sapiens
  misc_RNA (1)...(19): siRNA sense strand
aaacaguuccagagugaga

SEQ ID NO: 1564795 - RNA, 19 nt, Homo sapiens
  misc_RNA (1)...(19): siRNA sense strand
ccacuucaaggcccagaaa

SEQ ID NO: 1564796 - RNA, 19 nt, Homo sapiens
  misc_RNA (1)...(19): siRNA sense strand
cagagugagaggcagagua

SEQ ID NO: 1564797 - RNA, 19 nt, Homo sapiens
  misc_RNA (1)...(19): siRNA sense strand
gcagaguagggaccauuag

SEQ ID NO: 1564798 - RNA, 19 nt, Homo sapiens
  misc_RNA (1)...(19): siRNA sense strand
uagcaaacaguuccagagu

SEQ ID NO: 1564799 - RNA, 19 nt, Homo sapiens
  misc_RNA (1)...(19): siRNA sense strand
uauuggagaaccuggauga

SEQ ID NO: 1564800 - RNA, 19 nt, Homo sapiens
  misc_RNA (1)...(19): siRNA sense strand
agagugagaggcagaguag

SEQ ID NO: 1564801 - RNA, 19 nt, Homo sapiens
  misc_RNA (1)...(19): siRNA sense strand
gcaaauacaucuguuguuu

SEQ ID NO: 1564802 - RNA, 19 nt, Homo sapiens
  misc_RNA (1)...(19): siRNA sense strand
gaagcaaacuagcaaauau

SEQ ID NO: 1564803 - RNA, 19 nt, Homo sapiens
  misc_RNA (1)...(19): siRNA sense strand
ggagggaacucaucuaaug

SEQ ID NO: 1564804 - RNA, 19 nt, Homo sapiens
  misc_RNA (1)...(19): siRNA sense strand
caagauaccugaaauuaca

SEQ ID NO: 1564805 - RNA, 19 nt, Homo sapiens
  misc_RNA (1)...(19): siRNA sense strand
caagaaugcuagacuuaaa

SEQ ID NO: 1564806 - RNA, 19 nt, Homo sapiens
  misc_RNA (1)...(19): siRNA sense strand
ugaaacagcugaauuuaca

SEQ ID NO: 1564807 - RNA, 19 nt, Homo sapiens
  misc_RNA (1)...(19): siRNA sense strand
ggacaagaaugcuagacuu

SEQ ID NO: 1564808 - RNA, 19 nt, Homo sapiens
  misc_RNA (1)...(19): siRNA sense strand
gaucaucacuauugcaaau

SEQ ID NO: 1564809 - RNA, 19 nt, Homo sapiens
  misc_RNA (1)...(19): siRNA sense strand
gaagauauccgaucaaggu

SEQ ID NO: 1564810 - RNA, 19 nt, Homo sapiens
  misc_RNA (1)...(19): siRNA sense strand
ugugaaagcuggucuuaaa

SEQ ID NO: 1564811 - RNA, 19 nt, Homo sapiens
  misc_RNA (1)...(19): siRNA sense strand
guacagaacuccaugaacu

SEQ ID NO: 1564812 - RNA, 19 nt, Homo sapiens
  misc_RNA (1)...(19): siRNA sense strand
agaggaaacugaauugaaa

SEQ ID NO: 1564813 - RNA, 19 nt, Homo sapiens
  misc_RNA (1)...(19): siRNA sense strand
ccaguuaaccaacaucuua

SEQ ID NO: 1564814 - RNA, 19 nt, Homo sapiens
  misc_RNA (1)...(19): siRNA sense strand
gaaagacucuaacauccau

SEQ ID NO: 1564815 - RNA, 19 nt, Homo sapiens
  misc_RNA (1)...(19): siRNA sense strand
gaucggauguggcacuuug

SEQ ID NO: 1564816 - RNA, 19 nt, Homo sapiens
  misc_RNA (1)...(19): siRNA sense strand
ggucuugcuuuccuuuaua

SEQ ID NO: 1564817 - RNA, 19 nt, Homo sapiens
  misc_RNA (1)...(19): siRNA sense strand
caaagggauuggauuguug

SEQ ID NO: 1564818 - RNA, 19 nt, Homo sapiens
  misc_RNA (1)...(19): siRNA sense strand
ggagacaaguccugaaucu

SEQ ID NO: 1564819 - RNA, 19 nt, Homo sapiens
  misc_RNA (1)...(19): siRNA sense strand
gacaagaaugcuagacuua

SEQ ID NO: 1564820 - RNA, 19 nt, Homo sapiens
  misc_RNA (1)...(19): siRNA sense strand
gaagacagaagcaaacuag

SEQ ID NO: 1564821 - RNA, 19 nt, Homo sapiens
  misc_RNA (1)...(19): siRNA sense strand
guucugcucuggaagguuu

SEQ ID NO: 1564822 - RNA, 19 nt, Homo sapiens
  misc_RNA (1)...(19): siRNA sense strand
caacugaaauauacauguc

SEQ ID NO: 1564823 - RNA, 19 nt, Homo sapiens
  misc_RNA (1)...(19): siRNA sense strand
gaacuaucuucuugaucuu

SEQ ID NO: 1564824 - RNA, 19 nt, Homo sapiens
  misc_RNA (1)...(19): siRNA sense strand
ggucuuugguccuuugauu

SEQ ID NO: 1564825 - RNA, 19 nt, Homo sapiens
  misc_RNA (1)...(19): siRNA sense strand
ggaaacagccuccuuuuga

SEQ ID NO: 1564826 - RNA, 19 nt, Homo sapiens
  misc_RNA (1)...(19): siRNA sense strand
ugaacuaucuucuugaucu

SEQ ID NO: 1564827 - RNA, 19 nt, Homo sapiens
  misc_RNA (1)...(19): siRNA sense strand
uaacauccaugagcuugaa

SEQ ID NO: 1564828 - RNA, 19 nt, Homo sapiens
  misc_RNA (1)...(19): siRNA sense strand
uaccugaaauuacaacuga

SEQ ID NO: 1564829 - RNA, 19 nt, Homo sapiens
  misc_RNA (1)...(19): siRNA sense strand
gaaggaaaaucaagcaaau

SEQ ID NO: 1564830 - RNA, 19 nt, Homo sapiens
  misc_RNA (1)...(19): siRNA sense strand
gggauuggauuguuguugu

SEQ ID NO: 1564831 - RNA, 19 nt, Homo sapiens
  misc_RNA (1)...(19): siRNA sense strand
gauauccgaucaagguuca

SEQ ID NO: 1564832 - RNA, 19 nt, Homo sapiens
  misc_RNA (1)...(19): siRNA sense strand
ggaauaaugggaacuguag

SEQ ID NO: 1564833 - RNA, 19 nt, Homo sapiens
  misc_RNA (1)...(19): siRNA sense strand
gucauucucucucuacuug

SEQ ID NO: 1564834 - RNA, 19 nt, Homo sapiens
  misc_RNA (1)...(19): siRNA sense strand
ggucuaauucugcuaauau

SEQ ID NO: 1564835 - RNA, 19 nt, Homo sapiens
  misc_RNA (1)...(19): siRNA sense strand
uaaagaagaggaaacugaa

SEQ ID NO: 1564836 - RNA, 19 nt, Homo sapiens
  misc_RNA (1)...(19): siRNA sense strand
ucugaaagaggcauuauaa

SEQ ID NO: 1564837 - RNA, 19 nt, Homo sapiens
  misc_RNA (1)...(19): siRNA sense strand
acgaaggauugaccaguua

SEQ ID NO: 1564838 - RNA, 19 nt, Homo sapiens
  misc_RNA (1)...(19): siRNA sense strand
caucggcuguggcuuuauu

SEQ ID NO: 1564839 - RNA, 19 nt, Homo sapiens
  misc_RNA (1)...(19): siRNA sense strand
gcuguuggccagauuauga

SEQ ID NO: 1564840 - RNA, 19 nt, Homo sapiens
  misc_RNA (1)...(19): siRNA sense strand
aauuacaccuaccaagaua

SEQ ID NO: 1564841 - RNA, 19 nt, Homo sapiens
  misc_RNA (1)...(19): siRNA sense strand
gaagaggaaacugaauuga

SEQ ID NO: 1564842 - RNA, 19 nt, Homo sapiens
  misc_RNA (1)...(19): siRNA sense strand
ggauuggauuguuguuguu

SEQ ID NO: 1564843 - RNA, 19 nt, Homo sapiens
  misc_RNA (1)...(19): siRNA sense strand
acaaagauacugagccaaa

SEQ ID NO: 1564844 - RNA, 19 nt, Homo sapiens
  misc_RNA (1)...(19): siRNA sense strand
uguuugaucuuguguguga

SEQ ID NO: 1564845 - RNA, 19 nt, Homo sapiens
  misc_RNA (1)...(19): siRNA sense strand
ugugaucucuguauucaug

SEQ ID NO: 1564846 - RNA, 19 nt, Homo sapiens
  misc_RNA (1)...(19): siRNA sense strand
guacagaauguuucaguca

SEQ ID NO: 1564847 - RNA, 19 nt, Homo sapiens
  misc_RNA (1)...(19): siRNA sense strand
cgucauugcugcuagaauc

SEQ ID NO: 1564848 - RNA, 19 nt, Homo sapiens
  misc_RNA (1)...(19): siRNA sense strand
ucaauuacaccuaccaaga

SEQ ID NO: 1564849 - RNA, 19 nt, Homo sapiens
  misc_RNA (1)...(19): siRNA sense strand
guucucacuuccugcuaua

SEQ ID NO: 1564850 - RNA, 19 nt, Homo sapiens
  misc_RNA (1)...(19): siRNA sense strand
cuaccaagauaccugaaau

SEQ ID NO: 1564851 - RNA, 19 nt, Homo sapiens
  misc_RNA (1)...(19): siRNA sense strand
ggaugggucuccuacuaca

SEQ ID NO: 1564852 - RNA, 19 nt, Homo sapiens
  misc_RNA (1)...(19): siRNA sense strand
gugacuggguggacaagaa

SEQ ID NO: 1564853 - RNA, 19 nt, Homo sapiens
  misc_RNA (1)...(19): siRNA sense strand
caaaagaaguuaggaagga

SEQ ID NO: 1564854 - RNA, 19 nt, Homo sapiens
  misc_RNA (1)...(19): siRNA sense strand
uccaugaacuaucuucuug

SEQ ID NO: 1564855 - RNA, 19 nt, Homo sapiens
  misc_RNA (1)...(19): siRNA sense strand
guaauugaaucugaaagag

SEQ ID NO: 1564856 - RNA, 19 nt, Homo sapiens
  misc_RNA (1)...(19): siRNA sense strand
uuaaagaagaggaaacuga

SEQ ID NO: 1564857 - RNA, 19 nt, Homo sapiens
  misc_RNA (1)...(19): siRNA sense strand
caugaacuaucuucuugau

SEQ ID NO: 1564858 - RNA, 19 nt, Homo sapiens
  misc_RNA (1)...(19): siRNA sense strand
ggauugaccaguuaaccaa

SEQ ID NO: 1564859 - RNA, 19 nt, Homo sapiens
  misc_RNA (1)...(19): siRNA sense strand
agacaaguccugaaucugu

SEQ ID NO: 1564860 - RNA, 19 nt, Homo sapiens
  misc_RNA (1)...(19): siRNA sense strand
cagcugaauuuacacaaag

SEQ ID NO: 1564861 - RNA, 19 nt, Homo sapiens
  misc_RNA (1)...(19): siRNA sense strand
agaagcaaacuagcaaaua

SEQ ID NO: 1564862 - RNA, 19 nt, Homo sapiens
  misc_RNA (1)...(19): siRNA sense strand
cagagaggaugcuguggau

SEQ ID NO: 1564863 - RNA, 19 nt, Homo sapiens
  misc_RNA (1)...(19): siRNA sense strand
gucaucggcuguggcuuua

SEQ ID NO: 1564864 - RNA, 19 nt, Homo sapiens
  misc_RNA (1)...(19): siRNA sense strand
uacgaaggauugaccaguu

SEQ ID NO: 1564865 - RNA, 19 nt, Homo sapiens
  misc_RNA (1)...(19): siRNA sense strand
ucaagcaaauacaucuguu

SEQ ID NO: 1564866 - RNA, 19 nt, Homo sapiens
  misc_RNA (1)...(19): siRNA sense strand
gaaucggucuuugguccuu

SEQ ID NO: 1564867 - RNA, 19 nt, Homo sapiens
  misc_RNA (1)...(19): siRNA sense strand
gggucuaauucugcuaaua

SEQ ID NO: 1564868 - RNA, 19 nt, Homo sapiens
  misc_RNA (1)...(19): siRNA sense strand
agcuauaacuggaauaaug

SEQ ID NO: 1564869 - RNA, 19 nt, Homo sapiens
  misc_RNA (1)...(19): siRNA sense strand
acagcugaauuuacacaaa

SEQ ID NO: 1564870 - RNA, 19 nt, Homo sapiens
  misc_RNA (1)...(19): siRNA sense strand
ggaacuugguauccaugug

SEQ ID NO: 1564871 - RNA, 19 nt, Homo sapiens
  misc_RNA (1)...(19): siRNA sense strand
gacagaagcaaacuagcaa

SEQ ID NO: 1564872 - RNA, 19 nt, Homo sapiens
  misc_RNA (1)...(19): siRNA sense strand
ucuaaugggucuaauucug

SEQ ID NO: 1564873 - RNA, 19 nt, Homo sapiens
  misc_RNA (1)...(19): siRNA sense strand
caauuacaccuaccaagau

SEQ ID NO: 1564874 - RNA, 19 nt, Homo sapiens
  misc_RNA (1)...(19): siRNA sense strand
cgaucaagguucauucaag

SEQ ID NO: 1564875 - RNA, 19 nt, Homo sapiens
  misc_RNA (1)...(19): siRNA sense strand
caucagcuauaacuggaau

SEQ ID NO: 1564876 - RNA, 19 nt, Homo sapiens
  misc_RNA (1)...(19): siRNA sense strand
aacaugagcuucugaccau

SEQ ID NO: 1564877 - RNA, 19 nt, Homo sapiens
  misc_RNA (1)...(19): siRNA sense strand
uaaaugguguacagaacuc

SEQ ID NO: 1564878 - RNA, 19 nt, Homo sapiens
  misc_RNA (1)...(19): siRNA sense strand
gaaucugaaagaggcauua

SEQ ID NO: 1564879 - RNA, 19 nt, Homo sapiens
  misc_RNA (1)...(19): siRNA sense strand
accaagauaccugaaauua

SEQ ID NO: 1564880 - RNA, 19 nt, Homo sapiens
  misc_RNA (1)...(19): siRNA sense strand
gguuccauccucaguauuu

SEQ ID NO: 1564881 - RNA, 19 nt, Homo sapiens
  misc_RNA (1)...(19): siRNA sense strand
cuacaaccagccuguguuu

SEQ ID NO: 1564882 - RNA, 19 nt, Homo sapiens
  misc_RNA (1)...(19): siRNA sense strand
caaauaugaaugccacaau

SEQ ID NO: 1564883 - RNA, 19 nt, Homo sapiens
  misc_RNA (1)...(19): siRNA sense strand
ggagagucaauuacaccua

SEQ ID NO: 1564884 - RNA, 19 nt, Homo sapiens
  misc_RNA (1)...(19): siRNA sense strand
ucaaggagagucaauuaca

SEQ ID NO: 1564885 - RNA, 19 nt, Homo sapiens
  misc_RNA (1)...(19): siRNA sense strand
uuacuuggcuacgucgaaa

SEQ ID NO: 1564886 - RNA, 19 nt, Homo sapiens
  misc_RNA (1)...(19): siRNA sense strand
ugacuguccugggcuuuga

SEQ ID NO: 1564887 - RNA, 19 nt, Homo sapiens
  misc_RNA (1)...(19): siRNA sense strand
gggucuugcuuuccuuuau

SEQ ID NO: 1564888 - RNA, 19 nt, Homo sapiens
  misc_RNA (1)...(19): siRNA sense strand
uggcaugggucuugcuuuc

SEQ ID NO: 1564889 - RNA, 19 nt, Homo sapiens
  misc_RNA (1)...(19): siRNA sense strand
gcugugaaagcuggucuua

SEQ ID NO: 1564890 - RNA, 19 nt, Homo sapiens
  misc_RNA (1)...(19): siRNA sense strand
ggagaagacagaagcaaac

SEQ ID NO: 1564891 - RNA, 19 nt, Homo sapiens
  misc_RNA (1)...(19): siRNA sense strand
cuccaaauccugaagcuuu

SEQ ID NO: 1564892 - RNA, 19 nt, Homo sapiens
  misc_RNA (1)...(19): siRNA sense strand
gaucuucugcauuucauca

SEQ ID NO: 1564893 - RNA, 19 nt, Homo sapiens
  misc_RNA (1)...(19): siRNA sense strand
ucuuugguccuuugauuua

SEQ ID NO: 1564894 - RNA, 19 nt, Homo sapiens
  misc_RNA (1)...(19): siRNA sense strand
gugguuccauccucaguau

SEQ ID NO: 1564895 - RNA, 19 nt, Homo sapiens
  misc_RNA (1)...(19): siRNA sense strand
aagaagaggaaacugaauu

SEQ ID NO: 1564896 - RNA, 19 nt, Homo sapiens
  misc_RNA (1)...(19): siRNA sense strand
gcaaauaugaaugccacaa

SEQ ID NO: 1564897 - RNA, 19 nt, Homo sapiens
  misc_RNA (1)...(19): siRNA sense strand
gcaaacuagcaaauaugaa

SEQ ID NO: 1564898 - RNA, 19 nt, Homo sapiens
  misc_RNA (1)...(19): siRNA sense strand
gagaucggauguggcacuu

SEQ ID NO: 1564899 - RNA, 19 nt, Homo sapiens
  misc_RNA (1)...(19): siRNA sense strand
uauaaaugguguacagaac

SEQ ID NO: 1564900 - RNA, 19 nt, Homo sapiens
  misc_RNA (1)...(19): siRNA sense strand
cagcuuuccuguuugaucu

SEQ ID NO: 1564901 - RNA, 19 nt, Homo sapiens
  misc_RNA (1)...(19): siRNA sense strand
gaagggagcugcuguugac

SEQ ID NO: 1564902 - RNA, 19 nt, Homo sapiens
  misc_RNA (1)...(19): siRNA sense strand
ggacaagaaggaagaguaa

SEQ ID NO: 1564903 - RNA, 19 nt, Homo sapiens
  misc_RNA (1)...(19): siRNA sense strand
ggaggucuuuguuguguug

SEQ ID NO: 1564904 - RNA, 19 nt, Homo sapiens
  misc_RNA (1)...(19): siRNA sense strand
ggacugcaguugccaccuu

SEQ ID NO: 1564905 - RNA, 19 nt, Homo sapiens
  misc_RNA (1)...(19): siRNA sense strand
agaaguacauggaggagaa

SEQ ID NO: 1564906 - RNA, 19 nt, Homo sapiens
  misc_RNA (1)...(19): siRNA sense strand
gaaauucggaaguaugaug

SEQ ID NO: 1564907 - RNA, 19 nt, Homo sapiens
  misc_RNA (1)...(19): siRNA sense strand
caaguuggaugucgggaau

SEQ ID NO: 1564908 - RNA, 19 nt, Homo sapiens
  misc_RNA (1)...(19): siRNA sense strand
gagaaugaccagcucaaga

SEQ ID NO: 1564909 - RNA, 19 nt, Homo sapiens
  misc_RNA (1)...(19): siRNA sense strand
ggaaugcugaggugaaguu

SEQ ID NO: 1564910 - RNA, 19 nt, Homo sapiens
  misc_RNA (1)...(19): siRNA sense strand
agaaugaccagcucaagaa

SEQ ID NO: 1564911 - RNA, 19 nt, Homo sapiens
  misc_RNA (1)...(19): siRNA sense strand
gcggaggucuuuguugugu

SEQ ID NO: 1564912 - RNA, 19 nt, Homo sapiens
  misc_RNA (1)...(19): siRNA sense strand
cugcuguccuuccugcuua

SEQ ID NO: 1564913 - RNA, 19 nt, Homo sapiens
  misc_RNA (1)...(19): siRNA sense strand
ccuaaaagauggcagaaga

SEQ ID NO: 1564914 - RNA, 19 nt, Homo sapiens
  misc_RNA (1)...(19): siRNA sense strand
caacaccuucuuugugguu

SEQ ID NO: 1564915 - RNA, 19 nt, Homo sapiens
  misc_RNA (1)...(19): siRNA sense strand
ggccuccaaugaagccuuu

SEQ ID NO: 1564916 - RNA, 19 nt, Homo sapiens
  misc_RNA (1)...(19): siRNA sense strand
gaaguuggaggaagagaac

SEQ ID NO: 1564917 - RNA, 19 nt, Homo sapiens
  misc_RNA (1)...(19): siRNA sense strand
caagaagggagcugcuguu

SEQ ID NO: 1564918 - RNA, 19 nt, Homo sapiens
  misc_RNA (1)...(19): siRNA sense strand
aaagauggcagaagauuuu

SEQ ID NO: 1564919 - RNA, 19 nt, Homo sapiens
  misc_RNA (1)...(19): siRNA sense strand
ucucuacauugcuggcuuu

SEQ ID NO: 1564920 - RNA, 19 nt, Homo sapiens
  misc_RNA (1)...(19): siRNA sense strand
ucucugcauucccuucauu

SEQ ID NO: 1564921 - RNA, 19 nt, Homo sapiens
  misc_RNA (1)...(19): siRNA sense strand
gcugcuggccuccaaugaa

SEQ ID NO: 1564922 - RNA, 19 nt, Homo sapiens
  misc_RNA (1)...(19): siRNA sense strand
ggcagaagauuuucaaguc

SEQ ID NO: 1564923 - RNA, 19 nt, Homo sapiens
  misc_RNA (1)...(19): siRNA sense strand
ucggaaguaugaugaugug

SEQ ID NO: 1564924 - RNA, 19 nt, Homo sapiens
  misc_RNA (1)...(19): siRNA sense strand
augcugaggugaaguugga

SEQ ID NO: 1564925 - RNA, 19 nt, Homo sapiens
  misc_RNA (1)...(19): siRNA sense strand
uggacaagaaggaagagua

SEQ ID NO: 1564926 - RNA, 19 nt, Homo sapiens
  misc_RNA (1)...(19): siRNA sense strand
guugccaccuuccucuaug

SEQ ID NO: 1564927 - RNA, 19 nt, Homo sapiens
  misc_RNA (1)...(19): siRNA sense strand
uggcaacaccuucuuugug

SEQ ID NO: 1564928 - RNA, 19 nt, Homo sapiens
  misc_RNA (1)...(19): siRNA sense strand
gaaugaccagcucaagaag

SEQ ID NO: 1564929 - RNA, 19 nt, Homo sapiens
  misc_RNA (1)...(19): siRNA sense strand
uuagacgccuggugacucu

SEQ ID NO: 1564930 - RNA, 19 nt, Homo sapiens
  misc_RNA (1)...(19): siRNA sense strand
augcggaggucuuuguugu

SEQ ID NO: 1564931 - RNA, 19 nt, Homo sapiens
  misc_RNA (1)...(19): siRNA sense strand
ggucuuuguuguguugcuu

SEQ ID NO: 1564932 - RNA, 19 nt, Homo sapiens
  misc_RNA (1)...(19): siRNA sense strand
ugucauccuugugcuguug

SEQ ID NO: 1564933 - RNA, 19 nt, Homo sapiens
  misc_RNA (1)...(19): siRNA sense strand
cugcuggccuccaaugaag

SEQ ID NO: 1564934 - RNA, 19 nt, Homo sapiens
  misc_RNA (1)...(19): siRNA sense strand
ugaaguuggaggaagagaa

SEQ ID NO: 1564935 - RNA, 19 nt, Homo sapiens
  misc_RNA (1)...(19): siRNA sense strand
agaagggagcugcuguuga

SEQ ID NO: 1564936 - RNA, 19 nt, Homo sapiens
  misc_RNA (1)...(19): siRNA sense strand
ggagaaugaccagcucaag

SEQ ID NO: 1564937 - RNA, 19 nt, Homo sapiens
  misc_RNA (1)...(19): siRNA sense strand
aaauucggaaguaugauga

SEQ ID NO: 1564938 - RNA, 19 nt, Homo sapiens
  misc_RNA (1)...(19): siRNA sense strand
ccauggacaagaaggaaga

SEQ ID NO: 1564939 - RNA, 19 nt, Homo sapiens
  misc_RNA (1)...(19): siRNA sense strand
aggcugaccugcagaagcu

SEQ ID NO: 1564940 - RNA, 19 nt, Homo sapiens
  misc_RNA (1)...(19): siRNA sense strand
gaaguacauggaggagaau

SEQ ID NO: 1564941 - RNA, 19 nt, Homo sapiens
  misc_RNA (1)...(19): siRNA sense strand
cuucauuucuccuaaaaga

SEQ ID NO: 1564942 - RNA, 19 nt, Homo sapiens
  misc_RNA (1)...(19): siRNA sense strand
gaaggugguuccauucauc

SEQ ID NO: 1564943 - RNA, 19 nt, Homo sapiens
  misc_RNA (1)...(19): siRNA sense strand
ggacucacaugcucugcaa

SEQ ID NO: 1564944 - RNA, 19 nt, Homo sapiens
  misc_RNA (1)...(19): siRNA sense strand
ccuagaaggugguuccauu

SEQ ID NO: 1564945 - RNA, 19 nt, Homo sapiens
  misc_RNA (1)...(19): siRNA sense strand
gauccaauggcuucagaua

SEQ ID NO: 1564946 - RNA, 19 nt, Homo sapiens
  misc_RNA (1)...(19): siRNA sense strand
uaucagccauucuguagau

SEQ ID NO: 1564947 - RNA, 19 nt, Homo sapiens
  misc_RNA (1)...(19): siRNA sense strand
uccaauggcuucagauauc

SEQ ID NO: 1564948 - RNA, 19 nt, Homo sapiens
  misc_RNA (1)...(19): siRNA sense strand
cacaugcucugcaauucuu

SEQ ID NO: 1564949 - RNA, 19 nt, Homo sapiens
  misc_RNA (1)...(19): siRNA sense strand
guuaucagccauucuguag

SEQ ID NO: 1564950 - RNA, 19 nt, Homo sapiens
  misc_RNA (1)...(19): siRNA sense strand
ccauucaucuuguuaucag

SEQ ID NO: 1564951 - RNA, 19 nt, Homo sapiens
  misc_RNA (1)...(19): siRNA sense strand
ccacaccuccugcuacuac

SEQ ID NO: 1564952 - RNA, 19 nt, Homo sapiens
  misc_RNA (1)...(19): siRNA sense strand
aguuauagauccagauucu

SEQ ID NO: 1564953 - RNA, 19 nt, Homo sapiens
  misc_RNA (1)...(19): siRNA sense strand
ccaauggcuucagauaucu

SEQ ID NO: 1564954 - RNA, 19 nt, Homo sapiens
  misc_RNA (1)...(19): siRNA sense strand
cagcuggguuccucucucu

SEQ ID NO: 1564955 - RNA, 19 nt, Homo sapiens
  misc_RNA (1)...(19): siRNA sense strand
cuggguuccucucucuaua

SEQ ID NO: 1564956 - RNA, 19 nt, Homo sapiens
  misc_RNA (1)...(19): siRNA sense strand
ucacugggcuguggaucca

SEQ ID NO: 1564957 - RNA, 19 nt, Homo sapiens
  misc_RNA (1)...(19): siRNA sense strand
gugguuccauucaucuugu

SEQ ID NO: 1564958 - RNA, 19 nt, Homo sapiens
  misc_RNA (1)...(19): siRNA sense strand
agaaggugguuccauucau

SEQ ID NO: 1564959 - RNA, 19 nt, Homo sapiens
  misc_RNA (1)...(19): siRNA sense strand
gcuggguuccucucucuau

SEQ ID NO: 1564960 - RNA, 19 nt, Homo sapiens
  misc_RNA (1)...(19): siRNA sense strand
acucacaugcucugcaauu

SEQ ID NO: 1564961 - RNA, 19 nt, Homo sapiens
  misc_RNA (1)...(19): siRNA sense strand
ggugguuccauucaucuug

SEQ ID NO: 1564962 - RNA, 19 nt, Homo sapiens
  misc_RNA (1)...(19): siRNA sense strand
auucugccauccaaucuau

SEQ ID NO: 1564963 - RNA, 19 nt, Homo sapiens
  misc_RNA (1)...(19): siRNA sense strand
agaguuauagauccagauu

SEQ ID NO: 1564964 - RNA, 19 nt, Homo sapiens
  misc_RNA (1)...(19): siRNA sense strand
uggauccaauggcuucaga

SEQ ID NO: 1564965 - RNA, 19 nt, Homo sapiens
  misc_RNA (1)...(19): siRNA sense strand
uagaaggugguuccauuca

SEQ ID NO: 1564966 - RNA, 19 nt, Homo sapiens
  misc_RNA (1)...(19): siRNA sense strand
cagccauucuguagaucug

SEQ ID NO: 1564967 - RNA, 19 nt, Homo sapiens
  misc_RNA (1)...(19): siRNA sense strand
ucugccauccaaucuauuu

SEQ ID NO: 1564968 - RNA, 19 nt, Homo sapiens
  misc_RNA (1)...(19): siRNA sense strand
ggaaaucucuaucugaaug

SEQ ID NO: 1564969 - RNA, 19 nt, Homo sapiens
  misc_RNA (1)...(19): siRNA sense strand
gaaugaauaugguuccuau

SEQ ID NO: 1564970 - RNA, 19 nt, Homo sapiens
  misc_RNA (1)...(19): siRNA sense strand
ggacguuacuggaacauug

SEQ ID NO: 1564971 - RNA, 19 nt, Homo sapiens
  misc_RNA (1)...(19): siRNA sense strand
gcaggaaccaguacauuaa

SEQ ID NO: 1564972 - RNA, 19 nt, Homo sapiens
  misc_RNA (1)...(19): siRNA sense strand
gcaaaggcuuaauuggaaa

SEQ ID NO: 1564973 - RNA, 19 nt, Homo sapiens
  misc_RNA (1)...(19): siRNA sense strand
gccagaaccuuggacguua

SEQ ID NO: 1564974 - RNA, 19 nt, Homo sapiens
  misc_RNA (1)...(19): siRNA sense strand
ccaagauggugauggagua

SEQ ID NO: 1564975 - RNA, 19 nt, Homo sapiens
  misc_RNA (1)...(19): siRNA sense strand
gaacacaguauccauagga

SEQ ID NO: 1564976 - RNA, 19 nt, Homo sapiens
  misc_RNA (1)...(19): siRNA sense strand
gcacuuccaugacuacaag

SEQ ID NO: 1564977 - RNA, 19 nt, Homo sapiens
  misc_RNA (1)...(19): siRNA sense strand
ccgaagcaguggaccuuua

SEQ ID NO: 1564978 - RNA, 19 nt, Homo sapiens
  misc_RNA (1)...(19): siRNA sense strand
cacauuaccugcuuucuuc

SEQ ID NO: 1564979 - RNA, 19 nt, Homo sapiens
  misc_RNA (1)...(19): siRNA sense strand
cgcaaaggcuuaauuggaa

SEQ ID NO: 1564980 - RNA, 19 nt, Homo sapiens
  misc_RNA (1)...(19): siRNA sense strand
ggcaggaaccaguacauua

SEQ ID NO: 1564981 - RNA, 19 nt, Homo sapiens
  misc_RNA (1)...(19): siRNA sense strand
gcgauuacacggccaagua

SEQ ID NO: 1564982 - RNA, 19 nt, Homo sapiens
  misc_RNA (1)...(19): siRNA sense strand
ccagaaagaggcaaauuug

SEQ ID NO: 1564983 - RNA, 19 nt, Homo sapiens
  misc_RNA (1)...(19): siRNA sense strand
gcauuacaguucacggaaa

SEQ ID NO: 1564984 - RNA, 19 nt, Homo sapiens
  misc_RNA (1)...(19): siRNA sense strand
gccaagggcuggaacuuca

SEQ ID NO: 1564985 - RNA, 19 nt, Homo sapiens
  misc_RNA (1)...(19): siRNA sense strand
gcgcaaaggcuuaauugga

SEQ ID NO: 1564986 - RNA, 19 nt, Homo sapiens
  misc_RNA (1)...(19): siRNA sense strand
gaaccaguacauuaaguga

SEQ ID NO: 1564987 - RNA, 19 nt, Homo sapiens
  misc_RNA (1)...(19): siRNA sense strand
gaaccugcaugagccagaa

SEQ ID NO: 1564988 - RNA, 19 nt, Homo sapiens
  misc_RNA (1)...(19): siRNA sense strand
ccacggaggcaccaacuuu

SEQ ID NO: 1564989 - RNA, 19 nt, Homo sapiens
  misc_RNA (1)...(19): siRNA sense strand
cacaauaucuuggauucuu

SEQ ID NO: 1564990 - RNA, 19 nt, Homo sapiens
  misc_RNA (1)...(19): siRNA sense strand
ugaacacccucaccaccua

SEQ ID NO: 1564991 - RNA, 19 nt, Homo sapiens
  misc_RNA (1)...(19): siRNA sense strand
ccaucaaccucuacauguu

SEQ ID NO: 1564992 - RNA, 19 nt, Homo sapiens
  misc_RNA (1)...(19): siRNA sense strand
ucggguacauucucuauga

SEQ ID NO: 1564993 - RNA, 19 nt, Homo sapiens
  misc_RNA (1)...(19): siRNA sense strand
ggacucagcccaagauggu

SEQ ID NO: 1564994 - RNA, 19 nt, Homo sapiens
  misc_RNA (1)...(19): siRNA sense strand
gaaagaggcaaauuugacu

SEQ ID NO: 1564995 - RNA, 19 nt, Homo sapiens
  misc_RNA (1)...(19): siRNA sense strand
ucuauagccuggauaugaa

SEQ ID NO: 1564996 - RNA, 19 nt, Homo sapiens
  misc_RNA (1)...(19): siRNA sense strand
gggagccaaucaagucuga

SEQ ID NO: 1564997 - RNA, 19 nt, Homo sapiens
  misc_RNA (1)...(19): siRNA sense strand
gccagaaagaggcaaauuu

SEQ ID NO: 1564998 - RNA, 19 nt, Homo sapiens
  misc_RNA (1)...(19): siRNA sense strand
agucagaugucaccagcua

SEQ ID NO: 1564999 - RNA, 19 nt, Homo sapiens
  misc_RNA (1)...(19): siRNA sense strand
ggaggaccguggcauugug

SEQ ID NO: 1565000 - RNA, 19 nt, Homo sapiens
  misc_RNA (1)...(19): siRNA sense strand
gcagguggagaaugaauau

SEQ ID NO: 1565001 - RNA, 19 nt, Homo sapiens
  misc_RNA (1)...(19): siRNA sense strand
cccagaaacacccacauua

SEQ ID NO: 1565002 - RNA, 19 nt, Homo sapiens
  misc_RNA (1)...(19): siRNA sense strand
caacuuuggcuucaugaau

SEQ ID NO: 1565003 - RNA, 19 nt, Homo sapiens
  misc_RNA (1)...(19): siRNA sense strand
uuggaaaucucuaucugaa

SEQ ID NO: 1565004 - RNA, 19 nt, Homo sapiens
  misc_RNA (1)...(19): siRNA sense strand
ccauaggauucuuggacua

SEQ ID NO: 1565005 - RNA, 19 nt, Homo sapiens
  misc_RNA (1)...(19): siRNA sense strand
gagccaaucaagucugaaa

SEQ ID NO: 1565006 - RNA, 19 nt, Homo sapiens
  misc_RNA (1)...(19): siRNA sense strand
ccagcuggcuacuccaaga

SEQ ID NO: 1565007 - RNA, 19 nt, Homo sapiens
  misc_RNA (1)...(19): siRNA sense strand
gaaucuauagccuggauau

SEQ ID NO: 1565008 - RNA, 19 nt, Homo sapiens
  misc_RNA (1)...(19): siRNA sense strand
gaaaucucuaucugaauga

SEQ ID NO: 1565009 - RNA, 19 nt, Homo sapiens
  misc_RNA (1)...(19): siRNA sense strand
uuggguagcuuguccauca

SEQ ID NO: 1565010 - RNA, 19 nt, Homo sapiens
  misc_RNA (1)...(19): siRNA sense strand
cagaaagaggcaaauuuga

SEQ ID NO: 1565011 - RNA, 19 nt, Homo sapiens
  misc_RNA (1)...(19): siRNA sense strand
ccacauuaccugcuuucuu

SEQ ID NO: 1565012 - RNA, 19 nt, Homo sapiens
  misc_RNA (1)...(19): siRNA sense strand
gaaggccuguggcuugaac

SEQ ID NO: 1565013 - RNA, 19 nt, Homo sapiens
  misc_RNA (1)...(19): siRNA sense strand
gcccuuaacgccagucuug

SEQ ID NO: 1565014 - RNA, 19 nt, Homo sapiens
  misc_RNA (1)...(19): siRNA sense strand
ccgugcagguggagaauga

SEQ ID NO: 1565015 - RNA, 19 nt, Homo sapiens
  misc_RNA (1)...(19): siRNA sense strand
cagaaucuauagccuggau

SEQ ID NO: 1565016 - RNA, 19 nt, Homo sapiens
  misc_RNA (1)...(19): siRNA sense strand
acaugaagcuucgagacuu

SEQ ID NO: 1565017 - RNA, 19 nt, Homo sapiens
  misc_RNA (1)...(19): siRNA sense strand
gcuccuccaucaaccucua

SEQ ID NO: 1565018 - RNA, 19 nt, Homo sapiens
  misc_RNA (1)...(19): siRNA sense strand
gcaugaggcugaggacaac

SEQ ID NO: 1565019 - RNA, 19 nt, Homo sapiens
  misc_RNA (1)...(19): siRNA sense strand
ggaaccaguacauuaagug

SEQ ID NO: 1565020 - RNA, 19 nt, Homo sapiens
  misc_RNA (1)...(19): siRNA sense strand
ccagaaacacccacauuac

SEQ ID NO: 1565021 - RNA, 19 nt, Homo sapiens
  misc_RNA (1)...(19): siRNA sense strand
gguucggccuggacaaaug

SEQ ID NO: 1565022 - RNA, 19 nt, Homo sapiens
  misc_RNA (1)...(19): siRNA sense strand
uggagaaccugccagucaa

SEQ ID NO: 1565023 - RNA, 19 nt, Homo sapiens
  misc_RNA (1)...(19): siRNA sense strand
caccagcuaugacuaugau

SEQ ID NO: 1565024 - RNA, 19 nt, Homo sapiens
  misc_RNA (1)...(19): siRNA sense strand
aagcaguggaccuuuauuu

SEQ ID NO: 1565025 - RNA, 19 nt, Homo sapiens
  misc_RNA (1)...(19): siRNA sense strand
gagaaucgugggcgaguca

SEQ ID NO: 1565026 - RNA, 19 nt, Homo sapiens
  misc_RNA (1)...(19): siRNA sense strand
gcaguggaccuuuauuuug

SEQ ID NO: 1565027 - RNA, 19 nt, Homo sapiens
  misc_RNA (1)...(19): siRNA sense strand
gaugccguaugagcccuua

SEQ ID NO: 1565028 - RNA, 19 nt, Homo sapiens
  misc_RNA (1)...(19): siRNA sense strand
uggaacugcuccugacuuc

SEQ ID NO: 1565029 - RNA, 19 nt, Homo sapiens
  misc_RNA (1)...(19): siRNA sense strand
uucccaagaugccguauga

SEQ ID NO: 1565030 - RNA, 19 nt, Homo sapiens
  misc_RNA (1)...(19): siRNA sense strand
ggccagaaccuuggacguu

SEQ ID NO: 1565031 - RNA, 19 nt, Homo sapiens
  misc_RNA (1)...(19): siRNA sense strand
gaacacccucaccaccuau

SEQ ID NO: 1565032 - RNA, 19 nt, Homo sapiens
  misc_RNA (1)...(19): siRNA sense strand
gaagcaguggaccuuuauu

SEQ ID NO: 1565033 - RNA, 19 nt, Homo sapiens
  misc_RNA (1)...(19): siRNA sense strand
cagcgcaaaggcuuaauug

SEQ ID NO: 1565034 - RNA, 19 nt, Homo sapiens
  misc_RNA (1)...(19): siRNA sense strand
uacaagacaacgaagauug

SEQ ID NO: 1565035 - RNA, 19 nt, Homo sapiens
  misc_RNA (1)...(19): siRNA sense strand
caguggaccuuuauuuuga

SEQ ID NO: 1565036 - RNA, 19 nt, Homo sapiens
  misc_RNA (1)...(19): siRNA sense strand
ggcaugaggcugaggacaa

SEQ ID NO: 1565037 - RNA, 19 nt, Homo sapiens
  misc_RNA (1)...(19): siRNA sense strand
gggcaggaaccaguacauu

SEQ ID NO: 1565038 - RNA, 19 nt, Homo sapiens
  misc_RNA (1)...(19): siRNA sense strand
gaccagcgcaaaggcuuaa

SEQ ID NO: 1565039 - RNA, 19 nt, Homo sapiens
  misc_RNA (1)...(19): siRNA sense strand
aacuuuggcuucaugaaug

SEQ ID NO: 1565040 - RNA, 19 nt, Homo sapiens
  misc_RNA (1)...(19): siRNA sense strand
gggaccgccugcugaagau

SEQ ID NO: 1565041 - RNA, 19 nt, Homo sapiens
  misc_RNA (1)...(19): siRNA sense strand
acaauaucuuggauucuuc

SEQ ID NO: 1565042 - RNA, 19 nt, Homo sapiens
  misc_RNA (1)...(19): siRNA sense strand
gguggagaaugaauauggu

SEQ ID NO: 1565043 - RNA, 19 nt, Homo sapiens
  misc_RNA (1)...(19): siRNA sense strand
cgaagcaguggaccuuuau

SEQ ID NO: 1565044 - RNA, 19 nt, Homo sapiens
  misc_RNA (1)...(19): siRNA sense strand
gagguucggccuggacaaa

SEQ ID NO: 1565045 - RNA, 19 nt, Homo sapiens
  misc_RNA (1)...(19): siRNA sense strand
caucaaccucuacauguuc

SEQ ID NO: 1565046 - RNA, 19 nt, Homo sapiens
  misc_RNA (1)...(19): siRNA sense strand
ccuuaacgccagucuugua

SEQ ID NO: 1565047 - RNA, 19 nt, Homo sapiens
  misc_RNA (1)...(19): siRNA sense strand
ccaccuuucucuucaacgu

SEQ ID NO: 1565048 - RNA, 19 nt, Homo sapiens
  misc_RNA (1)...(19): siRNA sense strand
aggcaaauuugacuucucu

SEQ ID NO: 1565049 - RNA, 19 nt, Homo sapiens
  misc_RNA (1)...(19): siRNA sense strand
ggagaaccugccagucaau

SEQ ID NO: 1565050 - RNA, 19 nt, Homo sapiens
  misc_RNA (1)...(19): siRNA sense strand
cccuacaucugcagugaga

SEQ ID NO: 1565051 - RNA, 19 nt, Homo sapiens
  misc_RNA (1)...(19): siRNA sense strand
ucaaccaggucaucguuuu

SEQ ID NO: 1565052 - RNA, 19 nt, Homo sapiens
  misc_RNA (1)...(19): siRNA sense strand
ccagaaccuuggacguuac

SEQ ID NO: 1565053 - RNA, 19 nt, Homo sapiens
  misc_RNA (1)...(19): siRNA sense strand
cuacugaccaccuuucucu

SEQ ID NO: 1565054 - RNA, 19 nt, Homo sapiens
  misc_RNA (1)...(19): siRNA sense strand
gaggcaaauuugacuucuc

SEQ ID NO: 1565055 - RNA, 19 nt, Homo sapiens
  misc_RNA (1)...(19): siRNA sense strand
acacccacauuaccugcuu

SEQ ID NO: 1565056 - RNA, 19 nt, Homo sapiens
  misc_RNA (1)...(19): siRNA sense strand
ucaguggccacgugcauga

SEQ ID NO: 1565057 - RNA, 19 nt, Homo sapiens
  misc_RNA (1)...(19): siRNA sense strand
ugaccaccuuucucuucaa

SEQ ID NO: 1565058 - RNA, 19 nt, Homo sapiens
  misc_RNA (1)...(19): siRNA sense strand
ugacuucagacaacaagga

SEQ ID NO: 1565059 - RNA, 19 nt, Homo sapiens
  misc_RNA (1)...(19): siRNA sense strand
ugaggcugaggacaacuua

SEQ ID NO: 1565060 - RNA, 19 nt, Homo sapiens
  misc_RNA (1)...(19): siRNA sense strand
gccuggauaugaagaagag

SEQ ID NO: 1565061 - RNA, 19 nt, Homo sapiens
  misc_RNA (1)...(19): siRNA sense strand
ugaccagcgcaaaggcuua

SEQ ID NO: 1565062 - RNA, 19 nt, Homo sapiens
  misc_RNA (1)...(19): siRNA sense strand
ggaucuugguggagaaucg

SEQ ID NO: 1565063 - RNA, 19 nt, Homo sapiens
  misc_RNA (1)...(19): siRNA sense strand
ugugggacgcccucaagua

SEQ ID NO: 1565064 - RNA, 19 nt, Homo sapiens
  misc_RNA (1)...(19): siRNA sense strand
ucagaugucaccagcuaug

SEQ ID NO: 1565065 - RNA, 19 nt, Homo sapiens
  misc_RNA (1)...(19): siRNA sense strand
gaccgccugcugaagauga

SEQ ID NO: 1565066 - RNA, 19 nt, Homo sapiens
  misc_RNA (1)...(19): siRNA sense strand
cuacaagacaacgaagauu

SEQ ID NO: 1565067 - RNA, 19 nt, Homo sapiens
  misc_RNA (1)...(19): siRNA sense strand
uaggauucuuggacuacaa

SEQ ID NO: 1565068 - RNA, 19 nt, Homo sapiens
  misc_RNA (1)...(19): siRNA sense strand
gaaggaugcucuuagauau

SEQ ID NO: 1565069 - RNA, 19 nt, Homo sapiens
  misc_RNA (1)...(19): siRNA sense strand
ggaaggaugcucuuagaua

SEQ ID NO: 1565070 - RNA, 19 nt, Homo sapiens
  misc_RNA (1)...(19): siRNA sense strand
gcacaauauuccucaguaa

SEQ ID NO: 1565071 - RNA, 19 nt, Homo sapiens
  misc_RNA (1)...(19): siRNA sense strand
ggagagggcucacaagcuu

SEQ ID NO: 1565072 - RNA, 19 nt, Homo sapiens
  misc_RNA (1)...(19): siRNA sense strand
caaccaaaccucaaguaua

SEQ ID NO: 1565073 - RNA, 19 nt, Homo sapiens
  misc_RNA (1)...(19): siRNA sense strand
ggaauucaauccuucagau

SEQ ID NO: 1565074 - RNA, 19 nt, Homo sapiens
  misc_RNA (1)...(19): siRNA sense strand
ggacaaauagcaaggaaau

SEQ ID NO: 1565075 - RNA, 19 nt, Homo sapiens
  misc_RNA (1)...(19): siRNA sense strand
guacaaggaccuaagaaga

SEQ ID NO: 1565076 - RNA, 19 nt, Homo sapiens
  misc_RNA (1)...(19): siRNA sense strand
gagcgacaguuucuugaau

SEQ ID NO: 1565077 - RNA, 19 nt, Homo sapiens
  misc_RNA (1)...(19): siRNA sense strand
aaccaaaccucaaguauac

SEQ ID NO: 1565078 - RNA, 19 nt, Homo sapiens
  misc_RNA (1)...(19): siRNA sense strand
cagagcagaagcagauuua

SEQ ID NO: 1565079 - RNA, 19 nt, Homo sapiens
  misc_RNA (1)...(19): siRNA sense strand
gccaccagauuaugacaaa

SEQ ID NO: 1565080 - RNA, 19 nt, Homo sapiens
  misc_RNA (1)...(19): siRNA sense strand
uaacauacgcagagauaga

SEQ ID NO: 1565081 - RNA, 19 nt, Homo sapiens
  misc_RNA (1)...(19): siRNA sense strand
aggaugcucuuagauauuu

SEQ ID NO: 1565082 - RNA, 19 nt, Homo sapiens
  misc_RNA (1)...(19): siRNA sense strand
gcgacaguuucuugaauug

SEQ ID NO: 1565083 - RNA, 19 nt, Homo sapiens
  misc_RNA (1)...(19): siRNA sense strand
ugaccaggcuguauggaau

SEQ ID NO: 1565084 - RNA, 19 nt, Homo sapiens
  misc_RNA (1)...(19): siRNA sense strand
caauauuccucaguaaauc

SEQ ID NO: 1565085 - RNA, 19 nt, Homo sapiens
  misc_RNA (1)...(19): siRNA sense strand
ccgaagugccaccagauua

SEQ ID NO: 1565086 - RNA, 19 nt, Homo sapiens
  misc_RNA (1)...(19): siRNA sense strand
gugucgcucuugcaauaua

SEQ ID NO: 1565087 - RNA, 19 nt, Homo sapiens
  misc_RNA (1)...(19): siRNA sense strand
gcgaacaaccugagcuuuc

SEQ ID NO: 1565088 - RNA, 19 nt, Homo sapiens
  misc_RNA (1)...(19): siRNA sense strand
gcacagucagucaaccaaa

SEQ ID NO: 1565089 - RNA, 19 nt, Homo sapiens
  misc_RNA (1)...(19): siRNA sense strand
gugucuaugccaaguauua

SEQ ID NO: 1565090 - RNA, 19 nt, Homo sapiens
  misc_RNA (1)...(19): siRNA sense strand
cgaagugccaccagauuau

SEQ ID NO: 1565091 - RNA, 19 nt, Homo sapiens
  misc_RNA (1)...(19): siRNA sense strand
gaacauggaauucaauccu

SEQ ID NO: 1565092 - RNA, 19 nt, Homo sapiens
  misc_RNA (1)...(19): siRNA sense strand
caggacaaauagcaaggaa

SEQ ID NO: 1565093 - RNA, 19 nt, Homo sapiens
  misc_RNA (1)...(19): siRNA sense strand
ggacaaguacaaggaccua

SEQ ID NO: 1565094 - RNA, 19 nt, Homo sapiens
  misc_RNA (1)...(19): siRNA sense strand
gcagggagagggcucacaa

SEQ ID NO: 1565095 - RNA, 19 nt, Homo sapiens
  misc_RNA (1)...(19): siRNA sense strand
cgagcuagagcgacaguuu

SEQ ID NO: 1565096 - RNA, 19 nt, Homo sapiens
  misc_RNA (1)...(19): siRNA sense strand
uauggaauguggauuacug

SEQ ID NO: 1565097 - RNA, 19 nt, Homo sapiens
  misc_RNA (1)...(19): siRNA sense strand
aaacagggacccagaugga

SEQ ID NO: 1565098 - RNA, 19 nt, Homo sapiens
  misc_RNA (1)...(19): siRNA sense strand
caaguacaaggaccuaaga

SEQ ID NO: 1565099 - RNA, 19 nt, Homo sapiens
  misc_RNA (1)...(19): siRNA sense strand
gaaaaucuucacccucuuu

SEQ ID NO: 1565100 - RNA, 19 nt, Homo sapiens
  misc_RNA (1)...(19): siRNA sense strand
gaagugccaccagauuaug

SEQ ID NO: 1565101 - RNA, 19 nt, Homo sapiens
  misc_RNA (1)...(19): siRNA sense strand
gacaaauagcaaggaaaua

SEQ ID NO: 1565102 - RNA, 19 nt, Homo sapiens
  misc_RNA (1)...(19): siRNA sense strand
acaaggaccuaagaagauc

SEQ ID NO: 1565103 - RNA, 19 nt, Homo sapiens
  misc_RNA (1)...(19): siRNA sense strand
augugucgcucuugcaaua

SEQ ID NO: 1565104 - RNA, 19 nt, Homo sapiens
  misc_RNA (1)...(19): siRNA sense strand
caaauagcaaggaaauaca

SEQ ID NO: 1565105 - RNA, 19 nt, Homo sapiens
  misc_RNA (1)...(19): siRNA sense strand
cacaauauuccucaguaaa

SEQ ID NO: 1565106 - RNA, 19 nt, Homo sapiens
  misc_RNA (1)...(19): siRNA sense strand
ccuccaaggugugggauga

SEQ ID NO: 1565107 - RNA, 19 nt, Homo sapiens
  misc_RNA (1)...(19): siRNA sense strand
uuuaacauacgcagagaua

SEQ ID NO: 1565108 - RNA, 19 nt, Homo sapiens
  misc_RNA (1)...(19): siRNA sense strand
gauggaaggaugcucuuag

SEQ ID NO: 1565109 - RNA, 19 nt, Homo sapiens
  misc_RNA (1)...(19): siRNA sense strand
cagugucuaugccaaguau

SEQ ID NO: 1565110 - RNA, 19 nt, Homo sapiens
  misc_RNA (1)...(19): siRNA sense strand
acaaauagcaaggaaauac

SEQ ID NO: 1565111 - RNA, 19 nt, Homo sapiens
  misc_RNA (1)...(19): siRNA sense strand
ccaaaccucaaguauacaa

SEQ ID NO: 1565112 - RNA, 19 nt, Homo sapiens
  misc_RNA (1)...(19): siRNA sense strand
gcgaggacaaguacaagga

SEQ ID NO: 1565113 - RNA, 19 nt, Homo sapiens
  misc_RNA (1)...(19): siRNA sense strand
gggaugaccaggcuguaug

SEQ ID NO: 1565114 - RNA, 19 nt, Homo sapiens
  misc_RNA (1)...(19): siRNA sense strand
gguguaccuugaaagacuu

SEQ ID NO: 1565115 - RNA, 19 nt, Homo sapiens
  misc_RNA (1)...(19): siRNA sense strand
agcacaauauuccucagua

SEQ ID NO: 1565116 - RNA, 19 nt, Homo sapiens
  misc_RNA (1)...(19): siRNA sense strand
cuagagcgacaguuucuug

SEQ ID NO: 1565117 - RNA, 19 nt, Homo sapiens
  misc_RNA (1)...(19): siRNA sense strand
gagcuagagcgacaguuuc

SEQ ID NO: 1565118 - RNA, 19 nt, Homo sapiens
  misc_RNA (1)...(19): siRNA sense strand
gaauucaauccuucagauc

SEQ ID NO: 1565119 - RNA, 19 nt, Homo sapiens
  misc_RNA (1)...(19): siRNA sense strand
cagauuaugacaaacacaa

SEQ ID NO: 1565120 - RNA, 19 nt, Homo sapiens
  misc_RNA (1)...(19): siRNA sense strand
uacaaggaccuaagaagau

SEQ ID NO: 1565121 - RNA, 19 nt, Homo sapiens
  misc_RNA (1)...(19): siRNA sense strand
ccagagcagaagcagauuu

SEQ ID NO: 1565122 - RNA, 19 nt, Homo sapiens
  misc_RNA (1)...(19): siRNA sense strand
gacaguuucuugaauugcu

SEQ ID NO: 1565123 - RNA, 19 nt, Homo sapiens
  misc_RNA (1)...(19): siRNA sense strand
uaagaagauccgcgaggaa

SEQ ID NO: 1565124 - RNA, 19 nt, Homo sapiens
  misc_RNA (1)...(19): siRNA sense strand
ucaaccaaaccucaaguau

SEQ ID NO: 1565125 - RNA, 19 nt, Homo sapiens
  misc_RNA (1)...(19): siRNA sense strand
ucaauguuccuuccagugu

SEQ ID NO: 1565126 - RNA, 19 nt, Homo sapiens
  misc_RNA (1)...(19): siRNA sense strand
aauuaaaugugucgcucuu

SEQ ID NO: 1565127 - RNA, 19 nt, Homo sapiens
  misc_RNA (1)...(19): siRNA sense strand
cuguauggaauguggauua

SEQ ID NO: 1565128 - RNA, 19 nt, Homo sapiens
  misc_RNA (1)...(19): siRNA sense strand
agcgacaguuucuugaauu

SEQ ID NO: 1565129 - RNA, 19 nt, Homo sapiens
  misc_RNA (1)...(19): siRNA sense strand
gaauugcugcaguucaaca

SEQ ID NO: 1565130 - RNA, 19 nt, Homo sapiens
  misc_RNA (1)...(19): siRNA sense strand
gcucuugcaauauauuauc

SEQ ID NO: 1565131 - RNA, 19 nt, Homo sapiens
  misc_RNA (1)...(19): siRNA sense strand
gcagauuuaccgguucguu

SEQ ID NO: 1565132 - RNA, 19 nt, Homo sapiens
  misc_RNA (1)...(19): siRNA sense strand
auggaaggaugcucuuaga

SEQ ID NO: 1565133 - RNA, 19 nt, Homo sapiens
  misc_RNA (1)...(19): siRNA sense strand
aacauggaauucaauccuu

SEQ ID NO: 1565134 - RNA, 19 nt, Homo sapiens
  misc_RNA (1)...(19): siRNA sense strand
gccagauccugaaagacau

SEQ ID NO: 1565135 - RNA, 19 nt, Homo sapiens
  misc_RNA (1)...(19): siRNA sense strand
ccucgggccagcacaauau

SEQ ID NO: 1565136 - RNA, 19 nt, Homo sapiens
  misc_RNA (1)...(19): siRNA sense strand
uagcaaggaaauacaguuc

SEQ ID NO: 1565137 - RNA, 19 nt, Homo sapiens
  misc_RNA (1)...(19): siRNA sense strand
cgaacaaccugagcuuucc

SEQ ID NO: 1565138 - RNA, 19 nt, Homo sapiens
  misc_RNA (1)...(19): siRNA sense strand
ggaagcggauuguuuuagg

SEQ ID NO: 1565139 - RNA, 19 nt, Homo sapiens
  misc_RNA (1)...(19): siRNA sense strand
ugccagauccugaaagaca

SEQ ID NO: 1565140 - RNA, 19 nt, Homo sapiens
  misc_RNA (1)...(19): siRNA sense strand
acugccagauccugaaaga

SEQ ID NO: 1565141 - RNA, 19 nt, Homo sapiens
  misc_RNA (1)...(19): siRNA sense strand
gucaaccaaaccucaagua

SEQ ID NO: 1565142 - RNA, 19 nt, Homo sapiens
  misc_RNA (1)...(19): siRNA sense strand
gcucagccagugcagacaa

SEQ ID NO: 1565143 - RNA, 19 nt, Homo sapiens
  misc_RNA (1)...(19): siRNA sense strand
uugcugcaguucaacauca

SEQ ID NO: 1565144 - RNA, 19 nt, Homo sapiens
  misc_RNA (1)...(19): siRNA sense strand
caacuggaagcggauuguu

SEQ ID NO: 1565145 - RNA, 19 nt, Homo sapiens
  misc_RNA (1)...(19): siRNA sense strand
caccagauuaugacaaaca

SEQ ID NO: 1565146 - RNA, 19 nt, Homo sapiens
  misc_RNA (1)...(19): siRNA sense strand
gaccaggcuguauggaaug

SEQ ID NO: 1565147 - RNA, 19 nt, Homo sapiens
  misc_RNA (1)...(19): siRNA sense strand
gaaggaugcucuuagauau

SEQ ID NO: 1565148 - RNA, 19 nt, Homo sapiens
  misc_RNA (1)...(19): siRNA sense strand
ggaaggaugcucuuagaua

SEQ ID NO: 1565149 - RNA, 19 nt, Homo sapiens
  misc_RNA (1)...(19): siRNA sense strand
gcacaauauuccucaguaa

SEQ ID NO: 1565150 - RNA, 19 nt, Homo sapiens
  misc_RNA (1)...(19): siRNA sense strand
ggagagggcucacaagcuu

SEQ ID NO: 1565151 - RNA, 19 nt, Homo sapiens
  misc_RNA (1)...(19): siRNA sense strand
caaccaaaccucaaguaua

SEQ ID NO: 1565152 - RNA, 19 nt, Homo sapiens
  misc_RNA (1)...(19): siRNA sense strand
ggaauucaauccuucagau

SEQ ID NO: 1565153 - RNA, 19 nt, Homo sapiens
  misc_RNA (1)...(19): siRNA sense strand
ggacaaauagcaaggaaau

SEQ ID NO: 1565154 - RNA, 19 nt, Homo sapiens
  misc_RNA (1)...(19): siRNA sense strand
guacaaggaccuaagaaga

SEQ ID NO: 1565155 - RNA, 19 nt, Homo sapiens
  misc_RNA (1)...(19): siRNA sense strand
gagcgacaguuucuugaau

SEQ ID NO: 1565156 - RNA, 19 nt, Homo sapiens
  misc_RNA (1)...(19): siRNA sense strand
aaccaaaccucaaguauac

SEQ ID NO: 1565157 - RNA, 19 nt, Homo sapiens
  misc_RNA (1)...(19): siRNA sense strand
cagagcagaagcagauuua

SEQ ID NO: 1565158 - RNA, 19 nt, Homo sapiens
  misc_RNA (1)...(19): siRNA sense strand
gccaccagauuaugacaaa

SEQ ID NO: 1565159 - RNA, 19 nt, Homo sapiens
  misc_RNA (1)...(19): siRNA sense strand
uaacauacgcagagauaga

SEQ ID NO: 1565160 - RNA, 19 nt, Homo sapiens
  misc_RNA (1)...(19): siRNA sense strand
aggaugcucuuagauauuu

SEQ ID NO: 1565161 - RNA, 19 nt, Homo sapiens
  misc_RNA (1)...(19): siRNA sense strand
gcgacaguuucuugaauug

SEQ ID NO: 1565162 - RNA, 19 nt, Homo sapiens
  misc_RNA (1)...(19): siRNA sense strand
ugaccaggcuguauggaau

SEQ ID NO: 1565163 - RNA, 19 nt, Homo sapiens
  misc_RNA (1)...(19): siRNA sense strand
caauauuccucaguaaauc

SEQ ID NO: 1565164 - RNA, 19 nt, Homo sapiens
  misc_RNA (1)...(19): siRNA sense strand
ccgaagugccaccagauua

SEQ ID NO: 1565165 - RNA, 19 nt, Homo sapiens
  misc_RNA (1)...(19): siRNA sense strand
gugucgcucuugcaauaua

SEQ ID NO: 1565166 - RNA, 19 nt, Homo sapiens
  misc_RNA (1)...(19): siRNA sense strand
gcgaacaaccugagcuuuc

SEQ ID NO: 1565167 - RNA, 19 nt, Homo sapiens
  misc_RNA (1)...(19): siRNA sense strand
gcacagucagucaaccaaa

SEQ ID NO: 1565168 - RNA, 19 nt, Homo sapiens
  misc_RNA (1)...(19): siRNA sense strand
gugucuaugccaaguauua

SEQ ID NO: 1565169 - RNA, 19 nt, Homo sapiens
  misc_RNA (1)...(19): siRNA sense strand
cgaagugccaccagauuau

SEQ ID NO: 1565170 - RNA, 19 nt, Homo sapiens
  misc_RNA (1)...(19): siRNA sense strand
caggacaaauagcaaggaa

SEQ ID NO: 1565171 - RNA, 19 nt, Homo sapiens
  misc_RNA (1)...(19): siRNA sense strand
ggacaaguacaaggaccua

SEQ ID NO: 1565172 - RNA, 19 nt, Homo sapiens
  misc_RNA (1)...(19): siRNA sense strand
gcagggagagggcucacaa

SEQ ID NO: 1565173 - RNA, 19 nt, Homo sapiens
  misc_RNA (1)...(19): siRNA sense strand
cgagcuagagcgacaguuu

SEQ ID NO: 1565174 - RNA, 19 nt, Homo sapiens
  misc_RNA (1)...(19): siRNA sense strand
uauggaauguggauuacug

SEQ ID NO: 1565175 - RNA, 19 nt, Homo sapiens
  misc_RNA (1)...(19): siRNA sense strand
aaacagggacccagaugga

SEQ ID NO: 1565176 - RNA, 19 nt, Homo sapiens
  misc_RNA (1)...(19): siRNA sense strand
caaguacaaggaccuaaga

SEQ ID NO: 1565177 - RNA, 19 nt, Homo sapiens
  misc_RNA (1)...(19): siRNA sense strand
gaaaaucuucacccucuuu

SEQ ID NO: 1565178 - RNA, 19 nt, Homo sapiens
  misc_RNA (1)...(19): siRNA sense strand
gaagugccaccagauuaug

SEQ ID NO: 1565179 - RNA, 19 nt, Homo sapiens
  misc_RNA (1)...(19): siRNA sense strand
caaauagcaaggaaauaca

SEQ ID NO: 1565180 - RNA, 19 nt, Homo sapiens
  misc_RNA (1)...(19): siRNA sense strand
acaaggaccuaagaagauc

SEQ ID NO: 1565181 - RNA, 19 nt, Homo sapiens
  misc_RNA (1)...(19): siRNA sense strand
gacaaauagcaaggaaaua

SEQ ID NO: 1565182 - RNA, 19 nt, Homo sapiens
  misc_RNA (1)...(19): siRNA sense strand
augugucgcucuugcaaua

SEQ ID NO: 1565183 - RNA, 19 nt, Homo sapiens
  misc_RNA (1)...(19): siRNA sense strand
cacaauauuccucaguaaa

SEQ ID NO: 1565184 - RNA, 19 nt, Homo sapiens
  misc_RNA (1)...(19): siRNA sense strand
ccuccaaggugugggauga

SEQ ID NO: 1565185 - RNA, 19 nt, Homo sapiens
  misc_RNA (1)...(19): siRNA sense strand
uuuaacauacgcagagaua

SEQ ID NO: 1565186 - RNA, 19 nt, Homo sapiens
  misc_RNA (1)...(19): siRNA sense strand
gauggaaggaugcucuuag

SEQ ID NO: 1565187 - RNA, 19 nt, Homo sapiens
  misc_RNA (1)...(19): siRNA sense strand
acaaauagcaaggaaauac

SEQ ID NO: 1565188 - RNA, 19 nt, Homo sapiens
  misc_RNA (1)...(19): siRNA sense strand
cagugucuaugccaaguau

SEQ ID NO: 1565189 - RNA, 19 nt, Homo sapiens
  misc_RNA (1)...(19): siRNA sense strand
ccaaaccucaaguauacaa

SEQ ID NO: 1565190 - RNA, 19 nt, Homo sapiens
  misc_RNA (1)...(19): siRNA sense strand
gcgaggacaaguacaagga

SEQ ID NO: 1565191 - RNA, 19 nt, Homo sapiens
  misc_RNA (1)...(19): siRNA sense strand
gggaugaccaggcuguaug

SEQ ID NO: 1565192 - RNA, 19 nt, Homo sapiens
  misc_RNA (1)...(19): siRNA sense strand
gaauucaauccuucagauc

SEQ ID NO: 1565193 - RNA, 19 nt, Homo sapiens
  misc_RNA (1)...(19): siRNA sense strand
cuagagcgacaguuucuug

SEQ ID NO: 1565194 - RNA, 19 nt, Homo sapiens
  misc_RNA (1)...(19): siRNA sense strand
gagcuagagcgacaguuuc

SEQ ID NO: 1565195 - RNA, 19 nt, Homo sapiens
  misc_RNA (1)...(19): siRNA sense strand
agcacaauauuccucagua

SEQ ID NO: 1565196 - RNA, 19 nt, Homo sapiens
  misc_RNA (1)...(19): siRNA sense strand
gguguaccuugaaagacuu

SEQ ID NO: 1565197 - RNA, 19 nt, Homo sapiens
  misc_RNA (1)...(19): siRNA sense strand
cagauuaugacaaacacaa

SEQ ID NO: 1565198 - RNA, 19 nt, Homo sapiens
  misc_RNA (1)...(19): siRNA sense strand
uacaaggaccuaagaagau

SEQ ID NO: 1565199 - RNA, 19 nt, Homo sapiens
  misc_RNA (1)...(19): siRNA sense strand
ccagagcagaagcagauuu

SEQ ID NO: 1565200 - RNA, 19 nt, Homo sapiens
  misc_RNA (1)...(19): siRNA sense strand
gacaguuucuugaauugcu

SEQ ID NO: 1565201 - RNA, 19 nt, Homo sapiens
  misc_RNA (1)...(19): siRNA sense strand
uaagaagauccgcgaggaa

SEQ ID NO: 1565202 - RNA, 19 nt, Homo sapiens
  misc_RNA (1)...(19): siRNA sense strand
ucaaccaaaccucaaguau

SEQ ID NO: 1565203 - RNA, 19 nt, Homo sapiens
  misc_RNA (1)...(19): siRNA sense strand
ucaauguuccuuccagugu

SEQ ID NO: 1565204 - RNA, 19 nt, Homo sapiens
  misc_RNA (1)...(19): siRNA sense strand
aauuaaaugugucgcucuu

SEQ ID NO: 1565205 - RNA, 19 nt, Homo sapiens
  misc_RNA (1)...(19): siRNA sense strand
cuguauggaauguggauua

SEQ ID NO: 1565206 - RNA, 19 nt, Homo sapiens
  misc_RNA (1)...(19): siRNA sense strand
agcgacaguuucuugaauu

SEQ ID NO: 1565207 - RNA, 19 nt, Homo sapiens
  misc_RNA (1)...(19): siRNA sense strand
gaauugcugcaguucaaca

SEQ ID NO: 1565208 - RNA, 19 nt, Homo sapiens
  misc_RNA (1)...(19): siRNA sense strand
gcucuugcaauauauuauc

SEQ ID NO: 1565209 - RNA, 19 nt, Homo sapiens
  misc_RNA (1)...(19): siRNA sense strand
gcagauuuaccgguucguu

SEQ ID NO: 1565210 - RNA, 19 nt, Homo sapiens
  misc_RNA (1)...(19): siRNA sense strand
auggaaggaugcucuuaga

SEQ ID NO: 1565211 - RNA, 19 nt, Homo sapiens
  misc_RNA (1)...(19): siRNA sense strand
gccagauccugaaagacau

SEQ ID NO: 1565212 - RNA, 19 nt, Homo sapiens
  misc_RNA (1)...(19): siRNA sense strand
ccucgggccagcacaauau

SEQ ID NO: 1565213 - RNA, 19 nt, Homo sapiens
  misc_RNA (1)...(19): siRNA sense strand
cgaacaaccugagcuuucc

SEQ ID NO: 1565214 - RNA, 19 nt, Homo sapiens
  misc_RNA (1)...(19): siRNA sense strand
uagcaaggaaauacaguuc

SEQ ID NO: 1565215 - RNA, 19 nt, Homo sapiens
  misc_RNA (1)...(19): siRNA sense strand
ggaagcggauuguuuuagg

SEQ ID NO: 1565216 - RNA, 19 nt, Homo sapiens
  misc_RNA (1)...(19): siRNA sense strand
ugccagauccugaaagaca

SEQ ID NO: 1565217 - RNA, 19 nt, Homo sapiens
  misc_RNA (1)...(19): siRNA sense strand
acugccagauccugaaaga

SEQ ID NO: 1565218 - RNA, 19 nt, Homo sapiens
  misc_RNA (1)...(19): siRNA sense strand
caacuggaagcggauuguu

SEQ ID NO: 1565219 - RNA, 19 nt, Homo sapiens
  misc_RNA (1)...(19): siRNA sense strand
gcucagccagugcagacaa

SEQ ID NO: 1565220 - RNA, 19 nt, Homo sapiens
  misc_RNA (1)...(19): siRNA sense strand
gucaaccaaaccucaagua

SEQ ID NO: 1565221 - RNA, 19 nt, Homo sapiens
  misc_RNA (1)...(19): siRNA sense strand
uugcugcaguucaacauca

SEQ ID NO: 1565222 - RNA, 19 nt, Homo sapiens
  misc_RNA (1)...(19): siRNA sense strand
caccagauuaugacaaaca

SEQ ID NO: 1565223 - RNA, 19 nt, Homo sapiens
  misc_RNA (1)...(19): siRNA sense strand
gaccaggcuguauggaaug

SEQ ID NO: 1565224 - RNA, 19 nt, Homo sapiens
  misc_RNA (1)...(19): siRNA sense strand
gcaaguaccugcagaagca

SEQ ID NO: 1565225 - RNA, 19 nt, Homo sapiens
  misc_RNA (1)...(19): siRNA sense strand
ugaagaugcugcugaacuu

SEQ ID NO: 1565226 - RNA, 19 nt, Homo sapiens
  misc_RNA (1)...(19): siRNA sense strand
ggaggaaugucuugcuaag

SEQ ID NO: 1565227 - RNA, 19 nt, Homo sapiens
  misc_RNA (1)...(19): siRNA sense strand
aggaaugucuugcuaagga

SEQ ID NO: 1565228 - RNA, 19 nt, Homo sapiens
  misc_RNA (1)...(19): siRNA sense strand
cgacagugaugugaagaug

SEQ ID NO: 1565229 - RNA, 19 nt, Homo sapiens
  misc_RNA (1)...(19): siRNA sense strand
ccacccaucuucaaugucu

SEQ ID NO: 1565230 - RNA, 19 nt, Homo sapiens
  misc_RNA (1)...(19): siRNA sense strand
gaggaagagcccagccuuu

SEQ ID NO: 1565231 - RNA, 19 nt, Homo sapiens
  misc_RNA (1)...(19): siRNA sense strand
ucaaggcagcccuggauaa

SEQ ID NO: 1565232 - RNA, 19 nt, Homo sapiens
  misc_RNA (1)...(19): siRNA sense strand
caagggcccuggcugaaaa

SEQ ID NO: 1565233 - RNA, 19 nt, Homo sapiens
  misc_RNA (1)...(19): siRNA sense strand
gggaggaaugucuugcuaa

SEQ ID NO: 1565234 - RNA, 19 nt, Homo sapiens
  misc_RNA (1)...(19): siRNA sense strand
agacuacccugguguccau

SEQ ID NO: 1565235 - RNA, 19 nt, Homo sapiens
  misc_RNA (1)...(19): siRNA sense strand
ccaagggcccuggcugaaa

SEQ ID NO: 1565236 - RNA, 19 nt, Homo sapiens
  misc_RNA (1)...(19): siRNA sense strand
aggcagcccuggauaaguc

SEQ ID NO: 1565237 - RNA, 19 nt, Homo sapiens
  misc_RNA (1)...(19): siRNA sense strand
ccuacccucuucauggaaa

SEQ ID NO: 1565238 - RNA, 19 nt, Homo sapiens
  misc_RNA (1)...(19): siRNA sense strand
caucaaggcagcccuggau

SEQ ID NO: 1565239 - RNA, 19 nt, Homo sapiens
  misc_RNA (1)...(19): siRNA sense strand
agggaggaaugucuugcua

SEQ ID NO: 1565240 - RNA, 19 nt, Homo sapiens
  misc_RNA (1)...(19): siRNA sense strand
ggacgagcacagcaaagca

SEQ ID NO: 1565241 - RNA, 19 nt, Homo sapiens
  misc_RNA (1)...(19): siRNA sense strand
gcugagcccuaccugaaaa

SEQ ID NO: 1565242 - RNA, 19 nt, Homo sapiens
  misc_RNA (1)...(19): siRNA sense strand
caaggcagcccuggauaag

SEQ ID NO: 1565243 - RNA, 19 nt, Homo sapiens
  misc_RNA (1)...(19): siRNA sense strand
cugcugagcccuaccugaa

SEQ ID NO: 1565244 - RNA, 19 nt, Homo sapiens
  misc_RNA (1)...(19): siRNA sense strand
aaaggacgagcacagcaaa

SEQ ID NO: 1565245 - RNA, 19 nt, Homo sapiens
  misc_RNA (1)...(19): siRNA sense strand
gaucuucuggagagaggaa

SEQ ID NO: 1565246 - RNA, 19 nt, Homo sapiens
  misc_RNA (1)...(19): siRNA sense strand
gccaggugcccaugaggaa

SEQ ID NO: 1565247 - RNA, 19 nt, Homo sapiens
  misc_RNA (1)...(19): siRNA sense strand
acagugaugugaagaugcu

SEQ ID NO: 1565248 - RNA, 19 nt, Homo sapiens
  misc_RNA (1)...(19): siRNA sense strand
gucaaugccuggaguugcu

SEQ ID NO: 1565249 - RNA, 19 nt, Homo sapiens
  misc_RNA (1)...(19): siRNA sense strand
caaggcccacccacagcua

SEQ ID NO: 1565250 - RNA, 19 nt, Homo sapiens
  misc_RNA (1)...(19): siRNA sense strand
cagaaggccuggggagaaa

SEQ ID NO: 1565251 - RNA, 19 nt, Homo sapiens
  misc_RNA (1)...(19): siRNA sense strand
gugaagaugcugcugaacu

SEQ ID NO: 1565252 - RNA, 19 nt, Homo sapiens
  misc_RNA (1)...(19): siRNA sense strand
gcccuuagaagagagaaga

SEQ ID NO: 1565253 - RNA, 19 nt, Homo sapiens
  misc_RNA (1)...(19): siRNA sense strand
cuacagggaggaaugucuu

SEQ ID NO: 1565254 - RNA, 19 nt, Homo sapiens
  misc_RNA (1)...(19): siRNA sense strand
uggcgcaccucugcaagga

SEQ ID NO: 1565255 - RNA, 19 nt, Homo sapiens
  misc_RNA (1)...(19): siRNA sense strand
gacaagagcuggcggagau

SEQ ID NO: 1565256 - RNA, 19 nt, Homo sapiens
  misc_RNA (1)...(19): siRNA sense strand
gugcaggugugguucaaga

SEQ ID NO: 1565257 - RNA, 19 nt, Homo sapiens
  misc_RNA (1)...(19): siRNA sense strand
gcaggugugguucaagaau

SEQ ID NO: 1565258 - RNA, 19 nt, Homo sapiens
  misc_RNA (1)...(19): siRNA sense strand
caggugugguucaagaauc

SEQ ID NO: 1565259 - RNA, 19 nt, Homo sapiens
  misc_RNA (1)...(19): siRNA sense strand
uccagcagcuccagaagca

SEQ ID NO: 1565260 - RNA, 19 nt, Homo sapiens
  misc_RNA (1)...(19): siRNA sense strand
gaaacgagauccagagauu

SEQ ID NO: 1565261 - RNA, 19 nt, Homo sapiens
  misc_RNA (1)...(19): siRNA sense strand
gcaaauggaucagaacaaa

SEQ ID NO: 1565262 - RNA, 19 nt, Homo sapiens
  misc_RNA (1)...(19): siRNA sense strand
ugacacagcuggaguuaaa

SEQ ID NO: 1565263 - RNA, 19 nt, Homo sapiens
  misc_RNA (1)...(19): siRNA sense strand
gaauaagaauggaacaguu

SEQ ID NO: 1565264 - RNA, 19 nt, Homo sapiens
  misc_RNA (1)...(19): siRNA sense strand
cgaaauggaugaacgauuc

SEQ ID NO: 1565265 - RNA, 19 nt, Homo sapiens
  misc_RNA (1)...(19): siRNA sense strand
ugaaaucgcuggaaaauga

SEQ ID NO: 1565266 - RNA, 19 nt, Homo sapiens
  misc_RNA (1)...(19): siRNA sense strand
gaacaguugauguccauaa

SEQ ID NO: 1565267 - RNA, 19 nt, Homo sapiens
  misc_RNA (1)...(19): siRNA sense strand
agucagggcuggaauacua

SEQ ID NO: 1565268 - RNA, 19 nt, Homo sapiens
  misc_RNA (1)...(19): siRNA sense strand
cagaagcccuuguccuuga

SEQ ID NO: 1565269 - RNA, 19 nt, Homo sapiens
  misc_RNA (1)...(19): siRNA sense strand
gaaaauuacuggcugauuc

SEQ ID NO: 1565270 - RNA, 19 nt, Homo sapiens
  misc_RNA (1)...(19): siRNA sense strand
ggaaacgccuggaguacca

SEQ ID NO: 1565271 - RNA, 19 nt, Homo sapiens
  misc_RNA (1)...(19): siRNA sense strand
gggaaauccugacggaguu

SEQ ID NO: 1565272 - RNA, 19 nt, Homo sapiens
  misc_RNA (1)...(19): siRNA sense strand
gcuccagacucucaauguu

SEQ ID NO: 1565273 - RNA, 19 nt, Homo sapiens
  misc_RNA (1)...(19): siRNA sense strand
gcuggaaaaugaaagaaua

SEQ ID NO: 1565274 - RNA, 19 nt, Homo sapiens
  misc_RNA (1)...(19): siRNA sense strand
gaacgggaggcccagauga

SEQ ID NO: 1565275 - RNA, 19 nt, Homo sapiens
  misc_RNA (1)...(19): siRNA sense strand
cagaucaggagccagauua

SEQ ID NO: 1565276 - RNA, 19 nt, Homo sapiens
  misc_RNA (1)...(19): siRNA sense strand
gaagaaagaccugaugcau

SEQ ID NO: 1565277 - RNA, 19 nt, Homo sapiens
  misc_RNA (1)...(19): siRNA sense strand
gaacgauuccagcagauuc

SEQ ID NO: 1565278 - RNA, 19 nt, Homo sapiens
  misc_RNA (1)...(19): siRNA sense strand
aacagaagaugcuggagaa

SEQ ID NO: 1565279 - RNA, 19 nt, Homo sapiens
  misc_RNA (1)...(19): siRNA sense strand
gagcugaaaccaccaaugg

SEQ ID NO: 1565280 - RNA, 19 nt, Homo sapiens
  misc_RNA (1)...(19): siRNA sense strand
aagaaaagcuccgagauuu

SEQ ID NO: 1565281 - RNA, 19 nt, Homo sapiens
  misc_RNA (1)...(19): siRNA sense strand
uccagacucucaauguuaa

SEQ ID NO: 1565282 - RNA, 19 nt, Homo sapiens
  misc_RNA (1)...(19): siRNA sense strand
gcacuaccugcccaucuuu

SEQ ID NO: 1565283 - RNA, 19 nt, Homo sapiens
  misc_RNA (1)...(19): siRNA sense strand
gaugcuggcucacguucga

SEQ ID NO: 1565284 - RNA, 19 nt, Homo sapiens
  misc_RNA (1)...(19): siRNA sense strand
ggcagcaaauggaucagaa

SEQ ID NO: 1565285 - RNA, 19 nt, Homo sapiens
  misc_RNA (1)...(19): siRNA sense strand
gcaggacaaucagagacaa

SEQ ID NO: 1565286 - RNA, 19 nt, Homo sapiens
  misc_RNA (1)...(19): siRNA sense strand
ggaaauccugacggaguua

SEQ ID NO: 1565287 - RNA, 19 nt, Homo sapiens
  misc_RNA (1)...(19): siRNA sense strand
gaauggaacaguugauguc

SEQ ID NO: 1565288 - RNA, 19 nt, Homo sapiens
  misc_RNA (1)...(19): siRNA sense strand
gaagaggaaggaacagaag

SEQ ID NO: 1565289 - RNA, 19 nt, Homo sapiens
  misc_RNA (1)...(19): siRNA sense strand
aggaagagcuccgggaaau

SEQ ID NO: 1565290 - RNA, 19 nt, Homo sapiens
  misc_RNA (1)...(19): siRNA sense strand
cagcauggccgaaauggau

SEQ ID NO: 1565291 - RNA, 19 nt, Homo sapiens
  misc_RNA (1)...(19): siRNA sense strand
cagaugacauucucgacau

SEQ ID NO: 1565292 - RNA, 19 nt, Homo sapiens
  misc_RNA (1)...(19): siRNA sense strand
uucuagaucuccacgauaa

SEQ ID NO: 1565293 - RNA, 19 nt, Homo sapiens
  misc_RNA (1)...(19): siRNA sense strand
caaggugggcgucucagaa

SEQ ID NO: 1565294 - RNA, 19 nt, Homo sapiens
  misc_RNA (1)...(19): siRNA sense strand
agaagaugcuggagaaacu

SEQ ID NO: 1565295 - RNA, 19 nt, Homo sapiens
  misc_RNA (1)...(19): siRNA sense strand
ugacccagcuccagacucu

SEQ ID NO: 1565296 - RNA, 19 nt, Homo sapiens
  misc_RNA (1)...(19): siRNA sense strand
ugacugcccuccaggucuu

SEQ ID NO: 1565297 - RNA, 19 nt, Homo sapiens
  misc_RNA (1)...(19): siRNA sense strand
uggaguaccagauguguuu

SEQ ID NO: 1565298 - RNA, 19 nt, Homo sapiens
  misc_RNA (1)...(19): siRNA sense strand
gaucagaacaaagccauca

SEQ ID NO: 1565299 - RNA, 19 nt, Homo sapiens
  misc_RNA (1)...(19): siRNA sense strand
ugaagcagacggaacagaa

SEQ ID NO: 1565300 - RNA, 19 nt, Homo sapiens
  misc_RNA (1)...(19): siRNA sense strand
ucaccucacuucccugcuu

SEQ ID NO: 1565301 - RNA, 19 nt, Homo sapiens
  misc_RNA (1)...(19): siRNA sense strand
aaaccaggcaggaaaauua

SEQ ID NO: 1565302 - RNA, 19 nt, Homo sapiens
  misc_RNA (1)...(19): siRNA sense strand
ccaucaagguucuagaucu

SEQ ID NO: 1565303 - RNA, 19 nt, Homo sapiens
  misc_RNA (1)...(19): siRNA sense strand
agacggaacagaacauuuc

SEQ ID NO: 1565304 - RNA, 19 nt, Homo sapiens
  misc_RNA (1)...(19): siRNA sense strand
gcagcagccagaaggauga

SEQ ID NO: 1565305 - RNA, 19 nt, Homo sapiens
  misc_RNA (1)...(19): siRNA sense strand
ggaaggaacagaagaugcu

SEQ ID NO: 1565306 - RNA, 19 nt, Homo sapiens
  misc_RNA (1)...(19): siRNA sense strand
agaagaaggugcugaucgu

SEQ ID NO: 1565307 - RNA, 19 nt, Homo sapiens
  misc_RNA (1)...(19): siRNA sense strand
ucuuaaacguggaaaggaa

SEQ ID NO: 1565308 - RNA, 19 nt, Homo sapiens
  misc_RNA (1)...(19): siRNA sense strand
gcacugcggccaucuugca

SEQ ID NO: 1565309 - RNA, 19 nt, Homo sapiens
  misc_RNA (1)...(19): siRNA sense strand
gaggaagagcuccgggaaa

SEQ ID NO: 1565310 - RNA, 19 nt, Homo sapiens
  misc_RNA (1)...(19): siRNA sense strand
gcagaucaggagccagauu

SEQ ID NO: 1565311 - RNA, 19 nt, Homo sapiens
  misc_RNA (1)...(19): siRNA sense strand
ugacugagagcuguaagaa

SEQ ID NO: 1565312 - RNA, 19 nt, Homo sapiens
  misc_RNA (1)...(19): siRNA sense strand
gagaagaggaaggaacaga

SEQ ID NO: 1565313 - RNA, 19 nt, Homo sapiens
  misc_RNA (1)...(19): siRNA sense strand
caucaagguucuagaucuc

SEQ ID NO: 1565314 - RNA, 19 nt, Homo sapiens
  misc_RNA (1)...(19): siRNA sense strand
caggagccagauuaaguua

SEQ ID NO: 1565315 - RNA, 19 nt, Homo sapiens
  misc_RNA (1)...(19): siRNA sense strand
acacgaaucaccucacuuc

SEQ ID NO: 1565316 - RNA, 19 nt, Homo sapiens
  misc_RNA (1)...(19): siRNA sense strand
gaguuagaguggcagaaca

SEQ ID NO: 1565317 - RNA, 19 nt, Homo sapiens
  misc_RNA (1)...(19): siRNA sense strand
guggaaaggaaucaacuga

SEQ ID NO: 1565318 - RNA, 19 nt, Homo sapiens
  misc_RNA (1)...(19): siRNA sense strand
gaccugcugagccaaauga

SEQ ID NO: 1565319 - RNA, 19 nt, Homo sapiens
  misc_RNA (1)...(19): siRNA sense strand
gguucuagaucuccacgau

SEQ ID NO: 1565320 - RNA, 19 nt, Homo sapiens
  misc_RNA (1)...(19): siRNA sense strand
gcagacggaacagaacauu

SEQ ID NO: 1565321 - RNA, 19 nt, Homo sapiens
  misc_RNA (1)...(19): siRNA sense strand
ggaagcggaaacccaguga

SEQ ID NO: 1565322 - RNA, 19 nt, Homo sapiens
  misc_RNA (1)...(19): siRNA sense strand
cuccagacucucaauguua

SEQ ID NO: 1565323 - RNA, 19 nt, Homo sapiens
  misc_RNA (1)...(19): siRNA sense strand
uaacccaggaggagacuga

SEQ ID NO: 1565324 - RNA, 19 nt, Homo sapiens
  misc_RNA (1)...(19): siRNA sense strand
gaugaucuuccucaacugu

SEQ ID NO: 1565325 - RNA, 19 nt, Homo sapiens
  misc_RNA (1)...(19): siRNA sense strand
ucaggagccagauuaaguu

SEQ ID NO: 1565326 - RNA, 19 nt, Homo sapiens
  misc_RNA (1)...(19): siRNA sense strand
gaaccggcucguccagaug

SEQ ID NO: 1565327 - RNA, 19 nt, Homo sapiens
  misc_RNA (1)...(19): siRNA sense strand
ccacacgaaucaccucacu

SEQ ID NO: 1565328 - RNA, 19 nt, Homo sapiens
  misc_RNA (1)...(19): siRNA sense strand
gaagagcuccgggaaaucc

SEQ ID NO: 1565329 - RNA, 19 nt, Homo sapiens
  misc_RNA (1)...(19): siRNA sense strand
uuaaagacaacaagcugaa

SEQ ID NO: 1565330 - RNA, 19 nt, Homo sapiens
  misc_RNA (1)...(19): siRNA sense strand
aauaagaauggaacaguug

SEQ ID NO: 1565331 - RNA, 19 nt, Homo sapiens
  misc_RNA (1)...(19): siRNA sense strand
uagaguggcagaacagguu

SEQ ID NO: 1565332 - RNA, 19 nt, Homo sapiens
  misc_RNA (1)...(19): siRNA sense strand
caaagagucagggcuggaa

SEQ ID NO: 1565333 - RNA, 19 nt, Homo sapiens
  misc_RNA (1)...(19): siRNA sense strand
ggaaacgagauccagagau

SEQ ID NO: 1565334 - RNA, 19 nt, Homo sapiens
  misc_RNA (1)...(19): siRNA sense strand
gcagcucccacguuccauu

SEQ ID NO: 1565335 - RNA, 19 nt, Homo sapiens
  misc_RNA (1)...(19): siRNA sense strand
ucgaggcacuccaggugaa

SEQ ID NO: 1565336 - RNA, 19 nt, Homo sapiens
  misc_RNA (1)...(19): siRNA sense strand
gcagaugcuggcucacguu

SEQ ID NO: 1565337 - RNA, 19 nt, Homo sapiens
  misc_RNA (1)...(19): siRNA sense strand
gaagcagcagcgagaggaa

SEQ ID NO: 1565338 - RNA, 19 nt, Homo sapiens
  misc_RNA (1)...(19): siRNA sense strand
ugccaauucuggagcaaga

SEQ ID NO: 1565339 - RNA, 19 nt, Homo sapiens
  misc_RNA (1)...(19): siRNA sense strand
guucuagaucuccacgaua

SEQ ID NO: 1565340 - RNA, 19 nt, Homo sapiens
  misc_RNA (1)...(19): siRNA sense strand
gaggaaggaacagaagaug

SEQ ID NO: 1565341 - RNA, 19 nt, Homo sapiens
  misc_RNA (1)...(19): siRNA sense strand
agaagaggaaggaacagaa

SEQ ID NO: 1565342 - RNA, 19 nt, Homo sapiens
  misc_RNA (1)...(19): siRNA sense strand
aaaagaagcuggggcagau

SEQ ID NO: 1565343 - RNA, 19 nt, Homo sapiens
  misc_RNA (1)...(19): siRNA sense strand
acaaagccaucagccagau

SEQ ID NO: 1565344 - RNA, 19 nt, Homo sapiens
  misc_RNA (1)...(19): siRNA sense strand
agaaccggcucguccagau

SEQ ID NO: 1565345 - RNA, 19 nt, Homo sapiens
  misc_RNA (1)...(19): siRNA sense strand
cugcguacccucaacauca

SEQ ID NO: 1565346 - RNA, 19 nt, Homo sapiens
  misc_RNA (1)...(19): siRNA sense strand
gaucaggagccagauuaag

SEQ ID NO: 1565347 - RNA, 19 nt, Homo sapiens
  misc_RNA (1)...(19): siRNA sense strand
ggugaagaaagaccugaug

SEQ ID NO: 1565348 - RNA, 19 nt, Homo sapiens
  misc_RNA (1)...(19): siRNA sense strand
gacauucucgacaucucua

SEQ ID NO: 1565349 - RNA, 19 nt, Homo sapiens
  misc_RNA (1)...(19): siRNA sense strand
guuccagcauggccgaaau

SEQ ID NO: 1565350 - RNA, 19 nt, Homo sapiens
  misc_RNA (1)...(19): siRNA sense strand
gaagcagacggaacagaac

SEQ ID NO: 1565351 - RNA, 19 nt, Homo sapiens
  misc_RNA (1)...(19): siRNA sense strand
aaagaaaagcuccgagauu

SEQ ID NO: 1565352 - RNA, 19 nt, Homo sapiens
  misc_RNA (1)...(19): siRNA sense strand
ggugcaggccucagagugu

SEQ ID NO: 1565353 - RNA, 19 nt, Homo sapiens
  misc_RNA (1)...(19): siRNA sense strand
agaagcccuuguccuugaa

SEQ ID NO: 1565354 - RNA, 19 nt, Homo sapiens
  misc_RNA (1)...(19): siRNA sense strand
acacagcuggaguuaaaga

SEQ ID NO: 1565355 - RNA, 19 nt, Homo sapiens
  misc_RNA (1)...(19): siRNA sense strand
cacuccaggugaagaaaga

SEQ ID NO: 1565356 - RNA, 19 nt, Homo sapiens
  misc_RNA (1)...(19): siRNA sense strand
aagagucagggcuggaaua

SEQ ID NO: 1565357 - RNA, 19 nt, Homo sapiens
  misc_RNA (1)...(19): siRNA sense strand
ggaguuagaagccaaaagu

SEQ ID NO: 1565358 - RNA, 19 nt, Homo sapiens
  misc_RNA (1)...(19): siRNA sense strand
cagacggaacagaacauuu

SEQ ID NO: 1565359 - RNA, 19 nt, Homo sapiens
  misc_RNA (1)...(19): siRNA sense strand
gcagagcagcagccagaag

SEQ ID NO: 1565360 - RNA, 19 nt, Homo sapiens
  misc_RNA (1)...(19): siRNA sense strand
ggaaugauauuuacucugu

SEQ ID NO: 1565361 - RNA, 19 nt, Homo sapiens
  misc_RNA (1)...(19): siRNA sense strand
gcacagcguucggcucuuu

SEQ ID NO: 1565362 - RNA, 19 nt, Homo sapiens
  misc_RNA (1)...(19): siRNA sense strand
gaacagacaggaaccaaug

SEQ ID NO: 1565363 - RNA, 19 nt, Homo sapiens
  misc_RNA (1)...(19): siRNA sense strand
gcucgaaucuccaagaauc

SEQ ID NO: 1565364 - RNA, 19 nt, Homo sapiens
  misc_RNA (1)...(19): siRNA sense strand
gaaccaaugugggaauuca

SEQ ID NO: 1565365 - RNA, 19 nt, Homo sapiens
  misc_RNA (1)...(19): siRNA sense strand
cugaggacauugugaauuu

SEQ ID NO: 1565366 - RNA, 19 nt, Homo sapiens
  misc_RNA (1)...(19): siRNA sense strand
gagugaccguggcggauua

SEQ ID NO: 1565367 - RNA, 19 nt, Homo sapiens
  misc_RNA (1)...(19): siRNA sense strand
cgacagcagugaugagaug

SEQ ID NO: 1565368 - RNA, 19 nt, Homo sapiens
  misc_RNA (1)...(19): siRNA sense strand
gaggaaagcgacucaaguu

SEQ ID NO: 1565369 - RNA, 19 nt, Homo sapiens
  misc_RNA (1)...(19): siRNA sense strand
gaacagggugugcaaguca

SEQ ID NO: 1565370 - RNA, 19 nt, Homo sapiens
  misc_RNA (1)...(19): siRNA sense strand
gaaguaaaaucucuuugug

SEQ ID NO: 1565371 - RNA, 19 nt, Homo sapiens
  misc_RNA (1)...(19): siRNA sense strand
agacugguguuccaagauu

SEQ ID NO: 1565372 - RNA, 19 nt, Homo sapiens
  misc_RNA (1)...(19): siRNA sense strand
guacgaagauguucauacc

SEQ ID NO: 1565373 - RNA, 19 nt, Homo sapiens
  misc_RNA (1)...(19): siRNA sense strand
gagaagaguaucccaugga

SEQ ID NO: 1565374 - RNA, 19 nt, Homo sapiens
  misc_RNA (1)...(19): siRNA sense strand
cacccucaauuucaucuuu

SEQ ID NO: 1565375 - RNA, 19 nt, Homo sapiens
  misc_RNA (1)...(19): siRNA sense strand
acgaagauguucauaccaa

SEQ ID NO: 1565376 - RNA, 19 nt, Homo sapiens
  misc_RNA (1)...(19): siRNA sense strand
gcacauuaaagaauuccaa

SEQ ID NO: 1565377 - RNA, 19 nt, Homo sapiens
  misc_RNA (1)...(19): siRNA sense strand
gaccagagucaauggagaa

SEQ ID NO: 1565378 - RNA, 19 nt, Homo sapiens
  misc_RNA (1)...(19): siRNA sense strand
gccauuugcugcucgaauc

SEQ ID NO: 1565379 - RNA, 19 nt, Homo sapiens
  misc_RNA (1)...(19): siRNA sense strand
cccagcacauuaaagaauu

SEQ ID NO: 1565380 - RNA, 19 nt, Homo sapiens
  misc_RNA (1)...(19): siRNA sense strand
gaagauguucauaccaauc

SEQ ID NO: 1565381 - RNA, 19 nt, Homo sapiens
  misc_RNA (1)...(19): siRNA sense strand
cgaagauguucauaccaau

SEQ ID NO: 1565382 - RNA, 19 nt, Homo sapiens
  misc_RNA (1)...(19): siRNA sense strand
ccauggauauuuggcuauu

SEQ ID NO: 1565383 - RNA, 19 nt, Homo sapiens
  misc_RNA (1)...(19): siRNA sense strand
ggucaccacccucaauuuc

SEQ ID NO: 1565384 - RNA, 19 nt, Homo sapiens
  misc_RNA (1)...(19): siRNA sense strand
ggcuauugcuggccuccua

SEQ ID NO: 1565385 - RNA, 19 nt, Homo sapiens
  misc_RNA (1)...(19): siRNA sense strand
uccgaucucuguaccauau

SEQ ID NO: 1565386 - RNA, 19 nt, Homo sapiens
  misc_RNA (1)...(19): siRNA sense strand
ugagacugguguuccaaga

SEQ ID NO: 1565387 - RNA, 19 nt, Homo sapiens
  misc_RNA (1)...(19): siRNA sense strand
gcaggucaccacccucaau

SEQ ID NO: 1565388 - RNA, 19 nt, Homo sapiens
  misc_RNA (1)...(19): siRNA sense strand
ucaccacccucaauuucau

SEQ ID NO: 1565389 - RNA, 19 nt, Homo sapiens
  misc_RNA (1)...(19): siRNA sense strand
ggaacagacaggaaccaau

SEQ ID NO: 1565390 - RNA, 19 nt, Homo sapiens
  misc_RNA (1)...(19): siRNA sense strand
caaguguacaggaggauug

SEQ ID NO: 1565391 - RNA, 19 nt, Homo sapiens
  misc_RNA (1)...(19): siRNA sense strand
cacuugcacugcugccuuu

SEQ ID NO: 1565392 - RNA, 19 nt, Homo sapiens
  misc_RNA (1)...(19): siRNA sense strand
acccucaauuucaucuuua

SEQ ID NO: 1565393 - RNA, 19 nt, Homo sapiens
  misc_RNA (1)...(19): siRNA sense strand
ccagcacauuaaagaauuc

SEQ ID NO: 1565394 - RNA, 19 nt, Homo sapiens
  misc_RNA (1)...(19): siRNA sense strand
ggucuggacgagucaagaa

SEQ ID NO: 1565395 - RNA, 19 nt, Homo sapiens
  misc_RNA (1)...(19): siRNA sense strand
gagaggaaagcgacucaag

SEQ ID NO: 1565396 - RNA, 19 nt, Homo sapiens
  misc_RNA (1)...(19): siRNA sense strand
gaauuccaaaugcuuacuu

SEQ ID NO: 1565397 - RNA, 19 nt, Homo sapiens
  misc_RNA (1)...(19): siRNA sense strand
gauugcagccucccguuca

SEQ ID NO: 1565398 - RNA, 19 nt, Homo sapiens
  misc_RNA (1)...(19): siRNA sense strand
gagugagacugguguucca

SEQ ID NO: 1565399 - RNA, 19 nt, Homo sapiens
  misc_RNA (1)...(19): siRNA sense strand
ucccugauuuguaagaaug

SEQ ID NO: 1565400 - RNA, 19 nt, Homo sapiens
  misc_RNA (1)...(19): siRNA sense strand
ggaaguaaaaucucuuugu

SEQ ID NO: 1565401 - RNA, 19 nt, Homo sapiens
  misc_RNA (1)...(19): siRNA sense strand
gcaaguguacaggaggauu

SEQ ID NO: 1565402 - RNA, 19 nt, Homo sapiens
  misc_RNA (1)...(19): siRNA sense strand
gguuaaagagcaaguguac

SEQ ID NO: 1565403 - RNA, 19 nt, Homo sapiens
  misc_RNA (1)...(19): siRNA sense strand
ucuccgggcuugugugauc

SEQ ID NO: 1565404 - RNA, 19 nt, Homo sapiens
  misc_RNA (1)...(19): siRNA sense strand
cagagucaauggagaagcu

SEQ ID NO: 1565405 - RNA, 19 nt, Homo sapiens
  misc_RNA (1)...(19): siRNA sense strand
cuuggaagccucucagguu

SEQ ID NO: 1565406 - RNA, 19 nt, Homo sapiens
  misc_RNA (1)...(19): siRNA sense strand
cagcagugaugagauggau

SEQ ID NO: 1565407 - RNA, 19 nt, Homo sapiens
  misc_RNA (1)...(19): siRNA sense strand
uuaaagagcaaguguacag

SEQ ID NO: 1565408 - RNA, 19 nt, Homo sapiens
  misc_RNA (1)...(19): siRNA sense strand
gaucucuguaccauaugua

SEQ ID NO: 1565409 - RNA, 19 nt, Homo sapiens
  misc_RNA (1)...(19): siRNA sense strand
cuccaagaauccagccauu

SEQ ID NO: 1565410 - RNA, 19 nt, Homo sapiens
  misc_RNA (1)...(19): siRNA sense strand
cgaucucuguaccauaugu

SEQ ID NO: 1565411 - RNA, 19 nt, Homo sapiens
  misc_RNA (1)...(19): siRNA sense strand
ugaacagggugugcaaguc

SEQ ID NO: 1565412 - RNA, 19 nt, Homo sapiens
  misc_RNA (1)...(19): siRNA sense strand
caggucaccacccucaauu

SEQ ID NO: 1565413 - RNA, 19 nt, Homo sapiens
  misc_RNA (1)...(19): siRNA sense strand
aaaacaguccccuagguua

SEQ ID NO: 1565414 - RNA, 19 nt, Homo sapiens
  misc_RNA (1)...(19): siRNA sense strand
cugcucgaaucuccaagaa

SEQ ID NO: 1565415 - RNA, 19 nt, Homo sapiens
  misc_RNA (1)...(19): siRNA sense strand
ugugggaauucaacuucaa

SEQ ID NO: 1565416 - RNA, 19 nt, Homo sapiens
  misc_RNA (1)...(19): siRNA sense strand
gauggaugcccaggaggaa

SEQ ID NO: 1565417 - RNA, 19 nt, Homo sapiens
  misc_RNA (1)...(19): siRNA sense strand
caaugugggaauucaacuu

SEQ ID NO: 1565418 - RNA, 19 nt, Homo sapiens
  misc_RNA (1)...(19): siRNA sense strand
cauggauauuuggcuauug

SEQ ID NO: 1565419 - RNA, 19 nt, Homo sapiens
  misc_RNA (1)...(19): siRNA sense strand
gggcuggaggagaagagua

SEQ ID NO: 1565420 - RNA, 19 nt, Homo sapiens
  misc_RNA (1)...(19): siRNA sense strand
gacugguguuccaagauuc

SEQ ID NO: 1565421 - RNA, 19 nt, Homo sapiens
  misc_RNA (1)...(19): siRNA sense strand
gagacugguguuccaagau

SEQ ID NO: 1565422 - RNA, 19 nt, Homo sapiens
  misc_RNA (1)...(19): siRNA sense strand
ggacagcgguggugaugug

SEQ ID NO: 1565423 - RNA, 19 nt, Homo sapiens
  misc_RNA (1)...(19): siRNA sense strand
ggaagaagguggacauugc

SEQ ID NO: 1565424 - RNA, 19 nt, Homo sapiens
  misc_RNA (1)...(19): siRNA sense strand
ggauugggcugauuguuca

SEQ ID NO: 1565425 - RNA, 19 nt, Homo sapiens
  misc_RNA (1)...(19): siRNA sense strand
ggacugguuuggcuacuau

SEQ ID NO: 1565426 - RNA, 19 nt, Homo sapiens
  misc_RNA (1)...(19): siRNA sense strand
ggaggagaaucugcacaaa

SEQ ID NO: 1565427 - RNA, 19 nt, Homo sapiens
  misc_RNA (1)...(19): siRNA sense strand
caagguugcugaucucucu

SEQ ID NO: 1565428 - RNA, 19 nt, Homo sapiens
  misc_RNA (1)...(19): siRNA sense strand
caagucuggucuucuguga

SEQ ID NO: 1565429 - RNA, 19 nt, Homo sapiens
  misc_RNA (1)...(19): siRNA sense strand
gggcuccaauggcgaguuu

SEQ ID NO: 1565430 - RNA, 19 nt, Homo sapiens
  misc_RNA (1)...(19): siRNA sense strand
gcaggagcuuguccaggaa

SEQ ID NO: 1565431 - RNA, 19 nt, Homo sapiens
  misc_RNA (1)...(19): siRNA sense strand
gcauggauuucaccagcaa

SEQ ID NO: 1565432 - RNA, 19 nt, Homo sapiens
  misc_RNA (1)...(19): siRNA sense strand
ggacauugcggguaucuac

SEQ ID NO: 1565433 - RNA, 19 nt, Homo sapiens
  misc_RNA (1)...(19): siRNA sense strand
cugcagagguggacuaugg

SEQ ID NO: 1565434 - RNA, 19 nt, Homo sapiens
  misc_RNA (1)...(19): siRNA sense strand
gcacugcgcauggauuuca

SEQ ID NO: 1565435 - RNA, 19 nt, Homo sapiens
  misc_RNA (1)...(19): siRNA sense strand
gcugaucucucuccaaucc

SEQ ID NO: 1565436 - RNA, 19 nt, Homo sapiens
  misc_RNA (1)...(19): siRNA sense strand
gccaggccaugcccaagaa

SEQ ID NO: 1565437 - RNA, 19 nt, Homo sapiens
  misc_RNA (1)...(19): siRNA sense strand
acaccaagguugcugaucu

SEQ ID NO: 1565438 - RNA, 19 nt, Homo sapiens
  misc_RNA (1)...(19): siRNA sense strand
gaccaggauugggcugauu

SEQ ID NO: 1565439 - RNA, 19 nt, Homo sapiens
  misc_RNA (1)...(19): siRNA sense strand
aggagaaucugcacaaacu

SEQ ID NO: 1565440 - RNA, 19 nt, Homo sapiens
  misc_RNA (1)...(19): siRNA sense strand
ggaagaugcccagaaacug

SEQ ID NO: 1565441 - RNA, 19 nt, Homo sapiens
  misc_RNA (1)...(19): siRNA sense strand
gggaagaugcccagaaacu

SEQ ID NO: 1565442 - RNA, 19 nt, Homo sapiens
  misc_RNA (1)...(19): siRNA sense strand
ccaauggcgaguuuccuuu

SEQ ID NO: 1565443 - RNA, 19 nt, Homo sapiens
  misc_RNA (1)...(19): siRNA sense strand
gggaagaagguggacauug

SEQ ID NO: 1565444 - RNA, 19 nt, Homo sapiens
  misc_RNA (1)...(19): siRNA sense strand
gaaaaucauggacugguuu

SEQ ID NO: 1565445 - RNA, 19 nt, Homo sapiens
  misc_RNA (1)...(19): siRNA sense strand
ggaccugccuguggaugca

SEQ ID NO: 1565446 - RNA, 19 nt, Homo sapiens
  misc_RNA (1)...(19): siRNA sense strand
uugcugaucucucuccaau

SEQ ID NO: 1565447 - RNA, 19 nt, Homo sapiens
  misc_RNA (1)...(19): siRNA sense strand
cgaauauugugggcaugaa

SEQ ID NO: 1565448 - RNA, 19 nt, Homo sapiens
  misc_RNA (1)...(19): siRNA sense strand
ggaaacuggaggagaaucu

SEQ ID NO: 1565449 - RNA, 19 nt, Homo sapiens
  misc_RNA (1)...(19): siRNA sense strand
ucccagcacccgaauauug

SEQ ID NO: 1565450 - RNA, 19 nt, Homo sapiens
  misc_RNA (1)...(19): siRNA sense strand
gaaggacagcgguggugau

SEQ ID NO: 1565451 - RNA, 19 nt, Homo sapiens
  misc_RNA (1)...(19): siRNA sense strand
ggugaugugaccaggauug

SEQ ID NO: 1565452 - RNA, 19 nt, Homo sapiens
  misc_RNA (1)...(19): siRNA sense strand
augggaaacuggaggagaa

SEQ ID NO: 1565453 - RNA, 19 nt, Homo sapiens
  misc_RNA (1)...(19): siRNA sense strand
caaucccuguggugcugua

SEQ ID NO: 1565454 - RNA, 19 nt, Homo sapiens
  misc_RNA (1)...(19): siRNA sense strand
agaccaggaagcaggauuu

SEQ ID NO: 1565455 - RNA, 19 nt, Homo sapiens
  misc_RNA (1)...(19): siRNA sense strand
gaggagaaucugcacaaac

SEQ ID NO: 1565456 - RNA, 19 nt, Homo sapiens
  misc_RNA (1)...(19): siRNA sense strand
agagguggacuaugggaaa

SEQ ID NO: 1565457 - RNA, 19 nt, Homo sapiens
  misc_RNA (1)...(19): siRNA sense strand
cugcagcaccgccucauug

SEQ ID NO: 1565458 - RNA, 19 nt, Homo sapiens
  misc_RNA (1)...(19): siRNA sense strand
ggugaccccuugcuacuau

SEQ ID NO: 1565459 - RNA, 19 nt, Homo sapiens
  misc_RNA (1)...(19): siRNA sense strand
gaauauugugggcaugaag

SEQ ID NO: 1565460 - RNA, 19 nt, Homo sapiens
  misc_RNA (1)...(19): siRNA sense strand
gaucccagggcugaagaaa

SEQ ID NO: 1565461 - RNA, 19 nt, Homo sapiens
  misc_RNA (1)...(19): siRNA sense strand
gaaacuggaggagaaucug

SEQ ID NO: 1565462 - RNA, 19 nt, Homo sapiens
  misc_RNA (1)...(19): siRNA sense strand
gcuuucugauggccagcua

SEQ ID NO: 1565463 - RNA, 19 nt, Homo sapiens
  misc_RNA (1)...(19): siRNA sense strand
caauggcgaguuuccuuuc

SEQ ID NO: 1565464 - RNA, 19 nt, Homo sapiens
  misc_RNA (1)...(19): siRNA sense strand
ucccagggcugaagaaaau

SEQ ID NO: 1565465 - RNA, 19 nt, Homo sapiens
  misc_RNA (1)...(19): siRNA sense strand
uggaucggcuggcuuucug

SEQ ID NO: 1565466 - RNA, 19 nt, Homo sapiens
  misc_RNA (1)...(19): siRNA sense strand
gguggacuaugggaaacug

SEQ ID NO: 1565467 - RNA, 19 nt, Homo sapiens
  misc_RNA (1)...(19): siRNA sense strand
caccaagguugcugaucuc

SEQ ID NO: 1565468 - RNA, 19 nt, Homo sapiens
  misc_RNA (1)...(19): siRNA sense strand
gagguggacuaugggaaac

SEQ ID NO: 1565469 - RNA, 19 nt, Homo sapiens
  misc_RNA (1)...(19): siRNA sense strand
gaugcaguggucacgcuuu

SEQ ID NO: 1565470 - RNA, 19 nt, Homo sapiens
  misc_RNA (1)...(19): siRNA sense strand
gaacagugaccaaguguaa

SEQ ID NO: 1565471 - RNA, 19 nt, Homo sapiens
  misc_RNA (1)...(19): siRNA sense strand
gcuacuacgugcuguauau

SEQ ID NO: 1565472 - RNA, 19 nt, Homo sapiens
  misc_RNA (1)...(19): siRNA sense strand
gaacacgggcuuccucaug

SEQ ID NO: 1565473 - RNA, 19 nt, Homo sapiens
  misc_RNA (1)...(19): siRNA sense strand
gauggucccuuccuggauu

SEQ ID NO: 1565474 - RNA, 19 nt, Homo sapiens
  misc_RNA (1)...(19): siRNA sense strand
ucacauccaucgccguaaa

SEQ ID NO: 1565475 - RNA, 19 nt, Homo sapiens
  misc_RNA (1)...(19): siRNA sense strand
ggaaggagcgcuacuacgu

SEQ ID NO: 1565476 - RNA, 19 nt, Homo sapiens
  misc_RNA (1)...(19): siRNA sense strand
gagaacugaucgauguauc

SEQ ID NO: 1565477 - RNA, 19 nt, Homo sapiens
  misc_RNA (1)...(19): siRNA sense strand
gcaggaaggagcgcuacua

SEQ ID NO: 1565478 - RNA, 19 nt, Homo sapiens
  misc_RNA (1)...(19): siRNA sense strand
agggagaacugaucgaugu

SEQ ID NO: 1565479 - RNA, 19 nt, Homo sapiens
  misc_RNA (1)...(19): siRNA sense strand
gaaaucgagcccaacuuca

SEQ ID NO: 1565480 - RNA, 19 nt, Homo sapiens
  misc_RNA (1)...(19): siRNA sense strand
ugaaaucgagcccaacuuc

SEQ ID NO: 1565481 - RNA, 19 nt, Homo sapiens
  misc_RNA (1)...(19): siRNA sense strand
ggaacagugaccaagugua

SEQ ID NO: 1565482 - RNA, 19 nt, Homo sapiens
  misc_RNA (1)...(19): siRNA sense strand
ugaaggggcuggucaacaa

SEQ ID NO: 1565483 - RNA, 19 nt, Homo sapiens
  misc_RNA (1)...(19): siRNA sense strand
gugaccaaguguaauuuca

SEQ ID NO: 1565484 - RNA, 19 nt, Homo sapiens
  misc_RNA (1)...(19): siRNA sense strand
acagugaccaaguguaauu

SEQ ID NO: 1565485 - RNA, 19 nt, Homo sapiens
  misc_RNA (1)...(19): siRNA sense strand
agucagagauggaggugau

SEQ ID NO: 1565486 - RNA, 19 nt, Homo sapiens
  misc_RNA (1)...(19): siRNA sense strand
ggagaacugaucgauguau

SEQ ID NO: 1565487 - RNA, 19 nt, Homo sapiens
  misc_RNA (1)...(19): siRNA sense strand
gaacugaucgauguaucuc

SEQ ID NO: 1565488 - RNA, 19 nt, Homo sapiens
  misc_RNA (1)...(19): siRNA sense strand
gacaacaucauggcccaaa

SEQ ID NO: 1565489 - RNA, 19 nt, Homo sapiens
  misc_RNA (1)...(19): siRNA sense strand
gggagaacugaucgaugua

SEQ ID NO: 1565490 - RNA, 19 nt, Homo sapiens
  misc_RNA (1)...(19): siRNA sense strand
gucccuuccuggauucauu

SEQ ID NO: 1565491 - RNA, 19 nt, Homo sapiens
  misc_RNA (1)...(19): siRNA sense strand
aacacgggcuuccucaugu

SEQ ID NO: 1565492 - RNA, 19 nt, Homo sapiens
  misc_RNA (1)...(19): siRNA sense strand
ggagggagaacugaucgau

SEQ ID NO: 1565493 - RNA, 19 nt, Homo sapiens
  misc_RNA (1)...(19): siRNA sense strand
agauggaggugauggaacu

SEQ ID NO: 1565494 - RNA, 19 nt, Homo sapiens
  misc_RNA (1)...(19): siRNA sense strand
cuggaacagugaccaagug

SEQ ID NO: 1565495 - RNA, 19 nt, Homo sapiens
  misc_RNA (1)...(19): siRNA sense strand
cgaggagugggaugacuga

SEQ ID NO: 1565496 - RNA, 19 nt, Homo sapiens
  misc_RNA (1)...(19): siRNA sense strand
caucauggcccaaaagugu

SEQ ID NO: 1565497 - RNA, 19 nt, Homo sapiens
  misc_RNA (1)...(19): siRNA sense strand
gcgcuacuacgugcuguau

SEQ ID NO: 1565498 - RNA, 19 nt, Homo sapiens
  misc_RNA (1)...(19): siRNA sense strand
ggaucucgcuucuaucaau

SEQ ID NO: 1565499 - RNA, 19 nt, Homo sapiens
  misc_RNA (1)...(19): siRNA sense strand
gcagucuucuuguuacaga

SEQ ID NO: 1565500 - RNA, 19 nt, Homo sapiens
  misc_RNA (1)...(19): siRNA sense strand
gaucucgcuucuaucaauu

SEQ ID NO: 1565501 - RNA, 19 nt, Homo sapiens
  misc_RNA (1)...(19): siRNA sense strand
uacaacugcugcucuagaa

SEQ ID NO: 1565502 - RNA, 19 nt, Homo sapiens
  misc_RNA (1)...(19): siRNA sense strand
gagccuggcagucuucuug

SEQ ID NO: 1565503 - RNA, 19 nt, Homo sapiens
  misc_RNA (1)...(19): siRNA sense strand
gacuugcucuggaucucua

SEQ ID NO: 1565504 - RNA, 19 nt, Homo sapiens
  misc_RNA (1)...(19): siRNA sense strand
gcuacucgcugggaaaugg

SEQ ID NO: 1565505 - RNA, 19 nt, Homo sapiens
  misc_RNA (1)...(19): siRNA sense strand
ccuggcagucuucuuguua

SEQ ID NO: 1565506 - RNA, 19 nt, Homo sapiens
  misc_RNA (1)...(19): siRNA sense strand
cuguggaucucgcuucuau

SEQ ID NO: 1565507 - RNA, 19 nt, Homo sapiens
  misc_RNA (1)...(19): siRNA sense strand
ucuaucaauucaccugcua

SEQ ID NO: 1565508 - RNA, 19 nt, Homo sapiens
  misc_RNA (1)...(19): siRNA sense strand
guggaucucgcuucuauca

SEQ ID NO: 1565509 - RNA, 19 nt, Homo sapiens
  misc_RNA (1)...(19): siRNA sense strand
gauccaguggcuucagauu

SEQ ID NO: 1565510 - RNA, 19 nt, Homo sapiens
  misc_RNA (1)...(19): siRNA sense strand
cagcugcguuccucucucu

SEQ ID NO: 1565511 - RNA, 19 nt, Homo sapiens
  misc_RNA (1)...(19): siRNA sense strand
cuacaacugcugcucuaga

SEQ ID NO: 1565512 - RNA, 19 nt, Homo sapiens
  misc_RNA (1)...(19): siRNA sense strand
cugcugcucuagaaacuuc

SEQ ID NO: 1565513 - RNA, 19 nt, Homo sapiens
  misc_RNA (1)...(19): siRNA sense strand
caacugcugcucuagaaac

SEQ ID NO: 1565514 - RNA, 19 nt, Homo sapiens
  misc_RNA (1)...(19): siRNA sense strand
cucuggaucucuaggcuuu

SEQ ID NO: 1565515 - RNA, 19 nt, Homo sapiens
  misc_RNA (1)...(19): siRNA sense strand
aaauauggaggcugugguu

SEQ ID NO: 1565516 - RNA, 19 nt, Homo sapiens
  misc_RNA (1)...(19): siRNA sense strand
gaguuacggauccagauuc

SEQ ID NO: 1565517 - RNA, 19 nt, Homo sapiens
  misc_RNA (1)...(19): siRNA sense strand
ugaguuacggauccagauu

SEQ ID NO: 1565518 - RNA, 19 nt, Homo sapiens
  misc_RNA (1)...(19): siRNA sense strand
gccuggcagucuucuuguu

SEQ ID NO: 1565519 - RNA, 19 nt, Homo sapiens
  misc_RNA (1)...(19): siRNA sense strand
gagaauaacugccugaucu

SEQ ID NO: 1565520 - RNA, 19 nt, Homo sapiens
  misc_RNA (1)...(19): siRNA sense strand
gcaagcagccuuccucaaa

SEQ ID NO: 1565521 - RNA, 19 nt, Homo sapiens
  misc_RNA (1)...(19): siRNA sense strand
uaaggaagauggacacaug

SEQ ID NO: 1565522 - RNA, 19 nt, Homo sapiens
  misc_RNA (1)...(19): siRNA sense strand
caaacaaacuccacaacug

SEQ ID NO: 1565523 - RNA, 19 nt, Homo sapiens
  misc_RNA (1)...(19): siRNA sense strand
gaugaacuccuaauuggua

SEQ ID NO: 1565524 - RNA, 19 nt, Homo sapiens
  misc_RNA (1)...(19): siRNA sense strand
gugcucaucuccaucauuu

SEQ ID NO: 1565525 - RNA, 19 nt, Homo sapiens
  misc_RNA (1)...(19): siRNA sense strand
gggaugaacuccuaauugg

SEQ ID NO: 1565526 - RNA, 19 nt, Homo sapiens
  misc_RNA (1)...(19): siRNA sense strand
gaucuauuauucaguggaa

SEQ ID NO: 1565527 - RNA, 19 nt, Homo sapiens
  misc_RNA (1)...(19): siRNA sense strand
gcaaugaggcagcuaagug

SEQ ID NO: 1565528 - RNA, 19 nt, Homo sapiens
  misc_RNA (1)...(19): siRNA sense strand
aaacugaagcguauagauu

SEQ ID NO: 1565529 - RNA, 19 nt, Homo sapiens
  misc_RNA (1)...(19): siRNA sense strand
uauuuggccuugacauuaa

SEQ ID NO: 1565530 - RNA, 19 nt, Homo sapiens
  misc_RNA (1)...(19): siRNA sense strand
gagagggaauuguacaagu

SEQ ID NO: 1565531 - RNA, 19 nt, Homo sapiens
  misc_RNA (1)...(19): siRNA sense strand
gcucaucuccaucauuuau

SEQ ID NO: 1565532 - RNA, 19 nt, Homo sapiens
  misc_RNA (1)...(19): siRNA sense strand
gaagagcuaccgccugugu

SEQ ID NO: 1565533 - RNA, 19 nt, Homo sapiens
  misc_RNA (1)...(19): siRNA sense strand
gauauuuggccuugacauu

SEQ ID NO: 1565534 - RNA, 19 nt, Homo sapiens
  misc_RNA (1)...(19): siRNA sense strand
cuucagggcuccagacaug

SEQ ID NO: 1565535 - RNA, 19 nt, Homo sapiens
  misc_RNA (1)...(19): siRNA sense strand
gaggauaccugggaugaac

SEQ ID NO: 1565536 - RNA, 19 nt, Homo sapiens
  misc_RNA (1)...(19): siRNA sense strand
agagggaauuguacaaguu

SEQ ID NO: 1565537 - RNA, 19 nt, Homo sapiens
  misc_RNA (1)...(19): siRNA sense strand
uggcgaagcucuggaucua

SEQ ID NO: 1565538 - RNA, 19 nt, Homo sapiens
  misc_RNA (1)...(19): siRNA sense strand
gaagggaagaacaucaaga

SEQ ID NO: 1565539 - RNA, 19 nt, Homo sapiens
  misc_RNA (1)...(19): siRNA sense strand
ggaagaacaucaagaaaac

SEQ ID NO: 1565540 - RNA, 19 nt, Homo sapiens
  misc_RNA (1)...(19): siRNA sense strand
ccuaauugguaguguagaa

SEQ ID NO: 1565541 - RNA, 19 nt, Homo sapiens
  misc_RNA (1)...(19): siRNA sense strand
gacagaugccucccuggua

SEQ ID NO: 1565542 - RNA, 19 nt, Homo sapiens
  misc_RNA (1)...(19): siRNA sense strand
ccacaacugcaggauauuu

SEQ ID NO: 1565543 - RNA, 19 nt, Homo sapiens
  misc_RNA (1)...(19): siRNA sense strand
gcagagacuguggcaauga

SEQ ID NO: 1565544 - RNA, 19 nt, Homo sapiens
  misc_RNA (1)...(19): siRNA sense strand
uaccugggaugaacuccua

SEQ ID NO: 1565545 - RNA, 19 nt, Homo sapiens
  misc_RNA (1)...(19): siRNA sense strand
auaccaggauggagaagaa

SEQ ID NO: 1565546 - RNA, 19 nt, Homo sapiens
  misc_RNA (1)...(19): siRNA sense strand
ggaucuacccggugaaauc

SEQ ID NO: 1565547 - RNA, 19 nt, Homo sapiens
  misc_RNA (1)...(19): siRNA sense strand
gguuuuggcuggugauuaa

SEQ ID NO: 1565548 - RNA, 19 nt, Homo sapiens
  misc_RNA (1)...(19): siRNA sense strand
gaauaacugccugaucuuc

SEQ ID NO: 1565549 - RNA, 19 nt, Homo sapiens
  misc_RNA (1)...(19): siRNA sense strand
cuccacaacugcaggauau

SEQ ID NO: 1565550 - RNA, 19 nt, Homo sapiens
  misc_RNA (1)...(19): siRNA sense strand
caagcagccuuccucaaac

SEQ ID NO: 1565551 - RNA, 19 nt, Homo sapiens
  misc_RNA (1)...(19): siRNA sense strand
gagggaauuguacaaguug

SEQ ID NO: 1565552 - RNA, 19 nt, Homo sapiens
  misc_RNA (1)...(19): siRNA sense strand
gggaagaacaucaagaaaa

SEQ ID NO: 1565553 - RNA, 19 nt, Homo sapiens
  misc_RNA (1)...(19): siRNA sense strand
ugaagcguauagauugguu

SEQ ID NO: 1565554 - RNA, 19 nt, Homo sapiens
  misc_RNA (1)...(19): siRNA sense strand
auauuuggccuugacauua

SEQ ID NO: 1565555 - RNA, 19 nt, Homo sapiens
  misc_RNA (1)...(19): siRNA sense strand
ccacuggacacccugaaga

SEQ ID NO: 1565556 - RNA, 19 nt, Homo sapiens
  misc_RNA (1)...(19): siRNA sense strand
gaaaacuucuccccacucu

SEQ ID NO: 1565557 - RNA, 19 nt, Homo sapiens
  misc_RNA (1)...(19): siRNA sense strand
ggcagagacuguggcaaug

SEQ ID NO: 1565558 - RNA, 19 nt, Homo sapiens
  misc_RNA (1)...(19): siRNA sense strand
uggacacccugaagagcua

SEQ ID NO: 1565559 - RNA, 19 nt, Homo sapiens
  misc_RNA (1)...(19): siRNA sense strand
cuucugagagggaauugua

SEQ ID NO: 1565560 - RNA, 19 nt, Homo sapiens
  misc_RNA (1)...(19): siRNA sense strand
ccacucuugaucagaauuu

SEQ ID NO: 1565561 - RNA, 19 nt, Homo sapiens
  misc_RNA (1)...(19): siRNA sense strand
aagcagccuuccucaaaca

SEQ ID NO: 1565562 - RNA, 19 nt, Homo sapiens
  misc_RNA (1)...(19): siRNA sense strand
gaacuccuaauugguagug

SEQ ID NO: 1565563 - RNA, 19 nt, Homo sapiens
  misc_RNA (1)...(19): siRNA sense strand
aaacaugaagggaagaaca

SEQ ID NO: 1565564 - RNA, 19 nt, Homo sapiens
  misc_RNA (1)...(19): siRNA sense strand
gcagccuuccucaaacaaa

SEQ ID NO: 1565565 - RNA, 19 nt, Homo sapiens
  misc_RNA (1)...(19): siRNA sense strand
gcaggauauuuggccuuga

SEQ ID NO: 1565566 - RNA, 19 nt, Homo sapiens
  misc_RNA (1)...(19): siRNA sense strand
aagggaagaacaucaagaa

SEQ ID NO: 1565567 - RNA, 19 nt, Homo sapiens
  misc_RNA (1)...(19): siRNA sense strand
augccucccugguagauuu

SEQ ID NO: 1565568 - RNA, 19 nt, Homo sapiens
  misc_RNA (1)...(19): siRNA sense strand
ugggaugaacuccuaauug

SEQ ID NO: 1565569 - RNA, 19 nt, Homo sapiens
  misc_RNA (1)...(19): siRNA sense strand
gagaagaaaaugaaaaugg

SEQ ID NO: 1565570 - RNA, 19 nt, Homo sapiens
  misc_RNA (1)...(19): siRNA sense strand
ccggugaaauccugcaaag

SEQ ID NO: 1565571 - RNA, 19 nt, Homo sapiens
  misc_RNA (1)...(19): siRNA sense strand
cauuaaaggcagagacugu

SEQ ID NO: 1565572 - RNA, 19 nt, Homo sapiens
  misc_RNA (1)...(19): siRNA sense strand
acuccuaauugguagugua

SEQ ID NO: 1565573 - RNA, 19 nt, Homo sapiens
  misc_RNA (1)...(19): siRNA sense strand
ggaggauaccugggaugaa

SEQ ID NO: 1565574 - RNA, 19 nt, Homo sapiens
  misc_RNA (1)...(19): siRNA sense strand
ugaauaccaggauggagaa

SEQ ID NO: 1565575 - RNA, 19 nt, Homo sapiens
  misc_RNA (1)...(19): siRNA sense strand
cagagacuguggcaaugag

SEQ ID NO: 1565576 - RNA, 19 nt, Homo sapiens
  misc_RNA (1)...(19): siRNA sense strand
ucaaacaaacuccacaacu

SEQ ID NO: 1565577 - RNA, 19 nt, Homo sapiens
  misc_RNA (1)...(19): siRNA sense strand
gaccggcugugaugcuuuu

SEQ ID NO: 1565578 - RNA, 19 nt, Homo sapiens
  misc_RNA (1)...(19): siRNA sense strand
auuggaagccugagaguug

SEQ ID NO: 1565579 - RNA, 19 nt, Homo sapiens
  misc_RNA (1)...(19): siRNA sense strand
cacaacugcaggauauuug

SEQ ID NO: 1565580 - RNA, 19 nt, Homo sapiens
  misc_RNA (1)...(19): siRNA sense strand
ggcuggugauuaaggaaga

SEQ ID NO: 1565581 - RNA, 19 nt, Homo sapiens
  misc_RNA (1)...(19): siRNA sense strand
caggauauuuggccuugac

SEQ ID NO: 1565582 - RNA, 19 nt, Homo sapiens
  misc_RNA (1)...(19): siRNA sense strand
uggagaauuucaggccaaa

SEQ ID NO: 1565583 - RNA, 19 nt, Homo sapiens
  misc_RNA (1)...(19): siRNA sense strand
cuugaaaacugaagcguau

SEQ ID NO: 1565584 - RNA, 19 nt, Homo sapiens
  misc_RNA (1)...(19): siRNA sense strand
agagcuaccgccuguguga

SEQ ID NO: 1565585 - RNA, 19 nt, Homo sapiens
  misc_RNA (1)...(19): siRNA sense strand
ggaugaacuccuaauuggu

SEQ ID NO: 1565586 - RNA, 19 nt, Homo sapiens
  misc_RNA (1)...(19): siRNA sense strand
aacugaagcguauagauug

SEQ ID NO: 1565587 - RNA, 19 nt, Homo sapiens
  misc_RNA (1)...(19): siRNA sense strand
aggcagagacuguggcaau

SEQ ID NO: 1565588 - RNA, 19 nt, Homo sapiens
  misc_RNA (1)...(19): siRNA sense strand
ggauggagaagaaaaugaa

SEQ ID NO: 1565589 - RNA, 19 nt, Homo sapiens
  misc_RNA (1)...(19): siRNA sense strand
aaacuucuccccacucuug

SEQ ID NO: 1565590 - RNA, 19 nt, Homo sapiens
  misc_RNA (1)...(19): siRNA sense strand
cguaugaauucuucuguaa

SEQ ID NO: 1565591 - RNA, 19 nt, Homo sapiens
  misc_RNA (1)...(19): siRNA sense strand
ugaagcaccuguacaagug

SEQ ID NO: 1565592 - RNA, 19 nt, Homo sapiens
  misc_RNA (1)...(19): siRNA sense strand
gcaagacccugacauaucc

SEQ ID NO: 1565593 - RNA, 19 nt, Homo sapiens
  misc_RNA (1)...(19): siRNA sense strand
caagauccguuuccagcuu

SEQ ID NO: 1565594 - RNA, 19 nt, Homo sapiens
  misc_RNA (1)...(19): siRNA sense strand
ggaauucucagugcacuuu

SEQ ID NO: 1565595 - RNA, 19 nt, Homo sapiens
  misc_RNA (1)...(19): siRNA sense strand
gcaggaauaacaccaaguu

SEQ ID NO: 1565596 - RNA, 19 nt, Homo sapiens
  misc_RNA (1)...(19): siRNA sense strand
caaaccagauggcaggaau

SEQ ID NO: 1565597 - RNA, 19 nt, Homo sapiens
  misc_RNA (1)...(19): siRNA sense strand
guccaauucuugucauuug

SEQ ID NO: 1565598 - RNA, 19 nt, Homo sapiens
  misc_RNA (1)...(19): siRNA sense strand
gagcccaaggucuauaaua

SEQ ID NO: 1565599 - RNA, 19 nt, Homo sapiens
  misc_RNA (1)...(19): siRNA sense strand
guacgacgcccuggaauuc

SEQ ID NO: 1565600 - RNA, 19 nt, Homo sapiens
  misc_RNA (1)...(19): siRNA sense strand
gaauucuucuguaaugucu

SEQ ID NO: 1565601 - RNA, 19 nt, Homo sapiens
  misc_RNA (1)...(19): siRNA sense strand
ccacaggcuucauguucuu

SEQ ID NO: 1565602 - RNA, 19 nt, Homo sapiens
  misc_RNA (1)...(19): siRNA sense strand
gcuacagguuggaggguuu

SEQ ID NO: 1565603 - RNA, 19 nt, Homo sapiens
  misc_RNA (1)...(19): siRNA sense strand
ccagauggcaggaauaaca

SEQ ID NO: 1565604 - RNA, 19 nt, Homo sapiens
  misc_RNA (1)...(19): siRNA sense strand
caguggagcuggugucauc

SEQ ID NO: 1565605 - RNA, 19 nt, Homo sapiens
  misc_RNA (1)...(19): siRNA sense strand
guuuccagcuucagcauga

SEQ ID NO: 1565606 - RNA, 19 nt, Homo sapiens
  misc_RNA (1)...(19): siRNA sense strand
gcucagauucucuccauag

SEQ ID NO: 1565607 - RNA, 19 nt, Homo sapiens
  misc_RNA (1)...(19): siRNA sense strand
cauauccgcuggaccucuu

SEQ ID NO: 1565608 - RNA, 19 nt, Homo sapiens
  misc_RNA (1)...(19): siRNA sense strand
cagcucagauucucuccau

SEQ ID NO: 1565609 - RNA, 19 nt, Homo sapiens
  misc_RNA (1)...(19): siRNA sense strand
guucuucucguaugaauuc

SEQ ID NO: 1565610 - RNA, 19 nt, Homo sapiens
  misc_RNA (1)...(19): siRNA sense strand
ggccauaccagccgaagga

SEQ ID NO: 1565611 - RNA, 19 nt, Homo sapiens
  misc_RNA (1)...(19): siRNA sense strand
ccacagaggcagcguguac

SEQ ID NO: 1565612 - RNA, 19 nt, Homo sapiens
  misc_RNA (1)...(19): siRNA sense strand
cagcaagacccugacauau

SEQ ID NO: 1565613 - RNA, 19 nt, Homo sapiens
  misc_RNA (1)...(19): siRNA sense strand
ucagugcacuuuguaugug

SEQ ID NO: 1565614 - RNA, 19 nt, Homo sapiens
  misc_RNA (1)...(19): siRNA sense strand
ucguaugaauucuucugua

SEQ ID NO: 1565615 - RNA, 19 nt, Homo sapiens
  misc_RNA (1)...(19): siRNA sense strand
gauacaagggccucaugga

SEQ ID NO: 1565616 - RNA, 19 nt, Homo sapiens
  misc_RNA (1)...(19): siRNA sense strand
caagaagcggcuacagguu

SEQ ID NO: 1565617 - RNA, 19 nt, Homo sapiens
  misc_RNA (1)...(19): siRNA sense strand
ccaccuugaucgccaucuu

SEQ ID NO: 1565618 - RNA, 19 nt, Homo sapiens
  misc_RNA (1)...(19): siRNA sense strand
gagauacaagggccucaug

SEQ ID NO: 1565619 - RNA, 19 nt, Homo sapiens
  misc_RNA (1)...(19): siRNA sense strand
acacgucccagcucagauu

SEQ ID NO: 1565620 - RNA, 19 nt, Homo sapiens
  misc_RNA (1)...(19): siRNA sense strand
ccaauucuugucauuugaa

SEQ ID NO: 1565621 - RNA, 19 nt, Homo sapiens
  misc_RNA (1)...(19): siRNA sense strand
aaaaugagaaccuccaaaa

SEQ ID NO: 1565622 - RNA, 19 nt, Homo sapiens
  misc_RNA (1)...(19): siRNA sense strand
gcuucauguucuucucgua

SEQ ID NO: 1565623 - RNA, 19 nt, Homo sapiens
  misc_RNA (1)...(19): siRNA sense strand
gaggaggguccgacagcuu

SEQ ID NO: 1565624 - RNA, 19 nt, Homo sapiens
  misc_RNA (1)...(19): siRNA sense strand
ggcugcaguucucuugcua

SEQ ID NO: 1565625 - RNA, 19 nt, Homo sapiens
  misc_RNA (1)...(19): siRNA sense strand
ggagcuguccaauucuugu

SEQ ID NO: 1565626 - RNA, 19 nt, Homo sapiens
  misc_RNA (1)...(19): siRNA sense strand
guaaugucuuccacugcau

SEQ ID NO: 1565627 - RNA, 19 nt, Homo sapiens
  misc_RNA (1)...(19): siRNA sense strand
guucugcgcacccgcuuug

SEQ ID NO: 1565628 - RNA, 19 nt, Homo sapiens
  misc_RNA (1)...(19): siRNA sense strand
uggccuggcugccuguaug

SEQ ID NO: 1565629 - RNA, 19 nt, Homo sapiens
  misc_RNA (1)...(19): siRNA sense strand
aaaccagauggcaggaaua

SEQ ID NO: 1565630 - RNA, 19 nt, Homo sapiens
  misc_RNA (1)...(19): siRNA sense strand
uccaauucuugucauuuga

SEQ ID NO: 1565631 - RNA, 19 nt, Homo sapiens
  misc_RNA (1)...(19): siRNA sense strand
cauaccagccgaaggaaag

SEQ ID NO: 1565632 - RNA, 19 nt, Homo sapiens
  misc_RNA (1)...(19): siRNA sense strand
gucugugucuggacuuguu

SEQ ID NO: 1565633 - RNA, 19 nt, Homo sapiens
  misc_RNA (1)...(19): siRNA sense strand
gugagcccaaggucuauaa

SEQ ID NO: 1565634 - RNA, 19 nt, Homo sapiens
  misc_RNA (1)...(19): siRNA sense strand
aaccagauggcaggaauaa

SEQ ID NO: 1565635 - RNA, 19 nt, Homo sapiens
  misc_RNA (1)...(19): siRNA sense strand
cuucucguaugaauucuuc

SEQ ID NO: 1565636 - RNA, 19 nt, Homo sapiens
  misc_RNA (1)...(19): siRNA sense strand
guacaagugggccauacca

SEQ ID NO: 1565637 - RNA, 19 nt, Homo sapiens
  misc_RNA (1)...(19): siRNA sense strand
agcccaaggucuauaauac

SEQ ID NO: 1565638 - RNA, 19 nt, Homo sapiens
  misc_RNA (1)...(19): siRNA sense strand
ccuugaagcaccuguacaa

SEQ ID NO: 1565639 - RNA, 19 nt, Homo sapiens
  misc_RNA (1)...(19): siRNA sense strand
gggcugcaguucucuugcu

SEQ ID NO: 1565640 - RNA, 19 nt, Homo sapiens
  misc_RNA (1)...(19): siRNA sense strand
gcuccaagcuucagcauau

SEQ ID NO: 1565641 - RNA, 19 nt, Homo sapiens
  misc_RNA (1)...(19): siRNA sense strand
gagcgacccuguuucagaa

SEQ ID NO: 1565642 - RNA, 19 nt, Homo sapiens
  misc_RNA (1)...(19): siRNA sense strand
ggagacagcacgccaguga

SEQ ID NO: 1565643 - RNA, 19 nt, Homo sapiens
  misc_RNA (1)...(19): siRNA sense strand
ugaccagccuuacgucuug

SEQ ID NO: 1565644 - RNA, 19 nt, Homo sapiens
  misc_RNA (1)...(19): siRNA sense strand
gggaggcaguugcagcuuu

SEQ ID NO: 1565645 - RNA, 19 nt, Homo sapiens
  misc_RNA (1)...(19): siRNA sense strand
gagaagcccagcccucauu

SEQ ID NO: 1565646 - RNA, 19 nt, Homo sapiens
  misc_RNA (1)...(19): siRNA sense strand
ugagggagauggagaccaa

SEQ ID NO: 1565647 - RNA, 19 nt, Homo sapiens
  misc_RNA (1)...(19): siRNA sense strand
ggaggcaguugcagcuuuc

SEQ ID NO: 1565648 - RNA, 19 nt, Homo sapiens
  misc_RNA (1)...(19): siRNA sense strand
ggagcgacccuguuucaga

SEQ ID NO: 1565649 - RNA, 19 nt, Homo sapiens
  misc_RNA (1)...(19): siRNA sense strand
gcccagcccucauugugaa

SEQ ID NO: 1565650 - RNA, 19 nt, Homo sapiens
  misc_RNA (1)...(19): siRNA sense strand
uccaggaucucaaccaguu

SEQ ID NO: 1565651 - RNA, 19 nt, Homo sapiens
  misc_RNA (1)...(19): siRNA sense strand
cgacccuguuucagaauga

SEQ ID NO: 1565652 - RNA, 19 nt, Homo sapiens
  misc_RNA (1)...(19): siRNA sense strand
gcgacccuguuucagaaug

SEQ ID NO: 1565653 - RNA, 19 nt, Homo sapiens
  misc_RNA (1)...(19): siRNA sense strand
ccaaucacccacccagugu

SEQ ID NO: 1565654 - RNA, 19 nt, Homo sapiens
  misc_RNA (1)...(19): siRNA sense strand
gcacgccagugagggagau

SEQ ID NO: 1565655 - RNA, 19 nt, Homo sapiens
  misc_RNA (1)...(19): siRNA sense strand
gaccagccuuacgucuuga

SEQ ID NO: 1565656 - RNA, 19 nt, Homo sapiens
  misc_RNA (1)...(19): siRNA sense strand
gggagauggagaccaauca

SEQ ID NO: 1565657 - RNA, 19 nt, Homo sapiens
  misc_RNA (1)...(19): siRNA sense strand
gaagcccagcccucauugu

SEQ ID NO: 1565658 - RNA, 19 nt, Homo sapiens
  misc_RNA (1)...(19): siRNA sense strand
ccagagucccuuccagaca

SEQ ID NO: 1565659 - RNA, 19 nt, Homo sapiens
  misc_RNA (1)...(19): siRNA sense strand
gaagcucgggaaggucuga

SEQ ID NO: 1565660 - RNA, 19 nt, Homo sapiens
  misc_RNA (1)...(19): siRNA sense strand
ggagaagcccagcccucau

SEQ ID NO: 1565661 - RNA, 19 nt, Homo sapiens
  misc_RNA (1)...(19): siRNA sense strand
ggaauuacguugagucuau

SEQ ID NO: 1565662 - RNA, 19 nt, Homo sapiens
  misc_RNA (1)...(19): siRNA sense strand
ggaggaagcugcugugguu

SEQ ID NO: 1565663 - RNA, 19 nt, Homo sapiens
  misc_RNA (1)...(19): siRNA sense strand
gcagagagcccuagaagaa

SEQ ID NO: 1565664 - RNA, 19 nt, Homo sapiens
  misc_RNA (1)...(19): siRNA sense strand
aaacaagccuucagaauca

SEQ ID NO: 1565665 - RNA, 19 nt, Homo sapiens
  misc_RNA (1)...(19): siRNA sense strand
ggaaggagccauuauuuau

SEQ ID NO: 1565666 - RNA, 19 nt, Homo sapiens
  misc_RNA (1)...(19): siRNA sense strand
gauggaaucuucaaucaau

SEQ ID NO: 1565667 - RNA, 19 nt, Homo sapiens
  misc_RNA (1)...(19): siRNA sense strand
ggagggagccacccaagua

SEQ ID NO: 1565668 - RNA, 19 nt, Homo sapiens
  misc_RNA (1)...(19): siRNA sense strand
gcaagaagagaaauuggua

SEQ ID NO: 1565669 - RNA, 19 nt, Homo sapiens
  misc_RNA (1)...(19): siRNA sense strand
gaaugacgaugguugguau

SEQ ID NO: 1565670 - RNA, 19 nt, Homo sapiens
  misc_RNA (1)...(19): siRNA sense strand
guacaguucuacagcauga

SEQ ID NO: 1565671 - RNA, 19 nt, Homo sapiens
  misc_RNA (1)...(19): siRNA sense strand
gagaacaacuacauacagu

SEQ ID NO: 1565672 - RNA, 19 nt, Homo sapiens
  misc_RNA (1)...(19): siRNA sense strand
aagaugagcuguccuuuca

SEQ ID NO: 1565673 - RNA, 19 nt, Homo sapiens
  misc_RNA (1)...(19): siRNA sense strand
gaacaacuacauacaguca

SEQ ID NO: 1565674 - RNA, 19 nt, Homo sapiens
  misc_RNA (1)...(19): siRNA sense strand
ucaaggacacauaagauua

SEQ ID NO: 1565675 - RNA, 19 nt, Homo sapiens
  misc_RNA (1)...(19): siRNA sense strand
caaacaagccuucagaauc

SEQ ID NO: 1565676 - RNA, 19 nt, Homo sapiens
  misc_RNA (1)...(19): siRNA sense strand
agagaaaguugcaagaaga

SEQ ID NO: 1565677 - RNA, 19 nt, Homo sapiens
  misc_RNA (1)...(19): siRNA sense strand
gguaccaaaugauuacgua

SEQ ID NO: 1565678 - RNA, 19 nt, Homo sapiens
  misc_RNA (1)...(19): siRNA sense strand
guacaacaccuccaacuca

SEQ ID NO: 1565679 - RNA, 19 nt, Homo sapiens
  misc_RNA (1)...(19): siRNA sense strand
gaaggagccauuauuuaug

SEQ ID NO: 1565680 - RNA, 19 nt, Homo sapiens
  misc_RNA (1)...(19): siRNA sense strand
gaaccagucuuugaugagu

SEQ ID NO: 1565681 - RNA, 19 nt, Homo sapiens
  misc_RNA (1)...(19): siRNA sense strand
ucaaagaaaucgaacuuac

SEQ ID NO: 1565682 - RNA, 19 nt, Homo sapiens
  misc_RNA (1)...(19): siRNA sense strand
gaaaguugcaagaagagaa

SEQ ID NO: 1565683 - RNA, 19 nt, Homo sapiens
  misc_RNA (1)...(19): siRNA sense strand
uggaacggguggccgauua

SEQ ID NO: 1565684 - RNA, 19 nt, Homo sapiens
  misc_RNA (1)...(19): siRNA sense strand
cgaccaguucguuauauua

SEQ ID NO: 1565685 - RNA, 19 nt, Homo sapiens
  misc_RNA (1)...(19): siRNA sense strand
ccaguucguuauauuagaa

SEQ ID NO: 1565686 - RNA, 19 nt, Homo sapiens
  misc_RNA (1)...(19): siRNA sense strand
cuacaccacccaauccuua

SEQ ID NO: 1565687 - RNA, 19 nt, Homo sapiens
  misc_RNA (1)...(19): siRNA sense strand
uugagucuaucaugcauua

SEQ ID NO: 1565688 - RNA, 19 nt, Homo sapiens
  misc_RNA (1)...(19): siRNA sense strand
gaagaugagcuguccuuuc

SEQ ID NO: 1565689 - RNA, 19 nt, Homo sapiens
  misc_RNA (1)...(19): siRNA sense strand
gagaacaguggaaguggua

SEQ ID NO: 1565690 - RNA, 19 nt, Homo sapiens
  misc_RNA (1)...(19): siRNA sense strand
gaaaaccuauugacuauac

SEQ ID NO: 1565691 - RNA, 19 nt, Homo sapiens
  misc_RNA (1)...(19): siRNA sense strand
cacaaacaguugauauuca

SEQ ID NO: 1565692 - RNA, 19 nt, Homo sapiens
  misc_RNA (1)...(19): siRNA sense strand
caggaaggagccauuauuu

SEQ ID NO: 1565693 - RNA, 19 nt, Homo sapiens
  misc_RNA (1)...(19): siRNA sense strand
caagaagaaugacgauggu

SEQ ID NO: 1565694 - RNA, 19 nt, Homo sapiens
  misc_RNA (1)...(19): siRNA sense strand
gauauuggacauggaguaa

SEQ ID NO: 1565695 - RNA, 19 nt, Homo sapiens
  misc_RNA (1)...(19): siRNA sense strand
caaagaaaucgaacuuaca

SEQ ID NO: 1565696 - RNA, 19 nt, Homo sapiens
  misc_RNA (1)...(19): siRNA sense strand
gagcagcagucgagagaac

SEQ ID NO: 1565697 - RNA, 19 nt, Homo sapiens
  misc_RNA (1)...(19): siRNA sense strand
caacaccuccaacucagaa

SEQ ID NO: 1565698 - RNA, 19 nt, Homo sapiens
  misc_RNA (1)...(19): siRNA sense strand
aaggagccauuauuuaugu

SEQ ID NO: 1565699 - RNA, 19 nt, Homo sapiens
  misc_RNA (1)...(19): siRNA sense strand
uaaacaccuuggacaacaa

SEQ ID NO: 1565700 - RNA, 19 nt, Homo sapiens
  misc_RNA (1)...(19): siRNA sense strand
ggaaaagguuguggcaauu

SEQ ID NO: 1565701 - RNA, 19 nt, Homo sapiens
  misc_RNA (1)...(19): siRNA sense strand
aagcugcugugguugagua

SEQ ID NO: 1565702 - RNA, 19 nt, Homo sapiens
  misc_RNA (1)...(19): siRNA sense strand
acuccuacguuaccuuuaa

SEQ ID NO: 1565703 - RNA, 19 nt, Homo sapiens
  misc_RNA (1)...(19): siRNA sense strand
ucacaaacaagccuucaga

SEQ ID NO: 1565704 - RNA, 19 nt, Homo sapiens
  misc_RNA (1)...(19): siRNA sense strand
aggaaggagccauuauuua

SEQ ID NO: 1565705 - RNA, 19 nt, Homo sapiens
  misc_RNA (1)...(19): siRNA sense strand
gugaguacccagaacauga

SEQ ID NO: 1565706 - RNA, 19 nt, Homo sapiens
  misc_RNA (1)...(19): siRNA sense strand
ucacaaacaguugauauuc

SEQ ID NO: 1565707 - RNA, 19 nt, Homo sapiens
  misc_RNA (1)...(19): siRNA sense strand
aaaagguuguggcaauuua

SEQ ID NO: 1565708 - RNA, 19 nt, Homo sapiens
  misc_RNA (1)...(19): siRNA sense strand
ccaaaugauuacguaccua

SEQ ID NO: 1565709 - RNA, 19 nt, Homo sapiens
  misc_RNA (1)...(19): siRNA sense strand
ucaggaaggagccauuauu

SEQ ID NO: 1565710 - RNA, 19 nt, Homo sapiens
  misc_RNA (1)...(19): siRNA sense strand
gagucuaucaugcauuauu

SEQ ID NO: 1565711 - RNA, 19 nt, Homo sapiens
  misc_RNA (1)...(19): siRNA sense strand
uaaagagaaaguugcaaga

SEQ ID NO: 1565712 - RNA, 19 nt, Homo sapiens
  misc_RNA (1)...(19): siRNA sense strand
caugcauuauucugaguaa

SEQ ID NO: 1565713 - RNA, 19 nt, Homo sapiens
  misc_RNA (1)...(19): siRNA sense strand
gaauuacguugagucuauc

SEQ ID NO: 1565714 - RNA, 19 nt, Homo sapiens
  misc_RNA (1)...(19): siRNA sense strand
ggcaauuuaugacuauaca

SEQ ID NO: 1565715 - RNA, 19 nt, Homo sapiens
  misc_RNA (1)...(19): siRNA sense strand
cagcuucugugaaucaaag

SEQ ID NO: 1565716 - RNA, 19 nt, Homo sapiens
  misc_RNA (1)...(19): siRNA sense strand
aagagaaaguugcaagaag

SEQ ID NO: 1565717 - RNA, 19 nt, Homo sapiens
  misc_RNA (1)...(19): siRNA sense strand
ccagugguaccaaaugauu

SEQ ID NO: 1565718 - RNA, 19 nt, Homo sapiens
  misc_RNA (1)...(19): siRNA sense strand
gguaugagggaguuaugaa

SEQ ID NO: 1565719 - RNA, 19 nt, Homo sapiens
  misc_RNA (1)...(19): siRNA sense strand
uacauacagucagcagaua

SEQ ID NO: 1565720 - RNA, 19 nt, Homo sapiens
  misc_RNA (1)...(19): siRNA sense strand
caaaagacaaggaagauga

SEQ ID NO: 1565721 - RNA, 19 nt, Homo sapiens
  misc_RNA (1)...(19): siRNA sense strand
uagacgcccuccuuccauu

SEQ ID NO: 1565722 - RNA, 19 nt, Homo sapiens
  misc_RNA (1)...(19): siRNA sense strand
cagaauccaguaucucuug

SEQ ID NO: 1565723 - RNA, 19 nt, Homo sapiens
  misc_RNA (1)...(19): siRNA sense strand
acaacaauguccugcagau

SEQ ID NO: 1565724 - RNA, 19 nt, Homo sapiens
  misc_RNA (1)...(19): siRNA sense strand
acacuucaaggacacauaa

SEQ ID NO: 1565725 - RNA, 19 nt, Homo sapiens
  misc_RNA (1)...(19): siRNA sense strand
aaagagaaaguugcaagaa

SEQ ID NO: 1565726 - RNA, 19 nt, Homo sapiens
  misc_RNA (1)...(19): siRNA sense strand
gaagaaaccaaagccuaca

SEQ ID NO: 1565727 - RNA, 19 nt, Homo sapiens
  misc_RNA (1)...(19): siRNA sense strand
aggauggaaucuucaauca

SEQ ID NO: 1565728 - RNA, 19 nt, Homo sapiens
  misc_RNA (1)...(19): siRNA sense strand
auaaacaccuuggacaaca

SEQ ID NO: 1565729 - RNA, 19 nt, Homo sapiens
  misc_RNA (1)...(19): siRNA sense strand
ggauggaaucuucaaucaa

SEQ ID NO: 1565730 - RNA, 19 nt, Homo sapiens
  misc_RNA (1)...(19): siRNA sense strand
ggaagaugagcuguccuuu

SEQ ID NO: 1565731 - RNA, 19 nt, Homo sapiens
  misc_RNA (1)...(19): siRNA sense strand
ugaguauagugauccuuau

SEQ ID NO: 1565732 - RNA, 19 nt, Homo sapiens
  misc_RNA (1)...(19): siRNA sense strand
acaaacaagccuucagaau

SEQ ID NO: 1565733 - RNA, 19 nt, Homo sapiens
  misc_RNA (1)...(19): siRNA sense strand
gauaaacaccuuggacaac

SEQ ID NO: 1565734 - RNA, 19 nt, Homo sapiens
  misc_RNA (1)...(19): siRNA sense strand
uccagaagauuacgaagag

SEQ ID NO: 1565735 - RNA, 19 nt, Homo sapiens
  misc_RNA (1)...(19): siRNA sense strand
uauuggacauggaguaaag

SEQ ID NO: 1565736 - RNA, 19 nt, Homo sapiens
  misc_RNA (1)...(19): siRNA sense strand
gaccaguucguuauauuag

SEQ ID NO: 1565737 - RNA, 19 nt, Homo sapiens
  misc_RNA (1)...(19): siRNA sense strand
caagaagagaaauugguau

SEQ ID NO: 1565738 - RNA, 19 nt, Homo sapiens
  misc_RNA (1)...(19): siRNA sense strand
ggaguuaugaauggaguga

SEQ ID NO: 1565739 - RNA, 19 nt, Homo sapiens
  misc_RNA (1)...(19): siRNA sense strand
gaaaagguuguggcaauuu

SEQ ID NO: 1565740 - RNA, 19 nt, Homo sapiens
  misc_RNA (1)...(19): siRNA sense strand
ggaagcugcugugguugag

SEQ ID NO: 1565741 - RNA, 19 nt, Homo sapiens
  misc_RNA (1)...(19): siRNA sense strand
cgagagaacaguggaagug

SEQ ID NO: 1565742 - RNA, 19 nt, Homo sapiens
  misc_RNA (1)...(19): siRNA sense strand
gugaaucaaagaaaucgaa

SEQ ID NO: 1565743 - RNA, 19 nt, Homo sapiens
  misc_RNA (1)...(19): siRNA sense strand
gacuauacaauucuagaug

SEQ ID NO: 1565744 - RNA, 19 nt, Homo sapiens
  misc_RNA (1)...(19): siRNA sense strand
cagagagcccuagaagaaa

SEQ ID NO: 1565745 - RNA, 19 nt, Homo sapiens
  misc_RNA (1)...(19): siRNA sense strand
uccauuacuucacaaacaa

SEQ ID NO: 1565746 - RNA, 19 nt, Homo sapiens
  misc_RNA (1)...(19): siRNA sense strand
uaaaggugaguacccagaa

SEQ ID NO: 1565747 - RNA, 19 nt, Homo sapiens
  misc_RNA (1)...(19): siRNA sense strand
aaaguugcaagaagagaaa

SEQ ID NO: 1565748 - RNA, 19 nt, Homo sapiens
  misc_RNA (1)...(19): siRNA sense strand
ugauaaacaccuuggacaa

SEQ ID NO: 1565749 - RNA, 19 nt, Homo sapiens
  misc_RNA (1)...(19): siRNA sense strand
uugaguauagugauccuua

SEQ ID NO: 1565750 - RNA, 19 nt, Homo sapiens
  misc_RNA (1)...(19): siRNA sense strand
guacccagaacaugaagau

SEQ ID NO: 1565751 - RNA, 19 nt, Homo sapiens
  misc_RNA (1)...(19): siRNA sense strand
cuacauacagucagcagau

SEQ ID NO: 1565752 - RNA, 19 nt, Homo sapiens
  misc_RNA (1)...(19): siRNA sense strand
gcgagaacaacuacauaca

SEQ ID NO: 1565753 - RNA, 19 nt, Homo sapiens
  misc_RNA (1)...(19): siRNA sense strand
ccacguucuuacuuggaaa

SEQ ID NO: 1565754 - RNA, 19 nt, Homo sapiens
  misc_RNA (1)...(19): siRNA sense strand
gaguauagugauccuuaug

SEQ ID NO: 1565755 - RNA, 19 nt, Homo sapiens
  misc_RNA (1)...(19): siRNA sense strand
gaacaguggaagugguagu

SEQ ID NO: 1565756 - RNA, 19 nt, Homo sapiens
  misc_RNA (1)...(19): siRNA sense strand
ucagggaaagggacacuug

SEQ ID NO: 1565757 - RNA, 19 nt, Homo sapiens
  misc_RNA (1)...(19): siRNA sense strand
agucuaucaugcauuauuc

SEQ ID NO: 1565758 - RNA, 19 nt, Homo sapiens
  misc_RNA (1)...(19): siRNA sense strand
gccauuauuuaugucauca

SEQ ID NO: 1565759 - RNA, 19 nt, Homo sapiens
  misc_RNA (1)...(19): siRNA sense strand
cagugguaccaaaugauua

SEQ ID NO: 1565760 - RNA, 19 nt, Homo sapiens
  misc_RNA (1)...(19): siRNA sense strand
agagagcccuagaagaaac

SEQ ID NO: 1565761 - RNA, 19 nt, Homo sapiens
  misc_RNA (1)...(19): siRNA sense strand
gaaagacuaugacccaaug

SEQ ID NO: 1565762 - RNA, 19 nt, Homo sapiens
  misc_RNA (1)...(19): siRNA sense strand
gaaggagccugagaaguug

SEQ ID NO: 1565763 - RNA, 19 nt, Homo sapiens
  misc_RNA (1)...(19): siRNA sense strand
agaaggagccugagaaguu

SEQ ID NO: 1565764 - RNA, 19 nt, Homo sapiens
  misc_RNA (1)...(19): siRNA sense strand
gaaguugccagaccaugug

SEQ ID NO: 1565765 - RNA, 19 nt, Homo sapiens
  misc_RNA (1)...(19): siRNA sense strand
acaagaaggagccugagaa

SEQ ID NO: 1565766 - RNA, 19 nt, Homo sapiens
  misc_RNA (1)...(19): siRNA sense strand
caagaaggagccugagaag

SEQ ID NO: 1565767 - RNA, 19 nt, Homo sapiens
  misc_RNA (1)...(19): siRNA sense strand
ccgcauggacuucuucuuc

SEQ ID NO: 1565768 - RNA, 19 nt, Homo sapiens
  misc_RNA (1)...(19): siRNA sense strand
cgcauggacuucuucuuca

SEQ ID NO: 1565769 - RNA, 19 nt, Homo sapiens
  misc_RNA (1)...(19): siRNA sense strand
ugaaagacuaugacccaau

SEQ ID NO: 1565770 - RNA, 19 nt, Homo sapiens
  misc_RNA (1)...(19): siRNA sense strand
caucagcuggguaccgauu

SEQ ID NO: 1565771 - RNA, 19 nt, Homo sapiens
  misc_RNA (1)...(19): siRNA sense strand
gcauggacuucuucuucac

SEQ ID NO: 1565772 - RNA, 19 nt, Homo sapiens
  misc_RNA (1)...(19): siRNA sense strand
cggacacaguucccaguuc

SEQ ID NO: 1565773 - RNA, 19 nt, Homo sapiens
  misc_RNA (1)...(19): siRNA sense strand
ggacauggcugaccacuuu

SEQ ID NO: 1565774 - RNA, 19 nt, Homo sapiens
  misc_RNA (1)...(19): siRNA sense strand
guaaagauaugccagaaga

SEQ ID NO: 1565775 - RNA, 19 nt, Homo sapiens
  misc_RNA (1)...(19): siRNA sense strand
gaaggcaacuggcccugaa

SEQ ID NO: 1565776 - RNA, 19 nt, Homo sapiens
  misc_RNA (1)...(19): siRNA sense strand
cagcauggaugaugaugaa

SEQ ID NO: 1565777 - RNA, 19 nt, Homo sapiens
  misc_RNA (1)...(19): siRNA sense strand
cuacauggcuuccuucaac

SEQ ID NO: 1565778 - RNA, 19 nt, Homo sapiens
  misc_RNA (1)...(19): siRNA sense strand
ggguauaucuucgcuucua

SEQ ID NO: 1565779 - RNA, 19 nt, Homo sapiens
  misc_RNA (1)...(19): siRNA sense strand
ucaccuacauggcuuccuu

SEQ ID NO: 1565780 - RNA, 19 nt, Homo sapiens
  misc_RNA (1)...(19): siRNA sense strand
ucgccuaccuccucaccua

SEQ ID NO: 1565781 - RNA, 19 nt, Homo sapiens
  misc_RNA (1)...(19): siRNA sense strand
ucaaugagcggcugaagag

SEQ ID NO: 1565782 - RNA, 19 nt, Homo sapiens
  misc_RNA (1)...(19): siRNA sense strand
gcauggaugaugaugaaga

SEQ ID NO: 1565783 - RNA, 19 nt, Homo sapiens
  misc_RNA (1)...(19): siRNA sense strand
gcucuccaguuggguauau

SEQ ID NO: 1565784 - RNA, 19 nt, Homo sapiens
  misc_RNA (1)...(19): siRNA sense strand
ggcccagcauggaugauga

SEQ ID NO: 1565785 - RNA, 19 nt, Homo sapiens
  misc_RNA (1)...(19): siRNA sense strand
ccagaauccagucuaauca

SEQ ID NO: 1565786 - RNA, 19 nt, Homo sapiens
  misc_RNA (1)...(19): siRNA sense strand
ccucuuuccucccaacuuc

SEQ ID NO: 1565787 - RNA, 19 nt, Homo sapiens
  misc_RNA (1)...(19): siRNA sense strand
caaccuggucuaccuguuc

SEQ ID NO: 1565788 - RNA, 19 nt, Homo sapiens
  misc_RNA (1)...(19): siRNA sense strand
uggcugaccacuuugcuuu

SEQ ID NO: 1565789 - RNA, 19 nt, Homo sapiens
  misc_RNA (1)...(19): siRNA sense strand
caggugcgcgucaguguga

SEQ ID NO: 1565790 - RNA, 19 nt, Homo sapiens
  misc_RNA (1)...(19): siRNA sense strand
gccacuuucuucccugaga

SEQ ID NO: 1565791 - RNA, 19 nt, Homo sapiens
  misc_RNA (1)...(19): siRNA sense strand
cauggaugaugaugaagag

SEQ ID NO: 1565792 - RNA, 19 nt, Homo sapiens
  misc_RNA (1)...(19): siRNA sense strand
uggguuugcuggcgaacuu

SEQ ID NO: 1565793 - RNA, 19 nt, Homo sapiens
  misc_RNA (1)...(19): siRNA sense strand
uggugaagguaaagauaug

SEQ ID NO: 1565794 - RNA, 19 nt, Homo sapiens
  misc_RNA (1)...(19): siRNA sense strand
gguauaucuucgcuucuac

SEQ ID NO: 1565795 - RNA, 19 nt, Homo sapiens
  misc_RNA (1)...(19): siRNA sense strand
ccacuuucuucccugagau

SEQ ID NO: 1565796 - RNA, 19 nt, Homo sapiens
  misc_RNA (1)...(19): siRNA sense strand
ccuguucacuguccguauc

SEQ ID NO: 1565797 - RNA, 19 nt, Homo sapiens
  misc_RNA (1)...(19): siRNA sense strand
ccucccaacuucuggaucu

SEQ ID NO: 1565798 - RNA, 19 nt, Homo sapiens
  misc_RNA (1)...(19): siRNA sense strand
ccuggugaagguaaagaua

SEQ ID NO: 1565799 - RNA, 19 nt, Homo sapiens
  misc_RNA (1)...(19): siRNA sense strand
aauccagucuaaucaccuu

SEQ ID NO: 1565800 - RNA, 19 nt, Homo sapiens
  misc_RNA (1)...(19): siRNA sense strand
uggucuaccuguucacugu

SEQ ID NO: 1565801 - RNA, 19 nt, Homo sapiens
  misc_RNA (1)...(19): siRNA sense strand
cggcgguacuauuccucua

SEQ ID NO: 1565802 - RNA, 19 nt, Homo sapiens
  misc_RNA (1)...(19): siRNA sense strand
ggugaagcgcuacgaugug

SEQ ID NO: 1565803 - RNA, 19 nt, Homo sapiens
  misc_RNA (1)...(19): siRNA sense strand
caagacgccgagcggagaa

SEQ ID NO: 1565804 - RNA, 19 nt, Homo sapiens
  misc_RNA (1)...(19): siRNA sense strand
gcccugaaggcacucaaug

SEQ ID NO: 1565805 - RNA, 19 nt, Homo sapiens
  misc_RNA (1)...(19): siRNA sense strand
aauaagaccuugcuugaga

SEQ ID NO: 1565806 - RNA, 19 nt, Homo sapiens
  misc_RNA (1)...(19): siRNA sense strand
gaaggugaaugaaggugaa

SEQ ID NO: 1565807 - RNA, 19 nt, Homo sapiens
  misc_RNA (1)...(19): siRNA sense strand
ggacuugcccuucaugcua

SEQ ID NO: 1565808 - RNA, 19 nt, Homo sapiens
  misc_RNA (1)...(19): siRNA sense strand
acacugagcugcagaaggu

SEQ ID NO: 1565809 - RNA, 19 nt, Homo sapiens
  misc_RNA (1)...(19): siRNA sense strand
cuguugagcuaaagaauaa

SEQ ID NO: 1565810 - RNA, 19 nt, Homo sapiens
  misc_RNA (1)...(19): siRNA sense strand
ggacccaucauacgaauau

SEQ ID NO: 1565811 - RNA, 19 nt, Homo sapiens
  misc_RNA (1)...(19): siRNA sense strand
gaaauagugguccagauca

SEQ ID NO: 1565812 - RNA, 19 nt, Homo sapiens
  misc_RNA (1)...(19): siRNA sense strand
agaauaagaccuugcuuga

SEQ ID NO: 1565813 - RNA, 19 nt, Homo sapiens
  misc_RNA (1)...(19): siRNA sense strand
gaacuauggcuacgucuac

SEQ ID NO: 1565814 - RNA, 19 nt, Homo sapiens
  misc_RNA (1)...(19): siRNA sense strand
gagcaugacauucccaaag

SEQ ID NO: 1565815 - RNA, 19 nt, Homo sapiens
  misc_RNA (1)...(19): siRNA sense strand
gacuugcccuucaugcuau

SEQ ID NO: 1565816 - RNA, 19 nt, Homo sapiens
  misc_RNA (1)...(19): siRNA sense strand
gggagccuguugagcuaaa

SEQ ID NO: 1565817 - RNA, 19 nt, Homo sapiens
  misc_RNA (1)...(19): siRNA sense strand
aaauagugguccagaucaa

SEQ ID NO: 1565818 - RNA, 19 nt, Homo sapiens
  misc_RNA (1)...(19): siRNA sense strand
gcgagaagaacauggacuu

SEQ ID NO: 1565819 - RNA, 19 nt, Homo sapiens
  misc_RNA (1)...(19): siRNA sense strand
ucgcugcucacgucucuua

SEQ ID NO: 1565820 - RNA, 19 nt, Homo sapiens
  misc_RNA (1)...(19): siRNA sense strand
gcagucgucuguggugaag

SEQ ID NO: 1565821 - RNA, 19 nt, Homo sapiens
  misc_RNA (1)...(19): siRNA sense strand
ccuguugagcuaaagaaua

SEQ ID NO: 1565822 - RNA, 19 nt, Homo sapiens
  misc_RNA (1)...(19): siRNA sense strand
gcucagcuccuacuuccau

SEQ ID NO: 1565823 - RNA, 19 nt, Homo sapiens
  misc_RNA (1)...(19): siRNA sense strand
gaauaagaccuugcuugag

SEQ ID NO: 1565824 - RNA, 19 nt, Homo sapiens
  misc_RNA (1)...(19): siRNA sense strand
gcuaugaucggguucucuu

SEQ ID NO: 1565825 - RNA, 19 nt, Homo sapiens
  misc_RNA (1)...(19): siRNA sense strand
auacgaauaugaacacacu

SEQ ID NO: 1565826 - RNA, 19 nt, Homo sapiens
  misc_RNA (1)...(19): siRNA sense strand
ccaugucaaucggaccuuu

SEQ ID NO: 1565827 - RNA, 19 nt, Homo sapiens
  misc_RNA (1)...(19): siRNA sense strand
agaaauagugguccagauc

SEQ ID NO: 1565828 - RNA, 19 nt, Homo sapiens
  misc_RNA (1)...(19): siRNA sense strand
auaagaccuugcuugagaa

SEQ ID NO: 1565829 - RNA, 19 nt, Homo sapiens
  misc_RNA (1)...(19): siRNA sense strand
gcacuggcgagaagaacau

SEQ ID NO: 1565830 - RNA, 19 nt, Homo sapiens
  misc_RNA (1)...(19): siRNA sense strand
cgucgccgauuacuacauc

SEQ ID NO: 1565831 - RNA, 19 nt, Homo sapiens
  misc_RNA (1)...(19): siRNA sense strand
cgucucuuaugcugguuaa

SEQ ID NO: 1565832 - RNA, 19 nt, Homo sapiens
  misc_RNA (1)...(19): siRNA sense strand
aacauggacuugcccuuca

SEQ ID NO: 1565833 - RNA, 19 nt, Homo sapiens
  misc_RNA (1)...(19): siRNA sense strand
aagaaauagugguccagau

SEQ ID NO: 1565834 - RNA, 19 nt, Homo sapiens
  misc_RNA (1)...(19): siRNA sense strand
gcagaaggugaaugaaggu

SEQ ID NO: 1565835 - RNA, 19 nt, Homo sapiens
  misc_RNA (1)...(19): siRNA sense strand
ucauugaccagauugacaa

SEQ ID NO: 1565836 - RNA, 19 nt, Homo sapiens
  misc_RNA (1)...(19): siRNA sense strand
agccugaacugcacagagu

SEQ ID NO: 1565837 - RNA, 19 nt, Homo sapiens
  misc_RNA (1)...(19): siRNA sense strand
ccucgucgccgauuacuac

SEQ ID NO: 1565838 - RNA, 19 nt, Homo sapiens
  misc_RNA (1)...(19): siRNA sense strand
acaaggcuguggccaucau

SEQ ID NO: 1565839 - RNA, 19 nt, Homo sapiens
  misc_RNA (1)...(19): siRNA sense strand
ggagcaugacauucccaaa

SEQ ID NO: 1565840 - RNA, 19 nt, Homo sapiens
  misc_RNA (1)...(19): siRNA sense strand
uaaagaauaagaccuugcu

SEQ ID NO: 1565841 - RNA, 19 nt, Homo sapiens
  misc_RNA (1)...(19): siRNA sense strand
gcuccuacuuccauuucag

SEQ ID NO: 1565842 - RNA, 19 nt, Homo sapiens
  misc_RNA (1)...(19): siRNA sense strand
cgagaagaacauggacuug

SEQ ID NO: 1565843 - RNA, 19 nt, Homo sapiens
  misc_RNA (1)...(19): siRNA sense strand
guugagcuaaagaauaaga

SEQ ID NO: 1565844 - RNA, 19 nt, Homo sapiens
  misc_RNA (1)...(19): siRNA sense strand
ccaggcaacuuguuacuaa

SEQ ID NO: 1565845 - RNA, 19 nt, Homo sapiens
  misc_RNA (1)...(19): siRNA sense strand
gguauccaguuuccacuua

SEQ ID NO: 1565846 - RNA, 19 nt, Homo sapiens
  misc_RNA (1)...(19): siRNA sense strand
cagacuaacuacauaagau

SEQ ID NO: 1565847 - RNA, 19 nt, Homo sapiens
  misc_RNA (1)...(19): siRNA sense strand
ggccuuggaucucuugguu

SEQ ID NO: 1565848 - RNA, 19 nt, Homo sapiens
  misc_RNA (1)...(19): siRNA sense strand
gcuccucucucuacaaugg

SEQ ID NO: 1565849 - RNA, 19 nt, Homo sapiens
  misc_RNA (1)...(19): siRNA sense strand
gggcuccucucucuacaau

SEQ ID NO: 1565850 - RNA, 19 nt, Homo sapiens
  misc_RNA (1)...(19): siRNA sense strand
gcacuggcuuccaaucucu

SEQ ID NO: 1565851 - RNA, 19 nt, Homo sapiens
  misc_RNA (1)...(19): siRNA sense strand
ccgccagacuaacuacaua

SEQ ID NO: 1565852 - RNA, 19 nt, Homo sapiens
  misc_RNA (1)...(19): siRNA sense strand
uauccaguuuccacuuaua

SEQ ID NO: 1565853 - RNA, 19 nt, Homo sapiens
  misc_RNA (1)...(19): siRNA sense strand
ccuaucagacauccuguua

SEQ ID NO: 1565854 - RNA, 19 nt, Homo sapiens
  misc_RNA (1)...(19): siRNA sense strand
ccagacauccugcacuuug

SEQ ID NO: 1565855 - RNA, 19 nt, Homo sapiens
  misc_RNA (1)...(19): siRNA sense strand
uaucagacauccuguuacu

SEQ ID NO: 1565856 - RNA, 19 nt, Homo sapiens
  misc_RNA (1)...(19): siRNA sense strand
cugcagcucuggaaacuuc

SEQ ID NO: 1565857 - RNA, 19 nt, Homo sapiens
  misc_RNA (1)...(19): siRNA sense strand
ggccagauccuaucagaca

SEQ ID NO: 1565858 - RNA, 19 nt, Homo sapiens
  misc_RNA (1)...(19): siRNA sense strand
uggaaacacuggccuugga

SEQ ID NO: 1565859 - RNA, 19 nt, Homo sapiens
  misc_RNA (1)...(19): siRNA sense strand
ccaguuuccacuuauaauu

SEQ ID NO: 1565860 - RNA, 19 nt, Homo sapiens
  misc_RNA (1)...(19): siRNA sense strand
gucaggagaccuacuguga

SEQ ID NO: 1565861 - RNA, 19 nt, Homo sapiens
  misc_RNA (1)...(19): siRNA sense strand
gcacuuuggccagauccua

SEQ ID NO: 1565862 - RNA, 19 nt, Homo sapiens
  misc_RNA (1)...(19): siRNA sense strand
ccagcaaugccaucuauuc

SEQ ID NO: 1565863 - RNA, 19 nt, Homo sapiens
  misc_RNA (1)...(19): siRNA sense strand
guauccaguuuccacuuau

SEQ ID NO: 1565864 - RNA, 19 nt, Homo sapiens
  misc_RNA (1)...(19): siRNA sense strand
cuacauaagaucccuugga

SEQ ID NO: 1565865 - RNA, 19 nt, Homo sapiens
  misc_RNA (1)...(19): siRNA sense strand
ugccaucuauucuccaaau

SEQ ID NO: 1565866 - RNA, 19 nt, Homo sapiens
  misc_RNA (1)...(19): siRNA sense strand
ccuuggaucucuugguugu

SEQ ID NO: 1565867 - RNA, 19 nt, Homo sapiens
  misc_RNA (1)...(19): siRNA sense strand
ggaaacacuggccuuggau

SEQ ID NO: 1565868 - RNA, 19 nt, Homo sapiens
  misc_RNA (1)...(19): siRNA sense strand
ugccagacauccugcacuu

SEQ ID NO: 1565869 - RNA, 19 nt, Homo sapiens
  misc_RNA (1)...(19): siRNA sense strand
ccagacuaacuacauaaga

SEQ ID NO: 1565870 - RNA, 19 nt, Homo sapiens
  misc_RNA (1)...(19): siRNA sense strand
gaauuuccaggcaacuugu

SEQ ID NO: 1565871 - RNA, 19 nt, Homo sapiens
  misc_RNA (1)...(19): siRNA sense strand
caacugcagcucuggaaac

SEQ ID NO: 1565872 - RNA, 19 nt, Homo sapiens
  misc_RNA (1)...(19): siRNA sense strand
acacuggccuuggaucucu

SEQ ID NO: 1565873 - RNA, 19 nt, Homo sapiens
  misc_RNA (1)...(19): siRNA sense strand
cagcaaugccaucuauucu

SEQ ID NO: 1565874 - RNA, 19 nt, Homo sapiens
  misc_RNA (1)...(19): siRNA sense strand
guuacugcccaaagaauuc

SEQ ID NO: 1565875 - RNA, 19 nt, Homo sapiens
  misc_RNA (1)...(19): siRNA sense strand
cagacauccugcacuuugg

SEQ ID NO: 1565876 - RNA, 19 nt, Homo sapiens
  misc_RNA (1)...(19): siRNA sense strand
gggccuggcugcagaaguu

SEQ ID NO: 1565877 - RNA, 19 nt, Homo sapiens
  misc_RNA (1)...(19): siRNA sense strand
cgaaugugcuggcccgaau

SEQ ID NO: 1565878 - RNA, 19 nt, Homo sapiens
  misc_RNA (1)...(19): siRNA sense strand
ugacaaggccucaguacug

SEQ ID NO: 1565879 - RNA, 19 nt, Homo sapiens
  misc_RNA (1)...(19): siRNA sense strand
gcaaccgcaucucgcaugu

SEQ ID NO: 1565880 - RNA, 19 nt, Homo sapiens
  misc_RNA (1)...(19): siRNA sense strand
caucaaugacucacccuuu

SEQ ID NO: 1565881 - RNA, 19 nt, Homo sapiens
  misc_RNA (1)...(19): siRNA sense strand
ucaugacacucuaucuguu

SEQ ID NO: 1565882 - RNA, 19 nt, Homo sapiens
  misc_RNA (1)...(19): siRNA sense strand
gcccacggcacaucaauga

SEQ ID NO: 1565883 - RNA, 19 nt, Homo sapiens
  misc_RNA (1)...(19): siRNA sense strand
caugacacucuaucuguuu

SEQ ID NO: 1565884 - RNA, 19 nt, Homo sapiens
  misc_RNA (1)...(19): siRNA sense strand
caaccucacacaccucuuc

SEQ ID NO: 1565885 - RNA, 19 nt, Homo sapiens
  misc_RNA (1)...(19): siRNA sense strand
uggcgggacuggugacuca

SEQ ID NO: 1565886 - RNA, 19 nt, Homo sapiens
  misc_RNA (1)...(19): siRNA sense strand
gaaugugcuggcccgaauu

SEQ ID NO: 1565887 - RNA, 19 nt, Homo sapiens
  misc_RNA (1)...(19): siRNA sense strand
gugcuggcccgaauugaug

SEQ ID NO: 1565888 - RNA, 19 nt, Homo sapiens
  misc_RNA (1)...(19): siRNA sense strand
aucaaugacucacccuuug

SEQ ID NO: 1565889 - RNA, 19 nt, Homo sapiens
  misc_RNA (1)...(19): siRNA sense strand
ggaccucagcgauaaugca

SEQ ID NO: 1565890 - RNA, 19 nt, Homo sapiens
  misc_RNA (1)...(19): siRNA sense strand
ggcuggccgugaccucaaa

SEQ ID NO: 1565891 - RNA, 19 nt, Homo sapiens
  misc_RNA (1)...(19): siRNA sense strand
ccucgaccgucuccuacug

SEQ ID NO: 1565892 - RNA, 19 nt, Homo sapiens
  misc_RNA (1)...(19): siRNA sense strand
cagccucgaccgucuccua

SEQ ID NO: 1565893 - RNA, 19 nt, Homo sapiens
  misc_RNA (1)...(19): siRNA sense strand
ccaggcuguucacgcaaga

SEQ ID NO: 1565894 - RNA, 19 nt, Homo sapiens
  misc_RNA (1)...(19): siRNA sense strand
cgggacuggugacucagaa

SEQ ID NO: 1565895 - RNA, 19 nt, Homo sapiens
  misc_RNA (1)...(19): siRNA sense strand
gaaggccucucaucuguuu

SEQ ID NO: 1565896 - RNA, 19 nt, Homo sapiens
  misc_RNA (1)...(19): siRNA sense strand
gggcgcaguugcuuccuaa

SEQ ID NO: 1565897 - RNA, 19 nt, Homo sapiens
  misc_RNA (1)...(19): siRNA sense strand
gaacuucagacccuuaaac

SEQ ID NO: 1565898 - RNA, 19 nt, Homo sapiens
  misc_RNA (1)...(19): siRNA sense strand
cugaaggccucucaucugu

SEQ ID NO: 1565899 - RNA, 19 nt, Homo sapiens
  misc_RNA (1)...(19): siRNA sense strand
ucucacaggccaccucuuc

SEQ ID NO: 1565900 - RNA, 19 nt, Homo sapiens
  misc_RNA (1)...(19): siRNA sense strand
ggacucugaaggccucuca

SEQ ID NO: 1565901 - RNA, 19 nt, Homo sapiens
  misc_RNA (1)...(19): siRNA sense strand
ggaggaggagcugcaggaa

SEQ ID NO: 1565902 - RNA, 19 nt, Homo sapiens
  misc_RNA (1)...(19): siRNA sense strand
ggaacuucagacccuuaaa

SEQ ID NO: 1565903 - RNA, 19 nt, Homo sapiens
  misc_RNA (1)...(19): siRNA sense strand
cagcagccacauccuagga

SEQ ID NO: 1565904 - RNA, 19 nt, Homo sapiens
  misc_RNA (1)...(19): siRNA sense strand
caagaagccuuucaaauug

SEQ ID NO: 1565905 - RNA, 19 nt, Homo sapiens
  misc_RNA (1)...(19): siRNA sense strand
gaaaagcaauggagacuua

SEQ ID NO: 1565906 - RNA, 19 nt, Homo sapiens
  misc_RNA (1)...(19): siRNA sense strand
ucaagaagccuuucaaauu

SEQ ID NO: 1565907 - RNA, 19 nt, Homo sapiens
  misc_RNA (1)...(19): siRNA sense strand
ccaagaagaagaagaaauu

SEQ ID NO: 1565908 - RNA, 19 nt, Homo sapiens
  misc_RNA (1)...(19): siRNA sense strand
gcgcugagcagaaugagua

SEQ ID NO: 1565909 - RNA, 19 nt, Homo sapiens
  misc_RNA (1)...(19): siRNA sense strand
ggagaauggccacgugaaa

SEQ ID NO: 1565910 - RNA, 19 nt, Homo sapiens
  misc_RNA (1)...(19): siRNA sense strand
cgagggcacugcucaggaa

SEQ ID NO: 1565911 - RNA, 19 nt, Homo sapiens
  misc_RNA (1)...(19): siRNA sense strand
ggccuguccuucaagagaa

SEQ ID NO: 1565912 - RNA, 19 nt, Homo sapiens
  misc_RNA (1)...(19): siRNA sense strand
ugagcggccuguccuucaa

SEQ ID NO: 1565913 - RNA, 19 nt, Homo sapiens
  misc_RNA (1)...(19): siRNA sense strand
uagugcagccucagaagaa

SEQ ID NO: 1565914 - RNA, 19 nt, Homo sapiens
  misc_RNA (1)...(19): siRNA sense strand
caagaagaagaagaaauuc

SEQ ID NO: 1565915 - RNA, 19 nt, Homo sapiens
  misc_RNA (1)...(19): siRNA sense strand
gccuguccuucaagagaaa

SEQ ID NO: 1565916 - RNA, 19 nt, Homo sapiens
  misc_RNA (1)...(19): siRNA sense strand
gagaauggccacgugaaaa

SEQ ID NO: 1565917 - RNA, 19 nt, Homo sapiens
  misc_RNA (1)...(19): siRNA sense strand
gaaggaaggugaucgauuu

SEQ ID NO: 1565918 - RNA, 19 nt, Homo sapiens
  misc_RNA (1)...(19): siRNA sense strand
caacaaauguggugugaug

SEQ ID NO: 1565919 - RNA, 19 nt, Homo sapiens
  misc_RNA (1)...(19): siRNA sense strand
uaaagucccuggagaaaga

SEQ ID NO: 1565920 - RNA, 19 nt, Homo sapiens
  misc_RNA (1)...(19): siRNA sense strand
cggaaggccucacugauua

SEQ ID NO: 1565921 - RNA, 19 nt, Homo sapiens
  misc_RNA (1)...(19): siRNA sense strand
caucaaauccucacuguuu

SEQ ID NO: 1565922 - RNA, 19 nt, Homo sapiens
  misc_RNA (1)...(19): siRNA sense strand
cagccacgaucaucaauuu

SEQ ID NO: 1565923 - RNA, 19 nt, Homo sapiens
  misc_RNA (1)...(19): siRNA sense strand
gauccuggacugugaguua

SEQ ID NO: 1565924 - RNA, 19 nt, Homo sapiens
  misc_RNA (1)...(19): siRNA sense strand
agaaugccgugaaggauuu

SEQ ID NO: 1565925 - RNA, 19 nt, Homo sapiens
  misc_RNA (1)...(19): siRNA sense strand
ggaguuugcugaaggaucu

SEQ ID NO: 1565926 - RNA, 19 nt, Homo sapiens
  misc_RNA (1)...(19): siRNA sense strand
ggaaaccuuugccaccuau

SEQ ID NO: 1565927 - RNA, 19 nt, Homo sapiens
  misc_RNA (1)...(19): siRNA sense strand
caaauguggugugauguug

SEQ ID NO: 1565928 - RNA, 19 nt, Homo sapiens
  misc_RNA (1)...(19): siRNA sense strand
ccaccuauguugcucgauu

SEQ ID NO: 1565929 - RNA, 19 nt, Homo sapiens
  misc_RNA (1)...(19): siRNA sense strand
gauaaccggccuuaccuuu

SEQ ID NO: 1565930 - RNA, 19 nt, Homo sapiens
  misc_RNA (1)...(19): siRNA sense strand
gcacugauaaccggccuua

SEQ ID NO: 1565931 - RNA, 19 nt, Homo sapiens
  misc_RNA (1)...(19): siRNA sense strand
gagaaugccgugaaggauu

SEQ ID NO: 1565932 - RNA, 19 nt, Homo sapiens
  misc_RNA (1)...(19): siRNA sense strand
ggaaggugaucgauuucau

SEQ ID NO: 1565933 - RNA, 19 nt, Homo sapiens
  misc_RNA (1)...(19): siRNA sense strand
ggccuuaccuuugcgauau

SEQ ID NO: 1565934 - RNA, 19 nt, Homo sapiens
  misc_RNA (1)...(19): siRNA sense strand
uaaugaggaugccuauaug

SEQ ID NO: 1565935 - RNA, 19 nt, Homo sapiens
  misc_RNA (1)...(19): siRNA sense strand
caggaacugucgcuuaaug

SEQ ID NO: 1565936 - RNA, 19 nt, Homo sapiens
  misc_RNA (1)...(19): siRNA sense strand
uccaggaacugucgcuuaa

SEQ ID NO: 1565937 - RNA, 19 nt, Homo sapiens
  misc_RNA (1)...(19): siRNA sense strand
caaaagggguccuggaguu

SEQ ID NO: 1565938 - RNA, 19 nt, Homo sapiens
  misc_RNA (1)...(19): siRNA sense strand
cagauucgaggcaacaaua

SEQ ID NO: 1565939 - RNA, 19 nt, Homo sapiens
  misc_RNA (1)...(19): siRNA sense strand
uuaaugaggaugccuauau

SEQ ID NO: 1565940 - RNA, 19 nt, Homo sapiens
  misc_RNA (1)...(19): siRNA sense strand
acucugaucuggugcaaga

SEQ ID NO: 1565941 - RNA, 19 nt, Homo sapiens
  misc_RNA (1)...(19): siRNA sense strand
gcuaaagucccuggagaaa

SEQ ID NO: 1565942 - RNA, 19 nt, Homo sapiens
  misc_RNA (1)...(19): siRNA sense strand
ggaacaauacggagaccuu

SEQ ID NO: 1565943 - RNA, 19 nt, Homo sapiens
  misc_RNA (1)...(19): siRNA sense strand
ugucgaaaguccuacgauu

SEQ ID NO: 1565944 - RNA, 19 nt, Homo sapiens
  misc_RNA (1)...(19): siRNA sense strand
ccucacugauuacagcuuu

SEQ ID NO: 1565945 - RNA, 19 nt, Homo sapiens
  misc_RNA (1)...(19): siRNA sense strand
gaugaggccacacugcaaa

SEQ ID NO: 1565946 - RNA, 19 nt, Homo sapiens
  misc_RNA (1)...(19): siRNA sense strand
ggagcggaauguggaaguu

SEQ ID NO: 1565947 - RNA, 19 nt, Homo sapiens
  misc_RNA (1)...(19): siRNA sense strand
ggugugauguugcaaacuc

SEQ ID NO: 1565948 - RNA, 19 nt, Homo sapiens
  misc_RNA (1)...(19): siRNA sense strand
gguagagaaugccgugaag

SEQ ID NO: 1565949 - RNA, 19 nt, Homo sapiens
  misc_RNA (1)...(19): siRNA sense strand
cgaaggaaggugaucgauu

SEQ ID NO: 1565950 - RNA, 19 nt, Homo sapiens
  misc_RNA (1)...(19): siRNA sense strand
gaaggugaucgauuucauc

SEQ ID NO: 1565951 - RNA, 19 nt, Homo sapiens
  misc_RNA (1)...(19): siRNA sense strand
uaaccggccuuaccuuugc

SEQ ID NO: 1565952 - RNA, 19 nt, Homo sapiens
  misc_RNA (1)...(19): siRNA sense strand
ucaaauggaagacaugauc

SEQ ID NO: 1565953 - RNA, 19 nt, Homo sapiens
  misc_RNA (1)...(19): siRNA sense strand
ugaaggagcuauuuuggau

SEQ ID NO: 1565954 - RNA, 19 nt, Homo sapiens
  misc_RNA (1)...(19): siRNA sense strand
gauggaaaggguagagaau

SEQ ID NO: 1565955 - RNA, 19 nt, Homo sapiens
  misc_RNA (1)...(19): siRNA sense strand
ucggaaggccucacugauu

SEQ ID NO: 1565956 - RNA, 19 nt, Homo sapiens
  misc_RNA (1)...(19): siRNA sense strand
gagguucacgcuugucgaa

SEQ ID NO: 1565957 - RNA, 19 nt, Homo sapiens
  misc_RNA (1)...(19): siRNA sense strand
gaucugcggcucccuagca

SEQ ID NO: 1565958 - RNA, 19 nt, Homo sapiens
  misc_RNA (1)...(19): siRNA sense strand
aaggcgaucucuuugugaa

SEQ ID NO: 1565959 - RNA, 19 nt, Homo sapiens
  misc_RNA (1)...(19): siRNA sense strand
aaaggagguucacgcuugu

SEQ ID NO: 1565960 - RNA, 19 nt, Homo sapiens
  misc_RNA (1)...(19): siRNA sense strand
cuauguugcucgauuccaa

SEQ ID NO: 1565961 - RNA, 19 nt, Homo sapiens
  misc_RNA (1)...(19): siRNA sense strand
acaugauccuggacuguga

SEQ ID NO: 1565962 - RNA, 19 nt, Homo sapiens
  misc_RNA (1)...(19): siRNA sense strand
gguucacgcuugucgaaag

SEQ ID NO: 1565963 - RNA, 19 nt, Homo sapiens
  misc_RNA (1)...(19): siRNA sense strand
uagagaaugccgugaagga

SEQ ID NO: 1565964 - RNA, 19 nt, Homo sapiens
  misc_RNA (1)...(19): siRNA sense strand
caugguggguccagaggau

SEQ ID NO: 1565965 - RNA, 19 nt, Homo sapiens
  misc_RNA (1)...(19): siRNA sense strand
cccaacaaaugugguguga

SEQ ID NO: 1565966 - RNA, 19 nt, Homo sapiens
  misc_RNA (1)...(19): siRNA sense strand
ccacggagucguccauaag

SEQ ID NO: 1565967 - RNA, 19 nt, Homo sapiens
  misc_RNA (1)...(19): siRNA sense strand
gucgaaaguccuacgauug

SEQ ID NO: 1565968 - RNA, 19 nt, Homo sapiens
  misc_RNA (1)...(19): siRNA sense strand
acaaauguggugugauguu

SEQ ID NO: 1565969 - RNA, 19 nt, Homo sapiens
  misc_RNA (1)...(19): siRNA sense strand
aggaaaccuuugccaccua

SEQ ID NO: 1565970 - RNA, 19 nt, Homo sapiens
  misc_RNA (1)...(19): siRNA sense strand
caaaagaaaaggccacaga

SEQ ID NO: 1565971 - RNA, 19 nt, Homo sapiens
  misc_RNA (1)...(19): siRNA sense strand
uggaaaggguagagaaugc

SEQ ID NO: 1565972 - RNA, 19 nt, Homo sapiens
  misc_RNA (1)...(19): siRNA sense strand
gcuggccgguugcuugcuu

SEQ ID NO: 1565973 - RNA, 19 nt, Homo sapiens
  misc_RNA (1)...(19): siRNA sense strand
ggaacugucgcuuaaugag

SEQ ID NO: 1565974 - RNA, 19 nt, Homo sapiens
  misc_RNA (1)...(19): siRNA sense strand
guucacgcuugucgaaagu

SEQ ID NO: 1565975 - RNA, 19 nt, Homo sapiens
  misc_RNA (1)...(19): siRNA sense strand
aaacccaggucccaaaaga

SEQ ID NO: 1565976 - RNA, 19 nt, Homo sapiens
  misc_RNA (1)...(19): siRNA sense strand
cacagacagugauguaaaa

SEQ ID NO: 1565977 - RNA, 19 nt, Homo sapiens
  misc_RNA (1)...(19): siRNA sense strand
ggguagagaaugccgugaa

SEQ ID NO: 1565978 - RNA, 19 nt, Homo sapiens
  misc_RNA (1)...(19): siRNA sense strand
caccuauguugcucgauuc

SEQ ID NO: 1565979 - RNA, 19 nt, Homo sapiens
  misc_RNA (1)...(19): siRNA sense strand
gccuuaccuuugcgauauu

SEQ ID NO: 1565980 - RNA, 19 nt, Homo sapiens
  misc_RNA (1)...(19): siRNA sense strand
gcgaucucuuugugaagga

SEQ ID NO: 1565981 - RNA, 19 nt, Homo sapiens
  misc_RNA (1)...(19): siRNA sense strand
gaccacggagucguccaua

SEQ ID NO: 1565982 - RNA, 19 nt, Homo sapiens
  misc_RNA (1)...(19): siRNA sense strand
gaaacgcaucacagacagu

SEQ ID NO: 1565983 - RNA, 19 nt, Homo sapiens
  misc_RNA (1)...(19): siRNA sense strand
ccacagauucgaggcaaca

SEQ ID NO: 1565984 - RNA, 19 nt, Homo sapiens
  misc_RNA (1)...(19): siRNA sense strand
gaaggccucacugauuaca

SEQ ID NO: 1565985 - RNA, 19 nt, Homo sapiens
  misc_RNA (1)...(19): siRNA sense strand
aaacucugaucuggugcaa

SEQ ID NO: 1565986 - RNA, 19 nt, Homo sapiens
  misc_RNA (1)...(19): siRNA sense strand
cgagggguguguuauaugu

SEQ ID NO: 1565987 - RNA, 19 nt, Homo sapiens
  misc_RNA (1)...(19): siRNA sense strand
ggagcuauuuuggauguug

SEQ ID NO: 1565988 - RNA, 19 nt, Homo sapiens
  misc_RNA (1)...(19): siRNA sense strand
ccuuaccuuugcgauauuu

SEQ ID NO: 1565989 - RNA, 19 nt, Homo sapiens
  misc_RNA (1)...(19): siRNA sense strand
ucacaguguugcccaaaau

SEQ ID NO: 1565990 - RNA, 19 nt, Homo sapiens
  misc_RNA (1)...(19): siRNA sense strand
ccacuacgcucgcaacuua

SEQ ID NO: 1565991 - RNA, 19 nt, Homo sapiens
  misc_RNA (1)...(19): siRNA sense strand
gggcacggauagagaaaua

SEQ ID NO: 1565992 - RNA, 19 nt, Homo sapiens
  misc_RNA (1)...(19): siRNA sense strand
ggacugggcucucuauguc

SEQ ID NO: 1565993 - RNA, 19 nt, Homo sapiens
  misc_RNA (1)...(19): siRNA sense strand
gaucaucgcagccagauau

SEQ ID NO: 1565994 - RNA, 19 nt, Homo sapiens
  misc_RNA (1)...(19): siRNA sense strand
cgacugguguuccugaaga

SEQ ID NO: 1565995 - RNA, 19 nt, Homo sapiens
  misc_RNA (1)...(19): siRNA sense strand
gagaggcccuagcgaaaca

SEQ ID NO: 1565996 - RNA, 19 nt, Homo sapiens
  misc_RNA (1)...(19): siRNA sense strand
cauccuguuuccacuguua

SEQ ID NO: 1565997 - RNA, 19 nt, Homo sapiens
  misc_RNA (1)...(19): siRNA sense strand
uaucaagcccugccucuuu

SEQ ID NO: 1565998 - RNA, 19 nt, Homo sapiens
  misc_RNA (1)...(19): siRNA sense strand
gcucugccuucuccuacua

SEQ ID NO: 1565999 - RNA, 19 nt, Homo sapiens
  misc_RNA (1)...(19): siRNA sense strand
gcaacuuacuaugguuuga

SEQ ID NO: 1566000 - RNA, 19 nt, Homo sapiens
  misc_RNA (1)...(19): siRNA sense strand
gccaagagagggaauauuc

SEQ ID NO: 1566001 - RNA, 19 nt, Homo sapiens
  misc_RNA (1)...(19): siRNA sense strand
gcucgcaacuuacuauggu

SEQ ID NO: 1566002 - RNA, 19 nt, Homo sapiens
  misc_RNA (1)...(19): siRNA sense strand
gaaugugagcgccuagcua

SEQ ID NO: 1566003 - RNA, 19 nt, Homo sapiens
  misc_RNA (1)...(19): siRNA sense strand
caugguggcugaguacuuc

SEQ ID NO: 1566004 - RNA, 19 nt, Homo sapiens
  misc_RNA (1)...(19): siRNA sense strand
gcucugggagucuucauga

SEQ ID NO: 1566005 - RNA, 19 nt, Homo sapiens
  misc_RNA (1)...(19): siRNA sense strand
agcgaaacauugucuggua

SEQ ID NO: 1566006 - RNA, 19 nt, Homo sapiens
  misc_RNA (1)...(19): siRNA sense strand
gcccucauccauccuguuu

SEQ ID NO: 1566007 - RNA, 19 nt, Homo sapiens
  misc_RNA (1)...(19): siRNA sense strand
uuccaggccucuaggguaa

SEQ ID NO: 1566008 - RNA, 19 nt, Homo sapiens
  misc_RNA (1)...(19): siRNA sense strand
caagagagggaauauucau

SEQ ID NO: 1566009 - RNA, 19 nt, Homo sapiens
  misc_RNA (1)...(19): siRNA sense strand
gagccugcuucaccgcuau

SEQ ID NO: 1566010 - RNA, 19 nt, Homo sapiens
  misc_RNA (1)...(19): siRNA sense strand
cauccucugucaccacaug

SEQ ID NO: 1566011 - RNA, 19 nt, Homo sapiens
  misc_RNA (1)...(19): siRNA sense strand
cuauaaauccaccucauca

SEQ ID NO: 1566012 - RNA, 19 nt, Homo sapiens
  misc_RNA (1)...(19): siRNA sense strand
caaggccacucuccccaua

SEQ ID NO: 1566013 - RNA, 19 nt, Homo sapiens
  misc_RNA (1)...(19): siRNA sense strand
ggagucuucaugaccauug

SEQ ID NO: 1566014 - RNA, 19 nt, Homo sapiens
  misc_RNA (1)...(19): siRNA sense strand
ccgagaggcccuagcgaaa

SEQ ID NO: 1566015 - RNA, 19 nt, Homo sapiens
  misc_RNA (1)...(19): siRNA sense strand
uuacuaugguuugacuuug

SEQ ID NO: 1566016 - RNA, 19 nt, Homo sapiens
  misc_RNA (1)...(19): siRNA sense strand
caucgcagccagauaucaa

SEQ ID NO: 1566017 - RNA, 19 nt, Homo sapiens
  misc_RNA (1)...(19): siRNA sense strand
ccaagagagggaauauuca

SEQ ID NO: 1566018 - RNA, 19 nt, Homo sapiens
  misc_RNA (1)...(19): siRNA sense strand
gcuggacucugucuuugac

SEQ ID NO: 1566019 - RNA, 19 nt, Homo sapiens
  misc_RNA (1)...(19): siRNA sense strand
gcuuugcacuccagcucuu

SEQ ID NO: 1566020 - RNA, 19 nt, Homo sapiens
  misc_RNA (1)...(19): siRNA sense strand
gcugaguacuucgaugagu

SEQ ID NO: 1566021 - RNA, 19 nt, Homo sapiens
  misc_RNA (1)...(19): siRNA sense strand
cuucaugaccauuggcuuu

SEQ ID NO: 1566022 - RNA, 19 nt, Homo sapiens
  misc_RNA (1)...(19): siRNA sense strand
ccgcaagucaccaucuuug

SEQ ID NO: 1566023 - RNA, 19 nt, Homo sapiens
  misc_RNA (1)...(19): siRNA sense strand
cugcaggucuugccuucug

SEQ ID NO: 1566024 - RNA, 19 nt, Homo sapiens
  misc_RNA (1)...(19): siRNA sense strand
ugccuucuccuacuauaaa

SEQ ID NO: 1566025 - RNA, 19 nt, Homo sapiens
  misc_RNA (1)...(19): siRNA sense strand
uggcuggacucugucuuug

SEQ ID NO: 1566026 - RNA, 19 nt, Homo sapiens
  misc_RNA (1)...(19): siRNA sense strand
gcccugccucuuucgauuu

SEQ ID NO: 1566027 - RNA, 19 nt, Homo sapiens
  misc_RNA (1)...(19): siRNA sense strand
gaggcuaccugggcuacag

SEQ ID NO: 1566028 - RNA, 19 nt, Homo sapiens
  misc_RNA (1)...(19): siRNA sense strand
guacaaggacaagcuggau

SEQ ID NO: 1566029 - RNA, 19 nt, Homo sapiens
  misc_RNA (1)...(19): siRNA sense strand
agagguacuucaggucaug

SEQ ID NO: 1566030 - RNA, 19 nt, Homo sapiens
  misc_RNA (1)...(19): siRNA sense strand
ccccugagcuccaguacaa

SEQ ID NO: 1566031 - RNA, 19 nt, Homo sapiens
  misc_RNA (1)...(19): siRNA sense strand
cagagaagagggccaagag

SEQ ID NO: 1566032 - RNA, 19 nt, Homo sapiens
  misc_RNA (1)...(19): siRNA sense strand
cuuacuaugguuugacuuu

SEQ ID NO: 1566033 - RNA, 19 nt, Homo sapiens
  misc_RNA (1)...(19): siRNA sense strand
gacuuuggccugcccuuuc

SEQ ID NO: 1566034 - RNA, 19 nt, Homo sapiens
  misc_RNA (1)...(19): siRNA sense strand
gcuaagguuuugggcuaua

SEQ ID NO: 1566035 - RNA, 19 nt, Homo sapiens
  misc_RNA (1)...(19): siRNA sense strand
uggcugaguacuucgauga

SEQ ID NO: 1566036 - RNA, 19 nt, Homo sapiens
  misc_RNA (1)...(19): siRNA sense strand
gcugagggcuuuacagaaa

SEQ ID NO: 1566037 - RNA, 19 nt, Homo sapiens
  misc_RNA (1)...(19): siRNA sense strand
uagaacaucucaccaauga

SEQ ID NO: 1566038 - RNA, 19 nt, Homo sapiens
  misc_RNA (1)...(19): siRNA sense strand
gaaauucacugaggccuau

SEQ ID NO: 1566039 - RNA, 19 nt, Homo sapiens
  misc_RNA (1)...(19): siRNA sense strand
gcagaaauauguaugucuu

SEQ ID NO: 1566040 - RNA, 19 nt, Homo sapiens
  misc_RNA (1)...(19): siRNA sense strand
ggacagggcucaaggacau

SEQ ID NO: 1566041 - RNA, 19 nt, Homo sapiens
  misc_RNA (1)...(19): siRNA sense strand
ggaaagagaagacugauca

SEQ ID NO: 1566042 - RNA, 19 nt, Homo sapiens
  misc_RNA (1)...(19): siRNA sense strand
aaacagguaucucgugauu

SEQ ID NO: 1566043 - RNA, 19 nt, Homo sapiens
  misc_RNA (1)...(19): siRNA sense strand
gaaggaauuugaucauagu

SEQ ID NO: 1566044 - RNA, 19 nt, Homo sapiens
  misc_RNA (1)...(19): siRNA sense strand
ucacauugauucccuuauu

SEQ ID NO: 1566045 - RNA, 19 nt, Homo sapiens
  misc_RNA (1)...(19): siRNA sense strand
ggaagacugggacuuguua

SEQ ID NO: 1566046 - RNA, 19 nt, Homo sapiens
  misc_RNA (1)...(19): siRNA sense strand
gaagcggucucgagcagaa

SEQ ID NO: 1566047 - RNA, 19 nt, Homo sapiens
  misc_RNA (1)...(19): siRNA sense strand
caugaacucuuccgagaaa

SEQ ID NO: 1566048 - RNA, 19 nt, Homo sapiens
  misc_RNA (1)...(19): siRNA sense strand
gaagacugaucauuucauc

SEQ ID NO: 1566049 - RNA, 19 nt, Homo sapiens
  misc_RNA (1)...(19): siRNA sense strand
gaagcccugucuaguguaa

SEQ ID NO: 1566050 - RNA, 19 nt, Homo sapiens
  misc_RNA (1)...(19): siRNA sense strand
ggauaccucuuuucuuuua

SEQ ID NO: 1566051 - RNA, 19 nt, Homo sapiens
  misc_RNA (1)...(19): siRNA sense strand
cagaauaacucuucacaac

SEQ ID NO: 1566052 - RNA, 19 nt, Homo sapiens
  misc_RNA (1)...(19): siRNA sense strand
gaacaucucaccaaugaag

SEQ ID NO: 1566053 - RNA, 19 nt, Homo sapiens
  misc_RNA (1)...(19): siRNA sense strand
ccugaaggauaauuguuua

SEQ ID NO: 1566054 - RNA, 19 nt, Homo sapiens
  misc_RNA (1)...(19): siRNA sense strand
gaagaugacagcaccaguu

SEQ ID NO: 1566055 - RNA, 19 nt, Homo sapiens
  misc_RNA (1)...(19): siRNA sense strand
gacugggacuuguuaaauu

SEQ ID NO: 1566056 - RNA, 19 nt, Homo sapiens
  misc_RNA (1)...(19): siRNA sense strand
uugaggagauuaagucuuu

SEQ ID NO: 1566057 - RNA, 19 nt, Homo sapiens
  misc_RNA (1)...(19): siRNA sense strand
gaauaacucuucacaaccu

SEQ ID NO: 1566058 - RNA, 19 nt, Homo sapiens
  misc_RNA (1)...(19): siRNA sense strand
agagaagacugaucauuuc

SEQ ID NO: 1566059 - RNA, 19 nt, Homo sapiens
  misc_RNA (1)...(19): siRNA sense strand
aaagaggccuugagaaucu

SEQ ID NO: 1566060 - RNA, 19 nt, Homo sapiens
  misc_RNA (1)...(19): siRNA sense strand
acagguaucucgugauuuc

SEQ ID NO: 1566061 - RNA, 19 nt, Homo sapiens
  misc_RNA (1)...(19): siRNA sense strand
gaaaagaggccuugagaau

SEQ ID NO: 1566062 - RNA, 19 nt, Homo sapiens
  misc_RNA (1)...(19): siRNA sense strand
ugaaggaauuugaucauag

SEQ ID NO: 1566063 - RNA, 19 nt, Homo sapiens
  misc_RNA (1)...(19): siRNA sense strand
aagagaagacugaucauuu

SEQ ID NO: 1566064 - RNA, 19 nt, Homo sapiens
  misc_RNA (1)...(19): siRNA sense strand
gugcagggcugagggcuuu

SEQ ID NO: 1566065 - RNA, 19 nt, Homo sapiens
  misc_RNA (1)...(19): siRNA sense strand
ccuugagaaucuaacauua

SEQ ID NO: 1566066 - RNA, 19 nt, Homo sapiens
  misc_RNA (1)...(19): siRNA sense strand
ggaauuugaucauaguaac

SEQ ID NO: 1566067 - RNA, 19 nt, Homo sapiens
  misc_RNA (1)...(19): siRNA sense strand
agacgacacugcacggaaa

SEQ ID NO: 1566068 - RNA, 19 nt, Homo sapiens
  misc_RNA (1)...(19): siRNA sense strand
gaaacacgaagcuaucuca

SEQ ID NO: 1566069 - RNA, 19 nt, Homo sapiens
  misc_RNA (1)...(19): siRNA sense strand
gccuggaucuuuccuguug

SEQ ID NO: 1566070 - RNA, 19 nt, Homo sapiens
  misc_RNA (1)...(19): siRNA sense strand
gcaugaacuucuagaacau

SEQ ID NO: 1566071 - RNA, 19 nt, Homo sapiens
  misc_RNA (1)...(19): siRNA sense strand
cuucaaagcagaaauaugu

SEQ ID NO: 1566072 - RNA, 19 nt, Homo sapiens
  misc_RNA (1)...(19): siRNA sense strand
caaagaagagcaagaagag

SEQ ID NO: 1566073 - RNA, 19 nt, Homo sapiens
  misc_RNA (1)...(19): siRNA sense strand
guugcaagcuuggagauga

SEQ ID NO: 1566074 - RNA, 19 nt, Homo sapiens
  misc_RNA (1)...(19): siRNA sense strand
gaucauaguaacugcaaga

SEQ ID NO: 1566075 - RNA, 19 nt, Homo sapiens
  misc_RNA (1)...(19): siRNA sense strand
gcuguucucugcugcugaa

SEQ ID NO: 1566076 - RNA, 19 nt, Homo sapiens
  misc_RNA (1)...(19): siRNA sense strand
gaacuucuagaacaucuca

SEQ ID NO: 1566077 - RNA, 19 nt, Homo sapiens
  misc_RNA (1)...(19): siRNA sense strand
gagaugagcaugaacuucu

SEQ ID NO: 1566078 - RNA, 19 nt, Homo sapiens
  misc_RNA (1)...(19): siRNA sense strand
cagaaaagcuugaggagau

SEQ ID NO: 1566079 - RNA, 19 nt, Homo sapiens
  misc_RNA (1)...(19): siRNA sense strand
gaacagggaagacgacacu

SEQ ID NO: 1566080 - RNA, 19 nt, Homo sapiens
  misc_RNA (1)...(19): siRNA sense strand
ucaaagaagagcaagaaga

SEQ ID NO: 1566081 - RNA, 19 nt, Homo sapiens
  misc_RNA (1)...(19): siRNA sense strand
cacauugauucccuuauug

SEQ ID NO: 1566082 - RNA, 19 nt, Homo sapiens
  misc_RNA (1)...(19): siRNA sense strand
ucagagacagaacagaaua

SEQ ID NO: 1566083 - RNA, 19 nt, Homo sapiens
  misc_RNA (1)...(19): siRNA sense strand
gaagccagacagaaauuca

SEQ ID NO: 1566084 - RNA, 19 nt, Homo sapiens
  misc_RNA (1)...(19): siRNA sense strand
ccaaggccuuucagacugu

SEQ ID NO: 1566085 - RNA, 19 nt, Homo sapiens
  misc_RNA (1)...(19): siRNA sense strand
cagaacagaauaacucuuc

SEQ ID NO: 1566086 - RNA, 19 nt, Homo sapiens
  misc_RNA (1)...(19): siRNA sense strand
ccaaugaagcccugucuag

SEQ ID NO: 1566087 - RNA, 19 nt, Homo sapiens
  misc_RNA (1)...(19): siRNA sense strand
gggcugagggcuuuacaga

SEQ ID NO: 1566088 - RNA, 19 nt, Homo sapiens
  misc_RNA (1)...(19): siRNA sense strand
gcuuggagaugagcaugaa

SEQ ID NO: 1566089 - RNA, 19 nt, Homo sapiens
  misc_RNA (1)...(19): siRNA sense strand
ugaccugccuggaucuuuc

SEQ ID NO: 1566090 - RNA, 19 nt, Homo sapiens
  misc_RNA (1)...(19): siRNA sense strand
gugcuuugcucccuguguu

SEQ ID NO: 1566091 - RNA, 19 nt, Homo sapiens
  misc_RNA (1)...(19): siRNA sense strand
uauggaaguuuggugcuuu

SEQ ID NO: 1566092 - RNA, 19 nt, Homo sapiens
  misc_RNA (1)...(19): siRNA sense strand
ugagggcuuuacagaaauu

SEQ ID NO: 1566093 - RNA, 19 nt, Homo sapiens
  misc_RNA (1)...(19): siRNA sense strand
cauuucaucuucacauaca

SEQ ID NO: 1566094 - RNA, 19 nt, Homo sapiens
  misc_RNA (1)...(19): siRNA sense strand
gaagacugggacuuguuaa

SEQ ID NO: 1566095 - RNA, 19 nt, Homo sapiens
  misc_RNA (1)...(19): siRNA sense strand
ccagacagaaauucacuga

SEQ ID NO: 1566096 - RNA, 19 nt, Homo sapiens
  misc_RNA (1)...(19): siRNA sense strand
gagaagacugaucauuuca

SEQ ID NO: 1566097 - RNA, 19 nt, Homo sapiens
  misc_RNA (1)...(19): siRNA sense strand
caaagcagaaauauguaug

SEQ ID NO: 1566098 - RNA, 19 nt, Homo sapiens
  misc_RNA (1)...(19): siRNA sense strand
gaugacagcaccaguucga

SEQ ID NO: 1566099 - RNA, 19 nt, Homo sapiens
  misc_RNA (1)...(19): siRNA sense strand
ucuagaacaucucaccaau

SEQ ID NO: 1566100 - RNA, 19 nt, Homo sapiens
  misc_RNA (1)...(19): siRNA sense strand
agacugaucauuucaucuu

SEQ ID NO: 1566101 - RNA, 19 nt, Homo sapiens
  misc_RNA (1)...(19): siRNA sense strand
gagcaugaacuucuagaac

SEQ ID NO: 1566102 - RNA, 19 nt, Homo sapiens
  misc_RNA (1)...(19): siRNA sense strand
agacagaacagaauaacuc

SEQ ID NO: 1566103 - RNA, 19 nt, Homo sapiens
  misc_RNA (1)...(19): siRNA sense strand
cagcuccaccugaaggaua

SEQ ID NO: 1566104 - RNA, 19 nt, Homo sapiens
  misc_RNA (1)...(19): siRNA sense strand
gguaucucgugauuucaga

SEQ ID NO: 1566105 - RNA, 19 nt, Homo sapiens
  misc_RNA (1)...(19): siRNA sense strand
agaugagcaugaacuucua

SEQ ID NO: 1566106 - RNA, 19 nt, Homo sapiens
  misc_RNA (1)...(19): siRNA sense strand
cagagacagaacagaauaa

SEQ ID NO: 1566107 - RNA, 19 nt, Homo sapiens
  misc_RNA (1)...(19): siRNA sense strand
caagccaggagucaaagaa

SEQ ID NO: 1566108 - RNA, 19 nt, Homo sapiens
  misc_RNA (1)...(19): siRNA sense strand
agcaugaacuucuagaaca

SEQ ID NO: 1566109 - RNA, 19 nt, Homo sapiens
  misc_RNA (1)...(19): siRNA sense strand
aaagagaagacugaucauu

SEQ ID NO: 1566110 - RNA, 19 nt, Homo sapiens
  misc_RNA (1)...(19): siRNA sense strand
uuggauaccucuuuucuuu

SEQ ID NO: 1566111 - RNA, 19 nt, Homo sapiens
  misc_RNA (1)...(19): siRNA sense strand
gcaagaagagaccuuuuga

SEQ ID NO: 1566112 - RNA, 19 nt, Homo sapiens
  misc_RNA (1)...(19): siRNA sense strand
acacccacaugaacucuuc

SEQ ID NO: 1566113 - RNA, 19 nt, Homo sapiens
  misc_RNA (1)...(19): siRNA sense strand
gaucauuucaucuucacau

SEQ ID NO: 1566114 - RNA, 19 nt, Homo sapiens
  misc_RNA (1)...(19): siRNA sense strand
gaagccaaggccuuucaga

SEQ ID NO: 1566115 - RNA, 19 nt, Homo sapiens
  misc_RNA (1)...(19): siRNA sense strand
gcugaagccagacagaaau

SEQ ID NO: 1566116 - RNA, 19 nt, Homo sapiens
  misc_RNA (1)...(19): siRNA sense strand
gguuucaucuccgacaaug

SEQ ID NO: 1566117 - RNA, 19 nt, Homo sapiens
  misc_RNA (1)...(19): siRNA sense strand
ugaggccuauggaaguuug

SEQ ID NO: 1566118 - RNA, 19 nt, Homo sapiens
  misc_RNA (1)...(19): siRNA sense strand
gggacuuguuaaauuccua

SEQ ID NO: 1566119 - RNA, 19 nt, Homo sapiens
  misc_RNA (1)...(19): siRNA sense strand
gcagacacccacaugaacu

SEQ ID NO: 1566120 - RNA, 19 nt, Homo sapiens
  misc_RNA (1)...(19): siRNA sense strand
augaagcccugucuagugu

SEQ ID NO: 1566121 - RNA, 19 nt, Homo sapiens
  misc_RNA (1)...(19): siRNA sense strand
ggacuuguuaaauuccuau

SEQ ID NO: 1566122 - RNA, 19 nt, Homo sapiens
  misc_RNA (1)...(19): siRNA sense strand
acugggacuuguuaaauuc

SEQ ID NO: 1566123 - RNA, 19 nt, Homo sapiens
  misc_RNA (1)...(19): siRNA sense strand
gaaagagaagacugaucau

SEQ ID NO: 1566124 - RNA, 19 nt, Homo sapiens
  misc_RNA (1)...(19): siRNA sense strand
cagcucagcgcuucuaugg

SEQ ID NO: 1566125 - RNA, 19 nt, Homo sapiens
  misc_RNA (1)...(19): siRNA sense strand
ccacauaggccuuguucac

SEQ ID NO: 1566126 - RNA, 19 nt, Homo sapiens
  misc_RNA (1)...(19): siRNA sense strand
uaggaaacuaaacugcuua

SEQ ID NO: 1566127 - RNA, 19 nt, Homo sapiens
  misc_RNA (1)...(19): siRNA sense strand
ucucaagccaggagucaaa

SEQ ID NO: 1566128 - RNA, 19 nt, Homo sapiens
  misc_RNA (1)...(19): siRNA sense strand
ggagaugagcaugaacuuc

SEQ ID NO: 1566129 - RNA, 19 nt, Homo sapiens
  misc_RNA (1)...(19): siRNA sense strand
gccaugggccaguguugaa

SEQ ID NO: 1566130 - RNA, 19 nt, Homo sapiens
  misc_RNA (1)...(19): siRNA sense strand
gccuugagaaucuaacauu

SEQ ID NO: 1566131 - RNA, 19 nt, Homo sapiens
  misc_RNA (1)...(19): siRNA sense strand
acacugcacggaaagagaa

SEQ ID NO: 1566132 - RNA, 19 nt, Homo sapiens
  misc_RNA (1)...(19): siRNA sense strand
uggcagacacccacaugaa

SEQ ID NO: 1566133 - RNA, 19 nt, Homo sapiens
  misc_RNA (1)...(19): siRNA sense strand
agacugggacuuguuaaau

SEQ ID NO: 1566134 - RNA, 19 nt, Homo sapiens
  misc_RNA (1)...(19): siRNA sense strand
aaccuucaaagcagaaaua

SEQ ID NO: 1566135 - RNA, 19 nt, Homo sapiens
  misc_RNA (1)...(19): siRNA sense strand
agucagagacagaacagaa

SEQ ID NO: 1566136 - RNA, 19 nt, Homo sapiens
  misc_RNA (1)...(19): siRNA sense strand
caggauagcuuuaugaauu

SEQ ID NO: 1566137 - RNA, 19 nt, Homo sapiens
  misc_RNA (1)...(19): siRNA sense strand
gaaggcaggugcagguaaa

SEQ ID NO: 1566138 - RNA, 19 nt, Homo sapiens
  misc_RNA (1)...(19): siRNA sense strand
gcgcuuggcuuuauucaug

SEQ ID NO: 1566139 - RNA, 19 nt, Homo sapiens
  misc_RNA (1)...(19): siRNA sense strand
gcaucuaccuucauggaaa

SEQ ID NO: 1566140 - RNA, 19 nt, Homo sapiens
  misc_RNA (1)...(19): siRNA sense strand
gaauaagcaacgccuguua

SEQ ID NO: 1566141 - RNA, 19 nt, Homo sapiens
  misc_RNA (1)...(19): siRNA sense strand
caucaucaaugguuccuuu

SEQ ID NO: 1566142 - RNA, 19 nt, Homo sapiens
  misc_RNA (1)...(19): siRNA sense strand
caacgccuguuaaaugaaa

SEQ ID NO: 1566143 - RNA, 19 nt, Homo sapiens
  misc_RNA (1)...(19): siRNA sense strand
ggaccugaguuauaacaga

SEQ ID NO: 1566144 - RNA, 19 nt, Homo sapiens
  misc_RNA (1)...(19): siRNA sense strand
caagacagguaaugcaaau

SEQ ID NO: 1566145 - RNA, 19 nt, Homo sapiens
  misc_RNA (1)...(19): siRNA sense strand
caauggaagucugguuaua

SEQ ID NO: 1566146 - RNA, 19 nt, Homo sapiens
  misc_RNA (1)...(19): siRNA sense strand
gacuggaccugaguuauaa

SEQ ID NO: 1566147 - RNA, 19 nt, Homo sapiens
  misc_RNA (1)...(19): siRNA sense strand
cagaaacucuacuuaagug

SEQ ID NO: 1566148 - RNA, 19 nt, Homo sapiens
  misc_RNA (1)...(19): siRNA sense strand
gaaacccauuugucuguga

SEQ ID NO: 1566149 - RNA, 19 nt, Homo sapiens
  misc_RNA (1)...(19): siRNA sense strand
gaccugaguuauaacagaa

SEQ ID NO: 1566150 - RNA, 19 nt, Homo sapiens
  misc_RNA (1)...(19): siRNA sense strand
caaugcaccacauaaauuu

SEQ ID NO: 1566151 - RNA, 19 nt, Homo sapiens
  misc_RNA (1)...(19): siRNA sense strand
ggaagucugguuauagaaa

SEQ ID NO: 1566152 - RNA, 19 nt, Homo sapiens
  misc_RNA (1)...(19): siRNA sense strand
ccaaugcaccacauaaauu

SEQ ID NO: 1566153 - RNA, 19 nt, Homo sapiens
  misc_RNA (1)...(19): siRNA sense strand
ucacauauccuaucucgau

SEQ ID NO: 1566154 - RNA, 19 nt, Homo sapiens
  misc_RNA (1)...(19): siRNA sense strand
uaaauuuagugccaggaaa

SEQ ID NO: 1566155 - RNA, 19 nt, Homo sapiens
  misc_RNA (1)...(19): siRNA sense strand
gcagaaacucuacuuaagu

SEQ ID NO: 1566156 - RNA, 19 nt, Homo sapiens
  misc_RNA (1)...(19): siRNA sense strand
agacuggaccugaguuaua

SEQ ID NO: 1566157 - RNA, 19 nt, Homo sapiens
  misc_RNA (1)...(19): siRNA sense strand
gaagucugguuauagaaag

SEQ ID NO: 1566158 - RNA, 19 nt, Homo sapiens
  misc_RNA (1)...(19): siRNA sense strand
ccacaacuccaaauuugaa

SEQ ID NO: 1566159 - RNA, 19 nt, Homo sapiens
  misc_RNA (1)...(19): siRNA sense strand
ugaggaugcuggaguguau

SEQ ID NO: 1566160 - RNA, 19 nt, Homo sapiens
  misc_RNA (1)...(19): siRNA sense strand
guacuucugcuccaggaua

SEQ ID NO: 1566161 - RNA, 19 nt, Homo sapiens
  misc_RNA (1)...(19): siRNA sense strand
ucacacaguuuccgaugga

SEQ ID NO: 1566162 - RNA, 19 nt, Homo sapiens
  misc_RNA (1)...(19): siRNA sense strand
aagcaacgccuguuaaaug

SEQ ID NO: 1566163 - RNA, 19 nt, Homo sapiens
  misc_RNA (1)...(19): siRNA sense strand
aaacucuacuuaaguggaa

SEQ ID NO: 1566164 - RNA, 19 nt, Homo sapiens
  misc_RNA (1)...(19): siRNA sense strand
gcaaagcugaacacccuaa

SEQ ID NO: 1566165 - RNA, 19 nt, Homo sapiens
  misc_RNA (1)...(19): siRNA sense strand
gcaagacagguaaugcaaa

SEQ ID NO: 1566166 - RNA, 19 nt, Homo sapiens
  misc_RNA (1)...(19): siRNA sense strand
gggcagaacgggaaaguca

SEQ ID NO: 1566167 - RNA, 19 nt, Homo sapiens
  misc_RNA (1)...(19): siRNA sense strand
gcuggaguguauucuugua

SEQ ID NO: 1566168 - RNA, 19 nt, Homo sapiens
  misc_RNA (1)...(19): siRNA sense strand
gcucagugauggauuuuaa

SEQ ID NO: 1566169 - RNA, 19 nt, Homo sapiens
  misc_RNA (1)...(19): siRNA sense strand
cacaauggaagucugguua

SEQ ID NO: 1566170 - RNA, 19 nt, Homo sapiens
  misc_RNA (1)...(19): siRNA sense strand
ggaaggcaggugcagguaa

SEQ ID NO: 1566171 - RNA, 19 nt, Homo sapiens
  misc_RNA (1)...(19): siRNA sense strand
cagauucagucaauucagu

SEQ ID NO: 1566172 - RNA, 19 nt, Homo sapiens
  misc_RNA (1)...(19): siRNA sense strand
uuccacaacuccaaauuug

SEQ ID NO: 1566173 - RNA, 19 nt, Homo sapiens
  misc_RNA (1)...(19): siRNA sense strand
agcaacgccuguuaaauga

SEQ ID NO: 1566174 - RNA, 19 nt, Homo sapiens
  misc_RNA (1)...(19): siRNA sense strand
gcuccaggauagcuuuaug

SEQ ID NO: 1566175 - RNA, 19 nt, Homo sapiens
  misc_RNA (1)...(19): siRNA sense strand
ugagaggcaucuaccuuca

SEQ ID NO: 1566176 - RNA, 19 nt, Homo sapiens
  misc_RNA (1)...(19): siRNA sense strand
gcugaacacccuaauucuu

SEQ ID NO: 1566177 - RNA, 19 nt, Homo sapiens
  misc_RNA (1)...(19): siRNA sense strand
gcacucgcgucagguacuu

SEQ ID NO: 1566178 - RNA, 19 nt, Homo sapiens
  misc_RNA (1)...(19): siRNA sense strand
acaacaaucacauauccua

SEQ ID NO: 1566179 - RNA, 19 nt, Homo sapiens
  misc_RNA (1)...(19): siRNA sense strand
uuagcucagugauggauuu

SEQ ID NO: 1566180 - RNA, 19 nt, Homo sapiens
  misc_RNA (1)...(19): siRNA sense strand
ccgauggauuuguauguug

SEQ ID NO: 1566181 - RNA, 19 nt, Homo sapiens
  misc_RNA (1)...(19): siRNA sense strand
aggauagcuuuaugaauug

SEQ ID NO: 1566182 - RNA, 19 nt, Homo sapiens
  misc_RNA (1)...(19): siRNA sense strand
gcugagggcauccuaaagu

SEQ ID NO: 1566183 - RNA, 19 nt, Homo sapiens
  misc_RNA (1)...(19): siRNA sense strand
gcccauucaucgauucuca

SEQ ID NO: 1566184 - RNA, 19 nt, Homo sapiens
  misc_RNA (1)...(19): siRNA sense strand
gcuuggagccgucgucaga

SEQ ID NO: 1566185 - RNA, 19 nt, Homo sapiens
  misc_RNA (1)...(19): siRNA sense strand
caacaaucacauauccuau

SEQ ID NO: 1566186 - RNA, 19 nt, Homo sapiens
  misc_RNA (1)...(19): siRNA sense strand
gacagcaucaucaaugguu

SEQ ID NO: 1566187 - RNA, 19 nt, Homo sapiens
  misc_RNA (1)...(19): siRNA sense strand
gccaaugcaccacauaaau

SEQ ID NO: 1566188 - RNA, 19 nt, Homo sapiens
  misc_RNA (1)...(19): siRNA sense strand
ugcagaaacucuacuuaag

SEQ ID NO: 1566189 - RNA, 19 nt, Homo sapiens
  misc_RNA (1)...(19): siRNA sense strand
ucucgauccuucagcguuu

SEQ ID NO: 1566190 - RNA, 19 nt, Homo sapiens
  misc_RNA (1)...(19): siRNA sense strand
uuacaacaaucacauaucc

SEQ ID NO: 1566191 - RNA, 19 nt, Homo sapiens
  misc_RNA (1)...(19): siRNA sense strand
agaggcaucuaccuucaug

SEQ ID NO: 1566192 - RNA, 19 nt, Homo sapiens
  misc_RNA (1)...(19): siRNA sense strand
acaaucacauauccuaucu

SEQ ID NO: 1566193 - RNA, 19 nt, Homo sapiens
  misc_RNA (1)...(19): siRNA sense strand
aagcugaacacccuaauuc

SEQ ID NO: 1566194 - RNA, 19 nt, Homo sapiens
  misc_RNA (1)...(19): siRNA sense strand
gcucaugaggcauuuaaca

SEQ ID NO: 1566195 - RNA, 19 nt, Homo sapiens
  misc_RNA (1)...(19): siRNA sense strand
aauaagcaacgccuguuaa

SEQ ID NO: 1566196 - RNA, 19 nt, Homo sapiens
  misc_RNA (1)...(19): siRNA sense strand
gacugaugguccacuguga

SEQ ID NO: 1566197 - RNA, 19 nt, Homo sapiens
  misc_RNA (1)...(19): siRNA sense strand
caagcuggcagaacugaug

SEQ ID NO: 1566198 - RNA, 19 nt, Homo sapiens
  misc_RNA (1)...(19): siRNA sense strand
uugcagaaacucuacuuaa

SEQ ID NO: 1566199 - RNA, 19 nt, Homo sapiens
  misc_RNA (1)...(19): siRNA sense strand
gcauuuaacacagcuuuua

SEQ ID NO: 1566200 - RNA, 19 nt, Homo sapiens
  misc_RNA (1)...(19): siRNA sense strand
uaacaacaucaccagcauu

SEQ ID NO: 1566201 - RNA, 19 nt, Homo sapiens
  misc_RNA (1)...(19): siRNA sense strand
ucuuguaucgcaaugaaua

SEQ ID NO: 1566202 - RNA, 19 nt, Homo sapiens
  misc_RNA (1)...(19): siRNA sense strand
ggaguguauucuuguaucg

SEQ ID NO: 1566203 - RNA, 19 nt, Homo sapiens
  misc_RNA (1)...(19): siRNA sense strand
gcugagaggcaucuaccuu

SEQ ID NO: 1566204 - RNA, 19 nt, Homo sapiens
  misc_RNA (1)...(19): siRNA sense strand
aacaacaucaccagcauuu

SEQ ID NO: 1566205 - RNA, 19 nt, Homo sapiens
  misc_RNA (1)...(19): siRNA sense strand
caacuccaaauuugaagug

SEQ ID NO: 1566206 - RNA, 19 nt, Homo sapiens
  misc_RNA (1)...(19): siRNA sense strand
uucagucaauucaguguuu

SEQ ID NO: 1566207 - RNA, 19 nt, Homo sapiens
  misc_RNA (1)...(19): siRNA sense strand
cacaguuuccgauggauuu

SEQ ID NO: 1566208 - RNA, 19 nt, Homo sapiens
  misc_RNA (1)...(19): siRNA sense strand
gcuuuacaacaaucacaua

SEQ ID NO: 1566209 - RNA, 19 nt, Homo sapiens
  misc_RNA (1)...(19): siRNA sense strand
ccugaguuauaacagaauu

SEQ ID NO: 1566210 - RNA, 19 nt, Homo sapiens
  misc_RNA (1)...(19): siRNA sense strand
uagcugagggcauccuaaa

SEQ ID NO: 1566211 - RNA, 19 nt, Homo sapiens
  misc_RNA (1)...(19): siRNA sense strand
auggaagucugguuauaga

SEQ ID NO: 1566212 - RNA, 19 nt, Homo sapiens
  misc_RNA (1)...(19): siRNA sense strand
ccauuugucugugacuguu

SEQ ID NO: 1566213 - RNA, 19 nt, Homo sapiens
  misc_RNA (1)...(19): siRNA sense strand
gcauuuccacgggcaguuu

SEQ ID NO: 1566214 - RNA, 19 nt, Homo sapiens
  misc_RNA (1)...(19): siRNA sense strand
cugaacacccuaauucuuc

SEQ ID NO: 1566215 - RNA, 19 nt, Homo sapiens
  misc_RNA (1)...(19): siRNA sense strand
guaucgcaaugaauaagca

SEQ ID NO: 1566216 - RNA, 19 nt, Homo sapiens
  misc_RNA (1)...(19): siRNA sense strand
caucaaugguuccuuucgu

SEQ ID NO: 1566217 - RNA, 19 nt, Homo sapiens
  misc_RNA (1)...(19): siRNA sense strand
caaauuugaagugucuuga

SEQ ID NO: 1566218 - RNA, 19 nt, Homo sapiens
  misc_RNA (1)...(19): siRNA sense strand
uuacguguuucacaaugga

SEQ ID NO: 1566219 - RNA, 19 nt, Homo sapiens
  misc_RNA (1)...(19): siRNA sense strand
ugcuagagccggauaaaga

SEQ ID NO: 1566220 - RNA, 19 nt, Homo sapiens
  misc_RNA (1)...(19): siRNA sense strand
gguaaugcaaauacggauu

SEQ ID NO: 1566221 - RNA, 19 nt, Homo sapiens
  misc_RNA (1)...(19): siRNA sense strand
gcucugacagcaucaucaa

SEQ ID NO: 1566222 - RNA, 19 nt, Homo sapiens
  misc_RNA (1)...(19): siRNA sense strand
cuugacuuaucguccaaua

SEQ ID NO: 1566223 - RNA, 19 nt, Homo sapiens
  misc_RNA (1)...(19): siRNA sense strand
gcaacgccuguuaaaugaa

SEQ ID NO: 1566224 - RNA, 19 nt, Homo sapiens
  misc_RNA (1)...(19): siRNA sense strand
caacaucaccagcauuucc

SEQ ID NO: 1566225 - RNA, 19 nt, Homo sapiens
  misc_RNA (1)...(19): siRNA sense strand
auaagcaacgccuguuaaa

SEQ ID NO: 1566226 - RNA, 19 nt, Homo sapiens
  misc_RNA (1)...(19): siRNA sense strand
guugaagguucuggaagug

SEQ ID NO: 1566227 - RNA, 19 nt, Homo sapiens
  misc_RNA (1)...(19): siRNA sense strand
ccaaauuugaagugucuug

SEQ ID NO: 1566228 - RNA, 19 nt, Homo sapiens
  misc_RNA (1)...(19): siRNA sense strand
guugcagaaacucuacuua

SEQ ID NO: 1566229 - RNA, 19 nt, Homo sapiens
  misc_RNA (1)...(19): siRNA sense strand
agagacuggaccugaguua

SEQ ID NO: 1566230 - RNA, 19 nt, Homo sapiens
  misc_RNA (1)...(19): siRNA sense strand
ucugacagcaucaucaaug

SEQ ID NO: 1566231 - RNA, 19 nt, Homo sapiens
  misc_RNA (1)...(19): siRNA sense strand
gcuggcagaacugauguuu

SEQ ID NO: 1566232 - RNA, 19 nt, Homo sapiens
  misc_RNA (1)...(19): siRNA sense strand
agacagguaaugcaaauac

SEQ ID NO: 1566233 - RNA, 19 nt, Homo sapiens
  misc_RNA (1)...(19): siRNA sense strand
ucuuauaaccgaauuccuu

SEQ ID NO: 1566234 - RNA, 19 nt, Homo sapiens
  misc_RNA (1)...(19): siRNA sense strand
guggacgucacaauaaaug

SEQ ID NO: 1566235 - RNA, 19 nt, Homo sapiens
  misc_RNA (1)...(19): siRNA sense strand
cugcuugcguggccaguau

SEQ ID NO: 1566236 - RNA, 19 nt, Homo sapiens
  misc_RNA (1)...(19): siRNA sense strand
uaaagacacucuccaguua

SEQ ID NO: 1566237 - RNA, 19 nt, Homo sapiens
  misc_RNA (1)...(19): siRNA sense strand
gagcaggucucaucauuau

SEQ ID NO: 1566238 - RNA, 19 nt, Homo sapiens
  misc_RNA (1)...(19): siRNA sense strand
gaugaaauccgcugacaua

SEQ ID NO: 1566239 - RNA, 19 nt, Homo sapiens
  misc_RNA (1)...(19): siRNA sense strand
gaaauccgcugacauacug

SEQ ID NO: 1566240 - RNA, 19 nt, Homo sapiens
  misc_RNA (1)...(19): siRNA sense strand
gcaagccucugauauaaug

SEQ ID NO: 1566241 - RNA, 19 nt, Homo sapiens
  misc_RNA (1)...(19): siRNA sense strand
gaacggcugcuuccuguua

SEQ ID NO: 1566242 - RNA, 19 nt, Homo sapiens
  misc_RNA (1)...(19): siRNA sense strand
caagaaagauagaguuugu

SEQ ID NO: 1566243 - RNA, 19 nt, Homo sapiens
  misc_RNA (1)...(19): siRNA sense strand
gggauuaacuugcaugguu

SEQ ID NO: 1566244 - RNA, 19 nt, Homo sapiens
  misc_RNA (1)...(19): siRNA sense strand
cagaacagcucaccaagga

SEQ ID NO: 1566245 - RNA, 19 nt, Homo sapiens
  misc_RNA (1)...(19): siRNA sense strand
ggaaggaauuaauguggaa

SEQ ID NO: 1566246 - RNA, 19 nt, Homo sapiens
  misc_RNA (1)...(19): siRNA sense strand
ggaagcaucugccaucuac

SEQ ID NO: 1566247 - RNA, 19 nt, Homo sapiens
  misc_RNA (1)...(19): siRNA sense strand
ggauuaacuugcaugguuu

SEQ ID NO: 1566248 - RNA, 19 nt, Homo sapiens
  misc_RNA (1)...(19): siRNA sense strand
gaaacgggauuaacuugca

SEQ ID NO: 1566249 - RNA, 19 nt, Homo sapiens
  misc_RNA (1)...(19): siRNA sense strand
agcaggaucuuuccaguua

SEQ ID NO: 1566250 - RNA, 19 nt, Homo sapiens
  misc_RNA (1)...(19): siRNA sense strand
caagacagcagccaacauu

SEQ ID NO: 1566251 - RNA, 19 nt, Homo sapiens
  misc_RNA (1)...(19): siRNA sense strand
gaacuucaagaaacuacua

SEQ ID NO: 1566252 - RNA, 19 nt, Homo sapiens
  misc_RNA (1)...(19): siRNA sense strand
guucaucucuugccaaagu

SEQ ID NO: 1566253 - RNA, 19 nt, Homo sapiens
  misc_RNA (1)...(19): siRNA sense strand
gcacauuuguucaucucuu

SEQ ID NO: 1566254 - RNA, 19 nt, Homo sapiens
  misc_RNA (1)...(19): siRNA sense strand
ggacauccgagaauucuau

SEQ ID NO: 1566255 - RNA, 19 nt, Homo sapiens
  misc_RNA (1)...(19): siRNA sense strand
uaacuugcaugguuuccaa

SEQ ID NO: 1566256 - RNA, 19 nt, Homo sapiens
  misc_RNA (1)...(19): siRNA sense strand
gacaaggaguggaagaugu

SEQ ID NO: 1566257 - RNA, 19 nt, Homo sapiens
  misc_RNA (1)...(19): siRNA sense strand
cugcaagccucugauauaa

SEQ ID NO: 1566258 - RNA, 19 nt, Homo sapiens
  misc_RNA (1)...(19): siRNA sense strand
gagagguggugaaggcauu

SEQ ID NO: 1566259 - RNA, 19 nt, Homo sapiens
  misc_RNA (1)...(19): siRNA sense strand
gauggguauuuccaguuua

SEQ ID NO: 1566260 - RNA, 19 nt, Homo sapiens
  misc_RNA (1)...(19): siRNA sense strand
gguagagaaugcacugaug

SEQ ID NO: 1566261 - RNA, 19 nt, Homo sapiens
  misc_RNA (1)...(19): siRNA sense strand
uuuggaaucuuggacauua

SEQ ID NO: 1566262 - RNA, 19 nt, Homo sapiens
  misc_RNA (1)...(19): siRNA sense strand
agauagaguuugucuugaa

SEQ ID NO: 1566263 - RNA, 19 nt, Homo sapiens
  misc_RNA (1)...(19): siRNA sense strand
caaguacccaagaaagaua

SEQ ID NO: 1566264 - RNA, 19 nt, Homo sapiens
  misc_RNA (1)...(19): siRNA sense strand
caucuucucuggcuaugug

SEQ ID NO: 1566265 - RNA, 19 nt, Homo sapiens
  misc_RNA (1)...(19): siRNA sense strand
cagccgcacucucuacauu

SEQ ID NO: 1566266 - RNA, 19 nt, Homo sapiens
  misc_RNA (1)...(19): siRNA sense strand
gacacagguuggauacuga

SEQ ID NO: 1566267 - RNA, 19 nt, Homo sapiens
  misc_RNA (1)...(19): siRNA sense strand
gccgcacucucuacauuaa

SEQ ID NO: 1566268 - RNA, 19 nt, Homo sapiens
  misc_RNA (1)...(19): siRNA sense strand
cgcacucucuacauuaaua

SEQ ID NO: 1566269 - RNA, 19 nt, Homo sapiens
  misc_RNA (1)...(19): siRNA sense strand
caacauucgaggagacuuu

SEQ ID NO: 1566270 - RNA, 19 nt, Homo sapiens
  misc_RNA (1)...(19): siRNA sense strand
ccugcaagccucugauaua

SEQ ID NO: 1566271 - RNA, 19 nt, Homo sapiens
  misc_RNA (1)...(19): siRNA sense strand
guuaugauguacagguuau

SEQ ID NO: 1566272 - RNA, 19 nt, Homo sapiens
  misc_RNA (1)...(19): siRNA sense strand
ggacuggacauccgagaau

SEQ ID NO: 1566273 - RNA, 19 nt, Homo sapiens
  misc_RNA (1)...(19): siRNA sense strand
cuaaagacacucuccaguu

SEQ ID NO: 1566274 - RNA, 19 nt, Homo sapiens
  misc_RNA (1)...(19): siRNA sense strand
ucgagcaggucucaucauu

SEQ ID NO: 1566275 - RNA, 19 nt, Homo sapiens
  misc_RNA (1)...(19): siRNA sense strand
ccauacaaguacccaagaa

SEQ ID NO: 1566276 - RNA, 19 nt, Homo sapiens
  misc_RNA (1)...(19): siRNA sense strand
gaacaucuugggcucacuu

SEQ ID NO: 1566277 - RNA, 19 nt, Homo sapiens
  misc_RNA (1)...(19): siRNA sense strand
agauggguauuuccaguuu

SEQ ID NO: 1566278 - RNA, 19 nt, Homo sapiens
  misc_RNA (1)...(19): siRNA sense strand
guuauccaaucaagaguau

SEQ ID NO: 1566279 - RNA, 19 nt, Homo sapiens
  misc_RNA (1)...(19): siRNA sense strand
cgagcaggucucaucauua

SEQ ID NO: 1566280 - RNA, 19 nt, Homo sapiens
  misc_RNA (1)...(19): siRNA sense strand
guacagguuauagaugaua

SEQ ID NO: 1566281 - RNA, 19 nt, Homo sapiens
  misc_RNA (1)...(19): siRNA sense strand
ggacacaguggcaucugaa

SEQ ID NO: 1566282 - RNA, 19 nt, Homo sapiens
  misc_RNA (1)...(19): siRNA sense strand
aguuuaaccuugcuaguga

SEQ ID NO: 1566283 - RNA, 19 nt, Homo sapiens
  misc_RNA (1)...(19): siRNA sense strand
uaaccuugcuagugaugug

SEQ ID NO: 1566284 - RNA, 19 nt, Homo sapiens
  misc_RNA (1)...(19): siRNA sense strand
gauagaguuugucuugaac

SEQ ID NO: 1566285 - RNA, 19 nt, Homo sapiens
  misc_RNA (1)...(19): siRNA sense strand
aaucaaaccaggauacaug

SEQ ID NO: 1566286 - RNA, 19 nt, Homo sapiens
  misc_RNA (1)...(19): siRNA sense strand
agacacagguuggauacug

SEQ ID NO: 1566287 - RNA, 19 nt, Homo sapiens
  misc_RNA (1)...(19): siRNA sense strand
gaaggagacauuggcauca

SEQ ID NO: 1566288 - RNA, 19 nt, Homo sapiens
  misc_RNA (1)...(19): siRNA sense strand
gcacagaaggagacauugg

SEQ ID NO: 1566289 - RNA, 19 nt, Homo sapiens
  misc_RNA (1)...(19): siRNA sense strand
uuaggagcaugcacauuug

SEQ ID NO: 1566290 - RNA, 19 nt, Homo sapiens
  misc_RNA (1)...(19): siRNA sense strand
uuaagcuacuggugucuga

SEQ ID NO: 1566291 - RNA, 19 nt, Homo sapiens
  misc_RNA (1)...(19): siRNA sense strand
agaauucuauggccagaca

SEQ ID NO: 1566292 - RNA, 19 nt, Homo sapiens
  misc_RNA (1)...(19): siRNA sense strand
cacauuuguucaucucuug

SEQ ID NO: 1566293 - RNA, 19 nt, Homo sapiens
  misc_RNA (1)...(19): siRNA sense strand
aguggaagauguccggaaa

SEQ ID NO: 1566294 - RNA, 19 nt, Homo sapiens
  misc_RNA (1)...(19): siRNA sense strand
ccagacagaaacgggauua

SEQ ID NO: 1566295 - RNA, 19 nt, Homo sapiens
  misc_RNA (1)...(19): siRNA sense strand
gcaggucucaucauuaugc

SEQ ID NO: 1566296 - RNA, 19 nt, Homo sapiens
  misc_RNA (1)...(19): siRNA sense strand
caaagaugaagauggguau

SEQ ID NO: 1566297 - RNA, 19 nt, Homo sapiens
  misc_RNA (1)...(19): siRNA sense strand
cagaaacgggauuaacuug

SEQ ID NO: 1566298 - RNA, 19 nt, Homo sapiens
  misc_RNA (1)...(19): siRNA sense strand
uaauguggaccauaucaga

SEQ ID NO: 1566299 - RNA, 19 nt, Homo sapiens
  misc_RNA (1)...(19): siRNA sense strand
cuguauagguugcagaugu

SEQ ID NO: 1566300 - RNA, 19 nt, Homo sapiens
  misc_RNA (1)...(19): siRNA sense strand
auuaggagcaugcacauuu

SEQ ID NO: 1566301 - RNA, 19 nt, Homo sapiens
  misc_RNA (1)...(19): siRNA sense strand
gcagcagcaugugaaguca

SEQ ID NO: 1566302 - RNA, 19 nt, Homo sapiens
  misc_RNA (1)...(19): siRNA sense strand
agaugaagauggguauuuc

SEQ ID NO: 1566303 - RNA, 19 nt, Homo sapiens
  misc_RNA (1)...(19): siRNA sense strand
gggaaucaaagaugaagau

SEQ ID NO: 1566304 - RNA, 19 nt, Homo sapiens
  misc_RNA (1)...(19): siRNA sense strand
gacagaaacgggauuaacu

SEQ ID NO: 1566305 - RNA, 19 nt, Homo sapiens
  misc_RNA (1)...(19): siRNA sense strand
aauguggaauuucagagaa

SEQ ID NO: 1566306 - RNA, 19 nt, Homo sapiens
  misc_RNA (1)...(19): siRNA sense strand
gacuggacauccgagaauu

SEQ ID NO: 1566307 - RNA, 19 nt, Homo sapiens
  misc_RNA (1)...(19): siRNA sense strand
uauccaaucaagaguauga

SEQ ID NO: 1566308 - RNA, 19 nt, Homo sapiens
  misc_RNA (1)...(19): siRNA sense strand
gcaugcacauuuguucauc

SEQ ID NO: 1566309 - RNA, 19 nt, Homo sapiens
  misc_RNA (1)...(19): siRNA sense strand
gagcaugcacauuuguuca

SEQ ID NO: 1566310 - RNA, 19 nt, Homo sapiens
  misc_RNA (1)...(19): siRNA sense strand
cagaugaaauccgcugaca

SEQ ID NO: 1566311 - RNA, 19 nt, Homo sapiens
  misc_RNA (1)...(19): siRNA sense strand
gcugcuuccuguuaugaug

SEQ ID NO: 1566312 - RNA, 19 nt, Homo sapiens
  misc_RNA (1)...(19): siRNA sense strand
ggagcaugcacauuuguuc

SEQ ID NO: 1566313 - RNA, 19 nt, Homo sapiens
  misc_RNA (1)...(19): siRNA sense strand
ccaguuauccaaucaagag

SEQ ID NO: 1566314 - RNA, 19 nt, Homo sapiens
  misc_RNA (1)...(19): siRNA sense strand
ggccaaggcuauuguugcu

SEQ ID NO: 1566315 - RNA, 19 nt, Homo sapiens
  misc_RNA (1)...(19): siRNA sense strand
gauguacagguuauagaug

SEQ ID NO: 1566316 - RNA, 19 nt, Homo sapiens
  misc_RNA (1)...(19): siRNA sense strand
ccacugguuauucuaaaga

SEQ ID NO: 1566317 - RNA, 19 nt, Homo sapiens
  misc_RNA (1)...(19): siRNA sense strand
gccaucuacuucacuagug

SEQ ID NO: 1566318 - RNA, 19 nt, Homo sapiens
  misc_RNA (1)...(19): siRNA sense strand
cacaguggcaucugaaugu

SEQ ID NO: 1566319 - RNA, 19 nt, Homo sapiens
  misc_RNA (1)...(19): siRNA sense strand
cauacaaguacccaagaaa

SEQ ID NO: 1566320 - RNA, 19 nt, Homo sapiens
  misc_RNA (1)...(19): siRNA sense strand
acagaaacgggauuaacuu

SEQ ID NO: 1566321 - RNA, 19 nt, Homo sapiens
  misc_RNA (1)...(19): siRNA sense strand
caggaucuuuccaguuaca

SEQ ID NO: 1566322 - RNA, 19 nt, Homo sapiens
  misc_RNA (1)...(19): siRNA sense strand
gacccacugguuauucuaa

SEQ ID NO: 1566323 - RNA, 19 nt, Homo sapiens
  misc_RNA (1)...(19): siRNA sense strand
guuggauacugaacaucuu

SEQ ID NO: 1566324 - RNA, 19 nt, Homo sapiens
  misc_RNA (1)...(19): siRNA sense strand
caagauggcagaacauucc

SEQ ID NO: 1566325 - RNA, 19 nt, Homo sapiens
  misc_RNA (1)...(19): siRNA sense strand
uaauguggaauuucagaga

SEQ ID NO: 1566326 - RNA, 19 nt, Homo sapiens
  misc_RNA (1)...(19): siRNA sense strand
ccaagaaagauagaguuug

SEQ ID NO: 1566327 - RNA, 19 nt, Homo sapiens
  misc_RNA (1)...(19): siRNA sense strand
uacaaguacccaagaaaga

SEQ ID NO: 1566328 - RNA, 19 nt, Homo sapiens
  misc_RNA (1)...(19): siRNA sense strand
ucaaacccaucaggccuau

SEQ ID NO: 1566329 - RNA, 19 nt, Homo sapiens
  misc_RNA (1)...(19): siRNA sense strand
cggcacagaaggagacauu

SEQ ID NO: 1566330 - RNA, 19 nt, Homo sapiens
  misc_RNA (1)...(19): siRNA sense strand
auguacagguuauagauga

SEQ ID NO: 1566331 - RNA, 19 nt, Homo sapiens
  misc_RNA (1)...(19): siRNA sense strand
caagaaacuacuaaaugag

SEQ ID NO: 1566332 - RNA, 19 nt, Homo sapiens
  misc_RNA (1)...(19): siRNA sense strand
aagaugaagauggguauuu

SEQ ID NO: 1566333 - RNA, 19 nt, Homo sapiens
  misc_RNA (1)...(19): siRNA sense strand
aagacacucuccaguuauc

SEQ ID NO: 1566334 - RNA, 19 nt, Homo sapiens
  misc_RNA (1)...(19): siRNA sense strand
cagguuggauacugaacau

SEQ ID NO: 1566335 - RNA, 19 nt, Homo sapiens
  misc_RNA (1)...(19): siRNA sense strand
cccaagaaagauagaguuu

SEQ ID NO: 1566336 - RNA, 19 nt, Homo sapiens
  misc_RNA (1)...(19): siRNA sense strand
ucacagagcuggauaaaga

SEQ ID NO: 1566337 - RNA, 19 nt, Homo sapiens
  misc_RNA (1)...(19): siRNA sense strand
gaacauguaugguaguaaa

SEQ ID NO: 1566338 - RNA, 19 nt, Homo sapiens
  misc_RNA (1)...(19): siRNA sense strand
gaaggacaguggagaagua

SEQ ID NO: 1566339 - RNA, 19 nt, Homo sapiens
  misc_RNA (1)...(19): siRNA sense strand
gcaaagauccuauagaaga

SEQ ID NO: 1566340 - RNA, 19 nt, Homo sapiens
  misc_RNA (1)...(19): siRNA sense strand
gaaaagaccaccuacauua

SEQ ID NO: 1566341 - RNA, 19 nt, Homo sapiens
  misc_RNA (1)...(19): siRNA sense strand
gaucauccuuggccaguuu

SEQ ID NO: 1566342 - RNA, 19 nt, Homo sapiens
  misc_RNA (1)...(19): siRNA sense strand
guuguucgguuguuucuua

SEQ ID NO: 1566343 - RNA, 19 nt, Homo sapiens
  misc_RNA (1)...(19): siRNA sense strand
gaaagacuccacagcagua

SEQ ID NO: 1566344 - RNA, 19 nt, Homo sapiens
  misc_RNA (1)...(19): siRNA sense strand
gauauaaacucuccagaac

SEQ ID NO: 1566345 - RNA, 19 nt, Homo sapiens
  misc_RNA (1)...(19): siRNA sense strand
agaagaagaucaucaagga

SEQ ID NO: 1566346 - RNA, 19 nt, Homo sapiens
  misc_RNA (1)...(19): siRNA sense strand
gaggagaacauguauggua

SEQ ID NO: 1566347 - RNA, 19 nt, Homo sapiens
  misc_RNA (1)...(19): siRNA sense strand
gagaacauguaugguagua

SEQ ID NO: 1566348 - RNA, 19 nt, Homo sapiens
  misc_RNA (1)...(19): siRNA sense strand
ggucacgggucaaguugua

SEQ ID NO: 1566349 - RNA, 19 nt, Homo sapiens
  misc_RNA (1)...(19): siRNA sense strand
gaacaaccuuaucauccuu

SEQ ID NO: 1566350 - RNA, 19 nt, Homo sapiens
  misc_RNA (1)...(19): siRNA sense strand
gagcacagauggaggaaag

SEQ ID NO: 1566351 - RNA, 19 nt, Homo sapiens
  misc_RNA (1)...(19): siRNA sense strand
ggaaucagaagcucauaaa

SEQ ID NO: 1566352 - RNA, 19 nt, Homo sapiens
  misc_RNA (1)...(19): siRNA sense strand
caagggacuucucauguug

SEQ ID NO: 1566353 - RNA, 19 nt, Homo sapiens
  misc_RNA (1)...(19): siRNA sense strand
ccaccuacauuaaacagaa

SEQ ID NO: 1566354 - RNA, 19 nt, Homo sapiens
  misc_RNA (1)...(19): siRNA sense strand
gcgaggacauugagauuuc

SEQ ID NO: 1566355 - RNA, 19 nt, Homo sapiens
  misc_RNA (1)...(19): siRNA sense strand
gaacgagaccaacuucuuc

SEQ ID NO: 1566356 - RNA, 19 nt, Homo sapiens
  misc_RNA (1)...(19): siRNA sense strand
gaccagaaacugcuuguga

SEQ ID NO: 1566357 - RNA, 19 nt, Homo sapiens
  misc_RNA (1)...(19): siRNA sense strand
caaagauccuauagaagau

SEQ ID NO: 1566358 - RNA, 19 nt, Homo sapiens
  misc_RNA (1)...(19): siRNA sense strand
augcaaagauccuauagaa

SEQ ID NO: 1566359 - RNA, 19 nt, Homo sapiens
  misc_RNA (1)...(19): siRNA sense strand
acaagggacuucucauguu

SEQ ID NO: 1566360 - RNA, 19 nt, Homo sapiens
  misc_RNA (1)...(19): siRNA sense strand
gggaugcucuccuaugcuu

SEQ ID NO: 1566361 - RNA, 19 nt, Homo sapiens
  misc_RNA (1)...(19): siRNA sense strand
ucaagaccaucucaggaaa

SEQ ID NO: 1566362 - RNA, 19 nt, Homo sapiens
  misc_RNA (1)...(19): siRNA sense strand
gaucaucaaggaccagaaa

SEQ ID NO: 1566363 - RNA, 19 nt, Homo sapiens
  misc_RNA (1)...(19): siRNA sense strand
gaacaugcaaagauccuau

SEQ ID NO: 1566364 - RNA, 19 nt, Homo sapiens
  misc_RNA (1)...(19): siRNA sense strand
aaauaucaguggaucauuc

SEQ ID NO: 1566365 - RNA, 19 nt, Homo sapiens
  misc_RNA (1)...(19): siRNA sense strand
ggaaucuggugcagcuuuc

SEQ ID NO: 1566366 - RNA, 19 nt, Homo sapiens
  misc_RNA (1)...(19): siRNA sense strand
aaaaucaccucgaucaaaa

SEQ ID NO: 1566367 - RNA, 19 nt, Homo sapiens
  misc_RNA (1)...(19): siRNA sense strand
aaagaccaccuacauuaaa

SEQ ID NO: 1566368 - RNA, 19 nt, Homo sapiens
  misc_RNA (1)...(19): siRNA sense strand
aaucagaagcucauaaaga

SEQ ID NO: 1566369 - RNA, 19 nt, Homo sapiens
  misc_RNA (1)...(19): siRNA sense strand
ccaagcagaucaagaccau

SEQ ID NO: 1566370 - RNA, 19 nt, Homo sapiens
  misc_RNA (1)...(19): siRNA sense strand
ucucugaggugcggaauga

SEQ ID NO: 1566371 - RNA, 19 nt, Homo sapiens
  misc_RNA (1)...(19): siRNA sense strand
ucaagaaccggaaucagaa

SEQ ID NO: 1566372 - RNA, 19 nt, Homo sapiens
  misc_RNA (1)...(19): siRNA sense strand
ugacuggaguucuguaugg

SEQ ID NO: 1566373 - RNA, 19 nt, Homo sapiens
  misc_RNA (1)...(19): siRNA sense strand
gaucacagagcuggauaaa

SEQ ID NO: 1566374 - RNA, 19 nt, Homo sapiens
  misc_RNA (1)...(19): siRNA sense strand
guugaaagccuucuacgau

SEQ ID NO: 1566375 - RNA, 19 nt, Homo sapiens
  misc_RNA (1)...(19): siRNA sense strand
gagagagaguacaacaaca

SEQ ID NO: 1566376 - RNA, 19 nt, Homo sapiens
  misc_RNA (1)...(19): siRNA sense strand
gcaaaaguguucuguugug

SEQ ID NO: 1566377 - RNA, 19 nt, Homo sapiens
  misc_RNA (1)...(19): siRNA sense strand
gagggaugcucuccuaugc

SEQ ID NO: 1566378 - RNA, 19 nt, Homo sapiens
  misc_RNA (1)...(19): siRNA sense strand
cagcaaaaguguucuguug

SEQ ID NO: 1566379 - RNA, 19 nt, Homo sapiens
  misc_RNA (1)...(19): siRNA sense strand
cgcaagacguucagagguu

SEQ ID NO: 1566380 - RNA, 19 nt, Homo sapiens
  misc_RNA (1)...(19): siRNA sense strand
gaggaaaggccauuuuaaa

SEQ ID NO: 1566381 - RNA, 19 nt, Homo sapiens
  misc_RNA (1)...(19): siRNA sense strand
ccaccucggucaccagugu

SEQ ID NO: 1566382 - RNA, 19 nt, Homo sapiens
  misc_RNA (1)...(19): siRNA sense strand
ucacucagaaucagaagaa

SEQ ID NO: 1566383 - RNA, 19 nt, Homo sapiens
  misc_RNA (1)...(19): siRNA sense strand
ucaaugacaccaucagguu

SEQ ID NO: 1566384 - RNA, 19 nt, Homo sapiens
  misc_RNA (1)...(19): siRNA sense strand
gcacacggaagccaacuca

SEQ ID NO: 1566385 - RNA, 19 nt, Homo sapiens
  misc_RNA (1)...(19): siRNA sense strand
ugaagaagaagaucaucaa

SEQ ID NO: 1566386 - RNA, 19 nt, Homo sapiens
  misc_RNA (1)...(19): siRNA sense strand
ugugagaacacccauauga

SEQ ID NO: 1566387 - RNA, 19 nt, Homo sapiens
  misc_RNA (1)...(19): siRNA sense strand
cugggaaacuucacugaga

SEQ ID NO: 1566388 - RNA, 19 nt, Homo sapiens
  misc_RNA (1)...(19): siRNA sense strand
cauacgaggagaacaugua

SEQ ID NO: 1566389 - RNA, 19 nt, Homo sapiens
  misc_RNA (1)...(19): siRNA sense strand
uauaaacucuccagaacac

SEQ ID NO: 1566390 - RNA, 19 nt, Homo sapiens
  misc_RNA (1)...(19): siRNA sense strand
cagcuacaguggaacacaa

SEQ ID NO: 1566391 - RNA, 19 nt, Homo sapiens
  misc_RNA (1)...(19): siRNA sense strand
uggaagaggucaccaugca

SEQ ID NO: 1566392 - RNA, 19 nt, Homo sapiens
  misc_RNA (1)...(19): siRNA sense strand
ggauaaagacuuggaagag

SEQ ID NO: 1566393 - RNA, 19 nt, Homo sapiens
  misc_RNA (1)...(19): siRNA sense strand
cagaagcucauaaagaugu

SEQ ID NO: 1566394 - RNA, 19 nt, Homo sapiens
  misc_RNA (1)...(19): siRNA sense strand
aucagaagcucauaaagau

SEQ ID NO: 1566395 - RNA, 19 nt, Homo sapiens
  misc_RNA (1)...(19): siRNA sense strand
accaagagcucaaugacau

SEQ ID NO: 1566396 - RNA, 19 nt, Homo sapiens
  misc_RNA (1)...(19): siRNA sense strand
caucguggcucuggucauc

SEQ ID NO: 1566397 - RNA, 19 nt, Homo sapiens
  misc_RNA (1)...(19): siRNA sense strand
auaaagaugucgaguccau

SEQ ID NO: 1566398 - RNA, 19 nt, Homo sapiens
  misc_RNA (1)...(19): siRNA sense strand
guaaauaucaguggaucau

SEQ ID NO: 1566399 - RNA, 19 nt, Homo sapiens
  misc_RNA (1)...(19): siRNA sense strand
gaagaucacagagcuggau

SEQ ID NO: 1566400 - RNA, 19 nt, Homo sapiens
  misc_RNA (1)...(19): siRNA sense strand
gaagaagaagaucaucaag

SEQ ID NO: 1566401 - RNA, 19 nt, Homo sapiens
  misc_RNA (1)...(19): siRNA sense strand
gauuccaguucacucagaa

SEQ ID NO: 1566402 - RNA, 19 nt, Homo sapiens
  misc_RNA (1)...(19): siRNA sense strand
ucucgaacaugcaaagauc

SEQ ID NO: 1566403 - RNA, 19 nt, Homo sapiens
  misc_RNA (1)...(19): siRNA sense strand
gaucauggccagugcuuuu

SEQ ID NO: 1566404 - RNA, 19 nt, Homo sapiens
  misc_RNA (1)...(19): siRNA sense strand
ucaaugacauccucaaccu

SEQ ID NO: 1566405 - RNA, 19 nt, Homo sapiens
  misc_RNA (1)...(19): siRNA sense strand
ggaugagugucuacaacgu

SEQ ID NO: 1566406 - RNA, 19 nt, Homo sapiens
  misc_RNA (1)...(19): siRNA sense strand
caucgucuaugccuacaag

SEQ ID NO: 1566407 - RNA, 19 nt, Homo sapiens
  misc_RNA (1)...(19): siRNA sense strand
ucaugccgcucaccaagga

SEQ ID NO: 1566408 - RNA, 19 nt, Homo sapiens
  misc_RNA (1)...(19): siRNA sense strand
gagaguccacgccaucuuc

SEQ ID NO: 1566409 - RNA, 19 nt, Homo sapiens
  misc_RNA (1)...(19): siRNA sense strand
gcagauccgcaacgaguca

SEQ ID NO: 1566410 - RNA, 19 nt, Homo sapiens
  misc_RNA (1)...(19): siRNA sense strand
gagaacaaacccagaugca

SEQ ID NO: 1566411 - RNA, 19 nt, Homo sapiens
  misc_RNA (1)...(19): siRNA sense strand
gaauauggcagcaaaagug

SEQ ID NO: 1566412 - RNA, 19 nt, Homo sapiens
  misc_RNA (1)...(19): siRNA sense strand
agauauaaacucuccagaa

SEQ ID NO: 1566413 - RNA, 19 nt, Homo sapiens
  misc_RNA (1)...(19): siRNA sense strand
agagcuggauaaagacuug

SEQ ID NO: 1566414 - RNA, 19 nt, Homo sapiens
  misc_RNA (1)...(19): siRNA sense strand
agaaucagaagaaagaaga

SEQ ID NO: 1566415 - RNA, 19 nt, Homo sapiens
  misc_RNA (1)...(19): siRNA sense strand
cuacaagggacuucucaug

SEQ ID NO: 1566416 - RNA, 19 nt, Homo sapiens
  misc_RNA (1)...(19): siRNA sense strand
ugaacgagaccaacuucuu

SEQ ID NO: 1566417 - RNA, 19 nt, Homo sapiens
  misc_RNA (1)...(19): siRNA sense strand
ggauccaggacuucaacua

SEQ ID NO: 1566418 - RNA, 19 nt, Homo sapiens
  misc_RNA (1)...(19): siRNA sense strand
ugaccugacuggaguucug

SEQ ID NO: 1566419 - RNA, 19 nt, Homo sapiens
  misc_RNA (1)...(19): siRNA sense strand
ugaacaaccuuaucauccu

SEQ ID NO: 1566420 - RNA, 19 nt, Homo sapiens
  misc_RNA (1)...(19): siRNA sense strand
gagcagcugcggaagaucu

SEQ ID NO: 1566421 - RNA, 19 nt, Homo sapiens
  misc_RNA (1)...(19): siRNA sense strand
ggaggaaaggccauuuuaa

SEQ ID NO: 1566422 - RNA, 19 nt, Homo sapiens
  misc_RNA (1)...(19): siRNA sense strand
gcacucaacgacagcaagu

SEQ ID NO: 1566423 - RNA, 19 nt, Homo sapiens
  misc_RNA (1)...(19): siRNA sense strand
ccauacaugaacaaccuua

SEQ ID NO: 1566424 - RNA, 19 nt, Homo sapiens
  misc_RNA (1)...(19): siRNA sense strand
aaaguguucuguugugcau

SEQ ID NO: 1566425 - RNA, 19 nt, Homo sapiens
  misc_RNA (1)...(19): siRNA sense strand
acauuaaacagaaccacua

SEQ ID NO: 1566426 - RNA, 19 nt, Homo sapiens
  misc_RNA (1)...(19): siRNA sense strand
gcuuccauauuucucuuug

SEQ ID NO: 1566427 - RNA, 19 nt, Homo sapiens
  misc_RNA (1)...(19): siRNA sense strand
gauccaggacuucaacuac

SEQ ID NO: 1566428 - RNA, 19 nt, Homo sapiens
  misc_RNA (1)...(19): siRNA sense strand
gcagagggccauggagaca

SEQ ID NO: 1566429 - RNA, 19 nt, Homo sapiens
  misc_RNA (1)...(19): siRNA sense strand
agagagaguacaacaacaa

SEQ ID NO: 1566430 - RNA, 19 nt, Homo sapiens
  misc_RNA (1)...(19): siRNA sense strand
aagaccaucucaggaaaga

SEQ ID NO: 1566431 - RNA, 19 nt, Homo sapiens
  misc_RNA (1)...(19): siRNA sense strand
cauggucucgggccuguaa

SEQ ID NO: 1566432 - RNA, 19 nt, Homo sapiens
  misc_RNA (1)...(19): siRNA sense strand
caucagacaaugcggugaa

SEQ ID NO: 1566433 - RNA, 19 nt, Homo sapiens
  misc_RNA (1)...(19): siRNA sense strand
agacuccacagcaguauga

SEQ ID NO: 1566434 - RNA, 19 nt, Homo sapiens
  misc_RNA (1)...(19): siRNA sense strand
uaaagaugucgaguccaua

SEQ ID NO: 1566435 - RNA, 19 nt, Homo sapiens
  misc_RNA (1)...(19): siRNA sense strand
cgauuccaguucacucaga

SEQ ID NO: 1566436 - RNA, 19 nt, Homo sapiens
  misc_RNA (1)...(19): siRNA sense strand
gaggaagcaugaacucaau

SEQ ID NO: 1566437 - RNA, 19 nt, Homo sapiens
  misc_RNA (1)...(19): siRNA sense strand
gggagccgauguccaguuu

SEQ ID NO: 1566438 - RNA, 19 nt, Homo sapiens
  misc_RNA (1)...(19): siRNA sense strand
ccugcaagcuggccucuaa

SEQ ID NO: 1566439 - RNA, 19 nt, Homo sapiens
  misc_RNA (1)...(19): siRNA sense strand
gucauggccucaucaguuu

SEQ ID NO: 1566440 - RNA, 19 nt, Homo sapiens
  misc_RNA (1)...(19): siRNA sense strand
ggaggaagcaugaacucaa

SEQ ID NO: 1566441 - RNA, 19 nt, Homo sapiens
  misc_RNA (1)...(19): siRNA sense strand
ccaaggcccugcucaagag

SEQ ID NO: 1566442 - RNA, 19 nt, Homo sapiens
  misc_RNA (1)...(19): siRNA sense strand
gguuugcccugaagauugu

SEQ ID NO: 1566443 - RNA, 19 nt, Homo sapiens
  misc_RNA (1)...(19): siRNA sense strand
guucugcucuugcccuuca

SEQ ID NO: 1566444 - RNA, 19 nt, Homo sapiens
  misc_RNA (1)...(19): siRNA sense strand
ugaagauugugcccaccua

SEQ ID NO: 1566445 - RNA, 19 nt, Homo sapiens
  misc_RNA (1)...(19): siRNA sense strand
ccguggagauggugaguga

SEQ ID NO: 1566446 - RNA, 19 nt, Homo sapiens
  misc_RNA (1)...(19): siRNA sense strand
gcccuucauugacuccuuu

SEQ ID NO: 1566447 - RNA, 19 nt, Homo sapiens
  misc_RNA (1)...(19): siRNA sense strand
ugucauggccucaucaguu

SEQ ID NO: 1566448 - RNA, 19 nt, Homo sapiens
  misc_RNA (1)...(19): siRNA sense strand
guggacggcugaaggugaa

SEQ ID NO: 1566449 - RNA, 19 nt, Homo sapiens
  misc_RNA (1)...(19): siRNA sense strand
ggagauggugagugaaguu

SEQ ID NO: 1566450 - RNA, 19 nt, Homo sapiens
  misc_RNA (1)...(19): siRNA sense strand
uggagaagcucaagaucag

SEQ ID NO: 1566451 - RNA, 19 nt, Homo sapiens
  misc_RNA (1)...(19): siRNA sense strand
gagccgauguccaguuucg

SEQ ID NO: 1566452 - RNA, 19 nt, Homo sapiens
  misc_RNA (1)...(19): siRNA sense strand
gauggugagugaaguugag

SEQ ID NO: 1566453 - RNA, 19 nt, Homo sapiens
  misc_RNA (1)...(19): siRNA sense strand
gcagucgagcuucggcuuu

SEQ ID NO: 1566454 - RNA, 19 nt, Homo sapiens
  misc_RNA (1)...(19): siRNA sense strand
caagaucagcgaccagcuu

SEQ ID NO: 1566455 - RNA, 19 nt, Homo sapiens
  misc_RNA (1)...(19): siRNA sense strand
gcaagcuggccucuaagga

SEQ ID NO: 1566456 - RNA, 19 nt, Homo sapiens
  misc_RNA (1)...(19): siRNA sense strand
gcuacugacugcucuacag

SEQ ID NO: 1566457 - RNA, 19 nt, Homo sapiens
  misc_RNA (1)...(19): siRNA sense strand
ggugaugacugugaaagac

SEQ ID NO: 1566458 - RNA, 19 nt, Homo sapiens
  misc_RNA (1)...(19): siRNA sense strand
gaagggcgaccuggcuaug

SEQ ID NO: 1566459 - RNA, 19 nt, Homo sapiens
  misc_RNA (1)...(19): siRNA sense strand
ggaagcaugaacucaaugg

SEQ ID NO: 1566460 - RNA, 19 nt, Homo sapiens
  misc_RNA (1)...(19): siRNA sense strand
uggcaugguucugcucuug

SEQ ID NO: 1566461 - RNA, 19 nt, Homo sapiens
  misc_RNA (1)...(19): siRNA sense strand
cagcagacaccguggagau

SEQ ID NO: 1566462 - RNA, 19 nt, Homo sapiens
  misc_RNA (1)...(19): siRNA sense strand
uucauugacuccuuucaga

SEQ ID NO: 1566463 - RNA, 19 nt, Homo sapiens
  misc_RNA (1)...(19): siRNA sense strand
ggacacgagccuucaacgu

SEQ ID NO: 1566464 - RNA, 19 nt, Homo sapiens
  misc_RNA (1)...(19): siRNA sense strand
gaccaaggcccugcucaag

SEQ ID NO: 1566465 - RNA, 19 nt, Homo sapiens
  misc_RNA (1)...(19): siRNA sense strand
gagauggugagugaaguug

SEQ ID NO: 1566466 - RNA, 19 nt, Homo sapiens
  misc_RNA (1)...(19): siRNA sense strand
gaucagcgaccagcuucug

SEQ ID NO: 1566467 - RNA, 19 nt, Homo sapiens
  misc_RNA (1)...(19): siRNA sense strand
ccuacgagcggaugauugu

SEQ ID NO: 1566468 - RNA, 19 nt, Homo sapiens
  misc_RNA (1)...(19): siRNA sense strand
ccucagggccuugaaguag

SEQ ID NO: 1566469 - RNA, 19 nt, Homo sapiens
  misc_RNA (1)...(19): siRNA sense strand
ugucggugaugacugugaa

SEQ ID NO: 1566470 - RNA, 19 nt, Homo sapiens
  misc_RNA (1)...(19): siRNA sense strand
cagucgagcuucggcuuuc

SEQ ID NO: 1566471 - RNA, 19 nt, Homo sapiens
  misc_RNA (1)...(19): siRNA sense strand
ugaccaaggcccugcucaa

SEQ ID NO: 1566472 - RNA, 19 nt, Homo sapiens
  misc_RNA (1)...(19): siRNA sense strand
gcacagagccaucuucuuc

SEQ ID NO: 1566473 - RNA, 19 nt, Homo sapiens
  misc_RNA (1)...(19): siRNA sense strand
gagaagcacugagcaagaa

SEQ ID NO: 1566474 - RNA, 19 nt, Homo sapiens
  misc_RNA (1)...(19): siRNA sense strand
caucaaacuucgcaagauu

SEQ ID NO: 1566475 - RNA, 19 nt, Homo sapiens
  misc_RNA (1)...(19): siRNA sense strand
gcacggcccugaagcuguu

SEQ ID NO: 1566476 - RNA, 19 nt, Homo sapiens
  misc_RNA (1)...(19): siRNA sense strand
caagaacccuggcuacauc

SEQ ID NO: 1566477 - RNA, 19 nt, Homo sapiens
  misc_RNA (1)...(19): siRNA sense strand
caucaaggguaagaaauga

SEQ ID NO: 1566478 - RNA, 19 nt, Homo sapiens
  misc_RNA (1)...(19): siRNA sense strand
ccaaagaccuacagauggu

SEQ ID NO: 1566479 - RNA, 19 nt, Homo sapiens
  misc_RNA (1)...(19): siRNA sense strand
ccaagacgaucgccacauc

SEQ ID NO: 1566480 - RNA, 19 nt, Homo sapiens
  misc_RNA (1)...(19): siRNA sense strand
ucucacagcugacaaccuu

SEQ ID NO: 1566481 - RNA, 19 nt, Homo sapiens
  misc_RNA (1)...(19): siRNA sense strand
gaaccuacaggaugaaagu

SEQ ID NO: 1566482 - RNA, 19 nt, Homo sapiens
  misc_RNA (1)...(19): siRNA sense strand
gaacagcggcagaaaauug

SEQ ID NO: 1566483 - RNA, 19 nt, Homo sapiens
  misc_RNA (1)...(19): siRNA sense strand
ggaagugacagccucauca

SEQ ID NO: 1566484 - RNA, 19 nt, Homo sapiens
  misc_RNA (1)...(19): siRNA sense strand
ggagaagcacugagcaaga

SEQ ID NO: 1566485 - RNA, 19 nt, Homo sapiens
  misc_RNA (1)...(19): siRNA sense strand
ccacaucacagaaucguau

SEQ ID NO: 1566486 - RNA, 19 nt, Homo sapiens
  misc_RNA (1)...(19): siRNA sense strand
gaagugacagccucaucaa

SEQ ID NO: 1566487 - RNA, 19 nt, Homo sapiens
  misc_RNA (1)...(19): siRNA sense strand
ucaacgaggugcucaagag

SEQ ID NO: 1566488 - RNA, 19 nt, Homo sapiens
  misc_RNA (1)...(19): siRNA sense strand
gcaagaacccuggcuacau

SEQ ID NO: 1566489 - RNA, 19 nt, Homo sapiens
  misc_RNA (1)...(19): siRNA sense strand
ugacagagagggccaagga

SEQ ID NO: 1566490 - RNA, 19 nt, Homo sapiens
  misc_RNA (1)...(19): siRNA sense strand
gaacccuggcuacaucaaa

SEQ ID NO: 1566491 - RNA, 19 nt, Homo sapiens
  misc_RNA (1)...(19): siRNA sense strand
acagagccaucuucuucaa

SEQ ID NO: 1566492 - RNA, 19 nt, Homo sapiens
  misc_RNA (1)...(19): siRNA sense strand
gccuagggcuggacuacga

SEQ ID NO: 1566493 - RNA, 19 nt, Homo sapiens
  misc_RNA (1)...(19): siRNA sense strand
agagugugguggccaaguu

SEQ ID NO: 1566494 - RNA, 19 nt, Homo sapiens
  misc_RNA (1)...(19): siRNA sense strand
uguagaagccaaacaagug

SEQ ID NO: 1566495 - RNA, 19 nt, Homo sapiens
  misc_RNA (1)...(19): siRNA sense strand
gcaggaacagcggcagaaa

SEQ ID NO: 1566496 - RNA, 19 nt, Homo sapiens
  misc_RNA (1)...(19): siRNA sense strand
agagccaucuucuucaauc

SEQ ID NO: 1566497 - RNA, 19 nt, Homo sapiens
  misc_RNA (1)...(19): siRNA sense strand
cccauuaucuaugacauuc

SEQ ID NO: 1566498 - RNA, 19 nt, Homo sapiens
  misc_RNA (1)...(19): siRNA sense strand
cagaaucguaucuaucuca

SEQ ID NO: 1566499 - RNA, 19 nt, Homo sapiens
  misc_RNA (1)...(19): siRNA sense strand
ucacagaaucguaucuauc

SEQ ID NO: 1566500 - RNA, 19 nt, Homo sapiens
  misc_RNA (1)...(19): siRNA sense strand
cuacgaggaacgaguguug

SEQ ID NO: 1566501 - RNA, 19 nt, Homo sapiens
  misc_RNA (1)...(19): siRNA sense strand
cacagaaucguaucuaucu

SEQ ID NO: 1566502 - RNA, 19 nt, Homo sapiens
  misc_RNA (1)...(19): siRNA sense strand
caucacagaaucguaucua

SEQ ID NO: 1566503 - RNA, 19 nt, Homo sapiens
  misc_RNA (1)...(19): siRNA sense strand
gaucgccacaucacagaau

SEQ ID NO: 1566504 - RNA, 19 nt, Homo sapiens
  misc_RNA (1)...(19): siRNA sense strand
gaccuacagauggugaaua

SEQ ID NO: 1566505 - RNA, 19 nt, Homo sapiens
  misc_RNA (1)...(19): siRNA sense strand
ccucaucaaggguaagaaa

SEQ ID NO: 1566506 - RNA, 19 nt, Homo sapiens
  misc_RNA (1)...(19): siRNA sense strand
ggagcuuccuagcauguac

SEQ ID NO: 1566507 - RNA, 19 nt, Homo sapiens
  misc_RNA (1)...(19): siRNA sense strand
accuacagauggugaauau

SEQ ID NO: 1566508 - RNA, 19 nt, Homo sapiens
  misc_RNA (1)...(19): siRNA sense strand
gagcagcccagaauaucuc

SEQ ID NO: 1566509 - RNA, 19 nt, Homo sapiens
  misc_RNA (1)...(19): siRNA sense strand
gccgagggccuucacuuca

SEQ ID NO: 1566510 - RNA, 19 nt, Homo sapiens
  misc_RNA (1)...(19): siRNA sense strand
acgaggugcucaagagugu

SEQ ID NO: 1566511 - RNA, 19 nt, Homo sapiens
  misc_RNA (1)...(19): siRNA sense strand
cuccaaagaccuacagaug

SEQ ID NO: 1566512 - RNA, 19 nt, Homo sapiens
  misc_RNA (1)...(19): siRNA sense strand
ucaucaaggguaagaaaug

SEQ ID NO: 1566513 - RNA, 19 nt, Homo sapiens
  misc_RNA (1)...(19): siRNA sense strand
gcccagaauaucuccaaga

SEQ ID NO: 1566514 - RNA, 19 nt, Homo sapiens
  misc_RNA (1)...(19): siRNA sense strand
gaguguugccguccauugu

SEQ ID NO: 1566515 - RNA, 19 nt, Homo sapiens
  misc_RNA (1)...(19): siRNA sense strand
caacgaggugcucaagagu

SEQ ID NO: 1566516 - RNA, 19 nt, Homo sapiens
  misc_RNA (1)...(19): siRNA sense strand
acaucaaacuucgcaagau

SEQ ID NO: 1566517 - RNA, 19 nt, Homo sapiens
  misc_RNA (1)...(19): siRNA sense strand
cagagagggccaaggacuu

SEQ ID NO: 1566518 - RNA, 19 nt, Homo sapiens
  misc_RNA (1)...(19): siRNA sense strand
cccagaacuugaaggacuu

SEQ ID NO: 1566519 - RNA, 19 nt, Homo sapiens
  misc_RNA (1)...(19): siRNA sense strand
ugcugaaccuacaggauga

SEQ ID NO: 1566520 - RNA, 19 nt, Homo sapiens
  misc_RNA (1)...(19): siRNA sense strand
caagacgaucgccacauca

SEQ ID NO: 1566521 - RNA, 19 nt, Homo sapiens
  misc_RNA (1)...(19): siRNA sense strand
cccagaauaucuccaagac

SEQ ID NO: 1566522 - RNA, 19 nt, Homo sapiens
  misc_RNA (1)...(19): siRNA sense strand
guguugccguccauuguca

SEQ ID NO: 1566523 - RNA, 19 nt, Homo sapiens
  misc_RNA (1)...(19): siRNA sense strand
gcacccaccucucacucuu

SEQ ID NO: 1566524 - RNA, 19 nt, Homo sapiens
  misc_RNA (1)...(19): siRNA sense strand
gccagcaucuuccucauca

SEQ ID NO: 1566525 - RNA, 19 nt, Homo sapiens
  misc_RNA (1)...(19): siRNA sense strand
ccacuguccucaacgucua

SEQ ID NO: 1566526 - RNA, 19 nt, Homo sapiens
  misc_RNA (1)...(19): siRNA sense strand
ucuauacuauccagacgua

SEQ ID NO: 1566527 - RNA, 19 nt, Homo sapiens
  misc_RNA (1)...(19): siRNA sense strand
ccugguggcuuccuucuuc

SEQ ID NO: 1566528 - RNA, 19 nt, Homo sapiens
  misc_RNA (1)...(19): siRNA sense strand
ggaacaguacuuucuauac

SEQ ID NO: 1566529 - RNA, 19 nt, Homo sapiens
  misc_RNA (1)...(19): siRNA sense strand
uccgaugccugucaaauuc

SEQ ID NO: 1566530 - RNA, 19 nt, Homo sapiens
  misc_RNA (1)...(19): siRNA sense strand
gccuuugccugcugcguuu

SEQ ID NO: 1566531 - RNA, 19 nt, Homo sapiens
  misc_RNA (1)...(19): siRNA sense strand
cuggugcccuggaacagua

SEQ ID NO: 1566532 - RNA, 19 nt, Homo sapiens
  misc_RNA (1)...(19): siRNA sense strand
ugcaacagguggcccuaaa

SEQ ID NO: 1566533 - RNA, 19 nt, Homo sapiens
  misc_RNA (1)...(19): siRNA sense strand
agaggguggugcuggcuuu

SEQ ID NO: 1566534 - RNA, 19 nt, Homo sapiens
  misc_RNA (1)...(19): siRNA sense strand
gcugagugcugaugaugcu

SEQ ID NO: 1566535 - RNA, 19 nt, Homo sapiens
  misc_RNA (1)...(19): siRNA sense strand
gcggugcuguggguacuga

SEQ ID NO: 1566536 - RNA, 19 nt, Homo sapiens
  misc_RNA (1)...(19): siRNA sense strand
uggaacaguacuuucuaua

SEQ ID NO: 1566537 - RNA, 19 nt, Homo sapiens
  misc_RNA (1)...(19): siRNA sense strand
cuucuacccugcucaccaa

SEQ ID NO: 1566538 - RNA, 19 nt, Homo sapiens
  misc_RNA (1)...(19): siRNA sense strand
gguggagggugaggugugu

SEQ ID NO: 1566539 - RNA, 19 nt, Homo sapiens
  misc_RNA (1)...(19): siRNA sense strand
ccauuggcuugcugggaaa

SEQ ID NO: 1566540 - RNA, 19 nt, Homo sapiens
  misc_RNA (1)...(19): siRNA sense strand
ccucaacccugugcuguac

SEQ ID NO: 1566541 - RNA, 19 nt, Homo sapiens
  misc_RNA (1)...(19): siRNA sense strand
cuggaacaguacuuucuau

SEQ ID NO: 1566542 - RNA, 19 nt, Homo sapiens
  misc_RNA (1)...(19): siRNA sense strand
acguaugucuucccuguca

SEQ ID NO: 1566543 - RNA, 19 nt, Homo sapiens
  misc_RNA (1)...(19): siRNA sense strand
ucagggaucugcgguugag

SEQ ID NO: 1566544 - RNA, 19 nt, Homo sapiens
  misc_RNA (1)...(19): siRNA sense strand
gcaacagguggcccuaaag

SEQ ID NO: 1566545 - RNA, 19 nt, Homo sapiens
  misc_RNA (1)...(19): siRNA sense strand
caacagguggcccuaaagc

SEQ ID NO: 1566546 - RNA, 19 nt, Homo sapiens
  misc_RNA (1)...(19): siRNA sense strand
gcacaucgaugaaguuauc

SEQ ID NO: 1566547 - RNA, 19 nt, Homo sapiens
  misc_RNA (1)...(19): siRNA sense strand
gaauggagcacguacaaua

SEQ ID NO: 1566548 - RNA, 19 nt, Homo sapiens
  misc_RNA (1)...(19): siRNA sense strand
gcaaagugcuaauggagaa

SEQ ID NO: 1566549 - RNA, 19 nt, Homo sapiens
  misc_RNA (1)...(19): siRNA sense strand
gaucagagcuauuuaugca

SEQ ID NO: 1566550 - RNA, 19 nt, Homo sapiens
  misc_RNA (1)...(19): siRNA sense strand
ugacaaagcucaugaaucg

SEQ ID NO: 1566551 - RNA, 19 nt, Homo sapiens
  misc_RNA (1)...(19): siRNA sense strand
ccagcacgcucaaaguuua

SEQ ID NO: 1566552 - RNA, 19 nt, Homo sapiens
  misc_RNA (1)...(19): siRNA sense strand
gagaagaucagagcuauuu

SEQ ID NO: 1566553 - RNA, 19 nt, Homo sapiens
  misc_RNA (1)...(19): siRNA sense strand
gaaagucauuuacauccuu

SEQ ID NO: 1566554 - RNA, 19 nt, Homo sapiens
  misc_RNA (1)...(19): siRNA sense strand
gagcuucucuccuguacaa

SEQ ID NO: 1566555 - RNA, 19 nt, Homo sapiens
  misc_RNA (1)...(19): siRNA sense strand
acaguaagcuauuugagaa

SEQ ID NO: 1566556 - RNA, 19 nt, Homo sapiens
  misc_RNA (1)...(19): siRNA sense strand
uaagaacuguuuccauguu

SEQ ID NO: 1566557 - RNA, 19 nt, Homo sapiens
  misc_RNA (1)...(19): siRNA sense strand
guuagacgaugcuauuauu

SEQ ID NO: 1566558 - RNA, 19 nt, Homo sapiens
  misc_RNA (1)...(19): siRNA sense strand
ggaaggaagcccaggauga

SEQ ID NO: 1566559 - RNA, 19 nt, Homo sapiens
  misc_RNA (1)...(19): siRNA sense strand
gaagaucagagcuauuuau

SEQ ID NO: 1566560 - RNA, 19 nt, Homo sapiens
  misc_RNA (1)...(19): siRNA sense strand
cagguuggguugauaauau

SEQ ID NO: 1566561 - RNA, 19 nt, Homo sapiens
  misc_RNA (1)...(19): siRNA sense strand
gacaugcugugcaacuuaa

SEQ ID NO: 1566562 - RNA, 19 nt, Homo sapiens
  misc_RNA (1)...(19): siRNA sense strand
uaacaugaaucccugcaau

SEQ ID NO: 1566563 - RNA, 19 nt, Homo sapiens
  misc_RNA (1)...(19): siRNA sense strand
cuggaagccuuuauacaua

SEQ ID NO: 1566564 - RNA, 19 nt, Homo sapiens
  misc_RNA (1)...(19): siRNA sense strand
caacuuggcaggagccuuu

SEQ ID NO: 1566565 - RNA, 19 nt, Homo sapiens
  misc_RNA (1)...(19): siRNA sense strand
aaauuccucuccuacuuua

SEQ ID NO: 1566566 - RNA, 19 nt, Homo sapiens
  misc_RNA (1)...(19): siRNA sense strand
gaacauugccaucauaagg

SEQ ID NO: 1566567 - RNA, 19 nt, Homo sapiens
  misc_RNA (1)...(19): siRNA sense strand
acauuagucuaccacauua

SEQ ID NO: 1566568 - RNA, 19 nt, Homo sapiens
  misc_RNA (1)...(19): siRNA sense strand
ccagagaguauucaacuuu

SEQ ID NO: 1566569 - RNA, 19 nt, Homo sapiens
  misc_RNA (1)...(19): siRNA sense strand
guuauaaauuccucuccua

SEQ ID NO: 1566570 - RNA, 19 nt, Homo sapiens
  misc_RNA (1)...(19): siRNA sense strand
gcacguacaauacagaaau

SEQ ID NO: 1566571 - RNA, 19 nt, Homo sapiens
  misc_RNA (1)...(19): siRNA sense strand
gaacugguuggaauacauu

SEQ ID NO: 1566572 - RNA, 19 nt, Homo sapiens
  misc_RNA (1)...(19): siRNA sense strand
guccaaaugugcaugagaa

SEQ ID NO: 1566573 - RNA, 19 nt, Homo sapiens
  misc_RNA (1)...(19): siRNA sense strand
cacccaagcugaucagaga

SEQ ID NO: 1566574 - RNA, 19 nt, Homo sapiens
  misc_RNA (1)...(19): siRNA sense strand
cagaaugacuuugccauca

SEQ ID NO: 1566575 - RNA, 19 nt, Homo sapiens
  misc_RNA (1)...(19): siRNA sense strand
ggcccaauauuuauaccua

SEQ ID NO: 1566576 - RNA, 19 nt, Homo sapiens
  misc_RNA (1)...(19): siRNA sense strand
gcuuauggcuagucagaug

SEQ ID NO: 1566577 - RNA, 19 nt, Homo sapiens
  misc_RNA (1)...(19): siRNA sense strand
cagagaguauucaacuuug

SEQ ID NO: 1566578 - RNA, 19 nt, Homo sapiens
  misc_RNA (1)...(19): siRNA sense strand
uaaauuccucuccuacuuu

SEQ ID NO: 1566579 - RNA, 19 nt, Homo sapiens
  misc_RNA (1)...(19): siRNA sense strand
gagaaagucaaagaaguuu

SEQ ID NO: 1566580 - RNA, 19 nt, Homo sapiens
  misc_RNA (1)...(19): siRNA sense strand
cauaaaagcuacuccaaug

SEQ ID NO: 1566581 - RNA, 19 nt, Homo sapiens
  misc_RNA (1)...(19): siRNA sense strand
augcagaucucaaucagaa

SEQ ID NO: 1566582 - RNA, 19 nt, Homo sapiens
  misc_RNA (1)...(19): siRNA sense strand
gacaguaagcuauuugaga

SEQ ID NO: 1566583 - RNA, 19 nt, Homo sapiens
  misc_RNA (1)...(19): siRNA sense strand
cggaaugucugguucuuca

SEQ ID NO: 1566584 - RNA, 19 nt, Homo sapiens
  misc_RNA (1)...(19): siRNA sense strand
caacauuagucuaccacau

SEQ ID NO: 1566585 - RNA, 19 nt, Homo sapiens
  misc_RNA (1)...(19): siRNA sense strand
ucacagaccuaagucaaca

SEQ ID NO: 1566586 - RNA, 19 nt, Homo sapiens
  misc_RNA (1)...(19): siRNA sense strand
ccugaacauugccaucaua

SEQ ID NO: 1566587 - RNA, 19 nt, Homo sapiens
  misc_RNA (1)...(19): siRNA sense strand
gauccuagacaguaagcua

SEQ ID NO: 1566588 - RNA, 19 nt, Homo sapiens
  misc_RNA (1)...(19): siRNA sense strand
uaaauggaccuaauggaau

SEQ ID NO: 1566589 - RNA, 19 nt, Homo sapiens
  misc_RNA (1)...(19): siRNA sense strand
gcuggaagccuuuauacau

SEQ ID NO: 1566590 - RNA, 19 nt, Homo sapiens
  misc_RNA (1)...(19): siRNA sense strand
cggcagcucuugcuuaugg

SEQ ID NO: 1566591 - RNA, 19 nt, Homo sapiens
  misc_RNA (1)...(19): siRNA sense strand
gcagaucucaaucagaaug

SEQ ID NO: 1566592 - RNA, 19 nt, Homo sapiens
  misc_RNA (1)...(19): siRNA sense strand
auaaauuccucuccuacuu

SEQ ID NO: 1566593 - RNA, 19 nt, Homo sapiens
  misc_RNA (1)...(19): siRNA sense strand
gcuguaggaugguauacug

SEQ ID NO: 1566594 - RNA, 19 nt, Homo sapiens
  misc_RNA (1)...(19): siRNA sense strand
caaaugugcaugagaagau

SEQ ID NO: 1566595 - RNA, 19 nt, Homo sapiens
  misc_RNA (1)...(19): siRNA sense strand
ugagaaagucaaagaaguu

SEQ ID NO: 1566596 - RNA, 19 nt, Homo sapiens
  misc_RNA (1)...(19): siRNA sense strand
gaaauauucacuaccucuu

SEQ ID NO: 1566597 - RNA, 19 nt, Homo sapiens
  misc_RNA (1)...(19): siRNA sense strand
gcccagaccugaaagucau

SEQ ID NO: 1566598 - RNA, 19 nt, Homo sapiens
  misc_RNA (1)...(19): siRNA sense strand
gcaacagcuucacaucaca

SEQ ID NO: 1566599 - RNA, 19 nt, Homo sapiens
  misc_RNA (1)...(19): siRNA sense strand
ucacaucacaguacuggaa

SEQ ID NO: 1566600 - RNA, 19 nt, Homo sapiens
  misc_RNA (1)...(19): siRNA sense strand
ugacgacacucucagacau

SEQ ID NO: 1566601 - RNA, 19 nt, Homo sapiens
  misc_RNA (1)...(19): siRNA sense strand
gcucaugaaucggcuuuua

SEQ ID NO: 1566602 - RNA, 19 nt, Homo sapiens
  misc_RNA (1)...(19): siRNA sense strand
aaauggaccuaauggaauc

SEQ ID NO: 1566603 - RNA, 19 nt, Homo sapiens
  misc_RNA (1)...(19): siRNA sense strand
ucuacugccuauucaaauu

SEQ ID NO: 1566604 - RNA, 19 nt, Homo sapiens
  misc_RNA (1)...(19): siRNA sense strand
ucucagacaugcugugcaa

SEQ ID NO: 1566605 - RNA, 19 nt, Homo sapiens
  misc_RNA (1)...(19): siRNA sense strand
agacaugcugugcaacuua

SEQ ID NO: 1566606 - RNA, 19 nt, Homo sapiens
  misc_RNA (1)...(19): siRNA sense strand
auacugcccucuuccuuau

SEQ ID NO: 1566607 - RNA, 19 nt, Homo sapiens
  misc_RNA (1)...(19): siRNA sense strand
auacagaaaugcugauguc

SEQ ID NO: 1566608 - RNA, 19 nt, Homo sapiens
  misc_RNA (1)...(19): siRNA sense strand
cauuaucuaugacugcuau

SEQ ID NO: 1566609 - RNA, 19 nt, Homo sapiens
  misc_RNA (1)...(19): siRNA sense strand
gcaguucacagaccuaagu

SEQ ID NO: 1566610 - RNA, 19 nt, Homo sapiens
  misc_RNA (1)...(19): siRNA sense strand
gaagcacaucgaugaaguu

SEQ ID NO: 1566611 - RNA, 19 nt, Homo sapiens
  misc_RNA (1)...(19): siRNA sense strand
ugaagcacaucgaugaagu

SEQ ID NO: 1566612 - RNA, 19 nt, Homo sapiens
  misc_RNA (1)...(19): siRNA sense strand
uggaagccuuuauacauau

SEQ ID NO: 1566613 - RNA, 19 nt, Homo sapiens
  misc_RNA (1)...(19): siRNA sense strand
ggaagccuuuauacauauc

SEQ ID NO: 1566614 - RNA, 19 nt, Homo sapiens
  misc_RNA (1)...(19): siRNA sense strand
gggaauggagcacguacaa

SEQ ID NO: 1566615 - RNA, 19 nt, Homo sapiens
  misc_RNA (1)...(19): siRNA sense strand
ucaggaggccaaaugcuaa

SEQ ID NO: 1566616 - RNA, 19 nt, Homo sapiens
  misc_RNA (1)...(19): siRNA sense strand
gcagacguaauuccaguug

SEQ ID NO: 1566617 - RNA, 19 nt, Homo sapiens
  misc_RNA (1)...(19): siRNA sense strand
auaaauggaccuaauggaa

SEQ ID NO: 1566618 - RNA, 19 nt, Homo sapiens
  misc_RNA (1)...(19): siRNA sense strand
gcaaguccauucucaucac

SEQ ID NO: 1566619 - RNA, 19 nt, Homo sapiens
  misc_RNA (1)...(19): siRNA sense strand
ccuagacaguaagcuauuu

SEQ ID NO: 1566620 - RNA, 19 nt, Homo sapiens
  misc_RNA (1)...(19): siRNA sense strand
gaugguauacugcaguuca

SEQ ID NO: 1566621 - RNA, 19 nt, Homo sapiens
  misc_RNA (1)...(19): siRNA sense strand
agacguaauuccaguugau

SEQ ID NO: 1566622 - RNA, 19 nt, Homo sapiens
  misc_RNA (1)...(19): siRNA sense strand
gaaggaagcccaggaugac

SEQ ID NO: 1566623 - RNA, 19 nt, Homo sapiens
  misc_RNA (1)...(19): siRNA sense strand
ucagauggcucggaauguc

SEQ ID NO: 1566624 - RNA, 19 nt, Homo sapiens
  misc_RNA (1)...(19): siRNA sense strand
ggaagcccaggaugacaaa

SEQ ID NO: 1566625 - RNA, 19 nt, Homo sapiens
  misc_RNA (1)...(19): siRNA sense strand
acauaucucuacugccuau

SEQ ID NO: 1566626 - RNA, 19 nt, Homo sapiens
  misc_RNA (1)...(19): siRNA sense strand
gcugaugucugagcugagu

SEQ ID NO: 1566627 - RNA, 19 nt, Homo sapiens
  misc_RNA (1)...(19): siRNA sense strand
gauacagucgucaaucuca

SEQ ID NO: 1566628 - RNA, 19 nt, Homo sapiens
  misc_RNA (1)...(19): siRNA sense strand
caucauaaggcccuccauu

SEQ ID NO: 1566629 - RNA, 19 nt, Homo sapiens
  misc_RNA (1)...(19): siRNA sense strand
gugguuagacgaugcuauu

SEQ ID NO: 1566630 - RNA, 19 nt, Homo sapiens
  misc_RNA (1)...(19): siRNA sense strand
aauacugcccucuuccuua

SEQ ID NO: 1566631 - RNA, 19 nt, Homo sapiens
  misc_RNA (1)...(19): siRNA sense strand
gcuccgaaauauucacuac

SEQ ID NO: 1566632 - RNA, 19 nt, Homo sapiens
  misc_RNA (1)...(19): siRNA sense strand
cauaaggcccuccauugug

SEQ ID NO: 1566633 - RNA, 19 nt, Homo sapiens
  misc_RNA (1)...(19): siRNA sense strand
ucauaaggcccuccauugu

SEQ ID NO: 1566634 - RNA, 19 nt, Homo sapiens
  misc_RNA (1)...(19): siRNA sense strand
ccaagcugaucagagauug

SEQ ID NO: 1566635 - RNA, 19 nt, Homo sapiens
  misc_RNA (1)...(19): siRNA sense strand
gcuauuauugacgagauua

SEQ ID NO: 1566636 - RNA, 19 nt, Homo sapiens
  misc_RNA (1)...(19): siRNA sense strand
uagacgaugcuauuauuga

SEQ ID NO: 1566637 - RNA, 19 nt, Homo sapiens
  misc_RNA (1)...(19): siRNA sense strand
caugagaagaucagagcua

SEQ ID NO: 1566638 - RNA, 19 nt, Homo sapiens
  misc_RNA (1)...(19): siRNA sense strand
gcuaauggagaagcuguuu

SEQ ID NO: 1566639 - RNA, 19 nt, Homo sapiens
  misc_RNA (1)...(19): siRNA sense strand
gaccagagaguauucaacu

SEQ ID NO: 1566640 - RNA, 19 nt, Homo sapiens
  misc_RNA (1)...(19): siRNA sense strand
caaauuguaaccugaagca

SEQ ID NO: 1566641 - RNA, 19 nt, Homo sapiens
  misc_RNA (1)...(19): siRNA sense strand
ugaacugguuggaauacau

SEQ ID NO: 1566642 - RNA, 19 nt, Homo sapiens
  misc_RNA (1)...(19): siRNA sense strand
gagcacguacaauacagaa

SEQ ID NO: 1566643 - RNA, 19 nt, Homo sapiens
  misc_RNA (1)...(19): siRNA sense strand
cagcaacagcuucacauca

SEQ ID NO: 1566644 - RNA, 19 nt, Homo sapiens
  misc_RNA (1)...(19): siRNA sense strand
gacguaauuccaguugaua

SEQ ID NO: 1566645 - RNA, 19 nt, Homo sapiens
  misc_RNA (1)...(19): siRNA sense strand
uugauucccuugagugguu

SEQ ID NO: 1566646 - RNA, 19 nt, Homo sapiens
  misc_RNA (1)...(19): siRNA sense strand
gacaucagcucucuaagga

SEQ ID NO: 1566647 - RNA, 19 nt, Homo sapiens
  misc_RNA (1)...(19): siRNA sense strand
cagccaagcucaucaaugg

SEQ ID NO: 1566648 - RNA, 19 nt, Homo sapiens
  misc_RNA (1)...(19): siRNA sense strand
ccauggagaugcugaagau

SEQ ID NO: 1566649 - RNA, 19 nt, Homo sapiens
  misc_RNA (1)...(19): siRNA sense strand
ucgcacagguggucuacuu

SEQ ID NO: 1566650 - RNA, 19 nt, Homo sapiens
  misc_RNA (1)...(19): siRNA sense strand
gggagcugcugugaacuug

SEQ ID NO: 1566651 - RNA, 19 nt, Homo sapiens
  misc_RNA (1)...(19): siRNA sense strand
gagcugcugugaacuugac

SEQ ID NO: 1566652 - RNA, 19 nt, Homo sapiens
  misc_RNA (1)...(19): siRNA sense strand
agaccaggcugcagaacca

SEQ ID NO: 1566653 - RNA, 19 nt, Homo sapiens
  misc_RNA (1)...(19): siRNA sense strand
gaagacgcggcuccaguca

SEQ ID NO: 1566654 - RNA, 19 nt, Homo sapiens
  misc_RNA (1)...(19): siRNA sense strand
cgacaucagcucucuaagg

SEQ ID NO: 1566655 - RNA, 19 nt, Homo sapiens
  misc_RNA (1)...(19): siRNA sense strand
ugacccugcuuaaagagau

SEQ ID NO: 1566656 - RNA, 19 nt, Homo sapiens
  misc_RNA (1)...(19): siRNA sense strand
ccgaggagaagucgccuuu

SEQ ID NO: 1566657 - RNA, 19 nt, Homo sapiens
  misc_RNA (1)...(19): siRNA sense strand
caacgaggacaccuacucu

SEQ ID NO: 1566658 - RNA, 19 nt, Homo sapiens
  misc_RNA (1)...(19): siRNA sense strand
ccacgcugcucagggaugu

SEQ ID NO: 1566659 - RNA, 19 nt, Homo sapiens
  misc_RNA (1)...(19): siRNA sense strand
agacgcggcuccagucacu

SEQ ID NO: 1566660 - RNA, 19 nt, Homo sapiens
  misc_RNA (1)...(19): siRNA sense strand
ccaagaccaggcugcagaa

SEQ ID NO: 1566661 - RNA, 19 nt, Homo sapiens
  misc_RNA (1)...(19): siRNA sense strand
ugaccacgcccauggagau

SEQ ID NO: 1566662 - RNA, 19 nt, Homo sapiens
  misc_RNA (1)...(19): siRNA sense strand
gcauugccggucucuacaa

SEQ ID NO: 1566663 - RNA, 19 nt, Homo sapiens
  misc_RNA (1)...(19): siRNA sense strand
ggacugugccaggaagauc

SEQ ID NO: 1566664 - RNA, 19 nt, Homo sapiens
  misc_RNA (1)...(19): siRNA sense strand
ccaucgaccuggccaagac

SEQ ID NO: 1566665 - RNA, 19 nt, Homo sapiens
  misc_RNA (1)...(19): siRNA sense strand
gacccugcuuaaagagaug

SEQ ID NO: 1566666 - RNA, 19 nt, Homo sapiens
  misc_RNA (1)...(19): siRNA sense strand
ccugugauguggugaagac

SEQ ID NO: 1566667 - RNA, 19 nt, Homo sapiens
  misc_RNA (1)...(19): siRNA sense strand
gaagauggacagucaauug

SEQ ID NO: 1566668 - RNA, 19 nt, Homo sapiens
  misc_RNA (1)...(19): siRNA sense strand
agaaggagauuguaaagga

SEQ ID NO: 1566669 - RNA, 19 nt, Homo sapiens
  misc_RNA (1)...(19): siRNA sense strand
gaaggagauuguaaaggaa

SEQ ID NO: 1566670 - RNA, 19 nt, Homo sapiens
  misc_RNA (1)...(19): siRNA sense strand
gacaacggcuguacccaaa

SEQ ID NO: 1566671 - RNA, 19 nt, Homo sapiens
  misc_RNA (1)...(19): siRNA sense strand
caauggcuaucaucacuuu

SEQ ID NO: 1566672 - RNA, 19 nt, Homo sapiens
  misc_RNA (1)...(19): siRNA sense strand
aaaggaagauggacaguca

SEQ ID NO: 1566673 - RNA, 19 nt, Homo sapiens
  misc_RNA (1)...(19): siRNA sense strand
gauggacagucaauuguug

SEQ ID NO: 1566674 - RNA, 19 nt, Homo sapiens
  misc_RNA (1)...(19): siRNA sense strand
aagaacagcucaaggugaa

SEQ ID NO: 1566675 - RNA, 19 nt, Homo sapiens
  misc_RNA (1)...(19): siRNA sense strand
cgaaauaaguccaccuucu

SEQ ID NO: 1566676 - RNA, 19 nt, Homo sapiens
  misc_RNA (1)...(19): siRNA sense strand
gcagucuaaucaucugaaa

SEQ ID NO: 1566677 - RNA, 19 nt, Homo sapiens
  misc_RNA (1)...(19): siRNA sense strand
gugcagagaugcuguaucg

SEQ ID NO: 1566678 - RNA, 19 nt, Homo sapiens
  misc_RNA (1)...(19): siRNA sense strand
caucaaugguuaccgaaau

SEQ ID NO: 1566679 - RNA, 19 nt, Homo sapiens
  misc_RNA (1)...(19): siRNA sense strand
gaaauuugcagcucagaag

SEQ ID NO: 1566680 - RNA, 19 nt, Homo sapiens
  misc_RNA (1)...(19): siRNA sense strand
gaaauaaguccaccuucuc

SEQ ID NO: 1566681 - RNA, 19 nt, Homo sapiens
  misc_RNA (1)...(19): siRNA sense strand
caacggcuguacccaaauc

SEQ ID NO: 1566682 - RNA, 19 nt, Homo sapiens
  misc_RNA (1)...(19): siRNA sense strand
caaggugauucaagccauu

SEQ ID NO: 1566683 - RNA, 19 nt, Homo sapiens
  misc_RNA (1)...(19): siRNA sense strand
caucaccaacucugaauuu

SEQ ID NO: 1566684 - RNA, 19 nt, Homo sapiens
  misc_RNA (1)...(19): siRNA sense strand
ugucuucuccauccuauua

SEQ ID NO: 1566685 - RNA, 19 nt, Homo sapiens
  misc_RNA (1)...(19): siRNA sense strand
ccuaucagcuucuguuugg

SEQ ID NO: 1566686 - RNA, 19 nt, Homo sapiens
  misc_RNA (1)...(19): siRNA sense strand
gcauacaucucggguccuu

SEQ ID NO: 1566687 - RNA, 19 nt, Homo sapiens
  misc_RNA (1)...(19): siRNA sense strand
aggaaaggcuggcugaugu

SEQ ID NO: 1566688 - RNA, 19 nt, Homo sapiens
  misc_RNA (1)...(19): siRNA sense strand
gaacagcucaaggugaaau

SEQ ID NO: 1566689 - RNA, 19 nt, Homo sapiens
  misc_RNA (1)...(19): siRNA sense strand
ccagauggcaauccaaaga

SEQ ID NO: 1566690 - RNA, 19 nt, Homo sapiens
  misc_RNA (1)...(19): siRNA sense strand
gagguugagcuaugaagaa

SEQ ID NO: 1566691 - RNA, 19 nt, Homo sapiens
  misc_RNA (1)...(19): siRNA sense strand
acagucaaguggcgcagua

SEQ ID NO: 1566692 - RNA, 19 nt, Homo sapiens
  misc_RNA (1)...(19): siRNA sense strand
ggacugcagccuucaaugg

SEQ ID NO: 1566693 - RNA, 19 nt, Homo sapiens
  misc_RNA (1)...(19): siRNA sense strand
guucagaaggagauuguaa

SEQ ID NO: 1566694 - RNA, 19 nt, Homo sapiens
  misc_RNA (1)...(19): siRNA sense strand
gaaaggcuggcugauguug

SEQ ID NO: 1566695 - RNA, 19 nt, Homo sapiens
  misc_RNA (1)...(19): siRNA sense strand
acaccacucuggagguuga

SEQ ID NO: 1566696 - RNA, 19 nt, Homo sapiens
  misc_RNA (1)...(19): siRNA sense strand
ugacaccacucuggagguu

SEQ ID NO: 1566697 - RNA, 19 nt, Homo sapiens
  misc_RNA (1)...(19): siRNA sense strand
gcuccucuuuacucgauaa

SEQ ID NO: 1566698 - RNA, 19 nt, Homo sapiens
  misc_RNA (1)...(19): siRNA sense strand
ggagcugacuggagugaac

SEQ ID NO: 1566699 - RNA, 19 nt, Homo sapiens
  misc_RNA (1)...(19): siRNA sense strand
ggagagaugggaacguugu

SEQ ID NO: 1566700 - RNA, 19 nt, Homo sapiens
  misc_RNA (1)...(19): siRNA sense strand
ggagcccugccuuguauuu

SEQ ID NO: 1566701 - RNA, 19 nt, Homo sapiens
  misc_RNA (1)...(19): siRNA sense strand
gugccggacugcauuacaa

SEQ ID NO: 1566702 - RNA, 19 nt, Homo sapiens
  misc_RNA (1)...(19): siRNA sense strand
ggucaagcagagaagauuu

SEQ ID NO: 1566703 - RNA, 19 nt, Homo sapiens
  misc_RNA (1)...(19): siRNA sense strand
ggagcuccauguucagaag

SEQ ID NO: 1566704 - RNA, 19 nt, Homo sapiens
  misc_RNA (1)...(19): siRNA sense strand
ggaaaggcuggcugauguu

SEQ ID NO: 1566705 - RNA, 19 nt, Homo sapiens
  misc_RNA (1)...(19): siRNA sense strand
cauggugaauccacuagga

SEQ ID NO: 1566706 - RNA, 19 nt, Homo sapiens
  misc_RNA (1)...(19): siRNA sense strand
cuugacaucugcuguggaa

SEQ ID NO: 1566707 - RNA, 19 nt, Homo sapiens
  misc_RNA (1)...(19): siRNA sense strand
cacaauggcuaucaucacu

SEQ ID NO: 1566708 - RNA, 19 nt, Homo sapiens
  misc_RNA (1)...(19): siRNA sense strand
gcacagccucagauacuuc

SEQ ID NO: 1566709 - RNA, 19 nt, Homo sapiens
  misc_RNA (1)...(19): siRNA sense strand
caucagcagucucccuauc

SEQ ID NO: 1566710 - RNA, 19 nt, Homo sapiens
  misc_RNA (1)...(19): siRNA sense strand
cacgaaaugucagaaagga

SEQ ID NO: 1566711 - RNA, 19 nt, Homo sapiens
  misc_RNA (1)...(19): siRNA sense strand
ugccagggcugcuaaaguc

SEQ ID NO: 1566712 - RNA, 19 nt, Homo sapiens
  misc_RNA (1)...(19): siRNA sense strand
cuguggaacuggugugauu

SEQ ID NO: 1566713 - RNA, 19 nt, Homo sapiens
  misc_RNA (1)...(19): siRNA sense strand
gcacacaauggcuaucauc

SEQ ID NO: 1566714 - RNA, 19 nt, Homo sapiens
  misc_RNA (1)...(19): siRNA sense strand
acuagagucuuacauccaa

SEQ ID NO: 1566715 - RNA, 19 nt, Homo sapiens
  misc_RNA (1)...(19): siRNA sense strand
aaacaucccugagaaacac

SEQ ID NO: 1566716 - RNA, 19 nt, Homo sapiens
  misc_RNA (1)...(19): siRNA sense strand
ggaagauggacagucaauu

SEQ ID NO: 1566717 - RNA, 19 nt, Homo sapiens
  misc_RNA (1)...(19): siRNA sense strand
ucaauggcaucaccaacuc

SEQ ID NO: 1566718 - RNA, 19 nt, Homo sapiens
  misc_RNA (1)...(19): siRNA sense strand
ggagauuguaaaggaauuu

SEQ ID NO: 1566719 - RNA, 19 nt, Homo sapiens
  misc_RNA (1)...(19): siRNA sense strand
ggagguugagcuaugaaga

SEQ ID NO: 1566720 - RNA, 19 nt, Homo sapiens
  misc_RNA (1)...(19): siRNA sense strand
aucaaugguuaccgaaaua

SEQ ID NO: 1566721 - RNA, 19 nt, Homo sapiens
  misc_RNA (1)...(19): siRNA sense strand
ugagaaacacagucaagug

SEQ ID NO: 1566722 - RNA, 19 nt, Homo sapiens
  misc_RNA (1)...(19): siRNA sense strand
gugcuccucuuuacucgau

SEQ ID NO: 1566723 - RNA, 19 nt, Homo sapiens
  misc_RNA (1)...(19): siRNA sense strand
ucaagccauucgaaacuuc

SEQ ID NO: 1566724 - RNA, 19 nt, Homo sapiens
  misc_RNA (1)...(19): siRNA sense strand
gccacgaaaugucagaaag

SEQ ID NO: 1566725 - RNA, 19 nt, Homo sapiens
  misc_RNA (1)...(19): siRNA sense strand
cagggcugcuaaagucaaa

SEQ ID NO: 1566726 - RNA, 19 nt, Homo sapiens
  misc_RNA (1)...(19): siRNA sense strand
ucaaguggcgcaguacuau

SEQ ID NO: 1566727 - RNA, 19 nt, Homo sapiens
  misc_RNA (1)...(19): siRNA sense strand
cuccagacccugcuaagaa

SEQ ID NO: 1566728 - RNA, 19 nt, Homo sapiens
  misc_RNA (1)...(19): siRNA sense strand
ugaccucacuuuacuucca

SEQ ID NO: 1566729 - RNA, 19 nt, Homo sapiens
  misc_RNA (1)...(19): siRNA sense strand
uuggagcccugccuuguau

SEQ ID NO: 1566730 - RNA, 19 nt, Homo sapiens
  misc_RNA (1)...(19): siRNA sense strand
gaggcucucuugucuucuc

SEQ ID NO: 1566731 - RNA, 19 nt, Homo sapiens
  misc_RNA (1)...(19): siRNA sense strand
gaacucugacaccauccuu

SEQ ID NO: 1566732 - RNA, 19 nt, Homo sapiens
  misc_RNA (1)...(19): siRNA sense strand
ggacugcuucccugguaug

SEQ ID NO: 1566733 - RNA, 19 nt, Homo sapiens
  misc_RNA (1)...(19): siRNA sense strand
ucacaguccgcaccaauag

SEQ ID NO: 1566734 - RNA, 19 nt, Homo sapiens
  misc_RNA (1)...(19): siRNA sense strand
aagcuguaccuguggauuu

SEQ ID NO: 1566735 - RNA, 19 nt, Homo sapiens
  misc_RNA (1)...(19): siRNA sense strand
guugagcuaugaagaacag

SEQ ID NO: 1566736 - RNA, 19 nt, Homo sapiens
  misc_RNA (1)...(19): siRNA sense strand
caccauccuucuugacauc

SEQ ID NO: 1566737 - RNA, 19 nt, Homo sapiens
  misc_RNA (1)...(19): siRNA sense strand
ucuucuccauccuauuaua

SEQ ID NO: 1566738 - RNA, 19 nt, Homo sapiens
  misc_RNA (1)...(19): siRNA sense strand
cagcucaaggugaaauuug

SEQ ID NO: 1566739 - RNA, 19 nt, Homo sapiens
  misc_RNA (1)...(19): siRNA sense strand
auuauacccucuccuguca

SEQ ID NO: 1566740 - RNA, 19 nt, Homo sapiens
  misc_RNA (1)...(19): siRNA sense strand
gaggagcuccauguucaga

SEQ ID NO: 1566741 - RNA, 19 nt, Homo sapiens
  misc_RNA (1)...(19): siRNA sense strand
ucaaugguuaccgaaauaa

SEQ ID NO: 1566742 - RNA, 19 nt, Homo sapiens
  misc_RNA (1)...(19): siRNA sense strand
cuccugucaucaaugguua

SEQ ID NO: 1566743 - RNA, 19 nt, Homo sapiens
  misc_RNA (1)...(19): siRNA sense strand
gccauccacacgcuaguuu

SEQ ID NO: 1566744 - RNA, 19 nt, Homo sapiens
  misc_RNA (1)...(19): siRNA sense strand
ggcuugaccucacuuuacu

SEQ ID NO: 1566745 - RNA, 19 nt, Homo sapiens
  misc_RNA (1)...(19): siRNA sense strand
gcucacaguccgcaccaau

SEQ ID NO: 1566746 - RNA, 19 nt, Homo sapiens
  misc_RNA (1)...(19): siRNA sense strand
caggaaaggcuggcugaug

SEQ ID NO: 1566747 - RNA, 19 nt, Homo sapiens
  misc_RNA (1)...(19): siRNA sense strand
gauacuucaucuccauggu

SEQ ID NO: 1566748 - RNA, 19 nt, Homo sapiens
  misc_RNA (1)...(19): siRNA sense strand
gacaucugcuguggaacug

SEQ ID NO: 1566749 - RNA, 19 nt, Homo sapiens
  misc_RNA (1)...(19): siRNA sense strand
gacaccauccuucuugaca

SEQ ID NO: 1566750 - RNA, 19 nt, Homo sapiens
  misc_RNA (1)...(19): siRNA sense strand
ggaacccuacaucuuugaa

SEQ ID NO: 1566751 - RNA, 19 nt, Homo sapiens
  misc_RNA (1)...(19): siRNA sense strand
gucaaguggcgcaguacua

SEQ ID NO: 1566752 - RNA, 19 nt, Homo sapiens
  misc_RNA (1)...(19): siRNA sense strand
uuggagagaugggaacguu

SEQ ID NO: 1566753 - RNA, 19 nt, Homo sapiens
  misc_RNA (1)...(19): siRNA sense strand
gugggucucuucuccaaac

SEQ ID NO: 1566754 - RNA, 19 nt, Homo sapiens
  misc_RNA (1)...(19): siRNA sense strand
aaggcuggcugauguugug

SEQ ID NO: 1566755 - RNA, 19 nt, Homo sapiens
  misc_RNA (1)...(19): siRNA sense strand
caaaugcucaauggaguca

SEQ ID NO: 1566756 - RNA, 19 nt, Homo sapiens
  misc_RNA (1)...(19): siRNA sense strand
aaguccaccuucucuguga

SEQ ID NO: 1566757 - RNA, 19 nt, Homo sapiens
  misc_RNA (1)...(19): siRNA sense strand
ggugaauccacuaggaaug

SEQ ID NO: 1566758 - RNA, 19 nt, Homo sapiens
  misc_RNA (1)...(19): siRNA sense strand
caagcuccauggugaaucc

SEQ ID NO: 1566759 - RNA, 19 nt, Homo sapiens
  misc_RNA (1)...(19): siRNA sense strand
gcaucaccaacucugaauu

SEQ ID NO: 1566760 - RNA, 19 nt, Homo sapiens
  misc_RNA (1)...(19): siRNA sense strand
ugugauagccacgaaaugu

SEQ ID NO: 1566761 - RNA, 19 nt, Homo sapiens
  misc_RNA (1)...(19): siRNA sense strand
ccugggaacuuggagagau

SEQ ID NO: 1566762 - RNA, 19 nt, Homo sapiens
  misc_RNA (1)...(19): siRNA sense strand
guccagauggcaauccaaa

SEQ ID NO: 1566763 - RNA, 19 nt, Homo sapiens
  misc_RNA (1)...(19): siRNA sense strand
ucagaaggagauuguaaag

SEQ ID NO: 1566764 - RNA, 19 nt, Homo sapiens
  misc_RNA (1)...(19): siRNA sense strand
gugaauccacuaggaaugu

SEQ ID NO: 1566765 - RNA, 19 nt, Homo sapiens
  misc_RNA (1)...(19): siRNA sense strand
gaacccuacaucuuugaag

SEQ ID NO: 1566766 - RNA, 19 nt, Homo sapiens
  misc_RNA (1)...(19): siRNA sense strand
gcagucucccuaucagcuu

SEQ ID NO: 1566767 - RNA, 19 nt, Homo sapiens
  misc_RNA (1)...(19): siRNA sense strand
ggaaacuucuccucccauu

SEQ ID NO: 1566768 - RNA, 19 nt, Homo sapiens
  misc_RNA (1)...(19): siRNA sense strand
cuacagcacugaaccuuug

SEQ ID NO: 1566769 - RNA, 19 nt, Homo sapiens
  misc_RNA (1)...(19): siRNA sense strand
gcacugaaccuuugaucuc

SEQ ID NO: 1566770 - RNA, 19 nt, Homo sapiens
  misc_RNA (1)...(19): siRNA sense strand
caggagacuugcugggaaa

SEQ ID NO: 1566771 - RNA, 19 nt, Homo sapiens
  misc_RNA (1)...(19): siRNA sense strand
uacaacugcugcuguggaa

SEQ ID NO: 1566772 - RNA, 19 nt, Homo sapiens
  misc_RNA (1)...(19): siRNA sense strand
gaaacuucuccucccauuc

SEQ ID NO: 1566773 - RNA, 19 nt, Homo sapiens
  misc_RNA (1)...(19): siRNA sense strand
cagcuggguuccucucucu

SEQ ID NO: 1566774 - RNA, 19 nt, Homo sapiens
  misc_RNA (1)...(19): siRNA sense strand
caacugcugcuguggaaac

SEQ ID NO: 1566775 - RNA, 19 nt, Homo sapiens
  misc_RNA (1)...(19): siRNA sense strand
cugcugcuguggaaacuuc

SEQ ID NO: 1566776 - RNA, 19 nt, Homo sapiens
  misc_RNA (1)...(19): siRNA sense strand
gagccaagaucguuaaaga

SEQ ID NO: 1566777 - RNA, 19 nt, Homo sapiens
  misc_RNA (1)...(19): siRNA sense strand
gaacuagauuacuuugcua

SEQ ID NO: 1566778 - RNA, 19 nt, Homo sapiens
  misc_RNA (1)...(19): siRNA sense strand
gcagacaagauccaacuua

SEQ ID NO: 1566779 - RNA, 19 nt, Homo sapiens
  misc_RNA (1)...(19): siRNA sense strand
ugacaaauauuccuuagca

SEQ ID NO: 1566780 - RNA, 19 nt, Homo sapiens
  misc_RNA (1)...(19): siRNA sense strand
gccaagaucguuaaagaua

SEQ ID NO: 1566781 - RNA, 19 nt, Homo sapiens
  misc_RNA (1)...(19): siRNA sense strand
caagaucccucuggaaaga

SEQ ID NO: 1566782 - RNA, 19 nt, Homo sapiens
  misc_RNA (1)...(19): siRNA sense strand
gggcaaggauguucuguuc

SEQ ID NO: 1566783 - RNA, 19 nt, Homo sapiens
  misc_RNA (1)...(19): siRNA sense strand
gagaguagacuucaauguu

SEQ ID NO: 1566784 - RNA, 19 nt, Homo sapiens
  misc_RNA (1)...(19): siRNA sense strand
gaaggaacuagauuacuuu

SEQ ID NO: 1566785 - RNA, 19 nt, Homo sapiens
  misc_RNA (1)...(19): siRNA sense strand
caaagucaaugagaugauu

SEQ ID NO: 1566786 - RNA, 19 nt, Homo sapiens
  misc_RNA (1)...(19): siRNA sense strand
caagcaaggcuaauuguuu

SEQ ID NO: 1566787 - RNA, 19 nt, Homo sapiens
  misc_RNA (1)...(19): siRNA sense strand
caacaagaaucaugcucaa

SEQ ID NO: 1566788 - RNA, 19 nt, Homo sapiens
  misc_RNA (1)...(19): siRNA sense strand
gauuggugcuucccuguuu

SEQ ID NO: 1566789 - RNA, 19 nt, Homo sapiens
  misc_RNA (1)...(19): siRNA sense strand
caagaaucaugcucaaguu

SEQ ID NO: 1566790 - RNA, 19 nt, Homo sapiens
  misc_RNA (1)...(19): siRNA sense strand
ggacgucuaugucaaugau

SEQ ID NO: 1566791 - RNA, 19 nt, Homo sapiens
  misc_RNA (1)...(19): siRNA sense strand
ggacaaagucaaugagaug

SEQ ID NO: 1566792 - RNA, 19 nt, Homo sapiens
  misc_RNA (1)...(19): siRNA sense strand
ugaagaaggaacuagauua

SEQ ID NO: 1566793 - RNA, 19 nt, Homo sapiens
  misc_RNA (1)...(19): siRNA sense strand
gcacaccgcgcucauaguu

SEQ ID NO: 1566794 - RNA, 19 nt, Homo sapiens
  misc_RNA (1)...(19): siRNA sense strand
gacaagauccaacuuauca

SEQ ID NO: 1566795 - RNA, 19 nt, Homo sapiens
  misc_RNA (1)...(19): siRNA sense strand
agaaggaacuagauuacuu

SEQ ID NO: 1566796 - RNA, 19 nt, Homo sapiens
  misc_RNA (1)...(19): siRNA sense strand
gagcaucacuuuccaagcu

SEQ ID NO: 1566797 - RNA, 19 nt, Homo sapiens
  misc_RNA (1)...(19): siRNA sense strand
gugcuucccuguuugauga

SEQ ID NO: 1566798 - RNA, 19 nt, Homo sapiens
  misc_RNA (1)...(19): siRNA sense strand
gauuaaagcugagccagau

SEQ ID NO: 1566799 - RNA, 19 nt, Homo sapiens
  misc_RNA (1)...(19): siRNA sense strand
ggaacuagauuacuuugcu

SEQ ID NO: 1566800 - RNA, 19 nt, Homo sapiens
  misc_RNA (1)...(19): siRNA sense strand
uaaagcauccggauucuug

SEQ ID NO: 1566801 - RNA, 19 nt, Homo sapiens
  misc_RNA (1)...(19): siRNA sense strand
cagacaagauccaacuuau

SEQ ID NO: 1566802 - RNA, 19 nt, Homo sapiens
  misc_RNA (1)...(19): siRNA sense strand
aagcaaggcuaauuguuug

SEQ ID NO: 1566803 - RNA, 19 nt, Homo sapiens
  misc_RNA (1)...(19): siRNA sense strand
aaagaaugguguaaggauu

SEQ ID NO: 1566804 - RNA, 19 nt, Homo sapiens
  misc_RNA (1)...(19): siRNA sense strand
ccaagaucguuaaagauau

SEQ ID NO: 1566805 - RNA, 19 nt, Homo sapiens
  misc_RNA (1)...(19): siRNA sense strand
gaagaaggaacuagauuac

SEQ ID NO: 1566806 - RNA, 19 nt, Homo sapiens
  misc_RNA (1)...(19): siRNA sense strand
gaaucaugcucaaguugug

SEQ ID NO: 1566807 - RNA, 19 nt, Homo sapiens
  misc_RNA (1)...(19): siRNA sense strand
caagaucguuaaagauauc

SEQ ID NO: 1566808 - RNA, 19 nt, Homo sapiens
  misc_RNA (1)...(19): siRNA sense strand
gggacaaguuugacgagaa

SEQ ID NO: 1566809 - RNA, 19 nt, Homo sapiens
  misc_RNA (1)...(19): siRNA sense strand
gauaaagucagccauguca

SEQ ID NO: 1566810 - RNA, 19 nt, Homo sapiens
  misc_RNA (1)...(19): siRNA sense strand
ggacaaguuugacgagaac

SEQ ID NO: 1566811 - RNA, 19 nt, Homo sapiens
  misc_RNA (1)...(19): siRNA sense strand
gaaugggccguuaggagua

SEQ ID NO: 1566812 - RNA, 19 nt, Homo sapiens
  misc_RNA (1)...(19): siRNA sense strand
ucccaugccugacaaauau

SEQ ID NO: 1566813 - RNA, 19 nt, Homo sapiens
  misc_RNA (1)...(19): siRNA sense strand
agaagaaccagauuacaaa

SEQ ID NO: 1566814 - RNA, 19 nt, Homo sapiens
  misc_RNA (1)...(19): siRNA sense strand
caagauccaacuuaucaaa

SEQ ID NO: 1566815 - RNA, 19 nt, Homo sapiens
  misc_RNA (1)...(19): siRNA sense strand
agaguagacuucaauguuc

SEQ ID NO: 1566816 - RNA, 19 nt, Homo sapiens
  misc_RNA (1)...(19): siRNA sense strand
gccaagaucccucuggaaa

SEQ ID NO: 1566817 - RNA, 19 nt, Homo sapiens
  misc_RNA (1)...(19): siRNA sense strand
gaaccaaagcccucaugga

SEQ ID NO: 1566818 - RNA, 19 nt, Homo sapiens
  misc_RNA (1)...(19): siRNA sense strand
gauuauuggugguggaaug

SEQ ID NO: 1566819 - RNA, 19 nt, Homo sapiens
  misc_RNA (1)...(19): siRNA sense strand
agaaccagauuacaaacaa

SEQ ID NO: 1566820 - RNA, 19 nt, Homo sapiens
  misc_RNA (1)...(19): siRNA sense strand
cgagaacgcucagguugga

SEQ ID NO: 1566821 - RNA, 19 nt, Homo sapiens
  misc_RNA (1)...(19): siRNA sense strand
caaaguggcagacaagauc

SEQ ID NO: 1566822 - RNA, 19 nt, Homo sapiens
  misc_RNA (1)...(19): siRNA sense strand
ccaaauggaacacugaaga

SEQ ID NO: 1566823 - RNA, 19 nt, Homo sapiens
  misc_RNA (1)...(19): siRNA sense strand
gcgcagaaguggagaaagc

SEQ ID NO: 1566824 - RNA, 19 nt, Homo sapiens
  misc_RNA (1)...(19): siRNA sense strand
ccauaaagcauccggauuc

SEQ ID NO: 1566825 - RNA, 19 nt, Homo sapiens
  misc_RNA (1)...(19): siRNA sense strand
gagugaaucugccccauaa

SEQ ID NO: 1566826 - RNA, 19 nt, Homo sapiens
  misc_RNA (1)...(19): siRNA sense strand
aagaaugguguaaggauua

SEQ ID NO: 1566827 - RNA, 19 nt, Homo sapiens
  misc_RNA (1)...(19): siRNA sense strand
ggcaguaguucuuaugagu

SEQ ID NO: 1566828 - RNA, 19 nt, Homo sapiens
  misc_RNA (1)...(19): siRNA sense strand
gcucaagcaaggcuaauug

SEQ ID NO: 1566829 - RNA, 19 nt, Homo sapiens
  misc_RNA (1)...(19): siRNA sense strand
uagacaaacuggauguuag

SEQ ID NO: 1566830 - RNA, 19 nt, Homo sapiens
  misc_RNA (1)...(19): siRNA sense strand
ccaaggcaguaguucuuau

SEQ ID NO: 1566831 - RNA, 19 nt, Homo sapiens
  misc_RNA (1)...(19): siRNA sense strand
gaacacugaagauaaaguc

SEQ ID NO: 1566832 - RNA, 19 nt, Homo sapiens
  misc_RNA (1)...(19): siRNA sense strand
gaagaagaaccagauuaca

SEQ ID NO: 1566833 - RNA, 19 nt, Homo sapiens
  misc_RNA (1)...(19): siRNA sense strand
uaaaauccuuccuggagua

SEQ ID NO: 1566834 - RNA, 19 nt, Homo sapiens
  misc_RNA (1)...(19): siRNA sense strand
ucaauguucccaugaagaa

SEQ ID NO: 1566835 - RNA, 19 nt, Homo sapiens
  misc_RNA (1)...(19): siRNA sense strand
aagaagaaccagauuacaa

SEQ ID NO: 1566836 - RNA, 19 nt, Homo sapiens
  misc_RNA (1)...(19): siRNA sense strand
ucaacaacauggagauugg

SEQ ID NO: 1566837 - RNA, 19 nt, Homo sapiens
  misc_RNA (1)...(19): siRNA sense strand
gaagggaagggccaagauc

SEQ ID NO: 1566838 - RNA, 19 nt, Homo sapiens
  misc_RNA (1)...(19): siRNA sense strand
caaggcuaauuguuuggaa

SEQ ID NO: 1566839 - RNA, 19 nt, Homo sapiens
  misc_RNA (1)...(19): siRNA sense strand
caauggagccaaggcagua

SEQ ID NO: 1566840 - RNA, 19 nt, Homo sapiens
  misc_RNA (1)...(19): siRNA sense strand
gagggagccaagaucguua

SEQ ID NO: 1566841 - RNA, 19 nt, Homo sapiens
  misc_RNA (1)...(19): siRNA sense strand
caguaguucuuaugaguca

SEQ ID NO: 1566842 - RNA, 19 nt, Homo sapiens
  misc_RNA (1)...(19): siRNA sense strand
auggaacacugaagauaaa

SEQ ID NO: 1566843 - RNA, 19 nt, Homo sapiens
  misc_RNA (1)...(19): siRNA sense strand
gaaccugcgcuuucaugug

SEQ ID NO: 1566844 - RNA, 19 nt, Homo sapiens
  misc_RNA (1)...(19): siRNA sense strand
gaaccagauuacaaacaac

SEQ ID NO: 1566845 - RNA, 19 nt, Homo sapiens
  misc_RNA (1)...(19): siRNA sense strand
aauggaacacugaagauaa

SEQ ID NO: 1566846 - RNA, 19 nt, Homo sapiens
  misc_RNA (1)...(19): siRNA sense strand
uguagcaucuggcauaucu

SEQ ID NO: 1566847 - RNA, 19 nt, Homo sapiens
  misc_RNA (1)...(19): siRNA sense strand
uuagacaaacuggauguua

SEQ ID NO: 1566848 - RNA, 19 nt, Homo sapiens
  misc_RNA (1)...(19): siRNA sense strand
aaauggaacacugaagaua

SEQ ID NO: 1566849 - RNA, 19 nt, Homo sapiens
  misc_RNA (1)...(19): siRNA sense strand
uuaaagcugagccagauaa

SEQ ID NO: 1566850 - RNA, 19 nt, Homo sapiens
  misc_RNA (1)...(19): siRNA sense strand
gagaaccugcgcuuucaug

SEQ ID NO: 1566851 - RNA, 19 nt, Homo sapiens
  misc_RNA (1)...(19): siRNA sense strand
caaauggaacacugaagau

SEQ ID NO: 1566852 - RNA, 19 nt, Homo sapiens
  misc_RNA (1)...(19): siRNA sense strand
guggagacacugcuacuug

SEQ ID NO: 1566853 - RNA, 19 nt, Homo sapiens
  misc_RNA (1)...(19): siRNA sense strand
gagagcaacaagaaucaug

SEQ ID NO: 1566854 - RNA, 19 nt, Homo sapiens
  misc_RNA (1)...(19): siRNA sense strand
gcuuucauguggaggaaga

SEQ ID NO: 1566855 - RNA, 19 nt, Homo sapiens
  misc_RNA (1)...(19): siRNA sense strand
gaugaagaaggaacuagau

SEQ ID NO: 1566856 - RNA, 19 nt, Homo sapiens
  misc_RNA (1)...(19): siRNA sense strand
ugaagaagaaccagauuac

SEQ ID NO: 1566857 - RNA, 19 nt, Homo sapiens
  misc_RNA (1)...(19): siRNA sense strand
uaucauggccaaagcacaa

SEQ ID NO: 1566858 - RNA, 19 nt, Homo sapiens
  misc_RNA (1)...(19): siRNA sense strand
uuaagguacucaacaacau

SEQ ID NO: 1566859 - RNA, 19 nt, Homo sapiens
  misc_RNA (1)...(19): siRNA sense strand
uggcuuauaccuuccuuaa

SEQ ID NO: 1566860 - RNA, 19 nt, Homo sapiens
  misc_RNA (1)...(19): siRNA sense strand
acaaacaaccagaggauca

SEQ ID NO: 1566861 - RNA, 19 nt, Homo sapiens
  misc_RNA (1)...(19): siRNA sense strand
aaaauaugcuggacaaagu

SEQ ID NO: 1566862 - RNA, 19 nt, Homo sapiens
  misc_RNA (1)...(19): siRNA sense strand
gccaaggcaguaguucuua

SEQ ID NO: 1566863 - RNA, 19 nt, Homo sapiens
  misc_RNA (1)...(19): siRNA sense strand
uggagaaccugcgcuuuca

SEQ ID NO: 1566864 - RNA, 19 nt, Homo sapiens
  misc_RNA (1)...(19): siRNA sense strand
gcuacuugcugugccaaau

SEQ ID NO: 1566865 - RNA, 19 nt, Homo sapiens
  misc_RNA (1)...(19): siRNA sense strand
gacaaagucaaugagauga

SEQ ID NO: 1566866 - RNA, 19 nt, Homo sapiens
  misc_RNA (1)...(19): siRNA sense strand
aagauaaagucagccaugu

SEQ ID NO: 1566867 - RNA, 19 nt, Homo sapiens
  misc_RNA (1)...(19): siRNA sense strand
aaccaaagcccucauggau

SEQ ID NO: 1566868 - RNA, 19 nt, Homo sapiens
  misc_RNA (1)...(19): siRNA sense strand
ugaaugggaugccuuugcu

SEQ ID NO: 1566869 - RNA, 19 nt, Homo sapiens
  misc_RNA (1)...(19): siRNA sense strand
acaagaaucaugcucaagu

SEQ ID NO: 1566870 - RNA, 19 nt, Homo sapiens
  misc_RNA (1)...(19): siRNA sense strand
agacaaacuggauguuaga

SEQ ID NO: 1566871 - RNA, 19 nt, Homo sapiens
  misc_RNA (1)...(19): siRNA sense strand
gggcugcaucacuguuaua

SEQ ID NO: 1566872 - RNA, 19 nt, Homo sapiens
  misc_RNA (1)...(19): siRNA sense strand
guccugagagcaacaagaa

SEQ ID NO: 1566873 - RNA, 19 nt, Homo sapiens
  misc_RNA (1)...(19): siRNA sense strand
cacuguagcaucuggcaua

SEQ ID NO: 1566874 - RNA, 19 nt, Homo sapiens
  misc_RNA (1)...(19): siRNA sense strand
gaagaaccagauuacaaac

SEQ ID NO: 1566875 - RNA, 19 nt, Homo sapiens
  misc_RNA (1)...(19): siRNA sense strand
caaggcaguaguucuuaug

SEQ ID NO: 1566876 - RNA, 19 nt, Homo sapiens
  misc_RNA (1)...(19): siRNA sense strand
gaaccagucucaucauucu

SEQ ID NO: 1566877 - RNA, 19 nt, Homo sapiens
  misc_RNA (1)...(19): siRNA sense strand
gagaaccacuggauaaagu

SEQ ID NO: 1566878 - RNA, 19 nt, Homo sapiens
  misc_RNA (1)...(19): siRNA sense strand
ugaaguacccgcugaagua

SEQ ID NO: 1566879 - RNA, 19 nt, Homo sapiens
  misc_RNA (1)...(19): siRNA sense strand
gaaccacuggauaaaguua

SEQ ID NO: 1566880 - RNA, 19 nt, Homo sapiens
  misc_RNA (1)...(19): siRNA sense strand
ggagaaaucauuggaauuc

SEQ ID NO: 1566881 - RNA, 19 nt, Homo sapiens
  misc_RNA (1)...(19): siRNA sense strand
caacuauucucuuguuuac

SEQ ID NO: 1566882 - RNA, 19 nt, Homo sapiens
  misc_RNA (1)...(19): siRNA sense strand
gaacagcccacuacauuac

SEQ ID NO: 1566883 - RNA, 19 nt, Homo sapiens
  misc_RNA (1)...(19): siRNA sense strand
gaauucagaugacacuuac

SEQ ID NO: 1566884 - RNA, 19 nt, Homo sapiens
  misc_RNA (1)...(19): siRNA sense strand
gguuauggcuguggcagua

SEQ ID NO: 1566885 - RNA, 19 nt, Homo sapiens
  misc_RNA (1)...(19): siRNA sense strand
caugagaaccacuggauaa

SEQ ID NO: 1566886 - RNA, 19 nt, Homo sapiens
  misc_RNA (1)...(19): siRNA sense strand
ugaauucagaugacacuua

SEQ ID NO: 1566887 - RNA, 19 nt, Homo sapiens
  misc_RNA (1)...(19): siRNA sense strand
gaaaucauuggaauucaga

SEQ ID NO: 1566888 - RNA, 19 nt, Homo sapiens
  misc_RNA (1)...(19): siRNA sense strand
aagaacagcccacuacauu

SEQ ID NO: 1566889 - RNA, 19 nt, Homo sapiens
  misc_RNA (1)...(19): siRNA sense strand
cgucaacuauucucuuguu

SEQ ID NO: 1566890 - RNA, 19 nt, Homo sapiens
  misc_RNA (1)...(19): siRNA sense strand
gggaguuucuuccugauca

SEQ ID NO: 1566891 - RNA, 19 nt, Homo sapiens
  misc_RNA (1)...(19): siRNA sense strand
gagaaaucauuggaauuca

SEQ ID NO: 1566892 - RNA, 19 nt, Homo sapiens
  misc_RNA (1)...(19): siRNA sense strand
gaagaacagcccacuacau

SEQ ID NO: 1566893 - RNA, 19 nt, Homo sapiens
  misc_RNA (1)...(19): siRNA sense strand
gcacagcaccauguaccua

SEQ ID NO: 1566894 - RNA, 19 nt, Homo sapiens
  misc_RNA (1)...(19): siRNA sense strand
gcaauuaggacuuuguuuu

SEQ ID NO: 1566895 - RNA, 19 nt, Homo sapiens
  misc_RNA (1)...(19): siRNA sense strand
gaucgucgaagccgcaauu

SEQ ID NO: 1566896 - RNA, 19 nt, Homo sapiens
  misc_RNA (1)...(19): siRNA sense strand
caccauguaccuauucuuu

SEQ ID NO: 1566897 - RNA, 19 nt, Homo sapiens
  misc_RNA (1)...(19): siRNA sense strand
gggcuguguuggucaguga

SEQ ID NO: 1566898 - RNA, 19 nt, Homo sapiens
  misc_RNA (1)...(19): siRNA sense strand
gccgucaacuauucucuug

SEQ ID NO: 1566899 - RNA, 19 nt, Homo sapiens
  misc_RNA (1)...(19): siRNA sense strand
agaacagcccacuacauua

SEQ ID NO: 1566900 - RNA, 19 nt, Homo sapiens
  misc_RNA (1)...(19): siRNA sense strand
ccgaaccagucucaucauu

SEQ ID NO: 1566901 - RNA, 19 nt, Homo sapiens
  misc_RNA (1)...(19): siRNA sense strand
aagguuuccucuucuacua

SEQ ID NO: 1566902 - RNA, 19 nt, Homo sapiens
  misc_RNA (1)...(19): siRNA sense strand
ugacucggaugaagagaca

SEQ ID NO: 1566903 - RNA, 19 nt, Homo sapiens
  misc_RNA (1)...(19): siRNA sense strand
gauccuggcagagcaguuu

SEQ ID NO: 1566904 - RNA, 19 nt, Homo sapiens
  misc_RNA (1)...(19): siRNA sense strand
gcauuguggccgucaacua

SEQ ID NO: 1566905 - RNA, 19 nt, Homo sapiens
  misc_RNA (1)...(19): siRNA sense strand
acuauucucuuguuuacug

SEQ ID NO: 1566906 - RNA, 19 nt, Homo sapiens
  misc_RNA (1)...(19): siRNA sense strand
caguauucauggaagguuu

SEQ ID NO: 1566907 - RNA, 19 nt, Homo sapiens
  misc_RNA (1)...(19): siRNA sense strand
gggagaaaucauuggaauu

SEQ ID NO: 1566908 - RNA, 19 nt, Homo sapiens
  misc_RNA (1)...(19): siRNA sense strand
gaucuuccgggaccacauu

SEQ ID NO: 1566909 - RNA, 19 nt, Homo sapiens
  misc_RNA (1)...(19): siRNA sense strand
ggaagaacagcccacuaca

SEQ ID NO: 1566910 - RNA, 19 nt, Homo sapiens
  misc_RNA (1)...(19): siRNA sense strand
ccauguaccuauucuuugc

SEQ ID NO: 1566911 - RNA, 19 nt, Homo sapiens
  misc_RNA (1)...(19): siRNA sense strand
cauuguggccgucaacuau

SEQ ID NO: 1566912 - RNA, 19 nt, Homo sapiens
  misc_RNA (1)...(19): siRNA sense strand
ccuauucuuugcagucuca

SEQ ID NO: 1566913 - RNA, 19 nt, Homo sapiens
  misc_RNA (1)...(19): siRNA sense strand
gucaacuauucucuuguuu

SEQ ID NO: 1566914 - RNA, 19 nt, Homo sapiens
  misc_RNA (1)...(19): siRNA sense strand
ccaugagaaccacuggaua

SEQ ID NO: 1566915 - RNA, 19 nt, Homo sapiens
  misc_RNA (1)...(19): siRNA sense strand
acagcccacuacauuacua

SEQ ID NO: 1566916 - RNA, 19 nt, Homo sapiens
  misc_RNA (1)...(19): siRNA sense strand
ucucaggaauuguugacau

SEQ ID NO: 1566917 - RNA, 19 nt, Homo sapiens
  misc_RNA (1)...(19): siRNA sense strand
ccagaccgcccucuugagu

SEQ ID NO: 1566918 - RNA, 19 nt, Homo sapiens
  misc_RNA (1)...(19): siRNA sense strand
ggaguuucuuccugaucau

SEQ ID NO: 1566919 - RNA, 19 nt, Homo sapiens
  misc_RNA (1)...(19): siRNA sense strand
agaaaucauuggaauucag

SEQ ID NO: 1566920 - RNA, 19 nt, Homo sapiens
  misc_RNA (1)...(19): siRNA sense strand
gaugccaaccucauguuca

SEQ ID NO: 1566921 - RNA, 19 nt, Homo sapiens
  misc_RNA (1)...(19): siRNA sense strand
cgaaccagucucaucauuc

SEQ ID NO: 1566922 - RNA, 19 nt, Homo sapiens
  misc_RNA (1)...(19): siRNA sense strand
acagcaccauguaccuauu

SEQ ID NO: 1566923 - RNA, 19 nt, Homo sapiens
  misc_RNA (1)...(19): siRNA sense strand
cgucgaagccgcaauuagg

SEQ ID NO: 1566924 - RNA, 19 nt, Homo sapiens
  misc_RNA (1)...(19): siRNA sense strand
uaccagaccgcccucuuga

SEQ ID NO: 1566925 - RNA, 19 nt, Homo sapiens
  misc_RNA (1)...(19): siRNA sense strand
ggggagaaaucauuggaau

SEQ ID NO: 1566926 - RNA, 19 nt, Homo sapiens
  misc_RNA (1)...(19): siRNA sense strand
aaugggaccagaaggauga

SEQ ID NO: 1566927 - RNA, 19 nt, Homo sapiens
  misc_RNA (1)...(19): siRNA sense strand
aagccgcaauuaggacuuu

SEQ ID NO: 1566928 - RNA, 19 nt, Homo sapiens
  misc_RNA (1)...(19): siRNA sense strand
ucucuuguuuacugccuuu

SEQ ID NO: 1566929 - RNA, 19 nt, Homo sapiens
  misc_RNA (1)...(19): siRNA sense strand
ggaccagcacauccacuca

SEQ ID NO: 1566930 - RNA, 19 nt, Homo sapiens
  misc_RNA (1)...(19): siRNA sense strand
cugcaccucuaccaugaga

SEQ ID NO: 1566931 - RNA, 19 nt, Homo sapiens
  misc_RNA (1)...(19): siRNA sense strand
cggaagaacagcccacuac

SEQ ID NO: 1566932 - RNA, 19 nt, Homo sapiens
  misc_RNA (1)...(19): siRNA sense strand
gccaaccucauguucauca

SEQ ID NO: 1566933 - RNA, 19 nt, Homo sapiens
  misc_RNA (1)...(19): siRNA sense strand
uccacucacuccugcugua

SEQ ID NO: 1566934 - RNA, 19 nt, Homo sapiens
  misc_RNA (1)...(19): siRNA sense strand
gcaguauucauggaagguu

SEQ ID NO: 1566935 - RNA, 19 nt, Homo sapiens
  misc_RNA (1)...(19): siRNA sense strand
gcaccucuaccaugagaac

SEQ ID NO: 1566936 - RNA, 19 nt, Homo sapiens
  misc_RNA (1)...(19): siRNA sense strand
gcggaagaacagcccacua

SEQ ID NO: 1566937 - RNA, 19 nt, Homo sapiens
  misc_RNA (1)...(19): siRNA sense strand
ccgaaugggaccagaagga

SEQ ID NO: 1566938 - RNA, 19 nt, Homo sapiens
  misc_RNA (1)...(19): siRNA sense strand
uuauggcuguggcaguauu

SEQ ID NO: 1566939 - RNA, 19 nt, Homo sapiens
  misc_RNA (1)...(19): siRNA sense strand
gcagucucaggaauuguug

SEQ ID NO: 1566940 - RNA, 19 nt, Homo sapiens
  misc_RNA (1)...(19): siRNA sense strand
uuaccagaccgcccucuug

SEQ ID NO: 1566941 - RNA, 19 nt, Homo sapiens
  misc_RNA (1)...(19): siRNA sense strand
agauuggguuugugcuguu

SEQ ID NO: 1566942 - RNA, 19 nt, Homo sapiens
  misc_RNA (1)...(19): siRNA sense strand
ccagucucaucauucuuca

SEQ ID NO: 1566943 - RNA, 19 nt, Homo sapiens
  misc_RNA (1)...(19): siRNA sense strand
guguuaguaucucccuaga

SEQ ID NO: 1566944 - RNA, 19 nt, Homo sapiens
  misc_RNA (1)...(19): siRNA sense strand
cggaggguguguuaguauc

SEQ ID NO: 1566945 - RNA, 19 nt, Homo sapiens
  misc_RNA (1)...(19): siRNA sense strand
cucaggaauuguugacaug

SEQ ID NO: 1566946 - RNA, 19 nt, Homo sapiens
  misc_RNA (1)...(19): siRNA sense strand
ggcagcacagcaccaugua

SEQ ID NO: 1566947 - RNA, 19 nt, Homo sapiens
  misc_RNA (1)...(19): siRNA sense strand
gcccacuacauuacuauca

SEQ ID NO: 1566948 - RNA, 19 nt, Homo sapiens
  misc_RNA (1)...(19): siRNA sense strand
ggaaggggagaaaucauug

SEQ ID NO: 1566949 - RNA, 19 nt, Homo sapiens
  misc_RNA (1)...(19): siRNA sense strand
gauuggguuugugcuguuc

SEQ ID NO: 1566950 - RNA, 19 nt, Homo sapiens
  misc_RNA (1)...(19): siRNA sense strand
guucggaggguguguuagu

SEQ ID NO: 1566951 - RNA, 19 nt, Homo sapiens
  misc_RNA (1)...(19): siRNA sense strand
gaaaacaccugguucaguu

SEQ ID NO: 1566952 - RNA, 19 nt, Homo sapiens
  misc_RNA (1)...(19): siRNA sense strand
ggaaggugauccugacguu

SEQ ID NO: 1566953 - RNA, 19 nt, Homo sapiens
  misc_RNA (1)...(19): siRNA sense strand
gaaggcaucgaguucauuu

SEQ ID NO: 1566954 - RNA, 19 nt, Homo sapiens
  misc_RNA (1)...(19): siRNA sense strand
ggagcuauccgaccugauu

SEQ ID NO: 1566955 - RNA, 19 nt, Homo sapiens
  misc_RNA (1)...(19): siRNA sense strand
ucgcagaccuggacacaga

SEQ ID NO: 1566956 - RNA, 19 nt, Homo sapiens
  misc_RNA (1)...(19): siRNA sense strand
ccgaauggcuggcagugaa

SEQ ID NO: 1566957 - RNA, 19 nt, Homo sapiens
  misc_RNA (1)...(19): siRNA sense strand
ggaauggaaugagucuaug

SEQ ID NO: 1566958 - RNA, 19 nt, Homo sapiens
  misc_RNA (1)...(19): siRNA sense strand
agaacuggguguccaacua

SEQ ID NO: 1566959 - RNA, 19 nt, Homo sapiens
  misc_RNA (1)...(19): siRNA sense strand
ggagaggcauggagcuauc

SEQ ID NO: 1566960 - RNA, 19 nt, Homo sapiens
  misc_RNA (1)...(19): siRNA sense strand
ggacaagguggccguggaa

SEQ ID NO: 1566961 - RNA, 19 nt, Homo sapiens
  misc_RNA (1)...(19): siRNA sense strand
gguaucgaaucgcaguuau

SEQ ID NO: 1566962 - RNA, 19 nt, Homo sapiens
  misc_RNA (1)...(19): siRNA sense strand
caagaucggaagcgugaaa

SEQ ID NO: 1566963 - RNA, 19 nt, Homo sapiens
  misc_RNA (1)...(19): siRNA sense strand
gaaacucuacuccguggau

SEQ ID NO: 1566964 - RNA, 19 nt, Homo sapiens
  misc_RNA (1)...(19): siRNA sense strand
gugauguggugaacgagaa

SEQ ID NO: 1566965 - RNA, 19 nt, Homo sapiens
  misc_RNA (1)...(19): siRNA sense strand
gaacuggguguccaacuac

SEQ ID NO: 1566966 - RNA, 19 nt, Homo sapiens
  misc_RNA (1)...(19): siRNA sense strand
gaucauuguggcccucaaa

SEQ ID NO: 1566967 - RNA, 19 nt, Homo sapiens
  misc_RNA (1)...(19): siRNA sense strand
gucaagggcccaagaggaa

SEQ ID NO: 1566968 - RNA, 19 nt, Homo sapiens
  misc_RNA (1)...(19): siRNA sense strand
ccagaucgaaggcagcaaa

SEQ ID NO: 1566969 - RNA, 19 nt, Homo sapiens
  misc_RNA (1)...(19): siRNA sense strand
cagagucgccuccuacauc

SEQ ID NO: 1566970 - RNA, 19 nt, Homo sapiens
  misc_RNA (1)...(19): siRNA sense strand
gaucggaagcgugaaauac

SEQ ID NO: 1566971 - RNA, 19 nt, Homo sapiens
  misc_RNA (1)...(19): siRNA sense strand
cggaauggaaugagucuau

SEQ ID NO: 1566972 - RNA, 19 nt, Homo sapiens
  misc_RNA (1)...(19): siRNA sense strand
uauccgaccugauuguuuu

SEQ ID NO: 1566973 - RNA, 19 nt, Homo sapiens
  misc_RNA (1)...(19): siRNA sense strand
agagucgccuccuacauca

SEQ ID NO: 1566974 - RNA, 19 nt, Homo sapiens
  misc_RNA (1)...(19): siRNA sense strand
caagguggccguggaaugg

SEQ ID NO: 1566975 - RNA, 19 nt, Homo sapiens
  misc_RNA (1)...(19): siRNA sense strand
ugaagguggugggcuacaa

SEQ ID NO: 1566976 - RNA, 19 nt, Homo sapiens
  misc_RNA (1)...(19): siRNA sense strand
gauccugacguucuuugug

SEQ ID NO: 1566977 - RNA, 19 nt, Homo sapiens
  misc_RNA (1)...(19): siRNA sense strand
gaagguggugggcuacaag

SEQ ID NO: 1566978 - RNA, 19 nt, Homo sapiens
  misc_RNA (1)...(19): siRNA sense strand
cgggugauguggugaacga

SEQ ID NO: 1566979 - RNA, 19 nt, Homo sapiens
  misc_RNA (1)...(19): siRNA sense strand
gagcuauccgaccugauug

SEQ ID NO: 1566980 - RNA, 19 nt, Homo sapiens
  misc_RNA (1)...(19): siRNA sense strand
ugucugagcacccggaaug

SEQ ID NO: 1566981 - RNA, 19 nt, Homo sapiens
  misc_RNA (1)...(19): siRNA sense strand
ucggaagcgugaaauacga

SEQ ID NO: 1566982 - RNA, 19 nt, Homo sapiens
  misc_RNA (1)...(19): siRNA sense strand
aggcaucgaguucauuuga

SEQ ID NO: 1566983 - RNA, 19 nt, Homo sapiens
  misc_RNA (1)...(19): siRNA sense strand
gcagagucgccuccuacau

SEQ ID NO: 1566984 - RNA, 19 nt, Homo sapiens
  misc_RNA (1)...(19): siRNA sense strand
gggagaggcauggagcuau

SEQ ID NO: 1566985 - RNA, 19 nt, Homo sapiens
  misc_RNA (1)...(19): siRNA sense strand
auacgaaggcaucgaguuc

SEQ ID NO: 1566986 - RNA, 19 nt, Homo sapiens
  misc_RNA (1)...(19): siRNA sense strand
gccaacugguacaaugaca

SEQ ID NO: 1566987 - RNA, 19 nt, Homo sapiens
  misc_RNA (1)...(19): siRNA sense strand
cgaaggcaucgaguucauu

SEQ ID NO: 1566988 - RNA, 19 nt, Homo sapiens
  misc_RNA (1)...(19): siRNA sense strand
gcagaaaguuguagaaaug

SEQ ID NO: 1566989 - RNA, 19 nt, Homo sapiens
  misc_RNA (1)...(19): siRNA sense strand
gcagggaccucguuaaugg

SEQ ID NO: 1566990 - RNA, 19 nt, Homo sapiens
  misc_RNA (1)...(19): siRNA sense strand
caacagugcucccucauag

SEQ ID NO: 1566991 - RNA, 19 nt, Homo sapiens
  misc_RNA (1)...(19): siRNA sense strand
gcaaaugacuuggaguguu

SEQ ID NO: 1566992 - RNA, 19 nt, Homo sapiens
  misc_RNA (1)...(19): siRNA sense strand
gaaaugaaaugggaucaag

SEQ ID NO: 1566993 - RNA, 19 nt, Homo sapiens
  misc_RNA (1)...(19): siRNA sense strand
gaacaccucagucaagauu

SEQ ID NO: 1566994 - RNA, 19 nt, Homo sapiens
  misc_RNA (1)...(19): siRNA sense strand
caaaugacuuggaguguuc

SEQ ID NO: 1566995 - RNA, 19 nt, Homo sapiens
  misc_RNA (1)...(19): siRNA sense strand
caacaugcauuuccagucu

SEQ ID NO: 1566996 - RNA, 19 nt, Homo sapiens
  misc_RNA (1)...(19): siRNA sense strand
gaacaacggcaccugcuau

SEQ ID NO: 1566997 - RNA, 19 nt, Homo sapiens
  misc_RNA (1)...(19): siRNA sense strand
gauauugccugugggaaug

SEQ ID NO: 1566998 - RNA, 19 nt, Homo sapiens
  misc_RNA (1)...(19): siRNA sense strand
uuacaguccugaugacaaa

SEQ ID NO: 1566999 - RNA, 19 nt, Homo sapiens
  misc_RNA (1)...(19): siRNA sense strand
cuaagucuauuguggcuuu

SEQ ID NO: 1567000 - RNA, 19 nt, Homo sapiens
  misc_RNA (1)...(19): siRNA sense strand
ggcagaaaguuguagaaau

SEQ ID NO: 1567001 - RNA, 19 nt, Homo sapiens
  misc_RNA (1)...(19): siRNA sense strand
ccucauagauggacgaagu

SEQ ID NO: 1567002 - RNA, 19 nt, Homo sapiens
  misc_RNA (1)...(19): siRNA sense strand
gaggugaucccagauauug

SEQ ID NO: 1567003 - RNA, 19 nt, Homo sapiens
  misc_RNA (1)...(19): siRNA sense strand
gccacugccucacugauuu

SEQ ID NO: 1567004 - RNA, 19 nt, Homo sapiens
  misc_RNA (1)...(19): siRNA sense strand
ccacagaacaccucaguca

SEQ ID NO: 1567005 - RNA, 19 nt, Homo sapiens
  misc_RNA (1)...(19): siRNA sense strand
gaagauuacaguccugaug

SEQ ID NO: 1567006 - RNA, 19 nt, Homo sapiens
  misc_RNA (1)...(19): siRNA sense strand
guguuugccuuccugguua

SEQ ID NO: 1567007 - RNA, 19 nt, Homo sapiens
  misc_RNA (1)...(19): siRNA sense strand
cagaacaccucagucaaga

SEQ ID NO: 1567008 - RNA, 19 nt, Homo sapiens
  misc_RNA (1)...(19): siRNA sense strand
ggagcaauuucaccugugu

SEQ ID NO: 1567009 - RNA, 19 nt, Homo sapiens
  misc_RNA (1)...(19): siRNA sense strand
uauuguggcuuugcgcuua

SEQ ID NO: 1567010 - RNA, 19 nt, Homo sapiens
  misc_RNA (1)...(19): siRNA sense strand
ggaccucguuaauggcuau

SEQ ID NO: 1567011 - RNA, 19 nt, Homo sapiens
  misc_RNA (1)...(19): siRNA sense strand
gcuuaacucugguggugaa

SEQ ID NO: 1567012 - RNA, 19 nt, Homo sapiens
  misc_RNA (1)...(19): siRNA sense strand
gggagagucacgcaaauga

SEQ ID NO: 1567013 - RNA, 19 nt, Homo sapiens
  misc_RNA (1)...(19): siRNA sense strand
gcggagagccucaccaaca

SEQ ID NO: 1567014 - RNA, 19 nt, Homo sapiens
  misc_RNA (1)...(19): siRNA sense strand
gaggaggaauauaaugagu

SEQ ID NO: 1567015 - RNA, 19 nt, Homo sapiens
  misc_RNA (1)...(19): siRNA sense strand
caagaugggagcaauuuca

SEQ ID NO: 1567016 - RNA, 19 nt, Homo sapiens
  misc_RNA (1)...(19): siRNA sense strand
cagcaacccuugucaccau

SEQ ID NO: 1567017 - RNA, 19 nt, Homo sapiens
  misc_RNA (1)...(19): siRNA sense strand
gugcccagcuuauugacuu

SEQ ID NO: 1567018 - RNA, 19 nt, Homo sapiens
  misc_RNA (1)...(19): siRNA sense strand
aaacagggcagaaaguugu

SEQ ID NO: 1567019 - RNA, 19 nt, Homo sapiens
  misc_RNA (1)...(19): siRNA sense strand
gcaucagccgcauugaaua

SEQ ID NO: 1567020 - RNA, 19 nt, Homo sapiens
  misc_RNA (1)...(19): siRNA sense strand
gcagaaauggagcaacaug

SEQ ID NO: 1567021 - RNA, 19 nt, Homo sapiens
  misc_RNA (1)...(19): siRNA sense strand
aaacaacgcgagcuguauu

SEQ ID NO: 1567022 - RNA, 19 nt, Homo sapiens
  misc_RNA (1)...(19): siRNA sense strand
cuaugaaggucccaacugu

SEQ ID NO: 1567023 - RNA, 19 nt, Homo sapiens
  misc_RNA (1)...(19): siRNA sense strand
ccacggcacucccucuaca

SEQ ID NO: 1567024 - RNA, 19 nt, Homo sapiens
  misc_RNA (1)...(19): siRNA sense strand
ggugaagagugcgacauug

SEQ ID NO: 1567025 - RNA, 19 nt, Homo sapiens
  misc_RNA (1)...(19): siRNA sense strand
gugaggaggaauauaauga

SEQ ID NO: 1567026 - RNA, 19 nt, Homo sapiens
  misc_RNA (1)...(19): siRNA sense strand
caacggcaccugcuaugug

SEQ ID NO: 1567027 - RNA, 19 nt, Homo sapiens
  misc_RNA (1)...(19): siRNA sense strand
cggaucugcuugugaagaa

SEQ ID NO: 1567028 - RNA, 19 nt, Homo sapiens
  misc_RNA (1)...(19): siRNA sense strand
gggaaugccaguucuaaca

SEQ ID NO: 1567029 - RNA, 19 nt, Homo sapiens
  misc_RNA (1)...(19): siRNA sense strand
gaagagugcgacauugaca

SEQ ID NO: 1567030 - RNA, 19 nt, Homo sapiens
  misc_RNA (1)...(19): siRNA sense strand
cuucggaucugcuugugaa

SEQ ID NO: 1567031 - RNA, 19 nt, Homo sapiens
  misc_RNA (1)...(19): siRNA sense strand
gccaguccaagauugauua

SEQ ID NO: 1567032 - RNA, 19 nt, Homo sapiens
  misc_RNA (1)...(19): siRNA sense strand
gagcuguauugaugcaaau

SEQ ID NO: 1567033 - RNA, 19 nt, Homo sapiens
  misc_RNA (1)...(19): siRNA sense strand
cgagcuguauugaugcaaa

SEQ ID NO: 1567034 - RNA, 19 nt, Homo sapiens
  misc_RNA (1)...(19): siRNA sense strand
ccaacagugcucccucaua

SEQ ID NO: 1567035 - RNA, 19 nt, Homo sapiens
  misc_RNA (1)...(19): siRNA sense strand
gugcgacauugacauaaau

SEQ ID NO: 1567036 - RNA, 19 nt, Homo sapiens
  misc_RNA (1)...(19): siRNA sense strand
ggagcaacaugcauuucca

SEQ ID NO: 1567037 - RNA, 19 nt, Homo sapiens
  misc_RNA (1)...(19): siRNA sense strand
cuagacccaugcagaaaug

SEQ ID NO: 1567038 - RNA, 19 nt, Homo sapiens
  misc_RNA (1)...(19): siRNA sense strand
gaggaaaccuugccaaaac

SEQ ID NO: 1567039 - RNA, 19 nt, Homo sapiens
  misc_RNA (1)...(19): siRNA sense strand
gggcagaaaguuguagaaa

SEQ ID NO: 1567040 - RNA, 19 nt, Homo sapiens
  misc_RNA (1)...(19): siRNA sense strand
ggccugcaauguaugaugu

SEQ ID NO: 1567041 - RNA, 19 nt, Homo sapiens
  misc_RNA (1)...(19): siRNA sense strand
gugaagagugcgacauuga

SEQ ID NO: 1567042 - RNA, 19 nt, Homo sapiens
  misc_RNA (1)...(19): siRNA sense strand
ggaggugaucccagauauu

SEQ ID NO: 1567043 - RNA, 19 nt, Homo sapiens
  misc_RNA (1)...(19): siRNA sense strand
gaauggcacgugcaucugu

SEQ ID NO: 1567044 - RNA, 19 nt, Homo sapiens
  misc_RNA (1)...(19): siRNA sense strand
ugcguggccuucauccuua

SEQ ID NO: 1567045 - RNA, 19 nt, Homo sapiens
  misc_RNA (1)...(19): siRNA sense strand
caaugaaggcuaugaaggu

SEQ ID NO: 1567046 - RNA, 19 nt, Homo sapiens
  misc_RNA (1)...(19): siRNA sense strand
cagaggaaaccuugccaaa

SEQ ID NO: 1567047 - RNA, 19 nt, Homo sapiens
  misc_RNA (1)...(19): siRNA sense strand
gacagcgaguucagcaaug

SEQ ID NO: 1567048 - RNA, 19 nt, Homo sapiens
  misc_RNA (1)...(19): siRNA sense strand
gagcuuugccaguccaaga

SEQ ID NO: 1567049 - RNA, 19 nt, Homo sapiens
  misc_RNA (1)...(19): siRNA sense strand
ugacagcgacggccugaau

SEQ ID NO: 1567050 - RNA, 19 nt, Homo sapiens
  misc_RNA (1)...(19): siRNA sense strand
cauccggcaugccagguuu

SEQ ID NO: 1567051 - RNA, 19 nt, Homo sapiens
  misc_RNA (1)...(19): siRNA sense strand
gauggcuaccucugcauuu

SEQ ID NO: 1567052 - RNA, 19 nt, Homo sapiens
  misc_RNA (1)...(19): siRNA sense strand
acaaggaucccugcgcuaa

SEQ ID NO: 1567053 - RNA, 19 nt, Homo sapiens
  misc_RNA (1)...(19): siRNA sense strand
gaaauggagcaacaugcau

SEQ ID NO: 1567054 - RNA, 19 nt, Homo sapiens
  misc_RNA (1)...(19): siRNA sense strand
aacgcgagcuguauugaug

SEQ ID NO: 1567055 - RNA, 19 nt, Homo sapiens
  misc_RNA (1)...(19): siRNA sense strand
agagugcgacauugacaua

SEQ ID NO: 1567056 - RNA, 19 nt, Homo sapiens
  misc_RNA (1)...(19): siRNA sense strand
uaacucugguggugaaggu

SEQ ID NO: 1567057 - RNA, 19 nt, Homo sapiens
  misc_RNA (1)...(19): siRNA sense strand
gaaaacagggcagaaaguu

SEQ ID NO: 1567058 - RNA, 19 nt, Homo sapiens
  misc_RNA (1)...(19): siRNA sense strand
acugugaggaggaauauaa

SEQ ID NO: 1567059 - RNA, 19 nt, Homo sapiens
  misc_RNA (1)...(19): siRNA sense strand
gcaccacgaagccgucaga

SEQ ID NO: 1567060 - RNA, 19 nt, Homo sapiens
  misc_RNA (1)...(19): siRNA sense strand
gacuuggaguguucaggaa

SEQ ID NO: 1567061 - RNA, 19 nt, Homo sapiens
  misc_RNA (1)...(19): siRNA sense strand
ggucacggccacaggauuc

SEQ ID NO: 1567062 - RNA, 19 nt, Homo sapiens
  misc_RNA (1)...(19): siRNA sense strand
cgacagcgaguucagcaau

SEQ ID NO: 1567063 - RNA, 19 nt, Homo sapiens
  misc_RNA (1)...(19): siRNA sense strand
gccaguguccagaaggaua

SEQ ID NO: 1567064 - RNA, 19 nt, Homo sapiens
  misc_RNA (1)...(19): siRNA sense strand
aguccaagauugauuacug

SEQ ID NO: 1567065 - RNA, 19 nt, Homo sapiens
  misc_RNA (1)...(19): siRNA sense strand
auagauggacgaaguguga

SEQ ID NO: 1567066 - RNA, 19 nt, Homo sapiens
  misc_RNA (1)...(19): siRNA sense strand
ccugguauccuuugaagug

SEQ ID NO: 1567067 - RNA, 19 nt, Homo sapiens
  misc_RNA (1)...(19): siRNA sense strand
ccuaugaggaguucuacaa

SEQ ID NO: 1567068 - RNA, 19 nt, Homo sapiens
  misc_RNA (1)...(19): siRNA sense strand
cggagagccucaccaacau

SEQ ID NO: 1567069 - RNA, 19 nt, Homo sapiens
  misc_RNA (1)...(19): siRNA sense strand
ccuuugaagugccacagaa

SEQ ID NO: 1567070 - RNA, 19 nt, Homo sapiens
  misc_RNA (1)...(19): siRNA sense strand
uggaggugaucccagauau

SEQ ID NO: 1567071 - RNA, 19 nt, Homo sapiens
  misc_RNA (1)...(19): siRNA sense strand
gcgcuaacgucagcugucu

SEQ ID NO: 1567072 - RNA, 19 nt, Homo sapiens
  misc_RNA (1)...(19): siRNA sense strand
accauggccucuacuguga

SEQ ID NO: 1567073 - RNA, 19 nt, Homo sapiens
  misc_RNA (1)...(19): siRNA sense strand
aaagcaagaugggagcaau

SEQ ID NO: 1567074 - RNA, 19 nt, Homo sapiens
  misc_RNA (1)...(19): siRNA sense strand
guaccugugaggagcagua

SEQ ID NO: 1567075 - RNA, 19 nt, Homo sapiens
  misc_RNA (1)...(19): siRNA sense strand
aagauuacaguccugauga

SEQ ID NO: 1567076 - RNA, 19 nt, Homo sapiens
  misc_RNA (1)...(19): siRNA sense strand
ugccagguuuggaaagaaa

SEQ ID NO: 1567077 - RNA, 19 nt, Homo sapiens
  misc_RNA (1)...(19): siRNA sense strand
caugccagguuuggaaaga

SEQ ID NO: 1567078 - RNA, 19 nt, Homo sapiens
  misc_RNA (1)...(19): siRNA sense strand
cuacaaaugccucugugau

SEQ ID NO: 1567079 - RNA, 19 nt, Homo sapiens
  misc_RNA (1)...(19): siRNA sense strand
ggaucugcuugugaagaaa

SEQ ID NO: 1567080 - RNA, 19 nt, Homo sapiens
  misc_RNA (1)...(19): siRNA sense strand
gcaagaugggagcaauuuc

SEQ ID NO: 1567081 - RNA, 19 nt, Homo sapiens
  misc_RNA (1)...(19): siRNA sense strand
caaaacaacgcgagcugua

SEQ ID NO: 1567082 - RNA, 19 nt, Homo sapiens
  misc_RNA (1)...(19): siRNA sense strand
gccacaggauuccaacagu

SEQ ID NO: 1567083 - RNA, 19 nt, Homo sapiens
  misc_RNA (1)...(19): siRNA sense strand
agugcgacauugacauaaa

SEQ ID NO: 1567084 - RNA, 19 nt, Homo sapiens
  misc_RNA (1)...(19): siRNA sense strand
gaauacaaaggaacacacu

SEQ ID NO: 1567085 - RNA, 19 nt, Homo sapiens
  misc_RNA (1)...(19): siRNA sense strand
gcaauuucaccuguguuug

SEQ ID NO: 1567086 - RNA, 19 nt, Homo sapiens
  misc_RNA (1)...(19): siRNA sense strand
cagcaucgacagcgaguuc

SEQ ID NO: 1567087 - RNA, 19 nt, Homo sapiens
  misc_RNA (1)...(19): siRNA sense strand
caucgccuaugaagauuac

SEQ ID NO: 1567088 - RNA, 19 nt, Homo sapiens
  misc_RNA (1)...(19): siRNA sense strand
ggacaaagcucagagaaag

SEQ ID NO: 1567089 - RNA, 19 nt, Homo sapiens
  misc_RNA (1)...(19): siRNA sense strand
gcaaagcccaacagaaaua

SEQ ID NO: 1567090 - RNA, 19 nt, Homo sapiens
  misc_RNA (1)...(19): siRNA sense strand
gagcacaucuacagggaaa

SEQ ID NO: 1567091 - RNA, 19 nt, Homo sapiens
  misc_RNA (1)...(19): siRNA sense strand
caggaaacauggacuggua

SEQ ID NO: 1567092 - RNA, 19 nt, Homo sapiens
  misc_RNA (1)...(19): siRNA sense strand
cagcaagacuuacgagaga

SEQ ID NO: 1567093 - RNA, 19 nt, Homo sapiens
  misc_RNA (1)...(19): siRNA sense strand
caaaggagaugagggcuau

SEQ ID NO: 1567094 - RNA, 19 nt, Homo sapiens
  misc_RNA (1)...(19): siRNA sense strand
cccagaagcucaauccuuu

SEQ ID NO: 1567095 - RNA, 19 nt, Homo sapiens
  misc_RNA (1)...(19): siRNA sense strand
cagagaaacucaacugcaa

SEQ ID NO: 1567096 - RNA, 19 nt, Homo sapiens
  misc_RNA (1)...(19): siRNA sense strand
gugaagaguuugauuacga

SEQ ID NO: 1567097 - RNA, 19 nt, Homo sapiens
  misc_RNA (1)...(19): siRNA sense strand
gacaugugcuucauuaucu

SEQ ID NO: 1567098 - RNA, 19 nt, Homo sapiens
  misc_RNA (1)...(19): siRNA sense strand
gcaagauccagguuacuuu

SEQ ID NO: 1567099 - RNA, 19 nt, Homo sapiens
  misc_RNA (1)...(19): siRNA sense strand
ucagugaagaguuugauua

SEQ ID NO: 1567100 - RNA, 19 nt, Homo sapiens
  misc_RNA (1)...(19): siRNA sense strand
gugccaaccuggugucuga

SEQ ID NO: 1567101 - RNA, 19 nt, Homo sapiens
  misc_RNA (1)...(19): siRNA sense strand
ggacaugugcuucauuauc

SEQ ID NO: 1567102 - RNA, 19 nt, Homo sapiens
  misc_RNA (1)...(19): siRNA sense strand
gaagcucaauccuuucagu

SEQ ID NO: 1567103 - RNA, 19 nt, Homo sapiens
  misc_RNA (1)...(19): siRNA sense strand
cugcaaagcccaacagaaa

SEQ ID NO: 1567104 - RNA, 19 nt, Homo sapiens
  misc_RNA (1)...(19): siRNA sense strand
gcagugggcugaugaacac

SEQ ID NO: 1567105 - RNA, 19 nt, Homo sapiens
  misc_RNA (1)...(19): siRNA sense strand
gggaaaugauggacaugug

SEQ ID NO: 1567106 - RNA, 19 nt, Homo sapiens
  misc_RNA (1)...(19): siRNA sense strand
gagggaugcuggugugcuu

SEQ ID NO: 1567107 - RNA, 19 nt, Homo sapiens
  misc_RNA (1)...(19): siRNA sense strand
agaaggacauggagaugga

SEQ ID NO: 1567108 - RNA, 19 nt, Homo sapiens
  misc_RNA (1)...(19): siRNA sense strand
accaagggcuggagaguga

SEQ ID NO: 1567109 - RNA, 19 nt, Homo sapiens
  misc_RNA (1)...(19): siRNA sense strand
cagacgagauggcaagauc

SEQ ID NO: 1567110 - RNA, 19 nt, Homo sapiens
  misc_RNA (1)...(19): siRNA sense strand
ggacauggagauggacaaa

SEQ ID NO: 1567111 - RNA, 19 nt, Homo sapiens
  misc_RNA (1)...(19): siRNA sense strand
ugauuacgcuacucaagug

SEQ ID NO: 1567112 - RNA, 19 nt, Homo sapiens
  misc_RNA (1)...(19): siRNA sense strand
auggacaugugcuucauua

SEQ ID NO: 1567113 - RNA, 19 nt, Homo sapiens
  misc_RNA (1)...(19): siRNA sense strand
gauggcaagauccagguua

SEQ ID NO: 1567114 - RNA, 19 nt, Homo sapiens
  misc_RNA (1)...(19): siRNA sense strand
gcacaucuacagggaaaug

SEQ ID NO: 1567115 - RNA, 19 nt, Homo sapiens
  misc_RNA (1)...(19): siRNA sense strand
gagaugaccauguugugau

SEQ ID NO: 1567116 - RNA, 19 nt, Homo sapiens
  misc_RNA (1)...(19): siRNA sense strand
gugggcugaugaacacaua

SEQ ID NO: 1567117 - RNA, 19 nt, Homo sapiens
  misc_RNA (1)...(19): siRNA sense strand
ucucaugcgugccaggaaa

SEQ ID NO: 1567118 - RNA, 19 nt, Homo sapiens
  misc_RNA (1)...(19): siRNA sense strand
agaugaccauguugugauu

SEQ ID NO: 1567119 - RNA, 19 nt, Homo sapiens
  misc_RNA (1)...(19): siRNA sense strand
aaagaaagagguguccaaa

SEQ ID NO: 1567120 - RNA, 19 nt, Homo sapiens
  misc_RNA (1)...(19): siRNA sense strand
ggaaacauggacugguaga

SEQ ID NO: 1567121 - RNA, 19 nt, Homo sapiens
  misc_RNA (1)...(19): siRNA sense strand
gagaaacucaacugcaaag

SEQ ID NO: 1567122 - RNA, 19 nt, Homo sapiens
  misc_RNA (1)...(19): siRNA sense strand
ccaaaacgguggucagcaa

SEQ ID NO: 1567123 - RNA, 19 nt, Homo sapiens
  misc_RNA (1)...(19): siRNA sense strand
guucguauuucagauaaag

SEQ ID NO: 1567124 - RNA, 19 nt, Homo sapiens
  misc_RNA (1)...(19): siRNA sense strand
ccucccagguaaacagauu

SEQ ID NO: 1567125 - RNA, 19 nt, Homo sapiens
  misc_RNA (1)...(19): siRNA sense strand
agaaagagguguccaaaac

SEQ ID NO: 1567126 - RNA, 19 nt, Homo sapiens
  misc_RNA (1)...(19): siRNA sense strand
cgagaugaccauguuguga

SEQ ID NO: 1567127 - RNA, 19 nt, Homo sapiens
  misc_RNA (1)...(19): siRNA sense strand
acagggaaaugauggacau

SEQ ID NO: 1567128 - RNA, 19 nt, Homo sapiens
  misc_RNA (1)...(19): siRNA sense strand
gaugaccauguugugauua

SEQ ID NO: 1567129 - RNA, 19 nt, Homo sapiens
  misc_RNA (1)...(19): siRNA sense strand
gauaaaguagugggcauuc

SEQ ID NO: 1567130 - RNA, 19 nt, Homo sapiens
  misc_RNA (1)...(19): siRNA sense strand
aacauggacugguagacuu

SEQ ID NO: 1567131 - RNA, 19 nt, Homo sapiens
  misc_RNA (1)...(19): siRNA sense strand
aggccgagaugaccauguu

SEQ ID NO: 1567132 - RNA, 19 nt, Homo sapiens
  misc_RNA (1)...(19): siRNA sense strand
caaccuggugucugagcua

SEQ ID NO: 1567133 - RNA, 19 nt, Homo sapiens
  misc_RNA (1)...(19): siRNA sense strand
ggcaagauccagguuacuu

SEQ ID NO: 1567134 - RNA, 19 nt, Homo sapiens
  misc_RNA (1)...(19): siRNA sense strand
cagaagcucaauccuuuca

SEQ ID NO: 1567135 - RNA, 19 nt, Homo sapiens
  misc_RNA (1)...(19): siRNA sense strand
acauggagauggacaaagc

SEQ ID NO: 1567136 - RNA, 19 nt, Homo sapiens
  misc_RNA (1)...(19): siRNA sense strand
gcacagccacccuggucau

SEQ ID NO: 1567137 - RNA, 19 nt, Homo sapiens
  misc_RNA (1)...(19): siRNA sense strand
caaagcccaacagaaauau

SEQ ID NO: 1567138 - RNA, 19 nt, Homo sapiens
  misc_RNA (1)...(19): siRNA sense strand
gauggacaaagcucagaga

SEQ ID NO: 1567139 - RNA, 19 nt, Homo sapiens
  misc_RNA (1)...(19): siRNA sense strand
gugauuacgcuacucaagu

SEQ ID NO: 1567140 - RNA, 19 nt, Homo sapiens
  misc_RNA (1)...(19): siRNA sense strand
gauggacaugugcuucauu

SEQ ID NO: 1567141 - RNA, 19 nt, Homo sapiens
  misc_RNA (1)...(19): siRNA sense strand
acacauacaaucccagaag

SEQ ID NO: 1567142 - RNA, 19 nt, Homo sapiens
  misc_RNA (1)...(19): siRNA sense strand
gcugaugaacacauacaau

SEQ ID NO: 1567143 - RNA, 19 nt, Homo sapiens
  misc_RNA (1)...(19): siRNA sense strand
uuacagagaaacucaacug

SEQ ID NO: 1567144 - RNA, 19 nt, Homo sapiens
  misc_RNA (1)...(19): siRNA sense strand
ucaagcuccuaaaccaauc

SEQ ID NO: 1567145 - RNA, 19 nt, Homo sapiens
  misc_RNA (1)...(19): siRNA sense strand
ggacugguagacuuugaag

SEQ ID NO: 1567146 - RNA, 19 nt, Homo sapiens
  misc_RNA (1)...(19): siRNA sense strand
ggaugcuggugugcuugaa

SEQ ID NO: 1567147 - RNA, 19 nt, Homo sapiens
  misc_RNA (1)...(19): siRNA sense strand
gaaccaaaacugcugaaag

SEQ ID NO: 1567148 - RNA, 19 nt, Homo sapiens
  misc_RNA (1)...(19): siRNA sense strand
gcagugggcgaaugagaac

SEQ ID NO: 1567149 - RNA, 19 nt, Homo sapiens
  misc_RNA (1)...(19): siRNA sense strand
agagaaacucaacugcaaa

SEQ ID NO: 1567150 - RNA, 19 nt, Homo sapiens
  misc_RNA (1)...(19): siRNA sense strand
uaaaguagugggcauucuc

SEQ ID NO: 1567151 - RNA, 19 nt, Homo sapiens
  misc_RNA (1)...(19): siRNA sense strand
gcgaaugagaacagcauca

SEQ ID NO: 1567152 - RNA, 19 nt, Homo sapiens
  misc_RNA (1)...(19): siRNA sense strand
uggacaaagcucagagaaa

SEQ ID NO: 1567153 - RNA, 19 nt, Homo sapiens
  misc_RNA (1)...(19): siRNA sense strand
gggaugcuggugugcuuga

SEQ ID NO: 1567154 - RNA, 19 nt, Homo sapiens
  misc_RNA (1)...(19): siRNA sense strand
acugguagacuuugaagga

SEQ ID NO: 1567155 - RNA, 19 nt, Homo sapiens
  misc_RNA (1)...(19): siRNA sense strand
agagaaagccccugagguu

SEQ ID NO: 1567156 - RNA, 19 nt, Homo sapiens
  misc_RNA (1)...(19): siRNA sense strand
gagaaagccccugagguuu

SEQ ID NO: 1567157 - RNA, 19 nt, Homo sapiens
  misc_RNA (1)...(19): siRNA sense strand
ggcagcagugggcgaauga

SEQ ID NO: 1567158 - RNA, 19 nt, Homo sapiens
  misc_RNA (1)...(19): siRNA sense strand
gccagaaggacauggagau

SEQ ID NO: 1567159 - RNA, 19 nt, Homo sapiens
  misc_RNA (1)...(19): siRNA sense strand
gagauggacaaagcucaga

SEQ ID NO: 1567160 - RNA, 19 nt, Homo sapiens
  misc_RNA (1)...(19): siRNA sense strand
gugacagcguagacacaga

SEQ ID NO: 1567161 - RNA, 19 nt, Homo sapiens
  misc_RNA (1)...(19): siRNA sense strand
gcaaggccgagaugaccau

SEQ ID NO: 1567162 - RNA, 19 nt, Homo sapiens
  misc_RNA (1)...(19): siRNA sense strand
acguucguauuucagauaa

SEQ ID NO: 1567163 - RNA, 19 nt, Homo sapiens
  misc_RNA (1)...(19): siRNA sense strand
ccacccuggucaucagcuu

SEQ ID NO: 1567164 - RNA, 19 nt, Homo sapiens
  misc_RNA (1)...(19): siRNA sense strand
cccuugcccucccagguaa

SEQ ID NO: 1567165 - RNA, 19 nt, Homo sapiens
  misc_RNA (1)...(19): siRNA sense strand
gaggagggcucugagauug

SEQ ID NO: 1567166 - RNA, 19 nt, Homo sapiens
  misc_RNA (1)...(19): siRNA sense strand
ggaggagggcucugagauu

SEQ ID NO: 1567167 - RNA, 19 nt, Homo sapiens
  misc_RNA (1)...(19): siRNA sense strand
ucaccuggauugcaaguca

SEQ ID NO: 1567168 - RNA, 19 nt, Homo sapiens
  misc_RNA (1)...(19): siRNA sense strand
gauugcaagucagaacaug

SEQ ID NO: 1567169 - RNA, 19 nt, Homo sapiens
  misc_RNA (1)...(19): siRNA sense strand
gaccuucaguccucaugag

SEQ ID NO: 1567170 - RNA, 19 nt, Homo sapiens
  misc_RNA (1)...(19): siRNA sense strand
gcucugagauuggcuuuuc

SEQ ID NO: 1567171 - RNA, 19 nt, Homo sapiens
  misc_RNA (1)...(19): siRNA sense strand
ccggaacccugcaccuauc

SEQ ID NO: 1567172 - RNA, 19 nt, Homo sapiens
  misc_RNA (1)...(19): siRNA sense strand
ucccuggcauccacagaaa

SEQ ID NO: 1567173 - RNA, 19 nt, Homo sapiens
  misc_RNA (1)...(19): siRNA sense strand
gcacccagcucuccaggaa

SEQ ID NO: 1567174 - RNA, 19 nt, Homo sapiens
  misc_RNA (1)...(19): siRNA sense strand
guacguggcucaacuuuac

SEQ ID NO: 1567175 - RNA, 19 nt, Homo sapiens
  misc_RNA (1)...(19): siRNA sense strand
gcaagacggugccgagaag

SEQ ID NO: 1567176 - RNA, 19 nt, Homo sapiens
  misc_RNA (1)...(19): siRNA sense strand
ggaaauucaucagcgacua

SEQ ID NO: 1567177 - RNA, 19 nt, Homo sapiens
  misc_RNA (1)...(19): siRNA sense strand
uggaagagcucaaggagau

SEQ ID NO: 1567178 - RNA, 19 nt, Homo sapiens
  misc_RNA (1)...(19): siRNA sense strand
gcccagagccuucucaaug

SEQ ID NO: 1567179 - RNA, 19 nt, Homo sapiens
  misc_RNA (1)...(19): siRNA sense strand
gagagauccucaccaugga

SEQ ID NO: 1567180 - RNA, 19 nt, Homo sapiens
  misc_RNA (1)...(19): siRNA sense strand
ugagugggauuaugagugu

SEQ ID NO: 1567181 - RNA, 19 nt, Homo sapiens
  misc_RNA (1)...(19): siRNA sense strand
gagaagcagcugcgagaga

SEQ ID NO: 1567182 - RNA, 19 nt, Homo sapiens
  misc_RNA (1)...(19): siRNA sense strand
gaagagcucaaggagauug

SEQ ID NO: 1567183 - RNA, 19 nt, Homo sapiens
  misc_RNA (1)...(19): siRNA sense strand
gaggaggacacccgucuga

SEQ ID NO: 1567184 - RNA, 19 nt, Homo sapiens
  misc_RNA (1)...(19): siRNA sense strand
ggacacgacagucacaauc

SEQ ID NO: 1567185 - RNA, 19 nt, Homo sapiens
  misc_RNA (1)...(19): siRNA sense strand
aaauugagugggauuauga

SEQ ID NO: 1567186 - RNA, 19 nt, Homo sapiens
  misc_RNA (1)...(19): siRNA sense strand
ccaccaaguuaguaaaauu

SEQ ID NO: 1567187 - RNA, 19 nt, Homo sapiens
  misc_RNA (1)...(19): siRNA sense strand
agaagcagcugcgagagau

SEQ ID NO: 1567188 - RNA, 19 nt, Homo sapiens
  misc_RNA (1)...(19): siRNA sense strand
ggaggacacccgucugaag

SEQ ID NO: 1567189 - RNA, 19 nt, Homo sapiens
  misc_RNA (1)...(19): siRNA sense strand
gaaauucaucagcgacuac

SEQ ID NO: 1567190 - RNA, 19 nt, Homo sapiens
  misc_RNA (1)...(19): siRNA sense strand
ggucaaaggcauccaucau

SEQ ID NO: 1567191 - RNA, 19 nt, Homo sapiens
  misc_RNA (1)...(19): siRNA sense strand
gucaaaggcauccaucaug

SEQ ID NO: 1567192 - RNA, 19 nt, Homo sapiens
  misc_RNA (1)...(19): siRNA sense strand
gacgaggacacgacaguca

SEQ ID NO: 1567193 - RNA, 19 nt, Homo sapiens
  misc_RNA (1)...(19): siRNA sense strand
acccagcucuccaggaaau

SEQ ID NO: 1567194 - RNA, 19 nt, Homo sapiens
  misc_RNA (1)...(19): siRNA sense strand
ggaagagcucaaggagauu

SEQ ID NO: 1567195 - RNA, 19 nt, Homo sapiens
  misc_RNA (1)...(19): siRNA sense strand
guggagcggcugcuggaaa

SEQ ID NO: 1567196 - RNA, 19 nt, Homo sapiens
  misc_RNA (1)...(19): siRNA sense strand
cccagagccuucucaaugc

SEQ ID NO: 1567197 - RNA, 19 nt, Homo sapiens
  misc_RNA (1)...(19): siRNA sense strand
uccuucagcucaccagaga

SEQ ID NO: 1567198 - RNA, 19 nt, Homo sapiens
  misc_RNA (1)...(19): siRNA sense strand
ugcgagagauccucaccau

SEQ ID NO: 1567199 - RNA, 19 nt, Homo sapiens
  misc_RNA (1)...(19): siRNA sense strand
gcauguaccuggucuuuga

SEQ ID NO: 1567200 - RNA, 19 nt, Homo sapiens
  misc_RNA (1)...(19): siRNA sense strand
gaugaugaccguaaugaaa

SEQ ID NO: 1567201 - RNA, 19 nt, Homo sapiens
  misc_RNA (1)...(19): siRNA sense strand
gcagcgaugaugaccguaa

SEQ ID NO: 1567202 - RNA, 19 nt, Homo sapiens
  misc_RNA (1)...(19): siRNA sense strand
gcagucaucaccucagcaa

SEQ ID NO: 1567203 - RNA, 19 nt, Homo sapiens
  misc_RNA (1)...(19): siRNA sense strand
gucaucaccucagcaauuc

SEQ ID NO: 1567204 - RNA, 19 nt, Homo sapiens
  misc_RNA (1)...(19): siRNA sense strand
gcgaugaugaccguaauga

SEQ ID NO: 1567205 - RNA, 19 nt, Homo sapiens
  misc_RNA (1)...(19): siRNA sense strand
agucaucaccucagcaauu

SEQ ID NO: 1567206 - RNA, 19 nt, Homo sapiens
  misc_RNA (1)...(19): siRNA sense strand
cagcgaugaugaccguaau

SEQ ID NO: 1567207 - RNA, 19 nt, Homo sapiens
  misc_RNA (1)...(19): siRNA sense strand
uaccuggucuuugaugguu

SEQ ID NO: 1567208 - RNA, 19 nt, Homo sapiens
  misc_RNA (1)...(19): siRNA sense strand
ggaccugcacuacaauugc

SEQ ID NO: 1567209 - RNA, 19 nt, Homo sapiens
  misc_RNA (1)...(19): siRNA sense strand
ggagaggaauugaaagcaa

SEQ ID NO: 1567210 - RNA, 19 nt, Homo sapiens
  misc_RNA (1)...(19): siRNA sense strand
caggaaaaguguucaaaua

SEQ ID NO: 1567211 - RNA, 19 nt, Homo sapiens
  misc_RNA (1)...(19): siRNA sense strand
ggauuuggguccugacuca

SEQ ID NO: 1567212 - RNA, 19 nt, Homo sapiens
  misc_RNA (1)...(19): siRNA sense strand
ugaaggagaucuacaagcu

SEQ ID NO: 1567213 - RNA, 19 nt, Homo sapiens
  misc_RNA (1)...(19): siRNA sense strand
gcuuugaccuccuguugga

SEQ ID NO: 1567214 - RNA, 19 nt, Homo sapiens
  misc_RNA (1)...(19): siRNA sense strand
gcaagacggaggccaaaca

SEQ ID NO: 1567215 - RNA, 19 nt, Homo sapiens
  misc_RNA (1)...(19): siRNA sense strand
agaacauccugacccauga

SEQ ID NO: 1567216 - RNA, 19 nt, Homo sapiens
  misc_RNA (1)...(19): siRNA sense strand
uguccuugcucacggagua

SEQ ID NO: 1567217 - RNA, 19 nt, Homo sapiens
  misc_RNA (1)...(19): siRNA sense strand
uggaggagaggaauugaaa

SEQ ID NO: 1567218 - RNA, 19 nt, Homo sapiens
  misc_RNA (1)...(19): siRNA sense strand
ggagaggggaccuggauuu

SEQ ID NO: 1567219 - RNA, 19 nt, Homo sapiens
  misc_RNA (1)...(19): siRNA sense strand
gagccuuccuccugagaac

SEQ ID NO: 1567220 - RNA, 19 nt, Homo sapiens
  misc_RNA (1)...(19): siRNA sense strand
ggugagcgcggaacuggau

SEQ ID NO: 1567221 - RNA, 19 nt, Homo sapiens
  misc_RNA (1)...(19): siRNA sense strand
cguuucugcucaucuguga

SEQ ID NO: 1567222 - RNA, 19 nt, Homo sapiens
  misc_RNA (1)...(19): siRNA sense strand
gaggagaggaauugaaagc

SEQ ID NO: 1567223 - RNA, 19 nt, Homo sapiens
  misc_RNA (1)...(19): siRNA sense strand
gcagguggaagugcucaga

SEQ ID NO: 1567224 - RNA, 19 nt, Homo sapiens
  misc_RNA (1)...(19): siRNA sense strand
gaggaccagccaccaggaa

SEQ ID NO: 1567225 - RNA, 19 nt, Homo sapiens
  misc_RNA (1)...(19): siRNA sense strand
gugggcaaauucagaaacu

SEQ ID NO: 1567226 - RNA, 19 nt, Homo sapiens
  misc_RNA (1)...(19): siRNA sense strand
cuacagcaccagccucauc

SEQ ID NO: 1567227 - RNA, 19 nt, Homo sapiens
  misc_RNA (1)...(19): siRNA sense strand
cugcucaucugugaaaugg

SEQ ID NO: 1567228 - RNA, 19 nt, Homo sapiens
  misc_RNA (1)...(19): siRNA sense strand
gaacauccugacccaugag

SEQ ID NO: 1567229 - RNA, 19 nt, Homo sapiens
  misc_RNA (1)...(19): siRNA sense strand
gaaucgggauccagaauuu

SEQ ID NO: 1567230 - RNA, 19 nt, Homo sapiens
  misc_RNA (1)...(19): siRNA sense strand
gcacugaacuucggcucua

SEQ ID NO: 1567231 - RNA, 19 nt, Homo sapiens
  misc_RNA (1)...(19): siRNA sense strand
ggacagaggcggaucuuag

SEQ ID NO: 1567232 - RNA, 19 nt, Homo sapiens
  misc_RNA (1)...(19): siRNA sense strand
gcucuacguugaugaagaa

SEQ ID NO: 1567233 - RNA, 19 nt, Homo sapiens
  misc_RNA (1)...(19): siRNA sense strand
gaucagugguaaugggaaa

SEQ ID NO: 1567234 - RNA, 19 nt, Homo sapiens
  misc_RNA (1)...(19): siRNA sense strand
gacggcaucugcuaccuuu

SEQ ID NO: 1567235 - RNA, 19 nt, Homo sapiens
  misc_RNA (1)...(19): siRNA sense strand
ucacuugggugcagcagaa

SEQ ID NO: 1567236 - RNA, 19 nt, Homo sapiens
  misc_RNA (1)...(19): siRNA sense strand
gcgcugcucuucccugaga

SEQ ID NO: 1567237 - RNA, 19 nt, Homo sapiens
  misc_RNA (1)...(19): siRNA sense strand
cuacguugaugaagaagaa

SEQ ID NO: 1567238 - RNA, 19 nt, Homo sapiens
  misc_RNA (1)...(19): siRNA sense strand
cuggagagcuuucugguau

SEQ ID NO: 1567239 - RNA, 19 nt, Homo sapiens
  misc_RNA (1)...(19): siRNA sense strand
caucuuggccaucacuaua

SEQ ID NO: 1567240 - RNA, 19 nt, Homo sapiens
  misc_RNA (1)...(19): siRNA sense strand
gaauuuggccauuggaauc

SEQ ID NO: 1567241 - RNA, 19 nt, Homo sapiens
  misc_RNA (1)...(19): siRNA sense strand
ggaaucgggauccagaauu

SEQ ID NO: 1567242 - RNA, 19 nt, Homo sapiens
  misc_RNA (1)...(19): siRNA sense strand
gaacuuuccauccggauag

SEQ ID NO: 1567243 - RNA, 19 nt, Homo sapiens
  misc_RNA (1)...(19): siRNA sense strand
gcccuacgcucuggccuuu

SEQ ID NO: 1567244 - RNA, 19 nt, Homo sapiens
  misc_RNA (1)...(19): siRNA sense strand
agauggaagucuuggcuuu

SEQ ID NO: 1567245 - RNA, 19 nt, Homo sapiens
  misc_RNA (1)...(19): siRNA sense strand
ggugaggcauaucagagaa

SEQ ID NO: 1567246 - RNA, 19 nt, Homo sapiens
  misc_RNA (1)...(19): siRNA sense strand
gaaaagacggcaucugcua

SEQ ID NO: 1567247 - RNA, 19 nt, Homo sapiens
  misc_RNA (1)...(19): siRNA sense strand
ggaucgcacugcucaucuu

SEQ ID NO: 1567248 - RNA, 19 nt, Homo sapiens
  misc_RNA (1)...(19): siRNA sense strand
ggaauuuggccauuggaau

SEQ ID NO: 1567249 - RNA, 19 nt, Homo sapiens
  misc_RNA (1)...(19): siRNA sense strand
ggagagcuuucugguaugg

SEQ ID NO: 1567250 - RNA, 19 nt, Homo sapiens
  misc_RNA (1)...(19): siRNA sense strand
gacagaggcggaucuuaga

SEQ ID NO: 1567251 - RNA, 19 nt, Homo sapiens
  misc_RNA (1)...(19): siRNA sense strand
ggucauggacgacaucauc

SEQ ID NO: 1567252 - RNA, 19 nt, Homo sapiens
  misc_RNA (1)...(19): siRNA sense strand
guuggcagcuuccuauugg

SEQ ID NO: 1567253 - RNA, 19 nt, Homo sapiens
  misc_RNA (1)...(19): siRNA sense strand
agacggcccuggcacugaa

SEQ ID NO: 1567254 - RNA, 19 nt, Homo sapiens
  misc_RNA (1)...(19): siRNA sense strand
gggcagcucucguguucgu

SEQ ID NO: 1567255 - RNA, 19 nt, Homo sapiens
  misc_RNA (1)...(19): siRNA sense strand
gggucucgcuguuggaguu

SEQ ID NO: 1567256 - RNA, 19 nt, Homo sapiens
  misc_RNA (1)...(19): siRNA sense strand
ugagaauggugaggcauau

SEQ ID NO: 1567257 - RNA, 19 nt, Homo sapiens
  misc_RNA (1)...(19): siRNA sense strand
ugaugaagaagaagucuga

SEQ ID NO: 1567258 - RNA, 19 nt, Homo sapiens
  misc_RNA (1)...(19): siRNA sense strand
ccaggaauuuggccauugg

SEQ ID NO: 1567259 - RNA, 19 nt, Homo sapiens
  misc_RNA (1)...(19): siRNA sense strand
gugagaauggugaggcaua

SEQ ID NO: 1567260 - RNA, 19 nt, Homo sapiens
  misc_RNA (1)...(19): siRNA sense strand
ggccaucacuauacacaac

SEQ ID NO: 1567261 - RNA, 19 nt, Homo sapiens
  misc_RNA (1)...(19): siRNA sense strand
ggauagacaagagugagaa

SEQ ID NO: 1567262 - RNA, 19 nt, Homo sapiens
  misc_RNA (1)...(19): siRNA sense strand
gcccagaucagugguaaug

SEQ ID NO: 1567263 - RNA, 19 nt, Homo sapiens
  misc_RNA (1)...(19): siRNA sense strand
cggcaucugcuaccuuuga

SEQ ID NO: 1567264 - RNA, 19 nt, Homo sapiens
  misc_RNA (1)...(19): siRNA sense strand
ccugggauuuguagugaug

SEQ ID NO: 1567265 - RNA, 19 nt, Homo sapiens
  misc_RNA (1)...(19): siRNA sense strand
gaagcccagaucaguggua

SEQ ID NO: 1567266 - RNA, 19 nt, Homo sapiens
  misc_RNA (1)...(19): siRNA sense strand
gcagcucucguguucguau

SEQ ID NO: 1567267 - RNA, 19 nt, Homo sapiens
  misc_RNA (1)...(19): siRNA sense strand
gagagugccaggaauuugg

SEQ ID NO: 1567268 - RNA, 19 nt, Homo sapiens
  misc_RNA (1)...(19): siRNA sense strand
gauggaagucuuggcuuug

SEQ ID NO: 1567269 - RNA, 19 nt, Homo sapiens
  misc_RNA (1)...(19): siRNA sense strand
gaucgcacugcucaucuug

SEQ ID NO: 1567270 - RNA, 19 nt, Homo sapiens
  misc_RNA (1)...(19): siRNA sense strand
ggauuuguagugaugaugu

SEQ ID NO: 1567271 - RNA, 19 nt, Homo sapiens
  misc_RNA (1)...(19): siRNA sense strand
cauguuggcagcuuccuau

SEQ ID NO: 1567272 - RNA, 19 nt, Homo sapiens
  misc_RNA (1)...(19): siRNA sense strand
ggcucuacguugaugaaga

SEQ ID NO: 1567273 - RNA, 19 nt, Homo sapiens
  misc_RNA (1)...(19): siRNA sense strand
aagcccagaucagugguaa

SEQ ID NO: 1567274 - RNA, 19 nt, Homo sapiens
  misc_RNA (1)...(19): siRNA sense strand
gaggaucgcacugcucauc

SEQ ID NO: 1567275 - RNA, 19 nt, Homo sapiens
  misc_RNA (1)...(19): siRNA sense strand
gauagacaagagugagaau

SEQ ID NO: 1567276 - RNA, 19 nt, Homo sapiens
  misc_RNA (1)...(19): siRNA sense strand
aggcauaucagagaaagaa

SEQ ID NO: 1567277 - RNA, 19 nt, Homo sapiens
  misc_RNA (1)...(19): siRNA sense strand
ugaacuuuccauccggaua

SEQ ID NO: 1567278 - RNA, 19 nt, Homo sapiens
  misc_RNA (1)...(19): siRNA sense strand
gauuuguagugaugauguc

SEQ ID NO: 1567279 - RNA, 19 nt, Homo sapiens
  misc_RNA (1)...(19): siRNA sense strand
cagcucucguguucguauu

SEQ ID NO: 1567280 - RNA, 19 nt, Homo sapiens
  misc_RNA (1)...(19): siRNA sense strand
agaauggugaggcauauca

SEQ ID NO: 1567281 - RNA, 19 nt, Homo sapiens
  misc_RNA (1)...(19): siRNA sense strand
agacaagagugagaauggu

SEQ ID NO: 1567282 - RNA, 19 nt, Homo sapiens
  misc_RNA (1)...(19): siRNA sense strand
gaagaagaagucugauccu

SEQ ID NO: 1567283 - RNA, 19 nt, Homo sapiens
  misc_RNA (1)...(19): siRNA sense strand
gagcggcuuuugucuacuu

SEQ ID NO: 1567284 - RNA, 19 nt, Homo sapiens
  misc_RNA (1)...(19): siRNA sense strand
ccagagggucucgcuguug

SEQ ID NO: 1567285 - RNA, 19 nt, Homo sapiens
  misc_RNA (1)...(19): siRNA sense strand
uagacaagagugagaaugg

SEQ ID NO: 1567286 - RNA, 19 nt, Homo sapiens
  misc_RNA (1)...(19): siRNA sense strand
ugaggcauaucagagaaag

SEQ ID NO: 1567287 - RNA, 19 nt, Homo sapiens
  misc_RNA (1)...(19): siRNA sense strand
ugagagugccaggaauuug

SEQ ID NO: 1567288 - RNA, 19 nt, Homo sapiens
  misc_RNA (1)...(19): siRNA sense strand
cugcucaucuuggccauca

SEQ ID NO: 1567289 - RNA, 19 nt, Homo sapiens
  misc_RNA (1)...(19): siRNA sense strand
caacccaaauuccagacua

SEQ ID NO: 1567290 - RNA, 19 nt, Homo sapiens
  misc_RNA (1)...(19): siRNA sense strand
guacaaccaagaacaauga

SEQ ID NO: 1567291 - RNA, 19 nt, Homo sapiens
  misc_RNA (1)...(19): siRNA sense strand
cccagaagauauccucaua

SEQ ID NO: 1567292 - RNA, 19 nt, Homo sapiens
  misc_RNA (1)...(19): siRNA sense strand
caccugagccuuuccauga

SEQ ID NO: 1567293 - RNA, 19 nt, Homo sapiens
  misc_RNA (1)...(19): siRNA sense strand
aagcauccuuugagaauug

SEQ ID NO: 1567294 - RNA, 19 nt, Homo sapiens
  misc_RNA (1)...(19): siRNA sense strand
gcccagaaaggaaccaaua

SEQ ID NO: 1567295 - RNA, 19 nt, Homo sapiens
  misc_RNA (1)...(19): siRNA sense strand
gaaccaauaggcaagacaa

SEQ ID NO: 1567296 - RNA, 19 nt, Homo sapiens
  misc_RNA (1)...(19): siRNA sense strand
ccucauaccucugcgacuu

SEQ ID NO: 1567297 - RNA, 19 nt, Homo sapiens
  misc_RNA (1)...(19): siRNA sense strand
ccacaugucaagaaaugaa

SEQ ID NO: 1567298 - RNA, 19 nt, Homo sapiens
  misc_RNA (1)...(19): siRNA sense strand
agacuacaccugagccuuu

SEQ ID NO: 1567299 - RNA, 19 nt, Homo sapiens
  misc_RNA (1)...(19): siRNA sense strand
caaugaaaaucccagauga

SEQ ID NO: 1567300 - RNA, 19 nt, Homo sapiens
  misc_RNA (1)...(19): siRNA sense strand
gugcucagccuucccagaa

SEQ ID NO: 1567301 - RNA, 19 nt, Homo sapiens
  misc_RNA (1)...(19): siRNA sense strand
uaaaggcuucuguuccaaa

SEQ ID NO: 1567302 - RNA, 19 nt, Homo sapiens
  misc_RNA (1)...(19): siRNA sense strand
cauccaagaagaauaugaa

SEQ ID NO: 1567303 - RNA, 19 nt, Homo sapiens
  misc_RNA (1)...(19): siRNA sense strand
cuccacaugucaagaaaug

SEQ ID NO: 1567304 - RNA, 19 nt, Homo sapiens
  misc_RNA (1)...(19): siRNA sense strand
acuaaaggcuucuguucca

SEQ ID NO: 1567305 - RNA, 19 nt, Homo sapiens
  misc_RNA (1)...(19): siRNA sense strand
cagaagauauccucauacc

SEQ ID NO: 1567306 - RNA, 19 nt, Homo sapiens
  misc_RNA (1)...(19): siRNA sense strand
ccaauaggcaagacaacga

SEQ ID NO: 1567307 - RNA, 19 nt, Homo sapiens
  misc_RNA (1)...(19): siRNA sense strand
ccaggaggaaccaguguga

SEQ ID NO: 1567308 - RNA, 19 nt, Homo sapiens
  misc_RNA (1)...(19): siRNA sense strand
caaccaagaacaaugaaaa

SEQ ID NO: 1567309 - RNA, 19 nt, Homo sapiens
  misc_RNA (1)...(19): siRNA sense strand
acuccaugcugcucagaaa

SEQ ID NO: 1567310 - RNA, 19 nt, Homo sapiens
  misc_RNA (1)...(19): siRNA sense strand
guuucaaguuccagauguu

SEQ ID NO: 1567311 - RNA, 19 nt, Homo sapiens
  misc_RNA (1)...(19): siRNA sense strand
caagacaacgaggcaguga

SEQ ID NO: 1567312 - RNA, 19 nt, Homo sapiens
  misc_RNA (1)...(19): siRNA sense strand
guuauagaaugagucuuca

SEQ ID NO: 1567313 - RNA, 19 nt, Homo sapiens
  misc_RNA (1)...(19): siRNA sense strand
gguacaaccaagaacaaug

SEQ ID NO: 1567314 - RNA, 19 nt, Homo sapiens
  misc_RNA (1)...(19): siRNA sense strand
uuucugacuucauccaaga

SEQ ID NO: 1567315 - RNA, 19 nt, Homo sapiens
  misc_RNA (1)...(19): siRNA sense strand
gacuacaccugagccuuuc

SEQ ID NO: 1567316 - RNA, 19 nt, Homo sapiens
  misc_RNA (1)...(19): siRNA sense strand
aagauuccuuggcuuagug

SEQ ID NO: 1567317 - RNA, 19 nt, Homo sapiens
  misc_RNA (1)...(19): siRNA sense strand
cuaaaggcuucuguuccaa

SEQ ID NO: 1567318 - RNA, 19 nt, Homo sapiens
  misc_RNA (1)...(19): siRNA sense strand
uaucuaaggccaggaggaa

SEQ ID NO: 1567319 - RNA, 19 nt, Homo sapiens
  misc_RNA (1)...(19): siRNA sense strand
ccugagccuuuccaugaug

SEQ ID NO: 1567320 - RNA, 19 nt, Homo sapiens
  misc_RNA (1)...(19): siRNA sense strand
gagucuucaucaacccaaa

SEQ ID NO: 1567321 - RNA, 19 nt, Homo sapiens
  misc_RNA (1)...(19): siRNA sense strand
ccaauuuuguuucaaguuc

SEQ ID NO: 1567322 - RNA, 19 nt, Homo sapiens
  misc_RNA (1)...(19): siRNA sense strand
agagacaacguucuuccuu

SEQ ID NO: 1567323 - RNA, 19 nt, Homo sapiens
  misc_RNA (1)...(19): siRNA sense strand
ucaaguuccagauguuuua

SEQ ID NO: 1567324 - RNA, 19 nt, Homo sapiens
  misc_RNA (1)...(19): siRNA sense strand
cagcugucuuccacggauu

SEQ ID NO: 1567325 - RNA, 19 nt, Homo sapiens
  misc_RNA (1)...(19): siRNA sense strand
gugcuccacaugucaagaa

SEQ ID NO: 1567326 - RNA, 19 nt, Homo sapiens
  misc_RNA (1)...(19): siRNA sense strand
cgacuuuucugacuucauc

SEQ ID NO: 1567327 - RNA, 19 nt, Homo sapiens
  misc_RNA (1)...(19): siRNA sense strand
gaaaaucccagaugaucca

SEQ ID NO: 1567328 - RNA, 19 nt, Homo sapiens
  misc_RNA (1)...(19): siRNA sense strand
ccagaaaggaaccaauagg

SEQ ID NO: 1567329 - RNA, 19 nt, Homo sapiens
  misc_RNA (1)...(19): siRNA sense strand
gaacaaacuucagaacaaa

SEQ ID NO: 1567330 - RNA, 19 nt, Homo sapiens
  misc_RNA (1)...(19): siRNA sense strand
ggaacaaacuucagaacaa

SEQ ID NO: 1567331 - RNA, 19 nt, Homo sapiens
  misc_RNA (1)...(19): siRNA sense strand
ccauuaaacuucuggauuu

SEQ ID NO: 1567332 - RNA, 19 nt, Homo sapiens
  misc_RNA (1)...(19): siRNA sense strand
caagagcacugcaaaggaa

SEQ ID NO: 1567333 - RNA, 19 nt, Homo sapiens
  misc_RNA (1)...(19): siRNA sense strand
ccacaaacagucacaaaua

SEQ ID NO: 1567334 - RNA, 19 nt, Homo sapiens
  misc_RNA (1)...(19): siRNA sense strand
caacaaagaagaagcagaa

SEQ ID NO: 1567335 - RNA, 19 nt, Homo sapiens
  misc_RNA (1)...(19): siRNA sense strand
gaaauauaauuccguugca

SEQ ID NO: 1567336 - RNA, 19 nt, Homo sapiens
  misc_RNA (1)...(19): siRNA sense strand
agaauaugauguuggagua

SEQ ID NO: 1567337 - RNA, 19 nt, Homo sapiens
  misc_RNA (1)...(19): siRNA sense strand
gcgaauaccauuaaacuuc

SEQ ID NO: 1567338 - RNA, 19 nt, Homo sapiens
  misc_RNA (1)...(19): siRNA sense strand
ggaauuggaagcaguguug

SEQ ID NO: 1567339 - RNA, 19 nt, Homo sapiens
  misc_RNA (1)...(19): siRNA sense strand
gcuacugacuucuacaaug

SEQ ID NO: 1567340 - RNA, 19 nt, Homo sapiens
  misc_RNA (1)...(19): siRNA sense strand
ugugggaucuggagaauau

SEQ ID NO: 1567341 - RNA, 19 nt, Homo sapiens
  misc_RNA (1)...(19): siRNA sense strand
caaacagucacaaauacua

SEQ ID NO: 1567342 - RNA, 19 nt, Homo sapiens
  misc_RNA (1)...(19): siRNA sense strand
ggaguaacaauuaugcaaa

SEQ ID NO: 1567343 - RNA, 19 nt, Homo sapiens
  misc_RNA (1)...(19): siRNA sense strand
uaacagcuacugacuucua

SEQ ID NO: 1567344 - RNA, 19 nt, Homo sapiens
  misc_RNA (1)...(19): siRNA sense strand
gaaagucugagcaauggaa

SEQ ID NO: 1567345 - RNA, 19 nt, Homo sapiens
  misc_RNA (1)...(19): siRNA sense strand
agucucagcuucccguaua

SEQ ID NO: 1567346 - RNA, 19 nt, Homo sapiens
  misc_RNA (1)...(19): siRNA sense strand
gcccaauucucaaacaaga

SEQ ID NO: 1567347 - RNA, 19 nt, Homo sapiens
  misc_RNA (1)...(19): siRNA sense strand
gauguaggcccaauucuca

SEQ ID NO: 1567348 - RNA, 19 nt, Homo sapiens
  misc_RNA (1)...(19): siRNA sense strand
gcaauaugcugugcagucu

SEQ ID NO: 1567349 - RNA, 19 nt, Homo sapiens
  misc_RNA (1)...(19): siRNA sense strand
gaaggcagcagccaaugga

SEQ ID NO: 1567350 - RNA, 19 nt, Homo sapiens
  misc_RNA (1)...(19): siRNA sense strand
gguagaaguuaacaguuca

SEQ ID NO: 1567351 - RNA, 19 nt, Homo sapiens
  misc_RNA (1)...(19): siRNA sense strand
ccaguugccucccgagaug

SEQ ID NO: 1567352 - RNA, 19 nt, Homo sapiens
  misc_RNA (1)...(19): siRNA sense strand
gaucaguaauauaccacaa

SEQ ID NO: 1567353 - RNA, 19 nt, Homo sapiens
  misc_RNA (1)...(19): siRNA sense strand
ccaacaugcucauuucagu

SEQ ID NO: 1567354 - RNA, 19 nt, Homo sapiens
  misc_RNA (1)...(19): siRNA sense strand
ccuaagauuucugcuggua

SEQ ID NO: 1567355 - RNA, 19 nt, Homo sapiens
  misc_RNA (1)...(19): siRNA sense strand
cgaauaccauuaaacuucu

SEQ ID NO: 1567356 - RNA, 19 nt, Homo sapiens
  misc_RNA (1)...(19): siRNA sense strand
cuacugacuucuacaaugg

SEQ ID NO: 1567357 - RNA, 19 nt, Homo sapiens
  misc_RNA (1)...(19): siRNA sense strand
acuaacagcuacugacuuc

SEQ ID NO: 1567358 - RNA, 19 nt, Homo sapiens
  misc_RNA (1)...(19): siRNA sense strand
cacaaacagucacaaauac

SEQ ID NO: 1567359 - RNA, 19 nt, Homo sapiens
  misc_RNA (1)...(19): siRNA sense strand
caaccaagccaaugcagau

SEQ ID NO: 1567360 - RNA, 19 nt, Homo sapiens
  misc_RNA (1)...(19): siRNA sense strand
ccaagccaaugcagauuuc

SEQ ID NO: 1567361 - RNA, 19 nt, Homo sapiens
  misc_RNA (1)...(19): siRNA sense strand
gaagcaguguugucaagac

SEQ ID NO: 1567362 - RNA, 19 nt, Homo sapiens
  misc_RNA (1)...(19): siRNA sense strand
gaugugggaucuggagaau

SEQ ID NO: 1567363 - RNA, 19 nt, Homo sapiens
  misc_RNA (1)...(19): siRNA sense strand
cuucuacaauggauauuug

SEQ ID NO: 1567364 - RNA, 19 nt, Homo sapiens
  misc_RNA (1)...(19): siRNA sense strand
augaggcucuuauucuuaa

SEQ ID NO: 1567365 - RNA, 19 nt, Homo sapiens
  misc_RNA (1)...(19): siRNA sense strand
uggagaauaugauguugga

SEQ ID NO: 1567366 - RNA, 19 nt, Homo sapiens
  misc_RNA (1)...(19): siRNA sense strand
gugccaacaugcucauuuc

SEQ ID NO: 1567367 - RNA, 19 nt, Homo sapiens
  misc_RNA (1)...(19): siRNA sense strand
caacaugcucauuucaguu

SEQ ID NO: 1567368 - RNA, 19 nt, Homo sapiens
  misc_RNA (1)...(19): siRNA sense strand
uugcaaggaugguuggauu

SEQ ID NO: 1567369 - RNA, 19 nt, Homo sapiens
  misc_RNA (1)...(19): siRNA sense strand
ggaggaacaaacuucagaa

SEQ ID NO: 1567370 - RNA, 19 nt, Homo sapiens
  misc_RNA (1)...(19): siRNA sense strand
aaugaggcucuuauucuua

SEQ ID NO: 1567371 - RNA, 19 nt, Homo sapiens
  misc_RNA (1)...(19): siRNA sense strand
cagugaugcucaagaaauc

SEQ ID NO: 1567372 - RNA, 19 nt, Homo sapiens
  misc_RNA (1)...(19): siRNA sense strand
gggacaggcucuuauucca

SEQ ID NO: 1567373 - RNA, 19 nt, Homo sapiens
  misc_RNA (1)...(19): siRNA sense strand
cauuaaacuucuggauuug

SEQ ID NO: 1567374 - RNA, 19 nt, Homo sapiens
  misc_RNA (1)...(19): siRNA sense strand
gcacugcaaaggaauugga

SEQ ID NO: 1567375 - RNA, 19 nt, Homo sapiens
  misc_RNA (1)...(19): siRNA sense strand
gcucaagaaaucacuaaca

SEQ ID NO: 1567376 - RNA, 19 nt, Homo sapiens
  misc_RNA (1)...(19): siRNA sense strand
ugguagaaguuaacaguuc

SEQ ID NO: 1567377 - RNA, 19 nt, Homo sapiens
  misc_RNA (1)...(19): siRNA sense strand
gggaggaacaaacuucaga

SEQ ID NO: 1567378 - RNA, 19 nt, Homo sapiens
  misc_RNA (1)...(19): siRNA sense strand
uaacgggacaggcucuuau

SEQ ID NO: 1567379 - RNA, 19 nt, Homo sapiens
  misc_RNA (1)...(19): siRNA sense strand
ccaagagcacugcaaagga

SEQ ID NO: 1567380 - RNA, 19 nt, Homo sapiens
  misc_RNA (1)...(19): siRNA sense strand
gaauaccauuaaacuucug

SEQ ID NO: 1567381 - RNA, 19 nt, Homo sapiens
  misc_RNA (1)...(19): siRNA sense strand
aauaugcugugcagucuca

SEQ ID NO: 1567382 - RNA, 19 nt, Homo sapiens
  misc_RNA (1)...(19): siRNA sense strand
cagaacaaauauucagacu

SEQ ID NO: 1567383 - RNA, 19 nt, Homo sapiens
  misc_RNA (1)...(19): siRNA sense strand
ucagugaugcucaagaaau

SEQ ID NO: 1567384 - RNA, 19 nt, Homo sapiens
  misc_RNA (1)...(19): siRNA sense strand
uggauuugguagaaguuaa

SEQ ID NO: 1567385 - RNA, 19 nt, Homo sapiens
  misc_RNA (1)...(19): siRNA sense strand
ucaguaauauaccacaaac

SEQ ID NO: 1567386 - RNA, 19 nt, Homo sapiens
  misc_RNA (1)...(19): siRNA sense strand
ucucagacuuccaacaaag

SEQ ID NO: 1567387 - RNA, 19 nt, Homo sapiens
  misc_RNA (1)...(19): siRNA sense strand
ggaguaguggcuucguuug

SEQ ID NO: 1567388 - RNA, 19 nt, Homo sapiens
  misc_RNA (1)...(19): siRNA sense strand
ggaugugggaucuggagaa

SEQ ID NO: 1567389 - RNA, 19 nt, Homo sapiens
  misc_RNA (1)...(19): siRNA sense strand
ugacuucuacaauggauau

SEQ ID NO: 1567390 - RNA, 19 nt, Homo sapiens
  misc_RNA (1)...(19): siRNA sense strand
ggaagcaguguugucaaga

SEQ ID NO: 1567391 - RNA, 19 nt, Homo sapiens
  misc_RNA (1)...(19): siRNA sense strand
ggugccaacaugcucauuu

SEQ ID NO: 1567392 - RNA, 19 nt, Homo sapiens
  misc_RNA (1)...(19): siRNA sense strand
ggaaggcagcagccaaugg

SEQ ID NO: 1567393 - RNA, 19 nt, Homo sapiens
  misc_RNA (1)...(19): siRNA sense strand
uggaagcaguguugucaag

SEQ ID NO: 1567394 - RNA, 19 nt, Homo sapiens
  misc_RNA (1)...(19): siRNA sense strand
ggauugguguucgaucagu

SEQ ID NO: 1567395 - RNA, 19 nt, Homo sapiens
  misc_RNA (1)...(19): siRNA sense strand
guaauauaccacaaacagu

SEQ ID NO: 1567396 - RNA, 19 nt, Homo sapiens
  misc_RNA (1)...(19): siRNA sense strand
gccauuggaaauauaauuc

SEQ ID NO: 1567397 - RNA, 19 nt, Homo sapiens
  misc_RNA (1)...(19): siRNA sense strand
cugaaagucugagcaaugg

SEQ ID NO: 1567398 - RNA, 19 nt, Homo sapiens
  misc_RNA (1)...(19): siRNA sense strand
ccugaaagucugagcaaug

SEQ ID NO: 1567399 - RNA, 19 nt, Homo sapiens
  misc_RNA (1)...(19): siRNA sense strand
aagacugggugccaacaug

SEQ ID NO: 1567400 - RNA, 19 nt, Homo sapiens
  misc_RNA (1)...(19): siRNA sense strand
gagcacugcaaaggaauug

SEQ ID NO: 1567401 - RNA, 19 nt, Homo sapiens
  misc_RNA (1)...(19): siRNA sense strand
aacaugcucauuucaguuu

SEQ ID NO: 1567402 - RNA, 19 nt, Homo sapiens
  misc_RNA (1)...(19): siRNA sense strand
uuaaacuucuggauuuggu

SEQ ID NO: 1567403 - RNA, 19 nt, Homo sapiens
  misc_RNA (1)...(19): siRNA sense strand
gcaaggaugguuggauugg

SEQ ID NO: 1567404 - RNA, 19 nt, Homo sapiens
  misc_RNA (1)...(19): siRNA sense strand
caggaucaguaauauacca

SEQ ID NO: 1567405 - RNA, 19 nt, Homo sapiens
  misc_RNA (1)...(19): siRNA sense strand
gaucuggagaauaugaugu

SEQ ID NO: 1567406 - RNA, 19 nt, Homo sapiens
  misc_RNA (1)...(19): siRNA sense strand
ccuaaaagguuugauguag

SEQ ID NO: 1567407 - RNA, 19 nt, Homo sapiens
  misc_RNA (1)...(19): siRNA sense strand
cucaagaaaucacuaacag

SEQ ID NO: 1567408 - RNA, 19 nt, Homo sapiens
  misc_RNA (1)...(19): siRNA sense strand
uaccgugccauuggaaaua

SEQ ID NO: 1567409 - RNA, 19 nt, Homo sapiens
  misc_RNA (1)...(19): siRNA sense strand
gguaccaguuguauaaaau

SEQ ID NO: 1567410 - RNA, 19 nt, Homo sapiens
  misc_RNA (1)...(19): siRNA sense strand
aagaaaucacuaacagcua

SEQ ID NO: 1567411 - RNA, 19 nt, Homo sapiens
  misc_RNA (1)...(19): siRNA sense strand
gaauaugauguuggaguag

SEQ ID NO: 1567412 - RNA, 19 nt, Homo sapiens
  misc_RNA (1)...(19): siRNA sense strand
ucagacuuccaacaaagaa

SEQ ID NO: 1567413 - RNA, 19 nt, Homo sapiens
  misc_RNA (1)...(19): siRNA sense strand
gauauuugcaccccuggua

SEQ ID NO: 1567414 - RNA, 19 nt, Homo sapiens
  misc_RNA (1)...(19): siRNA sense strand
caaggaugguuggauuggu

SEQ ID NO: 1567415 - RNA, 19 nt, Homo sapiens
  misc_RNA (1)...(19): siRNA sense strand
aauaugauguuggaguagu

SEQ ID NO: 1567416 - RNA, 19 nt, Homo sapiens
  misc_RNA (1)...(19): siRNA sense strand
cagcuacugacuucuacaa

SEQ ID NO: 1567417 - RNA, 19 nt, Homo sapiens
  misc_RNA (1)...(19): siRNA sense strand
cuucacggagacacaguua

SEQ ID NO: 1567418 - RNA, 19 nt, Homo sapiens
  misc_RNA (1)...(19): siRNA sense strand
uaccacaaacagucacaaa

SEQ ID NO: 1567419 - RNA, 19 nt, Homo sapiens
  misc_RNA (1)...(19): siRNA sense strand
uggaguaguggcuucguuu

SEQ ID NO: 1567420 - RNA, 19 nt, Homo sapiens
  misc_RNA (1)...(19): siRNA sense strand
cagcuucccguauaugagu

SEQ ID NO: 1567421 - RNA, 19 nt, Homo sapiens
  misc_RNA (1)...(19): siRNA sense strand
cuuauuccaggaucaguaa

SEQ ID NO: 1567422 - RNA, 19 nt, Homo sapiens
  misc_RNA (1)...(19): siRNA sense strand
ccgugccauuggaaauaua

SEQ ID NO: 1567423 - RNA, 19 nt, Homo sapiens
  misc_RNA (1)...(19): siRNA sense strand
gcacagagcaugauugaaa

SEQ ID NO: 1567424 - RNA, 19 nt, Homo sapiens
  misc_RNA (1)...(19): siRNA sense strand
aaacaaggaugcucaguga

SEQ ID NO: 1567425 - RNA, 19 nt, Homo sapiens
  misc_RNA (1)...(19): siRNA sense strand
ggacauggcaucacacaaa

SEQ ID NO: 1567426 - RNA, 19 nt, Homo sapiens
  misc_RNA (1)...(19): siRNA sense strand
caggguguauugagaauua

SEQ ID NO: 1567427 - RNA, 19 nt, Homo sapiens
  misc_RNA (1)...(19): siRNA sense strand
ucaaggaugucauaucuau

SEQ ID NO: 1567428 - RNA, 19 nt, Homo sapiens
  misc_RNA (1)...(19): siRNA sense strand
ccaaagaaguuucaugaag

SEQ ID NO: 1567429 - RNA, 19 nt, Homo sapiens
  misc_RNA (1)...(19): siRNA sense strand
caaggaggauguuucagaa

SEQ ID NO: 1567430 - RNA, 19 nt, Homo sapiens
  misc_RNA (1)...(19): siRNA sense strand
aaacuuacauguccaagga

SEQ ID NO: 1567431 - RNA, 19 nt, Homo sapiens
  misc_RNA (1)...(19): siRNA sense strand
ucagugaccugguggaauu

SEQ ID NO: 1567432 - RNA, 19 nt, Homo sapiens
  misc_RNA (1)...(19): siRNA sense strand
aaacagaagcugcguauga

SEQ ID NO: 1567433 - RNA, 19 nt, Homo sapiens
  misc_RNA (1)...(19): siRNA sense strand
ggaaggaggacugcaauuu

SEQ ID NO: 1567434 - RNA, 19 nt, Homo sapiens
  misc_RNA (1)...(19): siRNA sense strand
gaugagaccaccugcauuu

SEQ ID NO: 1567435 - RNA, 19 nt, Homo sapiens
  misc_RNA (1)...(19): siRNA sense strand
ggagaaaucccugcaaaga

SEQ ID NO: 1567436 - RNA, 19 nt, Homo sapiens
  misc_RNA (1)...(19): siRNA sense strand
cagcaaaggugguuuacau

SEQ ID NO: 1567437 - RNA, 19 nt, Homo sapiens
  misc_RNA (1)...(19): siRNA sense strand
gaaacagaaggaauacuaa

SEQ ID NO: 1567438 - RNA, 19 nt, Homo sapiens
  misc_RNA (1)...(19): siRNA sense strand
gaauuuaugugccucucaa

SEQ ID NO: 1567439 - RNA, 19 nt, Homo sapiens
  misc_RNA (1)...(19): siRNA sense strand
gacuguaucuucaccauug

SEQ ID NO: 1567440 - RNA, 19 nt, Homo sapiens
  misc_RNA (1)...(19): siRNA sense strand
gagaagggauuuaagaaaa

SEQ ID NO: 1567441 - RNA, 19 nt, Homo sapiens
  misc_RNA (1)...(19): siRNA sense strand
gagcauauuugaaacuuac

SEQ ID NO: 1567442 - RNA, 19 nt, Homo sapiens
  misc_RNA (1)...(19): siRNA sense strand
gcaccaaacuuagcuacga

SEQ ID NO: 1567443 - RNA, 19 nt, Homo sapiens
  misc_RNA (1)...(19): siRNA sense strand
aagcugaccuucucuguga

SEQ ID NO: 1567444 - RNA, 19 nt, Homo sapiens
  misc_RNA (1)...(19): siRNA sense strand
gaucagcaaaggugguuua

SEQ ID NO: 1567445 - RNA, 19 nt, Homo sapiens
  misc_RNA (1)...(19): siRNA sense strand
gauccuugaugaaugguuu

SEQ ID NO: 1567446 - RNA, 19 nt, Homo sapiens
  misc_RNA (1)...(19): siRNA sense strand
caagagaagggauuuaaga

SEQ ID NO: 1567447 - RNA, 19 nt, Homo sapiens
  misc_RNA (1)...(19): siRNA sense strand
caaaggugguuuacaucuu

SEQ ID NO: 1567448 - RNA, 19 nt, Homo sapiens
  misc_RNA (1)...(19): siRNA sense strand
agaaaucccugcaaagauc

SEQ ID NO: 1567449 - RNA, 19 nt, Homo sapiens
  misc_RNA (1)...(19): siRNA sense strand
ggauuucucugauuucucu

SEQ ID NO: 1567450 - RNA, 19 nt, Homo sapiens
  misc_RNA (1)...(19): siRNA sense strand
gaaggaauacuaacagagu

SEQ ID NO: 1567451 - RNA, 19 nt, Homo sapiens
  misc_RNA (1)...(19): siRNA sense strand
ugaaacagaaggaauacua

SEQ ID NO: 1567452 - RNA, 19 nt, Homo sapiens
  misc_RNA (1)...(19): siRNA sense strand
gagaauuaauccaaagaag

SEQ ID NO: 1567453 - RNA, 19 nt, Homo sapiens
  misc_RNA (1)...(19): siRNA sense strand
aaaggugguuuacaucuug

SEQ ID NO: 1567454 - RNA, 19 nt, Homo sapiens
  misc_RNA (1)...(19): siRNA sense strand
agagagcaaugacaaagaa

SEQ ID NO: 1567455 - RNA, 19 nt, Homo sapiens
  misc_RNA (1)...(19): siRNA sense strand
ggauggugaucgagacauu

SEQ ID NO: 1567456 - RNA, 19 nt, Homo sapiens
  misc_RNA (1)...(19): siRNA sense strand
gcgaacuguuuaggaaaua

SEQ ID NO: 1567457 - RNA, 19 nt, Homo sapiens
  misc_RNA (1)...(19): siRNA sense strand
ggacggcgcacuucguuug

SEQ ID NO: 1567458 - RNA, 19 nt, Homo sapiens
  misc_RNA (1)...(19): siRNA sense strand
ugacgugaguuacuuuguu

SEQ ID NO: 1567459 - RNA, 19 nt, Homo sapiens
  misc_RNA (1)...(19): siRNA sense strand
caaagugggaguucacauu

SEQ ID NO: 1567460 - RNA, 19 nt, Homo sapiens
  misc_RNA (1)...(19): siRNA sense strand
ccagaggaguucagcaaga

SEQ ID NO: 1567461 - RNA, 19 nt, Homo sapiens
  misc_RNA (1)...(19): siRNA sense strand
uggcacggccuaaagauua

SEQ ID NO: 1567462 - RNA, 19 nt, Homo sapiens
  misc_RNA (1)...(19): siRNA sense strand
gaagagaggaacacucauc

SEQ ID NO: 1567463 - RNA, 19 nt, Homo sapiens
  misc_RNA (1)...(19): siRNA sense strand
gcguggauuucucugauuu

SEQ ID NO: 1567464 - RNA, 19 nt, Homo sapiens
  misc_RNA (1)...(19): siRNA sense strand
ccucaaggaugucauaucu

SEQ ID NO: 1567465 - RNA, 19 nt, Homo sapiens
  misc_RNA (1)...(19): siRNA sense strand
ucugugaucuggacacuga

SEQ ID NO: 1567466 - RNA, 19 nt, Homo sapiens
  misc_RNA (1)...(19): siRNA sense strand
aaauugagccugaaacaga

SEQ ID NO: 1567467 - RNA, 19 nt, Homo sapiens
  misc_RNA (1)...(19): siRNA sense strand
cagaaggaauacuaacaga

SEQ ID NO: 1567468 - RNA, 19 nt, Homo sapiens
  misc_RNA (1)...(19): siRNA sense strand
cguaauagagccuuaaaug

SEQ ID NO: 1567469 - RNA, 19 nt, Homo sapiens
  misc_RNA (1)...(19): siRNA sense strand
gcaaugacaaagaaacaga

SEQ ID NO: 1567470 - RNA, 19 nt, Homo sapiens
  misc_RNA (1)...(19): siRNA sense strand
caagagcuuuaucggagaa

SEQ ID NO: 1567471 - RNA, 19 nt, Homo sapiens
  misc_RNA (1)...(19): siRNA sense strand
gagaaaucccugcaaagau

SEQ ID NO: 1567472 - RNA, 19 nt, Homo sapiens
  misc_RNA (1)...(19): siRNA sense strand
ccaaggaggauguuucaga

SEQ ID NO: 1567473 - RNA, 19 nt, Homo sapiens
  misc_RNA (1)...(19): siRNA sense strand
gcaaccggcuuccucaaac

SEQ ID NO: 1567474 - RNA, 19 nt, Homo sapiens
  misc_RNA (1)...(19): siRNA sense strand
ccaccugcauuucacaaga

SEQ ID NO: 1567475 - RNA, 19 nt, Homo sapiens
  misc_RNA (1)...(19): siRNA sense strand
gguuguugcucguaauaga

SEQ ID NO: 1567476 - RNA, 19 nt, Homo sapiens
  misc_RNA (1)...(19): siRNA sense strand
cauccaggguguauugaga

SEQ ID NO: 1567477 - RNA, 19 nt, Homo sapiens
  misc_RNA (1)...(19): siRNA sense strand
gacgugaguuacuuuguuc

SEQ ID NO: 1567478 - RNA, 19 nt, Homo sapiens
  misc_RNA (1)...(19): siRNA sense strand
gaaggaggacugcaauuuu

SEQ ID NO: 1567479 - RNA, 19 nt, Homo sapiens
  misc_RNA (1)...(19): siRNA sense strand
uaaagauuaugccaacaca

SEQ ID NO: 1567480 - RNA, 19 nt, Homo sapiens
  misc_RNA (1)...(19): siRNA sense strand
uaggaaauacgcccuguuu

SEQ ID NO: 1567481 - RNA, 19 nt, Homo sapiens
  misc_RNA (1)...(19): siRNA sense strand
ucaaacucuuggcugauaa

SEQ ID NO: 1567482 - RNA, 19 nt, Homo sapiens
  misc_RNA (1)...(19): siRNA sense strand
gaaaagcuauaaugacagu

SEQ ID NO: 1567483 - RNA, 19 nt, Homo sapiens
  misc_RNA (1)...(19): siRNA sense strand
gguugaugguguuaagaaa

SEQ ID NO: 1567484 - RNA, 19 nt, Homo sapiens
  misc_RNA (1)...(19): siRNA sense strand
guaauagagccuuaaaugg

SEQ ID NO: 1567485 - RNA, 19 nt, Homo sapiens
  misc_RNA (1)...(19): siRNA sense strand
gaaaaucccugcgaaagag

SEQ ID NO: 1567486 - RNA, 19 nt, Homo sapiens
  misc_RNA (1)...(19): siRNA sense strand
ccgagugccuagaauuuau

SEQ ID NO: 1567487 - RNA, 19 nt, Homo sapiens
  misc_RNA (1)...(19): siRNA sense strand
gcaaaggugguuuacaucu

SEQ ID NO: 1567488 - RNA, 19 nt, Homo sapiens
  misc_RNA (1)...(19): siRNA sense strand
cggauugccucaaggaugu

SEQ ID NO: 1567489 - RNA, 19 nt, Homo sapiens
  misc_RNA (1)...(19): siRNA sense strand
ggccugccauggacaauuc

SEQ ID NO: 1567490 - RNA, 19 nt, Homo sapiens
  misc_RNA (1)...(19): siRNA sense strand
cgaggagcauuggaaggua

SEQ ID NO: 1567491 - RNA, 19 nt, Homo sapiens
  misc_RNA (1)...(19): siRNA sense strand
cgcaggagcccucaauaaa

SEQ ID NO: 1567492 - RNA, 19 nt, Homo sapiens
  misc_RNA (1)...(19): siRNA sense strand
cagaguauggcguggauuu

SEQ ID NO: 1567493 - RNA, 19 nt, Homo sapiens
  misc_RNA (1)...(19): siRNA sense strand
ugggcaggcuggugaaauu

SEQ ID NO: 1567494 - RNA, 19 nt, Homo sapiens
  misc_RNA (1)...(19): siRNA sense strand
cucaaacucuuggcugaua

SEQ ID NO: 1567495 - RNA, 19 nt, Homo sapiens
  misc_RNA (1)...(19): siRNA sense strand
ucggagaaaucccugcaaa

SEQ ID NO: 1567496 - RNA, 19 nt, Homo sapiens
  misc_RNA (1)...(19): siRNA sense strand
aacagaagcugcguaugaa

SEQ ID NO: 1567497 - RNA, 19 nt, Homo sapiens
  misc_RNA (1)...(19): siRNA sense strand
gagcauuggaagguaguua

SEQ ID NO: 1567498 - RNA, 19 nt, Homo sapiens
  misc_RNA (1)...(19): siRNA sense strand
ccgcaggagcccucaauaa

SEQ ID NO: 1567499 - RNA, 19 nt, Homo sapiens
  misc_RNA (1)...(19): siRNA sense strand
gugaugcaccgguuacaaa

SEQ ID NO: 1567500 - RNA, 19 nt, Homo sapiens
  misc_RNA (1)...(19): siRNA sense strand
gagcaaugacaaagaaaca

SEQ ID NO: 1567501 - RNA, 19 nt, Homo sapiens
  misc_RNA (1)...(19): siRNA sense strand
agagaagggauuuaagaaa

SEQ ID NO: 1567502 - RNA, 19 nt, Homo sapiens
  misc_RNA (1)...(19): siRNA sense strand
ugaaagcccaacugagaaa

SEQ ID NO: 1567503 - RNA, 19 nt, Homo sapiens
  misc_RNA (1)...(19): siRNA sense strand
guccugaugucauuguaga

SEQ ID NO: 1567504 - RNA, 19 nt, Homo sapiens
  misc_RNA (1)...(19): siRNA sense strand
acaagacacaagagcuuua

SEQ ID NO: 1567505 - RNA, 19 nt, Homo sapiens
  misc_RNA (1)...(19): siRNA sense strand
gcauuggaagguaguuaaa

SEQ ID NO: 1567506 - RNA, 19 nt, Homo sapiens
  misc_RNA (1)...(19): siRNA sense strand
gcaggagcccucaauaaaa

SEQ ID NO: 1567507 - RNA, 19 nt, Homo sapiens
  misc_RNA (1)...(19): siRNA sense strand
gccugaaacagaaggaaua

SEQ ID NO: 1567508 - RNA, 19 nt, Homo sapiens
  misc_RNA (1)...(19): siRNA sense strand
gacaccaucucccgcaaca

SEQ ID NO: 1567509 - RNA, 19 nt, Homo sapiens
  misc_RNA (1)...(19): siRNA sense strand
uauaaugacaguccugaug

SEQ ID NO: 1567510 - RNA, 19 nt, Homo sapiens
  misc_RNA (1)...(19): siRNA sense strand
gcaagagaagggauuuaag

SEQ ID NO: 1567511 - RNA, 19 nt, Homo sapiens
  misc_RNA (1)...(19): siRNA sense strand
ggcacggccuaaagauuau

SEQ ID NO: 1567512 - RNA, 19 nt, Homo sapiens
  misc_RNA (1)...(19): siRNA sense strand
caccgagugccuagaauuu

SEQ ID NO: 1567513 - RNA, 19 nt, Homo sapiens
  misc_RNA (1)...(19): siRNA sense strand
ucacaagacacaagagcuu

SEQ ID NO: 1567514 - RNA, 19 nt, Homo sapiens
  misc_RNA (1)...(19): siRNA sense strand
cauuguagaggcucaguuu

SEQ ID NO: 1567515 - RNA, 19 nt, Homo sapiens
  misc_RNA (1)...(19): siRNA sense strand
gaaaucccugcaaagauca

SEQ ID NO: 1567516 - RNA, 19 nt, Homo sapiens
  misc_RNA (1)...(19): siRNA sense strand
cggaauugccaagcaguua

SEQ ID NO: 1567517 - RNA, 19 nt, Homo sapiens
  misc_RNA (1)...(19): siRNA sense strand
aaagugggaguucacauug

SEQ ID NO: 1567518 - RNA, 19 nt, Homo sapiens
  misc_RNA (1)...(19): siRNA sense strand
ucuagaaugucuuccucaa

SEQ ID NO: 1567519 - RNA, 19 nt, Homo sapiens
  misc_RNA (1)...(19): siRNA sense strand
gagaccggauugccucaag

SEQ ID NO: 1567520 - RNA, 19 nt, Homo sapiens
  misc_RNA (1)...(19): siRNA sense strand
gaagggauuuaagaaaaga

SEQ ID NO: 1567521 - RNA, 19 nt, Homo sapiens
  misc_RNA (1)...(19): siRNA sense strand
gaggaguucagcaagagaa

SEQ ID NO: 1567522 - RNA, 19 nt, Homo sapiens
  misc_RNA (1)...(19): siRNA sense strand
gcauagcagcgaggaggua

SEQ ID NO: 1567523 - RNA, 19 nt, Homo sapiens
  misc_RNA (1)...(19): siRNA sense strand
gugaagaccuguucucuga

SEQ ID NO: 1567524 - RNA, 19 nt, Homo sapiens
  misc_RNA (1)...(19): siRNA sense strand
aaacaaggccuacccagaa

SEQ ID NO: 1567525 - RNA, 19 nt, Homo sapiens
  misc_RNA (1)...(19): siRNA sense strand
gggaagauauuggugaaga

SEQ ID NO: 1567526 - RNA, 19 nt, Homo sapiens
  misc_RNA (1)...(19): siRNA sense strand
gcacagacauaagcaccuu

SEQ ID NO: 1567527 - RNA, 19 nt, Homo sapiens
  misc_RNA (1)...(19): siRNA sense strand
gagagcagcauucuggauu

SEQ ID NO: 1567528 - RNA, 19 nt, Homo sapiens
  misc_RNA (1)...(19): siRNA sense strand
agaaggagcacagacauaa

SEQ ID NO: 1567529 - RNA, 19 nt, Homo sapiens
  misc_RNA (1)...(19): siRNA sense strand
ggacggcugucgaacuucu

SEQ ID NO: 1567530 - RNA, 19 nt, Homo sapiens
  misc_RNA (1)...(19): siRNA sense strand
ggagacugauggugaagag

SEQ ID NO: 1567531 - RNA, 19 nt, Homo sapiens
  misc_RNA (1)...(19): siRNA sense strand
gcccugagguggugucuac

SEQ ID NO: 1567532 - RNA, 19 nt, Homo sapiens
  misc_RNA (1)...(19): siRNA sense strand
cagaaggagcacagacaua

SEQ ID NO: 1567533 - RNA, 19 nt, Homo sapiens
  misc_RNA (1)...(19): siRNA sense strand
ggaaggcacccaggaggaa

SEQ ID NO: 1567534 - RNA, 19 nt, Homo sapiens
  misc_RNA (1)...(19): siRNA sense strand
cuucuucucuccugcuuau

SEQ ID NO: 1567535 - RNA, 19 nt, Homo sapiens
  misc_RNA (1)...(19): siRNA sense strand
ggaccacugccuucaggaa

SEQ ID NO: 1567536 - RNA, 19 nt, Homo sapiens
  misc_RNA (1)...(19): siRNA sense strand
cauaagcaccuuccggaau

SEQ ID NO: 1567537 - RNA, 19 nt, Homo sapiens
  misc_RNA (1)...(19): siRNA sense strand
ggaagauauuggugaagac

SEQ ID NO: 1567538 - RNA, 19 nt, Homo sapiens
  misc_RNA (1)...(19): siRNA sense strand
auaagcaccuuccggaauc

SEQ ID NO: 1567539 - RNA, 19 nt, Homo sapiens
  misc_RNA (1)...(19): siRNA sense strand
ugggacggcugucgaacuu

SEQ ID NO: 1567540 - RNA, 19 nt, Homo sapiens
  misc_RNA (1)...(19): siRNA sense strand
gacugauggugaagagcua

SEQ ID NO: 1567541 - RNA, 19 nt, Homo sapiens
  misc_RNA (1)...(19): siRNA sense strand
ccuggagacugauggugaa

SEQ ID NO: 1567542 - RNA, 19 nt, Homo sapiens
  misc_RNA (1)...(19): siRNA sense strand
gaaggagcacagacauaag

SEQ ID NO: 1567543 - RNA, 19 nt, Homo sapiens
  misc_RNA (1)...(19): siRNA sense strand
ggagagcagcauucuggau

SEQ ID NO: 1567544 - RNA, 19 nt, Homo sapiens
  misc_RNA (1)...(19): siRNA sense strand
ucuugggccuggagacuga

SEQ ID NO: 1567545 - RNA, 19 nt, Homo sapiens
  misc_RNA (1)...(19): siRNA sense strand
guuggugccuacaaucagu

SEQ ID NO: 1567546 - RNA, 19 nt, Homo sapiens
  misc_RNA (1)...(19): siRNA sense strand
agagcagcauucuggauuc

SEQ ID NO: 1567547 - RNA, 19 nt, Homo sapiens
  misc_RNA (1)...(19): siRNA sense strand
cggaaucaucucccucuga

SEQ ID NO: 1567548 - RNA, 19 nt, Homo sapiens
  misc_RNA (1)...(19): siRNA sense strand
cccaugggcucuaccuucu

SEQ ID NO: 1567549 - RNA, 19 nt, Homo sapiens
  misc_RNA (1)...(19): siRNA sense strand
ggugcugggccuaaaccua

SEQ ID NO: 1567550 - RNA, 19 nt, Homo sapiens
  misc_RNA (1)...(19): siRNA sense strand
caaggccuacccagaagug

SEQ ID NO: 1567551 - RNA, 19 nt, Homo sapiens
  misc_RNA (1)...(19): siRNA sense strand
uaagcaccuuccggaauca

SEQ ID NO: 1567552 - RNA, 19 nt, Homo sapiens
  misc_RNA (1)...(19): siRNA sense strand
gguggugacucuggaugca

SEQ ID NO: 1567553 - RNA, 19 nt, Homo sapiens
  misc_RNA (1)...(19): siRNA sense strand
ugucgaacuucuggauguu

SEQ ID NO: 1567554 - RNA, 19 nt, Homo sapiens
  misc_RNA (1)...(19): siRNA sense strand
acaagucccugcgguucug

SEQ ID NO: 1567555 - RNA, 19 nt, Homo sapiens
  misc_RNA (1)...(19): siRNA sense strand
gaagagacguguuccauua

SEQ ID NO: 1567556 - RNA, 19 nt, Homo sapiens
  misc_RNA (1)...(19): siRNA sense strand
gaacauggcaccaguccaa

SEQ ID NO: 1567557 - RNA, 19 nt, Homo sapiens
  misc_RNA (1)...(19): siRNA sense strand
caacacugcucuucaugau

SEQ ID NO: 1567558 - RNA, 19 nt, Homo sapiens
  misc_RNA (1)...(19): siRNA sense strand
uaaugaaggcuguauauug

SEQ ID NO: 1567559 - RNA, 19 nt, Homo sapiens
  misc_RNA (1)...(19): siRNA sense strand
gcaccaguccaaacauuaa

SEQ ID NO: 1567560 - RNA, 19 nt, Homo sapiens
  misc_RNA (1)...(19): siRNA sense strand
aaacaggacgccuuuaaug

SEQ ID NO: 1567561 - RNA, 19 nt, Homo sapiens
  misc_RNA (1)...(19): siRNA sense strand
gcaacacugcucuucauga

SEQ ID NO: 1567562 - RNA, 19 nt, Homo sapiens
  misc_RNA (1)...(19): siRNA sense strand
gagacguguuccauuauuc

SEQ ID NO: 1567563 - RNA, 19 nt, Homo sapiens
  misc_RNA (1)...(19): siRNA sense strand
uuaaggacgucuacagcaa

SEQ ID NO: 1567564 - RNA, 19 nt, Homo sapiens
  misc_RNA (1)...(19): siRNA sense strand
agagacguguuccauuauu

SEQ ID NO: 1567565 - RNA, 19 nt, Homo sapiens
  misc_RNA (1)...(19): siRNA sense strand
aaugaaggcuguauauugc

SEQ ID NO: 1567566 - RNA, 19 nt, Homo sapiens
  misc_RNA (1)...(19): siRNA sense strand
acaggacgccuuuaaugaa

SEQ ID NO: 1567567 - RNA, 19 nt, Homo sapiens
  misc_RNA (1)...(19): siRNA sense strand
ggcaccaguccaaacauua

SEQ ID NO: 1567568 - RNA, 19 nt, Homo sapiens
  misc_RNA (1)...(19): siRNA sense strand
caggacgccuuuaaugaag

SEQ ID NO: 1567569 - RNA, 19 nt, Homo sapiens
  misc_RNA (1)...(19): siRNA sense strand
ggcuguauauugccaggaa

SEQ ID NO: 1567570 - RNA, 19 nt, Homo sapiens
  misc_RNA (1)...(19): siRNA sense strand
uggcaccaguccaaacauu

SEQ ID NO: 1567571 - RNA, 19 nt, Homo sapiens
  misc_RNA (1)...(19): siRNA sense strand
ucaugaugguaaacauuga

SEQ ID NO: 1567572 - RNA, 19 nt, Homo sapiens
  misc_RNA (1)...(19): siRNA sense strand
caggacuguucuacauuug

SEQ ID NO: 1567573 - RNA, 19 nt, Homo sapiens
  misc_RNA (1)...(19): siRNA sense strand
ccauuauucugcuggaaca

SEQ ID NO: 1567574 - RNA, 19 nt, Homo sapiens
  misc_RNA (1)...(19): siRNA sense strand
aacaggacgccuuuaauga

SEQ ID NO: 1567575 - RNA, 19 nt, Homo sapiens
  misc_RNA (1)...(19): siRNA sense strand
gacuaaacaggacgccuuu

SEQ ID NO: 1567576 - RNA, 19 nt, Homo sapiens
  misc_RNA (1)...(19): siRNA sense strand
acgcggaacugcggaagau

SEQ ID NO: 1567577 - RNA, 19 nt, Homo sapiens
  misc_RNA (1)...(19): siRNA sense strand
ggacgucuacagcaacacu

SEQ ID NO: 1567578 - RNA, 19 nt, Homo sapiens
  misc_RNA (1)...(19): siRNA sense strand
gcaaugagauccggcaguu

SEQ ID NO: 1567579 - RNA, 19 nt, Homo sapiens
  misc_RNA (1)...(19): siRNA sense strand
guagagcucuucccauaug

SEQ ID NO: 1567580 - RNA, 19 nt, Homo sapiens
  misc_RNA (1)...(19): siRNA sense strand
ggacaucccaucccucauu

SEQ ID NO: 1567581 - RNA, 19 nt, Homo sapiens
  misc_RNA (1)...(19): siRNA sense strand
caacgaggcugaggaguuc

SEQ ID NO: 1567582 - RNA, 19 nt, Homo sapiens
  misc_RNA (1)...(19): siRNA sense strand
ugguagagcucuucccaua

SEQ ID NO: 1567583 - RNA, 19 nt, Homo sapiens
  misc_RNA (1)...(19): siRNA sense strand
ccacaacacucaguacuuc

SEQ ID NO: 1567584 - RNA, 19 nt, Homo sapiens
  misc_RNA (1)...(19): siRNA sense strand
ggaacaugaugccagagaa

SEQ ID NO: 1567585 - RNA, 19 nt, Homo sapiens
  misc_RNA (1)...(19): siRNA sense strand
ggaguacauucuggucuuu

SEQ ID NO: 1567586 - RNA, 19 nt, Homo sapiens
  misc_RNA (1)...(19): siRNA sense strand
ccacuacacucccuauaag

SEQ ID NO: 1567587 - RNA, 19 nt, Homo sapiens
  misc_RNA (1)...(19): siRNA sense strand
cagaucccauggaaccuua

SEQ ID NO: 1567588 - RNA, 19 nt, Homo sapiens
  misc_RNA (1)...(19): siRNA sense strand
gcccaggaguuccagauga

SEQ ID NO: 1567589 - RNA, 19 nt, Homo sapiens
  misc_RNA (1)...(19): siRNA sense strand
gaccacaccuuugcugaug

SEQ ID NO: 1567590 - RNA, 19 nt, Homo sapiens
  misc_RNA (1)...(19): siRNA sense strand
ugagggaggugaaguacga

SEQ ID NO: 1567591 - RNA, 19 nt, Homo sapiens
  misc_RNA (1)...(19): siRNA sense strand
gcacgguucaugacagaaa

SEQ ID NO: 1567592 - RNA, 19 nt, Homo sapiens
  misc_RNA (1)...(19): siRNA sense strand
gaccgcaucugccgcuuca

SEQ ID NO: 1567593 - RNA, 19 nt, Homo sapiens
  misc_RNA (1)...(19): siRNA sense strand
cagaugugcuggugugcaa

SEQ ID NO: 1567594 - RNA, 19 nt, Homo sapiens
  misc_RNA (1)...(19): siRNA sense strand
gaguggcucuuccgaaucu

SEQ ID NO: 1567595 - RNA, 19 nt, Homo sapiens
  misc_RNA (1)...(19): siRNA sense strand
guaccaguauggcuuugug

SEQ ID NO: 1567596 - RNA, 19 nt, Homo sapiens
  misc_RNA (1)...(19): siRNA sense strand
aaccacaccuucacugaga

SEQ ID NO: 1567597 - RNA, 19 nt, Homo sapiens
  misc_RNA (1)...(19): siRNA sense strand
ccgaguggcucuuccgaau

SEQ ID NO: 1567598 - RNA, 19 nt, Homo sapiens
  misc_RNA (1)...(19): siRNA sense strand
ccaacgaggcugaggaguu

SEQ ID NO: 1567599 - RNA, 19 nt, Homo sapiens
  misc_RNA (1)...(19): siRNA sense strand
uggcagcgguccuguggaa

SEQ ID NO: 1567600 - RNA, 19 nt, Homo sapiens
  misc_RNA (1)...(19): siRNA sense strand
gcaagcccguauccugcaa

SEQ ID NO: 1567601 - RNA, 19 nt, Homo sapiens
  misc_RNA (1)...(19): siRNA sense strand
cauggaaccuuaaauaccu

SEQ ID NO: 1567602 - RNA, 19 nt, Homo sapiens
  misc_RNA (1)...(19): siRNA sense strand
ucccauggaaccuuaaaua

SEQ ID NO: 1567603 - RNA, 19 nt, Homo sapiens
  misc_RNA (1)...(19): siRNA sense strand
ucaaguggcucugcuacuc

SEQ ID NO: 1567604 - RNA, 19 nt, Homo sapiens
  misc_RNA (1)...(19): siRNA sense strand
gacaucccaucccucauuc

SEQ ID NO: 1567605 - RNA, 19 nt, Homo sapiens
  misc_RNA (1)...(19): siRNA sense strand
gaaucuaccaggacaccaa

SEQ ID NO: 1567606 - RNA, 19 nt, Homo sapiens
  misc_RNA (1)...(19): siRNA sense strand
caacugugguagagcucuu

SEQ ID NO: 1567607 - RNA, 19 nt, Homo sapiens
  misc_RNA (1)...(19): siRNA sense strand
gugcacacuucgaccucua

SEQ ID NO: 1567608 - RNA, 19 nt, Homo sapiens
  misc_RNA (1)...(19): siRNA sense strand
cccaggaguuccagaugaa

SEQ ID NO: 1567609 - RNA, 19 nt, Homo sapiens
  misc_RNA (1)...(19): siRNA sense strand
aaugagauccggcaguuug

SEQ ID NO: 1567610 - RNA, 19 nt, Homo sapiens
  misc_RNA (1)...(19): siRNA sense strand
gcugaggaguucaucuucu

SEQ ID NO: 1567611 - RNA, 19 nt, Homo sapiens
  misc_RNA (1)...(19): siRNA sense strand
gagaacaucaagcccuuca

SEQ ID NO: 1567612 - RNA, 19 nt, Homo sapiens
  misc_RNA (1)...(19): siRNA sense strand
ccuggcagaucccauggaa

SEQ ID NO: 1567613 - RNA, 19 nt, Homo sapiens
  misc_RNA (1)...(19): siRNA sense strand
gaacaugaugccagagaac

SEQ ID NO: 1567614 - RNA, 19 nt, Homo sapiens
  misc_RNA (1)...(19): siRNA sense strand
ggaccacaccuuugcugau

SEQ ID NO: 1567615 - RNA, 19 nt, Homo sapiens
  misc_RNA (1)...(19): siRNA sense strand
cugaggaguucaucuucuu

SEQ ID NO: 1567616 - RNA, 19 nt, Homo sapiens
  misc_RNA (1)...(19): siRNA sense strand
acaccuacgugccuuacau

SEQ ID NO: 1567617 - RNA, 19 nt, Homo sapiens
  misc_RNA (1)...(19): siRNA sense strand
gaguacauucuggucuuua

SEQ ID NO: 1567618 - RNA, 19 nt, Homo sapiens
  misc_RNA (1)...(19): siRNA sense strand
caaccucaugcacgucuuu

SEQ ID NO: 1567619 - RNA, 19 nt, Homo sapiens
  misc_RNA (1)...(19): siRNA sense strand
ucaagcccuucaccaccua

SEQ ID NO: 1567620 - RNA, 19 nt, Homo sapiens
  misc_RNA (1)...(19): siRNA sense strand
uauguagccuggcggaaca

SEQ ID NO: 1567621 - RNA, 19 nt, Homo sapiens
  misc_RNA (1)...(19): siRNA sense strand
gaccacuacacucccuaua

SEQ ID NO: 1567622 - RNA, 19 nt, Homo sapiens
  misc_RNA (1)...(19): siRNA sense strand
gcagaucccauggaaccuu

SEQ ID NO: 1567623 - RNA, 19 nt, Homo sapiens
  misc_RNA (1)...(19): siRNA sense strand
guggacagucggccuauau

SEQ ID NO: 1567624 - RNA, 19 nt, Homo sapiens
  misc_RNA (1)...(19): siRNA sense strand
uggcaacaccucugucaug

SEQ ID NO: 1567625 - RNA, 19 nt, Homo sapiens
  misc_RNA (1)...(19): siRNA sense strand
gguagagcucuucccauau

SEQ ID NO: 1567626 - RNA, 19 nt, Homo sapiens
  misc_RNA (1)...(19): siRNA sense strand
ccacaccuuugcugauguc

SEQ ID NO: 1567627 - RNA, 19 nt, Homo sapiens
  misc_RNA (1)...(19): siRNA sense strand
gugggccucuccaagauca

SEQ ID NO: 1567628 - RNA, 19 nt, Homo sapiens
  misc_RNA (1)...(19): siRNA sense strand
cgaaggcacugcagauccu

SEQ ID NO: 1567629 - RNA, 19 nt, Homo sapiens
  misc_RNA (1)...(19): siRNA sense strand
gcaguuugcacgguucaug

SEQ ID NO: 1567630 - RNA, 19 nt, Homo sapiens
  misc_RNA (1)...(19): siRNA sense strand
caccuucacugagaacauc

SEQ ID NO: 1567631 - RNA, 19 nt, Homo sapiens
  misc_RNA (1)...(19): siRNA sense strand
ggaagcagaaguggacagu

SEQ ID NO: 1567632 - RNA, 19 nt, Homo sapiens
  misc_RNA (1)...(19): siRNA sense strand
gaaccuuaaauaccugaag

SEQ ID NO: 1567633 - RNA, 19 nt, Homo sapiens
  misc_RNA (1)...(19): siRNA sense strand
aggaguacauucuggucuu

SEQ ID NO: 1567634 - RNA, 19 nt, Homo sapiens
  misc_RNA (1)...(19): siRNA sense strand
gaacaccuacgugccuuac

SEQ ID NO: 1567635 - RNA, 19 nt, Homo sapiens
  misc_RNA (1)...(19): siRNA sense strand
gaccacggaagcagaagug

SEQ ID NO: 1567636 - RNA, 19 nt, Homo sapiens
  misc_RNA (1)...(19): siRNA sense strand
acacuucgaccucuacaag

SEQ ID NO: 1567637 - RNA, 19 nt, Homo sapiens
  misc_RNA (1)...(19): siRNA sense strand
gaucccauggaaccuuaaa

SEQ ID NO: 1567638 - RNA, 19 nt, Homo sapiens
  misc_RNA (1)...(19): siRNA sense strand
ucccaucccucauucaaac

SEQ ID NO: 1567639 - RNA, 19 nt, Homo sapiens
  misc_RNA (1)...(19): siRNA sense strand
auaagacgcuggccaugcu

SEQ ID NO: 1567640 - RNA, 19 nt, Homo sapiens
  misc_RNA (1)...(19): siRNA sense strand
aggcacggcucuucuucau

SEQ ID NO: 1567641 - RNA, 19 nt, Homo sapiens
  misc_RNA (1)...(19): siRNA sense strand
agaaccacaccuucacuga

SEQ ID NO: 1567642 - RNA, 19 nt, Homo sapiens
  misc_RNA (1)...(19): siRNA sense strand
ccuggaggaccacaccuuu

SEQ ID NO: 1567643 - RNA, 19 nt, Homo sapiens
  misc_RNA (1)...(19): siRNA sense strand
ggaguucaucuucuuccau

SEQ ID NO: 1567644 - RNA, 19 nt, Homo sapiens
  misc_RNA (1)...(19): siRNA sense strand
caucccaucccucauucaa

SEQ ID NO: 1567645 - RNA, 19 nt, Homo sapiens
  misc_RNA (1)...(19): siRNA sense strand
gcaucugccgcuucaagug

SEQ ID NO: 1567646 - RNA, 19 nt, Homo sapiens
  misc_RNA (1)...(19): siRNA sense strand
acacucaguacuucaacuu

SEQ ID NO: 1567647 - RNA, 19 nt, Homo sapiens
  misc_RNA (1)...(19): siRNA sense strand
gcagaaccacaccuucacu

SEQ ID NO: 1567648 - RNA, 19 nt, Homo sapiens
  misc_RNA (1)...(19): siRNA sense strand
uggaggaccacaacacuca

SEQ ID NO: 1567649 - RNA, 19 nt, Homo sapiens
  misc_RNA (1)...(19): siRNA sense strand
ccacaaggcugacgcugua

SEQ ID NO: 1567650 - RNA, 19 nt, Homo sapiens
  misc_RNA (1)...(19): siRNA sense strand
ggacaagguugaggaaaga

SEQ ID NO: 1567651 - RNA, 19 nt, Homo sapiens
  misc_RNA (1)...(19): siRNA sense strand
gagaagcccuuugagugua

SEQ ID NO: 1567652 - RNA, 19 nt, Homo sapiens
  misc_RNA (1)...(19): siRNA sense strand
gggucgagcuuccugauaa

SEQ ID NO: 1567653 - RNA, 19 nt, Homo sapiens
  misc_RNA (1)...(19): siRNA sense strand
gcacugacauggccgucuu

SEQ ID NO: 1567654 - RNA, 19 nt, Homo sapiens
  misc_RNA (1)...(19): siRNA sense strand
gaggaacagugccugaaga

SEQ ID NO: 1567655 - RNA, 19 nt, Homo sapiens
  misc_RNA (1)...(19): siRNA sense strand
acagugggaugaagacgua

SEQ ID NO: 1567656 - RNA, 19 nt, Homo sapiens
  misc_RNA (1)...(19): siRNA sense strand
gcaguggacaguuugauga

SEQ ID NO: 1567657 - RNA, 19 nt, Homo sapiens
  misc_RNA (1)...(19): siRNA sense strand
gaccagagcccuucagucu

SEQ ID NO: 1567658 - RNA, 19 nt, Homo sapiens
  misc_RNA (1)...(19): siRNA sense strand
ugacauggccgucuucugu

SEQ ID NO: 1567659 - RNA, 19 nt, Homo sapiens
  misc_RNA (1)...(19): siRNA sense strand
cuagggagcuacacuaugg

SEQ ID NO: 1567660 - RNA, 19 nt, Homo sapiens
  misc_RNA (1)...(19): siRNA sense strand
ccagcaagauguuugagau

SEQ ID NO: 1567661 - RNA, 19 nt, Homo sapiens
  misc_RNA (1)...(19): siRNA sense strand
gggacaagguugaggaaag

SEQ ID NO: 1567662 - RNA, 19 nt, Homo sapiens
  misc_RNA (1)...(19): siRNA sense strand
caaagaccuuccagcagau

SEQ ID NO: 1567663 - RNA, 19 nt, Homo sapiens
  misc_RNA (1)...(19): siRNA sense strand
agaagcaucugggcaucua

SEQ ID NO: 1567664 - RNA, 19 nt, Homo sapiens
  misc_RNA (1)...(19): siRNA sense strand
gcacuuacuggcucauuca

SEQ ID NO: 1567665 - RNA, 19 nt, Homo sapiens
  misc_RNA (1)...(19): siRNA sense strand
gggcaucuacuccguguug

SEQ ID NO: 1567666 - RNA, 19 nt, Homo sapiens
  misc_RNA (1)...(19): siRNA sense strand
ggacuacucggccaugauc

SEQ ID NO: 1567667 - RNA, 19 nt, Homo sapiens
  misc_RNA (1)...(19): siRNA sense strand
ucgaguaccuggaggaaca

SEQ ID NO: 1567668 - RNA, 19 nt, Homo sapiens
  misc_RNA (1)...(19): siRNA sense strand
agaagcccuuugaguguaa

SEQ ID NO: 1567669 - RNA, 19 nt, Homo sapiens
  misc_RNA (1)...(19): siRNA sense strand
ugaagaugcuggagaccau

SEQ ID NO: 1567670 - RNA, 19 nt, Homo sapiens
  misc_RNA (1)...(19): siRNA sense strand
gcaccagcaagauguuuga

SEQ ID NO: 1567671 - RNA, 19 nt, Homo sapiens
  misc_RNA (1)...(19): siRNA sense strand
uggaugaccugcuguaugc

SEQ ID NO: 1567672 - RNA, 19 nt, Homo sapiens
  misc_RNA (1)...(19): siRNA sense strand
acacacaggcagacccaua

SEQ ID NO: 1567673 - RNA, 19 nt, Homo sapiens
  misc_RNA (1)...(19): siRNA sense strand
gacuuccucucgccaaaga

SEQ ID NO: 1567674 - RNA, 19 nt, Homo sapiens
  misc_RNA (1)...(19): siRNA sense strand
ugagaagcccuuugagugu

SEQ ID NO: 1567675 - RNA, 19 nt, Homo sapiens
  misc_RNA (1)...(19): siRNA sense strand
gcccuucagucuccacuuc

SEQ ID NO: 1567676 - RNA, 19 nt, Homo sapiens
  misc_RNA (1)...(19): siRNA sense strand
gcaaggcucgguaccucaa

SEQ ID NO: 1567677 - RNA, 19 nt, Homo sapiens
  misc_RNA (1)...(19): siRNA sense strand
gcacaugaagggccacaag

SEQ ID NO: 1567678 - RNA, 19 nt, Homo sapiens
  misc_RNA (1)...(19): siRNA sense strand
gugcaaggccaaccagaug

SEQ ID NO: 1567679 - RNA, 19 nt, Homo sapiens
  misc_RNA (1)...(19): siRNA sense strand
gaaguucagccucaagcau

SEQ ID NO: 1567680 - RNA, 19 nt, Homo sapiens
  misc_RNA (1)...(19): siRNA sense strand
aggcugcaguggacaguuu

SEQ ID NO: 1567681 - RNA, 19 nt, Homo sapiens
  misc_RNA (1)...(19): siRNA sense strand
acacuauacuuuggacuuc

SEQ ID NO: 1567682 - RNA, 19 nt, Homo sapiens
  misc_RNA (1)...(19): siRNA sense strand
ggaggauagagaagacgua

SEQ ID NO: 1567683 - RNA, 19 nt, Homo sapiens
  misc_RNA (1)...(19): siRNA sense strand
caaggcugacgcuguauug

SEQ ID NO: 1567684 - RNA, 19 nt, Homo sapiens
  misc_RNA (1)...(19): siRNA sense strand
caccugcgcucacauacag

SEQ ID NO: 1567685 - RNA, 19 nt, Homo sapiens
  misc_RNA (1)...(19): siRNA sense strand
caggugagaagcccuuuga

SEQ ID NO: 1567686 - RNA, 19 nt, Homo sapiens
  misc_RNA (1)...(19): siRNA sense strand
gauaguuugcggcugagaa

SEQ ID NO: 1567687 - RNA, 19 nt, Homo sapiens
  misc_RNA (1)...(19): siRNA sense strand
ggugagaagcccuuugagu

SEQ ID NO: 1567688 - RNA, 19 nt, Homo sapiens
  misc_RNA (1)...(19): siRNA sense strand
ggaggaacagugccugaag

SEQ ID NO: 1567689 - RNA, 19 nt, Homo sapiens
  misc_RNA (1)...(19): siRNA sense strand
agucaacacuauacuuugg

SEQ ID NO: 1567690 - RNA, 19 nt, Homo sapiens
  misc_RNA (1)...(19): siRNA sense strand
guauugagcaugccgucuu

SEQ ID NO: 1567691 - RNA, 19 nt, Homo sapiens
  misc_RNA (1)...(19): siRNA sense strand
ccacuucauuuggucuuuc

SEQ ID NO: 1567692 - RNA, 19 nt, Homo sapiens
  misc_RNA (1)...(19): siRNA sense strand
gcagcugcuuccgggauga

SEQ ID NO: 1567693 - RNA, 19 nt, Homo sapiens
  misc_RNA (1)...(19): siRNA sense strand
gcaagauguuugagauccu

SEQ ID NO: 1567694 - RNA, 19 nt, Homo sapiens
  misc_RNA (1)...(19): siRNA sense strand
cggccgagauccuggagau

SEQ ID NO: 1567695 - RNA, 19 nt, Homo sapiens
  misc_RNA (1)...(19): siRNA sense strand
cuacgagugugaguucugu

SEQ ID NO: 1567696 - RNA, 19 nt, Homo sapiens
  misc_RNA (1)...(19): siRNA sense strand
gaucgaguaccuggaggaa

SEQ ID NO: 1567697 - RNA, 19 nt, Homo sapiens
  misc_RNA (1)...(19): siRNA sense strand
ggauagagaagacguaccu

SEQ ID NO: 1567698 - RNA, 19 nt, Homo sapiens
  misc_RNA (1)...(19): siRNA sense strand
ccacaagcccgaggagauc

SEQ ID NO: 1567699 - RNA, 19 nt, Homo sapiens
  misc_RNA (1)...(19): siRNA sense strand
ccauggacuucagcaccua

SEQ ID NO: 1567700 - RNA, 19 nt, Homo sapiens
  misc_RNA (1)...(19): siRNA sense strand
caccagugcuagggagcua

SEQ ID NO: 1567701 - RNA, 19 nt, Homo sapiens
  misc_RNA (1)...(19): siRNA sense strand
gaggugaagacggagauga

SEQ ID NO: 1567702 - RNA, 19 nt, Homo sapiens
  misc_RNA (1)...(19): siRNA sense strand
ggaacagugccugaagaug

SEQ ID NO: 1567703 - RNA, 19 nt, Homo sapiens
  misc_RNA (1)...(19): siRNA sense strand
gccacaagcccgaggagau

SEQ ID NO: 1567704 - RNA, 19 nt, Homo sapiens
  misc_RNA (1)...(19): siRNA sense strand
cagcuggagacgcacuaua

SEQ ID NO: 1567705 - RNA, 19 nt, Homo sapiens
  misc_RNA (1)...(19): siRNA sense strand
gugcuagggagcuacacua

SEQ ID NO: 1567706 - RNA, 19 nt, Homo sapiens
  misc_RNA (1)...(19): siRNA sense strand
cuaccugugcuauguguga

SEQ ID NO: 1567707 - RNA, 19 nt, Homo sapiens
  misc_RNA (1)...(19): siRNA sense strand
gauucuggaguaugcauau

SEQ ID NO: 1567708 - RNA, 19 nt, Homo sapiens
  misc_RNA (1)...(19): siRNA sense strand
cauccacacgggugagaaa

SEQ ID NO: 1567709 - RNA, 19 nt, Homo sapiens
  misc_RNA (1)...(19): siRNA sense strand
gcuagggagcuacacuaug

SEQ ID NO: 1567710 - RNA, 19 nt, Homo sapiens
  misc_RNA (1)...(19): siRNA sense strand
ggucgagcuuccugauaac

SEQ ID NO: 1567711 - RNA, 19 nt, Homo sapiens
  misc_RNA (1)...(19): siRNA sense strand
gcucgguaccucaagaaca

SEQ ID NO: 1567712 - RNA, 19 nt, Homo sapiens
  misc_RNA (1)...(19): siRNA sense strand
aggaugcccuggagacaca

SEQ ID NO: 1567713 - RNA, 19 nt, Homo sapiens
  misc_RNA (1)...(19): siRNA sense strand
ucauucagcgggugccaaa

SEQ ID NO: 1567714 - RNA, 19 nt, Homo sapiens
  misc_RNA (1)...(19): siRNA sense strand
gcacaggaagcugcacagu

SEQ ID NO: 1567715 - RNA, 19 nt, Homo sapiens
  misc_RNA (1)...(19): siRNA sense strand
gcaugauccagcugcagaa

SEQ ID NO: 1567716 - RNA, 19 nt, Homo sapiens
  misc_RNA (1)...(19): siRNA sense strand
gcagccgaguccagcaucu

SEQ ID NO: 1567717 - RNA, 19 nt, Homo sapiens
  misc_RNA (1)...(19): siRNA sense strand
ggacaguuugaugaccaua

SEQ ID NO: 1567718 - RNA, 19 nt, Homo sapiens
  misc_RNA (1)...(19): siRNA sense strand
ccacggggcuacugugcaa

SEQ ID NO: 1567719 - RNA, 19 nt, Homo sapiens
  misc_RNA (1)...(19): siRNA sense strand
ggaggaugcccuggagaca

SEQ ID NO: 1567720 - RNA, 19 nt, Homo sapiens
  misc_RNA (1)...(19): siRNA sense strand
gugcacaguuuucgaagga

SEQ ID NO: 1567721 - RNA, 19 nt, Homo sapiens
  misc_RNA (1)...(19): siRNA sense strand
uauugagcaugccgucuuc

SEQ ID NO: 1567722 - RNA, 19 nt, Homo sapiens
  misc_RNA (1)...(19): siRNA sense strand
ggugaagacggagaugaug

SEQ ID NO: 1567723 - RNA, 19 nt, Homo sapiens
  misc_RNA (1)...(19): siRNA sense strand
caugaucaagcaccugaga

SEQ ID NO: 1567724 - RNA, 19 nt, Homo sapiens
  misc_RNA (1)...(19): siRNA sense strand
gcugagaaugcacuuacug

SEQ ID NO: 1567725 - RNA, 19 nt, Homo sapiens
  misc_RNA (1)...(19): siRNA sense strand
gagaugaccuccagaguaa

SEQ ID NO: 1567726 - RNA, 19 nt, Homo sapiens
  misc_RNA (1)...(19): siRNA sense strand
gagaagcgcuauaaaugua

SEQ ID NO: 1567727 - RNA, 19 nt, Homo sapiens
  misc_RNA (1)...(19): siRNA sense strand
ggaagaagcagaaaccuua

SEQ ID NO: 1567728 - RNA, 19 nt, Homo sapiens
  misc_RNA (1)...(19): siRNA sense strand
gagaagcccuauaaaugua

SEQ ID NO: 1567729 - RNA, 19 nt, Homo sapiens
  misc_RNA (1)...(19): siRNA sense strand
ggaaaagacuucagccuua

SEQ ID NO: 1567730 - RNA, 19 nt, Homo sapiens
  misc_RNA (1)...(19): siRNA sense strand
ggcaaacacuucagaauga

SEQ ID NO: 1567731 - RNA, 19 nt, Homo sapiens
  misc_RNA (1)...(19): siRNA sense strand
gcagaaggaucaaugugaa

SEQ ID NO: 1567732 - RNA, 19 nt, Homo sapiens
  misc_RNA (1)...(19): siRNA sense strand
gaaacuaucgccuuguuaa

SEQ ID NO: 1567733 - RNA, 19 nt, Homo sapiens
  misc_RNA (1)...(19): siRNA sense strand
gcagaaaccuuagcugugu

SEQ ID NO: 1567734 - RNA, 19 nt, Homo sapiens
  misc_RNA (1)...(19): siRNA sense strand
ggaaggacuuugccuauag

SEQ ID NO: 1567735 - RNA, 19 nt, Homo sapiens
  misc_RNA (1)...(19): siRNA sense strand
gagagaagcgcuauaaaug

SEQ ID NO: 1567736 - RNA, 19 nt, Homo sapiens
  misc_RNA (1)...(19): siRNA sense strand
agagagaccuuucaaaugu

SEQ ID NO: 1567737 - RNA, 19 nt, Homo sapiens
  misc_RNA (1)...(19): siRNA sense strand
agucauagcucccaucuug

SEQ ID NO: 1567738 - RNA, 19 nt, Homo sapiens
  misc_RNA (1)...(19): siRNA sense strand
ugagaaaccuuaccagugu

SEQ ID NO: 1567739 - RNA, 19 nt, Homo sapiens
  misc_RNA (1)...(19): siRNA sense strand
agauggagaucaaacuuua

SEQ ID NO: 1567740 - RNA, 19 nt, Homo sapiens
  misc_RNA (1)...(19): siRNA sense strand
ggagaagcccuauaaaugu

SEQ ID NO: 1567741 - RNA, 19 nt, Homo sapiens
  misc_RNA (1)...(19): siRNA sense strand
gggaaggacuuugccuaua

SEQ ID NO: 1567742 - RNA, 19 nt, Homo sapiens
  misc_RNA (1)...(19): siRNA sense strand
gaaccuggcucggcauaug

SEQ ID NO: 1567743 - RNA, 19 nt, Homo sapiens
  misc_RNA (1)...(19): siRNA sense strand
ggacacaaaguugagauua

SEQ ID NO: 1567744 - RNA, 19 nt, Homo sapiens
  misc_RNA (1)...(19): siRNA sense strand
ggagagaagcgcuauaaau

SEQ ID NO: 1567745 - RNA, 19 nt, Homo sapiens
  misc_RNA (1)...(19): siRNA sense strand
gagugaagccuuauaaaug

SEQ ID NO: 1567746 - RNA, 19 nt, Homo sapiens
  misc_RNA (1)...(19): siRNA sense strand
gggaaaaccuuuacacgua

SEQ ID NO: 1567747 - RNA, 19 nt, Homo sapiens
  misc_RNA (1)...(19): siRNA sense strand
gagagaagccauauaagug

SEQ ID NO: 1567748 - RNA, 19 nt, Homo sapiens
  misc_RNA (1)...(19): siRNA sense strand
gagagaggcccuucaaaug

SEQ ID NO: 1567749 - RNA, 19 nt, Homo sapiens
  misc_RNA (1)...(19): siRNA sense strand
gaaguaucaggaaguaaua

SEQ ID NO: 1567750 - RNA, 19 nt, Homo sapiens
  misc_RNA (1)...(19): siRNA sense strand
ggacauaagcauugggaaa

SEQ ID NO: 1567751 - RNA, 19 nt, Homo sapiens
  misc_RNA (1)...(19): siRNA sense strand
gaccaugacuuucaaggau

SEQ ID NO: 1567752 - RNA, 19 nt, Homo sapiens
  misc_RNA (1)...(19): siRNA sense strand
gggaaagccuucagaugga

SEQ ID NO: 1567753 - RNA, 19 nt, Homo sapiens
  misc_RNA (1)...(19): siRNA sense strand
gaaaaucccauacaaguaa

SEQ ID NO: 1567754 - RNA, 19 nt, Homo sapiens
  misc_RNA (1)...(19): siRNA sense strand
ggagugaagccuuauaaau

SEQ ID NO: 1567755 - RNA, 19 nt, Homo sapiens
  misc_RNA (1)...(19): siRNA sense strand
gagaaacccaugcuaagaa

SEQ ID NO: 1567756 - RNA, 19 nt, Homo sapiens
  misc_RNA (1)...(19): siRNA sense strand
agaaagaagagaccaauuu

SEQ ID NO: 1567757 - RNA, 19 nt, Homo sapiens
  misc_RNA (1)...(19): siRNA sense strand
gacauacccuuuccaguca

SEQ ID NO: 1567758 - RNA, 19 nt, Homo sapiens
  misc_RNA (1)...(19): siRNA sense strand
ugggaaaucuuaugauaga

SEQ ID NO: 1567759 - RNA, 19 nt, Homo sapiens
  misc_RNA (1)...(19): siRNA sense strand
ggagagaagccauauaagu

SEQ ID NO: 1567760 - RNA, 19 nt, Homo sapiens
  misc_RNA (1)...(19): siRNA sense strand
gaauugggcucagagaauc

SEQ ID NO: 1567761 - RNA, 19 nt, Homo sapiens
  misc_RNA (1)...(19): siRNA sense strand
ugugggaaaucuuaugaua

SEQ ID NO: 1567762 - RNA, 19 nt, Homo sapiens
  misc_RNA (1)...(19): siRNA sense strand
ucaggaaccuuuggaagaa

SEQ ID NO: 1567763 - RNA, 19 nt, Homo sapiens
  misc_RNA (1)...(19): siRNA sense strand
aaacuuuacucgucauaug

SEQ ID NO: 1567764 - RNA, 19 nt, Homo sapiens
  misc_RNA (1)...(19): siRNA sense strand
ggaauugggcucagagaau

SEQ ID NO: 1567765 - RNA, 19 nt, Homo sapiens
  misc_RNA (1)...(19): siRNA sense strand
gagaaaccuuaccagugua

SEQ ID NO: 1567766 - RNA, 19 nt, Homo sapiens
  misc_RNA (1)...(19): siRNA sense strand
caagaugaaugucgugaag

SEQ ID NO: 1567767 - RNA, 19 nt, Homo sapiens
  misc_RNA (1)...(19): siRNA sense strand
gaacaucaaaggauucaca

SEQ ID NO: 1567768 - RNA, 19 nt, Homo sapiens
  misc_RNA (1)...(19): siRNA sense strand
gcucccaucuugcguauca

SEQ ID NO: 1567769 - RNA, 19 nt, Homo sapiens
  misc_RNA (1)...(19): siRNA sense strand
caccaaaccugcucugauc

SEQ ID NO: 1567770 - RNA, 19 nt, Homo sapiens
  misc_RNA (1)...(19): siRNA sense strand
cacaagagauuucauacuc

SEQ ID NO: 1567771 - RNA, 19 nt, Homo sapiens
  misc_RNA (1)...(19): siRNA sense strand
agaagaggaugaaagcuau

SEQ ID NO: 1567772 - RNA, 19 nt, Homo sapiens
  misc_RNA (1)...(19): siRNA sense strand
gccuauaggucagccuuua

SEQ ID NO: 1567773 - RNA, 19 nt, Homo sapiens
  misc_RNA (1)...(19): siRNA sense strand
ggaaaagacucugaaguau

SEQ ID NO: 1567774 - RNA, 19 nt, Homo sapiens
  misc_RNA (1)...(19): siRNA sense strand
gagaggcccuucaaaugca

SEQ ID NO: 1567775 - RNA, 19 nt, Homo sapiens
  misc_RNA (1)...(19): siRNA sense strand
caaagaggagcccuacaaa

SEQ ID NO: 1567776 - RNA, 19 nt, Homo sapiens
  misc_RNA (1)...(19): siRNA sense strand
ccaaagaggagcccuacaa

SEQ ID NO: 1567777 - RNA, 19 nt, Homo sapiens
  misc_RNA (1)...(19): siRNA sense strand
uagaaacuaucgccuuguu

SEQ ID NO: 1567778 - RNA, 19 nt, Homo sapiens
  misc_RNA (1)...(19): siRNA sense strand
cuacaucagagaauucaua

SEQ ID NO: 1567779 - RNA, 19 nt, Homo sapiens
  misc_RNA (1)...(19): siRNA sense strand
gaaggaagaagaggaugaa

SEQ ID NO: 1567780 - RNA, 19 nt, Homo sapiens
  misc_RNA (1)...(19): siRNA sense strand
caucagagaauucauagug

SEQ ID NO: 1567781 - RNA, 19 nt, Homo sapiens
  misc_RNA (1)...(19): siRNA sense strand
ucagagcagucacuccaaa

SEQ ID NO: 1567782 - RNA, 19 nt, Homo sapiens
  misc_RNA (1)...(19): siRNA sense strand
gaucauaagggaauacaca

SEQ ID NO: 1567783 - RNA, 19 nt, Homo sapiens
  misc_RNA (1)...(19): siRNA sense strand
aagaggagcccuacaaaug

SEQ ID NO: 1567784 - RNA, 19 nt, Homo sapiens
  misc_RNA (1)...(19): siRNA sense strand
gaagaggaugaaagcuaua

SEQ ID NO: 1567785 - RNA, 19 nt, Homo sapiens
  misc_RNA (1)...(19): siRNA sense strand
cgagagaggcccuucaaau

SEQ ID NO: 1567786 - RNA, 19 nt, Homo sapiens
  misc_RNA (1)...(19): siRNA sense strand
gaagcgcuauaaauguaau

SEQ ID NO: 1567787 - RNA, 19 nt, Homo sapiens
  misc_RNA (1)...(19): siRNA sense strand
aggauucacucucuucaaa

SEQ ID NO: 1567788 - RNA, 19 nt, Homo sapiens
  misc_RNA (1)...(19): siRNA sense strand
gcccagaugugcauuggau

SEQ ID NO: 1567789 - RNA, 19 nt, Homo sapiens
  misc_RNA (1)...(19): siRNA sense strand
aaacauggcuguggcaaac

SEQ ID NO: 1567790 - RNA, 19 nt, Homo sapiens
  misc_RNA (1)...(19): siRNA sense strand
gggaugugaugcuggagaa

SEQ ID NO: 1567791 - RNA, 19 nt, Homo sapiens
  misc_RNA (1)...(19): siRNA sense strand
caaguaagaguuaagaaag

SEQ ID NO: 1567792 - RNA, 19 nt, Homo sapiens
  misc_RNA (1)...(19): siRNA sense strand
acacaaaguugagauuaca

SEQ ID NO: 1567793 - RNA, 19 nt, Homo sapiens
  misc_RNA (1)...(19): siRNA sense strand
cagagagaccuuucaaaug

SEQ ID NO: 1567794 - RNA, 19 nt, Homo sapiens
  misc_RNA (1)...(19): siRNA sense strand
gcaaggccuuccgcaauca

SEQ ID NO: 1567795 - RNA, 19 nt, Homo sapiens
  misc_RNA (1)...(19): siRNA sense strand
ggucagccuuuauuguuca

SEQ ID NO: 1567796 - RNA, 19 nt, Homo sapiens
  misc_RNA (1)...(19): siRNA sense strand
gaaagaaaacucucguuga

SEQ ID NO: 1567797 - RNA, 19 nt, Homo sapiens
  misc_RNA (1)...(19): siRNA sense strand
cuacaaacaagaugaaugu

SEQ ID NO: 1567798 - RNA, 19 nt, Homo sapiens
  misc_RNA (1)...(19): siRNA sense strand
ccacuaugacuacaagaaa

SEQ ID NO: 1567799 - RNA, 19 nt, Homo sapiens
  misc_RNA (1)...(19): siRNA sense strand
aaaagacucugaaguauca

SEQ ID NO: 1567800 - RNA, 19 nt, Homo sapiens
  misc_RNA (1)...(19): siRNA sense strand
gacacaaaguugagauuac

SEQ ID NO: 1567801 - RNA, 19 nt, Homo sapiens
  misc_RNA (1)...(19): siRNA sense strand
ggcaaggccuuccgcaauc

SEQ ID NO: 1567802 - RNA, 19 nt, Homo sapiens
  misc_RNA (1)...(19): siRNA sense strand
gggcagcucucaccuacag

SEQ ID NO: 1567803 - RNA, 19 nt, Homo sapiens
  misc_RNA (1)...(19): siRNA sense strand
ggaagaagaggaugaaagc

SEQ ID NO: 1567804 - RNA, 19 nt, Homo sapiens
  misc_RNA (1)...(19): siRNA sense strand
gauauggucccuugcuuca

SEQ ID NO: 1567805 - RNA, 19 nt, Homo sapiens
  misc_RNA (1)...(19): siRNA sense strand
ccucgaagacugcaaagaa

SEQ ID NO: 1567806 - RNA, 19 nt, Homo sapiens
  misc_RNA (1)...(19): siRNA sense strand
acagagagaccuuucaaau

SEQ ID NO: 1567807 - RNA, 19 nt, Homo sapiens
  misc_RNA (1)...(19): siRNA sense strand
gaaggacuuugccuauagg

SEQ ID NO: 1567808 - RNA, 19 nt, Homo sapiens
  misc_RNA (1)...(19): siRNA sense strand
aggagaagcccuauaaaug

SEQ ID NO: 1567809 - RNA, 19 nt, Homo sapiens
  misc_RNA (1)...(19): siRNA sense strand
cagugggagugucauuuaa

SEQ ID NO: 1567810 - RNA, 19 nt, Homo sapiens
  misc_RNA (1)...(19): siRNA sense strand
gaggagcccuacaaaugca

SEQ ID NO: 1567811 - RNA, 19 nt, Homo sapiens
  misc_RNA (1)...(19): siRNA sense strand
acagugggagugucauuua

SEQ ID NO: 1567812 - RNA, 19 nt, Homo sapiens
  misc_RNA (1)...(19): siRNA sense strand
cagcuucgcuaccaugagu

SEQ ID NO: 1567813 - RNA, 19 nt, Homo sapiens
  misc_RNA (1)...(19): siRNA sense strand
ggcagaaggaucaauguga

SEQ ID NO: 1567814 - RNA, 19 nt, Homo sapiens
  misc_RNA (1)...(19): siRNA sense strand
aagaagaggaugaaagcua

SEQ ID NO: 1567815 - RNA, 19 nt, Homo sapiens
  misc_RNA (1)...(19): siRNA sense strand
caggagaagcccuauaaau

SEQ ID NO: 1567816 - RNA, 19 nt, Homo sapiens
  misc_RNA (1)...(19): siRNA sense strand
gcaaacacuucagaaugag

SEQ ID NO: 1567817 - RNA, 19 nt, Homo sapiens
  misc_RNA (1)...(19): siRNA sense strand
ugaguucacaccacuauga

SEQ ID NO: 1567818 - RNA, 19 nt, Homo sapiens
  misc_RNA (1)...(19): siRNA sense strand
gagagaccuuucaaauguc

SEQ ID NO: 1567819 - RNA, 19 nt, Homo sapiens
  misc_RNA (1)...(19): siRNA sense strand
ggccugacguucucuccaa

SEQ ID NO: 1567820 - RNA, 19 nt, Homo sapiens
  misc_RNA (1)...(19): siRNA sense strand
ggaauacacaguggagaga

SEQ ID NO: 1567821 - RNA, 19 nt, Homo sapiens
  misc_RNA (1)...(19): siRNA sense strand
cuggagagaagccauauaa

SEQ ID NO: 1567822 - RNA, 19 nt, Homo sapiens
  misc_RNA (1)...(19): siRNA sense strand
cgagaaacccaugcuaaga

SEQ ID NO: 1567823 - RNA, 19 nt, Homo sapiens
  misc_RNA (1)...(19): siRNA sense strand
ggcagagucuucacacagu

SEQ ID NO: 1567824 - RNA, 19 nt, Homo sapiens
  misc_RNA (1)...(19): siRNA sense strand
cagccuacaucagagaauu

SEQ ID NO: 1567825 - RNA, 19 nt, Homo sapiens
  misc_RNA (1)...(19): siRNA sense strand
ggccuuggcugccuucuug

SEQ ID NO: 1567826 - RNA, 19 nt, Homo sapiens
  misc_RNA (1)...(19): siRNA sense strand
caccagagccugagagcua

SEQ ID NO: 1567827 - RNA, 19 nt, Homo sapiens
  misc_RNA (1)...(19): siRNA sense strand
cgaaggcuguggcugagaa

SEQ ID NO: 1567828 - RNA, 19 nt, Homo sapiens
  misc_RNA (1)...(19): siRNA sense strand
ggagacaggcuaugacaca

SEQ ID NO: 1567829 - RNA, 19 nt, Homo sapiens
  misc_RNA (1)...(19): siRNA sense strand
gcgaccaccucaucacaga

SEQ ID NO: 1567830 - RNA, 19 nt, Homo sapiens
  misc_RNA (1)...(19): siRNA sense strand
aaacagcagugaccgagau

SEQ ID NO: 1567831 - RNA, 19 nt, Homo sapiens
  misc_RNA (1)...(19): siRNA sense strand
gugaccaccucucugauga

SEQ ID NO: 1567832 - RNA, 19 nt, Homo sapiens
  misc_RNA (1)...(19): siRNA sense strand
ccgcagacauugccaccuu

SEQ ID NO: 1567833 - RNA, 19 nt, Homo sapiens
  misc_RNA (1)...(19): siRNA sense strand
gaccgcaugucccggauuc

SEQ ID NO: 1567834 - RNA, 19 nt, Homo sapiens
  misc_RNA (1)...(19): siRNA sense strand
gggcaucagcuggagguua

SEQ ID NO: 1567835 - RNA, 19 nt, Homo sapiens
  misc_RNA (1)...(19): siRNA sense strand
ggcaucagcuggagguuac

SEQ ID NO: 1567836 - RNA, 19 nt, Homo sapiens
  misc_RNA (1)...(19): siRNA sense strand
ccgagaucgucaacaguuu

SEQ ID NO: 1567837 - RNA, 19 nt, Homo sapiens
  misc_RNA (1)...(19): siRNA sense strand
gagccuauucuccguguug

SEQ ID NO: 1567838 - RNA, 19 nt, Homo sapiens
  misc_RNA (1)...(19): siRNA sense strand
gggacuugaugcagagaau

SEQ ID NO: 1567839 - RNA, 19 nt, Homo sapiens
  misc_RNA (1)...(19): siRNA sense strand
gcuaugaggacacccuaga

SEQ ID NO: 1567840 - RNA, 19 nt, Homo sapiens
  misc_RNA (1)...(19): siRNA sense strand
ccauugccuucgucaaguu

SEQ ID NO: 1567841 - RNA, 19 nt, Homo sapiens
  misc_RNA (1)...(19): siRNA sense strand
cgcagacauugccaccuua

SEQ ID NO: 1567842 - RNA, 19 nt, Homo sapiens
  misc_RNA (1)...(19): siRNA sense strand
cccuagaccuggaggaaga

SEQ ID NO: 1567843 - RNA, 19 nt, Homo sapiens
  misc_RNA (1)...(19): siRNA sense strand
gaggagacaggcuaugaca

SEQ ID NO: 1567844 - RNA, 19 nt, Homo sapiens
  misc_RNA (1)...(19): siRNA sense strand
accgacagcuuccuggauu

SEQ ID NO: 1567845 - RNA, 19 nt, Homo sapiens
  misc_RNA (1)...(19): siRNA sense strand
ccuguaugcucaucucauc

SEQ ID NO: 1567846 - RNA, 19 nt, Homo sapiens
  misc_RNA (1)...(19): siRNA sense strand
cuuccuggauuccggcuuu

SEQ ID NO: 1567847 - RNA, 19 nt, Homo sapiens
  misc_RNA (1)...(19): siRNA sense strand
gagacaggcuaugacacau

SEQ ID NO: 1567848 - RNA, 19 nt, Homo sapiens
  misc_RNA (1)...(19): siRNA sense strand
gauuccggcuuucaaacuc

SEQ ID NO: 1567849 - RNA, 19 nt, Homo sapiens
  misc_RNA (1)...(19): siRNA sense strand
ugacacauacguccacgau

SEQ ID NO: 1567850 - RNA, 19 nt, Homo sapiens
  misc_RNA (1)...(19): siRNA sense strand
gcucaucucaucgggcauu

SEQ ID NO: 1567851 - RNA, 19 nt, Homo sapiens
  misc_RNA (1)...(19): siRNA sense strand
gccauugccuucgucaagu

SEQ ID NO: 1567852 - RNA, 19 nt, Homo sapiens
  misc_RNA (1)...(19): siRNA sense strand
ccacacuccggcuguuuga

SEQ ID NO: 1567853 - RNA, 19 nt, Homo sapiens
  misc_RNA (1)...(19): siRNA sense strand
ggcuguggcugagaacuuc

SEQ ID NO: 1567854 - RNA, 19 nt, Homo sapiens
  misc_RNA (1)...(19): siRNA sense strand
uggaggaguucugcaagga

SEQ ID NO: 1567855 - RNA, 19 nt, Homo sapiens
  misc_RNA (1)...(19): siRNA sense strand
cauacguccacgaugcuua

SEQ ID NO: 1567856 - RNA, 19 nt, Homo sapiens
  misc_RNA (1)...(19): siRNA sense strand
ucaccacacuccggcuguu

SEQ ID NO: 1567857 - RNA, 19 nt, Homo sapiens
  misc_RNA (1)...(19): siRNA sense strand
ggauucuggaucagccaua

SEQ ID NO: 1567858 - RNA, 19 nt, Homo sapiens
  misc_RNA (1)...(19): siRNA sense strand
gcagacauugccaccuuag

SEQ ID NO: 1567859 - RNA, 19 nt, Homo sapiens
  misc_RNA (1)...(19): siRNA sense strand
cacaugauccucgccagaa

SEQ ID NO: 1567860 - RNA, 19 nt, Homo sapiens
  misc_RNA (1)...(19): siRNA sense strand
uucuugggcugguuugauu

SEQ ID NO: 1567861 - RNA, 19 nt, Homo sapiens
  misc_RNA (1)...(19): siRNA sense strand
caucucaucgggcauugug

SEQ ID NO: 1567862 - RNA, 19 nt, Homo sapiens
  misc_RNA (1)...(19): siRNA sense strand
agacauugccaccuuagag

SEQ ID NO: 1567863 - RNA, 19 nt, Homo sapiens
  misc_RNA (1)...(19): siRNA sense strand
cgagaucgucaacaguuuc

SEQ ID NO: 1567864 - RNA, 19 nt, Homo sapiens
  misc_RNA (1)...(19): siRNA sense strand
ggauuccggcuuucaaacu

SEQ ID NO: 1567865 - RNA, 19 nt, Homo sapiens
  misc_RNA (1)...(19): siRNA sense strand
gaggauaucugcucuauuu

SEQ ID NO: 1567866 - RNA, 19 nt, Homo sapiens
  misc_RNA (1)...(19): siRNA sense strand
gaaagaguuugcaccauua

SEQ ID NO: 1567867 - RNA, 19 nt, Homo sapiens
  misc_RNA (1)...(19): siRNA sense strand
ggaaagaguuugcaccauu

SEQ ID NO: 1567868 - RNA, 19 nt, Homo sapiens
  misc_RNA (1)...(19): siRNA sense strand
gaacaaaugacgagaauga

SEQ ID NO: 1567869 - RNA, 19 nt, Homo sapiens
  misc_RNA (1)...(19): siRNA sense strand
gaaugaacauguugaagaa

SEQ ID NO: 1567870 - RNA, 19 nt, Homo sapiens
  misc_RNA (1)...(19): siRNA sense strand
gcaugaagaucuuagcuaa

SEQ ID NO: 1567871 - RNA, 19 nt, Homo sapiens
  misc_RNA (1)...(19): siRNA sense strand
guacugagcuaucuuuaau

SEQ ID NO: 1567872 - RNA, 19 nt, Homo sapiens
  misc_RNA (1)...(19): siRNA sense strand
gaaauugauucagaggaua

SEQ ID NO: 1567873 - RNA, 19 nt, Homo sapiens
  misc_RNA (1)...(19): siRNA sense strand
gaagaagauggguacauua

SEQ ID NO: 1567874 - RNA, 19 nt, Homo sapiens
  misc_RNA (1)...(19): siRNA sense strand
gaagauggguacauuaaac

SEQ ID NO: 1567875 - RNA, 19 nt, Homo sapiens
  misc_RNA (1)...(19): siRNA sense strand
gaaauccucacguuuguaa

SEQ ID NO: 1567876 - RNA, 19 nt, Homo sapiens
  misc_RNA (1)...(19): siRNA sense strand
ggaaauugauucagaggau

SEQ ID NO: 1567877 - RNA, 19 nt, Homo sapiens
  misc_RNA (1)...(19): siRNA sense strand
ggacaaacaccuugggauu

SEQ ID NO: 1567878 - RNA, 19 nt, Homo sapiens
  misc_RNA (1)...(19): siRNA sense strand
aaauggagaucacuagaaa

SEQ ID NO: 1567879 - RNA, 19 nt, Homo sapiens
  misc_RNA (1)...(19): siRNA sense strand
gaagacuccugccacuaaa

SEQ ID NO: 1567880 - RNA, 19 nt, Homo sapiens
  misc_RNA (1)...(19): siRNA sense strand
ggaaguguauugacaacug

SEQ ID NO: 1567881 - RNA, 19 nt, Homo sapiens
  misc_RNA (1)...(19): siRNA sense strand
caacaagcgaucaacuuua

SEQ ID NO: 1567882 - RNA, 19 nt, Homo sapiens
  misc_RNA (1)...(19): siRNA sense strand
ugaagaagauggguacauu

SEQ ID NO: 1567883 - RNA, 19 nt, Homo sapiens
  misc_RNA (1)...(19): siRNA sense strand
gauagcuacugccaucuuu

SEQ ID NO: 1567884 - RNA, 19 nt, Homo sapiens
  misc_RNA (1)...(19): siRNA sense strand
gaucuuagcuaauuaucag

SEQ ID NO: 1567885 - RNA, 19 nt, Homo sapiens
  misc_RNA (1)...(19): siRNA sense strand
ccaugaaucugcuuuacaa

SEQ ID NO: 1567886 - RNA, 19 nt, Homo sapiens
  misc_RNA (1)...(19): siRNA sense strand
gaccaaaggcuguaaaugu

SEQ ID NO: 1567887 - RNA, 19 nt, Homo sapiens
  misc_RNA (1)...(19): siRNA sense strand
agaaggaaauugauucaga

SEQ ID NO: 1567888 - RNA, 19 nt, Homo sapiens
  misc_RNA (1)...(19): siRNA sense strand
guaauaaccacaaccuaaa

SEQ ID NO: 1567889 - RNA, 19 nt, Homo sapiens
  misc_RNA (1)...(19): siRNA sense strand
gaaccaugaaucugcuuua

SEQ ID NO: 1567890 - RNA, 19 nt, Homo sapiens
  misc_RNA (1)...(19): siRNA sense strand
gcacaucagucuguuucaa

SEQ ID NO: 1567891 - RNA, 19 nt, Homo sapiens
  misc_RNA (1)...(19): siRNA sense strand
gaaaggcgaagacacuuga

SEQ ID NO: 1567892 - RNA, 19 nt, Homo sapiens
  misc_RNA (1)...(19): siRNA sense strand
accaaaggcuguaaaugua

SEQ ID NO: 1567893 - RNA, 19 nt, Homo sapiens
  misc_RNA (1)...(19): siRNA sense strand
aagagcagaugaaguugua

SEQ ID NO: 1567894 - RNA, 19 nt, Homo sapiens
  misc_RNA (1)...(19): siRNA sense strand
gaaaauaccaucucaaaca

SEQ ID NO: 1567895 - RNA, 19 nt, Homo sapiens
  misc_RNA (1)...(19): siRNA sense strand
aaacacugcuuccuccuau

SEQ ID NO: 1567896 - RNA, 19 nt, Homo sapiens
  misc_RNA (1)...(19): siRNA sense strand
ggagaaagagagauaagug

SEQ ID NO: 1567897 - RNA, 19 nt, Homo sapiens
  misc_RNA (1)...(19): siRNA sense strand
guacuggauuagucuuaaa

SEQ ID NO: 1567898 - RNA, 19 nt, Homo sapiens
  misc_RNA (1)...(19): siRNA sense strand
agacaucauucaucuauca

SEQ ID NO: 1567899 - RNA, 19 nt, Homo sapiens
  misc_RNA (1)...(19): siRNA sense strand
gagaaagagagauaaguga

SEQ ID NO: 1567900 - RNA, 19 nt, Homo sapiens
  misc_RNA (1)...(19): siRNA sense strand
caagauugcuaccauguac

SEQ ID NO: 1567901 - RNA, 19 nt, Homo sapiens
  misc_RNA (1)...(19): siRNA sense strand
auacauggauuuccgaguu

SEQ ID NO: 1567902 - RNA, 19 nt, Homo sapiens
  misc_RNA (1)...(19): siRNA sense strand
acacuuccauguugaaaug

SEQ ID NO: 1567903 - RNA, 19 nt, Homo sapiens
  misc_RNA (1)...(19): siRNA sense strand
cagaguacaucaaacacuu

SEQ ID NO: 1567904 - RNA, 19 nt, Homo sapiens
  misc_RNA (1)...(19): siRNA sense strand
ugacgagaaugaacauguu

SEQ ID NO: 1567905 - RNA, 19 nt, Homo sapiens
  misc_RNA (1)...(19): siRNA sense strand
gggaggaggagccggaaua

SEQ ID NO: 1567906 - RNA, 19 nt, Homo sapiens
  misc_RNA (1)...(19): siRNA sense strand
caaaggcuguaaauguaau

SEQ ID NO: 1567907 - RNA, 19 nt, Homo sapiens
  misc_RNA (1)...(19): siRNA sense strand
gauaucugcucuauuuguc

SEQ ID NO: 1567908 - RNA, 19 nt, Homo sapiens
  misc_RNA (1)...(19): siRNA sense strand
guagucaucuaucaagaca

SEQ ID NO: 1567909 - RNA, 19 nt, Homo sapiens
  misc_RNA (1)...(19): siRNA sense strand
gguacuggauuagucuuaa

SEQ ID NO: 1567910 - RNA, 19 nt, Homo sapiens
  misc_RNA (1)...(19): siRNA sense strand
gggaaguguuauaagugua

SEQ ID NO: 1567911 - RNA, 19 nt, Homo sapiens
  misc_RNA (1)...(19): siRNA sense strand
agaagacuccugccacuaa

SEQ ID NO: 1567912 - RNA, 19 nt, Homo sapiens
  misc_RNA (1)...(19): siRNA sense strand
caaaagaugccuaugaaaa

SEQ ID NO: 1567913 - RNA, 19 nt, Homo sapiens
  misc_RNA (1)...(19): siRNA sense strand
uagcauaccucaguguaau

SEQ ID NO: 1567914 - RNA, 19 nt, Homo sapiens
  misc_RNA (1)...(19): siRNA sense strand
gaaggcauuucaucuuggu

SEQ ID NO: 1567915 - RNA, 19 nt, Homo sapiens
  misc_RNA (1)...(19): siRNA sense strand
uguaauaaccacaaccuaa

SEQ ID NO: 1567916 - RNA, 19 nt, Homo sapiens
  misc_RNA (1)...(19): siRNA sense strand
ccaaaggcuguaaauguaa

SEQ ID NO: 1567917 - RNA, 19 nt, Homo sapiens
  misc_RNA (1)...(19): siRNA sense strand
guaccgaaugcauagaaua

SEQ ID NO: 1567918 - RNA, 19 nt, Homo sapiens
  misc_RNA (1)...(19): siRNA sense strand
gaaaauaucacacuagucu

SEQ ID NO: 1567919 - RNA, 19 nt, Homo sapiens
  misc_RNA (1)...(19): siRNA sense strand
acagagacaucauucaucu

SEQ ID NO: 1567920 - RNA, 19 nt, Homo sapiens
  misc_RNA (1)...(19): siRNA sense strand
gagcagaugaaguuguaaa

SEQ ID NO: 1567921 - RNA, 19 nt, Homo sapiens
  misc_RNA (1)...(19): siRNA sense strand
ccgaaugcauagaauauca

SEQ ID NO: 1567922 - RNA, 19 nt, Homo sapiens
  misc_RNA (1)...(19): siRNA sense strand
ugaaucugcuuuacaacug

SEQ ID NO: 1567923 - RNA, 19 nt, Homo sapiens
  misc_RNA (1)...(19): siRNA sense strand
gaaaagcaaggccaaguuu

SEQ ID NO: 1567924 - RNA, 19 nt, Homo sapiens
  misc_RNA (1)...(19): siRNA sense strand
uaaguguaccgaaugcaua

SEQ ID NO: 1567925 - RNA, 19 nt, Homo sapiens
  misc_RNA (1)...(19): siRNA sense strand
aagaagauggguacauuaa

SEQ ID NO: 1567926 - RNA, 19 nt, Homo sapiens
  misc_RNA (1)...(19): siRNA sense strand
agaaugaacauguugaaga

SEQ ID NO: 1567927 - RNA, 19 nt, Homo sapiens
  misc_RNA (1)...(19): siRNA sense strand
aagagagacuggacaaaca

SEQ ID NO: 1567928 - RNA, 19 nt, Homo sapiens
  misc_RNA (1)...(19): siRNA sense strand
gcgaucaacuuuacuucca

SEQ ID NO: 1567929 - RNA, 19 nt, Homo sapiens
  misc_RNA (1)...(19): siRNA sense strand
acaacaagcgaucaacuuu

SEQ ID NO: 1567930 - RNA, 19 nt, Homo sapiens
  misc_RNA (1)...(19): siRNA sense strand
gcauaccucaguguaauuu

SEQ ID NO: 1567931 - RNA, 19 nt, Homo sapiens
  misc_RNA (1)...(19): siRNA sense strand
caaaugacgagaaugaaca

SEQ ID NO: 1567932 - RNA, 19 nt, Homo sapiens
  misc_RNA (1)...(19): siRNA sense strand
cauacaagauugcuaccau

SEQ ID NO: 1567933 - RNA, 19 nt, Homo sapiens
  misc_RNA (1)...(19): siRNA sense strand
caaaacacauuguaagauc

SEQ ID NO: 1567934 - RNA, 19 nt, Homo sapiens
  misc_RNA (1)...(19): siRNA sense strand
ggauaucugcucuauuugu

SEQ ID NO: 1567935 - RNA, 19 nt, Homo sapiens
  misc_RNA (1)...(19): siRNA sense strand
acaacugggucuuggagaa

SEQ ID NO: 1567936 - RNA, 19 nt, Homo sapiens
  misc_RNA (1)...(19): siRNA sense strand
gguggacaaguuauauaua

SEQ ID NO: 1567937 - RNA, 19 nt, Homo sapiens
  misc_RNA (1)...(19): siRNA sense strand
gcuauaaggccucugaaag

SEQ ID NO: 1567938 - RNA, 19 nt, Homo sapiens
  misc_RNA (1)...(19): siRNA sense strand
caagauuuacccacuguau

SEQ ID NO: 1567939 - RNA, 19 nt, Homo sapiens
  misc_RNA (1)...(19): siRNA sense strand
ucaauuggagcacagcuaa

SEQ ID NO: 1567940 - RNA, 19 nt, Homo sapiens
  misc_RNA (1)...(19): siRNA sense strand
gacaacaagcgaucaacuu

SEQ ID NO: 1567941 - RNA, 19 nt, Homo sapiens
  misc_RNA (1)...(19): siRNA sense strand
ggaggagccggaauacaug

SEQ ID NO: 1567942 - RNA, 19 nt, Homo sapiens
  misc_RNA (1)...(19): siRNA sense strand
gagccggaauacauggauu

SEQ ID NO: 1567943 - RNA, 19 nt, Homo sapiens
  misc_RNA (1)...(19): siRNA sense strand
caucauucaucuaucaaag

SEQ ID NO: 1567944 - RNA, 19 nt, Homo sapiens
  misc_RNA (1)...(19): siRNA sense strand
cacaggaaguguauugaca

SEQ ID NO: 1567945 - RNA, 19 nt, Homo sapiens
  misc_RNA (1)...(19): siRNA sense strand
ggaaauccucacguuugua

SEQ ID NO: 1567946 - RNA, 19 nt, Homo sapiens
  misc_RNA (1)...(19): siRNA sense strand
gugucucacucuguaaaua

SEQ ID NO: 1567947 - RNA, 19 nt, Homo sapiens
  misc_RNA (1)...(19): siRNA sense strand
ggaaaguccaugcaucagu

SEQ ID NO: 1567948 - RNA, 19 nt, Homo sapiens
  misc_RNA (1)...(19): siRNA sense strand
aaacagagacaucauucau

SEQ ID NO: 1567949 - RNA, 19 nt, Homo sapiens
  misc_RNA (1)...(19): siRNA sense strand
uacauggauuuccgaguuu

SEQ ID NO: 1567950 - RNA, 19 nt, Homo sapiens
  misc_RNA (1)...(19): siRNA sense strand
caaacacugcuuccuccua

SEQ ID NO: 1567951 - RNA, 19 nt, Homo sapiens
  misc_RNA (1)...(19): siRNA sense strand
gacaagcacaucagucugu

SEQ ID NO: 1567952 - RNA, 19 nt, Homo sapiens
  misc_RNA (1)...(19): siRNA sense strand
gaaagagagauaagugacu

SEQ ID NO: 1567953 - RNA, 19 nt, Homo sapiens
  misc_RNA (1)...(19): siRNA sense strand
agagacaucauucaucuau

SEQ ID NO: 1567954 - RNA, 19 nt, Homo sapiens
  misc_RNA (1)...(19): siRNA sense strand
ccuauugguggacaaguua

SEQ ID NO: 1567955 - RNA, 19 nt, Homo sapiens
  misc_RNA (1)...(19): siRNA sense strand
caacugggucuuggagaaa

SEQ ID NO: 1567956 - RNA, 19 nt, Homo sapiens
  misc_RNA (1)...(19): siRNA sense strand
gacaaacaccuugggauuc

SEQ ID NO: 1567957 - RNA, 19 nt, Homo sapiens
  misc_RNA (1)...(19): siRNA sense strand
gccugugucucacucugua

SEQ ID NO: 1567958 - RNA, 19 nt, Homo sapiens
  misc_RNA (1)...(19): siRNA sense strand
uaucugcucuauuugucaa

SEQ ID NO: 1567959 - RNA, 19 nt, Homo sapiens
  misc_RNA (1)...(19): siRNA sense strand
ggcuaccagugucuacuuu

SEQ ID NO: 1567960 - RNA, 19 nt, Homo sapiens
  misc_RNA (1)...(19): siRNA sense strand
caucuuucccacacguuua

SEQ ID NO: 1567961 - RNA, 19 nt, Homo sapiens
  misc_RNA (1)...(19): siRNA sense strand
uaucagaguacaucaaaca

SEQ ID NO: 1567962 - RNA, 19 nt, Homo sapiens
  misc_RNA (1)...(19): siRNA sense strand
gucaagagcuacuuuuaga

SEQ ID NO: 1567963 - RNA, 19 nt, Homo sapiens
  misc_RNA (1)...(19): siRNA sense strand
gggaaaauaccaucucaaa

SEQ ID NO: 1567964 - RNA, 19 nt, Homo sapiens
  misc_RNA (1)...(19): siRNA sense strand
aacaagcgaucaacuuuac

SEQ ID NO: 1567965 - RNA, 19 nt, Homo sapiens
  misc_RNA (1)...(19): siRNA sense strand
gcaggacuauucaguaauu

SEQ ID NO: 1567966 - RNA, 19 nt, Homo sapiens
  misc_RNA (1)...(19): siRNA sense strand
gaauaagcccuguuuguuu

SEQ ID NO: 1567967 - RNA, 19 nt, Homo sapiens
  misc_RNA (1)...(19): siRNA sense strand
aauaagcccuguuuguuua

SEQ ID NO: 1567968 - RNA, 19 nt, Homo sapiens
  misc_RNA (1)...(19): siRNA sense strand
ggaaagcccuaaaugugaa

SEQ ID NO: 1567969 - RNA, 19 nt, Homo sapiens
  misc_RNA (1)...(19): siRNA sense strand
gaacccaugugcuuccuuu

SEQ ID NO: 1567970 - RNA, 19 nt, Homo sapiens
  misc_RNA (1)...(19): siRNA sense strand
ggaagaggcucagaggaaa

SEQ ID NO: 1567971 - RNA, 19 nt, Homo sapiens
  misc_RNA (1)...(19): siRNA sense strand
gaacacaacacaaagaaau

SEQ ID NO: 1567972 - RNA, 19 nt, Homo sapiens
  misc_RNA (1)...(19): siRNA sense strand
gaaauagagccuucagaaa

SEQ ID NO: 1567973 - RNA, 19 nt, Homo sapiens
  misc_RNA (1)...(19): siRNA sense strand
gagccaaacucaaggaaga

SEQ ID NO: 1567974 - RNA, 19 nt, Homo sapiens
  misc_RNA (1)...(19): siRNA sense strand
gaaauuagacaacagugaa

SEQ ID NO: 1567975 - RNA, 19 nt, Homo sapiens
  misc_RNA (1)...(19): siRNA sense strand
ggacuuugaucacugaaga

SEQ ID NO: 1567976 - RNA, 19 nt, Homo sapiens
  misc_RNA (1)...(19): siRNA sense strand
uaaagugguuggaugguaa

SEQ ID NO: 1567977 - RNA, 19 nt, Homo sapiens
  misc_RNA (1)...(19): siRNA sense strand
uagcaacucuuccacaauu

SEQ ID NO: 1567978 - RNA, 19 nt, Homo sapiens
  misc_RNA (1)...(19): siRNA sense strand
ggaauaagcccuguuuguu

SEQ ID NO: 1567979 - RNA, 19 nt, Homo sapiens
  misc_RNA (1)...(19): siRNA sense strand
cagaaaggauuaaggcauu

SEQ ID NO: 1567980 - RNA, 19 nt, Homo sapiens
  misc_RNA (1)...(19): siRNA sense strand
gaagaugacuuggaauucu

SEQ ID NO: 1567981 - RNA, 19 nt, Homo sapiens
  misc_RNA (1)...(19): siRNA sense strand
gaagugaaacccgauagua

SEQ ID NO: 1567982 - RNA, 19 nt, Homo sapiens
  misc_RNA (1)...(19): siRNA sense strand
gauaaauggugccgggauu

SEQ ID NO: 1567983 - RNA, 19 nt, Homo sapiens
  misc_RNA (1)...(19): siRNA sense strand
cacagaagaucuuauuaga

SEQ ID NO: 1567984 - RNA, 19 nt, Homo sapiens
  misc_RNA (1)...(19): siRNA sense strand
gaagcaagcacauggagaa

SEQ ID NO: 1567985 - RNA, 19 nt, Homo sapiens
  misc_RNA (1)...(19): siRNA sense strand
gagcagagaacaaacaaau

SEQ ID NO: 1567986 - RNA, 19 nt, Homo sapiens
  misc_RNA (1)...(19): siRNA sense strand
gggaaagcccuaaauguga

SEQ ID NO: 1567987 - RNA, 19 nt, Homo sapiens
  misc_RNA (1)...(19): siRNA sense strand
gcacauggagaaacuagaa

SEQ ID NO: 1567988 - RNA, 19 nt, Homo sapiens
  misc_RNA (1)...(19): siRNA sense strand
ugaaggagcucuuucucau

SEQ ID NO: 1567989 - RNA, 19 nt, Homo sapiens
  misc_RNA (1)...(19): siRNA sense strand
gcaagcacauggagaaacu

SEQ ID NO: 1567990 - RNA, 19 nt, Homo sapiens
  misc_RNA (1)...(19): siRNA sense strand
gaguaaugaucaaaggaaa

SEQ ID NO: 1567991 - RNA, 19 nt, Homo sapiens
  misc_RNA (1)...(19): siRNA sense strand
ggauaccucuuuaaucgau

SEQ ID NO: 1567992 - RNA, 19 nt, Homo sapiens
  misc_RNA (1)...(19): siRNA sense strand
gguagcaacucuuccacaa

SEQ ID NO: 1567993 - RNA, 19 nt, Homo sapiens
  misc_RNA (1)...(19): siRNA sense strand
gcaagaaauagaaagacua

SEQ ID NO: 1567994 - RNA, 19 nt, Homo sapiens
  misc_RNA (1)...(19): siRNA sense strand
gacuagaacacauugauaa

SEQ ID NO: 1567995 - RNA, 19 nt, Homo sapiens
  misc_RNA (1)...(19): siRNA sense strand
gcagagaacaaacaaauac

SEQ ID NO: 1567996 - RNA, 19 nt, Homo sapiens
  misc_RNA (1)...(19): siRNA sense strand
gaaagacuagaacacauug

SEQ ID NO: 1567997 - RNA, 19 nt, Homo sapiens
  misc_RNA (1)...(19): siRNA sense strand
gaucaaaggaaagccauuu

SEQ ID NO: 1567998 - RNA, 19 nt, Homo sapiens
  misc_RNA (1)...(19): siRNA sense strand
guaauugaaccacaaauca

SEQ ID NO: 1567999 - RNA, 19 nt, Homo sapiens
  misc_RNA (1)...(19): siRNA sense strand
aaacuugaccugacuguga

SEQ ID NO: 1568000 - RNA, 19 nt, Homo sapiens
  misc_RNA (1)...(19): siRNA sense strand
gugguuggaugguaaagaa

SEQ ID NO: 1568001 - RNA, 19 nt, Homo sapiens
  misc_RNA (1)...(19): siRNA sense strand
gaagugccuccgcugauuu

SEQ ID NO: 1568002 - RNA, 19 nt, Homo sapiens
  misc_RNA (1)...(19): siRNA sense strand
guuggaugguaaagaaaua

SEQ ID NO: 1568003 - RNA, 19 nt, Homo sapiens
  misc_RNA (1)...(19): siRNA sense strand
gcaacucuuccacaauuaa

SEQ ID NO: 1568004 - RNA, 19 nt, Homo sapiens
  misc_RNA (1)...(19): siRNA sense strand
cagcgagcauucaaaucua

SEQ ID NO: 1568005 - RNA, 19 nt, Homo sapiens
  misc_RNA (1)...(19): siRNA sense strand
caacagugaagaugacuug

SEQ ID NO: 1568006 - RNA, 19 nt, Homo sapiens
  misc_RNA (1)...(19): siRNA sense strand
cagugaagaugacuuggaa

SEQ ID NO: 1568007 - RNA, 19 nt, Homo sapiens
  misc_RNA (1)...(19): siRNA sense strand
agaaauagagccuucagaa

SEQ ID NO: 1568008 - RNA, 19 nt, Homo sapiens
  misc_RNA (1)...(19): siRNA sense strand
gaggaagacccaaccuuug

SEQ ID NO: 1568009 - RNA, 19 nt, Homo sapiens
  misc_RNA (1)...(19): siRNA sense strand
gcuaaaagaucucagacaa

SEQ ID NO: 1568010 - RNA, 19 nt, Homo sapiens
  misc_RNA (1)...(19): siRNA sense strand
uugcaggacuauucaguaa

SEQ ID NO: 1568011 - RNA, 19 nt, Homo sapiens
  misc_RNA (1)...(19): siRNA sense strand
ugaagugccuccgcugauu

SEQ ID NO: 1568012 - RNA, 19 nt, Homo sapiens
  misc_RNA (1)...(19): siRNA sense strand
caagguaggagaaguaauc

SEQ ID NO: 1568013 - RNA, 19 nt, Homo sapiens
  misc_RNA (1)...(19): siRNA sense strand
gauaguaguucugcuaaaa

SEQ ID NO: 1568014 - RNA, 19 nt, Homo sapiens
  misc_RNA (1)...(19): siRNA sense strand
ggaccuugcugucuauagg

SEQ ID NO: 1568015 - RNA, 19 nt, Homo sapiens
  misc_RNA (1)...(19): siRNA sense strand
cagaggaacacaacacaaa

SEQ ID NO: 1568016 - RNA, 19 nt, Homo sapiens
  misc_RNA (1)...(19): siRNA sense strand
gagcaaagaccaccuacag

SEQ ID NO: 1568017 - RNA, 19 nt, Homo sapiens
  misc_RNA (1)...(19): siRNA sense strand
aaauagagccuucagaaag

SEQ ID NO: 1568018 - RNA, 19 nt, Homo sapiens
  misc_RNA (1)...(19): siRNA sense strand
ugaggaagacccaaccuuu

SEQ ID NO: 1568019 - RNA, 19 nt, Homo sapiens
  misc_RNA (1)...(19): siRNA sense strand
ggacguugguacacagaca

SEQ ID NO: 1568020 - RNA, 19 nt, Homo sapiens
  misc_RNA (1)...(19): siRNA sense strand
ggacaggagcagagaacaa

SEQ ID NO: 1568021 - RNA, 19 nt, Homo sapiens
  misc_RNA (1)...(19): siRNA sense strand
ccaggacuuugaucacuga

SEQ ID NO: 1568022 - RNA, 19 nt, Homo sapiens
  misc_RNA (1)...(19): siRNA sense strand
caaagaaauuagacaacag

SEQ ID NO: 1568023 - RNA, 19 nt, Homo sapiens
  misc_RNA (1)...(19): siRNA sense strand
uuaaagugguuggauggua

SEQ ID NO: 1568024 - RNA, 19 nt, Homo sapiens
  misc_RNA (1)...(19): siRNA sense strand
gacaggagcagagaacaaa

SEQ ID NO: 1568025 - RNA, 19 nt, Homo sapiens
  misc_RNA (1)...(19): siRNA sense strand
gagaaguaacgcaggcuuu

SEQ ID NO: 1568026 - RNA, 19 nt, Homo sapiens
  misc_RNA (1)...(19): siRNA sense strand
aagacgaccugaacccaaa

SEQ ID NO: 1568027 - RNA, 19 nt, Homo sapiens
  misc_RNA (1)...(19): siRNA sense strand
ggaacacaacacaaagaaa

SEQ ID NO: 1568028 - RNA, 19 nt, Homo sapiens
  misc_RNA (1)...(19): siRNA sense strand
gaaguaacgcaggcuuuga

SEQ ID NO: 1568029 - RNA, 19 nt, Homo sapiens
  misc_RNA (1)...(19): siRNA sense strand
augcuacucuuuccucuuu

SEQ ID NO: 1568030 - RNA, 19 nt, Homo sapiens
  misc_RNA (1)...(19): siRNA sense strand
ggaagacccaaccuuugaa

SEQ ID NO: 1568031 - RNA, 19 nt, Homo sapiens
  misc_RNA (1)...(19): siRNA sense strand
gcagaagugaaacccgaua

SEQ ID NO: 1568032 - RNA, 19 nt, Homo sapiens
  misc_RNA (1)...(19): siRNA sense strand
gaagaugggaaagcccuaa

SEQ ID NO: 1568033 - RNA, 19 nt, Homo sapiens
  misc_RNA (1)...(19): siRNA sense strand
ucacagaagaucuuauuag

SEQ ID NO: 1568034 - RNA, 19 nt, Homo sapiens
  misc_RNA (1)...(19): siRNA sense strand
gugaagaugacuuggaauu

SEQ ID NO: 1568035 - RNA, 19 nt, Homo sapiens
  misc_RNA (1)...(19): siRNA sense strand
gaggaacacaacacaaaga

SEQ ID NO: 1568036 - RNA, 19 nt, Homo sapiens
  misc_RNA (1)...(19): siRNA sense strand
gaaggagcucuuucucaug

SEQ ID NO: 1568037 - RNA, 19 nt, Homo sapiens
  misc_RNA (1)...(19): siRNA sense strand
caagaaauagaaagacuag

SEQ ID NO: 1568038 - RNA, 19 nt, Homo sapiens
  misc_RNA (1)...(19): siRNA sense strand
ugaaugagcccaaaauuga

SEQ ID NO: 1568039 - RNA, 19 nt, Homo sapiens
  misc_RNA (1)...(19): siRNA sense strand
agacaucaaugcuacucuu

SEQ ID NO: 1568040 - RNA, 19 nt, Homo sapiens
  misc_RNA (1)...(19): siRNA sense strand
gaaauagaaagacuagaac

SEQ ID NO: 1568041 - RNA, 19 nt, Homo sapiens
  misc_RNA (1)...(19): siRNA sense strand
gaggaaacaccaagaagag

SEQ ID NO: 1568042 - RNA, 19 nt, Homo sapiens
  misc_RNA (1)...(19): siRNA sense strand
uggagaaacuagaaguaga

SEQ ID NO: 1568043 - RNA, 19 nt, Homo sapiens
  misc_RNA (1)...(19): siRNA sense strand
gaaacccgauaguaguucu

SEQ ID NO: 1568044 - RNA, 19 nt, Homo sapiens
  misc_RNA (1)...(19): siRNA sense strand
gaugggaaagcccuaaaug

SEQ ID NO: 1568045 - RNA, 19 nt, Homo sapiens
  misc_RNA (1)...(19): siRNA sense strand
uaaacgagccaaacucaag

SEQ ID NO: 1568046 - RNA, 19 nt, Homo sapiens
  misc_RNA (1)...(19): siRNA sense strand
ggaaacucuuagacacaug

SEQ ID NO: 1568047 - RNA, 19 nt, Homo sapiens
  misc_RNA (1)...(19): siRNA sense strand
uaacgcaggcuuugaugga

SEQ ID NO: 1568048 - RNA, 19 nt, Homo sapiens
  misc_RNA (1)...(19): siRNA sense strand
caaaucagagagcaggaaa

SEQ ID NO: 1568049 - RNA, 19 nt, Homo sapiens
  misc_RNA (1)...(19): siRNA sense strand
uagaaagacuagaacacau

SEQ ID NO: 1568050 - RNA, 19 nt, Homo sapiens
  misc_RNA (1)...(19): siRNA sense strand
gacccaaccuuugaagaca

SEQ ID NO: 1568051 - RNA, 19 nt, Homo sapiens
  misc_RNA (1)...(19): siRNA sense strand
cgauaguaguucugcuaaa

SEQ ID NO: 1568052 - RNA, 19 nt, Homo sapiens
  misc_RNA (1)...(19): siRNA sense strand
caacggaagaaacaggaaa

SEQ ID NO: 1568053 - RNA, 19 nt, Homo sapiens
  misc_RNA (1)...(19): siRNA sense strand
agacuagaacacauugaua

SEQ ID NO: 1568054 - RNA, 19 nt, Homo sapiens
  misc_RNA (1)...(19): siRNA sense strand
gaucuuauuagacggaaug

SEQ ID NO: 1568055 - RNA, 19 nt, Homo sapiens
  misc_RNA (1)...(19): siRNA sense strand
caacucuuccacaauuaaa

SEQ ID NO: 1568056 - RNA, 19 nt, Homo sapiens
  misc_RNA (1)...(19): siRNA sense strand
gagaacaaacaaauacaag

SEQ ID NO: 1568057 - RNA, 19 nt, Homo sapiens
  misc_RNA (1)...(19): siRNA sense strand
ggucagcgagcauucaaau

SEQ ID NO: 1568058 - RNA, 19 nt, Homo sapiens
  misc_RNA (1)...(19): siRNA sense strand
gguaggagaaguaaucaca

SEQ ID NO: 1568059 - RNA, 19 nt, Homo sapiens
  misc_RNA (1)...(19): siRNA sense strand
ucagacaacgggucauuug

SEQ ID NO: 1568060 - RNA, 19 nt, Homo sapiens
  misc_RNA (1)...(19): siRNA sense strand
uuuaaucgauguugaugug

SEQ ID NO: 1568061 - RNA, 19 nt, Homo sapiens
  misc_RNA (1)...(19): siRNA sense strand
agaaagacuagaacacauu

SEQ ID NO: 1568062 - RNA, 19 nt, Homo sapiens
  misc_RNA (1)...(19): siRNA sense strand
ugaaaccacccaggacuuu

SEQ ID NO: 1568063 - RNA, 19 nt, Homo sapiens
  misc_RNA (1)...(19): siRNA sense strand
ugaccugacugugaauuuc

SEQ ID NO: 1568064 - RNA, 19 nt, Homo sapiens
  misc_RNA (1)...(19): siRNA sense strand
uuagcaaacucaagaaacu

SEQ ID NO: 1568065 - RNA, 19 nt, Homo sapiens
  misc_RNA (1)...(19): siRNA sense strand
gaaagaagcucuaaaggau

SEQ ID NO: 1568066 - RNA, 19 nt, Homo sapiens
  misc_RNA (1)...(19): siRNA sense strand
gaucaacacuccuuuauug

SEQ ID NO: 1568067 - RNA, 19 nt, Homo sapiens
  misc_RNA (1)...(19): siRNA sense strand
cgacagcuauggauuauuu

SEQ ID NO: 1568068 - RNA, 19 nt, Homo sapiens
  misc_RNA (1)...(19): siRNA sense strand
aaacaaaggugaagaacaa

SEQ ID NO: 1568069 - RNA, 19 nt, Homo sapiens
  misc_RNA (1)...(19): siRNA sense strand
gcauagagauggacaguau

SEQ ID NO: 1568070 - RNA, 19 nt, Homo sapiens
  misc_RNA (1)...(19): siRNA sense strand
caaagcagauuaugagcua

SEQ ID NO: 1568071 - RNA, 19 nt, Homo sapiens
  misc_RNA (1)...(19): siRNA sense strand
gaggagaguucugaaauuu

SEQ ID NO: 1568072 - RNA, 19 nt, Homo sapiens
  misc_RNA (1)...(19): siRNA sense strand
gaaauacacagccaaguaa

SEQ ID NO: 1568073 - RNA, 19 nt, Homo sapiens
  misc_RNA (1)...(19): siRNA sense strand
gcacagucuucaccuauaa

SEQ ID NO: 1568074 - RNA, 19 nt, Homo sapiens
  misc_RNA (1)...(19): siRNA sense strand
gaagagaaccagagacaaa

SEQ ID NO: 1568075 - RNA, 19 nt, Homo sapiens
  misc_RNA (1)...(19): siRNA sense strand
ggaaauacacagccaagua

SEQ ID NO: 1568076 - RNA, 19 nt, Homo sapiens
  misc_RNA (1)...(19): siRNA sense strand
caagggaaauugcaaagaa

SEQ ID NO: 1568077 - RNA, 19 nt, Homo sapiens
  misc_RNA (1)...(19): siRNA sense strand
agaaauaccucauccgaaa

SEQ ID NO: 1568078 - RNA, 19 nt, Homo sapiens
  misc_RNA (1)...(19): siRNA sense strand
uaagagagcuuuggauuuc

SEQ ID NO: 1568079 - RNA, 19 nt, Homo sapiens
  misc_RNA (1)...(19): siRNA sense strand
caaaaugccugaaguuaua

SEQ ID NO: 1568080 - RNA, 19 nt, Homo sapiens
  misc_RNA (1)...(19): siRNA sense strand
gaauauagagcaucugaaa

SEQ ID NO: 1568081 - RNA, 19 nt, Homo sapiens
  misc_RNA (1)...(19): siRNA sense strand
cauaguggcauuacaauua

SEQ ID NO: 1568082 - RNA, 19 nt, Homo sapiens
  misc_RNA (1)...(19): siRNA sense strand
gaagaagugucaauuagag

SEQ ID NO: 1568083 - RNA, 19 nt, Homo sapiens
  misc_RNA (1)...(19): siRNA sense strand
gcacaaagccaacuaacga

SEQ ID NO: 1568084 - RNA, 19 nt, Homo sapiens
  misc_RNA (1)...(19): siRNA sense strand
gaugaagaagugucaauua

SEQ ID NO: 1568085 - RNA, 19 nt, Homo sapiens
  misc_RNA (1)...(19): siRNA sense strand
gaagaaagaagcucuaaag

SEQ ID NO: 1568086 - RNA, 19 nt, Homo sapiens
  misc_RNA (1)...(19): siRNA sense strand
ggacuugaaucuccaggaa

SEQ ID NO: 1568087 - RNA, 19 nt, Homo sapiens
  misc_RNA (1)...(19): siRNA sense strand
gaccaaacaggcauuaaua

SEQ ID NO: 1568088 - RNA, 19 nt, Homo sapiens
  misc_RNA (1)...(19): siRNA sense strand
ggaaaugaaugguauuaac

SEQ ID NO: 1568089 - RNA, 19 nt, Homo sapiens
  misc_RNA (1)...(19): siRNA sense strand
gaauugauaugcaguuuac

SEQ ID NO: 1568090 - RNA, 19 nt, Homo sapiens
  misc_RNA (1)...(19): siRNA sense strand
gaaguuaaacccauaaaca

SEQ ID NO: 1568091 - RNA, 19 nt, Homo sapiens
  misc_RNA (1)...(19): siRNA sense strand
uaacgacagcuauggauua

SEQ ID NO: 1568092 - RNA, 19 nt, Homo sapiens
  misc_RNA (1)...(19): siRNA sense strand
gaacucaacccuauguaug

SEQ ID NO: 1568093 - RNA, 19 nt, Homo sapiens
  misc_RNA (1)...(19): siRNA sense strand
guuuggaguuugauuguua

SEQ ID NO: 1568094 - RNA, 19 nt, Homo sapiens
  misc_RNA (1)...(19): siRNA sense strand
acaauuugcuucaguagaa

SEQ ID NO: 1568095 - RNA, 19 nt, Homo sapiens
  misc_RNA (1)...(19): siRNA sense strand
ggcaaguuaugaauugaua

SEQ ID NO: 1568096 - RNA, 19 nt, Homo sapiens
  misc_RNA (1)...(19): siRNA sense strand
gaaauucugagacuaguga

SEQ ID NO: 1568097 - RNA, 19 nt, Homo sapiens
  misc_RNA (1)...(19): siRNA sense strand
gaccaaaugugugaaauag

SEQ ID NO: 1568098 - RNA, 19 nt, Homo sapiens
  misc_RNA (1)...(19): siRNA sense strand
gaagagagaaaacuuguua

SEQ ID NO: 1568099 - RNA, 19 nt, Homo sapiens
  misc_RNA (1)...(19): siRNA sense strand
ggagaguucugaaauuucu

SEQ ID NO: 1568100 - RNA, 19 nt, Homo sapiens
  misc_RNA (1)...(19): siRNA sense strand
ccagagaaauauacugaug

SEQ ID NO: 1568101 - RNA, 19 nt, Homo sapiens
  misc_RNA (1)...(19): siRNA sense strand
caaaggacaaucuaaagaa

SEQ ID NO: 1568102 - RNA, 19 nt, Homo sapiens
  misc_RNA (1)...(19): siRNA sense strand
gaaacaaggaauccaguga

SEQ ID NO: 1568103 - RNA, 19 nt, Homo sapiens
  misc_RNA (1)...(19): siRNA sense strand
gcauuacacugcuucuguu

SEQ ID NO: 1568104 - RNA, 19 nt, Homo sapiens
  misc_RNA (1)...(19): siRNA sense strand
ccaaaugugugaaauaggu

SEQ ID NO: 1568105 - RNA, 19 nt, Homo sapiens
  misc_RNA (1)...(19): siRNA sense strand
gaaacaugccaacuccuaa

SEQ ID NO: 1568106 - RNA, 19 nt, Homo sapiens
  misc_RNA (1)...(19): siRNA sense strand
caaaguuacugaagagaag

SEQ ID NO: 1568107 - RNA, 19 nt, Homo sapiens
  misc_RNA (1)...(19): siRNA sense strand
ggaauccagugaccaaaca

SEQ ID NO: 1568108 - RNA, 19 nt, Homo sapiens
  misc_RNA (1)...(19): siRNA sense strand
ugaaauagguaagccagaa

SEQ ID NO: 1568109 - RNA, 19 nt, Homo sapiens
  misc_RNA (1)...(19): siRNA sense strand
uuacacugcuucuguuaaa

SEQ ID NO: 1568110 - RNA, 19 nt, Homo sapiens
  misc_RNA (1)...(19): siRNA sense strand
caacacuccuuuauugaca

SEQ ID NO: 1568111 - RNA, 19 nt, Homo sapiens
  misc_RNA (1)...(19): siRNA sense strand
ugaauaaucucggcaauac

SEQ ID NO: 1568112 - RNA, 19 nt, Homo sapiens
  misc_RNA (1)...(19): siRNA sense strand
ccaaacaggcauuaauauu

SEQ ID NO: 1568113 - RNA, 19 nt, Homo sapiens
  misc_RNA (1)...(19): siRNA sense strand
caagaucaacacuccuuua

SEQ ID NO: 1568114 - RNA, 19 nt, Homo sapiens
  misc_RNA (1)...(19): siRNA sense strand
gaagcugaacgaagucuuu

SEQ ID NO: 1568115 - RNA, 19 nt, Homo sapiens
  misc_RNA (1)...(19): siRNA sense strand
ccagcauucuuucuaaauu

SEQ ID NO: 1568116 - RNA, 19 nt, Homo sapiens
  misc_RNA (1)...(19): siRNA sense strand
gaggcauucugaagacuuu

SEQ ID NO: 1568117 - RNA, 19 nt, Homo sapiens
  misc_RNA (1)...(19): siRNA sense strand
gaggaaaugaaugguauua

SEQ ID NO: 1568118 - RNA, 19 nt, Homo sapiens
  misc_RNA (1)...(19): siRNA sense strand
aaggauaucuacagcauga

SEQ ID NO: 1568119 - RNA, 19 nt, Homo sapiens
  misc_RNA (1)...(19): siRNA sense strand
gaacagcuccaggcuaguu

SEQ ID NO: 1568120 - RNA, 19 nt, Homo sapiens
  misc_RNA (1)...(19): siRNA sense strand
gagcaaagcagauuaugag

SEQ ID NO: 1568121 - RNA, 19 nt, Homo sapiens
  misc_RNA (1)...(19): siRNA sense strand
aagaagcucuaaaggauga

SEQ ID NO: 1568122 - RNA, 19 nt, Homo sapiens
  misc_RNA (1)...(19): siRNA sense strand
gggaaacauucaagaaaca

SEQ ID NO: 1568123 - RNA, 19 nt, Homo sapiens
  misc_RNA (1)...(19): siRNA sense strand
caucugaaauugaucaagu

SEQ ID NO: 1568124 - RNA, 19 nt, Homo sapiens
  misc_RNA (1)...(19): siRNA sense strand
cuuggaaugugaaaguuua

SEQ ID NO: 1568125 - RNA, 19 nt, Homo sapiens
  misc_RNA (1)...(19): siRNA sense strand
ccaaggaacaccagucauu

SEQ ID NO: 1568126 - RNA, 19 nt, Homo sapiens
  misc_RNA (1)...(19): siRNA sense strand
gcagcacagucuucaccua

SEQ ID NO: 1568127 - RNA, 19 nt, Homo sapiens
  misc_RNA (1)...(19): siRNA sense strand
gaaaugaagacccugagau

SEQ ID NO: 1568128 - RNA, 19 nt, Homo sapiens
  misc_RNA (1)...(19): siRNA sense strand
caaaggugaagaacaaauu

SEQ ID NO: 1568129 - RNA, 19 nt, Homo sapiens
  misc_RNA (1)...(19): siRNA sense strand
gguuaaagucugcaacuaa

SEQ ID NO: 1568130 - RNA, 19 nt, Homo sapiens
  misc_RNA (1)...(19): siRNA sense strand
gcacaggaaguauuacaau

SEQ ID NO: 1568131 - RNA, 19 nt, Homo sapiens
  misc_RNA (1)...(19): siRNA sense strand
gguauuaacagcauagaga

SEQ ID NO: 1568132 - RNA, 19 nt, Homo sapiens
  misc_RNA (1)...(19): siRNA sense strand
caacaaagccucuaauccu

SEQ ID NO: 1568133 - RNA, 19 nt, Homo sapiens
  misc_RNA (1)...(19): siRNA sense strand
agagguagcccuucaaaga

SEQ ID NO: 1568134 - RNA, 19 nt, Homo sapiens
  misc_RNA (1)...(19): siRNA sense strand
agaggagaguucugaaauu

SEQ ID NO: 1568135 - RNA, 19 nt, Homo sapiens
  misc_RNA (1)...(19): siRNA sense strand
ccuauaaacugugagaaga

SEQ ID NO: 1568136 - RNA, 19 nt, Homo sapiens
  misc_RNA (1)...(19): siRNA sense strand
ugucauaccuagugaaagu

SEQ ID NO: 1568137 - RNA, 19 nt, Homo sapiens
  misc_RNA (1)...(19): siRNA sense strand
gagguagcccuucaaagaa

SEQ ID NO: 1568138 - RNA, 19 nt, Homo sapiens
  misc_RNA (1)...(19): siRNA sense strand
caacccagcauucuuucua

SEQ ID NO: 1568139 - RNA, 19 nt, Homo sapiens
  misc_RNA (1)...(19): siRNA sense strand
ucugaagacuuuaaagaga

SEQ ID NO: 1568140 - RNA, 19 nt, Homo sapiens
  misc_RNA (1)...(19): siRNA sense strand
gaaagugauaacacaacua

SEQ ID NO: 1568141 - RNA, 19 nt, Homo sapiens
  misc_RNA (1)...(19): siRNA sense strand
ccucuuaaauugucacuag

SEQ ID NO: 1568142 - RNA, 19 nt, Homo sapiens
  misc_RNA (1)...(19): siRNA sense strand
gaaaacugccaucauuaua

SEQ ID NO: 1568143 - RNA, 19 nt, Homo sapiens
  misc_RNA (1)...(19): siRNA sense strand
gaaaacuuguuaccauuug

SEQ ID NO: 1568144 - RNA, 19 nt, Homo sapiens
  misc_RNA (1)...(19): siRNA sense strand
uguagaagcuauuggacuu

SEQ ID NO: 1568145 - RNA, 19 nt, Homo sapiens
  misc_RNA (1)...(19): siRNA sense strand
gauaacacaacuaaugguu

SEQ ID NO: 1568146 - RNA, 19 nt, Homo sapiens
  misc_RNA (1)...(19): siRNA sense strand
guuaaagucugcaacuaag

SEQ ID NO: 1568147 - RNA, 19 nt, Homo sapiens
  misc_RNA (1)...(19): siRNA sense strand
gaaugguauuaacagcaua

SEQ ID NO: 1568148 - RNA, 19 nt, Homo sapiens
  misc_RNA (1)...(19): siRNA sense strand
gaaauugcaaagaagauuc

SEQ ID NO: 1568149 - RNA, 19 nt, Homo sapiens
  misc_RNA (1)...(19): siRNA sense strand
ggaaauugcaaagaagauu

SEQ ID NO: 1568150 - RNA, 19 nt, Homo sapiens
  misc_RNA (1)...(19): siRNA sense strand
gagaaaacuuguuaccauu

SEQ ID NO: 1568151 - RNA, 19 nt, Homo sapiens
  misc_RNA (1)...(19): siRNA sense strand
ggaguuugauuguuauggu

SEQ ID NO: 1568152 - RNA, 19 nt, Homo sapiens
  misc_RNA (1)...(19): siRNA sense strand
gauuguaggagaagauaaa

SEQ ID NO: 1568153 - RNA, 19 nt, Homo sapiens
  misc_RNA (1)...(19): siRNA sense strand
agaaaggauuguaggagaa

SEQ ID NO: 1568154 - RNA, 19 nt, Homo sapiens
  misc_RNA (1)...(19): siRNA sense strand
gugaagaacaaauugguuu

SEQ ID NO: 1568155 - RNA, 19 nt, Homo sapiens
  misc_RNA (1)...(19): siRNA sense strand
aagaggaaaugaaugguau

SEQ ID NO: 1568156 - RNA, 19 nt, Homo sapiens
  misc_RNA (1)...(19): siRNA sense strand
agaaagaagcucuaaagga

SEQ ID NO: 1568157 - RNA, 19 nt, Homo sapiens
  misc_RNA (1)...(19): siRNA sense strand
ggaagaaagaagcucuaaa

SEQ ID NO: 1568158 - RNA, 19 nt, Homo sapiens
  misc_RNA (1)...(19): siRNA sense strand
uagagcaucugaaauugau

SEQ ID NO: 1568159 - RNA, 19 nt, Homo sapiens
  misc_RNA (1)...(19): siRNA sense strand
ccaugaaucugauagaaac

SEQ ID NO: 1568160 - RNA, 19 nt, Homo sapiens
  misc_RNA (1)...(19): siRNA sense strand
agacaucagugugccagua

SEQ ID NO: 1568161 - RNA, 19 nt, Homo sapiens
  misc_RNA (1)...(19): siRNA sense strand
gagacaaacuagaucaaaa

SEQ ID NO: 1568162 - RNA, 19 nt, Homo sapiens
  misc_RNA (1)...(19): siRNA sense strand
ugaaggauaucuacagcau

SEQ ID NO: 1568163 - RNA, 19 nt, Homo sapiens
  misc_RNA (1)...(19): siRNA sense strand
ggaacucaacccuauguau

SEQ ID NO: 1568164 - RNA, 19 nt, Homo sapiens
  misc_RNA (1)...(19): siRNA sense strand
cagccaaggcgacugcuua

SEQ ID NO: 1568165 - RNA, 19 nt, Homo sapiens
  misc_RNA (1)...(19): siRNA sense strand
gaagaaguaugaaacagaa

SEQ ID NO: 1568166 - RNA, 19 nt, Homo sapiens
  misc_RNA (1)...(19): siRNA sense strand
gaaggagggucuuuauuau

SEQ ID NO: 1568167 - RNA, 19 nt, Homo sapiens
  misc_RNA (1)...(19): siRNA sense strand
gaagaaagaaccuaugaaa

SEQ ID NO: 1568168 - RNA, 19 nt, Homo sapiens
  misc_RNA (1)...(19): siRNA sense strand
gaaaugggacgauucagua

SEQ ID NO: 1568169 - RNA, 19 nt, Homo sapiens
  misc_RNA (1)...(19): siRNA sense strand
gaacugauauucuucuucu

SEQ ID NO: 1568170 - RNA, 19 nt, Homo sapiens
  misc_RNA (1)...(19): siRNA sense strand
gaaagaaccuaugaaaucu

SEQ ID NO: 1568171 - RNA, 19 nt, Homo sapiens
  misc_RNA (1)...(19): siRNA sense strand
ugaaggagggucuuuauua

SEQ ID NO: 1568172 - RNA, 19 nt, Homo sapiens
  misc_RNA (1)...(19): siRNA sense strand
guagaagaaugaugaaugu

SEQ ID NO: 1568173 - RNA, 19 nt, Homo sapiens
  misc_RNA (1)...(19): siRNA sense strand
cagaauugcuucauaccua

SEQ ID NO: 1568174 - RNA, 19 nt, Homo sapiens
  misc_RNA (1)...(19): siRNA sense strand
gaacgggaacuauuugguu

SEQ ID NO: 1568175 - RNA, 19 nt, Homo sapiens
  misc_RNA (1)...(19): siRNA sense strand
guaccugcuuugucacaua

SEQ ID NO: 1568176 - RNA, 19 nt, Homo sapiens
  misc_RNA (1)...(19): siRNA sense strand
agaaagaaccuaugaaauc

SEQ ID NO: 1568177 - RNA, 19 nt, Homo sapiens
  misc_RNA (1)...(19): siRNA sense strand
gauauaaggcauuuggauu

SEQ ID NO: 1568178 - RNA, 19 nt, Homo sapiens
  misc_RNA (1)...(19): siRNA sense strand
gaagaagaaguaugaaaca

SEQ ID NO: 1568179 - RNA, 19 nt, Homo sapiens
  misc_RNA (1)...(19): siRNA sense strand
ucaaguuggugaagaaaga

SEQ ID NO: 1568180 - RNA, 19 nt, Homo sapiens
  misc_RNA (1)...(19): siRNA sense strand
caagcuaccucuucauagu

SEQ ID NO: 1568181 - RNA, 19 nt, Homo sapiens
  misc_RNA (1)...(19): siRNA sense strand
gcaucuggaucaauuacaa

SEQ ID NO: 1568182 - RNA, 19 nt, Homo sapiens
  misc_RNA (1)...(19): siRNA sense strand
gagggucuuuauuauauga

SEQ ID NO: 1568183 - RNA, 19 nt, Homo sapiens
  misc_RNA (1)...(19): siRNA sense strand
gagucagaauugcuucaua

SEQ ID NO: 1568184 - RNA, 19 nt, Homo sapiens
  misc_RNA (1)...(19): siRNA sense strand
uuagggauaucuuugguuu

SEQ ID NO: 1568185 - RNA, 19 nt, Homo sapiens
  misc_RNA (1)...(19): siRNA sense strand
ccaauuuacuugucaucuu

SEQ ID NO: 1568186 - RNA, 19 nt, Homo sapiens
  misc_RNA (1)...(19): siRNA sense strand
uaaggcauuuggauuaguu

SEQ ID NO: 1568187 - RNA, 19 nt, Homo sapiens
  misc_RNA (1)...(19): siRNA sense strand
gacaguaccaguaguuauu

SEQ ID NO: 1568188 - RNA, 19 nt, Homo sapiens
  misc_RNA (1)...(19): siRNA sense strand
cuucauaccuacucuucua

SEQ ID NO: 1568189 - RNA, 19 nt, Homo sapiens
  misc_RNA (1)...(19): siRNA sense strand
ccaguggccuuuccuuguu

SEQ ID NO: 1568190 - RNA, 19 nt, Homo sapiens
  misc_RNA (1)...(19): siRNA sense strand
ugaaauaugaguugccuuu

SEQ ID NO: 1568191 - RNA, 19 nt, Homo sapiens
  misc_RNA (1)...(19): siRNA sense strand
gcagaacauuggagcuaug

SEQ ID NO: 1568192 - RNA, 19 nt, Homo sapiens
  misc_RNA (1)...(19): siRNA sense strand
gcauuuggauuaguuggaa

SEQ ID NO: 1568193 - RNA, 19 nt, Homo sapiens
  misc_RNA (1)...(19): siRNA sense strand
aggagggucuuuauuauau

SEQ ID NO: 1568194 - RNA, 19 nt, Homo sapiens
  misc_RNA (1)...(19): siRNA sense strand
gaaaagccauuaugcagau

SEQ ID NO: 1568195 - RNA, 19 nt, Homo sapiens
  misc_RNA (1)...(19): siRNA sense strand
gaagacagcagcagcuaca

SEQ ID NO: 1568196 - RNA, 19 nt, Homo sapiens
  misc_RNA (1)...(19): siRNA sense strand
uaccuacucuucuaucuug

SEQ ID NO: 1568197 - RNA, 19 nt, Homo sapiens
  misc_RNA (1)...(19): siRNA sense strand
uuacgaacauguugaguca

SEQ ID NO: 1568198 - RNA, 19 nt, Homo sapiens
  misc_RNA (1)...(19): siRNA sense strand
gaccgcagccguagaagaa

SEQ ID NO: 1568199 - RNA, 19 nt, Homo sapiens
  misc_RNA (1)...(19): siRNA sense strand
caacagcgacuucaacuac

SEQ ID NO: 1568200 - RNA, 19 nt, Homo sapiens
  misc_RNA (1)...(19): siRNA sense strand
gcauuuaccaauuuacuug

SEQ ID NO: 1568201 - RNA, 19 nt, Homo sapiens
  misc_RNA (1)...(19): siRNA sense strand
acaauaaacaccaccuuaa

SEQ ID NO: 1568202 - RNA, 19 nt, Homo sapiens
  misc_RNA (1)...(19): siRNA sense strand
ggaagaagaaguaugaaac

SEQ ID NO: 1568203 - RNA, 19 nt, Homo sapiens
  misc_RNA (1)...(19): siRNA sense strand
gugucuaucuuggcauuua

SEQ ID NO: 1568204 - RNA, 19 nt, Homo sapiens
  misc_RNA (1)...(19): siRNA sense strand
ccuaugaaaucuguacaaa

SEQ ID NO: 1568205 - RNA, 19 nt, Homo sapiens
  misc_RNA (1)...(19): siRNA sense strand
gaagacugccaaugaagga

SEQ ID NO: 1568206 - RNA, 19 nt, Homo sapiens
  misc_RNA (1)...(19): siRNA sense strand
gauauucuucuucucauug

SEQ ID NO: 1568207 - RNA, 19 nt, Homo sapiens
  misc_RNA (1)...(19): siRNA sense strand
ggaagcauggccuugauug

SEQ ID NO: 1568208 - RNA, 19 nt, Homo sapiens
  misc_RNA (1)...(19): siRNA sense strand
ggagggucuuuauuauaug

SEQ ID NO: 1568209 - RNA, 19 nt, Homo sapiens
  misc_RNA (1)...(19): siRNA sense strand
gcuuuguucuuccuguuaa

SEQ ID NO: 1568210 - RNA, 19 nt, Homo sapiens
  misc_RNA (1)...(19): siRNA sense strand
ggauauaccaguggccuuu

SEQ ID NO: 1568211 - RNA, 19 nt, Homo sapiens
  misc_RNA (1)...(19): siRNA sense strand
gggaagaagaaguaugaaa

SEQ ID NO: 1568212 - RNA, 19 nt, Homo sapiens
  misc_RNA (1)...(19): siRNA sense strand
ggccuuuccuuguugugua

SEQ ID NO: 1568213 - RNA, 19 nt, Homo sapiens
  misc_RNA (1)...(19): siRNA sense strand
uguaugguguucuuucuga

SEQ ID NO: 1568214 - RNA, 19 nt, Homo sapiens
  misc_RNA (1)...(19): siRNA sense strand
gcagauguagauccugaaa

SEQ ID NO: 1568215 - RNA, 19 nt, Homo sapiens
  misc_RNA (1)...(19): siRNA sense strand
augaauguguccaagauuu

SEQ ID NO: 1568216 - RNA, 19 nt, Homo sapiens
  misc_RNA (1)...(19): siRNA sense strand
caauuacaaugcagaacau

SEQ ID NO: 1568217 - RNA, 19 nt, Homo sapiens
  misc_RNA (1)...(19): siRNA sense strand
gaacaauugggauauaagg

SEQ ID NO: 1568218 - RNA, 19 nt, Homo sapiens
  misc_RNA (1)...(19): siRNA sense strand
caaugaaggagggucuuua

SEQ ID NO: 1568219 - RNA, 19 nt, Homo sapiens
  misc_RNA (1)...(19): siRNA sense strand
gugaagaaagaaccuauga

SEQ ID NO: 1568220 - RNA, 19 nt, Homo sapiens
  misc_RNA (1)...(19): siRNA sense strand
gaacauguugagucagaau

SEQ ID NO: 1568221 - RNA, 19 nt, Homo sapiens
  misc_RNA (1)...(19): siRNA sense strand
ugaugaauguguccaagau

SEQ ID NO: 1568222 - RNA, 19 nt, Homo sapiens
  misc_RNA (1)...(19): siRNA sense strand
cuuugucgcuguuuagaaa

SEQ ID NO: 1568223 - RNA, 19 nt, Homo sapiens
  misc_RNA (1)...(19): siRNA sense strand
agcauggccuugauuguuu

SEQ ID NO: 1568224 - RNA, 19 nt, Homo sapiens
  misc_RNA (1)...(19): siRNA sense strand
gccaacagcucuuguaccu

SEQ ID NO: 1568225 - RNA, 19 nt, Homo sapiens
  misc_RNA (1)...(19): siRNA sense strand
ugcagcaucuggaucaauu

SEQ ID NO: 1568226 - RNA, 19 nt, Homo sapiens
  misc_RNA (1)...(19): siRNA sense strand
ccaauccggaguucuguaa

SEQ ID NO: 1568227 - RNA, 19 nt, Homo sapiens
  misc_RNA (1)...(19): siRNA sense strand
gaaauaugaguugccuuug

SEQ ID NO: 1568228 - RNA, 19 nt, Homo sapiens
  misc_RNA (1)...(19): siRNA sense strand
gucaagcuaccucuucaua

SEQ ID NO: 1568229 - RNA, 19 nt, Homo sapiens
  misc_RNA (1)...(19): siRNA sense strand
ggaaugucaguauuuaauc

SEQ ID NO: 1568230 - RNA, 19 nt, Homo sapiens
  misc_RNA (1)...(19): siRNA sense strand
gacagcagcagcuacaguu

SEQ ID NO: 1568231 - RNA, 19 nt, Homo sapiens
  misc_RNA (1)...(19): siRNA sense strand
uaccugcuuugucacauaa

SEQ ID NO: 1568232 - RNA, 19 nt, Homo sapiens
  misc_RNA (1)...(19): siRNA sense strand
augggacgauucaguauuu

SEQ ID NO: 1568233 - RNA, 19 nt, Homo sapiens
  misc_RNA (1)...(19): siRNA sense strand
uggauuaguuggaaagcuu

SEQ ID NO: 1568234 - RNA, 19 nt, Homo sapiens
  misc_RNA (1)...(19): siRNA sense strand
ggauauaaggcauuuggau

SEQ ID NO: 1568235 - RNA, 19 nt, Homo sapiens
  misc_RNA (1)...(19): siRNA sense strand
aaggagggucuuuauuaua

SEQ ID NO: 1568236 - RNA, 19 nt, Homo sapiens
  misc_RNA (1)...(19): siRNA sense strand
gucauagucucauuacagu

SEQ ID NO: 1568237 - RNA, 19 nt, Homo sapiens
  misc_RNA (1)...(19): siRNA sense strand
aacaauaaacaccaccuua

SEQ ID NO: 1568238 - RNA, 19 nt, Homo sapiens
  misc_RNA (1)...(19): siRNA sense strand
uauaaggcauuuggauuag

SEQ ID NO: 1568239 - RNA, 19 nt, Homo sapiens
  misc_RNA (1)...(19): siRNA sense strand
cuugggaacugauauucuu

SEQ ID NO: 1568240 - RNA, 19 nt, Homo sapiens
  misc_RNA (1)...(19): siRNA sense strand
gaaagaccgcagccguaga

SEQ ID NO: 1568241 - RNA, 19 nt, Homo sapiens
  misc_RNA (1)...(19): siRNA sense strand
uaucugaacgggaacuauu

SEQ ID NO: 1568242 - RNA, 19 nt, Homo sapiens
  misc_RNA (1)...(19): siRNA sense strand
gaucaauuacaaugcagaa

SEQ ID NO: 1568243 - RNA, 19 nt, Homo sapiens
  misc_RNA (1)...(19): siRNA sense strand
gcagcaucuggaucaauua

SEQ ID NO: 1568244 - RNA, 19 nt, Homo sapiens
  misc_RNA (1)...(19): siRNA sense strand
uuugaagacugccaaugaa

SEQ ID NO: 1568245 - RNA, 19 nt, Homo sapiens
  misc_RNA (1)...(19): siRNA sense strand
gaaccuaugaaaucuguac

SEQ ID NO: 1568246 - RNA, 19 nt, Homo sapiens
  misc_RNA (1)...(19): siRNA sense strand
aagaaccuaugaaaucugu

SEQ ID NO: 1568247 - RNA, 19 nt, Homo sapiens
  misc_RNA (1)...(19): siRNA sense strand
cagcuucuauguugauuuu

SEQ ID NO: 1568248 - RNA, 19 nt, Homo sapiens
  misc_RNA (1)...(19): siRNA sense strand
uuacuugaaucgaauuugg

SEQ ID NO: 1568249 - RNA, 19 nt, Homo sapiens
  misc_RNA (1)...(19): siRNA sense strand
acgaacauguugagucaga

SEQ ID NO: 1568250 - RNA, 19 nt, Homo sapiens
  misc_RNA (1)...(19): siRNA sense strand
aaagaccgcagccguagaa

SEQ ID NO: 1568251 - RNA, 19 nt, Homo sapiens
  misc_RNA (1)...(19): siRNA sense strand
uugcagaccucacuauuuu

SEQ ID NO: 1568252 - RNA, 19 nt, Homo sapiens
  misc_RNA (1)...(19): siRNA sense strand
aaauaugaguugccuuugg

SEQ ID NO: 1568253 - RNA, 19 nt, Homo sapiens
  misc_RNA (1)...(19): siRNA sense strand
gguggucauucuuccuuug

SEQ ID NO: 1568254 - RNA, 19 nt, Homo sapiens
  misc_RNA (1)...(19): siRNA sense strand
gggaacugauauucuucuu

SEQ ID NO: 1568255 - RNA, 19 nt, Homo sapiens
  misc_RNA (1)...(19): siRNA sense strand
ucuuguaccugcuuuguca

SEQ ID NO: 1568256 - RNA, 19 nt, Homo sapiens
  misc_RNA (1)...(19): siRNA sense strand
agaagaaguaugaaacaga

SEQ ID NO: 1568257 - RNA, 19 nt, Homo sapiens
  misc_RNA (1)...(19): siRNA sense strand
gaagcauggccuugauugu

SEQ ID NO: 1568258 - RNA, 19 nt, Homo sapiens
  misc_RNA (1)...(19): siRNA sense strand
gaauuucauccagguacua

SEQ ID NO: 1568259 - RNA, 19 nt, Homo sapiens
  misc_RNA (1)...(19): siRNA sense strand
uauaucaaguuggugaaga

SEQ ID NO: 1568260 - RNA, 19 nt, Homo sapiens
  misc_RNA (1)...(19): siRNA sense strand
cgaaaugggacgauucagu

SEQ ID NO: 1568261 - RNA, 19 nt, Homo sapiens
  misc_RNA (1)...(19): siRNA sense strand
cguagaagaaugaugaaug

SEQ ID NO: 1568262 - RNA, 19 nt, Homo sapiens
  misc_RNA (1)...(19): siRNA sense strand
gaugaauguguccaagauu

SEQ ID NO: 1568263 - RNA, 19 nt, Homo sapiens
  misc_RNA (1)...(19): siRNA sense strand
gggcuuuguucuuccuguu

SEQ ID NO: 1568264 - RNA, 19 nt, Homo sapiens
  misc_RNA (1)...(19): siRNA sense strand
agggauaucuuugguuuua

SEQ ID NO: 1568265 - RNA, 19 nt, Homo sapiens
  misc_RNA (1)...(19): siRNA sense strand
gaaggaugcucuuagauau

SEQ ID NO: 1568266 - RNA, 19 nt, Homo sapiens
  misc_RNA (1)...(19): siRNA sense strand
ggaaggaugcucuuagaua

SEQ ID NO: 1568267 - RNA, 19 nt, Homo sapiens
  misc_RNA (1)...(19): siRNA sense strand
gcacaauauuccucaguaa

SEQ ID NO: 1568268 - RNA, 19 nt, Homo sapiens
  misc_RNA (1)...(19): siRNA sense strand
ggagagggcucacaagcuu

SEQ ID NO: 1568269 - RNA, 19 nt, Homo sapiens
  misc_RNA (1)...(19): siRNA sense strand
caaccaaaccucaaguaua

SEQ ID NO: 1568270 - RNA, 19 nt, Homo sapiens
  misc_RNA (1)...(19): siRNA sense strand
ggaauucaauccuucagau

SEQ ID NO: 1568271 - RNA, 19 nt, Homo sapiens
  misc_RNA (1)...(19): siRNA sense strand
ggacaaauagcaaggaaau

SEQ ID NO: 1568272 - RNA, 19 nt, Homo sapiens
  misc_RNA (1)...(19): siRNA sense strand
guacaaggaccuaagaaga

SEQ ID NO: 1568273 - RNA, 19 nt, Homo sapiens
  misc_RNA (1)...(19): siRNA sense strand
gagcgacaguuucuugaau

SEQ ID NO: 1568274 - RNA, 19 nt, Homo sapiens
  misc_RNA (1)...(19): siRNA sense strand
aaccaaaccucaaguauac

SEQ ID NO: 1568275 - RNA, 19 nt, Homo sapiens
  misc_RNA (1)...(19): siRNA sense strand
cagagcagaagcagauuua

SEQ ID NO: 1568276 - RNA, 19 nt, Homo sapiens
  misc_RNA (1)...(19): siRNA sense strand
gccaccagauuaugacaaa

SEQ ID NO: 1568277 - RNA, 19 nt, Homo sapiens
  misc_RNA (1)...(19): siRNA sense strand
uaacauacgcagagauaga

SEQ ID NO: 1568278 - RNA, 19 nt, Homo sapiens
  misc_RNA (1)...(19): siRNA sense strand
aggaugcucuuagauauuu

SEQ ID NO: 1568279 - RNA, 19 nt, Homo sapiens
  misc_RNA (1)...(19): siRNA sense strand
gcgacaguuucuugaauug

SEQ ID NO: 1568280 - RNA, 19 nt, Homo sapiens
  misc_RNA (1)...(19): siRNA sense strand
ugaccaggcuguauggaau

SEQ ID NO: 1568281 - RNA, 19 nt, Homo sapiens
  misc_RNA (1)...(19): siRNA sense strand
caauauuccucaguaaauc

SEQ ID NO: 1568282 - RNA, 19 nt, Homo sapiens
  misc_RNA (1)...(19): siRNA sense strand
ccgaagugccaccagauua

SEQ ID NO: 1568283 - RNA, 19 nt, Homo sapiens
  misc_RNA (1)...(19): siRNA sense strand
gugucgcucuugcaauaua

SEQ ID NO: 1568284 - RNA, 19 nt, Homo sapiens
  misc_RNA (1)...(19): siRNA sense strand
gcgaacaaccugagcuuuc

SEQ ID NO: 1568285 - RNA, 19 nt, Homo sapiens
  misc_RNA (1)...(19): siRNA sense strand
gcacagucagucaaccaaa

SEQ ID NO: 1568286 - RNA, 19 nt, Homo sapiens
  misc_RNA (1)...(19): siRNA sense strand
gugucuaugccaaguauua

SEQ ID NO: 1568287 - RNA, 19 nt, Homo sapiens
  misc_RNA (1)...(19): siRNA sense strand
cgaagugccaccagauuau

SEQ ID NO: 1568288 - RNA, 19 nt, Homo sapiens
  misc_RNA (1)...(19): siRNA sense strand
gaacauggaauucaauccu

SEQ ID NO: 1568289 - RNA, 19 nt, Homo sapiens
  misc_RNA (1)...(19): siRNA sense strand
caggacaaauagcaaggaa

SEQ ID NO: 1568290 - RNA, 19 nt, Homo sapiens
  misc_RNA (1)...(19): siRNA sense strand
ggacaaguacaaggaccua

SEQ ID NO: 1568291 - RNA, 19 nt, Homo sapiens
  misc_RNA (1)...(19): siRNA sense strand
gcagggagagggcucacaa

SEQ ID NO: 1568292 - RNA, 19 nt, Homo sapiens
  misc_RNA (1)...(19): siRNA sense strand
cgagcuagagcgacaguuu

SEQ ID NO: 1568293 - RNA, 19 nt, Homo sapiens
  misc_RNA (1)...(19): siRNA sense strand
uauggaauguggauuacug

SEQ ID NO: 1568294 - RNA, 19 nt, Homo sapiens
  misc_RNA (1)...(19): siRNA sense strand
aaacagggacccagaugga

SEQ ID NO: 1568295 - RNA, 19 nt, Homo sapiens
  misc_RNA (1)...(19): siRNA sense strand
caaguacaaggaccuaaga

SEQ ID NO: 1568296 - RNA, 19 nt, Homo sapiens
  misc_RNA (1)...(19): siRNA sense strand
gaaaaucuucacccucuuu

SEQ ID NO: 1568297 - RNA, 19 nt, Homo sapiens
  misc_RNA (1)...(19): siRNA sense strand
gaagugccaccagauuaug

SEQ ID NO: 1568298 - RNA, 19 nt, Homo sapiens
  misc_RNA (1)...(19): siRNA sense strand
gacaaauagcaaggaaaua

SEQ ID NO: 1568299 - RNA, 19 nt, Homo sapiens
  misc_RNA (1)...(19): siRNA sense strand
acaaggaccuaagaagauc

SEQ ID NO: 1568300 - RNA, 19 nt, Homo sapiens
  misc_RNA (1)...(19): siRNA sense strand
augugucgcucuugcaaua

SEQ ID NO: 1568301 - RNA, 19 nt, Homo sapiens
  misc_RNA (1)...(19): siRNA sense strand
caaauagcaaggaaauaca

SEQ ID NO: 1568302 - RNA, 19 nt, Homo sapiens
  misc_RNA (1)...(19): siRNA sense strand
cacaauauuccucaguaaa

SEQ ID NO: 1568303 - RNA, 19 nt, Homo sapiens
  misc_RNA (1)...(19): siRNA sense strand
ccuccaaggugugggauga

SEQ ID NO: 1568304 - RNA, 19 nt, Homo sapiens
  misc_RNA (1)...(19): siRNA sense strand
uuuaacauacgcagagaua

SEQ ID NO: 1568305 - RNA, 19 nt, Homo sapiens
  misc_RNA (1)...(19): siRNA sense strand
gauggaaggaugcucuuag

SEQ ID NO: 1568306 - RNA, 19 nt, Homo sapiens
  misc_RNA (1)...(19): siRNA sense strand
cagugucuaugccaaguau

SEQ ID NO: 1568307 - RNA, 19 nt, Homo sapiens
  misc_RNA (1)...(19): siRNA sense strand
acaaauagcaaggaaauac

SEQ ID NO: 1568308 - RNA, 19 nt, Homo sapiens
  misc_RNA (1)...(19): siRNA sense strand
ccaaaccucaaguauacaa

SEQ ID NO: 1568309 - RNA, 19 nt, Homo sapiens
  misc_RNA (1)...(19): siRNA sense strand
gcgaggacaaguacaagga

SEQ ID NO: 1568310 - RNA, 19 nt, Homo sapiens
  misc_RNA (1)...(19): siRNA sense strand
gggaugaccaggcuguaug

SEQ ID NO: 1568311 - RNA, 19 nt, Homo sapiens
  misc_RNA (1)...(19): siRNA sense strand
gguguaccuugaaagacuu

SEQ ID NO: 1568312 - RNA, 19 nt, Homo sapiens
  misc_RNA (1)...(19): siRNA sense strand
agcacaauauuccucagua

SEQ ID NO: 1568313 - RNA, 19 nt, Homo sapiens
  misc_RNA (1)...(19): siRNA sense strand
cuagagcgacaguuucuug

SEQ ID NO: 1568314 - RNA, 19 nt, Homo sapiens
  misc_RNA (1)...(19): siRNA sense strand
gagcuagagcgacaguuuc

SEQ ID NO: 1568315 - RNA, 19 nt, Homo sapiens
  misc_RNA (1)...(19): siRNA sense strand
gaauucaauccuucagauc

SEQ ID NO: 1568316 - RNA, 19 nt, Homo sapiens
  misc_RNA (1)...(19): siRNA sense strand
cagauuaugacaaacacaa

SEQ ID NO: 1568317 - RNA, 19 nt, Homo sapiens
  misc_RNA (1)...(19): siRNA sense strand
uacaaggaccuaagaagau

SEQ ID NO: 1568318 - RNA, 19 nt, Homo sapiens
  misc_RNA (1)...(19): siRNA sense strand
ccagagcagaagcagauuu

SEQ ID NO: 1568319 - RNA, 19 nt, Homo sapiens
  misc_RNA (1)...(19): siRNA sense strand
gacaguuucuugaauugcu

SEQ ID NO: 1568320 - RNA, 19 nt, Homo sapiens
  misc_RNA (1)...(19): siRNA sense strand
uaagaagauccgcgaggaa

SEQ ID NO: 1568321 - RNA, 19 nt, Homo sapiens
  misc_RNA (1)...(19): siRNA sense strand
ucaaccaaaccucaaguau

SEQ ID NO: 1568322 - RNA, 19 nt, Homo sapiens
  misc_RNA (1)...(19): siRNA sense strand
ucaauguuccuuccagugu

SEQ ID NO: 1568323 - RNA, 19 nt, Homo sapiens
  misc_RNA (1)...(19): siRNA sense strand
aauuaaaugugucgcucuu

SEQ ID NO: 1568324 - RNA, 19 nt, Homo sapiens
  misc_RNA (1)...(19): siRNA sense strand
cuguauggaauguggauua

SEQ ID NO: 1568325 - RNA, 19 nt, Homo sapiens
  misc_RNA (1)...(19): siRNA sense strand
agcgacaguuucuugaauu

SEQ ID NO: 1568326 - RNA, 19 nt, Homo sapiens
  misc_RNA (1)...(19): siRNA sense strand
gaauugcugcaguucaaca

SEQ ID NO: 1568327 - RNA, 19 nt, Homo sapiens
  misc_RNA (1)...(19): siRNA sense strand
gcucuugcaauauauuauc

SEQ ID NO: 1568328 - RNA, 19 nt, Homo sapiens
  misc_RNA (1)...(19): siRNA sense strand
gcagauuuaccgguucguu

SEQ ID NO: 1568329 - RNA, 19 nt, Homo sapiens
  misc_RNA (1)...(19): siRNA sense strand
auggaaggaugcucuuaga

SEQ ID NO: 1568330 - RNA, 19 nt, Homo sapiens
  misc_RNA (1)...(19): siRNA sense strand
aacauggaauucaauccuu

SEQ ID NO: 1568331 - RNA, 19 nt, Homo sapiens
  misc_RNA (1)...(19): siRNA sense strand
gccagauccugaaagacau

SEQ ID NO: 1568332 - RNA, 19 nt, Homo sapiens
  misc_RNA (1)...(19): siRNA sense strand
ccucgggccagcacaauau

SEQ ID NO: 1568333 - RNA, 19 nt, Homo sapiens
  misc_RNA (1)...(19): siRNA sense strand
uagcaaggaaauacaguuc

SEQ ID NO: 1568334 - RNA, 19 nt, Homo sapiens
  misc_RNA (1)...(19): siRNA sense strand
cgaacaaccugagcuuucc

SEQ ID NO: 1568335 - RNA, 19 nt, Homo sapiens
  misc_RNA (1)...(19): siRNA sense strand
ggaagcggauuguuuuagg

SEQ ID NO: 1568336 - RNA, 19 nt, Homo sapiens
  misc_RNA (1)...(19): siRNA sense strand
ugccagauccugaaagaca

SEQ ID NO: 1568337 - RNA, 19 nt, Homo sapiens
  misc_RNA (1)...(19): siRNA sense strand
acugccagauccugaaaga

SEQ ID NO: 1568338 - RNA, 19 nt, Homo sapiens
  misc_RNA (1)...(19): siRNA sense strand
gucaaccaaaccucaagua

SEQ ID NO: 1568339 - RNA, 19 nt, Homo sapiens
  misc_RNA (1)...(19): siRNA sense strand
gcucagccagugcagacaa

SEQ ID NO: 1568340 - RNA, 19 nt, Homo sapiens
  misc_RNA (1)...(19): siRNA sense strand
uugcugcaguucaacauca

SEQ ID NO: 1568341 - RNA, 19 nt, Homo sapiens
  misc_RNA (1)...(19): siRNA sense strand
caacuggaagcggauuguu

SEQ ID NO: 1568342 - RNA, 19 nt, Homo sapiens
  misc_RNA (1)...(19): siRNA sense strand
caccagauuaugacaaaca

SEQ ID NO: 1568343 - RNA, 19 nt, Homo sapiens
  misc_RNA (1)...(19): siRNA sense strand
gaccaggcuguauggaaug

SEQ ID NO: 1568344 - RNA, 19 nt, Homo sapiens
  misc_RNA (1)...(19): siRNA sense strand
gaaggaugcucuuagauau

SEQ ID NO: 1568345 - RNA, 19 nt, Homo sapiens
  misc_RNA (1)...(19): siRNA sense strand
ggaaggaugcucuuagaua

SEQ ID NO: 1568346 - RNA, 19 nt, Homo sapiens
  misc_RNA (1)...(19): siRNA sense strand
gcacaauauuccucaguaa

SEQ ID NO: 1568347 - RNA, 19 nt, Homo sapiens
  misc_RNA (1)...(19): siRNA sense strand
ggagagggcucacaagcuu

SEQ ID NO: 1568348 - RNA, 19 nt, Homo sapiens
  misc_RNA (1)...(19): siRNA sense strand
caaccaaaccucaaguaua

SEQ ID NO: 1568349 - RNA, 19 nt, Homo sapiens
  misc_RNA (1)...(19): siRNA sense strand
ggaauucaauccuucagau

SEQ ID NO: 1568350 - RNA, 19 nt, Homo sapiens
  misc_RNA (1)...(19): siRNA sense strand
ggacaaauagcaaggaaau

SEQ ID NO: 1568351 - RNA, 19 nt, Homo sapiens
  misc_RNA (1)...(19): siRNA sense strand
guacaaggaccuaagaaga

SEQ ID NO: 1568352 - RNA, 19 nt, Homo sapiens
  misc_RNA (1)...(19): siRNA sense strand
gagcgacaguuucuugaau

SEQ ID NO: 1568353 - RNA, 19 nt, Homo sapiens
  misc_RNA (1)...(19): siRNA sense strand
aaccaaaccucaaguauac

SEQ ID NO: 1568354 - RNA, 19 nt, Homo sapiens
  misc_RNA (1)...(19): siRNA sense strand
cagagcagaagcagauuua

SEQ ID NO: 1568355 - RNA, 19 nt, Homo sapiens
  misc_RNA (1)...(19): siRNA sense strand
gccaccagauuaugacaaa

SEQ ID NO: 1568356 - RNA, 19 nt, Homo sapiens
  misc_RNA (1)...(19): siRNA sense strand
uaacauacgcagagauaga

SEQ ID NO: 1568357 - RNA, 19 nt, Homo sapiens
  misc_RNA (1)...(19): siRNA sense strand
aggaugcucuuagauauuu

SEQ ID NO: 1568358 - RNA, 19 nt, Homo sapiens
  misc_RNA (1)...(19): siRNA sense strand
gcgacaguuucuugaauug

SEQ ID NO: 1568359 - RNA, 19 nt, Homo sapiens
  misc_RNA (1)...(19): siRNA sense strand
ugaccaggcuguauggaau

SEQ ID NO: 1568360 - RNA, 19 nt, Homo sapiens
  misc_RNA (1)...(19): siRNA sense strand
caauauuccucaguaaauc

SEQ ID NO: 1568361 - RNA, 19 nt, Homo sapiens
  misc_RNA (1)...(19): siRNA sense strand
ccgaagugccaccagauua

SEQ ID NO: 1568362 - RNA, 19 nt, Homo sapiens
  misc_RNA (1)...(19): siRNA sense strand
gugucgcucuugcaauaua

SEQ ID NO: 1568363 - RNA, 19 nt, Homo sapiens
  misc_RNA (1)...(19): siRNA sense strand
gcgaacaaccugagcuuuc

SEQ ID NO: 1568364 - RNA, 19 nt, Homo sapiens
  misc_RNA (1)...(19): siRNA sense strand
gcacagucagucaaccaaa

SEQ ID NO: 1568365 - RNA, 19 nt, Homo sapiens
  misc_RNA (1)...(19): siRNA sense strand
gugucuaugccaaguauua

SEQ ID NO: 1568366 - RNA, 19 nt, Homo sapiens
  misc_RNA (1)...(19): siRNA sense strand
cgaagugccaccagauuau

SEQ ID NO: 1568367 - RNA, 19 nt, Homo sapiens
  misc_RNA (1)...(19): siRNA sense strand
caggacaaauagcaaggaa

SEQ ID NO: 1568368 - RNA, 19 nt, Homo sapiens
  misc_RNA (1)...(19): siRNA sense strand
ggacaaguacaaggaccua

SEQ ID NO: 1568369 - RNA, 19 nt, Homo sapiens
  misc_RNA (1)...(19): siRNA sense strand
gcagggagagggcucacaa

SEQ ID NO: 1568370 - RNA, 19 nt, Homo sapiens
  misc_RNA (1)...(19): siRNA sense strand
cgagcuagagcgacaguuu

SEQ ID NO: 1568371 - RNA, 19 nt, Homo sapiens
  misc_RNA (1)...(19): siRNA sense strand
uauggaauguggauuacug

SEQ ID NO: 1568372 - RNA, 19 nt, Homo sapiens
  misc_RNA (1)...(19): siRNA sense strand
aaacagggacccagaugga

SEQ ID NO: 1568373 - RNA, 19 nt, Homo sapiens
  misc_RNA (1)...(19): siRNA sense strand
caaguacaaggaccuaaga

SEQ ID NO: 1568374 - RNA, 19 nt, Homo sapiens
  misc_RNA (1)...(19): siRNA sense strand
gaaaaucuucacccucuuu

SEQ ID NO: 1568375 - RNA, 19 nt, Homo sapiens
  misc_RNA (1)...(19): siRNA sense strand
gaagugccaccagauuaug

SEQ ID NO: 1568376 - RNA, 19 nt, Homo sapiens
  misc_RNA (1)...(19): siRNA sense strand
caaauagcaaggaaauaca

SEQ ID NO: 1568377 - RNA, 19 nt, Homo sapiens
  misc_RNA (1)...(19): siRNA sense strand
acaaggaccuaagaagauc

SEQ ID NO: 1568378 - RNA, 19 nt, Homo sapiens
  misc_RNA (1)...(19): siRNA sense strand
gacaaauagcaaggaaaua

SEQ ID NO: 1568379 - RNA, 19 nt, Homo sapiens
  misc_RNA (1)...(19): siRNA sense strand
augugucgcucuugcaaua

SEQ ID NO: 1568380 - RNA, 19 nt, Homo sapiens
  misc_RNA (1)...(19): siRNA sense strand
cacaauauuccucaguaaa

SEQ ID NO: 1568381 - RNA, 19 nt, Homo sapiens
  misc_RNA (1)...(19): siRNA sense strand
ccuccaaggugugggauga

SEQ ID NO: 1568382 - RNA, 19 nt, Homo sapiens
  misc_RNA (1)...(19): siRNA sense strand
uuuaacauacgcagagaua

SEQ ID NO: 1568383 - RNA, 19 nt, Homo sapiens
  misc_RNA (1)...(19): siRNA sense strand
gauggaaggaugcucuuag

SEQ ID NO: 1568384 - RNA, 19 nt, Homo sapiens
  misc_RNA (1)...(19): siRNA sense strand
acaaauagcaaggaaauac

SEQ ID NO: 1568385 - RNA, 19 nt, Homo sapiens
  misc_RNA (1)...(19): siRNA sense strand
cagugucuaugccaaguau

SEQ ID NO: 1568386 - RNA, 19 nt, Homo sapiens
  misc_RNA (1)...(19): siRNA sense strand
ccaaaccucaaguauacaa

SEQ ID NO: 1568387 - RNA, 19 nt, Homo sapiens
  misc_RNA (1)...(19): siRNA sense strand
gcgaggacaaguacaagga

SEQ ID NO: 1568388 - RNA, 19 nt, Homo sapiens
  misc_RNA (1)...(19): siRNA sense strand
gggaugaccaggcuguaug

SEQ ID NO: 1568389 - RNA, 19 nt, Homo sapiens
  misc_RNA (1)...(19): siRNA sense strand
gaauucaauccuucagauc

SEQ ID NO: 1568390 - RNA, 19 nt, Homo sapiens
  misc_RNA (1)...(19): siRNA sense strand
cuagagcgacaguuucuug

SEQ ID NO: 1568391 - RNA, 19 nt, Homo sapiens
  misc_RNA (1)...(19): siRNA sense strand
gagcuagagcgacaguuuc

SEQ ID NO: 1568392 - RNA, 19 nt, Homo sapiens
  misc_RNA (1)...(19): siRNA sense strand
agcacaauauuccucagua

SEQ ID NO: 1568393 - RNA, 19 nt, Homo sapiens
  misc_RNA (1)...(19): siRNA sense strand
gguguaccuugaaagacuu

SEQ ID NO: 1568394 - RNA, 19 nt, Homo sapiens
  misc_RNA (1)...(19): siRNA sense strand
cagauuaugacaaacacaa

SEQ ID NO: 1568395 - RNA, 19 nt, Homo sapiens
  misc_RNA (1)...(19): siRNA sense strand
uacaaggaccuaagaagau

SEQ ID NO: 1568396 - RNA, 19 nt, Homo sapiens
  misc_RNA (1)...(19): siRNA sense strand
ccagagcagaagcagauuu

SEQ ID NO: 1568397 - RNA, 19 nt, Homo sapiens
  misc_RNA (1)...(19): siRNA sense strand
gacaguuucuugaauugcu

SEQ ID NO: 1568398 - RNA, 19 nt, Homo sapiens
  misc_RNA (1)...(19): siRNA sense strand
uaagaagauccgcgaggaa

SEQ ID NO: 1568399 - RNA, 19 nt, Homo sapiens
  misc_RNA (1)...(19): siRNA sense strand
ucaaccaaaccucaaguau

SEQ ID NO: 1568400 - RNA, 19 nt, Homo sapiens
  misc_RNA (1)...(19): siRNA sense strand
ucaauguuccuuccagugu

SEQ ID NO: 1568401 - RNA, 19 nt, Homo sapiens
  misc_RNA (1)...(19): siRNA sense strand
aauuaaaugugucgcucuu

SEQ ID NO: 1568402 - RNA, 19 nt, Homo sapiens
  misc_RNA (1)...(19): siRNA sense strand
cuguauggaauguggauua

SEQ ID NO: 1568403 - RNA, 19 nt, Homo sapiens
  misc_RNA (1)...(19): siRNA sense strand
agcgacaguuucuugaauu

SEQ ID NO: 1568404 - RNA, 19 nt, Homo sapiens
  misc_RNA (1)...(19): siRNA sense strand
gaauugcugcaguucaaca

SEQ ID NO: 1568405 - RNA, 19 nt, Homo sapiens
  misc_RNA (1)...(19): siRNA sense strand
gcucuugcaauauauuauc

SEQ ID NO: 1568406 - RNA, 19 nt, Homo sapiens
  misc_RNA (1)...(19): siRNA sense strand
gcagauuuaccgguucguu

SEQ ID NO: 1568407 - RNA, 19 nt, Homo sapiens
  misc_RNA (1)...(19): siRNA sense strand
auggaaggaugcucuuaga

SEQ ID NO: 1568408 - RNA, 19 nt, Homo sapiens
  misc_RNA (1)...(19): siRNA sense strand
gccagauccugaaagacau

SEQ ID NO: 1568409 - RNA, 19 nt, Homo sapiens
  misc_RNA (1)...(19): siRNA sense strand
ccucgggccagcacaauau

SEQ ID NO: 1568410 - RNA, 19 nt, Homo sapiens
  misc_RNA (1)...(19): siRNA sense strand
cgaacaaccugagcuuucc

SEQ ID NO: 1568411 - RNA, 19 nt, Homo sapiens
  misc_RNA (1)...(19): siRNA sense strand
uagcaaggaaauacaguuc

SEQ ID NO: 1568412 - RNA, 19 nt, Homo sapiens
  misc_RNA (1)...(19): siRNA sense strand
ggaagcggauuguuuuagg

SEQ ID NO: 1568413 - RNA, 19 nt, Homo sapiens
  misc_RNA (1)...(19): siRNA sense strand
ugccagauccugaaagaca

SEQ ID NO: 1568414 - RNA, 19 nt, Homo sapiens
  misc_RNA (1)...(19): siRNA sense strand
acugccagauccugaaaga

SEQ ID NO: 1568415 - RNA, 19 nt, Homo sapiens
  misc_RNA (1)...(19): siRNA sense strand
caacuggaagcggauuguu

SEQ ID NO: 1568416 - RNA, 19 nt, Homo sapiens
  misc_RNA (1)...(19): siRNA sense strand
gcucagccagugcagacaa

SEQ ID NO: 1568417 - RNA, 19 nt, Homo sapiens
  misc_RNA (1)...(19): siRNA sense strand
gucaaccaaaccucaagua

SEQ ID NO: 1568418 - RNA, 19 nt, Homo sapiens
  misc_RNA (1)...(19): siRNA sense strand
uugcugcaguucaacauca

SEQ ID NO: 1568419 - RNA, 19 nt, Homo sapiens
  misc_RNA (1)...(19): siRNA sense strand
caccagauuaugacaaaca

SEQ ID NO: 1568420 - RNA, 19 nt, Homo sapiens
  misc_RNA (1)...(19): siRNA sense strand
gaccaggcuguauggaaug

SEQ ID NO: 1568421 - RNA, 19 nt, Homo sapiens
  misc_RNA (1)...(19): siRNA sense strand
gaaagaaacugaaagaaca

SEQ ID NO: 1568422 - RNA, 19 nt, Homo sapiens
  misc_RNA (1)...(19): siRNA sense strand
gacaguacuuugagaauua

SEQ ID NO: 1568423 - RNA, 19 nt, Homo sapiens
  misc_RNA (1)...(19): siRNA sense strand
caaaggagauuaagaggaa

SEQ ID NO: 1568424 - RNA, 19 nt, Homo sapiens
  misc_RNA (1)...(19): siRNA sense strand
gaaauaacaagccgagaua

SEQ ID NO: 1568425 - RNA, 19 nt, Homo sapiens
  misc_RNA (1)...(19): siRNA sense strand
ugaaagaacaguugacuua

SEQ ID NO: 1568426 - RNA, 19 nt, Homo sapiens
  misc_RNA (1)...(19): siRNA sense strand
gaaagaaacuacaagugau

SEQ ID NO: 1568427 - RNA, 19 nt, Homo sapiens
  misc_RNA (1)...(19): siRNA sense strand
gaagagaagagacugauuu

SEQ ID NO: 1568428 - RNA, 19 nt, Homo sapiens
  misc_RNA (1)...(19): siRNA sense strand
gaaagggacaggaagguua

SEQ ID NO: 1568429 - RNA, 19 nt, Homo sapiens
  misc_RNA (1)...(19): siRNA sense strand
gcaggaggcugaaauguuc

SEQ ID NO: 1568430 - RNA, 19 nt, Homo sapiens
  misc_RNA (1)...(19): siRNA sense strand
aaacaccucuucucacuaa

SEQ ID NO: 1568431 - RNA, 19 nt, Homo sapiens
  misc_RNA (1)...(19): siRNA sense strand
gcauaucagugccauguaa

SEQ ID NO: 1568432 - RNA, 19 nt, Homo sapiens
  misc_RNA (1)...(19): siRNA sense strand
gagaagagacugauuuaga

SEQ ID NO: 1568433 - RNA, 19 nt, Homo sapiens
  misc_RNA (1)...(19): siRNA sense strand
gaauaccuaugucaagauu

SEQ ID NO: 1568434 - RNA, 19 nt, Homo sapiens
  misc_RNA (1)...(19): siRNA sense strand
cuaaagcaguugcagauaa

SEQ ID NO: 1568435 - RNA, 19 nt, Homo sapiens
  misc_RNA (1)...(19): siRNA sense strand
ucacaacagucuaaguuaa

SEQ ID NO: 1568436 - RNA, 19 nt, Homo sapiens
  misc_RNA (1)...(19): siRNA sense strand
caaaggaaguaauaaagug

SEQ ID NO: 1568437 - RNA, 19 nt, Homo sapiens
  misc_RNA (1)...(19): siRNA sense strand
gagaacaaguagccaugua

SEQ ID NO: 1568438 - RNA, 19 nt, Homo sapiens
  misc_RNA (1)...(19): siRNA sense strand
agaagaggaugaagaauug

SEQ ID NO: 1568439 - RNA, 19 nt, Homo sapiens
  misc_RNA (1)...(19): siRNA sense strand
gugcaccacuggacuauaa

SEQ ID NO: 1568440 - RNA, 19 nt, Homo sapiens
  misc_RNA (1)...(19): siRNA sense strand
aaacuucgcuugcagcuau

SEQ ID NO: 1568441 - RNA, 19 nt, Homo sapiens
  misc_RNA (1)...(19): siRNA sense strand
gaagacagcaugcaagaug

SEQ ID NO: 1568442 - RNA, 19 nt, Homo sapiens
  misc_RNA (1)...(19): siRNA sense strand
ccauguaacugaagaaaug

SEQ ID NO: 1568443 - RNA, 19 nt, Homo sapiens
  misc_RNA (1)...(19): siRNA sense strand
agaagagacugauuuagaa

SEQ ID NO: 1568444 - RNA, 19 nt, Homo sapiens
  misc_RNA (1)...(19): siRNA sense strand
gaacaaagcacagaagaca

SEQ ID NO: 1568445 - RNA, 19 nt, Homo sapiens
  misc_RNA (1)...(19): siRNA sense strand
guaaaccagugcauuguga

SEQ ID NO: 1568446 - RNA, 19 nt, Homo sapiens
  misc_RNA (1)...(19): siRNA sense strand
caacgguaguggcucuuua

SEQ ID NO: 1568447 - RNA, 19 nt, Homo sapiens
  misc_RNA (1)...(19): siRNA sense strand
gaugaucccgacacuauua

SEQ ID NO: 1568448 - RNA, 19 nt, Homo sapiens
  misc_RNA (1)...(19): siRNA sense strand
gugaaacacuguaucaaga

SEQ ID NO: 1568449 - RNA, 19 nt, Homo sapiens
  misc_RNA (1)...(19): siRNA sense strand
cacagaaccuggauuagaa

SEQ ID NO: 1568450 - RNA, 19 nt, Homo sapiens
  misc_RNA (1)...(19): siRNA sense strand
uaaauuccauccagcugua

SEQ ID NO: 1568451 - RNA, 19 nt, Homo sapiens
  misc_RNA (1)...(19): siRNA sense strand
gucaauaugucaagaaaga

SEQ ID NO: 1568452 - RNA, 19 nt, Homo sapiens
  misc_RNA (1)...(19): siRNA sense strand
gcugaccgcucaagagauu

SEQ ID NO: 1568453 - RNA, 19 nt, Homo sapiens
  misc_RNA (1)...(19): siRNA sense strand
caacgaagaugcagcuagu

SEQ ID NO: 1568454 - RNA, 19 nt, Homo sapiens
  misc_RNA (1)...(19): siRNA sense strand
gaagauucauaguacuuug

SEQ ID NO: 1568455 - RNA, 19 nt, Homo sapiens
  misc_RNA (1)...(19): siRNA sense strand
uaagagagcuaguaguuac

SEQ ID NO: 1568456 - RNA, 19 nt, Homo sapiens
  misc_RNA (1)...(19): siRNA sense strand
gaaaguuccagacuguaua

SEQ ID NO: 1568457 - RNA, 19 nt, Homo sapiens
  misc_RNA (1)...(19): siRNA sense strand
ugaaagaaacuacaaguga

SEQ ID NO: 1568458 - RNA, 19 nt, Homo sapiens
  misc_RNA (1)...(19): siRNA sense strand
gaacaaguagccauguauu

SEQ ID NO: 1568459 - RNA, 19 nt, Homo sapiens
  misc_RNA (1)...(19): siRNA sense strand
gggagaagauucauaguac

SEQ ID NO: 1568460 - RNA, 19 nt, Homo sapiens
  misc_RNA (1)...(19): siRNA sense strand
gaaaacaucucaccugaca

SEQ ID NO: 1568461 - RNA, 19 nt, Homo sapiens
  misc_RNA (1)...(19): siRNA sense strand
aaacaaggaaagccaaaua

SEQ ID NO: 1568462 - RNA, 19 nt, Homo sapiens
  misc_RNA (1)...(19): siRNA sense strand
ccacaauggaagaauauua

SEQ ID NO: 1568463 - RNA, 19 nt, Homo sapiens
  misc_RNA (1)...(19): siRNA sense strand
cggaaacuccugagaauaa

SEQ ID NO: 1568464 - RNA, 19 nt, Homo sapiens
  misc_RNA (1)...(19): siRNA sense strand
agaacugccuccugagaua

SEQ ID NO: 1568465 - RNA, 19 nt, Homo sapiens
  misc_RNA (1)...(19): siRNA sense strand
gauaguggacggccuguuu

SEQ ID NO: 1568466 - RNA, 19 nt, Homo sapiens
  misc_RNA (1)...(19): siRNA sense strand
gaccuugucuugggaguuu

SEQ ID NO: 1568467 - RNA, 19 nt, Homo sapiens
  misc_RNA (1)...(19): siRNA sense strand
uaaagcaguugcagauaau

SEQ ID NO: 1568468 - RNA, 19 nt, Homo sapiens
  misc_RNA (1)...(19): siRNA sense strand
aaagaagacuaaagcaguu

SEQ ID NO: 1568469 - RNA, 19 nt, Homo sapiens
  misc_RNA (1)...(19): siRNA sense strand
caaauuaucgggagaagau

SEQ ID NO: 1568470 - RNA, 19 nt, Homo sapiens
  misc_RNA (1)...(19): siRNA sense strand
gaaucgaucagaugaacua

SEQ ID NO: 1568471 - RNA, 19 nt, Homo sapiens
  misc_RNA (1)...(19): siRNA sense strand
caucucaccugacacuauu

SEQ ID NO: 1568472 - RNA, 19 nt, Homo sapiens
  misc_RNA (1)...(19): siRNA sense strand
gggauuaucagcauagaaa

SEQ ID NO: 1568473 - RNA, 19 nt, Homo sapiens
  misc_RNA (1)...(19): siRNA sense strand
gaaauuccuucuggacguu

SEQ ID NO: 1568474 - RNA, 19 nt, Homo sapiens
  misc_RNA (1)...(19): siRNA sense strand
agacacagaaccuggauua

SEQ ID NO: 1568475 - RNA, 19 nt, Homo sapiens
  misc_RNA (1)...(19): siRNA sense strand
gaaggcaaaugagggaaga

SEQ ID NO: 1568476 - RNA, 19 nt, Homo sapiens
  misc_RNA (1)...(19): siRNA sense strand
ggaccaaggacacauaaug

SEQ ID NO: 1568477 - RNA, 19 nt, Homo sapiens
  misc_RNA (1)...(19): siRNA sense strand
gaugguauaguguauguuu

SEQ ID NO: 1568478 - RNA, 19 nt, Homo sapiens
  misc_RNA (1)...(19): siRNA sense strand
ugaaauaagcucaauggaa

SEQ ID NO: 1568479 - RNA, 19 nt, Homo sapiens
  misc_RNA (1)...(19): siRNA sense strand
gaaauggcaaaggagauua

SEQ ID NO: 1568480 - RNA, 19 nt, Homo sapiens
  misc_RNA (1)...(19): siRNA sense strand
guaagagagcuaguaguua

SEQ ID NO: 1568481 - RNA, 19 nt, Homo sapiens
  misc_RNA (1)...(19): siRNA sense strand
gaaccuggauuagaagagu

SEQ ID NO: 1568482 - RNA, 19 nt, Homo sapiens
  misc_RNA (1)...(19): siRNA sense strand
gacggccuguuucaucuua

SEQ ID NO: 1568483 - RNA, 19 nt, Homo sapiens
  misc_RNA (1)...(19): siRNA sense strand
ucaccgaacugauagacuu

SEQ ID NO: 1568484 - RNA, 19 nt, Homo sapiens
  misc_RNA (1)...(19): siRNA sense strand
caaggacacauaauggaua

SEQ ID NO: 1568485 - RNA, 19 nt, Homo sapiens
  misc_RNA (1)...(19): siRNA sense strand
cuaaucauguggcuaguga

SEQ ID NO: 1568486 - RNA, 19 nt, Homo sapiens
  misc_RNA (1)...(19): siRNA sense strand
gaauuuguccacacugaaa

SEQ ID NO: 1568487 - RNA, 19 nt, Homo sapiens
  misc_RNA (1)...(19): siRNA sense strand
caauggaaaugcaaacauc

SEQ ID NO: 1568488 - RNA, 19 nt, Homo sapiens
  misc_RNA (1)...(19): siRNA sense strand
agacuaggcucagaaucua

SEQ ID NO: 1568489 - RNA, 19 nt, Homo sapiens
  misc_RNA (1)...(19): siRNA sense strand
agaaacaggagaacaagua

SEQ ID NO: 1568490 - RNA, 19 nt, Homo sapiens
  misc_RNA (1)...(19): siRNA sense strand
uaagggaauuccaauaagu

SEQ ID NO: 1568491 - RNA, 19 nt, Homo sapiens
  misc_RNA (1)...(19): siRNA sense strand
auacggauauggaaaguug

SEQ ID NO: 1568492 - RNA, 19 nt, Homo sapiens
  misc_RNA (1)...(19): siRNA sense strand
aaacaaacaccucuucuca

SEQ ID NO: 1568493 - RNA, 19 nt, Homo sapiens
  misc_RNA (1)...(19): siRNA sense strand
aaagugagaaggcaaauga

SEQ ID NO: 1568494 - RNA, 19 nt, Homo sapiens
  misc_RNA (1)...(19): siRNA sense strand
uauauuacccaccuacuaa

SEQ ID NO: 1568495 - RNA, 19 nt, Homo sapiens
  misc_RNA (1)...(19): siRNA sense strand
gaugagaguccuaaaguca

SEQ ID NO: 1568496 - RNA, 19 nt, Homo sapiens
  misc_RNA (1)...(19): siRNA sense strand
ugacacaguugaaggugaa

SEQ ID NO: 1568497 - RNA, 19 nt, Homo sapiens
  misc_RNA (1)...(19): siRNA sense strand
ugacuuacuuucccucaga

SEQ ID NO: 1568498 - RNA, 19 nt, Homo sapiens
  misc_RNA (1)...(19): siRNA sense strand
uagaagaggaugaagaauu

SEQ ID NO: 1568499 - RNA, 19 nt, Homo sapiens
  misc_RNA (1)...(19): siRNA sense strand
ggagauucaucccaaugga

SEQ ID NO: 1568500 - RNA, 19 nt, Homo sapiens
  misc_RNA (1)...(19): siRNA sense strand
guuacaggaugcuaugauu

SEQ ID NO: 1568501 - RNA, 19 nt, Homo sapiens
  misc_RNA (1)...(19): siRNA sense strand
guaagaggacugaaaguuc

SEQ ID NO: 1568502 - RNA, 19 nt, Homo sapiens
  misc_RNA (1)...(19): siRNA sense strand
ccacuggacuauaaauaag

SEQ ID NO: 1568503 - RNA, 19 nt, Homo sapiens
  misc_RNA (1)...(19): siRNA sense strand
gcaguuuccucacaacagu

SEQ ID NO: 1568504 - RNA, 19 nt, Homo sapiens
  misc_RNA (1)...(19): siRNA sense strand
ugaugguguucaugaaaua

SEQ ID NO: 1568505 - RNA, 19 nt, Homo sapiens
  misc_RNA (1)...(19): siRNA sense strand
gaacugccuccugagauaa

SEQ ID NO: 1568506 - RNA, 19 nt, Homo sapiens
  misc_RNA (1)...(19): siRNA sense strand
agacaguacuuugagaauu

SEQ ID NO: 1568507 - RNA, 19 nt, Homo sapiens
  misc_RNA (1)...(19): siRNA sense strand
uaaugaagauguugauggu

SEQ ID NO: 1568508 - RNA, 19 nt, Homo sapiens
  misc_RNA (1)...(19): siRNA sense strand
aauguuugcuugaugauga

SEQ ID NO: 1568509 - RNA, 19 nt, Homo sapiens
  misc_RNA (1)...(19): siRNA sense strand
cuaacaaccugaagaagag

SEQ ID NO: 1568510 - RNA, 19 nt, Homo sapiens
  misc_RNA (1)...(19): siRNA sense strand
gguaguggcucuuuaugac

SEQ ID NO: 1568511 - RNA, 19 nt, Homo sapiens
  misc_RNA (1)...(19): siRNA sense strand
cucaagagauucuacauca

SEQ ID NO: 1568512 - RNA, 19 nt, Homo sapiens
  misc_RNA (1)...(19): siRNA sense strand
gagccaauucuucuguaua

SEQ ID NO: 1568513 - RNA, 19 nt, Homo sapiens
  misc_RNA (1)...(19): siRNA sense strand
gagaagauucauaguacuu

SEQ ID NO: 1568514 - RNA, 19 nt, Homo sapiens
  misc_RNA (1)...(19): siRNA sense strand
aauuauggaucuccggaua

SEQ ID NO: 1568515 - RNA, 19 nt, Homo sapiens
  misc_RNA (1)...(19): siRNA sense strand
ugaaggucaucauauguau

SEQ ID NO: 1568516 - RNA, 19 nt, Homo sapiens
  misc_RNA (1)...(19): siRNA sense strand
aagaacaguugacuuacuu

SEQ ID NO: 1568517 - RNA, 19 nt, Homo sapiens
  misc_RNA (1)...(19): siRNA sense strand
cugaagaaauggcaaagga

SEQ ID NO: 1568518 - RNA, 19 nt, Homo sapiens
  misc_RNA (1)...(19): siRNA sense strand
augcaaacaucaacucaaa

SEQ ID NO: 1568519 - RNA, 19 nt, Homo sapiens
  misc_RNA (1)...(19): siRNA sense strand
gaaacacuguaucaagaac

SEQ ID NO: 1568520 - RNA, 19 nt, Homo sapiens
  misc_RNA (1)...(19): siRNA sense strand
caucaaggcucuuuucaga

SEQ ID NO: 1568521 - RNA, 19 nt, Homo sapiens
  misc_RNA (1)...(19): siRNA sense strand
gauagcaucuuauguagug

SEQ ID NO: 1568522 - RNA, 19 nt, Homo sapiens
  misc_RNA (1)...(19): siRNA sense strand
gaagcugucucugcugaua

SEQ ID NO: 1568523 - RNA, 19 nt, Homo sapiens
  misc_RNA (1)...(19): siRNA sense strand
aaacaccaguugugacuuu

SEQ ID NO: 1568524 - RNA, 19 nt, Homo sapiens
  misc_RNA (1)...(19): siRNA sense strand
gauagacuccuuccagaau

SEQ ID NO: 1568525 - RNA, 19 nt, Homo sapiens
  misc_RNA (1)...(19): siRNA sense strand
uagacuccuuccagaauaa

SEQ ID NO: 1568526 - RNA, 19 nt, Homo sapiens
  misc_RNA (1)...(19): siRNA sense strand
ggacagccauccguuucug

SEQ ID NO: 1568527 - RNA, 19 nt, Homo sapiens
  misc_RNA (1)...(19): siRNA sense strand
auagacuccuuccagaaua

SEQ ID NO: 1568528 - RNA, 19 nt, Homo sapiens
  misc_RNA (1)...(19): siRNA sense strand
cauaauauuggaaggauug

SEQ ID NO: 1568529 - RNA, 19 nt, Homo sapiens
  misc_RNA (1)...(19): siRNA sense strand
ggccguuccuguuggauuc

SEQ ID NO: 1568530 - RNA, 19 nt, Homo sapiens
  misc_RNA (1)...(19): siRNA sense strand
gugguggccuuuaugaagu

SEQ ID NO: 1568531 - RNA, 19 nt, Homo sapiens
  misc_RNA (1)...(19): siRNA sense strand
ggugguggccuuuaugaag

SEQ ID NO: 1568532 - RNA, 19 nt, Homo sapiens
  misc_RNA (1)...(19): siRNA sense strand
ggaaggauuggucaucucu

SEQ ID NO: 1568533 - RNA, 19 nt, Homo sapiens
  misc_RNA (1)...(19): siRNA sense strand
aaggauuggucaucucugu

SEQ ID NO: 1568534 - RNA, 19 nt, Homo sapiens
  misc_RNA (1)...(19): siRNA sense strand
ggucauaauauuggaagga

SEQ ID NO: 1568535 - RNA, 19 nt, Homo sapiens
  misc_RNA (1)...(19): siRNA sense strand
gucauaauauuggaaggau

SEQ ID NO: 1568536 - RNA, 19 nt, Homo sapiens
  misc_RNA (1)...(19): siRNA sense strand
ugauagacuccuuccagaa

SEQ ID NO: 1568537 - RNA, 19 nt, Homo sapiens
  misc_RNA (1)...(19): siRNA sense strand
uugcugguguucauuguca

SEQ ID NO: 1568538 - RNA, 19 nt, Homo sapiens
  misc_RNA (1)...(19): siRNA sense strand
uccagugggucaguacuug

SEQ ID NO: 1568539 - RNA, 19 nt, Homo sapiens
  misc_RNA (1)...(19): siRNA sense strand
augauagcaucuuauguag

SEQ ID NO: 1568540 - RNA, 19 nt, Homo sapiens
  misc_RNA (1)...(19): siRNA sense strand
ggaagacagugacaagaaa

SEQ ID NO: 1568541 - RNA, 19 nt, Homo sapiens
  misc_RNA (1)...(19): siRNA sense strand
aagaagagaugaaggauga

SEQ ID NO: 1568542 - RNA, 19 nt, Homo sapiens
  misc_RNA (1)...(19): siRNA sense strand
ggacgccucugacuucgaa

SEQ ID NO: 1568543 - RNA, 19 nt, Homo sapiens
  misc_RNA (1)...(19): siRNA sense strand
gaacaccuaccaagcauug

SEQ ID NO: 1568544 - RNA, 19 nt, Homo sapiens
  misc_RNA (1)...(19): siRNA sense strand
gagaccaccugccucauuc

SEQ ID NO: 1568545 - RNA, 19 nt, Homo sapiens
  misc_RNA (1)...(19): siRNA sense strand
ucaagaggaagccgaguua

SEQ ID NO: 1568546 - RNA, 19 nt, Homo sapiens
  misc_RNA (1)...(19): siRNA sense strand
gcaggccagugccauauca

SEQ ID NO: 1568547 - RNA, 19 nt, Homo sapiens
  misc_RNA (1)...(19): siRNA sense strand
gcuggaacacagagaaaua

SEQ ID NO: 1568548 - RNA, 19 nt, Homo sapiens
  misc_RNA (1)...(19): siRNA sense strand
uaccaagcauugauucuga

SEQ ID NO: 1568549 - RNA, 19 nt, Homo sapiens
  misc_RNA (1)...(19): siRNA sense strand
ggaaaccacaggagaaagu

SEQ ID NO: 1568550 - RNA, 19 nt, Homo sapiens
  misc_RNA (1)...(19): siRNA sense strand
gcaccugggcagacucuuu

SEQ ID NO: 1568551 - RNA, 19 nt, Homo sapiens
  misc_RNA (1)...(19): siRNA sense strand
gaggaaggccgcugaugga

SEQ ID NO: 1568552 - RNA, 19 nt, Homo sapiens
  misc_RNA (1)...(19): siRNA sense strand
gagcggagaguccaugaug

SEQ ID NO: 1568553 - RNA, 19 nt, Homo sapiens
  misc_RNA (1)...(19): siRNA sense strand
gaaaagaagagaugaagga

SEQ ID NO: 1568554 - RNA, 19 nt, Homo sapiens
  misc_RNA (1)...(19): siRNA sense strand
gaacucauucgggagguuu

SEQ ID NO: 1568555 - RNA, 19 nt, Homo sapiens
  misc_RNA (1)...(19): siRNA sense strand
cgaguuagguggccagaac

SEQ ID NO: 1568556 - RNA, 19 nt, Homo sapiens
  misc_RNA (1)...(19): siRNA sense strand
guccaugugucaaucagaa

SEQ ID NO: 1568557 - RNA, 19 nt, Homo sapiens
  misc_RNA (1)...(19): siRNA sense strand
ggagccagagggcaaauug

SEQ ID NO: 1568558 - RNA, 19 nt, Homo sapiens
  misc_RNA (1)...(19): siRNA sense strand
caccugggcagacucuuua

SEQ ID NO: 1568559 - RNA, 19 nt, Homo sapiens
  misc_RNA (1)...(19): siRNA sense strand
caugaugggugcuggagau

SEQ ID NO: 1568560 - RNA, 19 nt, Homo sapiens
  misc_RNA (1)...(19): siRNA sense strand
gaugacagcaagccugaga

SEQ ID NO: 1568561 - RNA, 19 nt, Homo sapiens
  misc_RNA (1)...(19): siRNA sense strand
ucgcagaccugagcacaga

SEQ ID NO: 1568562 - RNA, 19 nt, Homo sapiens
  misc_RNA (1)...(19): siRNA sense strand
gccaagaccaccugucaga

SEQ ID NO: 1568563 - RNA, 19 nt, Homo sapiens
  misc_RNA (1)...(19): siRNA sense strand
gcuccuccgucaaccagaa

SEQ ID NO: 1568564 - RNA, 19 nt, Homo sapiens
  misc_RNA (1)...(19): siRNA sense strand
cgagaccaccugccucauu

SEQ ID NO: 1568565 - RNA, 19 nt, Homo sapiens
  misc_RNA (1)...(19): siRNA sense strand
cagcucacaugccaaugga

SEQ ID NO: 1568566 - RNA, 19 nt, Homo sapiens
  misc_RNA (1)...(19): siRNA sense strand
cgccuuaacuaccggaaga

SEQ ID NO: 1568567 - RNA, 19 nt, Homo sapiens
  misc_RNA (1)...(19): siRNA sense strand
uuaacuaccggaagacaaa

SEQ ID NO: 1568568 - RNA, 19 nt, Homo sapiens
  misc_RNA (1)...(19): siRNA sense strand
acagcaagccugagacaga

SEQ ID NO: 1568569 - RNA, 19 nt, Homo sapiens
  misc_RNA (1)...(19): siRNA sense strand
ccuuuagccuggaaacaau

SEQ ID NO: 1568570 - RNA, 19 nt, Homo sapiens
  misc_RNA (1)...(19): siRNA sense strand
cagccaagaccaccuguca

SEQ ID NO: 1568571 - RNA, 19 nt, Homo sapiens
  misc_RNA (1)...(19): siRNA sense strand
ggaccuggaagcuuucaag

SEQ ID NO: 1568572 - RNA, 19 nt, Homo sapiens
  misc_RNA (1)...(19): siRNA sense strand
accgggaccuggaagcuuu

SEQ ID NO: 1568573 - RNA, 19 nt, Homo sapiens
  misc_RNA (1)...(19): siRNA sense strand
ggacagccagauacaggau

SEQ ID NO: 1568574 - RNA, 19 nt, Homo sapiens
  misc_RNA (1)...(19): siRNA sense strand
gaugggugcuggagauucc

SEQ ID NO: 1568575 - RNA, 19 nt, Homo sapiens
  misc_RNA (1)...(19): siRNA sense strand
gaaggggaagggacucaua

SEQ ID NO: 1568576 - RNA, 19 nt, Homo sapiens
  misc_RNA (1)...(19): siRNA sense strand
caauggagacccuguugca

SEQ ID NO: 1568577 - RNA, 19 nt, Homo sapiens
  misc_RNA (1)...(19): siRNA sense strand
ggaacacagagaaauagca

SEQ ID NO: 1568578 - RNA, 19 nt, Homo sapiens
  misc_RNA (1)...(19): siRNA sense strand
gaaaccacaggagaaagug

SEQ ID NO: 1568579 - RNA, 19 nt, Homo sapiens
  misc_RNA (1)...(19): siRNA sense strand
aggaagacagugacaagaa

SEQ ID NO: 1568580 - RNA, 19 nt, Homo sapiens
  misc_RNA (1)...(19): siRNA sense strand
aagaccaccugucagaaca

SEQ ID NO: 1568581 - RNA, 19 nt, Homo sapiens
  misc_RNA (1)...(19): siRNA sense strand
caagaccaccugucagaac

SEQ ID NO: 1568582 - RNA, 19 nt, Homo sapiens
  misc_RNA (1)...(19): siRNA sense strand
ccaggaagacagugacaag

SEQ ID NO: 1568583 - RNA, 19 nt, Homo sapiens
  misc_RNA (1)...(19): siRNA sense strand
gggcaaauugggaccuguu

SEQ ID NO: 1568584 - RNA, 19 nt, Homo sapiens
  misc_RNA (1)...(19): siRNA sense strand
gaagacagugacaagaaaa

SEQ ID NO: 1568585 - RNA, 19 nt, Homo sapiens
  misc_RNA (1)...(19): siRNA sense strand
gagguuuguuccccaguuu

SEQ ID NO: 1568586 - RNA, 19 nt, Homo sapiens
  misc_RNA (1)...(19): siRNA sense strand
gccaauggagacccuguug

SEQ ID NO: 1568587 - RNA, 19 nt, Homo sapiens
  misc_RNA (1)...(19): siRNA sense strand
ggaacaccuaccaagcauu

SEQ ID NO: 1568588 - RNA, 19 nt, Homo sapiens
  misc_RNA (1)...(19): siRNA sense strand
ggagauuccggucaugcau

SEQ ID NO: 1568589 - RNA, 19 nt, Homo sapiens
  misc_RNA (1)...(19): siRNA sense strand
gccuuuagccuggaaacaa

SEQ ID NO: 1568590 - RNA, 19 nt, Homo sapiens
  misc_RNA (1)...(19): siRNA sense strand
ccuggacgccucugacuuc

SEQ ID NO: 1568591 - RNA, 19 nt, Homo sapiens
  misc_RNA (1)...(19): siRNA sense strand
gaccaccugucagaacaag

SEQ ID NO: 1568592 - RNA, 19 nt, Homo sapiens
  misc_RNA (1)...(19): siRNA sense strand
ccaagaccaccugucagaa

SEQ ID NO: 1568593 - RNA, 19 nt, Homo sapiens
  misc_RNA (1)...(19): siRNA sense strand
gacaaagcugggaggcaaa

SEQ ID NO: 1568594 - RNA, 19 nt, Homo sapiens
  misc_RNA (1)...(19): siRNA sense strand
gugcuggaacacagagaaa

SEQ ID NO: 1568595 - RNA, 19 nt, Homo sapiens
  misc_RNA (1)...(19): siRNA sense strand
gaccuguucccucuacaca

SEQ ID NO: 1568596 - RNA, 19 nt, Homo sapiens
  misc_RNA (1)...(19): siRNA sense strand
ggaaugcgcuggcuacaga

SEQ ID NO: 1568597 - RNA, 19 nt, Homo sapiens
  misc_RNA (1)...(19): siRNA sense strand
ggaagaggauggcuacaga

SEQ ID NO: 1568598 - RNA, 19 nt, Homo sapiens
  misc_RNA (1)...(19): siRNA sense strand
gcaagcagaagaucuauuu

SEQ ID NO: 1568599 - RNA, 19 nt, Homo sapiens
  misc_RNA (1)...(19): siRNA sense strand
gaaagaaauccaggaguua

SEQ ID NO: 1568600 - RNA, 19 nt, Homo sapiens
  misc_RNA (1)...(19): siRNA sense strand
agaaagaaauccaggaguu

SEQ ID NO: 1568601 - RNA, 19 nt, Homo sapiens
  misc_RNA (1)...(19): siRNA sense strand
gcaaggcggugguggugaa

SEQ ID NO: 1568602 - RNA, 19 nt, Homo sapiens
  misc_RNA (1)...(19): siRNA sense strand
ggauagagacggaugaaga

SEQ ID NO: 1568603 - RNA, 19 nt, Homo sapiens
  misc_RNA (1)...(19): siRNA sense strand
agagagagauugaagaaca

SEQ ID NO: 1568604 - RNA, 19 nt, Homo sapiens
  misc_RNA (1)...(19): siRNA sense strand
gagcagguguacagagaga

SEQ ID NO: 1568605 - RNA, 19 nt, Homo sapiens
  misc_RNA (1)...(19): siRNA sense strand
agagcugucugaugcaaua

SEQ ID NO: 1568606 - RNA, 19 nt, Homo sapiens
  misc_RNA (1)...(19): siRNA sense strand
uaaagcagcuaccaaucau

SEQ ID NO: 1568607 - RNA, 19 nt, Homo sapiens
  misc_RNA (1)...(19): siRNA sense strand
acagagagaggcagaagua

SEQ ID NO: 1568608 - RNA, 19 nt, Homo sapiens
  misc_RNA (1)...(19): siRNA sense strand
uagagacggaugaagauua

SEQ ID NO: 1568609 - RNA, 19 nt, Homo sapiens
  misc_RNA (1)...(19): siRNA sense strand
gcaguucuuugaggaaguu

SEQ ID NO: 1568610 - RNA, 19 nt, Homo sapiens
  misc_RNA (1)...(19): siRNA sense strand
gcaacaaggcaagaucaaa

SEQ ID NO: 1568611 - RNA, 19 nt, Homo sapiens
  misc_RNA (1)...(19): siRNA sense strand
gagagagauugaagaacau

SEQ ID NO: 1568612 - RNA, 19 nt, Homo sapiens
  misc_RNA (1)...(19): siRNA sense strand
caacaaggcaagaucaaag

SEQ ID NO: 1568613 - RNA, 19 nt, Homo sapiens
  misc_RNA (1)...(19): siRNA sense strand
aaagaaauccaggaguuaa

SEQ ID NO: 1568614 - RNA, 19 nt, Homo sapiens
  misc_RNA (1)...(19): siRNA sense strand
gaaauccaggaguuaaaga

SEQ ID NO: 1568615 - RNA, 19 nt, Homo sapiens
  misc_RNA (1)...(19): siRNA sense strand
gagugaugcugaccuucaa

SEQ ID NO: 1568616 - RNA, 19 nt, Homo sapiens
  misc_RNA (1)...(19): siRNA sense strand
gauagagacggaugaagau

SEQ ID NO: 1568617 - RNA, 19 nt, Homo sapiens
  misc_RNA (1)...(19): siRNA sense strand
gcagcuaccaaucauguga

SEQ ID NO: 1568618 - RNA, 19 nt, Homo sapiens
  misc_RNA (1)...(19): siRNA sense strand
gagagauugaagaacauua

SEQ ID NO: 1568619 - RNA, 19 nt, Homo sapiens
  misc_RNA (1)...(19): siRNA sense strand
gaucaggaccaguuugaca

SEQ ID NO: 1568620 - RNA, 19 nt, Homo sapiens
  misc_RNA (1)...(19): siRNA sense strand
gagagaggcagaaguacug

SEQ ID NO: 1568621 - RNA, 19 nt, Homo sapiens
  misc_RNA (1)...(19): siRNA sense strand
aagagcagguguacagaga

SEQ ID NO: 1568622 - RNA, 19 nt, Homo sapiens
  misc_RNA (1)...(19): siRNA sense strand
ggaggaagaggaagaggau

SEQ ID NO: 1568623 - RNA, 19 nt, Homo sapiens
  misc_RNA (1)...(19): siRNA sense strand
aaggcaagaucaaagagaa

SEQ ID NO: 1568624 - RNA, 19 nt, Homo sapiens
  misc_RNA (1)...(19): siRNA sense strand
augcaauacuugaaggaua

SEQ ID NO: 1568625 - RNA, 19 nt, Homo sapiens
  misc_RNA (1)...(19): siRNA sense strand
ggugagugaugcugaccuu

SEQ ID NO: 1568626 - RNA, 19 nt, Homo sapiens
  misc_RNA (1)...(19): siRNA sense strand
uguaaggaguggaggaaga

SEQ ID NO: 1568627 - RNA, 19 nt, Homo sapiens
  misc_RNA (1)...(19): siRNA sense strand
gaaagagcagguguacaga

SEQ ID NO: 1568628 - RNA, 19 nt, Homo sapiens
  misc_RNA (1)...(19): siRNA sense strand
acagagagagauugaagaa

SEQ ID NO: 1568629 - RNA, 19 nt, Homo sapiens
  misc_RNA (1)...(19): siRNA sense strand
uuaaagcagcuaccaauca

SEQ ID NO: 1568630 - RNA, 19 nt, Homo sapiens
  misc_RNA (1)...(19): siRNA sense strand
gaagcaguucuuugaggaa

SEQ ID NO: 1568631 - RNA, 19 nt, Homo sapiens
  misc_RNA (1)...(19): siRNA sense strand
agaaagagcagguguacag

SEQ ID NO: 1568632 - RNA, 19 nt, Homo sapiens
  misc_RNA (1)...(19): siRNA sense strand
cauuaaagcagcuaccaau

SEQ ID NO: 1568633 - RNA, 19 nt, Homo sapiens
  misc_RNA (1)...(19): siRNA sense strand
agagacggaugaagauuac

SEQ ID NO: 1568634 - RNA, 19 nt, Homo sapiens
  misc_RNA (1)...(19): siRNA sense strand
uggagcagcuggcgcaaca

SEQ ID NO: 1568635 - RNA, 19 nt, Homo sapiens
  misc_RNA (1)...(19): siRNA sense strand
gcugucugaugcaauacuu

SEQ ID NO: 1568636 - RNA, 19 nt, Homo sapiens
  misc_RNA (1)...(19): siRNA sense strand
gaucaaagagaagauguac

SEQ ID NO: 1568637 - RNA, 19 nt, Homo sapiens
  misc_RNA (1)...(19): siRNA sense strand
agaggcagaaguacuguaa

SEQ ID NO: 1568638 - RNA, 19 nt, Homo sapiens
  misc_RNA (1)...(19): siRNA sense strand
ucaugugacuccagaagag

SEQ ID NO: 1568639 - RNA, 19 nt, Homo sapiens
  misc_RNA (1)...(19): siRNA sense strand
caaggcaagaucaaagaga

SEQ ID NO: 1568640 - RNA, 19 nt, Homo sapiens
  misc_RNA (1)...(19): siRNA sense strand
gcgcaacaaggcaagauca

SEQ ID NO: 1568641 - RNA, 19 nt, Homo sapiens
  misc_RNA (1)...(19): siRNA sense strand
aguuugacauggugaguga

SEQ ID NO: 1568642 - RNA, 19 nt, Homo sapiens
  misc_RNA (1)...(19): siRNA sense strand
ccaagagcaagaagcaguu

SEQ ID NO: 1568643 - RNA, 19 nt, Homo sapiens
  misc_RNA (1)...(19): siRNA sense strand
caagaucaaagagaagaug

SEQ ID NO: 1568644 - RNA, 19 nt, Homo sapiens
  misc_RNA (1)...(19): siRNA sense strand
cuacagagagagauugaag

SEQ ID NO: 1568645 - RNA, 19 nt, Homo sapiens
  misc_RNA (1)...(19): siRNA sense strand
aagaaauccaggaguuaaa

SEQ ID NO: 1568646 - RNA, 19 nt, Homo sapiens
  misc_RNA (1)...(19): siRNA sense strand
ugaggaaguugggauagag

SEQ ID NO: 1568647 - RNA, 19 nt, Homo sapiens
  misc_RNA (1)...(19): siRNA sense strand
gagaggcagaaguacugua

SEQ ID NO: 1568648 - RNA, 19 nt, Homo sapiens
  misc_RNA (1)...(19): siRNA sense strand
ucguggcccucacugcuaa

SEQ ID NO: 1568649 - RNA, 19 nt, Homo sapiens
  misc_RNA (1)...(19): siRNA sense strand
gaggaaguugggauagaga

SEQ ID NO: 1568650 - RNA, 19 nt, Homo sapiens
  misc_RNA (1)...(19): siRNA sense strand
ugcaauacuugaaggauac

SEQ ID NO: 1568651 - RNA, 19 nt, Homo sapiens
  misc_RNA (1)...(19): siRNA sense strand
gauugaagaacauuaaagc

SEQ ID NO: 1568652 - RNA, 19 nt, Homo sapiens
  misc_RNA (1)...(19): siRNA sense strand
uccaggaguuaaagaagga

SEQ ID NO: 1568653 - RNA, 19 nt, Homo sapiens
  misc_RNA (1)...(19): siRNA sense strand
ugagugaugcugaccuuca

SEQ ID NO: 1568654 - RNA, 19 nt, Homo sapiens
  misc_RNA (1)...(19): siRNA sense strand
ggcaagaucaaagagaaga

SEQ ID NO: 1568655 - RNA, 19 nt, Homo sapiens
  misc_RNA (1)...(19): siRNA sense strand
gaccuucaaguccuagaug

SEQ ID NO: 1568656 - RNA, 19 nt, Homo sapiens
  misc_RNA (1)...(19): siRNA sense strand
gagcagcuggcgcaacaag

SEQ ID NO: 1568657 - RNA, 19 nt, Homo sapiens
  misc_RNA (1)...(19): siRNA sense strand
gcaagaucaaagagaagau

SEQ ID NO: 1568658 - RNA, 19 nt, Homo sapiens
  misc_RNA (1)...(19): siRNA sense strand
aggcagaaguacuguaagg

SEQ ID NO: 1568659 - RNA, 19 nt, Homo sapiens
  misc_RNA (1)...(19): siRNA sense strand
cggaucaggaccaguuuga

SEQ ID NO: 1568660 - RNA, 19 nt, Homo sapiens
  misc_RNA (1)...(19): siRNA sense strand
guacagagagaggcagaag

SEQ ID NO: 1568661 - RNA, 19 nt, Homo sapiens
  misc_RNA (1)...(19): siRNA sense strand
aagcagcuaccaaucaugu

SEQ ID NO: 1568662 - RNA, 19 nt, Homo sapiens
  misc_RNA (1)...(19): siRNA sense strand
gaguggaggaagaggaaga

SEQ ID NO: 1568663 - RNA, 19 nt, Homo sapiens
  misc_RNA (1)...(19): siRNA sense strand
aagagaaagagcaggugua

SEQ ID NO: 1568664 - RNA, 19 nt, Homo sapiens
  misc_RNA (1)...(19): siRNA sense strand
agacggaugaagauuacaa

SEQ ID NO: 1568665 - RNA, 19 nt, Homo sapiens
  misc_RNA (1)...(19): siRNA sense strand
aaauccaggaguuaaagaa

SEQ ID NO: 1568666 - RNA, 19 nt, Homo sapiens
  misc_RNA (1)...(19): siRNA sense strand
ggaaugcgcuggcuacaga

SEQ ID NO: 1568667 - RNA, 19 nt, Homo sapiens
  misc_RNA (1)...(19): siRNA sense strand
ggaagaggauggcuacaga

SEQ ID NO: 1568668 - RNA, 19 nt, Homo sapiens
  misc_RNA (1)...(19): siRNA sense strand
gcaagcagaagaucuauuu

SEQ ID NO: 1568669 - RNA, 19 nt, Homo sapiens
  misc_RNA (1)...(19): siRNA sense strand
gaaagaaauccaggaguua

SEQ ID NO: 1568670 - RNA, 19 nt, Homo sapiens
  misc_RNA (1)...(19): siRNA sense strand
agaaagaaauccaggaguu

SEQ ID NO: 1568671 - RNA, 19 nt, Homo sapiens
  misc_RNA (1)...(19): siRNA sense strand
gcaaggcggugguggugaa

SEQ ID NO: 1568672 - RNA, 19 nt, Homo sapiens
  misc_RNA (1)...(19): siRNA sense strand
ggauagagacggaugaaga

SEQ ID NO: 1568673 - RNA, 19 nt, Homo sapiens
  misc_RNA (1)...(19): siRNA sense strand
agagagagauugaagaaca

SEQ ID NO: 1568674 - RNA, 19 nt, Homo sapiens
  misc_RNA (1)...(19): siRNA sense strand
gagcagguguacagagaga

SEQ ID NO: 1568675 - RNA, 19 nt, Homo sapiens
  misc_RNA (1)...(19): siRNA sense strand
agagcugucugaugcaaua

SEQ ID NO: 1568676 - RNA, 19 nt, Homo sapiens
  misc_RNA (1)...(19): siRNA sense strand
uaaagcagcuaccaaucau

SEQ ID NO: 1568677 - RNA, 19 nt, Homo sapiens
  misc_RNA (1)...(19): siRNA sense strand
acagagagaggcagaagua

SEQ ID NO: 1568678 - RNA, 19 nt, Homo sapiens
  misc_RNA (1)...(19): siRNA sense strand
uagagacggaugaagauua

SEQ ID NO: 1568679 - RNA, 19 nt, Homo sapiens
  misc_RNA (1)...(19): siRNA sense strand
gcaguucuuugaggaaguu

SEQ ID NO: 1568680 - RNA, 19 nt, Homo sapiens
  misc_RNA (1)...(19): siRNA sense strand
gcaacaaggcaagaucaaa

SEQ ID NO: 1568681 - RNA, 19 nt, Homo sapiens
  misc_RNA (1)...(19): siRNA sense strand
gagagagauugaagaacau

SEQ ID NO: 1568682 - RNA, 19 nt, Homo sapiens
  misc_RNA (1)...(19): siRNA sense strand
caacaaggcaagaucaaag

SEQ ID NO: 1568683 - RNA, 19 nt, Homo sapiens
  misc_RNA (1)...(19): siRNA sense strand
aaagaaauccaggaguuaa

SEQ ID NO: 1568684 - RNA, 19 nt, Homo sapiens
  misc_RNA (1)...(19): siRNA sense strand
gaaauccaggaguuaaaga

SEQ ID NO: 1568685 - RNA, 19 nt, Homo sapiens
  misc_RNA (1)...(19): siRNA sense strand
gagugaugcugaccuucaa

SEQ ID NO: 1568686 - RNA, 19 nt, Homo sapiens
  misc_RNA (1)...(19): siRNA sense strand
gauagagacggaugaagau

SEQ ID NO: 1568687 - RNA, 19 nt, Homo sapiens
  misc_RNA (1)...(19): siRNA sense strand
gcagcuaccaaucauguga

SEQ ID NO: 1568688 - RNA, 19 nt, Homo sapiens
  misc_RNA (1)...(19): siRNA sense strand
gagagauugaagaacauua

SEQ ID NO: 1568689 - RNA, 19 nt, Homo sapiens
  misc_RNA (1)...(19): siRNA sense strand
gaucaggaccaguuugaca

SEQ ID NO: 1568690 - RNA, 19 nt, Homo sapiens
  misc_RNA (1)...(19): siRNA sense strand
gagagaggcagaaguacug

SEQ ID NO: 1568691 - RNA, 19 nt, Homo sapiens
  misc_RNA (1)...(19): siRNA sense strand
aagagcagguguacagaga

SEQ ID NO: 1568692 - RNA, 19 nt, Homo sapiens
  misc_RNA (1)...(19): siRNA sense strand
ggaggaagaggaagaggau

SEQ ID NO: 1568693 - RNA, 19 nt, Homo sapiens
  misc_RNA (1)...(19): siRNA sense strand
aaggcaagaucaaagagaa

SEQ ID NO: 1568694 - RNA, 19 nt, Homo sapiens
  misc_RNA (1)...(19): siRNA sense strand
augcaauacuugaaggaua

SEQ ID NO: 1568695 - RNA, 19 nt, Homo sapiens
  misc_RNA (1)...(19): siRNA sense strand
ggugagugaugcugaccuu

SEQ ID NO: 1568696 - RNA, 19 nt, Homo sapiens
  misc_RNA (1)...(19): siRNA sense strand
uguaaggaguggaggaaga

SEQ ID NO: 1568697 - RNA, 19 nt, Homo sapiens
  misc_RNA (1)...(19): siRNA sense strand
gaaagagcagguguacaga

SEQ ID NO: 1568698 - RNA, 19 nt, Homo sapiens
  misc_RNA (1)...(19): siRNA sense strand
acagagagagauugaagaa

SEQ ID NO: 1568699 - RNA, 19 nt, Homo sapiens
  misc_RNA (1)...(19): siRNA sense strand
uuaaagcagcuaccaauca

SEQ ID NO: 1568700 - RNA, 19 nt, Homo sapiens
  misc_RNA (1)...(19): siRNA sense strand
gaagcaguucuuugaggaa

SEQ ID NO: 1568701 - RNA, 19 nt, Homo sapiens
  misc_RNA (1)...(19): siRNA sense strand
agaaagagcagguguacag

SEQ ID NO: 1568702 - RNA, 19 nt, Homo sapiens
  misc_RNA (1)...(19): siRNA sense strand
cauuaaagcagcuaccaau

SEQ ID NO: 1568703 - RNA, 19 nt, Homo sapiens
  misc_RNA (1)...(19): siRNA sense strand
agagacggaugaagauuac

SEQ ID NO: 1568704 - RNA, 19 nt, Homo sapiens
  misc_RNA (1)...(19): siRNA sense strand
uggagcagcuggcgcaaca

SEQ ID NO: 1568705 - RNA, 19 nt, Homo sapiens
  misc_RNA (1)...(19): siRNA sense strand
gcugucugaugcaauacuu

SEQ ID NO: 1568706 - RNA, 19 nt, Homo sapiens
  misc_RNA (1)...(19): siRNA sense strand
gaucaaagagaagauguac

SEQ ID NO: 1568707 - RNA, 19 nt, Homo sapiens
  misc_RNA (1)...(19): siRNA sense strand
agaggcagaaguacuguaa

SEQ ID NO: 1568708 - RNA, 19 nt, Homo sapiens
  misc_RNA (1)...(19): siRNA sense strand
ucaugugacuccagaagag

SEQ ID NO: 1568709 - RNA, 19 nt, Homo sapiens
  misc_RNA (1)...(19): siRNA sense strand
caaggcaagaucaaagaga

SEQ ID NO: 1568710 - RNA, 19 nt, Homo sapiens
  misc_RNA (1)...(19): siRNA sense strand
gcgcaacaaggcaagauca

SEQ ID NO: 1568711 - RNA, 19 nt, Homo sapiens
  misc_RNA (1)...(19): siRNA sense strand
aguuugacauggugaguga

SEQ ID NO: 1568712 - RNA, 19 nt, Homo sapiens
  misc_RNA (1)...(19): siRNA sense strand
ccaagagcaagaagcaguu

SEQ ID NO: 1568713 - RNA, 19 nt, Homo sapiens
  misc_RNA (1)...(19): siRNA sense strand
caagaucaaagagaagaug

SEQ ID NO: 1568714 - RNA, 19 nt, Homo sapiens
  misc_RNA (1)...(19): siRNA sense strand
cuacagagagagauugaag

SEQ ID NO: 1568715 - RNA, 19 nt, Homo sapiens
  misc_RNA (1)...(19): siRNA sense strand
aagaaauccaggaguuaaa

SEQ ID NO: 1568716 - RNA, 19 nt, Homo sapiens
  misc_RNA (1)...(19): siRNA sense strand
ugaggaaguugggauagag

SEQ ID NO: 1568717 - RNA, 19 nt, Homo sapiens
  misc_RNA (1)...(19): siRNA sense strand
gagaggcagaaguacugua

SEQ ID NO: 1568718 - RNA, 19 nt, Homo sapiens
  misc_RNA (1)...(19): siRNA sense strand
ucguggcccucacugcuaa

SEQ ID NO: 1568719 - RNA, 19 nt, Homo sapiens
  misc_RNA (1)...(19): siRNA sense strand
gaggaaguugggauagaga

SEQ ID NO: 1568720 - RNA, 19 nt, Homo sapiens
  misc_RNA (1)...(19): siRNA sense strand
ugcaauacuugaaggauac

SEQ ID NO: 1568721 - RNA, 19 nt, Homo sapiens
  misc_RNA (1)...(19): siRNA sense strand
gauugaagaacauuaaagc

SEQ ID NO: 1568722 - RNA, 19 nt, Homo sapiens
  misc_RNA (1)...(19): siRNA sense strand
uccaggaguuaaagaagga

SEQ ID NO: 1568723 - RNA, 19 nt, Homo sapiens
  misc_RNA (1)...(19): siRNA sense strand
ugagugaugcugaccuuca

SEQ ID NO: 1568724 - RNA, 19 nt, Homo sapiens
  misc_RNA (1)...(19): siRNA sense strand
ggcaagaucaaagagaaga

SEQ ID NO: 1568725 - RNA, 19 nt, Homo sapiens
  misc_RNA (1)...(19): siRNA sense strand
gaccuucaaguccuagaug

SEQ ID NO: 1568726 - RNA, 19 nt, Homo sapiens
  misc_RNA (1)...(19): siRNA sense strand
gagcagcuggcgcaacaag

SEQ ID NO: 1568727 - RNA, 19 nt, Homo sapiens
  misc_RNA (1)...(19): siRNA sense strand
gcaagaucaaagagaagau

SEQ ID NO: 1568728 - RNA, 19 nt, Homo sapiens
  misc_RNA (1)...(19): siRNA sense strand
aggcagaaguacuguaagg

SEQ ID NO: 1568729 - RNA, 19 nt, Homo sapiens
  misc_RNA (1)...(19): siRNA sense strand
cggaucaggaccaguuuga

SEQ ID NO: 1568730 - RNA, 19 nt, Homo sapiens
  misc_RNA (1)...(19): siRNA sense strand
guacagagagaggcagaag

SEQ ID NO: 1568731 - RNA, 19 nt, Homo sapiens
  misc_RNA (1)...(19): siRNA sense strand
aagcagcuaccaaucaugu

SEQ ID NO: 1568732 - RNA, 19 nt, Homo sapiens
  misc_RNA (1)...(19): siRNA sense strand
gaguggaggaagaggaaga

SEQ ID NO: 1568733 - RNA, 19 nt, Homo sapiens
  misc_RNA (1)...(19): siRNA sense strand
aagagaaagagcaggugua

SEQ ID NO: 1568734 - RNA, 19 nt, Homo sapiens
  misc_RNA (1)...(19): siRNA sense strand
agacggaugaagauuacaa

SEQ ID NO: 1568735 - RNA, 19 nt, Homo sapiens
  misc_RNA (1)...(19): siRNA sense strand
aaauccaggaguuaaagaa

SEQ ID NO: 1568736 - RNA, 19 nt, Homo sapiens
  misc_RNA (1)...(19): siRNA sense strand
gagaguagcugaagaaaug

SEQ ID NO: 1568737 - RNA, 19 nt, Homo sapiens
  misc_RNA (1)...(19): siRNA sense strand
gaacuaaucaggaagcuua

SEQ ID NO: 1568738 - RNA, 19 nt, Homo sapiens
  misc_RNA (1)...(19): siRNA sense strand
agaaggagauggacaaaua

SEQ ID NO: 1568739 - RNA, 19 nt, Homo sapiens
  misc_RNA (1)...(19): siRNA sense strand
gaaaugaaaugcacuuugg

SEQ ID NO: 1568740 - RNA, 19 nt, Homo sapiens
  misc_RNA (1)...(19): siRNA sense strand
gacaauagauggaaucaga

SEQ ID NO: 1568741 - RNA, 19 nt, Homo sapiens
  misc_RNA (1)...(19): siRNA sense strand
caagagaccuccaggaaga

SEQ ID NO: 1568742 - RNA, 19 nt, Homo sapiens
  misc_RNA (1)...(19): siRNA sense strand
ggaaauacaggaaguggua

SEQ ID NO: 1568743 - RNA, 19 nt, Homo sapiens
  misc_RNA (1)...(19): siRNA sense strand
gaacagagacaucgagaau

SEQ ID NO: 1568744 - RNA, 19 nt, Homo sapiens
  misc_RNA (1)...(19): siRNA sense strand
caacucaacucccaaaaua

SEQ ID NO: 1568745 - RNA, 19 nt, Homo sapiens
  misc_RNA (1)...(19): siRNA sense strand
gaaggaagcagaacagaga

SEQ ID NO: 1568746 - RNA, 19 nt, Homo sapiens
  misc_RNA (1)...(19): siRNA sense strand
caagcucucugcauucuuu

SEQ ID NO: 1568747 - RNA, 19 nt, Homo sapiens
  misc_RNA (1)...(19): siRNA sense strand
gaacuaguuugacaucugu

SEQ ID NO: 1568748 - RNA, 19 nt, Homo sapiens
  misc_RNA (1)...(19): siRNA sense strand
ugaaagaacucuaacuaca

SEQ ID NO: 1568749 - RNA, 19 nt, Homo sapiens
  misc_RNA (1)...(19): siRNA sense strand
ggaugaagcccaugaaaga

SEQ ID NO: 1568750 - RNA, 19 nt, Homo sapiens
  misc_RNA (1)...(19): siRNA sense strand
ugaaauggcuggagacauc

SEQ ID NO: 1568751 - RNA, 19 nt, Homo sapiens
  misc_RNA (1)...(19): siRNA sense strand
uaagagaacuaguuugaca

SEQ ID NO: 1568752 - RNA, 19 nt, Homo sapiens
  misc_RNA (1)...(19): siRNA sense strand
gaagaaaugaugacaaauc

SEQ ID NO: 1568753 - RNA, 19 nt, Homo sapiens
  misc_RNA (1)...(19): siRNA sense strand
gaacaggaaaccaaacuug

SEQ ID NO: 1568754 - RNA, 19 nt, Homo sapiens
  misc_RNA (1)...(19): siRNA sense strand
acagagacaucgagaauug

SEQ ID NO: 1568755 - RNA, 19 nt, Homo sapiens
  misc_RNA (1)...(19): siRNA sense strand
ggagacagcaaucaaauau

SEQ ID NO: 1568756 - RNA, 19 nt, Homo sapiens
  misc_RNA (1)...(19): siRNA sense strand
caaaguaggauaccaaguu

SEQ ID NO: 1568757 - RNA, 19 nt, Homo sapiens
  misc_RNA (1)...(19): siRNA sense strand
ucauaagguuucccuauuu

SEQ ID NO: 1568758 - RNA, 19 nt, Homo sapiens
  misc_RNA (1)...(19): siRNA sense strand
acccaaaucuuaccaaauu

SEQ ID NO: 1568759 - RNA, 19 nt, Homo sapiens
  misc_RNA (1)...(19): siRNA sense strand
ggacaauucauuccuuauu

SEQ ID NO: 1568760 - RNA, 19 nt, Homo sapiens
  misc_RNA (1)...(19): siRNA sense strand
gaacaaugcaaaucaagug

SEQ ID NO: 1568761 - RNA, 19 nt, Homo sapiens
  misc_RNA (1)...(19): siRNA sense strand
aaagaacucuaacuacaga

SEQ ID NO: 1568762 - RNA, 19 nt, Homo sapiens
  misc_RNA (1)...(19): siRNA sense strand
uaaagugccuugccauaca

SEQ ID NO: 1568763 - RNA, 19 nt, Homo sapiens
  misc_RNA (1)...(19): siRNA sense strand
caugugaucccugaaauua

SEQ ID NO: 1568764 - RNA, 19 nt, Homo sapiens
  misc_RNA (1)...(19): siRNA sense strand
cuacagauaucuuauuugg

SEQ ID NO: 1568765 - RNA, 19 nt, Homo sapiens
  misc_RNA (1)...(19): siRNA sense strand
caacgucuuugacaauaga

SEQ ID NO: 1568766 - RNA, 19 nt, Homo sapiens
  misc_RNA (1)...(19): siRNA sense strand
gcuaaaggauggaauaucg

SEQ ID NO: 1568767 - RNA, 19 nt, Homo sapiens
  misc_RNA (1)...(19): siRNA sense strand
gaaggagauggacaaauaa

SEQ ID NO: 1568768 - RNA, 19 nt, Homo sapiens
  misc_RNA (1)...(19): siRNA sense strand
aaaccaaacuugaauggau

SEQ ID NO: 1568769 - RNA, 19 nt, Homo sapiens
  misc_RNA (1)...(19): siRNA sense strand
ggaggugguuccaauuuca

SEQ ID NO: 1568770 - RNA, 19 nt, Homo sapiens
  misc_RNA (1)...(19): siRNA sense strand
ucugacaugugcaguaaua

SEQ ID NO: 1568771 - RNA, 19 nt, Homo sapiens
  misc_RNA (1)...(19): siRNA sense strand
uagccaagcucucugcauu

SEQ ID NO: 1568772 - RNA, 19 nt, Homo sapiens
  misc_RNA (1)...(19): siRNA sense strand
gcaaagugauuucccaaaa

SEQ ID NO: 1568773 - RNA, 19 nt, Homo sapiens
  misc_RNA (1)...(19): siRNA sense strand
caucugacaugugcaguaa

SEQ ID NO: 1568774 - RNA, 19 nt, Homo sapiens
  misc_RNA (1)...(19): siRNA sense strand
gaggaacuacuccaacuuu

SEQ ID NO: 1568775 - RNA, 19 nt, Homo sapiens
  misc_RNA (1)...(19): siRNA sense strand
ccaaguugcaugaauuuaa

SEQ ID NO: 1568776 - RNA, 19 nt, Homo sapiens
  misc_RNA (1)...(19): siRNA sense strand
ugauggauguuuacugaaa

SEQ ID NO: 1568777 - RNA, 19 nt, Homo sapiens
  misc_RNA (1)...(19): siRNA sense strand
caaagucuacgcaagaauu

SEQ ID NO: 1568778 - RNA, 19 nt, Homo sapiens
  misc_RNA (1)...(19): siRNA sense strand
aaauguagcucgaagaucu

SEQ ID NO: 1568779 - RNA, 19 nt, Homo sapiens
  misc_RNA (1)...(19): siRNA sense strand
aacuuuagcugucaucuuu

SEQ ID NO: 1568780 - RNA, 19 nt, Homo sapiens
  misc_RNA (1)...(19): siRNA sense strand
cauaagguuucccuauuug

SEQ ID NO: 1568781 - RNA, 19 nt, Homo sapiens
  misc_RNA (1)...(19): siRNA sense strand
caugaaagaacucuaacua

SEQ ID NO: 1568782 - RNA, 19 nt, Homo sapiens
  misc_RNA (1)...(19): siRNA sense strand
gcagcuaaaggauggaaua

SEQ ID NO: 1568783 - RNA, 19 nt, Homo sapiens
  misc_RNA (1)...(19): siRNA sense strand
gcaagaaggagauggacaa

SEQ ID NO: 1568784 - RNA, 19 nt, Homo sapiens
  misc_RNA (1)...(19): siRNA sense strand
gucauaagguuucccuauu

SEQ ID NO: 1568785 - RNA, 19 nt, Homo sapiens
  misc_RNA (1)...(19): siRNA sense strand
cacccucgauggcuuguua

SEQ ID NO: 1568786 - RNA, 19 nt, Homo sapiens
  misc_RNA (1)...(19): siRNA sense strand
gucagcaacuauggaauua

SEQ ID NO: 1568787 - RNA, 19 nt, Homo sapiens
  misc_RNA (1)...(19): siRNA sense strand
ggagauggacaaauaagga

SEQ ID NO: 1568788 - RNA, 19 nt, Homo sapiens
  misc_RNA (1)...(19): siRNA sense strand
gcuuucggaucuauaguaa

SEQ ID NO: 1568789 - RNA, 19 nt, Homo sapiens
  misc_RNA (1)...(19): siRNA sense strand
gaagaaaugaaaugcacuu

SEQ ID NO: 1568790 - RNA, 19 nt, Homo sapiens
  misc_RNA (1)...(19): siRNA sense strand
gaugacaaauccauaucug

SEQ ID NO: 1568791 - RNA, 19 nt, Homo sapiens
  misc_RNA (1)...(19): siRNA sense strand
gaaaugaugacaaauccau

SEQ ID NO: 1568792 - RNA, 19 nt, Homo sapiens
  misc_RNA (1)...(19): siRNA sense strand
ugaaggcccuaaacaugaa

SEQ ID NO: 1568793 - RNA, 19 nt, Homo sapiens
  misc_RNA (1)...(19): siRNA sense strand
caauagauggaaucagaua

SEQ ID NO: 1568794 - RNA, 19 nt, Homo sapiens
  misc_RNA (1)...(19): siRNA sense strand
uaugacugauggauguuua

SEQ ID NO: 1568795 - RNA, 19 nt, Homo sapiens
  misc_RNA (1)...(19): siRNA sense strand
cucgauggcuuguuaauau

SEQ ID NO: 1568796 - RNA, 19 nt, Homo sapiens
  misc_RNA (1)...(19): siRNA sense strand
ggaaggcuuuauccaguca

SEQ ID NO: 1568797 - RNA, 19 nt, Homo sapiens
  misc_RNA (1)...(19): siRNA sense strand
gaucuacuacuuccaauag

SEQ ID NO: 1568798 - RNA, 19 nt, Homo sapiens
  misc_RNA (1)...(19): siRNA sense strand
caacagaggaggauauuuu

SEQ ID NO: 1568799 - RNA, 19 nt, Homo sapiens
  misc_RNA (1)...(19): siRNA sense strand
gaaagaacucuaacuacag

SEQ ID NO: 1568800 - RNA, 19 nt, Homo sapiens
  misc_RNA (1)...(19): siRNA sense strand
gaacucuaacuacagauau

SEQ ID NO: 1568801 - RNA, 19 nt, Homo sapiens
  misc_RNA (1)...(19): siRNA sense strand
gagggacaauucauuccuu

SEQ ID NO: 1568802 - RNA, 19 nt, Homo sapiens
  misc_RNA (1)...(19): siRNA sense strand
ccucagcacuucaugaaca

SEQ ID NO: 1568803 - RNA, 19 nt, Homo sapiens
  misc_RNA (1)...(19): siRNA sense strand
gaagcccaguucacauuca

SEQ ID NO: 1568804 - RNA, 19 nt, Homo sapiens
  misc_RNA (1)...(19): siRNA sense strand
gcaauguugucuguggaaa

SEQ ID NO: 1568805 - RNA, 19 nt, Homo sapiens
  misc_RNA (1)...(19): siRNA sense strand
aaaguaggauaccaaguuc

SEQ ID NO: 1568806 - RNA, 19 nt, Homo sapiens
  misc_RNA (1)...(19): siRNA sense strand
gaagaucuguugggagaac

SEQ ID NO: 1568807 - RNA, 19 nt, Homo sapiens
  misc_RNA (1)...(19): siRNA sense strand
uagaagcucuuaaacaacu

SEQ ID NO: 1568808 - RNA, 19 nt, Homo sapiens
  misc_RNA (1)...(19): siRNA sense strand
acugauggauguuuacuga

SEQ ID NO: 1568809 - RNA, 19 nt, Homo sapiens
  misc_RNA (1)...(19): siRNA sense strand
gagacagcaaucaaauaua

SEQ ID NO: 1568810 - RNA, 19 nt, Homo sapiens
  misc_RNA (1)...(19): siRNA sense strand
gaaggagcauuuaaaagug

SEQ ID NO: 1568811 - RNA, 19 nt, Homo sapiens
  misc_RNA (1)...(19): siRNA sense strand
caacuucgagaacuaauca

SEQ ID NO: 1568812 - RNA, 19 nt, Homo sapiens
  misc_RNA (1)...(19): siRNA sense strand
uagcagcaauguugucugu

SEQ ID NO: 1568813 - RNA, 19 nt, Homo sapiens
  misc_RNA (1)...(19): siRNA sense strand
gaucaacagaggaggauau

SEQ ID NO: 1568814 - RNA, 19 nt, Homo sapiens
  misc_RNA (1)...(19): siRNA sense strand
uauaucaguugcucagaga

SEQ ID NO: 1568815 - RNA, 19 nt, Homo sapiens
  misc_RNA (1)...(19): siRNA sense strand
ccuaaugagagacuuauuu

SEQ ID NO: 1568816 - RNA, 19 nt, Homo sapiens
  misc_RNA (1)...(19): siRNA sense strand
gcaacgucuuugacaauag

SEQ ID NO: 1568817 - RNA, 19 nt, Homo sapiens
  misc_RNA (1)...(19): siRNA sense strand
ugugucauauccaccaaua

SEQ ID NO: 1568818 - RNA, 19 nt, Homo sapiens
  misc_RNA (1)...(19): siRNA sense strand
ggaauuagccaagcucucu

SEQ ID NO: 1568819 - RNA, 19 nt, Homo sapiens
  misc_RNA (1)...(19): siRNA sense strand
uaaggagacagcaaucaaa

SEQ ID NO: 1568820 - RNA, 19 nt, Homo sapiens
  misc_RNA (1)...(19): siRNA sense strand
ggauccaccuaaugagaga

SEQ ID NO: 1568821 - RNA, 19 nt, Homo sapiens
  misc_RNA (1)...(19): siRNA sense strand
ggaaggagcauuuaaaagu

SEQ ID NO: 1568822 - RNA, 19 nt, Homo sapiens
  misc_RNA (1)...(19): siRNA sense strand
cuaauaggaaggagcauuu

SEQ ID NO: 1568823 - RNA, 19 nt, Homo sapiens
  misc_RNA (1)...(19): siRNA sense strand
uggaggauuuaaugacuuu

SEQ ID NO: 1568824 - RNA, 19 nt, Homo sapiens
  misc_RNA (1)...(19): siRNA sense strand
gaagaugcaagaaggagau

SEQ ID NO: 1568825 - RNA, 19 nt, Homo sapiens
  misc_RNA (1)...(19): siRNA sense strand
cccuaaacaugaaguacua

SEQ ID NO: 1568826 - RNA, 19 nt, Homo sapiens
  misc_RNA (1)...(19): siRNA sense strand
gcugucaucuuugaacaau

SEQ ID NO: 1568827 - RNA, 19 nt, Homo sapiens
  misc_RNA (1)...(19): siRNA sense strand
gugguaaugucagcaacua

SEQ ID NO: 1568828 - RNA, 19 nt, Homo sapiens
  misc_RNA (1)...(19): siRNA sense strand
ggacaaauaaggaaaaugu

SEQ ID NO: 1568829 - RNA, 19 nt, Homo sapiens
  misc_RNA (1)...(19): siRNA sense strand
cugcuucccuggauuguga

SEQ ID NO: 1568830 - RNA, 19 nt, Homo sapiens
  misc_RNA (1)...(19): siRNA sense strand
ugacaugugcaguaauaaa

SEQ ID NO: 1568831 - RNA, 19 nt, Homo sapiens
  misc_RNA (1)...(19): siRNA sense strand
aaucagauaugugguagau

SEQ ID NO: 1568832 - RNA, 19 nt, Homo sapiens
  misc_RNA (1)...(19): siRNA sense strand
aaacaugaaguacuacgaa

SEQ ID NO: 1568833 - RNA, 19 nt, Homo sapiens
  misc_RNA (1)...(19): siRNA sense strand
gaaauacaggaagugguaa

SEQ ID NO: 1568834 - RNA, 19 nt, Homo sapiens
  misc_RNA (1)...(19): siRNA sense strand
ggcaggacuucuucaggaa

SEQ ID NO: 1568835 - RNA, 19 nt, Homo sapiens
  misc_RNA (1)...(19): siRNA sense strand
ugaagcaguuaaaucacaa

SEQ ID NO: 1568836 - RNA, 19 nt, Homo sapiens
  misc_RNA (1)...(19): siRNA sense strand
ccacugagaucuacaaguu

SEQ ID NO: 1568837 - RNA, 19 nt, Homo sapiens
  misc_RNA (1)...(19): siRNA sense strand
caagggaaauugaagcuaa

SEQ ID NO: 1568838 - RNA, 19 nt, Homo sapiens
  misc_RNA (1)...(19): siRNA sense strand
gacauugccuucaagcuaa

SEQ ID NO: 1568839 - RNA, 19 nt, Homo sapiens
  misc_RNA (1)...(19): siRNA sense strand
gcaaggaggcccaggagua

SEQ ID NO: 1568840 - RNA, 19 nt, Homo sapiens
  misc_RNA (1)...(19): siRNA sense strand
ggacauugccuucaagcua

SEQ ID NO: 1568841 - RNA, 19 nt, Homo sapiens
  misc_RNA (1)...(19): siRNA sense strand
ccaagaagcugugcauugu

SEQ ID NO: 1568842 - RNA, 19 nt, Homo sapiens
  misc_RNA (1)...(19): siRNA sense strand
uccaugaccuuuaucaaua

SEQ ID NO: 1568843 - RNA, 19 nt, Homo sapiens
  misc_RNA (1)...(19): siRNA sense strand
cccagcaucuucaucauua

SEQ ID NO: 1568844 - RNA, 19 nt, Homo sapiens
  misc_RNA (1)...(19): siRNA sense strand
ggauuuccaugaccuuuau

SEQ ID NO: 1568845 - RNA, 19 nt, Homo sapiens
  misc_RNA (1)...(19): siRNA sense strand
gcucugauguucuuguaug

SEQ ID NO: 1568846 - RNA, 19 nt, Homo sapiens
  misc_RNA (1)...(19): siRNA sense strand
gaaaaucaaugugggaauu

SEQ ID NO: 1568847 - RNA, 19 nt, Homo sapiens
  misc_RNA (1)...(19): siRNA sense strand
acgaaucccuucuacagua

SEQ ID NO: 1568848 - RNA, 19 nt, Homo sapiens
  misc_RNA (1)...(19): siRNA sense strand
ggaccuggaugcugcuguu

SEQ ID NO: 1568849 - RNA, 19 nt, Homo sapiens
  misc_RNA (1)...(19): siRNA sense strand
gagaagaccaguccaaugg

SEQ ID NO: 1568850 - RNA, 19 nt, Homo sapiens
  misc_RNA (1)...(19): siRNA sense strand
uaagaaccaucacaagaca

SEQ ID NO: 1568851 - RNA, 19 nt, Homo sapiens
  misc_RNA (1)...(19): siRNA sense strand
gacaagauccgagacauug

SEQ ID NO: 1568852 - RNA, 19 nt, Homo sapiens
  misc_RNA (1)...(19): siRNA sense strand
cuacagacauuggaacaga

SEQ ID NO: 1568853 - RNA, 19 nt, Homo sapiens
  misc_RNA (1)...(19): siRNA sense strand
aagaagcugugcauuguug

SEQ ID NO: 1568854 - RNA, 19 nt, Homo sapiens
  misc_RNA (1)...(19): siRNA sense strand
caacggcaguguccuacau

SEQ ID NO: 1568855 - RNA, 19 nt, Homo sapiens
  misc_RNA (1)...(19): siRNA sense strand
ggagaagaccaguccaaug

SEQ ID NO: 1568856 - RNA, 19 nt, Homo sapiens
  misc_RNA (1)...(19): siRNA sense strand
ucaaguuccucaugcuuau

SEQ ID NO: 1568857 - RNA, 19 nt, Homo sapiens
  misc_RNA (1)...(19): siRNA sense strand
gcuaaacaaccaaaucaga

SEQ ID NO: 1568858 - RNA, 19 nt, Homo sapiens
  misc_RNA (1)...(19): siRNA sense strand
gaagcaagucggacccauu

SEQ ID NO: 1568859 - RNA, 19 nt, Homo sapiens
  misc_RNA (1)...(19): siRNA sense strand
aaacucaaaugcaccuuca

SEQ ID NO: 1568860 - RNA, 19 nt, Homo sapiens
  misc_RNA (1)...(19): siRNA sense strand
aaugugauguccuuccuuu

SEQ ID NO: 1568861 - RNA, 19 nt, Homo sapiens
  misc_RNA (1)...(19): siRNA sense strand
caaaugcaccuucacaucu

SEQ ID NO: 1568862 - RNA, 19 nt, Homo sapiens
  misc_RNA (1)...(19): siRNA sense strand
ggacggacccacugagauc

SEQ ID NO: 1568863 - RNA, 19 nt, Homo sapiens
  misc_RNA (1)...(19): siRNA sense strand
ccaugaccuuuaucaauau

SEQ ID NO: 1568864 - RNA, 19 nt, Homo sapiens
  misc_RNA (1)...(19): siRNA sense strand
cgacagggcaucuucuaug

SEQ ID NO: 1568865 - RNA, 19 nt, Homo sapiens
  misc_RNA (1)...(19): siRNA sense strand
gucaucuucuucaucguua

SEQ ID NO: 1568866 - RNA, 19 nt, Homo sapiens
  misc_RNA (1)...(19): siRNA sense strand
gcccauaaguuuuaccuuu

SEQ ID NO: 1568867 - RNA, 19 nt, Homo sapiens
  misc_RNA (1)...(19): siRNA sense strand
caugguauuucagguguuu

SEQ ID NO: 1568868 - RNA, 19 nt, Homo sapiens
  misc_RNA (1)...(19): siRNA sense strand
gggauuuccaugaccuuua

SEQ ID NO: 1568869 - RNA, 19 nt, Homo sapiens
  misc_RNA (1)...(19): siRNA sense strand
ugaaagaguaccacggaaa

SEQ ID NO: 1568870 - RNA, 19 nt, Homo sapiens
  misc_RNA (1)...(19): siRNA sense strand
acugagaucuacaaguuga

SEQ ID NO: 1568871 - RNA, 19 nt, Homo sapiens
  misc_RNA (1)...(19): siRNA sense strand
cgaaucccuucuacaguau

SEQ ID NO: 1568872 - RNA, 19 nt, Homo sapiens
  misc_RNA (1)...(19): siRNA sense strand
gcaugagggccguuacuau

SEQ ID NO: 1568873 - RNA, 19 nt, Homo sapiens
  misc_RNA (1)...(19): siRNA sense strand
ccaagacuccagagcauga

SEQ ID NO: 1568874 - RNA, 19 nt, Homo sapiens
  misc_RNA (1)...(19): siRNA sense strand
gaaagaguaccacggaaac

SEQ ID NO: 1568875 - RNA, 19 nt, Homo sapiens
  misc_RNA (1)...(19): siRNA sense strand
ccacaacggcaguguccua

SEQ ID NO: 1568876 - RNA, 19 nt, Homo sapiens
  misc_RNA (1)...(19): siRNA sense strand
gaaucugccucugccucua

SEQ ID NO: 1568877 - RNA, 19 nt, Homo sapiens
  misc_RNA (1)...(19): siRNA sense strand
cuucauauuugacaugugu

SEQ ID NO: 1568878 - RNA, 19 nt, Homo sapiens
  misc_RNA (1)...(19): siRNA sense strand
cguaagaaccaucacaaga

SEQ ID NO: 1568879 - RNA, 19 nt, Homo sapiens
  misc_RNA (1)...(19): siRNA sense strand
ugagggccguuacuaugaa

SEQ ID NO: 1568880 - RNA, 19 nt, Homo sapiens
  misc_RNA (1)...(19): siRNA sense strand
uaugggauguggaaucugu

SEQ ID NO: 1568881 - RNA, 19 nt, Homo sapiens
  misc_RNA (1)...(19): siRNA sense strand
uaacggaaggccauuggaa

SEQ ID NO: 1568882 - RNA, 19 nt, Homo sapiens
  misc_RNA (1)...(19): siRNA sense strand
uaaacaaccaaaucagaga

SEQ ID NO: 1568883 - RNA, 19 nt, Homo sapiens
  misc_RNA (1)...(19): siRNA sense strand
ccaccacuaucacccaugu

SEQ ID NO: 1568884 - RNA, 19 nt, Homo sapiens
  misc_RNA (1)...(19): siRNA sense strand
ggauguggaaucuguaugu

SEQ ID NO: 1568885 - RNA, 19 nt, Homo sapiens
  misc_RNA (1)...(19): siRNA sense strand
guaagaaccaucacaagac

SEQ ID NO: 1568886 - RNA, 19 nt, Homo sapiens
  misc_RNA (1)...(19): siRNA sense strand
cuucaucguuagucaggua

SEQ ID NO: 1568887 - RNA, 19 nt, Homo sapiens
  misc_RNA (1)...(19): siRNA sense strand
uaaaggauauccgguuggu

SEQ ID NO: 1568888 - RNA, 19 nt, Homo sapiens
  misc_RNA (1)...(19): siRNA sense strand
caagauccgagacauugaa

SEQ ID NO: 1568889 - RNA, 19 nt, Homo sapiens
  misc_RNA (1)...(19): siRNA sense strand
ugacaagauccgagacauu

SEQ ID NO: 1568890 - RNA, 19 nt, Homo sapiens
  misc_RNA (1)...(19): siRNA sense strand
gugcauuguuggugggauu

SEQ ID NO: 1568891 - RNA, 19 nt, Homo sapiens
  misc_RNA (1)...(19): siRNA sense strand
caugagggccguuacuaug

SEQ ID NO: 1568892 - RNA, 19 nt, Homo sapiens
  misc_RNA (1)...(19): siRNA sense strand
cuaugaaugugauguccuu

SEQ ID NO: 1568893 - RNA, 19 nt, Homo sapiens
  misc_RNA (1)...(19): siRNA sense strand
guaugucuuugcucugaug

SEQ ID NO: 1568894 - RNA, 19 nt, Homo sapiens
  misc_RNA (1)...(19): siRNA sense strand
uguggaaucuguaugucuu

SEQ ID NO: 1568895 - RNA, 19 nt, Homo sapiens
  misc_RNA (1)...(19): siRNA sense strand
uacaguaucuggacuacag

SEQ ID NO: 1568896 - RNA, 19 nt, Homo sapiens
  misc_RNA (1)...(19): siRNA sense strand
caucuuugcccuugggauu

SEQ ID NO: 1568897 - RNA, 19 nt, Homo sapiens
  misc_RNA (1)...(19): siRNA sense strand
gaaccacaucgcaggguau

SEQ ID NO: 1568898 - RNA, 19 nt, Homo sapiens
  misc_RNA (1)...(19): siRNA sense strand
ucaaaugcaccuucacauc

SEQ ID NO: 1568899 - RNA, 19 nt, Homo sapiens
  misc_RNA (1)...(19): siRNA sense strand
ccaagugaacagugccuuu

SEQ ID NO: 1568900 - RNA, 19 nt, Homo sapiens
  misc_RNA (1)...(19): siRNA sense strand
uuucuaugcuucaugguau

SEQ ID NO: 1568901 - RNA, 19 nt, Homo sapiens
  misc_RNA (1)...(19): siRNA sense strand
ucacgaaucccuucuacag

SEQ ID NO: 1568902 - RNA, 19 nt, Homo sapiens
  misc_RNA (1)...(19): siRNA sense strand
ggucuguggcccauaaguu

SEQ ID NO: 1568903 - RNA, 19 nt, Homo sapiens
  misc_RNA (1)...(19): siRNA sense strand
ucauuauggugugguauug

SEQ ID NO: 1568904 - RNA, 19 nt, Homo sapiens
  misc_RNA (1)...(19): siRNA sense strand
gaaaacaugagcaccaaga

SEQ ID NO: 1568905 - RNA, 19 nt, Homo sapiens
  misc_RNA (1)...(19): siRNA sense strand
caagcuaaacaaccaaauc

SEQ ID NO: 1568906 - RNA, 19 nt, Homo sapiens
  misc_RNA (1)...(19): siRNA sense strand
ggguacaacucacgaaucc

SEQ ID NO: 1568907 - RNA, 19 nt, Homo sapiens
  misc_RNA (1)...(19): siRNA sense strand
ccacggaaacucaaaugca

SEQ ID NO: 1568908 - RNA, 19 nt, Homo sapiens
  misc_RNA (1)...(19): siRNA sense strand
gauccgagacauugaagag

SEQ ID NO: 1568909 - RNA, 19 nt, Homo sapiens
  misc_RNA (1)...(19): siRNA sense strand
caaggaggcccaggaguag

SEQ ID NO: 1568910 - RNA, 19 nt, Homo sapiens
  misc_RNA (1)...(19): siRNA sense strand
cagcucaccaccacuauca

SEQ ID NO: 1568911 - RNA, 19 nt, Homo sapiens
  misc_RNA (1)...(19): siRNA sense strand
gaucuggguguccauagug

SEQ ID NO: 1568912 - RNA, 19 nt, Homo sapiens
  misc_RNA (1)...(19): siRNA sense strand
gaaucuguaugucuuugcu

SEQ ID NO: 1568913 - RNA, 19 nt, Homo sapiens
  misc_RNA (1)...(19): siRNA sense strand
aaacaaccaaaucagagaa

SEQ ID NO: 1568914 - RNA, 19 nt, Homo sapiens
  misc_RNA (1)...(19): siRNA sense strand
caagaagcugugcauuguu

SEQ ID NO: 1568915 - RNA, 19 nt, Homo sapiens
  misc_RNA (1)...(19): siRNA sense strand
aagcuaaacaaccaaauca

SEQ ID NO: 1568916 - RNA, 19 nt, Homo sapiens
  misc_RNA (1)...(19): siRNA sense strand
agaaccaucacaagacaaa

SEQ ID NO: 1568917 - RNA, 19 nt, Homo sapiens
  misc_RNA (1)...(19): siRNA sense strand
ccuucugccucuucauauu

SEQ ID NO: 1568918 - RNA, 19 nt, Homo sapiens
  misc_RNA (1)...(19): siRNA sense strand
aagcaagucggacccauug

SEQ ID NO: 1568919 - RNA, 19 nt, Homo sapiens
  misc_RNA (1)...(19): siRNA sense strand
gcccuugggauuuccauga

SEQ ID NO: 1568920 - RNA, 19 nt, Homo sapiens
  misc_RNA (1)...(19): siRNA sense strand
gcccagcaucuucaucauu

SEQ ID NO: 1568921 - RNA, 19 nt, Homo sapiens
  misc_RNA (1)...(19): siRNA sense strand
gagggccguuacuaugaau

SEQ ID NO: 1568922 - RNA, 19 nt, Homo sapiens
  misc_RNA (1)...(19): siRNA sense strand
uccaauucaugcuguuuau

SEQ ID NO: 1568923 - RNA, 19 nt, Homo sapiens
  misc_RNA (1)...(19): siRNA sense strand
ugucuuugcucugauguuc

SEQ ID NO: 1568924 - RNA, 19 nt, Homo sapiens
  misc_RNA (1)...(19): siRNA sense strand
gauguggaaucuguauguc

SEQ ID NO: 1568925 - RNA, 19 nt, Homo sapiens
  misc_RNA (1)...(19): siRNA sense strand
gguuugccaugaagaccuu

SEQ ID NO: 1568926 - RNA, 19 nt, Homo sapiens
  misc_RNA (1)...(19): siRNA sense strand
gucuguggcccauaaguuu

SEQ ID NO: 1568927 - RNA, 19 nt, Homo sapiens
  misc_RNA (1)...(19): siRNA sense strand
cuucacaucucccaagacu

SEQ ID NO: 1568928 - RNA, 19 nt, Homo sapiens
  misc_RNA (1)...(19): siRNA sense strand
uggaggaggaucaccauga

SEQ ID NO: 1568929 - RNA, 19 nt, Homo sapiens
  misc_RNA (1)...(19): siRNA sense strand
ucauggaaauugggucugu

SEQ ID NO: 1568930 - RNA, 19 nt, Homo sapiens
  misc_RNA (1)...(19): siRNA sense strand
augcagaagucuccaugga

SEQ ID NO: 1568931 - RNA, 19 nt, Homo sapiens
  misc_RNA (1)...(19): siRNA sense strand
ccacaucgcaggguauugg

SEQ ID NO: 1568932 - RNA, 19 nt, Homo sapiens
  misc_RNA (1)...(19): siRNA sense strand
ucaucauuaugguguggua

SEQ ID NO: 1568933 - RNA, 19 nt, Homo sapiens
  misc_RNA (1)...(19): siRNA sense strand
gugauguccuuccuuucau

SEQ ID NO: 1568934 - RNA, 19 nt, Homo sapiens
  misc_RNA (1)...(19): siRNA sense strand
ggauucugcucguguucca

SEQ ID NO: 1568935 - RNA, 19 nt, Homo sapiens
  misc_RNA (1)...(19): siRNA sense strand
aaaugcaccuucacaucuc

SEQ ID NO: 1568936 - RNA, 19 nt, Homo sapiens
  misc_RNA (1)...(19): siRNA sense strand
gcaaggagcuccagaggaa

SEQ ID NO: 1568937 - RNA, 19 nt, Homo sapiens
  misc_RNA (1)...(19): siRNA sense strand
caacucagauuuaaagguu

SEQ ID NO: 1568938 - RNA, 19 nt, Homo sapiens
  misc_RNA (1)...(19): siRNA sense strand
uacaugagcuucuugauga

SEQ ID NO: 1568939 - RNA, 19 nt, Homo sapiens
  misc_RNA (1)...(19): siRNA sense strand
ggaaaugcagcuuuaauug

SEQ ID NO: 1568940 - RNA, 19 nt, Homo sapiens
  misc_RNA (1)...(19): siRNA sense strand
gagcgcuucuucagugaua

SEQ ID NO: 1568941 - RNA, 19 nt, Homo sapiens
  misc_RNA (1)...(19): siRNA sense strand
gcagccaacucagauuuaa

SEQ ID NO: 1568942 - RNA, 19 nt, Homo sapiens
  misc_RNA (1)...(19): siRNA sense strand
ggaaguacacccucacuau

SEQ ID NO: 1568943 - RNA, 19 nt, Homo sapiens
  misc_RNA (1)...(19): siRNA sense strand
gaaguacacccucacuauu

SEQ ID NO: 1568944 - RNA, 19 nt, Homo sapiens
  misc_RNA (1)...(19): siRNA sense strand
gaucacagcauucugcauu

SEQ ID NO: 1568945 - RNA, 19 nt, Homo sapiens
  misc_RNA (1)...(19): siRNA sense strand
gcuccaggauuguauuaaa

SEQ ID NO: 1568946 - RNA, 19 nt, Homo sapiens
  misc_RNA (1)...(19): siRNA sense strand
gaaauuugcagccaacuca

SEQ ID NO: 1568947 - RNA, 19 nt, Homo sapiens
  misc_RNA (1)...(19): siRNA sense strand
gaggcaggcuccaggauug

SEQ ID NO: 1568948 - RNA, 19 nt, Homo sapiens
  misc_RNA (1)...(19): siRNA sense strand
ggaccucacucuucucucu

SEQ ID NO: 1568949 - RNA, 19 nt, Homo sapiens
  misc_RNA (1)...(19): siRNA sense strand
gaaaugcagcuuuaauugg

SEQ ID NO: 1568950 - RNA, 19 nt, Homo sapiens
  misc_RNA (1)...(19): siRNA sense strand
aaaugcagcuuuaauugga

SEQ ID NO: 1568951 - RNA, 19 nt, Homo sapiens
  misc_RNA (1)...(19): siRNA sense strand
aggaggaaaugcagcuuua

SEQ ID NO: 1568952 - RNA, 19 nt, Homo sapiens
  misc_RNA (1)...(19): siRNA sense strand
aaacaagccaguaguagaa

SEQ ID NO: 1568953 - RNA, 19 nt, Homo sapiens
  misc_RNA (1)...(19): siRNA sense strand
gaacaugggaggaguaaaa

SEQ ID NO: 1568954 - RNA, 19 nt, Homo sapiens
  misc_RNA (1)...(19): siRNA sense strand
ugggaaagaucacagcauu

SEQ ID NO: 1568955 - RNA, 19 nt, Homo sapiens
  misc_RNA (1)...(19): siRNA sense strand
ugaauaugcuggagguguu

SEQ ID NO: 1568956 - RNA, 19 nt, Homo sapiens
  misc_RNA (1)...(19): siRNA sense strand
caaacaagccaguaguaga

SEQ ID NO: 1568957 - RNA, 19 nt, Homo sapiens
  misc_RNA (1)...(19): siRNA sense strand
ccacuucacaccaguauug

SEQ ID NO: 1568958 - RNA, 19 nt, Homo sapiens
  misc_RNA (1)...(19): siRNA sense strand
aaguacacccucacuauua

SEQ ID NO: 1568959 - RNA, 19 nt, Homo sapiens
  misc_RNA (1)...(19): siRNA sense strand
gcacagagagggaauaucc

SEQ ID NO: 1568960 - RNA, 19 nt, Homo sapiens
  misc_RNA (1)...(19): siRNA sense strand
ggaaagaucacagcauucu

SEQ ID NO: 1568961 - RNA, 19 nt, Homo sapiens
  misc_RNA (1)...(19): siRNA sense strand
caggagcuguuauuucuca

SEQ ID NO: 1568962 - RNA, 19 nt, Homo sapiens
  misc_RNA (1)...(19): siRNA sense strand
gggagucaaugcauguguu

SEQ ID NO: 1568963 - RNA, 19 nt, Homo sapiens
  misc_RNA (1)...(19): siRNA sense strand
cccaagaguucaugacuuc

SEQ ID NO: 1568964 - RNA, 19 nt, Homo sapiens
  misc_RNA (1)...(19): siRNA sense strand
ucagugauaaggaaacuuu

SEQ ID NO: 1568965 - RNA, 19 nt, Homo sapiens
  misc_RNA (1)...(19): siRNA sense strand
gagcuggccaguaugacua

SEQ ID NO: 1568966 - RNA, 19 nt, Homo sapiens
  misc_RNA (1)...(19): siRNA sense strand
guuguaaccuccauuucug

SEQ ID NO: 1568967 - RNA, 19 nt, Homo sapiens
  misc_RNA (1)...(19): siRNA sense strand
gaggaaaugcagcuuuaau

SEQ ID NO: 1568968 - RNA, 19 nt, Homo sapiens
  misc_RNA (1)...(19): siRNA sense strand
ccucggaucucaccaggau

SEQ ID NO: 1568969 - RNA, 19 nt, Homo sapiens
  misc_RNA (1)...(19): siRNA sense strand
gcaggaaguggaugaguuc

SEQ ID NO: 1568970 - RNA, 19 nt, Homo sapiens
  misc_RNA (1)...(19): siRNA sense strand
caaggaaugaucuggaaga

SEQ ID NO: 1568971 - RNA, 19 nt, Homo sapiens
  misc_RNA (1)...(19): siRNA sense strand
guucaugacuucccauucg

SEQ ID NO: 1568972 - RNA, 19 nt, Homo sapiens
  misc_RNA (1)...(19): siRNA sense strand
caaugcauguguugaugug

SEQ ID NO: 1568973 - RNA, 19 nt, Homo sapiens
  misc_RNA (1)...(19): siRNA sense strand
ggaggaaaugcagcuuuaa

SEQ ID NO: 1568974 - RNA, 19 nt, Homo sapiens
  misc_RNA (1)...(19): siRNA sense strand
ugucuagccuggaggaguu

SEQ ID NO: 1568975 - RNA, 19 nt, Homo sapiens
  misc_RNA (1)...(19): siRNA sense strand
ucacgacauugcccagguu

SEQ ID NO: 1568976 - RNA, 19 nt, Homo sapiens
  misc_RNA (1)...(19): siRNA sense strand
ccuuggagaugccauuuca

SEQ ID NO: 1568977 - RNA, 19 nt, Homo sapiens
  misc_RNA (1)...(19): siRNA sense strand
ucagugacauccucuucug

SEQ ID NO: 1568978 - RNA, 19 nt, Homo sapiens
  misc_RNA (1)...(19): siRNA sense strand
ugacuucccuugggcugaa

SEQ ID NO: 1568979 - RNA, 19 nt, Homo sapiens
  misc_RNA (1)...(19): siRNA sense strand
cuacaugagcuucuugaug

SEQ ID NO: 1568980 - RNA, 19 nt, Homo sapiens
  misc_RNA (1)...(19): siRNA sense strand
uaaccuccauuucugacau

SEQ ID NO: 1568981 - RNA, 19 nt, Homo sapiens
  misc_RNA (1)...(19): siRNA sense strand
gaauaugcuggagguguuu

SEQ ID NO: 1568982 - RNA, 19 nt, Homo sapiens
  misc_RNA (1)...(19): siRNA sense strand
accuagagcuggccaguau

SEQ ID NO: 1568983 - RNA, 19 nt, Homo sapiens
  misc_RNA (1)...(19): siRNA sense strand
ucacagcauucugcauuca

SEQ ID NO: 1568984 - RNA, 19 nt, Homo sapiens
  misc_RNA (1)...(19): siRNA sense strand
cuucuucagugauaaggaa

SEQ ID NO: 1568985 - RNA, 19 nt, Homo sapiens
  misc_RNA (1)...(19): siRNA sense strand
ggagucaaugcauguguug

SEQ ID NO: 1568986 - RNA, 19 nt, Homo sapiens
  misc_RNA (1)...(19): siRNA sense strand
aggaaaugcagcuuuaauu

SEQ ID NO: 1568987 - RNA, 19 nt, Homo sapiens
  misc_RNA (1)...(19): siRNA sense strand
gagcagcauuguccaucag

SEQ ID NO: 1568988 - RNA, 19 nt, Homo sapiens
  misc_RNA (1)...(19): siRNA sense strand
ggauuguauuaaacccaaa

SEQ ID NO: 1568989 - RNA, 19 nt, Homo sapiens
  misc_RNA (1)...(19): siRNA sense strand
caguauugguguguaaaga

SEQ ID NO: 1568990 - RNA, 19 nt, Homo sapiens
  misc_RNA (1)...(19): siRNA sense strand
gaauauccuuccacuucac

SEQ ID NO: 1568991 - RNA, 19 nt, Homo sapiens
  misc_RNA (1)...(19): siRNA sense strand
ugcaggaaguggaugaguu

SEQ ID NO: 1568992 - RNA, 19 nt, Homo sapiens
  misc_RNA (1)...(19): siRNA sense strand
gccaaccgauucaucuucu

SEQ ID NO: 1568993 - RNA, 19 nt, Homo sapiens
  misc_RNA (1)...(19): siRNA sense strand
gcacuauguaggaggaaau

SEQ ID NO: 1568994 - RNA, 19 nt, Homo sapiens
  misc_RNA (1)...(19): siRNA sense strand
cauuguccaucaggucuuu

SEQ ID NO: 1568995 - RNA, 19 nt, Homo sapiens
  misc_RNA (1)...(19): siRNA sense strand
ugagcagcauuguccauca

SEQ ID NO: 1568996 - RNA, 19 nt, Homo sapiens
  misc_RNA (1)...(19): siRNA sense strand
guauuccaguucaccuaga

SEQ ID NO: 1568997 - RNA, 19 nt, Homo sapiens
  misc_RNA (1)...(19): siRNA sense strand
aaggaaugaucuggaagaa

SEQ ID NO: 1568998 - RNA, 19 nt, Homo sapiens
  misc_RNA (1)...(19): siRNA sense strand
aaagaacaugggaggagua

SEQ ID NO: 1568999 - RNA, 19 nt, Homo sapiens
  misc_RNA (1)...(19): siRNA sense strand
cuagagcuggccaguauga

SEQ ID NO: 1569000 - RNA, 19 nt, Homo sapiens
  misc_RNA (1)...(19): siRNA sense strand
ccaaacaagccaguaguag

SEQ ID NO: 1569001 - RNA, 19 nt, Homo sapiens
  misc_RNA (1)...(19): siRNA sense strand
gcauucugcauucaaggaa

SEQ ID NO: 1569002 - RNA, 19 nt, Homo sapiens
  misc_RNA (1)...(19): siRNA sense strand
gaaagaucacagcauucug

SEQ ID NO: 1569003 - RNA, 19 nt, Homo sapiens
  misc_RNA (1)...(19): siRNA sense strand
cagagucauugcaggaagu

SEQ ID NO: 1569004 - RNA, 19 nt, Homo sapiens
  misc_RNA (1)...(19): siRNA sense strand
cagcuuuaauuggacagaa

SEQ ID NO: 1569005 - RNA, 19 nt, Homo sapiens
  misc_RNA (1)...(19): siRNA sense strand
caggagcccagcacuaugu

SEQ ID NO: 1569006 - RNA, 19 nt, Homo sapiens
  misc_RNA (1)...(19): siRNA sense strand
acaagccaguaguagaaug

SEQ ID NO: 1569007 - RNA, 19 nt, Homo sapiens
  misc_RNA (1)...(19): siRNA sense strand
cccaaacaagccaguagua

SEQ ID NO: 1569008 - RNA, 19 nt, Homo sapiens
  misc_RNA (1)...(19): siRNA sense strand
ucaccaggauccauuucca

SEQ ID NO: 1569009 - RNA, 19 nt, Homo sapiens
  misc_RNA (1)...(19): siRNA sense strand
gcagugggagucaaugcau

SEQ ID NO: 1569010 - RNA, 19 nt, Homo sapiens
  misc_RNA (1)...(19): siRNA sense strand
aguacacccucacuauuag

SEQ ID NO: 1569011 - RNA, 19 nt, Homo sapiens
  misc_RNA (1)...(19): siRNA sense strand
uucaaggaaugaucuggaa

SEQ ID NO: 1569012 - RNA, 19 nt, Homo sapiens
  misc_RNA (1)...(19): siRNA sense strand
ccucuggaccucacucuuc

SEQ ID NO: 1569013 - RNA, 19 nt, Homo sapiens
  misc_RNA (1)...(19): siRNA sense strand
gcaggcuccaggauuguau

SEQ ID NO: 1569014 - RNA, 19 nt, Homo sapiens
  misc_RNA (1)...(19): siRNA sense strand
ccagguugcgucagaguuc

SEQ ID NO: 1569015 - RNA, 19 nt, Homo sapiens
  misc_RNA (1)...(19): siRNA sense strand
gggaaagaucacagcauuc

SEQ ID NO: 1569016 - RNA, 19 nt, Homo sapiens
  misc_RNA (1)...(19): siRNA sense strand
uaggaggaaaugcagcuuu

SEQ ID NO: 1569017 - RNA, 19 nt, Homo sapiens
  misc_RNA (1)...(19): siRNA sense strand
acagagagggaauauccuu

SEQ ID NO: 1569018 - RNA, 19 nt, Homo sapiens
  misc_RNA (1)...(19): siRNA sense strand
uguauuaaacccaaacaag

SEQ ID NO: 1569019 - RNA, 19 nt, Homo sapiens
  misc_RNA (1)...(19): siRNA sense strand
ggaggaguggggccaguua

SEQ ID NO: 1569020 - RNA, 19 nt, Homo sapiens
  misc_RNA (1)...(19): siRNA sense strand
cagccaacucagauuuaaa

SEQ ID NO: 1569021 - RNA, 19 nt, Homo sapiens
  misc_RNA (1)...(19): siRNA sense strand
gcacaugauggagggacaa

SEQ ID NO: 1569022 - RNA, 19 nt, Homo sapiens
  misc_RNA (1)...(19): siRNA sense strand
gaagagcuccauacacaua

SEQ ID NO: 1569023 - RNA, 19 nt, Homo sapiens
  misc_RNA (1)...(19): siRNA sense strand
cagaagagcuccauacaca

SEQ ID NO: 1569024 - RNA, 19 nt, Homo sapiens
  misc_RNA (1)...(19): siRNA sense strand
gaaccucgcugggaccaaa

SEQ ID NO: 1569025 - RNA, 19 nt, Homo sapiens
  misc_RNA (1)...(19): siRNA sense strand
gaaguggucuacuacaaca

SEQ ID NO: 1569026 - RNA, 19 nt, Homo sapiens
  misc_RNA (1)...(19): siRNA sense strand
ucaaaucccucaccaagca

SEQ ID NO: 1569027 - RNA, 19 nt, Homo sapiens
  misc_RNA (1)...(19): siRNA sense strand
ugaauugccuuuagacauc

SEQ ID NO: 1569028 - RNA, 19 nt, Homo sapiens
  misc_RNA (1)...(19): siRNA sense strand
ggaacaucgugcagaacua

SEQ ID NO: 1569029 - RNA, 19 nt, Homo sapiens
  misc_RNA (1)...(19): siRNA sense strand
gcguugaaguggucuacua

SEQ ID NO: 1569030 - RNA, 19 nt, Homo sapiens
  misc_RNA (1)...(19): siRNA sense strand
gggagaaggugguccugau

SEQ ID NO: 1569031 - RNA, 19 nt, Homo sapiens
  misc_RNA (1)...(19): siRNA sense strand
ggagaaggugguccugauu

SEQ ID NO: 1569032 - RNA, 19 nt, Homo sapiens
  misc_RNA (1)...(19): siRNA sense strand
gagaaggugguccugauug

SEQ ID NO: 1569033 - RNA, 19 nt, Homo sapiens
  misc_RNA (1)...(19): siRNA sense strand
gcugcaugcucacauucua

SEQ ID NO: 1569034 - RNA, 19 nt, Homo sapiens
  misc_RNA (1)...(19): siRNA sense strand
gaauugccuuuagacauca

SEQ ID NO: 1569035 - RNA, 19 nt, Homo sapiens
  misc_RNA (1)...(19): siRNA sense strand
gggccaaguauguguauga

SEQ ID NO: 1569036 - RNA, 19 nt, Homo sapiens
  misc_RNA (1)...(19): siRNA sense strand
uggacacucuggagaagaa

SEQ ID NO: 1569037 - RNA, 19 nt, Homo sapiens
  misc_RNA (1)...(19): siRNA sense strand
gcagauuugugcccuuugc

SEQ ID NO: 1569038 - RNA, 19 nt, Homo sapiens
  misc_RNA (1)...(19): siRNA sense strand
ggaagcuucucggaacauc

SEQ ID NO: 1569039 - RNA, 19 nt, Homo sapiens
  misc_RNA (1)...(19): siRNA sense strand
acacauaagcaaccuggaa

SEQ ID NO: 1569040 - RNA, 19 nt, Homo sapiens
  misc_RNA (1)...(19): siRNA sense strand
gggcuucugccugguauuu

SEQ ID NO: 1569041 - RNA, 19 nt, Homo sapiens
  misc_RNA (1)...(19): siRNA sense strand
cagcccaggugcccaugaa

SEQ ID NO: 1569042 - RNA, 19 nt, Homo sapiens
  misc_RNA (1)...(19): siRNA sense strand
ggagggccaaguaugugua

SEQ ID NO: 1569043 - RNA, 19 nt, Homo sapiens
  misc_RNA (1)...(19): siRNA sense strand
gaacaucgugcagaacuac

SEQ ID NO: 1569044 - RNA, 19 nt, Homo sapiens
  misc_RNA (1)...(19): siRNA sense strand
gcugccaacugcaucaaca

SEQ ID NO: 1569045 - RNA, 19 nt, Homo sapiens
  misc_RNA (1)...(19): siRNA sense strand
uugaaguggucuacuacaa

SEQ ID NO: 1569046 - RNA, 19 nt, Homo sapiens
  misc_RNA (1)...(19): siRNA sense strand
ccugugcugugcccuauuc

SEQ ID NO: 1569047 - RNA, 19 nt, Homo sapiens
  misc_RNA (1)...(19): siRNA sense strand
gugaauugccuuuagacau

SEQ ID NO: 1569048 - RNA, 19 nt, Homo sapiens
  misc_RNA (1)...(19): siRNA sense strand
gcaaaaccccagcguugaa

SEQ ID NO: 1569049 - RNA, 19 nt, Homo sapiens
  misc_RNA (1)...(19): siRNA sense strand
agaaggugguccugauugg

SEQ ID NO: 1569050 - RNA, 19 nt, Homo sapiens
  misc_RNA (1)...(19): siRNA sense strand
ugggugaauugccuuuaga

SEQ ID NO: 1569051 - RNA, 19 nt, Homo sapiens
  misc_RNA (1)...(19): siRNA sense strand
uuacugauccucgaaaucu

SEQ ID NO: 1569052 - RNA, 19 nt, Homo sapiens
  misc_RNA (1)...(19): siRNA sense strand
agacaucaacauccaggaa

SEQ ID NO: 1569053 - RNA, 19 nt, Homo sapiens
  misc_RNA (1)...(19): siRNA sense strand
ucauggacacucuggagaa

SEQ ID NO: 1569054 - RNA, 19 nt, Homo sapiens
  misc_RNA (1)...(19): siRNA sense strand
cauggacacucuggagaag

SEQ ID NO: 1569055 - RNA, 19 nt, Homo sapiens
  misc_RNA (1)...(19): siRNA sense strand
ucccaccacugaucaugga

SEQ ID NO: 1569056 - RNA, 19 nt, Homo sapiens
  misc_RNA (1)...(19): siRNA sense strand
cagguggugauuucaagaa

SEQ ID NO: 1569057 - RNA, 19 nt, Homo sapiens
  misc_RNA (1)...(19): siRNA sense strand
ccaaggagcuggaggagaa

SEQ ID NO: 1569058 - RNA, 19 nt, Homo sapiens
  misc_RNA (1)...(19): siRNA sense strand
gaaggcccaucgcucgaaa

SEQ ID NO: 1569059 - RNA, 19 nt, Homo sapiens
  misc_RNA (1)...(19): siRNA sense strand
cugcugggcuucuucauga

SEQ ID NO: 1569060 - RNA, 19 nt, Homo sapiens
  misc_RNA (1)...(19): siRNA sense strand
gggauggucuuccucaagu

SEQ ID NO: 1569061 - RNA, 19 nt, Homo sapiens
  misc_RNA (1)...(19): siRNA sense strand
gggaaaagcuccagaaggu

SEQ ID NO: 1569062 - RNA, 19 nt, Homo sapiens
  misc_RNA (1)...(19): siRNA sense strand
ugaagaucaucgagacaga

SEQ ID NO: 1569063 - RNA, 19 nt, Homo sapiens
  misc_RNA (1)...(19): siRNA sense strand
gaaaguggugagccuguuc

SEQ ID NO: 1569064 - RNA, 19 nt, Homo sapiens
  misc_RNA (1)...(19): siRNA sense strand
ucaucgaccuggagaccuu

SEQ ID NO: 1569065 - RNA, 19 nt, Homo sapiens
  misc_RNA (1)...(19): siRNA sense strand
gaaauugcuaguggccaaa

SEQ ID NO: 1569066 - RNA, 19 nt, Homo sapiens
  misc_RNA (1)...(19): siRNA sense strand
gaagaucaucgagacagau

SEQ ID NO: 1569067 - RNA, 19 nt, Homo sapiens
  misc_RNA (1)...(19): siRNA sense strand
gaucaucgagacagauuuu

SEQ ID NO: 1569068 - RNA, 19 nt, Homo sapiens
  misc_RNA (1)...(19): siRNA sense strand
ggauggucuuccucaagug

SEQ ID NO: 1569069 - RNA, 19 nt, Homo sapiens
  misc_RNA (1)...(19): siRNA sense strand
ggcggcaccuuccucuuca

SEQ ID NO: 1569070 - RNA, 19 nt, Homo sapiens
  misc_RNA (1)...(19): siRNA sense strand
cgagacagauuuugagaag

SEQ ID NO: 1569071 - RNA, 19 nt, Homo sapiens
  misc_RNA (1)...(19): siRNA sense strand
agaaaguggugagccuguu

SEQ ID NO: 1569072 - RNA, 19 nt, Homo sapiens
  misc_RNA (1)...(19): siRNA sense strand
gcaccuuccucuucaucac

SEQ ID NO: 1569073 - RNA, 19 nt, Homo sapiens
  misc_RNA (1)...(19): siRNA sense strand
gggcguguucuucuucaug

SEQ ID NO: 1569074 - RNA, 19 nt, Homo sapiens
  misc_RNA (1)...(19): siRNA sense strand
agaaauugcugaucgcaua

SEQ ID NO: 1569075 - RNA, 19 nt, Homo sapiens
  misc_RNA (1)...(19): siRNA sense strand
aaacagcagugggaaauaa

SEQ ID NO: 1569076 - RNA, 19 nt, Homo sapiens
  misc_RNA (1)...(19): siRNA sense strand
gcagaaagcaugucgaugu

SEQ ID NO: 1569077 - RNA, 19 nt, Homo sapiens
  misc_RNA (1)...(19): siRNA sense strand
gcuaaugaaugaaguugaa

SEQ ID NO: 1569078 - RNA, 19 nt, Homo sapiens
  misc_RNA (1)...(19): siRNA sense strand
gagcagagcaugucacaga

SEQ ID NO: 1569079 - RNA, 19 nt, Homo sapiens
  misc_RNA (1)...(19): siRNA sense strand
ggagagcucuuugacuuug

SEQ ID NO: 1569080 - RNA, 19 nt, Homo sapiens
  misc_RNA (1)...(19): siRNA sense strand
gaagaacagugcuugacau

SEQ ID NO: 1569081 - RNA, 19 nt, Homo sapiens
  misc_RNA (1)...(19): siRNA sense strand
gaaaagaggcuguguaugu

SEQ ID NO: 1569082 - RNA, 19 nt, Homo sapiens
  misc_RNA (1)...(19): siRNA sense strand
aaaggaaguuuauggaaga

SEQ ID NO: 1569083 - RNA, 19 nt, Homo sapiens
  misc_RNA (1)...(19): siRNA sense strand
gcaaacagaauuauaccuu

SEQ ID NO: 1569084 - RNA, 19 nt, Homo sapiens
  misc_RNA (1)...(19): siRNA sense strand
aaggagagcucuuugacuu

SEQ ID NO: 1569085 - RNA, 19 nt, Homo sapiens
  misc_RNA (1)...(19): siRNA sense strand
ggaaaggaaguuuauggaa

SEQ ID NO: 1569086 - RNA, 19 nt, Homo sapiens
  misc_RNA (1)...(19): siRNA sense strand
gagauaggauuucuuccau

SEQ ID NO: 1569087 - RNA, 19 nt, Homo sapiens
  misc_RNA (1)...(19): siRNA sense strand
ggaaguaauggaagaagaa

SEQ ID NO: 1569088 - RNA, 19 nt, Homo sapiens
  misc_RNA (1)...(19): siRNA sense strand
augaagaaccuaugcauua

SEQ ID NO: 1569089 - RNA, 19 nt, Homo sapiens
  misc_RNA (1)...(19): siRNA sense strand
gaaccuaugcauuauggaa

SEQ ID NO: 1569090 - RNA, 19 nt, Homo sapiens
  misc_RNA (1)...(19): siRNA sense strand
ugaagaaccuaugcauuau

SEQ ID NO: 1569091 - RNA, 19 nt, Homo sapiens
  misc_RNA (1)...(19): siRNA sense strand
gaaggguaauucgagguaa

SEQ ID NO: 1569092 - RNA, 19 nt, Homo sapiens
  misc_RNA (1)...(19): siRNA sense strand
ccaccaacaccacucuuua

SEQ ID NO: 1569093 - RNA, 19 nt, Homo sapiens
  misc_RNA (1)...(19): siRNA sense strand
gaaacagcagugggaaaua

SEQ ID NO: 1569094 - RNA, 19 nt, Homo sapiens
  misc_RNA (1)...(19): siRNA sense strand
gaaauugcugaucgcauaa

SEQ ID NO: 1569095 - RNA, 19 nt, Homo sapiens
  misc_RNA (1)...(19): siRNA sense strand
aaagagauauugagauagg

SEQ ID NO: 1569096 - RNA, 19 nt, Homo sapiens
  misc_RNA (1)...(19): siRNA sense strand
gaccuucucccgucuguuu

SEQ ID NO: 1569097 - RNA, 19 nt, Homo sapiens
  misc_RNA (1)...(19): siRNA sense strand
ccagucagcgugaguauga

SEQ ID NO: 1569098 - RNA, 19 nt, Homo sapiens
  misc_RNA (1)...(19): siRNA sense strand
cuacaaagaacaacauaug

SEQ ID NO: 1569099 - RNA, 19 nt, Homo sapiens
  misc_RNA (1)...(19): siRNA sense strand
aagccaagcuccaccgaaa

SEQ ID NO: 1569100 - RNA, 19 nt, Homo sapiens
  misc_RNA (1)...(19): siRNA sense strand
caacaccacucuuuauucc

SEQ ID NO: 1569101 - RNA, 19 nt, Homo sapiens
  misc_RNA (1)...(19): siRNA sense strand
gaugaagaaccuaugcauu

SEQ ID NO: 1569102 - RNA, 19 nt, Homo sapiens
  misc_RNA (1)...(19): siRNA sense strand
uuccauggcuaaugaauga

SEQ ID NO: 1569103 - RNA, 19 nt, Homo sapiens
  misc_RNA (1)...(19): siRNA sense strand
gcgugaguaugaagaacua

SEQ ID NO: 1569104 - RNA, 19 nt, Homo sapiens
  misc_RNA (1)...(19): siRNA sense strand
gaagaaccuaugcauuaug

SEQ ID NO: 1569105 - RNA, 19 nt, Homo sapiens
  misc_RNA (1)...(19): siRNA sense strand
caaagaacaacauaugaca

SEQ ID NO: 1569106 - RNA, 19 nt, Homo sapiens
  misc_RNA (1)...(19): siRNA sense strand
gauauggaaugccaaacag

SEQ ID NO: 1569107 - RNA, 19 nt, Homo sapiens
  misc_RNA (1)...(19): siRNA sense strand
cagaaagcaugucgaugug

SEQ ID NO: 1569108 - RNA, 19 nt, Homo sapiens
  misc_RNA (1)...(19): siRNA sense strand
gcaugucgaugugcaaaca

SEQ ID NO: 1569109 - RNA, 19 nt, Homo sapiens
  misc_RNA (1)...(19): siRNA sense strand
gaacaacauaugacagaag

SEQ ID NO: 1569110 - RNA, 19 nt, Homo sapiens
  misc_RNA (1)...(19): siRNA sense strand
ggaagaacagugcuugaca

SEQ ID NO: 1569111 - RNA, 19 nt, Homo sapiens
  misc_RNA (1)...(19): siRNA sense strand
gauaguggcuacuuuuaug

SEQ ID NO: 1569112 - RNA, 19 nt, Homo sapiens
  misc_RNA (1)...(19): siRNA sense strand
gagcauuugcacagcguua

SEQ ID NO: 1569113 - RNA, 19 nt, Homo sapiens
  misc_RNA (1)...(19): siRNA sense strand
uaugaagaacuacggaaua

SEQ ID NO: 1569114 - RNA, 19 nt, Homo sapiens
  misc_RNA (1)...(19): siRNA sense strand
aagaagagcuggcuaaccu

SEQ ID NO: 1569115 - RNA, 19 nt, Homo sapiens
  misc_RNA (1)...(19): siRNA sense strand
gggaggaagaauugucaua

SEQ ID NO: 1569116 - RNA, 19 nt, Homo sapiens
  misc_RNA (1)...(19): siRNA sense strand
gcacaacgagacaucacaa

SEQ ID NO: 1569117 - RNA, 19 nt, Homo sapiens
  misc_RNA (1)...(19): siRNA sense strand
gaaguuaaaccaguguuag

SEQ ID NO: 1569118 - RNA, 19 nt, Homo sapiens
  misc_RNA (1)...(19): siRNA sense strand
gggaaauaaugcacaagca

SEQ ID NO: 1569119 - RNA, 19 nt, Homo sapiens
  misc_RNA (1)...(19): siRNA sense strand
ugagcagucucuucuggaa

SEQ ID NO: 1569120 - RNA, 19 nt, Homo sapiens
  misc_RNA (1)...(19): siRNA sense strand
aaaagaggcuguguaugua

SEQ ID NO: 1569121 - RNA, 19 nt, Homo sapiens
  misc_RNA (1)...(19): siRNA sense strand
ugaaguuaaaccaguguua

SEQ ID NO: 1569122 - RNA, 19 nt, Homo sapiens
  misc_RNA (1)...(19): siRNA sense strand
ggucaucccaggaaaggaa

SEQ ID NO: 1569123 - RNA, 19 nt, Homo sapiens
  misc_RNA (1)...(19): siRNA sense strand
guaauucgagguaacacuu

SEQ ID NO: 1569124 - RNA, 19 nt, Homo sapiens
  misc_RNA (1)...(19): siRNA sense strand
aaacagcaaugaggaaguc

SEQ ID NO: 1569125 - RNA, 19 nt, Homo sapiens
  misc_RNA (1)...(19): siRNA sense strand
gagagcucuuugacuuuga

SEQ ID NO: 1569126 - RNA, 19 nt, Homo sapiens
  misc_RNA (1)...(19): siRNA sense strand
ggaggaagaauugucauag

SEQ ID NO: 1569127 - RNA, 19 nt, Homo sapiens
  misc_RNA (1)...(19): siRNA sense strand
uuucuuccauggcuaauga

SEQ ID NO: 1569128 - RNA, 19 nt, Homo sapiens
  misc_RNA (1)...(19): siRNA sense strand
uagugaacgugcugaaguu

SEQ ID NO: 1569129 - RNA, 19 nt, Homo sapiens
  misc_RNA (1)...(19): siRNA sense strand
agauguggccacccaaaua

SEQ ID NO: 1569130 - RNA, 19 nt, Homo sapiens
  misc_RNA (1)...(19): siRNA sense strand
gaugaagaaacagcaauga

SEQ ID NO: 1569131 - RNA, 19 nt, Homo sapiens
  misc_RNA (1)...(19): siRNA sense strand
cagggauaguggcuacuuu

SEQ ID NO: 1569132 - RNA, 19 nt, Homo sapiens
  misc_RNA (1)...(19): siRNA sense strand
gcacaagcacaacgagaca

SEQ ID NO: 1569133 - RNA, 19 nt, Homo sapiens
  misc_RNA (1)...(19): siRNA sense strand
gcugaucgcauaauagaag

SEQ ID NO: 1569134 - RNA, 19 nt, Homo sapiens
  misc_RNA (1)...(19): siRNA sense strand
ugacgcagccagaugaaga

SEQ ID NO: 1569135 - RNA, 19 nt, Homo sapiens
  misc_RNA (1)...(19): siRNA sense strand
cgaugugcaaacagaauua

SEQ ID NO: 1569136 - RNA, 19 nt, Homo sapiens
  misc_RNA (1)...(19): siRNA sense strand
ggauuucuuccauggcuaa

SEQ ID NO: 1569137 - RNA, 19 nt, Homo sapiens
  misc_RNA (1)...(19): siRNA sense strand
ccaacaccacucuuuauuc

SEQ ID NO: 1569138 - RNA, 19 nt, Homo sapiens
  misc_RNA (1)...(19): siRNA sense strand
uaauucgagguaacacuua

SEQ ID NO: 1569139 - RNA, 19 nt, Homo sapiens
  misc_RNA (1)...(19): siRNA sense strand
cagaaggucaucccaggaa

SEQ ID NO: 1569140 - RNA, 19 nt, Homo sapiens
  misc_RNA (1)...(19): siRNA sense strand
gcgcccaccugcuucaaag

SEQ ID NO: 1569141 - RNA, 19 nt, Homo sapiens
  misc_RNA (1)...(19): siRNA sense strand
gaggcgacaccgagaagaa

SEQ ID NO: 1569142 - RNA, 19 nt, Homo sapiens
  misc_RNA (1)...(19): siRNA sense strand
gaauagugaacgugcugaa

SEQ ID NO: 1569143 - RNA, 19 nt, Homo sapiens
  misc_RNA (1)...(19): siRNA sense strand
uaaaccaguguuagaaguu

SEQ ID NO: 1569144 - RNA, 19 nt, Homo sapiens
  misc_RNA (1)...(19): siRNA sense strand
uuaaaccaguguuagaagu

SEQ ID NO: 1569145 - RNA, 19 nt, Homo sapiens
  misc_RNA (1)...(19): siRNA sense strand
aagaaccuaugcauuaugg

SEQ ID NO: 1569146 - RNA, 19 nt, Homo sapiens
  misc_RNA (1)...(19): siRNA sense strand
gaaacagcaaugaggaagu

SEQ ID NO: 1569147 - RNA, 19 nt, Homo sapiens
  misc_RNA (1)...(19): siRNA sense strand
aagaacaacauaugacaga

SEQ ID NO: 1569148 - RNA, 19 nt, Homo sapiens
  misc_RNA (1)...(19): siRNA sense strand
acacaucagucuccagaac

SEQ ID NO: 1569149 - RNA, 19 nt, Homo sapiens
  misc_RNA (1)...(19): siRNA sense strand
gaaagagauauugagauag

SEQ ID NO: 1569150 - RNA, 19 nt, Homo sapiens
  misc_RNA (1)...(19): siRNA sense strand
aagaagaagagcuggcuaa

SEQ ID NO: 1569151 - RNA, 19 nt, Homo sapiens
  misc_RNA (1)...(19): siRNA sense strand
uggaaguaauggaagaaga

SEQ ID NO: 1569152 - RNA, 19 nt, Homo sapiens
  misc_RNA (1)...(19): siRNA sense strand
aauugcugaucgcauaaua

SEQ ID NO: 1569153 - RNA, 19 nt, Homo sapiens
  misc_RNA (1)...(19): siRNA sense strand
gaaggagagcucuuugacu

SEQ ID NO: 1569154 - RNA, 19 nt, Homo sapiens
  misc_RNA (1)...(19): siRNA sense strand
gcagccagaugaagaaccu

SEQ ID NO: 1569155 - RNA, 19 nt, Homo sapiens
  misc_RNA (1)...(19): siRNA sense strand
caacgggaggcuaggaaga

SEQ ID NO: 1569156 - RNA, 19 nt, Homo sapiens
  misc_RNA (1)...(19): siRNA sense strand
agaaggucaucccaggaaa

SEQ ID NO: 1569157 - RNA, 19 nt, Homo sapiens
  misc_RNA (1)...(19): siRNA sense strand
caauugagcagucucuucu

SEQ ID NO: 1569158 - RNA, 19 nt, Homo sapiens
  misc_RNA (1)...(19): siRNA sense strand
gaucgcauaauagaaguug

SEQ ID NO: 1569159 - RNA, 19 nt, Homo sapiens
  misc_RNA (1)...(19): siRNA sense strand
caccaacaccacucuuuau

SEQ ID NO: 1569160 - RNA, 19 nt, Homo sapiens
  misc_RNA (1)...(19): siRNA sense strand
cggacggccugauucucua

SEQ ID NO: 1569161 - RNA, 19 nt, Homo sapiens
  misc_RNA (1)...(19): siRNA sense strand
gaaguuuauggaagagaga

SEQ ID NO: 1569162 - RNA, 19 nt, Homo sapiens
  misc_RNA (1)...(19): siRNA sense strand
gaaggucaucccaggaaag

SEQ ID NO: 1569163 - RNA, 19 nt, Homo sapiens
  misc_RNA (1)...(19): siRNA sense strand
gagauauugagauaggauu

SEQ ID NO: 1569164 - RNA, 19 nt, Homo sapiens
  misc_RNA (1)...(19): siRNA sense strand
ugacagaaggguaauucga

SEQ ID NO: 1569165 - RNA, 19 nt, Homo sapiens
  misc_RNA (1)...(19): siRNA sense strand
gauguggccacccaaauac

SEQ ID NO: 1569166 - RNA, 19 nt, Homo sapiens
  misc_RNA (1)...(19): siRNA sense strand
agaacaacauaugacagaa

SEQ ID NO: 1569167 - RNA, 19 nt, Homo sapiens
  misc_RNA (1)...(19): siRNA sense strand
cuccagaacccgaggauga

SEQ ID NO: 1569168 - RNA, 19 nt, Homo sapiens
  misc_RNA (1)...(19): siRNA sense strand
aagaggcuguguauguaug

SEQ ID NO: 1569169 - RNA, 19 nt, Homo sapiens
  misc_RNA (1)...(19): siRNA sense strand
guaugaagaacuacggaau

SEQ ID NO: 1569170 - RNA, 19 nt, Homo sapiens
  misc_RNA (1)...(19): siRNA sense strand
agaaggguaauucgaggua

SEQ ID NO: 1569171 - RNA, 19 nt, Homo sapiens
  misc_RNA (1)...(19): siRNA sense strand
gcucuuugacuuugaucuu

SEQ ID NO: 1569172 - RNA, 19 nt, Homo sapiens
  misc_RNA (1)...(19): siRNA sense strand
uagaaggagagcucuuuga

SEQ ID NO: 1569173 - RNA, 19 nt, Homo sapiens
  misc_RNA (1)...(19): siRNA sense strand
gaucccauugaaagagaua

SEQ ID NO: 1569174 - RNA, 19 nt, Homo sapiens
  misc_RNA (1)...(19): siRNA sense strand
gcucacagaucuucaccaa

SEQ ID NO: 1569175 - RNA, 19 nt, Homo sapiens
  misc_RNA (1)...(19): siRNA sense strand
gcuccagcguucucuaugg

SEQ ID NO: 1569176 - RNA, 19 nt, Homo sapiens
  misc_RNA (1)...(19): siRNA sense strand
gggcauccgccacucgaaa

SEQ ID NO: 1569177 - RNA, 19 nt, Homo sapiens
  misc_RNA (1)...(19): siRNA sense strand
gagaccggccugaggaagu

SEQ ID NO: 1569178 - RNA, 19 nt, Homo sapiens
  misc_RNA (1)...(19): siRNA sense strand
gggcuccagcguucucuau

SEQ ID NO: 1569179 - RNA, 19 nt, Homo sapiens
  misc_RNA (1)...(19): siRNA sense strand
gggaagacuugccucauua

SEQ ID NO: 1569180 - RNA, 19 nt, Homo sapiens
  misc_RNA (1)...(19): siRNA sense strand
agacuugccucauuaauag

SEQ ID NO: 1569181 - RNA, 19 nt, Homo sapiens
  misc_RNA (1)...(19): siRNA sense strand
agaagaagcccacauguug

SEQ ID NO: 1569182 - RNA, 19 nt, Homo sapiens
  misc_RNA (1)...(19): siRNA sense strand
gcaagaagaagcccacaug

SEQ ID NO: 1569183 - RNA, 19 nt, Homo sapiens
  misc_RNA (1)...(19): siRNA sense strand
uggcugagcuggagaaauc

SEQ ID NO: 1569184 - RNA, 19 nt, Homo sapiens
  misc_RNA (1)...(19): siRNA sense strand
uggcagcacugaccuuuga

SEQ ID NO: 1569185 - RNA, 19 nt, Homo sapiens
  misc_RNA (1)...(19): siRNA sense strand
ggacaggcaccgugggauu

SEQ ID NO: 1569186 - RNA, 19 nt, Homo sapiens
  misc_RNA (1)...(19): siRNA sense strand
gacagcaaccucuaccuaa

SEQ ID NO: 1569187 - RNA, 19 nt, Homo sapiens
  misc_RNA (1)...(19): siRNA sense strand
gcucaagccaucaucauug

SEQ ID NO: 1569188 - RNA, 19 nt, Homo sapiens
  misc_RNA (1)...(19): siRNA sense strand
ggaagacuugccucauuaa

SEQ ID NO: 1569189 - RNA, 19 nt, Homo sapiens
  misc_RNA (1)...(19): siRNA sense strand
caggagagguucaaaugca

SEQ ID NO: 1569190 - RNA, 19 nt, Homo sapiens
  misc_RNA (1)...(19): siRNA sense strand
gugcuucucuuccuuguag

SEQ ID NO: 1569191 - RNA, 19 nt, Homo sapiens
  misc_RNA (1)...(19): siRNA sense strand
gcaucaaccuacuauagag

SEQ ID NO: 1569192 - RNA, 19 nt, Homo sapiens
  misc_RNA (1)...(19): siRNA sense strand
ggaaggaggccgcuuugca

SEQ ID NO: 1569193 - RNA, 19 nt, Homo sapiens
  misc_RNA (1)...(19): siRNA sense strand
gugagaauguccgagaauu

SEQ ID NO: 1569194 - RNA, 19 nt, Homo sapiens
  misc_RNA (1)...(19): siRNA sense strand
aguaugcgcugauggagaa

SEQ ID NO: 1569195 - RNA, 19 nt, Homo sapiens
  misc_RNA (1)...(19): siRNA sense strand
aagacuugccucauuaaua

SEQ ID NO: 1569196 - RNA, 19 nt, Homo sapiens
  misc_RNA (1)...(19): siRNA sense strand
ccgaugcccugaaggagaa

SEQ ID NO: 1569197 - RNA, 19 nt, Homo sapiens
  misc_RNA (1)...(19): siRNA sense strand
ggauuuaagaucuccaaga

SEQ ID NO: 1569198 - RNA, 19 nt, Homo sapiens
  misc_RNA (1)...(19): siRNA sense strand
ugacagcaaccucuaccua

SEQ ID NO: 1569199 - RNA, 19 nt, Homo sapiens
  misc_RNA (1)...(19): siRNA sense strand
agaaugacccuuccagugu

SEQ ID NO: 1569200 - RNA, 19 nt, Homo sapiens
  misc_RNA (1)...(19): siRNA sense strand
auuaauagguucugcaaag

SEQ ID NO: 1569201 - RNA, 19 nt, Homo sapiens
  misc_RNA (1)...(19): siRNA sense strand
uaacugccagcaagaagaa

SEQ ID NO: 1569202 - RNA, 19 nt, Homo sapiens
  misc_RNA (1)...(19): siRNA sense strand
uggcaucucuggaacauac

SEQ ID NO: 1569203 - RNA, 19 nt, Homo sapiens
  misc_RNA (1)...(19): siRNA sense strand
uuaauagguucugcaaaga

SEQ ID NO: 1569204 - RNA, 19 nt, Homo sapiens
  misc_RNA (1)...(19): siRNA sense strand
gaagacuugccucauuaau

SEQ ID NO: 1569205 - RNA, 19 nt, Homo sapiens
  misc_RNA (1)...(19): siRNA sense strand
gggcauucccuucaguuug

SEQ ID NO: 1569206 - RNA, 19 nt, Homo sapiens
  misc_RNA (1)...(19): siRNA sense strand
ggcaggagagguucaaaug

SEQ ID NO: 1569207 - RNA, 19 nt, Homo sapiens
  misc_RNA (1)...(19): siRNA sense strand
agacaccuuugauaagaau

SEQ ID NO: 1569208 - RNA, 19 nt, Homo sapiens
  misc_RNA (1)...(19): siRNA sense strand
ccaagaaggaucugaguac

SEQ ID NO: 1569209 - RNA, 19 nt, Homo sapiens
  misc_RNA (1)...(19): siRNA sense strand
gaauuacaaggccaccauu

SEQ ID NO: 1569210 - RNA, 19 nt, Homo sapiens
  misc_RNA (1)...(19): siRNA sense strand
ggggaagacuugccucauu

SEQ ID NO: 1569211 - RNA, 19 nt, Homo sapiens
  misc_RNA (1)...(19): siRNA sense strand
gcacgggcacaaagacuuc

SEQ ID NO: 1569212 - RNA, 19 nt, Homo sapiens
  misc_RNA (1)...(19): siRNA sense strand
gacaggcaccgugggauuu

SEQ ID NO: 1569213 - RNA, 19 nt, Homo sapiens
  misc_RNA (1)...(19): siRNA sense strand
ggagagguucaaaugcauu

SEQ ID NO: 1569214 - RNA, 19 nt, Homo sapiens
  misc_RNA (1)...(19): siRNA sense strand
gaguggacuucgagaugga

SEQ ID NO: 1569215 - RNA, 19 nt, Homo sapiens
  misc_RNA (1)...(19): siRNA sense strand
ggcauucccuucaguuugc

SEQ ID NO: 1569216 - RNA, 19 nt, Homo sapiens
  misc_RNA (1)...(19): siRNA sense strand
aagaagaagcccacauguu

SEQ ID NO: 1569217 - RNA, 19 nt, Homo sapiens
  misc_RNA (1)...(19): siRNA sense strand
caagaagaagcccacaugu

SEQ ID NO: 1569218 - RNA, 19 nt, Homo sapiens
  misc_RNA (1)...(19): siRNA sense strand
gaggaaggaggccgcuuug

SEQ ID NO: 1569219 - RNA, 19 nt, Homo sapiens
  misc_RNA (1)...(19): siRNA sense strand
caucaucauugucuucaac

SEQ ID NO: 1569220 - RNA, 19 nt, Homo sapiens
  misc_RNA (1)...(19): siRNA sense strand
ugaggaaggaggccgcuuu

SEQ ID NO: 1569221 - RNA, 19 nt, Homo sapiens
  misc_RNA (1)...(19): siRNA sense strand
gagagguucaaaugcauug

SEQ ID NO: 1569222 - RNA, 19 nt, Homo sapiens
  misc_RNA (1)...(19): siRNA sense strand
uuacaaggccaccauugga

SEQ ID NO: 1569223 - RNA, 19 nt, Homo sapiens
  misc_RNA (1)...(19): siRNA sense strand
ggagaugaaggcugaguac

SEQ ID NO: 1569224 - RNA, 19 nt, Homo sapiens
  misc_RNA (1)...(19): siRNA sense strand
aauagguucugcaaagaca

SEQ ID NO: 1569225 - RNA, 19 nt, Homo sapiens
  misc_RNA (1)...(19): siRNA sense strand
aagacaccuuugauaagaa

SEQ ID NO: 1569226 - RNA, 19 nt, Homo sapiens
  misc_RNA (1)...(19): siRNA sense strand
gcauugcaucaaccuacua

SEQ ID NO: 1569227 - RNA, 19 nt, Homo sapiens
  misc_RNA (1)...(19): siRNA sense strand
gggcaggagagguucaaau

SEQ ID NO: 1569228 - RNA, 19 nt, Homo sapiens
  misc_RNA (1)...(19): siRNA sense strand
acaggcaccgugggauuua

SEQ ID NO: 1569229 - RNA, 19 nt, Homo sapiens
  misc_RNA (1)...(19): siRNA sense strand
caggcaccgugggauuuaa

SEQ ID NO: 1569230 - RNA, 19 nt, Homo sapiens
  misc_RNA (1)...(19): siRNA sense strand
cucaagccaucaucauugu

SEQ ID NO: 1569231 - RNA, 19 nt, Homo sapiens
  misc_RNA (1)...(19): siRNA sense strand
gagcucaagccaucaucau

SEQ ID NO: 1569232 - RNA, 19 nt, Homo sapiens
  misc_RNA (1)...(19): siRNA sense strand
gcaggagagguucaaaugc

SEQ ID NO: 1569233 - RNA, 19 nt, Homo sapiens
  misc_RNA (1)...(19): siRNA sense strand
ggugagaauguccgagaau

SEQ ID NO: 1569234 - RNA, 19 nt, Homo sapiens
  misc_RNA (1)...(19): siRNA sense strand
ggagcucaagccaucauca

SEQ ID NO: 1569235 - RNA, 19 nt, Homo sapiens
  misc_RNA (1)...(19): siRNA sense strand
acagcaaccucuaccuaac

SEQ ID NO: 1569236 - RNA, 19 nt, Homo sapiens
  misc_RNA (1)...(19): siRNA sense strand
gugaugacagcaaccucua

SEQ ID NO: 1569237 - RNA, 19 nt, Homo sapiens
  misc_RNA (1)...(19): siRNA sense strand
gaguaccccugcucaguau

SEQ ID NO: 1569238 - RNA, 19 nt, Homo sapiens
  misc_RNA (1)...(19): siRNA sense strand
ccauuggaguggacuucga

SEQ ID NO: 1569239 - RNA, 19 nt, Homo sapiens
  misc_RNA (1)...(19): siRNA sense strand
cgagauggaacgauuugag

SEQ ID NO: 1569240 - RNA, 19 nt, Homo sapiens
  misc_RNA (1)...(19): siRNA sense strand
ugggcagucucaucucuca

SEQ ID NO: 1569241 - RNA, 19 nt, Homo sapiens
  misc_RNA (1)...(19): siRNA sense strand
ccagugugcuucucuuccu

SEQ ID NO: 1569242 - RNA, 19 nt, Homo sapiens
  misc_RNA (1)...(19): siRNA sense strand
caagccaucaucauugucu

SEQ ID NO: 1569243 - RNA, 19 nt, Homo sapiens
  misc_RNA (1)...(19): siRNA sense strand
ggacuucgagauggaacga

SEQ ID NO: 1569244 - RNA, 19 nt, Homo sapiens
  misc_RNA (1)...(19): siRNA sense strand
guuugcagcuuugggauac

SEQ ID NO: 1569245 - RNA, 19 nt, Homo sapiens
  misc_RNA (1)...(19): siRNA sense strand
gcugggcauucccuucagu

SEQ ID NO: 1569246 - RNA, 19 nt, Homo sapiens
  misc_RNA (1)...(19): siRNA sense strand
gugcugggcauucccuuca

SEQ ID NO: 1569247 - RNA, 19 nt, Homo sapiens
  misc_RNA (1)...(19): siRNA sense strand
uuacagauguggacuauga

SEQ ID NO: 1569248 - RNA, 19 nt, Homo sapiens
  misc_RNA (1)...(19): siRNA sense strand
gagcaucacugucagaauc

SEQ ID NO: 1569249 - RNA, 19 nt, Homo sapiens
  misc_RNA (1)...(19): siRNA sense strand
ggacacauauggaggacaa

SEQ ID NO: 1569250 - RNA, 19 nt, Homo sapiens
  misc_RNA (1)...(19): siRNA sense strand
caaaggggcuguagguuua

SEQ ID NO: 1569251 - RNA, 19 nt, Homo sapiens
  misc_RNA (1)...(19): siRNA sense strand
guuuaaaccuucagucaaa

SEQ ID NO: 1569252 - RNA, 19 nt, Homo sapiens
  misc_RNA (1)...(19): siRNA sense strand
cuaugaagaugcuauguaa

SEQ ID NO: 1569253 - RNA, 19 nt, Homo sapiens
  misc_RNA (1)...(19): siRNA sense strand
gaucugugcuccacucugu

SEQ ID NO: 1569254 - RNA, 19 nt, Homo sapiens
  misc_RNA (1)...(19): siRNA sense strand
gccagaagcaaucaucuua

SEQ ID NO: 1569255 - RNA, 19 nt, Homo sapiens
  misc_RNA (1)...(19): siRNA sense strand
ggagacaucaccuuccuuu

SEQ ID NO: 1569256 - RNA, 19 nt, Homo sapiens
  misc_RNA (1)...(19): siRNA sense strand
ggagaucccagauaaaugu

SEQ ID NO: 1569257 - RNA, 19 nt, Homo sapiens
  misc_RNA (1)...(19): siRNA sense strand
caccguggccuuauuauuu

SEQ ID NO: 1569258 - RNA, 19 nt, Homo sapiens
  misc_RNA (1)...(19): siRNA sense strand
ggaaagcaaacauuacaga

SEQ ID NO: 1569259 - RNA, 19 nt, Homo sapiens
  misc_RNA (1)...(19): siRNA sense strand
gggaugagguuuauucacu

SEQ ID NO: 1569260 - RNA, 19 nt, Homo sapiens
  misc_RNA (1)...(19): siRNA sense strand
gagcaggagaucccagaua

SEQ ID NO: 1569261 - RNA, 19 nt, Homo sapiens
  misc_RNA (1)...(19): siRNA sense strand
ugagcaauauuacugugua

SEQ ID NO: 1569262 - RNA, 19 nt, Homo sapiens
  misc_RNA (1)...(19): siRNA sense strand
caucuuaccucaggaguca

SEQ ID NO: 1569263 - RNA, 19 nt, Homo sapiens
  misc_RNA (1)...(19): siRNA sense strand
cagugacccugacguguaa

SEQ ID NO: 1569264 - RNA, 19 nt, Homo sapiens
  misc_RNA (1)...(19): siRNA sense strand
gaggaaagcaaacauuaca

SEQ ID NO: 1569265 - RNA, 19 nt, Homo sapiens
  misc_RNA (1)...(19): siRNA sense strand
gcuacagccuauauaugaa

SEQ ID NO: 1569266 - RNA, 19 nt, Homo sapiens
  misc_RNA (1)...(19): siRNA sense strand
gaguucagaugcccaguuc

SEQ ID NO: 1569267 - RNA, 19 nt, Homo sapiens
  misc_RNA (1)...(19): siRNA sense strand
gaaagcaaacauuacagau

SEQ ID NO: 1569268 - RNA, 19 nt, Homo sapiens
  misc_RNA (1)...(19): siRNA sense strand
aagaugcccuuucuacaga

SEQ ID NO: 1569269 - RNA, 19 nt, Homo sapiens
  misc_RNA (1)...(19): siRNA sense strand
ccagugacccugacgugua

SEQ ID NO: 1569270 - RNA, 19 nt, Homo sapiens
  misc_RNA (1)...(19): siRNA sense strand
gcagcuacagccuauauau

SEQ ID NO: 1569271 - RNA, 19 nt, Homo sapiens
  misc_RNA (1)...(19): siRNA sense strand
agcaggagaucccagauaa

SEQ ID NO: 1569272 - RNA, 19 nt, Homo sapiens
  misc_RNA (1)...(19): siRNA sense strand
guccucaucugcucaguug

SEQ ID NO: 1569273 - RNA, 19 nt, Homo sapiens
  misc_RNA (1)...(19): siRNA sense strand
uuuauucacuggcguacua

SEQ ID NO: 1569274 - RNA, 19 nt, Homo sapiens
  misc_RNA (1)...(19): siRNA sense strand
gacaucaccuuccuuuggu

SEQ ID NO: 1569275 - RNA, 19 nt, Homo sapiens
  misc_RNA (1)...(19): siRNA sense strand
ggaaucaguagcagcagaa

SEQ ID NO: 1569276 - RNA, 19 nt, Homo sapiens
  misc_RNA (1)...(19): siRNA sense strand
gauguggacuaugaagaug

SEQ ID NO: 1569277 - RNA, 19 nt, Homo sapiens
  misc_RNA (1)...(19): siRNA sense strand
gacaauggcguccaaaguc

SEQ ID NO: 1569278 - RNA, 19 nt, Homo sapiens
  misc_RNA (1)...(19): siRNA sense strand
gacagcagaguaugagauu

SEQ ID NO: 1569279 - RNA, 19 nt, Homo sapiens
  misc_RNA (1)...(19): siRNA sense strand
gcaggagaucccagauaaa

SEQ ID NO: 1569280 - RNA, 19 nt, Homo sapiens
  misc_RNA (1)...(19): siRNA sense strand
gagcaauauuacuguguag

SEQ ID NO: 1569281 - RNA, 19 nt, Homo sapiens
  misc_RNA (1)...(19): siRNA sense strand
gcacaggagacaucaccuu

SEQ ID NO: 1569282 - RNA, 19 nt, Homo sapiens
  misc_RNA (1)...(19): siRNA sense strand
gagacaggcugguccucau

SEQ ID NO: 1569283 - RNA, 19 nt, Homo sapiens
  misc_RNA (1)...(19): siRNA sense strand
aguaugagauuccuucagu

SEQ ID NO: 1569284 - RNA, 19 nt, Homo sapiens
  misc_RNA (1)...(19): siRNA sense strand
cauuacagauguggacuau

SEQ ID NO: 1569285 - RNA, 19 nt, Homo sapiens
  misc_RNA (1)...(19): siRNA sense strand
cugaggaaagcaaacauua

SEQ ID NO: 1569286 - RNA, 19 nt, Homo sapiens
  misc_RNA (1)...(19): siRNA sense strand
caggagaucccagauaaau

SEQ ID NO: 1569287 - RNA, 19 nt, Homo sapiens
  misc_RNA (1)...(19): siRNA sense strand
cagggcagcuacagccuau

SEQ ID NO: 1569288 - RNA, 19 nt, Homo sapiens
  misc_RNA (1)...(19): siRNA sense strand
gggcagcuacagccuauau

SEQ ID NO: 1569289 - RNA, 19 nt, Homo sapiens
  misc_RNA (1)...(19): siRNA sense strand
guaagaugcccuuucuaca

SEQ ID NO: 1569290 - RNA, 19 nt, Homo sapiens
  misc_RNA (1)...(19): siRNA sense strand
cguguaagaugcccuuucu

SEQ ID NO: 1569291 - RNA, 19 nt, Homo sapiens
  misc_RNA (1)...(19): siRNA sense strand
ggacuaugaagaugcuaug

SEQ ID NO: 1569292 - RNA, 19 nt, Homo sapiens
  misc_RNA (1)...(19): siRNA sense strand
uaagaugcccuuucuacag

SEQ ID NO: 1569293 - RNA, 19 nt, Homo sapiens
  misc_RNA (1)...(19): siRNA sense strand
aaagcaaacauuacagaug

SEQ ID NO: 1569294 - RNA, 19 nt, Homo sapiens
  misc_RNA (1)...(19): siRNA sense strand
uaugagauuccuucaguga

SEQ ID NO: 1569295 - RNA, 19 nt, Homo sapiens
  misc_RNA (1)...(19): siRNA sense strand
gcugaggaaagcaaacauu

SEQ ID NO: 1569296 - RNA, 19 nt, Homo sapiens
  misc_RNA (1)...(19): siRNA sense strand
agacaucaccuuccuuugg

SEQ ID NO: 1569297 - RNA, 19 nt, Homo sapiens
  misc_RNA (1)...(19): siRNA sense strand
gcucuccuccgauccugua

SEQ ID NO: 1569298 - RNA, 19 nt, Homo sapiens
  misc_RNA (1)...(19): siRNA sense strand
ccgaggcuguugcuguuga

SEQ ID NO: 1569299 - RNA, 19 nt, Homo sapiens
  misc_RNA (1)...(19): siRNA sense strand
gaagacacagggucauacu

SEQ ID NO: 1569300 - RNA, 19 nt, Homo sapiens
  misc_RNA (1)...(19): siRNA sense strand
cuacagccuauauaugaaa

SEQ ID NO: 1569301 - RNA, 19 nt, Homo sapiens
  misc_RNA (1)...(19): siRNA sense strand
gagccuccuucaaccuuuc

SEQ ID NO: 1569302 - RNA, 19 nt, Homo sapiens
  misc_RNA (1)...(19): siRNA sense strand
acaauggcguccaaagucu

SEQ ID NO: 1569303 - RNA, 19 nt, Homo sapiens
  misc_RNA (1)...(19): siRNA sense strand
gcuacggccucaaaagaaa

SEQ ID NO: 1569304 - RNA, 19 nt, Homo sapiens
  misc_RNA (1)...(19): siRNA sense strand
cagcuacagccuauauaug

SEQ ID NO: 1569305 - RNA, 19 nt, Homo sapiens
  misc_RNA (1)...(19): siRNA sense strand
aagaagacacagggucaua

SEQ ID NO: 1569306 - RNA, 19 nt, Homo sapiens
  misc_RNA (1)...(19): siRNA sense strand
ugccgaggcuguugcuguu

SEQ ID NO: 1569307 - RNA, 19 nt, Homo sapiens
  misc_RNA (1)...(19): siRNA sense strand
ccaguuccaguucugcuuu

SEQ ID NO: 1569308 - RNA, 19 nt, Homo sapiens
  misc_RNA (1)...(19): siRNA sense strand
cacagacaauggcguccaa

SEQ ID NO: 1569309 - RNA, 19 nt, Homo sapiens
  misc_RNA (1)...(19): siRNA sense strand
gcaauauuacuguguagcu

SEQ ID NO: 1569310 - RNA, 19 nt, Homo sapiens
  misc_RNA (1)...(19): siRNA sense strand
gacccagcguucacugaca

SEQ ID NO: 1569311 - RNA, 19 nt, Homo sapiens
  misc_RNA (1)...(19): siRNA sense strand
ucaccuuccuuugguacaa

SEQ ID NO: 1569312 - RNA, 19 nt, Homo sapiens
  misc_RNA (1)...(19): siRNA sense strand
agcuacagccuauauauga

SEQ ID NO: 1569313 - RNA, 19 nt, Homo sapiens
  misc_RNA (1)...(19): siRNA sense strand
acuaugaagaugcuaugua

SEQ ID NO: 1569314 - RNA, 19 nt, Homo sapiens
  misc_RNA (1)...(19): siRNA sense strand
cagaugcccaguuccaguu

SEQ ID NO: 1569315 - RNA, 19 nt, Homo sapiens
  misc_RNA (1)...(19): siRNA sense strand
agacaauggcguccaaagu

SEQ ID NO: 1569316 - RNA, 19 nt, Homo sapiens
  misc_RNA (1)...(19): siRNA sense strand
gcggugacacucaacuuca

SEQ ID NO: 1569317 - RNA, 19 nt, Homo sapiens
  misc_RNA (1)...(19): siRNA sense strand
ggccagaagcaaucaucuu

SEQ ID NO: 1569318 - RNA, 19 nt, Homo sapiens
  misc_RNA (1)...(19): siRNA sense strand
cagaagcaaucaucuuacc

SEQ ID NO: 1569319 - RNA, 19 nt, Homo sapiens
  misc_RNA (1)...(19): siRNA sense strand
ggagcaggaaucaguagca

SEQ ID NO: 1569320 - RNA, 19 nt, Homo sapiens
  misc_RNA (1)...(19): siRNA sense strand
uguaagaugcccuuucuac

SEQ ID NO: 1569321 - RNA, 19 nt, Homo sapiens
  misc_RNA (1)...(19): siRNA sense strand
gacccugacguguaagaug

SEQ ID NO: 1569322 - RNA, 19 nt, Homo sapiens
  misc_RNA (1)...(19): siRNA sense strand
gcugccauguggaaagaag

SEQ ID NO: 1569323 - RNA, 19 nt, Homo sapiens
  misc_RNA (1)...(19): siRNA sense strand
aggaugugcuggagcuuca

SEQ ID NO: 1569324 - RNA, 19 nt, Homo sapiens
  misc_RNA (1)...(19): siRNA sense strand
ugacagcagaguaugagau

SEQ ID NO: 1569325 - RNA, 19 nt, Homo sapiens
  misc_RNA (1)...(19): siRNA sense strand
caucugcucaguugcuaug

SEQ ID NO: 1569326 - RNA, 19 nt, Homo sapiens
  misc_RNA (1)...(19): siRNA sense strand
ccugugaggccaacaaugg

SEQ ID NO: 1569327 - RNA, 19 nt, Homo sapiens
  misc_RNA (1)...(19): siRNA sense strand
ucgcugccauguggaaaga

SEQ ID NO: 1569328 - RNA, 19 nt, Homo sapiens
  misc_RNA (1)...(19): siRNA sense strand
gagacaucaccuuccuuug

SEQ ID NO: 1569329 - RNA, 19 nt, Homo sapiens
  misc_RNA (1)...(19): siRNA sense strand
gaaucaguagcagcagaaa

SEQ ID NO: 1569330 - RNA, 19 nt, Homo sapiens
  misc_RNA (1)...(19): siRNA sense strand
uaaguggggaugagguuua

SEQ ID NO: 1569331 - RNA, 19 nt, Homo sapiens
  misc_RNA (1)...(19): siRNA sense strand
ggcagcuacagccuauaua

SEQ ID NO: 1569332 - RNA, 19 nt, Homo sapiens
  misc_RNA (1)...(19): siRNA sense strand
guucaccuaccucaacuca

SEQ ID NO: 1569333 - RNA, 19 nt, Homo sapiens
  misc_RNA (1)...(19): siRNA sense strand
ucagugagggagagugaug

SEQ ID NO: 1569334 - RNA, 19 nt, Homo sapiens
  misc_RNA (1)...(19): siRNA sense strand
acaucaccuuccuuuggua

SEQ ID NO: 1569335 - RNA, 19 nt, Homo sapiens
  misc_RNA (1)...(19): siRNA sense strand
ccucuggugucauaucuaa

SEQ ID NO: 1569336 - RNA, 19 nt, Homo sapiens
  misc_RNA (1)...(19): siRNA sense strand
ccucuggugucauaucuaa

SEQ ID NO: 1569337 - RNA, 19 nt, Homo sapiens
  misc_RNA (1)...(19): siRNA sense strand
ggugucauaucuaagaaau

SEQ ID NO: 1569338 - RNA, 19 nt, Homo sapiens
  misc_RNA (1)...(19): siRNA sense strand
ccguuuauaugucgucuuu

SEQ ID NO: 1569339 - RNA, 19 nt, Homo sapiens
  misc_RNA (1)...(19): siRNA sense strand
ggauugccuuucacucugu

SEQ ID NO: 1569340 - RNA, 19 nt, Homo sapiens
  misc_RNA (1)...(19): siRNA sense strand
ggauugccuuucacucugu

SEQ ID NO: 1569341 - RNA, 19 nt, Homo sapiens
  misc_RNA (1)...(19): siRNA sense strand
gugugccucuggugucaua

SEQ ID NO: 1569342 - RNA, 19 nt, Homo sapiens
  misc_RNA (1)...(19): siRNA sense strand
gugugccucuggugucaua

SEQ ID NO: 1569343 - RNA, 19 nt, Homo sapiens
  misc_RNA (1)...(19): siRNA sense strand
guuuauaugucgucuuugg

SEQ ID NO: 1569344 - RNA, 19 nt, Homo sapiens
  misc_RNA (1)...(19): siRNA sense strand
uaugucgucuuuggagaaa

SEQ ID NO: 1569345 - RNA, 19 nt, Homo sapiens
  misc_RNA (1)...(19): siRNA sense strand
ucuguuuguuggccguuua

SEQ ID NO: 1569346 - RNA, 19 nt, Homo sapiens
  misc_RNA (1)...(19): siRNA sense strand
uauauguucuggguauuca

SEQ ID NO: 1569347 - RNA, 19 nt, Homo sapiens
  misc_RNA (1)...(19): siRNA sense strand
ugucgucuuuggagaaaug

SEQ ID NO: 1569348 - RNA, 19 nt, Homo sapiens
  misc_RNA (1)...(19): siRNA sense strand
ucuuugauguacagaaguu

SEQ ID NO: 1569349 - RNA, 19 nt, Homo sapiens
  misc_RNA (1)...(19): siRNA sense strand
ucuuugauguacagaaguu

SEQ ID NO: 1569350 - RNA, 19 nt, Homo sapiens
  misc_RNA (1)...(19): siRNA sense strand
aaucacugccucacccuuu

SEQ ID NO: 1569351 - RNA, 19 nt, Homo sapiens
  misc_RNA (1)...(19): siRNA sense strand
ucaaucagguguguguuuu

SEQ ID NO: 1569352 - RNA, 19 nt, Homo sapiens
  misc_RNA (1)...(19): siRNA sense strand
gcugaguaucuguuuguug

SEQ ID NO: 1569353 - RNA, 19 nt, Homo sapiens
  misc_RNA (1)...(19): siRNA sense strand
aaaauacuuugucccauuc

SEQ ID NO: 1569354 - RNA, 19 nt, Homo sapiens
  misc_RNA (1)...(19): siRNA sense strand
aaaauacuuugucccauuc

SEQ ID NO: 1569355 - RNA, 19 nt, Homo sapiens
  misc_RNA (1)...(19): siRNA sense strand
gauugccuuucacucuguu

SEQ ID NO: 1569356 - RNA, 19 nt, Homo sapiens
  misc_RNA (1)...(19): siRNA sense strand
gauugccuuucacucuguu

SEQ ID NO: 1569357 - RNA, 19 nt, Homo sapiens
  misc_RNA (1)...(19): siRNA sense strand
uaagaagucucugguggua

SEQ ID NO: 1569358 - RNA, 19 nt, Homo sapiens
  misc_RNA (1)...(19): siRNA sense strand
ccaggaguaucgugaguuu

SEQ ID NO: 1569359 - RNA, 19 nt, Homo sapiens
  misc_RNA (1)...(19): siRNA sense strand
ggucaaggcuguuuguacu

SEQ ID NO: 1569360 - RNA, 19 nt, Homo sapiens
  misc_RNA (1)...(19): siRNA sense strand
gagacuauuuggcgauuca

SEQ ID NO: 1569361 - RNA, 19 nt, Homo sapiens
  misc_RNA (1)...(19): siRNA sense strand
gaauguugcugccuuugag

SEQ ID NO: 1569362 - RNA, 19 nt, Homo sapiens
  misc_RNA (1)...(19): siRNA sense strand
ccguaagggucauuugaaa

SEQ ID NO: 1569363 - RNA, 19 nt, Homo sapiens
  misc_RNA (1)...(19): siRNA sense strand
ucaaggcuguuuguacuga

SEQ ID NO: 1569364 - RNA, 19 nt, Homo sapiens
  misc_RNA (1)...(19): siRNA sense strand
gaggcuggcuuaccuucga

SEQ ID NO: 1569365 - RNA, 19 nt, Homo sapiens
  misc_RNA (1)...(19): siRNA sense strand
uguaugaggugguguccaa

SEQ ID NO: 1569366 - RNA, 19 nt, Homo sapiens
  misc_RNA (1)...(19): siRNA sense strand
caaugcaggagauguauga

SEQ ID NO: 1569367 - RNA, 19 nt, Homo sapiens
  misc_RNA (1)...(19): siRNA sense strand
caccugucauggaacguua

SEQ ID NO: 1569368 - RNA, 19 nt, Homo sapiens
  misc_RNA (1)...(19): siRNA sense strand
acagaauguugcugccuuu

SEQ ID NO: 1569369 - RNA, 19 nt, Homo sapiens
  misc_RNA (1)...(19): siRNA sense strand
agaagucucuggugguauc

SEQ ID NO: 1569370 - RNA, 19 nt, Homo sapiens
  misc_RNA (1)...(19): siRNA sense strand
gaaccugcacuguggacuu

SEQ ID NO: 1569371 - RNA, 19 nt, Homo sapiens
  misc_RNA (1)...(19): siRNA sense strand
uguccaacguccaggagua

SEQ ID NO: 1569372 - RNA, 19 nt, Homo sapiens
  misc_RNA (1)...(19): siRNA sense strand
cguuacaccucugcaguuu

SEQ ID NO: 1569373 - RNA, 19 nt, Homo sapiens
  misc_RNA (1)...(19): siRNA sense strand
ccagcuggccaccauguuu

SEQ ID NO: 1569374 - RNA, 19 nt, Homo sapiens
  misc_RNA (1)...(19): siRNA sense strand
cgaccaaugagguuucuga

SEQ ID NO: 1569375 - RNA, 19 nt, Homo sapiens
  misc_RNA (1)...(19): siRNA sense strand
caagcucuucaaccacuua

SEQ ID NO: 1569376 - RNA, 19 nt, Homo sapiens
  misc_RNA (1)...(19): siRNA sense strand
gguacucaaugcaggagau

SEQ ID NO: 1569377 - RNA, 19 nt, Homo sapiens
  misc_RNA (1)...(19): siRNA sense strand
aaccugcacuguggacuuu

SEQ ID NO: 1569378 - RNA, 19 nt, Homo sapiens
  misc_RNA (1)...(19): siRNA sense strand
gcaagcucuucaaccacuu

SEQ ID NO: 1569379 - RNA, 19 nt, Homo sapiens
  misc_RNA (1)...(19): siRNA sense strand
gcugcucccuucaccaaca

SEQ ID NO: 1569380 - RNA, 19 nt, Homo sapiens
  misc_RNA (1)...(19): siRNA sense strand
ccacuuagagacuauuugg

SEQ ID NO: 1569381 - RNA, 19 nt, Homo sapiens
  misc_RNA (1)...(19): siRNA sense strand
uagagacuauuuggcgauu

SEQ ID NO: 1569382 - RNA, 19 nt, Homo sapiens
  misc_RNA (1)...(19): siRNA sense strand
ggaguaucgugaguuugug

SEQ ID NO: 1569383 - RNA, 19 nt, Homo sapiens
  misc_RNA (1)...(19): siRNA sense strand
gcgauucagcccugguauu

SEQ ID NO: 1569384 - RNA, 19 nt, Homo sapiens
  misc_RNA (1)...(19): siRNA sense strand
uuugugcccugguguaaga

SEQ ID NO: 1569385 - RNA, 19 nt, Homo sapiens
  misc_RNA (1)...(19): siRNA sense strand
guaagggucauuugaaagc

SEQ ID NO: 1569386 - RNA, 19 nt, Homo sapiens
  misc_RNA (1)...(19): siRNA sense strand
ucaaccacuuagagacuau

SEQ ID NO: 1569387 - RNA, 19 nt, Homo sapiens
  misc_RNA (1)...(19): siRNA sense strand
guacugauggcaagcucuu

SEQ ID NO: 1569388 - RNA, 19 nt, Homo sapiens
  misc_RNA (1)...(19): siRNA sense strand
cgauucagcccugguauuc

SEQ ID NO: 1569389 - RNA, 19 nt, Homo sapiens
  misc_RNA (1)...(19): siRNA sense strand
gccguaagggucauuugaa

SEQ ID NO: 1569390 - RNA, 19 nt, Homo sapiens
  misc_RNA (1)...(19): siRNA sense strand
acucaaugcaggagaugua

SEQ ID NO: 1569391 - RNA, 19 nt, Homo sapiens
  misc_RNA (1)...(19): siRNA sense strand
gaguuugugcccuggugua

SEQ ID NO: 1569392 - RNA, 19 nt, Homo sapiens
  misc_RNA (1)...(19): siRNA sense strand
ucgauuuccuuugaauuuc

SEQ ID NO: 1569393 - RNA, 19 nt, Homo sapiens
  misc_RNA (1)...(19): siRNA sense strand
gccguuccuucaugggauu

SEQ ID NO: 1569394 - RNA, 19 nt, Homo sapiens
  misc_RNA (1)...(19): siRNA sense strand
gaaagcccagcuggagguu

SEQ ID NO: 1569395 - RNA, 19 nt, Homo sapiens
  misc_RNA (1)...(19): siRNA sense strand
agaauguugcugccuuuga

SEQ ID NO: 1569396 - RNA, 19 nt, Homo sapiens
  misc_RNA (1)...(19): siRNA sense strand
ccagcuggagguuggcuuu

SEQ ID NO: 1569397 - RNA, 19 nt, Homo sapiens
  misc_RNA (1)...(19): siRNA sense strand
ucgggcagccaccaaguuu

SEQ ID NO: 1569398 - RNA, 19 nt, Homo sapiens
  misc_RNA (1)...(19): siRNA sense strand
uuacaccucugcaguuucc

SEQ ID NO: 1569399 - RNA, 19 nt, Homo sapiens
  misc_RNA (1)...(19): siRNA sense strand
ucaaaccucacauggucaa

SEQ ID NO: 1569400 - RNA, 19 nt, Homo sapiens
  misc_RNA (1)...(19): siRNA sense strand
caaggcuguuuguacugau

SEQ ID NO: 1569401 - RNA, 19 nt, Homo sapiens
  misc_RNA (1)...(19): siRNA sense strand
gaacugcuccgccuacuac

SEQ ID NO: 1569402 - RNA, 19 nt, Homo sapiens
  misc_RNA (1)...(19): siRNA sense strand
ggacucaccuuggccuuca

SEQ ID NO: 1569403 - RNA, 19 nt, Homo sapiens
  misc_RNA (1)...(19): siRNA sense strand
gagugugugcgaaaccuaa

SEQ ID NO: 1569404 - RNA, 19 nt, Homo sapiens
  misc_RNA (1)...(19): siRNA sense strand
cauccucgccguccucaga

SEQ ID NO: 1569405 - RNA, 19 nt, Homo sapiens
  misc_RNA (1)...(19): siRNA sense strand
gagaacugcuccgccuacu

SEQ ID NO: 1569406 - RNA, 19 nt, Homo sapiens
  misc_RNA (1)...(19): siRNA sense strand
gauaagcuccgaagaagua

SEQ ID NO: 1569407 - RNA, 19 nt, Homo sapiens
  misc_RNA (1)...(19): siRNA sense strand
gaucauggcucgucugcaa

SEQ ID NO: 1569408 - RNA, 19 nt, Homo sapiens
  misc_RNA (1)...(19): siRNA sense strand
gaagaggaauuugaucauu

SEQ ID NO: 1569409 - RNA, 19 nt, Homo sapiens
  misc_RNA (1)...(19): siRNA sense strand
gagagaugguugcuacuaa

SEQ ID NO: 1569410 - RNA, 19 nt, Homo sapiens
  misc_RNA (1)...(19): siRNA sense strand
gcauggagcuggaaaugga

SEQ ID NO: 1569411 - RNA, 19 nt, Homo sapiens
  misc_RNA (1)...(19): siRNA sense strand
gaaagucucaggcaagauu

SEQ ID NO: 1569412 - RNA, 19 nt, Homo sapiens
  misc_RNA (1)...(19): siRNA sense strand
gcaguaacaugccuuuauc

SEQ ID NO: 1569413 - RNA, 19 nt, Homo sapiens
  misc_RNA (1)...(19): siRNA sense strand
uaacaugccuuuaucaaac

SEQ ID NO: 1569414 - RNA, 19 nt, Homo sapiens
  misc_RNA (1)...(19): siRNA sense strand
gagauaagcuccgaagaag

SEQ ID NO: 1569415 - RNA, 19 nt, Homo sapiens
  misc_RNA (1)...(19): siRNA sense strand
gcaucuguaucaagacaua

SEQ ID NO: 1569416 - RNA, 19 nt, Homo sapiens
  misc_RNA (1)...(19): siRNA sense strand
ucaagaauaugaccaauac

SEQ ID NO: 1569417 - RNA, 19 nt, Homo sapiens
  misc_RNA (1)...(19): siRNA sense strand
agacauaguuccagugugu

SEQ ID NO: 1569418 - RNA, 19 nt, Homo sapiens
  misc_RNA (1)...(19): siRNA sense strand
gaccuucguuggcaauaaa

SEQ ID NO: 1569419 - RNA, 19 nt, Homo sapiens
  misc_RNA (1)...(19): siRNA sense strand
uaaccugccucgaagcaaa

SEQ ID NO: 1569420 - RNA, 19 nt, Homo sapiens
  misc_RNA (1)...(19): siRNA sense strand
guagugaucaagaauauga

SEQ ID NO: 1569421 - RNA, 19 nt, Homo sapiens
  misc_RNA (1)...(19): siRNA sense strand
gauggaaauuggagagaug

SEQ ID NO: 1569422 - RNA, 19 nt, Homo sapiens
  misc_RNA (1)...(19): siRNA sense strand
ggacauguagugaucaaga

SEQ ID NO: 1569423 - RNA, 19 nt, Homo sapiens
  misc_RNA (1)...(19): siRNA sense strand
gaagaaguaugccuaaccu

SEQ ID NO: 1569424 - RNA, 19 nt, Homo sapiens
  misc_RNA (1)...(19): siRNA sense strand
gccauuaguagcaacauua

SEQ ID NO: 1569425 - RNA, 19 nt, Homo sapiens
  misc_RNA (1)...(19): siRNA sense strand
guaacaugccuuuaucaaa

SEQ ID NO: 1569426 - RNA, 19 nt, Homo sapiens
  misc_RNA (1)...(19): siRNA sense strand
gaucagcaaccaaauagga

SEQ ID NO: 1569427 - RNA, 19 nt, Homo sapiens
  misc_RNA (1)...(19): siRNA sense strand
ccagaucagcaaccaaaua

SEQ ID NO: 1569428 - RNA, 19 nt, Homo sapiens
  misc_RNA (1)...(19): siRNA sense strand
gacauguagugaucaagaa

SEQ ID NO: 1569429 - RNA, 19 nt, Homo sapiens
  misc_RNA (1)...(19): siRNA sense strand
gcacaaccuguuagaaguu

SEQ ID NO: 1569430 - RNA, 19 nt, Homo sapiens
  misc_RNA (1)...(19): siRNA sense strand
agaggaauuugaucauuug

SEQ ID NO: 1569431 - RNA, 19 nt, Homo sapiens
  misc_RNA (1)...(19): siRNA sense strand
ccaaguacaacugccauua

SEQ ID NO: 1569432 - RNA, 19 nt, Homo sapiens
  misc_RNA (1)...(19): siRNA sense strand
gggaguaaccugccucgaa

SEQ ID NO: 1569433 - RNA, 19 nt, Homo sapiens
  misc_RNA (1)...(19): siRNA sense strand
ggagagaugguugcuacua

SEQ ID NO: 1569434 - RNA, 19 nt, Homo sapiens
  misc_RNA (1)...(19): siRNA sense strand
aaagggacauguagugauc

SEQ ID NO: 1569435 - RNA, 19 nt, Homo sapiens
  misc_RNA (1)...(19): siRNA sense strand
guacaacugccauuaguag

SEQ ID NO: 1569436 - RNA, 19 nt, Homo sapiens
  misc_RNA (1)...(19): siRNA sense strand
caacugccauuaguagcaa

SEQ ID NO: 1569437 - RNA, 19 nt, Homo sapiens
  misc_RNA (1)...(19): siRNA sense strand
uacaggaccucacugaugu

SEQ ID NO: 1569438 - RNA, 19 nt, Homo sapiens
  misc_RNA (1)...(19): siRNA sense strand
caaagccucugucuucacu

SEQ ID NO: 1569439 - RNA, 19 nt, Homo sapiens
  misc_RNA (1)...(19): siRNA sense strand
aauacagucuggaggauga

SEQ ID NO: 1569440 - RNA, 19 nt, Homo sapiens
  misc_RNA (1)...(19): siRNA sense strand
gaucaagaauaugaccaau

SEQ ID NO: 1569441 - RNA, 19 nt, Homo sapiens
  misc_RNA (1)...(19): siRNA sense strand
aagaaagucucaggcaaga

SEQ ID NO: 1569442 - RNA, 19 nt, Homo sapiens
  misc_RNA (1)...(19): siRNA sense strand
ggauggaaauuggagagau

SEQ ID NO: 1569443 - RNA, 19 nt, Homo sapiens
  misc_RNA (1)...(19): siRNA sense strand
ggaggaugaagaggaauuu

SEQ ID NO: 1569444 - RNA, 19 nt, Homo sapiens
  misc_RNA (1)...(19): siRNA sense strand
guucaaggcagcaguaaca

SEQ ID NO: 1569445 - RNA, 19 nt, Homo sapiens
  misc_RNA (1)...(19): siRNA sense strand
gcagcaacaguauuauuca

SEQ ID NO: 1569446 - RNA, 19 nt, Homo sapiens
  misc_RNA (1)...(19): siRNA sense strand
ggaugaagaggaauuugau

SEQ ID NO: 1569447 - RNA, 19 nt, Homo sapiens
  misc_RNA (1)...(19): siRNA sense strand
cagcaucuguaucaagaca

SEQ ID NO: 1569448 - RNA, 19 nt, Homo sapiens
  misc_RNA (1)...(19): siRNA sense strand
gcaagauuaugcuucuacu

SEQ ID NO: 1569449 - RNA, 19 nt, Homo sapiens
  misc_RNA (1)...(19): siRNA sense strand
cacaaccuguuagaaguuu

SEQ ID NO: 1569450 - RNA, 19 nt, Homo sapiens
  misc_RNA (1)...(19): siRNA sense strand
uuacaggaccucacugaug

SEQ ID NO: 1569451 - RNA, 19 nt, Homo sapiens
  misc_RNA (1)...(19): siRNA sense strand
caagacauaguuccagugu

SEQ ID NO: 1569452 - RNA, 19 nt, Homo sapiens
  misc_RNA (1)...(19): siRNA sense strand
ggaaauuggagagaugguu

SEQ ID NO: 1569453 - RNA, 19 nt, Homo sapiens
  misc_RNA (1)...(19): siRNA sense strand
cauguagugaucaagaaua

SEQ ID NO: 1569454 - RNA, 19 nt, Homo sapiens
  misc_RNA (1)...(19): siRNA sense strand
caaguacaacugccauuag

SEQ ID NO: 1569455 - RNA, 19 nt, Homo sapiens
  misc_RNA (1)...(19): siRNA sense strand
cagcagcaacaguauuauu

SEQ ID NO: 1569456 - RNA, 19 nt, Homo sapiens
  misc_RNA (1)...(19): siRNA sense strand
cagacuuucuccagcauuc

SEQ ID NO: 1569457 - RNA, 19 nt, Homo sapiens
  misc_RNA (1)...(19): siRNA sense strand
cagaucagcaaccaaauag

SEQ ID NO: 1569458 - RNA, 19 nt, Homo sapiens
  misc_RNA (1)...(19): siRNA sense strand
agauuaugcuucuacuuca

SEQ ID NO: 1569459 - RNA, 19 nt, Homo sapiens
  misc_RNA (1)...(19): siRNA sense strand
gaaauagucagaguuuuga

SEQ ID NO: 1569460 - RNA, 19 nt, Homo sapiens
  misc_RNA (1)...(19): siRNA sense strand
aagauuaugcuucuacuuc

SEQ ID NO: 1569461 - RNA, 19 nt, Homo sapiens
  misc_RNA (1)...(19): siRNA sense strand
cuccaaagccucugucuuc

SEQ ID NO: 1569462 - RNA, 19 nt, Homo sapiens
  misc_RNA (1)...(19): siRNA sense strand
ucuggaggaugaagaggaa

SEQ ID NO: 1569463 - RNA, 19 nt, Homo sapiens
  misc_RNA (1)...(19): siRNA sense strand
ccaauacagucuggaggau

SEQ ID NO: 1569464 - RNA, 19 nt, Homo sapiens
  misc_RNA (1)...(19): siRNA sense strand
gcagcaguaacaugccuuu

SEQ ID NO: 1569465 - RNA, 19 nt, Homo sapiens
  misc_RNA (1)...(19): siRNA sense strand
caggcaagauuaugcuucu

SEQ ID NO: 1569466 - RNA, 19 nt, Homo sapiens
  misc_RNA (1)...(19): siRNA sense strand
accagcagcaacaguauua

SEQ ID NO: 1569467 - RNA, 19 nt, Homo sapiens
  misc_RNA (1)...(19): siRNA sense strand
ucugagggauggaaauugg

SEQ ID NO: 1569468 - RNA, 19 nt, Homo sapiens
  misc_RNA (1)...(19): siRNA sense strand
uggcucgucugcaagaaga

SEQ ID NO: 1569469 - RNA, 19 nt, Homo sapiens
  misc_RNA (1)...(19): siRNA sense strand
agaccuucguuggcaauaa

SEQ ID NO: 1569470 - RNA, 19 nt, Homo sapiens
  misc_RNA (1)...(19): siRNA sense strand
caaccaaauaggaccaaug

SEQ ID NO: 1569471 - RNA, 19 nt, Homo sapiens
  misc_RNA (1)...(19): siRNA sense strand
gcaaccaaauaggaccaau

SEQ ID NO: 1569472 - RNA, 19 nt, Homo sapiens
  misc_RNA (1)...(19): siRNA sense strand
aaguacaacugccauuagu

SEQ ID NO: 1569473 - RNA, 19 nt, Homo sapiens
  misc_RNA (1)...(19): siRNA sense strand
gcacucugagggauggaaa

SEQ ID NO: 1569474 - RNA, 19 nt, Homo sapiens
  misc_RNA (1)...(19): siRNA sense strand
gccuuuaucaaacggcuua

SEQ ID NO: 1569475 - RNA, 19 nt, Homo sapiens
  misc_RNA (1)...(19): siRNA sense strand
gcccggaugccaaguacaa

SEQ ID NO: 1569476 - RNA, 19 nt, Homo sapiens
  misc_RNA (1)...(19): siRNA sense strand
uucagcaucuguaucaaga

SEQ ID NO: 1569477 - RNA, 19 nt, Homo sapiens
  misc_RNA (1)...(19): siRNA sense strand
uaaauuacaggaccucacu

SEQ ID NO: 1569478 - RNA, 19 nt, Homo sapiens
  misc_RNA (1)...(19): siRNA sense strand
cgaaauagucagaguuuug

SEQ ID NO: 1569479 - RNA, 19 nt, Homo sapiens
  misc_RNA (1)...(19): siRNA sense strand
ggcaauaaaugggaguaac

SEQ ID NO: 1569480 - RNA, 19 nt, Homo sapiens
  misc_RNA (1)...(19): siRNA sense strand
aauaggaccaauggagaua

SEQ ID NO: 1569481 - RNA, 19 nt, Homo sapiens
  misc_RNA (1)...(19): siRNA sense strand
ugcacaaccuguuagaagu

SEQ ID NO: 1569482 - RNA, 19 nt, Homo sapiens
  misc_RNA (1)...(19): siRNA sense strand
aaaauugcacaaccuguua

SEQ ID NO: 1569483 - RNA, 19 nt, Homo sapiens
  misc_RNA (1)...(19): siRNA sense strand
ucuauccgacagccucuua

SEQ ID NO: 1569484 - RNA, 19 nt, Homo sapiens
  misc_RNA (1)...(19): siRNA sense strand
caagauuaugcuucuacuu

SEQ ID NO: 1569485 - RNA, 19 nt, Homo sapiens
  misc_RNA (1)...(19): siRNA sense strand
aaagucucaggcaagauua

SEQ ID NO: 1569486 - RNA, 19 nt, Homo sapiens
  misc_RNA (1)...(19): siRNA sense strand
uccagugugucauugaguu

SEQ ID NO: 1569487 - RNA, 19 nt, Homo sapiens
  misc_RNA (1)...(19): siRNA sense strand
gauuaugcuucuacuucag

SEQ ID NO: 1569488 - RNA, 19 nt, Homo sapiens
  misc_RNA (1)...(19): siRNA sense strand
gaugaagaggaauuugauc

SEQ ID NO: 1569489 - RNA, 19 nt, Homo sapiens
  misc_RNA (1)...(19): siRNA sense strand
gcugcagcuucugggauaa

SEQ ID NO: 1569490 - RNA, 19 nt, Homo sapiens
  misc_RNA (1)...(19): siRNA sense strand
uuaaagccacagccuaugu

SEQ ID NO: 1569491 - RNA, 19 nt, Homo sapiens
  misc_RNA (1)...(19): siRNA sense strand
ugcgaaauagucagaguuu

SEQ ID NO: 1569492 - RNA, 19 nt, Homo sapiens
  misc_RNA (1)...(19): siRNA sense strand
auaauuaccagcagcaaca

SEQ ID NO: 1569493 - RNA, 19 nt, Homo sapiens
  misc_RNA (1)...(19): siRNA sense strand
ucuuaaagccacagccuau

SEQ ID NO: 1569494 - RNA, 19 nt, Homo sapiens
  misc_RNA (1)...(19): siRNA sense strand
aagccucugucuucacuca

SEQ ID NO: 1569495 - RNA, 19 nt, Homo sapiens
  misc_RNA (1)...(19): siRNA sense strand
gcaauaaaugggaguaacc

SEQ ID NO: 1569496 - RNA, 19 nt, Homo sapiens
  misc_RNA (1)...(19): siRNA sense strand
ugaagaggaauuugaucau

SEQ ID NO: 1569497 - RNA, 19 nt, Homo sapiens
  misc_RNA (1)...(19): siRNA sense strand
caaaauugcacaaccuguu

SEQ ID NO: 1569498 - RNA, 19 nt, Homo sapiens
  misc_RNA (1)...(19): siRNA sense strand
uauccgacagccucuuaaa

SEQ ID NO: 1569499 - RNA, 19 nt, Homo sapiens
  misc_RNA (1)...(19): siRNA sense strand
gggcauuucccagugucua

SEQ ID NO: 1569500 - RNA, 19 nt, Homo sapiens
  misc_RNA (1)...(19): siRNA sense strand
uaggaccaauggagauaag

SEQ ID NO: 1569501 - RNA, 19 nt, Homo sapiens
  misc_RNA (1)...(19): siRNA sense strand
aggaugaagaggaauuuga

SEQ ID NO: 1569502 - RNA, 19 nt, Homo sapiens
  misc_RNA (1)...(19): siRNA sense strand
agaauaugaccaauacagu

SEQ ID NO: 1569503 - RNA, 19 nt, Homo sapiens
  misc_RNA (1)...(19): siRNA sense strand
acagcuguauuccaacaca

SEQ ID NO: 1569504 - RNA, 19 nt, Homo sapiens
  misc_RNA (1)...(19): siRNA sense strand
ucaaggcagcaguaacaug

SEQ ID NO: 1569505 - RNA, 19 nt, Homo sapiens
  misc_RNA (1)...(19): siRNA sense strand
gcaacucugaggucaagua

SEQ ID NO: 1569506 - RNA, 19 nt, Homo sapiens
  misc_RNA (1)...(19): siRNA sense strand
ucaaguacgccucggagaa

SEQ ID NO: 1569507 - RNA, 19 nt, Homo sapiens
  misc_RNA (1)...(19): siRNA sense strand
agaagcauuuccaggacaa

SEQ ID NO: 1569508 - RNA, 19 nt, Homo sapiens
  misc_RNA (1)...(19): siRNA sense strand
caaguacgccucggagaag

SEQ ID NO: 1569509 - RNA, 19 nt, Homo sapiens
  misc_RNA (1)...(19): siRNA sense strand
caugagauccgcugcaacu

SEQ ID NO: 1569510 - RNA, 19 nt, Homo sapiens
  misc_RNA (1)...(19): siRNA sense strand
gaugcugccaguguucuuu

SEQ ID NO: 1569511 - RNA, 19 nt, Homo sapiens
  misc_RNA (1)...(19): siRNA sense strand
ccaggacaaggucuucuau

SEQ ID NO: 1569512 - RNA, 19 nt, Homo sapiens
  misc_RNA (1)...(19): siRNA sense strand
aggacaaggucuucuaugc

SEQ ID NO: 1569513 - RNA, 19 nt, Homo sapiens
  misc_RNA (1)...(19): siRNA sense strand
gcagcaccaccaucaucuu

SEQ ID NO: 1569514 - RNA, 19 nt, Homo sapiens
  misc_RNA (1)...(19): siRNA sense strand
cagcaccaccaucaucuuc

SEQ ID NO: 1569515 - RNA, 19 nt, Homo sapiens
  misc_RNA (1)...(19): siRNA sense strand
ggaacccacgcaugagauc

SEQ ID NO: 1569516 - RNA, 19 nt, Homo sapiens
  misc_RNA (1)...(19): siRNA sense strand
cgcaugagauccgcugcaa

SEQ ID NO: 1569517 - RNA, 19 nt, Homo sapiens
  misc_RNA (1)...(19): siRNA sense strand
gaaccgauccaaagaguuu

SEQ ID NO: 1569518 - RNA, 19 nt, Homo sapiens
  misc_RNA (1)...(19): siRNA sense strand
ggacagcauugaaaucuuc

SEQ ID NO: 1569519 - RNA, 19 nt, Homo sapiens
  misc_RNA (1)...(19): siRNA sense strand
caugaaagauggguccuua

SEQ ID NO: 1569520 - RNA, 19 nt, Homo sapiens
  misc_RNA (1)...(19): siRNA sense strand
caagagggcccaauuauuc

SEQ ID NO: 1569521 - RNA, 19 nt, Homo sapiens
  misc_RNA (1)...(19): siRNA sense strand
ccaaagaguuucucaugga

SEQ ID NO: 1569522 - RNA, 19 nt, Homo sapiens
  misc_RNA (1)...(19): siRNA sense strand
gaacaacacggacacauuc

SEQ ID NO: 1569523 - RNA, 19 nt, Homo sapiens
  misc_RNA (1)...(19): siRNA sense strand
gaacgacaccuucaucaug

SEQ ID NO: 1569524 - RNA, 19 nt, Homo sapiens
  misc_RNA (1)...(19): siRNA sense strand
cauaugacaucuucacuga

SEQ ID NO: 1569525 - RNA, 19 nt, Homo sapiens
  misc_RNA (1)...(19): siRNA sense strand
gggugaagguucucuauga

SEQ ID NO: 1569526 - RNA, 19 nt, Homo sapiens
  misc_RNA (1)...(19): siRNA sense strand
acaacgagaucacguacua

SEQ ID NO: 1569527 - RNA, 19 nt, Homo sapiens
  misc_RNA (1)...(19): siRNA sense strand
aaauagagcugggccauga

SEQ ID NO: 1569528 - RNA, 19 nt, Homo sapiens
  misc_RNA (1)...(19): siRNA sense strand
gcccauggcugacuacguu

SEQ ID NO: 1569529 - RNA, 19 nt, Homo sapiens
  misc_RNA (1)...(19): siRNA sense strand
gccaacaucuucaucauca

SEQ ID NO: 1569530 - RNA, 19 nt, Homo sapiens
  misc_RNA (1)...(19): siRNA sense strand
ggcaauguguacuucuuua

SEQ ID NO: 1569531 - RNA, 19 nt, Homo sapiens
  misc_RNA (1)...(19): siRNA sense strand
gagaggauccuacugaaga

SEQ ID NO: 1569532 - RNA, 19 nt, Homo sapiens
  misc_RNA (1)...(19): siRNA sense strand
gugcagagaccuugacuuu

SEQ ID NO: 1569533 - RNA, 19 nt, Homo sapiens
  misc_RNA (1)...(19): siRNA sense strand
gcagagaccuugacuuucc

SEQ ID NO: 1569534 - RNA, 19 nt, Homo sapiens
  misc_RNA (1)...(19): siRNA sense strand
gaaugacccuccugaaguc

SEQ ID NO: 1569535 - RNA, 19 nt, Homo sapiens
  misc_RNA (1)...(19): siRNA sense strand
caaagaguuucucauggaa

SEQ ID NO: 1569536 - RNA, 19 nt, Homo sapiens
  misc_RNA (1)...(19): siRNA sense strand
ggaagaaccgauccaaaga

SEQ ID NO: 1569537 - RNA, 19 nt, Homo sapiens
  misc_RNA (1)...(19): siRNA sense strand
ccaaguacauguugaacug

SEQ ID NO: 1569538 - RNA, 19 nt, Homo sapiens
  misc_RNA (1)...(19): siRNA sense strand
ggaaugacccuccugaagu

SEQ ID NO: 1569539 - RNA, 19 nt, Homo sapiens
  misc_RNA (1)...(19): siRNA sense strand
ggacggaugccaaggugua

SEQ ID NO: 1569540 - RNA, 19 nt, Homo sapiens
  misc_RNA (1)...(19): siRNA sense strand
gcacagaugcuaaugucuu

SEQ ID NO: 1569541 - RNA, 19 nt, Homo sapiens
  misc_RNA (1)...(19): siRNA sense strand
ggacauugccucccucugu

SEQ ID NO: 1569542 - RNA, 19 nt, Homo sapiens
  misc_RNA (1)...(19): siRNA sense strand
agaagacccugguguguga

SEQ ID NO: 1569543 - RNA, 19 nt, Homo sapiens
  misc_RNA (1)...(19): siRNA sense strand
cuacaccagugaugucuuu

SEQ ID NO: 1569544 - RNA, 19 nt, Homo sapiens
  misc_RNA (1)...(19): siRNA sense strand
ggaacaacacggacacauu

SEQ ID NO: 1569545 - RNA, 19 nt, Homo sapiens
  misc_RNA (1)...(19): siRNA sense strand
gcaggcuccucccggauaa

SEQ ID NO: 1569546 - RNA, 19 nt, Homo sapiens
  misc_RNA (1)...(19): siRNA sense strand
cagccgagccuucaucuuu

SEQ ID NO: 1569547 - RNA, 19 nt, Homo sapiens
  misc_RNA (1)...(19): siRNA sense strand
uaugacaucuucacugaga

SEQ ID NO: 1569548 - RNA, 19 nt, Homo sapiens
  misc_RNA (1)...(19): siRNA sense strand
acacaccauuuguuccuua

SEQ ID NO: 1569549 - RNA, 19 nt, Homo sapiens
  misc_RNA (1)...(19): siRNA sense strand
cgagaucacguacuacuuu

SEQ ID NO: 1569550 - RNA, 19 nt, Homo sapiens
  misc_RNA (1)...(19): siRNA sense strand
ggugaagguucucuaugaa

SEQ ID NO: 1569551 - RNA, 19 nt, Homo sapiens
  misc_RNA (1)...(19): siRNA sense strand
guggagaucuggaaugaca

SEQ ID NO: 1569552 - RNA, 19 nt, Homo sapiens
  misc_RNA (1)...(19): siRNA sense strand
ccacagacacguuugaguu

SEQ ID NO: 1569553 - RNA, 19 nt, Homo sapiens
  misc_RNA (1)...(19): siRNA sense strand
guaguaagcgcaucugguu

SEQ ID NO: 1569554 - RNA, 19 nt, Homo sapiens
  misc_RNA (1)...(19): siRNA sense strand
gcccaauuauuccauacua

SEQ ID NO: 1569555 - RNA, 19 nt, Homo sapiens
  misc_RNA (1)...(19): siRNA sense strand
gggcacagaugcuaauguc

SEQ ID NO: 1569556 - RNA, 19 nt, Homo sapiens
  misc_RNA (1)...(19): siRNA sense strand
gcaauguguacuucuuuaa

SEQ ID NO: 1569557 - RNA, 19 nt, Homo sapiens
  misc_RNA (1)...(19): siRNA sense strand
gcacgacaacaaagggaua

SEQ ID NO: 1569558 - RNA, 19 nt, Homo sapiens
  misc_RNA (1)...(19): siRNA sense strand
ugaagguucucuaugaaau

SEQ ID NO: 1569559 - RNA, 19 nt, Homo sapiens
  misc_RNA (1)...(19): siRNA sense strand
guucaagagggcccaauua

SEQ ID NO: 1569560 - RNA, 19 nt, Homo sapiens
  misc_RNA (1)...(19): siRNA sense strand
gcuccaagauggccgaugu

SEQ ID NO: 1569561 - RNA, 19 nt, Homo sapiens
  misc_RNA (1)...(19): siRNA sense strand
ugaaaugugugccguuauc

SEQ ID NO: 1569562 - RNA, 19 nt, Homo sapiens
  misc_RNA (1)...(19): siRNA sense strand
acaacaagaucugugauga

SEQ ID NO: 1569563 - RNA, 19 nt, Homo sapiens
  misc_RNA (1)...(19): siRNA sense strand
gcacugaugccaacguguu

SEQ ID NO: 1569564 - RNA, 19 nt, Homo sapiens
  misc_RNA (1)...(19): siRNA sense strand
gagagggacagcauugaaa

SEQ ID NO: 1569565 - RNA, 19 nt, Homo sapiens
  misc_RNA (1)...(19): siRNA sense strand
guuagaagaugugggagaa

SEQ ID NO: 1569566 - RNA, 19 nt, Homo sapiens
  misc_RNA (1)...(19): siRNA sense strand
agaaguaucuguguaccaa

SEQ ID NO: 1569567 - RNA, 19 nt, Homo sapiens
  misc_RNA (1)...(19): siRNA sense strand
gagaaauacaugaaagaug

SEQ ID NO: 1569568 - RNA, 19 nt, Homo sapiens
  misc_RNA (1)...(19): siRNA sense strand
gcaagucuacaaggaagua

SEQ ID NO: 1569569 - RNA, 19 nt, Homo sapiens
  misc_RNA (1)...(19): siRNA sense strand
ugugaaaugugugccguua

SEQ ID NO: 1569570 - RNA, 19 nt, Homo sapiens
  misc_RNA (1)...(19): siRNA sense strand
gaagaaugcgggcacagau

SEQ ID NO: 1569571 - RNA, 19 nt, Homo sapiens
  misc_RNA (1)...(19): siRNA sense strand
cgacaacaaagggauauuu

SEQ ID NO: 1569572 - RNA, 19 nt, Homo sapiens
  misc_RNA (1)...(19): siRNA sense strand
gcugcuggcugguggaaga

SEQ ID NO: 1569573 - RNA, 19 nt, Homo sapiens
  misc_RNA (1)...(19): siRNA sense strand
gagaucacguacuacuuuc

SEQ ID NO: 1569574 - RNA, 19 nt, Homo sapiens
  misc_RNA (1)...(19): siRNA sense strand
ucaagagggcccaauuauu

SEQ ID NO: 1569575 - RNA, 19 nt, Homo sapiens
  misc_RNA (1)...(19): siRNA sense strand
agacaaacagcgauaaguu

SEQ ID NO: 1569576 - RNA, 19 nt, Homo sapiens
  misc_RNA (1)...(19): siRNA sense strand
cagacacguuugaguuuga

SEQ ID NO: 1569577 - RNA, 19 nt, Homo sapiens
  misc_RNA (1)...(19): siRNA sense strand
gcagacgguccgcgacuuu

SEQ ID NO: 1569578 - RNA, 19 nt, Homo sapiens
  misc_RNA (1)...(19): siRNA sense strand
gcaccaaguacauguugaa

SEQ ID NO: 1569579 - RNA, 19 nt, Homo sapiens
  misc_RNA (1)...(19): siRNA sense strand
gaagaugugggagaaauca

SEQ ID NO: 1569580 - RNA, 19 nt, Homo sapiens
  misc_RNA (1)...(19): siRNA sense strand
gaagacgacggguccauca

SEQ ID NO: 1569581 - RNA, 19 nt, Homo sapiens
  misc_RNA (1)...(19): siRNA sense strand
uagaagaugugggagaaau

SEQ ID NO: 1569582 - RNA, 19 nt, Homo sapiens
  misc_RNA (1)...(19): siRNA sense strand
gcacugaugccaacgucuu

SEQ ID NO: 1569583 - RNA, 19 nt, Homo sapiens
  misc_RNA (1)...(19): siRNA sense strand
gaucugugaugagcuggaa

SEQ ID NO: 1569584 - RNA, 19 nt, Homo sapiens
  misc_RNA (1)...(19): siRNA sense strand
gcacugacuccaacaucuu

SEQ ID NO: 1569585 - RNA, 19 nt, Homo sapiens
  misc_RNA (1)...(19): siRNA sense strand
caucuucacugagaaauac

SEQ ID NO: 1569586 - RNA, 19 nt, Homo sapiens
  misc_RNA (1)...(19): siRNA sense strand
gcacccagcagaaguaucu

SEQ ID NO: 1569587 - RNA, 19 nt, Homo sapiens
  misc_RNA (1)...(19): siRNA sense strand
cuggagaccugaccauguu

SEQ ID NO: 1569588 - RNA, 19 nt, Homo sapiens
  misc_RNA (1)...(19): siRNA sense strand
cauaauaacacgggcauga

SEQ ID NO: 1569589 - RNA, 19 nt, Homo sapiens
  misc_RNA (1)...(19): siRNA sense strand
gacgacggguccaucauca

SEQ ID NO: 1569590 - RNA, 19 nt, Homo sapiens
  misc_RNA (1)...(19): siRNA sense strand
gaagguucucuaugaaaug

SEQ ID NO: 1569591 - RNA, 19 nt, Homo sapiens
  misc_RNA (1)...(19): siRNA sense strand
ggaggaugaugaacguagu

SEQ ID NO: 1569592 - RNA, 19 nt, Homo sapiens
  misc_RNA (1)...(19): siRNA sense strand
caucgaggccgcugaccua

SEQ ID NO: 1569593 - RNA, 19 nt, Homo sapiens
  misc_RNA (1)...(19): siRNA sense strand
gggacuugcugcagagugu

SEQ ID NO: 1569594 - RNA, 19 nt, Homo sapiens
  misc_RNA (1)...(19): siRNA sense strand
cgacgagaccuuccacuuc

SEQ ID NO: 1569595 - RNA, 19 nt, Homo sapiens
  misc_RNA (1)...(19): siRNA sense strand
gcuggcaucugagcuaugu

SEQ ID NO: 1569596 - RNA, 19 nt, Homo sapiens
  misc_RNA (1)...(19): siRNA sense strand
gagcagaacgacaccuuca

SEQ ID NO: 1569597 - RNA, 19 nt, Homo sapiens
  misc_RNA (1)...(19): siRNA sense strand
gcagaacgacaccuucauc

SEQ ID NO: 1569598 - RNA, 19 nt, Homo sapiens
  misc_RNA (1)...(19): siRNA sense strand
gaagaaccgauccaaagag

SEQ ID NO: 1569599 - RNA, 19 nt, Homo sapiens
  misc_RNA (1)...(19): siRNA sense strand
caucguagaguuagaagau

SEQ ID NO: 1569600 - RNA, 19 nt, Homo sapiens
  misc_RNA (1)...(19): siRNA sense strand
gccaacguguucaucauca

SEQ ID NO: 1569601 - RNA, 19 nt, Homo sapiens
  misc_RNA (1)...(19): siRNA sense strand
ucagagaaccggaccaaca

SEQ ID NO: 1569602 - RNA, 19 nt, Homo sapiens
  misc_RNA (1)...(19): siRNA sense strand
gauaaagacggugcagaga

SEQ ID NO: 1569603 - RNA, 19 nt, Homo sapiens
  misc_RNA (1)...(19): siRNA sense strand
gaaaguccggcuuggcaau

SEQ ID NO: 1569604 - RNA, 19 nt, Homo sapiens
  misc_RNA (1)...(19): siRNA sense strand
ccaacaacaagaucuguga

SEQ ID NO: 1569605 - RNA, 19 nt, Homo sapiens
  misc_RNA (1)...(19): siRNA sense strand
gaacguaguaagcgcaucu

SEQ ID NO: 1569606 - RNA, 19 nt, Homo sapiens
  misc_RNA (1)...(19): siRNA sense strand
gaucuucacagggaacauu

SEQ ID NO: 1569607 - RNA, 19 nt, Homo sapiens
  misc_RNA (1)...(19): siRNA sense strand
ucacugagaaauacaugaa

SEQ ID NO: 1569608 - RNA, 19 nt, Homo sapiens
  misc_RNA (1)...(19): siRNA sense strand
ccaacaagagggaacagaa

SEQ ID NO: 1569609 - RNA, 19 nt, Homo sapiens
  misc_RNA (1)...(19): siRNA sense strand
gggacagcauugaaaucuu

SEQ ID NO: 1569610 - RNA, 19 nt, Homo sapiens
  misc_RNA (1)...(19): siRNA sense strand
cagcacagaccgcuucuuc

SEQ ID NO: 1569611 - RNA, 19 nt, Homo sapiens
  misc_RNA (1)...(19): siRNA sense strand
ugagcuaugucgaugugaa

SEQ ID NO: 1569612 - RNA, 19 nt, Homo sapiens
  misc_RNA (1)...(19): siRNA sense strand
ggucuggcacgacaacaaa

SEQ ID NO: 1569613 - RNA, 19 nt, Homo sapiens
  misc_RNA (1)...(19): siRNA sense strand
gaggaacggcugacaccuu

SEQ ID NO: 1569614 - RNA, 19 nt, Homo sapiens
  misc_RNA (1)...(19): siRNA sense strand
aaauucggauuggccauaa

SEQ ID NO: 1569615 - RNA, 19 nt, Homo sapiens
  misc_RNA (1)...(19): siRNA sense strand
cacagaugcuaaugucuuc

SEQ ID NO: 1569616 - RNA, 19 nt, Homo sapiens
  misc_RNA (1)...(19): siRNA sense strand
ggaccacagacacguuuga

SEQ ID NO: 1569617 - RNA, 19 nt, Homo sapiens
  misc_RNA (1)...(19): siRNA sense strand
gcacaucccuuuggaacug

SEQ ID NO: 1569618 - RNA, 19 nt, Homo sapiens
  misc_RNA (1)...(19): siRNA sense strand
ucacauggauccuaacuac

SEQ ID NO: 1569619 - RNA, 19 nt, Homo sapiens
  misc_RNA (1)...(19): siRNA sense strand
ccgaguggcucaccucauu

SEQ ID NO: 1569620 - RNA, 19 nt, Homo sapiens
  misc_RNA (1)...(19): siRNA sense strand
gaacaagaggcucgcuuug

SEQ ID NO: 1569621 - RNA, 19 nt, Homo sapiens
  misc_RNA (1)...(19): siRNA sense strand
ccacugaugacuccuauga

SEQ ID NO: 1569622 - RNA, 19 nt, Homo sapiens
  misc_RNA (1)...(19): siRNA sense strand
ccucugaccuggccucuuc

SEQ ID NO: 1569623 - RNA, 19 nt, Homo sapiens
  misc_RNA (1)...(19): siRNA sense strand
acaagaggcucgcuuugca

SEQ ID NO: 1569624 - RNA, 19 nt, Homo sapiens
  misc_RNA (1)...(19): siRNA sense strand
ggcgaggacuccacugaug

SEQ ID NO: 1569625 - RNA, 19 nt, Homo sapiens
  misc_RNA (1)...(19): siRNA sense strand
ucccuggccugguccuuua

SEQ ID NO: 1569626 - RNA, 19 nt, Homo sapiens
  misc_RNA (1)...(19): siRNA sense strand
ccacucugcccaccacuaa

SEQ ID NO: 1569627 - RNA, 19 nt, Homo sapiens
  misc_RNA (1)...(19): siRNA sense strand
cgaacaagaggcucgcuuu

SEQ ID NO: 1569628 - RNA, 19 nt, Homo sapiens
  misc_RNA (1)...(19): siRNA sense strand
aggaguggcugagcaguuu

SEQ ID NO: 1569629 - RNA, 19 nt, Homo sapiens
  misc_RNA (1)...(19): siRNA sense strand
gcccaggacucacucuaca

SEQ ID NO: 1569630 - RNA, 19 nt, Homo sapiens
  misc_RNA (1)...(19): siRNA sense strand
gaacuguuuccugugagua

SEQ ID NO: 1569631 - RNA, 19 nt, Homo sapiens
  misc_RNA (1)...(19): siRNA sense strand
ccagacacccugugcucua

SEQ ID NO: 1569632 - RNA, 19 nt, Homo sapiens
  misc_RNA (1)...(19): siRNA sense strand
acugaugacuccuaugaug

SEQ ID NO: 1569633 - RNA, 19 nt, Homo sapiens
  misc_RNA (1)...(19): siRNA sense strand
gggaauggacacagacaug

SEQ ID NO: 1569634 - RNA, 19 nt, Homo sapiens
  misc_RNA (1)...(19): siRNA sense strand
gcgaggacuccacugauga

SEQ ID NO: 1569635 - RNA, 19 nt, Homo sapiens
  misc_RNA (1)...(19): siRNA sense strand
acccaaagguucacaugga

SEQ ID NO: 1569636 - RNA, 19 nt, Homo sapiens
  misc_RNA (1)...(19): siRNA sense strand
ugaaggaccacgugaccaa

SEQ ID NO: 1569637 - RNA, 19 nt, Homo sapiens
  misc_RNA (1)...(19): siRNA sense strand
gaguggcucaccucauuga

SEQ ID NO: 1569638 - RNA, 19 nt, Homo sapiens
  misc_RNA (1)...(19): siRNA sense strand
cccaaagguucacauggau

SEQ ID NO: 1569639 - RNA, 19 nt, Homo sapiens
  misc_RNA (1)...(19): siRNA sense strand
ccuggaggauggguuguug

SEQ ID NO: 1569640 - RNA, 19 nt, Homo sapiens
  misc_RNA (1)...(19): siRNA sense strand
cagacacccugugcucuag

SEQ ID NO: 1569641 - RNA, 19 nt, Homo sapiens
  misc_RNA (1)...(19): siRNA sense strand
ucacagaguccugccuuuc

SEQ ID NO: 1569642 - RNA, 19 nt, Homo sapiens
  misc_RNA (1)...(19): siRNA sense strand
gcugggcgaugagcugcuu

SEQ ID NO: 1569643 - RNA, 19 nt, Homo sapiens
  misc_RNA (1)...(19): siRNA sense strand
acauggauccuaacuacug

SEQ ID NO: 1569644 - RNA, 19 nt, Homo sapiens
  misc_RNA (1)...(19): siRNA sense strand
cugaugacuccuaugauga

SEQ ID NO: 1569645 - RNA, 19 nt, Homo sapiens
  misc_RNA (1)...(19): siRNA sense strand
aggcagagccagaggaaca

SEQ ID NO: 1569646 - RNA, 19 nt, Homo sapiens
  misc_RNA (1)...(19): siRNA sense strand
ugagcugcuucucgccaaa

SEQ ID NO: 1569647 - RNA, 19 nt, Homo sapiens
  misc_RNA (1)...(19): siRNA sense strand
gcaaacagccauccaacaa

SEQ ID NO: 1569648 - RNA, 19 nt, Homo sapiens
  misc_RNA (1)...(19): siRNA sense strand
ucucugggcuggaaacaua

SEQ ID NO: 1569649 - RNA, 19 nt, Homo sapiens
  misc_RNA (1)...(19): siRNA sense strand
ggacagagauaucuuucag

SEQ ID NO: 1569650 - RNA, 19 nt, Homo sapiens
  misc_RNA (1)...(19): siRNA sense strand
aaacagccauccaacaaau

SEQ ID NO: 1569651 - RNA, 19 nt, Homo sapiens
  misc_RNA (1)...(19): siRNA sense strand
ggcagaagcuggcauugau

SEQ ID NO: 1569652 - RNA, 19 nt, Homo sapiens
  misc_RNA (1)...(19): siRNA sense strand
cauugucacuguagucuuu

SEQ ID NO: 1569653 - RNA, 19 nt, Homo sapiens
  misc_RNA (1)...(19): siRNA sense strand
caagacagcuauggaucaa

SEQ ID NO: 1569654 - RNA, 19 nt, Homo sapiens
  misc_RNA (1)...(19): siRNA sense strand
ccacuuccuuuaccaauca

SEQ ID NO: 1569655 - RNA, 19 nt, Homo sapiens
  misc_RNA (1)...(19): siRNA sense strand
caacggaucccaaggaagu

SEQ ID NO: 1569656 - RNA, 19 nt, Homo sapiens
  misc_RNA (1)...(19): siRNA sense strand
aaacacuucuguggucuuu

SEQ ID NO: 1569657 - RNA, 19 nt, Homo sapiens
  misc_RNA (1)...(19): siRNA sense strand
ccuguuaugucaagcuuaa

SEQ ID NO: 1569658 - RNA, 19 nt, Homo sapiens
  misc_RNA (1)...(19): siRNA sense strand
ucaacaagacagaaaguaa

SEQ ID NO: 1569659 - RNA, 19 nt, Homo sapiens
  misc_RNA (1)...(19): siRNA sense strand
gaaaggaacggcagaagcu

SEQ ID NO: 1569660 - RNA, 19 nt, Homo sapiens
  misc_RNA (1)...(19): siRNA sense strand
cagaacaaauaccgggaaa

SEQ ID NO: 1569661 - RNA, 19 nt, Homo sapiens
  misc_RNA (1)...(19): siRNA sense strand
caaacagccauccaacaaa

SEQ ID NO: 1569662 - RNA, 19 nt, Homo sapiens
  misc_RNA (1)...(19): siRNA sense strand
gagaccggcuggcauucuu

SEQ ID NO: 1569663 - RNA, 19 nt, Homo sapiens
  misc_RNA (1)...(19): siRNA sense strand
gcuauaaucaaggugguua

SEQ ID NO: 1569664 - RNA, 19 nt, Homo sapiens
  misc_RNA (1)...(19): siRNA sense strand
cagcaucgacauagcguuu

SEQ ID NO: 1569665 - RNA, 19 nt, Homo sapiens
  misc_RNA (1)...(19): siRNA sense strand
gcagaagcuggcauugauu

SEQ ID NO: 1569666 - RNA, 19 nt, Homo sapiens
  misc_RNA (1)...(19): siRNA sense strand
aaaguaaccucagcaucga

SEQ ID NO: 1569667 - RNA, 19 nt, Homo sapiens
  misc_RNA (1)...(19): siRNA sense strand
uaaccucagcaucgacaua

SEQ ID NO: 1569668 - RNA, 19 nt, Homo sapiens
  misc_RNA (1)...(19): siRNA sense strand
caaccaagacagcuaugga

SEQ ID NO: 1569669 - RNA, 19 nt, Homo sapiens
  misc_RNA (1)...(19): siRNA sense strand
gaagcacuccagcagcuau

SEQ ID NO: 1569670 - RNA, 19 nt, Homo sapiens
  misc_RNA (1)...(19): siRNA sense strand
acagucagcaggcgaguuu

SEQ ID NO: 1569671 - RNA, 19 nt, Homo sapiens
  misc_RNA (1)...(19): siRNA sense strand
uaaucaaggugguuacaac

SEQ ID NO: 1569672 - RNA, 19 nt, Homo sapiens
  misc_RNA (1)...(19): siRNA sense strand
caacaagacagaaaguaac

SEQ ID NO: 1569673 - RNA, 19 nt, Homo sapiens
  misc_RNA (1)...(19): siRNA sense strand
cagcagcuauaaucaaggu

SEQ ID NO: 1569674 - RNA, 19 nt, Homo sapiens
  misc_RNA (1)...(19): siRNA sense strand
ccaagacagcuauggauca

SEQ ID NO: 1569675 - RNA, 19 nt, Homo sapiens
  misc_RNA (1)...(19): siRNA sense strand
cagaagcuggcauugauug

SEQ ID NO: 1569676 - RNA, 19 nt, Homo sapiens
  misc_RNA (1)...(19): siRNA sense strand
cagaugaguuuggccaaca

SEQ ID NO: 1569677 - RNA, 19 nt, Homo sapiens
  misc_RNA (1)...(19): siRNA sense strand
caacaugcgguggcuauuc

SEQ ID NO: 1569678 - RNA, 19 nt, Homo sapiens
  misc_RNA (1)...(19): siRNA sense strand
ucgccuuccucuacucuuu

SEQ ID NO: 1569679 - RNA, 19 nt, Homo sapiens
  misc_RNA (1)...(19): siRNA sense strand
acacuucuguggucuuugg

SEQ ID NO: 1569680 - RNA, 19 nt, Homo sapiens
  misc_RNA (1)...(19): siRNA sense strand
aggacugucugacgucaaa

SEQ ID NO: 1569681 - RNA, 19 nt, Homo sapiens
  misc_RNA (1)...(19): siRNA sense strand
gccacugucguuuacauuu

SEQ ID NO: 1569682 - RNA, 19 nt, Homo sapiens
  misc_RNA (1)...(19): siRNA sense strand
ccacugucguuuacauuuu

SEQ ID NO: 1569683 - RNA, 19 nt, Homo sapiens
  misc_RNA (1)...(19): siRNA sense strand
acaaaugcauggcuaucca

SEQ ID NO: 1569684 - RNA, 19 nt, Homo sapiens
  misc_RNA (1)...(19): siRNA sense strand
aaugucagcuugcaaacag

SEQ ID NO: 1569685 - RNA, 19 nt, Homo sapiens
  misc_RNA (1)...(19): siRNA sense strand
ggacugcgucaacaagaca

SEQ ID NO: 1569686 - RNA, 19 nt, Homo sapiens
  misc_RNA (1)...(19): siRNA sense strand
gcguuugccuacccauuca

SEQ ID NO: 1569687 - RNA, 19 nt, Homo sapiens
  misc_RNA (1)...(19): siRNA sense strand
cuacuaaugucagcuugca

SEQ ID NO: 1569688 - RNA, 19 nt, Homo sapiens
  misc_RNA (1)...(19): siRNA sense strand
caacaaaugcauggcuauc

SEQ ID NO: 1569689 - RNA, 19 nt, Homo sapiens
  misc_RNA (1)...(19): siRNA sense strand
cuucuguggucuuuggauu

SEQ ID NO: 1569690 - RNA, 19 nt, Homo sapiens
  misc_RNA (1)...(19): siRNA sense strand
gcacuccagcagcuauaau

SEQ ID NO: 1569691 - RNA, 19 nt, Homo sapiens
  misc_RNA (1)...(19): siRNA sense strand
gaacaaauaccgggaaaac

SEQ ID NO: 1569692 - RNA, 19 nt, Homo sapiens
  misc_RNA (1)...(19): siRNA sense strand
ugucaagcuuaaacacuuc

SEQ ID NO: 1569693 - RNA, 19 nt, Homo sapiens
  misc_RNA (1)...(19): siRNA sense strand
ugcaacggaucccaaggaa

SEQ ID NO: 1569694 - RNA, 19 nt, Homo sapiens
  misc_RNA (1)...(19): siRNA sense strand
gggcuggaaacauaugguu

SEQ ID NO: 1569695 - RNA, 19 nt, Homo sapiens
  misc_RNA (1)...(19): siRNA sense strand
gcccuguuaugucaagcuu

SEQ ID NO: 1569696 - RNA, 19 nt, Homo sapiens
  misc_RNA (1)...(19): siRNA sense strand
uccagcagcuauaaucaag

SEQ ID NO: 1569697 - RNA, 19 nt, Homo sapiens
  misc_RNA (1)...(19): siRNA sense strand
uguggucuuuggauucuug

SEQ ID NO: 1569698 - RNA, 19 nt, Homo sapiens
  misc_RNA (1)...(19): siRNA sense strand
cggcagaagcuggcauuga

SEQ ID NO: 1569699 - RNA, 19 nt, Homo sapiens
  misc_RNA (1)...(19): siRNA sense strand
gcaacaugcgguggcuauu

SEQ ID NO: 1569700 - RNA, 19 nt, Homo sapiens
  misc_RNA (1)...(19): siRNA sense strand
gcaucgacauagcguuugc

SEQ ID NO: 1569701 - RNA, 19 nt, Homo sapiens
  misc_RNA (1)...(19): siRNA sense strand
acuaaugucagcuugcaaa

SEQ ID NO: 1569702 - RNA, 19 nt, Homo sapiens
  misc_RNA (1)...(19): siRNA sense strand
cagaguucuucgucacugu

SEQ ID NO: 1569703 - RNA, 19 nt, Homo sapiens
  misc_RNA (1)...(19): siRNA sense strand
guuacaaccaagacagcua

SEQ ID NO: 1569704 - RNA, 19 nt, Homo sapiens
  misc_RNA (1)...(19): siRNA sense strand
gaagcuggcauugauuggu

SEQ ID NO: 1569705 - RNA, 19 nt, Homo sapiens
  misc_RNA (1)...(19): siRNA sense strand
cgucacuguugcugucuuc

SEQ ID NO: 1569706 - RNA, 19 nt, Homo sapiens
  misc_RNA (1)...(19): siRNA sense strand
uuacaaccaagacagcuau

SEQ ID NO: 1569707 - RNA, 19 nt, Homo sapiens
  misc_RNA (1)...(19): siRNA sense strand
gacagagauaucuuucaga

SEQ ID NO: 1569708 - RNA, 19 nt, Homo sapiens
  misc_RNA (1)...(19): siRNA sense strand
aaggagaccggcuggcauu

SEQ ID NO: 1569709 - RNA, 19 nt, Homo sapiens
  misc_RNA (1)...(19): siRNA sense strand
uuuauucucugggcuggaa

SEQ ID NO: 1569710 - RNA, 19 nt, Homo sapiens
  misc_RNA (1)...(19): siRNA sense strand
gucaacaagacagaaagua

SEQ ID NO: 1569711 - RNA, 19 nt, Homo sapiens
  misc_RNA (1)...(19): siRNA sense strand
acaaauaccgggaaaacaa

SEQ ID NO: 1569712 - RNA, 19 nt, Homo sapiens
  misc_RNA (1)...(19): siRNA sense strand
ccacucauugacuucauug

SEQ ID NO: 1569713 - RNA, 19 nt, Homo sapiens
  misc_RNA (1)...(19): siRNA sense strand
ccaacaaaugcauggcuau

SEQ ID NO: 1569714 - RNA, 19 nt, Homo sapiens
  misc_RNA (1)...(19): siRNA sense strand
ucuauuaccuguacaguau

SEQ ID NO: 1569715 - RNA, 19 nt, Homo sapiens
  misc_RNA (1)...(19): siRNA sense strand
uuuauacguuggugaguuu

SEQ ID NO: 1569716 - RNA, 19 nt, Homo sapiens
  misc_RNA (1)...(19): siRNA sense strand
gcgccucccucaucuucuu

SEQ ID NO: 1569717 - RNA, 19 nt, Homo sapiens
  misc_RNA (1)...(19): siRNA sense strand
augcugacauucucaacua

SEQ ID NO: 1569718 - RNA, 19 nt, Homo sapiens
  misc_RNA (1)...(19): siRNA sense strand
ccucuucugucugauguuu

SEQ ID NO: 1569719 - RNA, 19 nt, Homo sapiens
  misc_RNA (1)...(19): siRNA sense strand
ucccucaucuucuuuguca

SEQ ID NO: 1569720 - RNA, 19 nt, Homo sapiens
  misc_RNA (1)...(19): siRNA sense strand
guuuauacguuggugaguu

SEQ ID NO: 1569721 - RNA, 19 nt, Homo sapiens
  misc_RNA (1)...(19): siRNA sense strand
ugucaucuggcacaucaua

SEQ ID NO: 1569722 - RNA, 19 nt, Homo sapiens
  misc_RNA (1)...(19): siRNA sense strand
cacggccucuucugucuga

SEQ ID NO: 1569723 - RNA, 19 nt, Homo sapiens
  misc_RNA (1)...(19): siRNA sense strand
ggccucuucugucugaugu

SEQ ID NO: 1569724 - RNA, 19 nt, Homo sapiens
  misc_RNA (1)...(19): siRNA sense strand
uuugucaucuggcacauca

SEQ ID NO: 1569725 - RNA, 19 nt, Homo sapiens
  misc_RNA (1)...(19): siRNA sense strand
gaguccuggugcaaacuug

SEQ ID NO: 1569726 - RNA, 19 nt, Homo sapiens
  misc_RNA (1)...(19): siRNA sense strand
auacguuggugaguuucua

SEQ ID NO: 1569727 - RNA, 19 nt, Homo sapiens
  misc_RNA (1)...(19): siRNA sense strand
cuucuucuauuaccuguac

SEQ ID NO: 1569728 - RNA, 19 nt, Homo sapiens
  misc_RNA (1)...(19): siRNA sense strand
ggaguccuggugcaaacuu

SEQ ID NO: 1569729 - RNA, 19 nt, Homo sapiens
  misc_RNA (1)...(19): siRNA sense strand
ccuucuaccugcucuccuu

SEQ ID NO: 1569730 - RNA, 19 nt, Homo sapiens
  misc_RNA (1)...(19): siRNA sense strand
uaccugcucuccuucuucu

SEQ ID NO: 1569731 - RNA, 19 nt, Homo sapiens
  misc_RNA (1)...(19): siRNA sense strand
ugcucuccuucuucuauua

SEQ ID NO: 1569732 - RNA, 19 nt, Homo sapiens
  misc_RNA (1)...(19): siRNA sense strand
ucaaauggcuuccuaauug

SEQ ID NO: 1569733 - RNA, 19 nt, Homo sapiens
  misc_RNA (1)...(19): siRNA sense strand
uagaagagguuuacacuuu

SEQ ID NO: 1569734 - RNA, 19 nt, Homo sapiens
  misc_RNA (1)...(19): siRNA sense strand
gaagcaagcuggacaacau

SEQ ID NO: 1569735 - RNA, 19 nt, Homo sapiens
  misc_RNA (1)...(19): siRNA sense strand
ucagaaacauggacaagaa

SEQ ID NO: 1569736 - RNA, 19 nt, Homo sapiens
  misc_RNA (1)...(19): siRNA sense strand
gaagagguuuacacuuuau

SEQ ID NO: 1569737 - RNA, 19 nt, Homo sapiens
  misc_RNA (1)...(19): siRNA sense strand
gggcgcagauauaauuuaa

SEQ ID NO: 1569738 - RNA, 19 nt, Homo sapiens
  misc_RNA (1)...(19): siRNA sense strand
agaagagguuuacacuuua

SEQ ID NO: 1569739 - RNA, 19 nt, Homo sapiens
  misc_RNA (1)...(19): siRNA sense strand
ccaacaugcugaccaauga

SEQ ID NO: 1569740 - RNA, 19 nt, Homo sapiens
  misc_RNA (1)...(19): siRNA sense strand
gggcacaguuggagaaguu

SEQ ID NO: 1569741 - RNA, 19 nt, Homo sapiens
  misc_RNA (1)...(19): siRNA sense strand
gaacuaauccauggaacaa

SEQ ID NO: 1569742 - RNA, 19 nt, Homo sapiens
  misc_RNA (1)...(19): siRNA sense strand
ccaggaacaucaacagaga

SEQ ID NO: 1569743 - RNA, 19 nt, Homo sapiens
  misc_RNA (1)...(19): siRNA sense strand
ggacaacauucuuauuacu

SEQ ID NO: 1569744 - RNA, 19 nt, Homo sapiens
  misc_RNA (1)...(19): siRNA sense strand
uggagugccugaaauauug

SEQ ID NO: 1569745 - RNA, 19 nt, Homo sapiens
  misc_RNA (1)...(19): siRNA sense strand
ccgaagagcucccgcuugu

SEQ ID NO: 1569746 - RNA, 19 nt, Homo sapiens
  misc_RNA (1)...(19): siRNA sense strand
gaacuugaauuaucauccu

SEQ ID NO: 1569747 - RNA, 19 nt, Homo sapiens
  misc_RNA (1)...(19): siRNA sense strand
gcugaccaaugaacuuaaa

SEQ ID NO: 1569748 - RNA, 19 nt, Homo sapiens
  misc_RNA (1)...(19): siRNA sense strand
caggaugacuuugugaauu

SEQ ID NO: 1569749 - RNA, 19 nt, Homo sapiens
  misc_RNA (1)...(19): siRNA sense strand
aggaugacuuugugaauuu

SEQ ID NO: 1569750 - RNA, 19 nt, Homo sapiens
  misc_RNA (1)...(19): siRNA sense strand
cagaaugguuugaugugaa

SEQ ID NO: 1569751 - RNA, 19 nt, Homo sapiens
  misc_RNA (1)...(19): siRNA sense strand
gaagagcucccgcuugucu

SEQ ID NO: 1569752 - RNA, 19 nt, Homo sapiens
  misc_RNA (1)...(19): siRNA sense strand
uaagaagugucuggucuau

SEQ ID NO: 1569753 - RNA, 19 nt, Homo sapiens
  misc_RNA (1)...(19): siRNA sense strand
agaaguuccuggcaagaaa

SEQ ID NO: 1569754 - RNA, 19 nt, Homo sapiens
  misc_RNA (1)...(19): siRNA sense strand
gcuaugaaaccuaucagaa

SEQ ID NO: 1569755 - RNA, 19 nt, Homo sapiens
  misc_RNA (1)...(19): siRNA sense strand
cuuccuaauugcagaaaua

SEQ ID NO: 1569756 - RNA, 19 nt, Homo sapiens
  misc_RNA (1)...(19): siRNA sense strand
agaaauacaugugaagcaa

SEQ ID NO: 1569757 - RNA, 19 nt, Homo sapiens
  misc_RNA (1)...(19): siRNA sense strand
caguucacauagagaaaua

SEQ ID NO: 1569758 - RNA, 19 nt, Homo sapiens
  misc_RNA (1)...(19): siRNA sense strand
agaaugguuugaugugaaa

SEQ ID NO: 1569759 - RNA, 19 nt, Homo sapiens
  misc_RNA (1)...(19): siRNA sense strand
ccagaaugguuugauguga

SEQ ID NO: 1569760 - RNA, 19 nt, Homo sapiens
  misc_RNA (1)...(19): siRNA sense strand
gaacaucaacagagauuuu

SEQ ID NO: 1569761 - RNA, 19 nt, Homo sapiens
  misc_RNA (1)...(19): siRNA sense strand
cuggacaacauucuuauua

SEQ ID NO: 1569762 - RNA, 19 nt, Homo sapiens
  misc_RNA (1)...(19): siRNA sense strand
acuaauccauggaacaauu

SEQ ID NO: 1569763 - RNA, 19 nt, Homo sapiens
  misc_RNA (1)...(19): siRNA sense strand
ucacauagagaaauacaug

SEQ ID NO: 1569764 - RNA, 19 nt, Homo sapiens
  misc_RNA (1)...(19): siRNA sense strand
ggaagaguugucccuguuu

SEQ ID NO: 1569765 - RNA, 19 nt, Homo sapiens
  misc_RNA (1)...(19): siRNA sense strand
gagggaggccuaagaagug

SEQ ID NO: 1569766 - RNA, 19 nt, Homo sapiens
  misc_RNA (1)...(19): siRNA sense strand
ccugaaauauugauagaag

SEQ ID NO: 1569767 - RNA, 19 nt, Homo sapiens
  misc_RNA (1)...(19): siRNA sense strand
ccugggaacuugaauuauc

SEQ ID NO: 1569768 - RNA, 19 nt, Homo sapiens
  misc_RNA (1)...(19): siRNA sense strand
gaagaguugucccuguuuu

SEQ ID NO: 1569769 - RNA, 19 nt, Homo sapiens
  misc_RNA (1)...(19): siRNA sense strand
ggucuacaguuucgaaguc

SEQ ID NO: 1569770 - RNA, 19 nt, Homo sapiens
  misc_RNA (1)...(19): siRNA sense strand
cuaugaaaccuaucagaaa

SEQ ID NO: 1569771 - RNA, 19 nt, Homo sapiens
  misc_RNA (1)...(19): siRNA sense strand
gaaaacgggaccucuuuaa

SEQ ID NO: 1569772 - RNA, 19 nt, Homo sapiens
  misc_RNA (1)...(19): siRNA sense strand
gagaaguuccuggcaagaa

SEQ ID NO: 1569773 - RNA, 19 nt, Homo sapiens
  misc_RNA (1)...(19): siRNA sense strand
uaugaaaccuaucagaaac

SEQ ID NO: 1569774 - RNA, 19 nt, Homo sapiens
  misc_RNA (1)...(19): siRNA sense strand
caaauggcuuccuaauugc

SEQ ID NO: 1569775 - RNA, 19 nt, Homo sapiens
  misc_RNA (1)...(19): siRNA sense strand
ccuaauugcagaaauauuc

SEQ ID NO: 1569776 - RNA, 19 nt, Homo sapiens
  misc_RNA (1)...(19): siRNA sense strand
gauagaagagguuuacacu

SEQ ID NO: 1569777 - RNA, 19 nt, Homo sapiens
  misc_RNA (1)...(19): siRNA sense strand
caaagaaaauuaggcagaa

SEQ ID NO: 1569778 - RNA, 19 nt, Homo sapiens
  misc_RNA (1)...(19): siRNA sense strand
ggacuauagcuaccagaug

SEQ ID NO: 1569779 - RNA, 19 nt, Homo sapiens
  misc_RNA (1)...(19): siRNA sense strand
guuuccaggucuacaguuu

SEQ ID NO: 1569780 - RNA, 19 nt, Homo sapiens
  misc_RNA (1)...(19): siRNA sense strand
gaaaccaacagugggagaa

SEQ ID NO: 1569781 - RNA, 19 nt, Homo sapiens
  misc_RNA (1)...(19): siRNA sense strand
gagaaauacaugugaagca

SEQ ID NO: 1569782 - RNA, 19 nt, Homo sapiens
  misc_RNA (1)...(19): siRNA sense strand
gcggaguuccucauccuuu

SEQ ID NO: 1569783 - RNA, 19 nt, Homo sapiens
  misc_RNA (1)...(19): siRNA sense strand
acuaagcaaucccaacaug

SEQ ID NO: 1569784 - RNA, 19 nt, Homo sapiens
  misc_RNA (1)...(19): siRNA sense strand
aagcuggacaacauucuua

SEQ ID NO: 1569785 - RNA, 19 nt, Homo sapiens
  misc_RNA (1)...(19): siRNA sense strand
aggaagaguugucccuguu

SEQ ID NO: 1569786 - RNA, 19 nt, Homo sapiens
  misc_RNA (1)...(19): siRNA sense strand
ggaugacuuugugaauuuc

SEQ ID NO: 1569787 - RNA, 19 nt, Homo sapiens
  misc_RNA (1)...(19): siRNA sense strand
cauagagaaauacauguga

SEQ ID NO: 1569788 - RNA, 19 nt, Homo sapiens
  misc_RNA (1)...(19): siRNA sense strand
agaagugucuggucuaucc

SEQ ID NO: 1569789 - RNA, 19 nt, Homo sapiens
  misc_RNA (1)...(19): siRNA sense strand
gaaaauugaauccagaaug

SEQ ID NO: 1569790 - RNA, 19 nt, Homo sapiens
  misc_RNA (1)...(19): siRNA sense strand
gcaguucacauagagaaau

SEQ ID NO: 1569791 - RNA, 19 nt, Homo sapiens
  misc_RNA (1)...(19): siRNA sense strand
aaagaacuaauccauggaa

SEQ ID NO: 1569792 - RNA, 19 nt, Homo sapiens
  misc_RNA (1)...(19): siRNA sense strand
aaacgggaccucuuuaaaa

SEQ ID NO: 1569793 - RNA, 19 nt, Homo sapiens
  misc_RNA (1)...(19): siRNA sense strand
gguggcaguucacauagag

SEQ ID NO: 1569794 - RNA, 19 nt, Homo sapiens
  misc_RNA (1)...(19): siRNA sense strand
cgagggaggccuaagaagu

SEQ ID NO: 1569795 - RNA, 19 nt, Homo sapiens
  misc_RNA (1)...(19): siRNA sense strand
cugggaacuugaauuauca

SEQ ID NO: 1569796 - RNA, 19 nt, Homo sapiens
  misc_RNA (1)...(19): siRNA sense strand
cagaaacauggacaagaaa

SEQ ID NO: 1569797 - RNA, 19 nt, Homo sapiens
  misc_RNA (1)...(19): siRNA sense strand
ugaaaccuaucagaaacau

SEQ ID NO: 1569798 - RNA, 19 nt, Homo sapiens
  misc_RNA (1)...(19): siRNA sense strand
cggcagcccuagacaaguc

SEQ ID NO: 1569799 - RNA, 19 nt, Homo sapiens
  misc_RNA (1)...(19): siRNA sense strand
caguuucgaagucuauuaa

SEQ ID NO: 1569800 - RNA, 19 nt, Homo sapiens
  misc_RNA (1)...(19): siRNA sense strand
ugccugaaauauugauaga

SEQ ID NO: 1569801 - RNA, 19 nt, Homo sapiens
  misc_RNA (1)...(19): siRNA sense strand
aagcuggagugccugaaau

SEQ ID NO: 1569802 - RNA, 19 nt, Homo sapiens
  misc_RNA (1)...(19): siRNA sense strand
ucuuauuacucugcuauga

SEQ ID NO: 1569803 - RNA, 19 nt, Homo sapiens
  misc_RNA (1)...(19): siRNA sense strand
uggacaacauucuuauuac

SEQ ID NO: 1569804 - RNA, 19 nt, Homo sapiens
  misc_RNA (1)...(19): siRNA sense strand
ccaacagugggagaaguua

SEQ ID NO: 1569805 - RNA, 19 nt, Homo sapiens
  misc_RNA (1)...(19): siRNA sense strand
aauccagaaugguuugaug

SEQ ID NO: 1569806 - RNA, 19 nt, Homo sapiens
  misc_RNA (1)...(19): siRNA sense strand
aaaggguauuugacacaga

SEQ ID NO: 1569807 - RNA, 19 nt, Homo sapiens
  misc_RNA (1)...(19): siRNA sense strand
caacaugcugaccaaugaa

SEQ ID NO: 1569808 - RNA, 19 nt, Homo sapiens
  misc_RNA (1)...(19): siRNA sense strand
guuucgaagucuauuaaag

SEQ ID NO: 1569809 - RNA, 19 nt, Homo sapiens
  misc_RNA (1)...(19): siRNA sense strand
cuaagaagugucuggucua

SEQ ID NO: 1569810 - RNA, 19 nt, Homo sapiens
  misc_RNA (1)...(19): siRNA sense strand
acucugcuaugaaaccuau

SEQ ID NO: 1569811 - RNA, 19 nt, Homo sapiens
  misc_RNA (1)...(19): siRNA sense strand
uuacuaagcaaucccaaca

SEQ ID NO: 1569812 - RNA, 19 nt, Homo sapiens
  misc_RNA (1)...(19): siRNA sense strand
ggagaaguuccuggcaaga

SEQ ID NO: 1569813 - RNA, 19 nt, Homo sapiens
  misc_RNA (1)...(19): siRNA sense strand
gcuggacaacauucuuauu

SEQ ID NO: 1569814 - RNA, 19 nt, Homo sapiens
  misc_RNA (1)...(19): siRNA sense strand
aaaauugaauccagaaugg

SEQ ID NO: 1569815 - RNA, 19 nt, Homo sapiens
  misc_RNA (1)...(19): siRNA sense strand
ggagugccugaaauauuga

SEQ ID NO: 1569816 - RNA, 19 nt, Homo sapiens
  misc_RNA (1)...(19): siRNA sense strand
ggaacaucaacagagauuu

SEQ ID NO: 1569817 - RNA, 19 nt, Homo sapiens
  misc_RNA (1)...(19): siRNA sense strand
gacaacauucuuauuacuc

SEQ ID NO: 1569818 - RNA, 19 nt, Homo sapiens
  misc_RNA (1)...(19): siRNA sense strand
agugguggcaguucacaua

SEQ ID NO: 1569819 - RNA, 19 nt, Homo sapiens
  misc_RNA (1)...(19): siRNA sense strand
ccaggaugacuuugugaau

SEQ ID NO: 1569820 - RNA, 19 nt, Homo sapiens
  misc_RNA (1)...(19): siRNA sense strand
guuaaaagaggaagaguug

SEQ ID NO: 1569821 - RNA, 19 nt, Homo sapiens
  misc_RNA (1)...(19): siRNA sense strand
cuggagugccugaaauauu

SEQ ID NO: 1569822 - RNA, 19 nt, Homo sapiens
  misc_RNA (1)...(19): siRNA sense strand
cuugaauuaucauccuuug

SEQ ID NO: 1569823 - RNA, 19 nt, Homo sapiens
  misc_RNA (1)...(19): siRNA sense strand
acaguuucgaagucuauua

SEQ ID NO: 1569824 - RNA, 19 nt, Homo sapiens
  misc_RNA (1)...(19): siRNA sense strand
gaauuucacggacuauagc

SEQ ID NO: 1569825 - RNA, 19 nt, Homo sapiens
  misc_RNA (1)...(19): siRNA sense strand
uaaagaacuaauccaugga

SEQ ID NO: 1569826 - RNA, 19 nt, Homo sapiens
  misc_RNA (1)...(19): siRNA sense strand
aaagcuggagugccugaaa

SEQ ID NO: 1569827 - RNA, 19 nt, Homo sapiens
  misc_RNA (1)...(19): siRNA sense strand
uaaagcggaguuccucauc

SEQ ID NO: 1569828 - RNA, 19 nt, Homo sapiens
  misc_RNA (1)...(19): siRNA sense strand
cuacaguuucgaagucuau

SEQ ID NO: 1569829 - RNA, 19 nt, Homo sapiens
  misc_RNA (1)...(19): siRNA sense strand
gcuggagugccugaaauau

SEQ ID NO: 1569830 - RNA, 19 nt, Homo sapiens
  misc_RNA (1)...(19): siRNA sense strand
caagcuggacaacauucuu

SEQ ID NO: 1569831 - RNA, 19 nt, Homo sapiens
  misc_RNA (1)...(19): siRNA sense strand
ggaguuccucauccuuuua

SEQ ID NO: 1569832 - RNA, 19 nt, Homo sapiens
  misc_RNA (1)...(19): siRNA sense strand
gagagaagccuuauaagug

SEQ ID NO: 1569833 - RNA, 19 nt, Homo sapiens
  misc_RNA (1)...(19): siRNA sense strand
gagagaaacccuacaaaug

SEQ ID NO: 1569834 - RNA, 19 nt, Homo sapiens
  misc_RNA (1)...(19): siRNA sense strand
caacagauccacuucaaga

SEQ ID NO: 1569835 - RNA, 19 nt, Homo sapiens
  misc_RNA (1)...(19): siRNA sense strand
gagaaacccuacaaaugug

SEQ ID NO: 1569836 - RNA, 19 nt, Homo sapiens
  misc_RNA (1)...(19): siRNA sense strand
gagaagccauaucagugua

SEQ ID NO: 1569837 - RNA, 19 nt, Homo sapiens
  misc_RNA (1)...(19): siRNA sense strand
ggagagaaacccuacaaau

SEQ ID NO: 1569838 - RNA, 19 nt, Homo sapiens
  misc_RNA (1)...(19): siRNA sense strand
ggagagaagccuuauaagu

SEQ ID NO: 1569839 - RNA, 19 nt, Homo sapiens
  misc_RNA (1)...(19): siRNA sense strand
ggacagagccuccauacac

SEQ ID NO: 1569840 - RNA, 19 nt, Homo sapiens
  misc_RNA (1)...(19): siRNA sense strand
guacgcaccugacucaaca

SEQ ID NO: 1569841 - RNA, 19 nt, Homo sapiens
  misc_RNA (1)...(19): siRNA sense strand
agagaggucuggacuauca

SEQ ID NO: 1569842 - RNA, 19 nt, Homo sapiens
  misc_RNA (1)...(19): siRNA sense strand
ccauaucaguguaagguuu

SEQ ID NO: 1569843 - RNA, 19 nt, Homo sapiens
  misc_RNA (1)...(19): siRNA sense strand
gggagaagcccuacaagug

SEQ ID NO: 1569844 - RNA, 19 nt, Homo sapiens
  misc_RNA (1)...(19): siRNA sense strand
ggagaagcccuacaagugu

SEQ ID NO: 1569845 - RNA, 19 nt, Homo sapiens
  misc_RNA (1)...(19): siRNA sense strand
caaagucugucacccaaca

SEQ ID NO: 1569846 - RNA, 19 nt, Homo sapiens
  misc_RNA (1)...(19): siRNA sense strand
agagaaacccuacaaaugu

SEQ ID NO: 1569847 - RNA, 19 nt, Homo sapiens
  misc_RNA (1)...(19): siRNA sense strand
ggagagaagccauaucagu

SEQ ID NO: 1569848 - RNA, 19 nt, Homo sapiens
  misc_RNA (1)...(19): siRNA sense strand
ucagagccaucaaauguca

SEQ ID NO: 1569849 - RNA, 19 nt, Homo sapiens
  misc_RNA (1)...(19): siRNA sense strand
ugacucaggugcuggacaa

SEQ ID NO: 1569850 - RNA, 19 nt, Homo sapiens
  misc_RNA (1)...(19): siRNA sense strand
cgggagagaagccuuauaa

SEQ ID NO: 1569851 - RNA, 19 nt, Homo sapiens
  misc_RNA (1)...(19): siRNA sense strand
ggacagcuuccuucaagug

SEQ ID NO: 1569852 - RNA, 19 nt, Homo sapiens
  misc_RNA (1)...(19): siRNA sense strand
gcaccagguuguccacaca

SEQ ID NO: 1569853 - RNA, 19 nt, Homo sapiens
  misc_RNA (1)...(19): siRNA sense strand
gcccugauccgacaucuga

SEQ ID NO: 1569854 - RNA, 19 nt, Homo sapiens
  misc_RNA (1)...(19): siRNA sense strand
gauucauacuggagagaaa

SEQ ID NO: 1569855 - RNA, 19 nt, Homo sapiens
  misc_RNA (1)...(19): siRNA sense strand
caaauuugaucugguggau

SEQ ID NO: 1569856 - RNA, 19 nt, Homo sapiens
  misc_RNA (1)...(19): siRNA sense strand
gagagucagagccaucaaa

SEQ ID NO: 1569857 - RNA, 19 nt, Homo sapiens
  misc_RNA (1)...(19): siRNA sense strand
gauccgacaucugagaauc

SEQ ID NO: 1569858 - RNA, 19 nt, Homo sapiens
  misc_RNA (1)...(19): siRNA sense strand
agucagagccaucaaaugu

SEQ ID NO: 1569859 - RNA, 19 nt, Homo sapiens
  misc_RNA (1)...(19): siRNA sense strand
cccaacagauccacuucaa

SEQ ID NO: 1569860 - RNA, 19 nt, Homo sapiens
  misc_RNA (1)...(19): siRNA sense strand
acagagcuccucccucauu

SEQ ID NO: 1569861 - RNA, 19 nt, Homo sapiens
  misc_RNA (1)...(19): siRNA sense strand
ccgaaggccuuugcacaga

SEQ ID NO: 1569862 - RNA, 19 nt, Homo sapiens
  misc_RNA (1)...(19): siRNA sense strand
ggggagaucuggacaaagu

SEQ ID NO: 1569863 - RNA, 19 nt, Homo sapiens
  misc_RNA (1)...(19): siRNA sense strand
acagauccacuucaagaaa

SEQ ID NO: 1569864 - RNA, 19 nt, Homo sapiens
  misc_RNA (1)...(19): siRNA sense strand
cagcaccaaaggauucaua

SEQ ID NO: 1569865 - RNA, 19 nt, Homo sapiens
  misc_RNA (1)...(19): siRNA sense strand
cagagcuccucccucauug

SEQ ID NO: 1569866 - RNA, 19 nt, Homo sapiens
  misc_RNA (1)...(19): siRNA sense strand
gaagccauaucaguguaag

SEQ ID NO: 1569867 - RNA, 19 nt, Homo sapiens
  misc_RNA (1)...(19): siRNA sense strand
aaccucaccucccaagaga

SEQ ID NO: 1569868 - RNA, 19 nt, Homo sapiens
  misc_RNA (1)...(19): siRNA sense strand
ccaagugucgcgaguguag

SEQ ID NO: 1569869 - RNA, 19 nt, Homo sapiens
  misc_RNA (1)...(19): siRNA sense strand
caccaaaggauucauacug

SEQ ID NO: 1569870 - RNA, 19 nt, Homo sapiens
  misc_RNA (1)...(19): siRNA sense strand
ugacucagcaccaaaggau

SEQ ID NO: 1569871 - RNA, 19 nt, Homo sapiens
  misc_RNA (1)...(19): siRNA sense strand
cagauccacuucaagaaaa

SEQ ID NO: 1569872 - RNA, 19 nt, Homo sapiens
  misc_RNA (1)...(19): siRNA sense strand
acacgggagagaagccuua

SEQ ID NO: 1569873 - RNA, 19 nt, Homo sapiens
  misc_RNA (1)...(19): siRNA sense strand
gacagcuuccuucaaguga

SEQ ID NO: 1569874 - RNA, 19 nt, Homo sapiens
  misc_RNA (1)...(19): siRNA sense strand
uugaucugguggaugcuua

SEQ ID NO: 1569875 - RNA, 19 nt, Homo sapiens
  misc_RNA (1)...(19): siRNA sense strand
gcacaccagaagacccauu

SEQ ID NO: 1569876 - RNA, 19 nt, Homo sapiens
  misc_RNA (1)...(19): siRNA sense strand
ccacagaggcaagcugcaa

SEQ ID NO: 1569877 - RNA, 19 nt, Homo sapiens
  misc_RNA (1)...(19): siRNA sense strand
aaacuucagggccuuacaa

SEQ ID NO: 1569878 - RNA, 19 nt, Homo sapiens
  misc_RNA (1)...(19): siRNA sense strand
gcucgaggcacaccagaag

SEQ ID NO: 1569879 - RNA, 19 nt, Homo sapiens
  misc_RNA (1)...(19): siRNA sense strand
agagaagccauaucagugu

SEQ ID NO: 1569880 - RNA, 19 nt, Homo sapiens
  misc_RNA (1)...(19): siRNA sense strand
gcgaguguaggaagauguu

SEQ ID NO: 1569881 - RNA, 19 nt, Homo sapiens
  misc_RNA (1)...(19): siRNA sense strand
cauaucaguguaagguuug

SEQ ID NO: 1569882 - RNA, 19 nt, Homo sapiens
  misc_RNA (1)...(19): siRNA sense strand
cuacaaauguggggaaugu

SEQ ID NO: 1569883 - RNA, 19 nt, Homo sapiens
  misc_RNA (1)...(19): siRNA sense strand
ucagaagacaaauuugauc

SEQ ID NO: 1569884 - RNA, 19 nt, Homo sapiens
  misc_RNA (1)...(19): siRNA sense strand
ggauucauacuggagagaa

SEQ ID NO: 1569885 - RNA, 19 nt, Homo sapiens
  misc_RNA (1)...(19): siRNA sense strand
cagaagacaaauuugaucu

SEQ ID NO: 1569886 - RNA, 19 nt, Homo sapiens
  misc_RNA (1)...(19): siRNA sense strand
gaagguggaggaggaagag

SEQ ID NO: 1569887 - RNA, 19 nt, Homo sapiens
  misc_RNA (1)...(19): siRNA sense strand
ucauugagcaccagaggau

SEQ ID NO: 1569888 - RNA, 19 nt, Homo sapiens
  misc_RNA (1)...(19): siRNA sense strand
cuggagagaagccauauca

SEQ ID NO: 1569889 - RNA, 19 nt, Homo sapiens
  misc_RNA (1)...(19): siRNA sense strand
gcggagaauccagccauga

SEQ ID NO: 1569890 - RNA, 19 nt, Homo sapiens
  misc_RNA (1)...(19): siRNA sense strand
ggagaucuggacaaagucu

SEQ ID NO: 1569891 - RNA, 19 nt, Homo sapiens
  misc_RNA (1)...(19): siRNA sense strand
ccacaucacggugcugcaa

SEQ ID NO: 1569892 - RNA, 19 nt, Homo sapiens
  misc_RNA (1)...(19): siRNA sense strand
gguggaggaggaagaggaa

SEQ ID NO: 1569893 - RNA, 19 nt, Homo sapiens
  misc_RNA (1)...(19): siRNA sense strand
acaaggauguccccacaga

SEQ ID NO: 1569894 - RNA, 19 nt, Homo sapiens
  misc_RNA (1)...(19): siRNA sense strand
acaucacggugcugcaaug

SEQ ID NO: 1569895 - RNA, 19 nt, Homo sapiens
  misc_RNA (1)...(19): siRNA sense strand
ucuggugccucgaggaaca

SEQ ID NO: 1569896 - RNA, 19 nt, Homo sapiens
  misc_RNA (1)...(19): siRNA sense strand
gagucagagccaucaaaug

SEQ ID NO: 1569897 - RNA, 19 nt, Homo sapiens
  misc_RNA (1)...(19): siRNA sense strand
ccaugaguguaaggaaugu

SEQ ID NO: 1569898 - RNA, 19 nt, Homo sapiens
  misc_RNA (1)...(19): siRNA sense strand
aaaccucaccucccaagag

SEQ ID NO: 1569899 - RNA, 19 nt, Homo sapiens
  misc_RNA (1)...(19): siRNA sense strand
gcaaguauaugcucaaguc

SEQ ID NO: 1569900 - RNA, 19 nt, Homo sapiens
  misc_RNA (1)...(19): siRNA sense strand
ucaagauccucaagaauga

SEQ ID NO: 1569901 - RNA, 19 nt, Homo sapiens
  misc_RNA (1)...(19): siRNA sense strand
ucaaggagcuggcuaucau

SEQ ID NO: 1569902 - RNA, 19 nt, Homo sapiens
  misc_RNA (1)...(19): siRNA sense strand
gaaggaggcugcggguaug

SEQ ID NO: 1569903 - RNA, 19 nt, Homo sapiens
  misc_RNA (1)...(19): siRNA sense strand
ccaucaagauccucaagaa

SEQ ID NO: 1569904 - RNA, 19 nt, Homo sapiens
  misc_RNA (1)...(19): siRNA sense strand
gaggaugggcccaacauug

SEQ ID NO: 1569905 - RNA, 19 nt, Homo sapiens
  misc_RNA (1)...(19): siRNA sense strand
ggagaaggcaccagguaug

SEQ ID NO: 1569906 - RNA, 19 nt, Homo sapiens
  misc_RNA (1)...(19): siRNA sense strand
gaggagaaggcaccaggua

SEQ ID NO: 1569907 - RNA, 19 nt, Homo sapiens
  misc_RNA (1)...(19): siRNA sense strand
gaaggcaccagguaugcaa

SEQ ID NO: 1569908 - RNA, 19 nt, Homo sapiens
  misc_RNA (1)...(19): siRNA sense strand
caacuucagcaaccucauu

SEQ ID NO: 1569909 - RNA, 19 nt, Homo sapiens
  misc_RNA (1)...(19): siRNA sense strand
cauccacgcugaucucaag

SEQ ID NO: 1569910 - RNA, 19 nt, Homo sapiens
  misc_RNA (1)...(19): siRNA sense strand
agacgaaggugcgcccauu

SEQ ID NO: 1569911 - RNA, 19 nt, Homo sapiens
  misc_RNA (1)...(19): siRNA sense strand
gcccaacauugacaacaug

SEQ ID NO: 1569912 - RNA, 19 nt, Homo sapiens
  misc_RNA (1)...(19): siRNA sense strand
ccaaugcggucuccgacau

SEQ ID NO: 1569913 - RNA, 19 nt, Homo sapiens
  misc_RNA (1)...(19): siRNA sense strand
gcaaggcccaccacuucuu

SEQ ID NO: 1569914 - RNA, 19 nt, Homo sapiens
  misc_RNA (1)...(19): siRNA sense strand
caaguucuaccuggucuuu

SEQ ID NO: 1569915 - RNA, 19 nt, Homo sapiens
  misc_RNA (1)...(19): siRNA sense strand
ucaagucguuggaccagau

SEQ ID NO: 1569916 - RNA, 19 nt, Homo sapiens
  misc_RNA (1)...(19): siRNA sense strand
aguauaugcucaagucguu

SEQ ID NO: 1569917 - RNA, 19 nt, Homo sapiens
  misc_RNA (1)...(19): siRNA sense strand
ugaagaggcccacgucauc

SEQ ID NO: 1569918 - RNA, 19 nt, Homo sapiens
  misc_RNA (1)...(19): siRNA sense strand
cagcuguccuggagaaugg

SEQ ID NO: 1569919 - RNA, 19 nt, Homo sapiens
  misc_RNA (1)...(19): siRNA sense strand
agaaggaggcugcggguau

SEQ ID NO: 1569920 - RNA, 19 nt, Homo sapiens
  misc_RNA (1)...(19): siRNA sense strand
ccaugacgcccucaaguuc

SEQ ID NO: 1569921 - RNA, 19 nt, Homo sapiens
  misc_RNA (1)...(19): siRNA sense strand
gcccaagccacaccuguug

SEQ ID NO: 1569922 - RNA, 19 nt, Homo sapiens
  misc_RNA (1)...(19): siRNA sense strand
ggcccaacauugacaacau

SEQ ID NO: 1569923 - RNA, 19 nt, Homo sapiens
  misc_RNA (1)...(19): siRNA sense strand
gaccagauugagacaguga

SEQ ID NO: 1569924 - RNA, 19 nt, Homo sapiens
  misc_RNA (1)...(19): siRNA sense strand
gccagacccugagcucuuc

SEQ ID NO: 1569925 - RNA, 19 nt, Homo sapiens
  misc_RNA (1)...(19): siRNA sense strand
ccagcuggaugaccugagu

SEQ ID NO: 1569926 - RNA, 19 nt, Homo sapiens
  misc_RNA (1)...(19): siRNA sense strand
aggaugggcccaacauuga

SEQ ID NO: 1569927 - RNA, 19 nt, Homo sapiens
  misc_RNA (1)...(19): siRNA sense strand
ggccagacccugagcucuu

SEQ ID NO: 1569928 - RNA, 19 nt, Homo sapiens
  misc_RNA (1)...(19): siRNA sense strand
gucauccgcuuccuugagu

SEQ ID NO: 1569929 - RNA, 19 nt, Homo sapiens
  misc_RNA (1)...(19): siRNA sense strand
aguucuaccuggucuuuga

SEQ ID NO: 1569930 - RNA, 19 nt, Homo sapiens
  misc_RNA (1)...(19): siRNA sense strand
ccagcuuccuccagcaugu

SEQ ID NO: 1569931 - RNA, 19 nt, Homo sapiens
  misc_RNA (1)...(19): siRNA sense strand
gaccugggagucacacgaa

SEQ ID NO: 1569932 - RNA, 19 nt, Homo sapiens
  misc_RNA (1)...(19): siRNA sense strand
caucaagauccucaagaau

SEQ ID NO: 1569933 - RNA, 19 nt, Homo sapiens
  misc_RNA (1)...(19): siRNA sense strand
ugaaggagccauacaucca

SEQ ID NO: 1569934 - RNA, 19 nt, Homo sapiens
  misc_RNA (1)...(19): siRNA sense strand
cugcaaggcccaccacuuc

SEQ ID NO: 1569935 - RNA, 19 nt, Homo sapiens
  misc_RNA (1)...(19): siRNA sense strand
cgucguggccgcagaagau

SEQ ID NO: 1569936 - RNA, 19 nt, Homo sapiens
  misc_RNA (1)...(19): siRNA sense strand
cgacaucaucgaggucuug

SEQ ID NO: 1569937 - RNA, 19 nt, Homo sapiens
  misc_RNA (1)...(19): siRNA sense strand
gagcacgccgaccucaaga

SEQ ID NO: 1569938 - RNA, 19 nt, Homo sapiens
  misc_RNA (1)...(19): siRNA sense strand
gcagcuguccuggagaaug

SEQ ID NO: 1569939 - RNA, 19 nt, Homo sapiens
  misc_RNA (1)...(19): siRNA sense strand
uccuugaguucuuccauga

SEQ ID NO: 1569940 - RNA, 19 nt, Homo sapiens
  misc_RNA (1)...(19): siRNA sense strand
cuucggauccgccagcauu

SEQ ID NO: 1569941 - RNA, 19 nt, Homo sapiens
  misc_RNA (1)...(19): siRNA sense strand
ugacugcuacgacaucauc

SEQ ID NO: 1569942 - RNA, 19 nt, Homo sapiens
  misc_RNA (1)...(19): siRNA sense strand
gaccaggugcgcuacaucu

SEQ ID NO: 1569943 - RNA, 19 nt, Homo sapiens
  misc_RNA (1)...(19): siRNA sense strand
ggcaccagguaugcaaaga

SEQ ID NO: 1569944 - RNA, 19 nt, Homo sapiens
  misc_RNA (1)...(19): siRNA sense strand
cgagaccacccacuacuac

SEQ ID NO: 1569945 - RNA, 19 nt, Homo sapiens
  misc_RNA (1)...(19): siRNA sense strand
cgaaggugcgcccauugga

SEQ ID NO: 1569946 - RNA, 19 nt, Homo sapiens
  misc_RNA (1)...(19): siRNA sense strand
gacgaaggugcgcccauug

SEQ ID NO: 1569947 - RNA, 19 nt, Homo sapiens
  misc_RNA (1)...(19): siRNA sense strand
cgccacauccguacaguca

SEQ ID NO: 1569948 - RNA, 19 nt, Homo sapiens
  misc_RNA (1)...(19): siRNA sense strand
caaggcccaccacuucuuc

SEQ ID NO: 1569949 - RNA, 19 nt, Homo sapiens
  misc_RNA (1)...(19): siRNA sense strand
ccgcaaccgcaucaucaaa

SEQ ID NO: 1569950 - RNA, 19 nt, Homo sapiens
  misc_RNA (1)...(19): siRNA sense strand
gcuacgugaaggagccaua

SEQ ID NO: 1569951 - RNA, 19 nt, Homo sapiens
  misc_RNA (1)...(19): siRNA sense strand
gcaccagguaugcaaagag

SEQ ID NO: 1569952 - RNA, 19 nt, Homo sapiens
  misc_RNA (1)...(19): siRNA sense strand
gagaaggcaccagguaugc

SEQ ID NO: 1569953 - RNA, 19 nt, Homo sapiens
  misc_RNA (1)...(19): siRNA sense strand
uggaccagauugagacagu

SEQ ID NO: 1569954 - RNA, 19 nt, Homo sapiens
  misc_RNA (1)...(19): siRNA sense strand
aucaagauccucaagaaug

SEQ ID NO: 1569955 - RNA, 19 nt, Homo sapiens
  misc_RNA (1)...(19): siRNA sense strand
guaaagaacuccaaggauu

SEQ ID NO: 1569956 - RNA, 19 nt, Homo sapiens
  misc_RNA (1)...(19): siRNA sense strand
gaucgaagguuuccgguaa

SEQ ID NO: 1569957 - RNA, 19 nt, Homo sapiens
  misc_RNA (1)...(19): siRNA sense strand
gaagggauguuaaagacuu

SEQ ID NO: 1569958 - RNA, 19 nt, Homo sapiens
  misc_RNA (1)...(19): siRNA sense strand
gagagaggauuaagcaguu

SEQ ID NO: 1569959 - RNA, 19 nt, Homo sapiens
  misc_RNA (1)...(19): siRNA sense strand
acaaauagcugcccagaag

SEQ ID NO: 1569960 - RNA, 19 nt, Homo sapiens
  misc_RNA (1)...(19): siRNA sense strand
gagaagccauccuccaguu

SEQ ID NO: 1569961 - RNA, 19 nt, Homo sapiens
  misc_RNA (1)...(19): siRNA sense strand
ucacagaccuacucaaugg

SEQ ID NO: 1569962 - RNA, 19 nt, Homo sapiens
  misc_RNA (1)...(19): siRNA sense strand
uaaagaacuccaaggauuu

SEQ ID NO: 1569963 - RNA, 19 nt, Homo sapiens
  misc_RNA (1)...(19): siRNA sense strand
ccagaaagaugaccauagg

SEQ ID NO: 1569964 - RNA, 19 nt, Homo sapiens
  misc_RNA (1)...(19): siRNA sense strand
uaggacaucuagcuuuaaa

SEQ ID NO: 1569965 - RNA, 19 nt, Homo sapiens
  misc_RNA (1)...(19): siRNA sense strand
guagaagggauguuaaaga

SEQ ID NO: 1569966 - RNA, 19 nt, Homo sapiens
  misc_RNA (1)...(19): siRNA sense strand
gcgaaaagaucaagagaug

SEQ ID NO: 1569967 - RNA, 19 nt, Homo sapiens
  misc_RNA (1)...(19): siRNA sense strand
gacuugguuuccacaaaua

SEQ ID NO: 1569968 - RNA, 19 nt, Homo sapiens
  misc_RNA (1)...(19): siRNA sense strand
gacaggauccagcguauug

SEQ ID NO: 1569969 - RNA, 19 nt, Homo sapiens
  misc_RNA (1)...(19): siRNA sense strand
caucuagcguuucuuccua

SEQ ID NO: 1569970 - RNA, 19 nt, Homo sapiens
  misc_RNA (1)...(19): siRNA sense strand
aaagaacuccaaggauuua

SEQ ID NO: 1569971 - RNA, 19 nt, Homo sapiens
  misc_RNA (1)...(19): siRNA sense strand
gacuggagcuauacccuau

SEQ ID NO: 1569972 - RNA, 19 nt, Homo sapiens
  misc_RNA (1)...(19): siRNA sense strand
aggcaucgaucgaagguuu

SEQ ID NO: 1569973 - RNA, 19 nt, Homo sapiens
  misc_RNA (1)...(19): siRNA sense strand
ccaucagacuggagcuaua

SEQ ID NO: 1569974 - RNA, 19 nt, Homo sapiens
  misc_RNA (1)...(19): siRNA sense strand
ggcauuggcgucauucuuu

SEQ ID NO: 1569975 - RNA, 19 nt, Homo sapiens
  misc_RNA (1)...(19): siRNA sense strand
gcccagaagucaucauugg

SEQ ID NO: 1569976 - RNA, 19 nt, Homo sapiens
  misc_RNA (1)...(19): siRNA sense strand
ggauuuauaccuccucuca

SEQ ID NO: 1569977 - RNA, 19 nt, Homo sapiens
  misc_RNA (1)...(19): siRNA sense strand
gccaguaacucugccauca

SEQ ID NO: 1569978 - RNA, 19 nt, Homo sapiens
  misc_RNA (1)...(19): siRNA sense strand
uagaagggauguuaaagac

SEQ ID NO: 1569979 - RNA, 19 nt, Homo sapiens
  misc_RNA (1)...(19): siRNA sense strand
ccacaccacuccaauuugc

SEQ ID NO: 1569980 - RNA, 19 nt, Homo sapiens
  misc_RNA (1)...(19): siRNA sense strand
gcaagcaucagcugaccaa

SEQ ID NO: 1569981 - RNA, 19 nt, Homo sapiens
  misc_RNA (1)...(19): siRNA sense strand
agacuugguuuccacaaau

SEQ ID NO: 1569982 - RNA, 19 nt, Homo sapiens
  misc_RNA (1)...(19): siRNA sense strand
gcccagaaguguaaagaac

SEQ ID NO: 1569983 - RNA, 19 nt, Homo sapiens
  misc_RNA (1)...(19): siRNA sense strand
gaacuccaaggauuuauac

SEQ ID NO: 1569984 - RNA, 19 nt, Homo sapiens
  misc_RNA (1)...(19): siRNA sense strand
gauucuccaucuagcguuu

SEQ ID NO: 1569985 - RNA, 19 nt, Homo sapiens
  misc_RNA (1)...(19): siRNA sense strand
gauguuaaagacuugguuu

SEQ ID NO: 1569986 - RNA, 19 nt, Homo sapiens
  misc_RNA (1)...(19): siRNA sense strand
gaagaugggucguuuugag

SEQ ID NO: 1569987 - RNA, 19 nt, Homo sapiens
  misc_RNA (1)...(19): siRNA sense strand
ccagguacuaucuccuuua

SEQ ID NO: 1569988 - RNA, 19 nt, Homo sapiens
  misc_RNA (1)...(19): siRNA sense strand
gguccucguugcuacaguu

SEQ ID NO: 1569989 - RNA, 19 nt, Homo sapiens
  misc_RNA (1)...(19): siRNA sense strand
gagggagaccugcuguuug

SEQ ID NO: 1569990 - RNA, 19 nt, Homo sapiens
  misc_RNA (1)...(19): siRNA sense strand
gauccacaccacuccaauu

SEQ ID NO: 1569991 - RNA, 19 nt, Homo sapiens
  misc_RNA (1)...(19): siRNA sense strand
acagguagaagggauguua

SEQ ID NO: 1569992 - RNA, 19 nt, Homo sapiens
  misc_RNA (1)...(19): siRNA sense strand
cagcauacaccaucucauc

SEQ ID NO: 1569993 - RNA, 19 nt, Homo sapiens
  misc_RNA (1)...(19): siRNA sense strand
cuaugaaccucaccuggau

SEQ ID NO: 1569994 - RNA, 19 nt, Homo sapiens
  misc_RNA (1)...(19): siRNA sense strand
cagguacuaucuccuuuag

SEQ ID NO: 1569995 - RNA, 19 nt, Homo sapiens
  misc_RNA (1)...(19): siRNA sense strand
cuuuagccaugguccuuua

SEQ ID NO: 1569996 - RNA, 19 nt, Homo sapiens
  misc_RNA (1)...(19): siRNA sense strand
ccagaaguguaaagaacuc

SEQ ID NO: 1569997 - RNA, 19 nt, Homo sapiens
  misc_RNA (1)...(19): siRNA sense strand
cacaauggccagcuaugaa

SEQ ID NO: 1569998 - RNA, 19 nt, Homo sapiens
  misc_RNA (1)...(19): siRNA sense strand
agacacagcuaggacaucu

SEQ ID NO: 1569999 - RNA, 19 nt, Homo sapiens
  misc_RNA (1)...(19): siRNA sense strand
uacaccaucucauccgaaa

SEQ ID NO: 1570000 - RNA, 19 nt, Homo sapiens
  misc_RNA (1)...(19): siRNA sense strand
ggcugaagaugggucguuu

SEQ ID NO: 1570001 - RNA, 19 nt, Homo sapiens
  misc_RNA (1)...(19): siRNA sense strand
cuaaacacccaagguugua

SEQ ID NO: 1570002 - RNA, 19 nt, Homo sapiens
  misc_RNA (1)...(19): siRNA sense strand
ggacaggauccagcguauu

SEQ ID NO: 1570003 - RNA, 19 nt, Homo sapiens
  misc_RNA (1)...(19): siRNA sense strand
aagacuugguuuccacaaa

SEQ ID NO: 1570004 - RNA, 19 nt, Homo sapiens
  misc_RNA (1)...(19): siRNA sense strand
ggguucggcuucuccuaug

SEQ ID NO: 1570005 - RNA, 19 nt, Homo sapiens
  misc_RNA (1)...(19): siRNA sense strand
gcauuggcgucauucuuuu

SEQ ID NO: 1570006 - RNA, 19 nt, Homo sapiens
  misc_RNA (1)...(19): siRNA sense strand
agagggagaccugcuguuu

SEQ ID NO: 1570007 - RNA, 19 nt, Homo sapiens
  misc_RNA (1)...(19): siRNA sense strand
ccaagccaccacagugauu

SEQ ID NO: 1570008 - RNA, 19 nt, Homo sapiens
  misc_RNA (1)...(19): siRNA sense strand
guuaaagacuugguuucca

SEQ ID NO: 1570009 - RNA, 19 nt, Homo sapiens
  misc_RNA (1)...(19): siRNA sense strand
gauccagcguauuguaggu

SEQ ID NO: 1570010 - RNA, 19 nt, Homo sapiens
  misc_RNA (1)...(19): siRNA sense strand
gaaguguaaagaacuccaa

SEQ ID NO: 1570011 - RNA, 19 nt, Homo sapiens
  misc_RNA (1)...(19): siRNA sense strand
agaacuccaaggauuuaua

SEQ ID NO: 1570012 - RNA, 19 nt, Homo sapiens
  misc_RNA (1)...(19): siRNA sense strand
ccucucagcuccccaggua

SEQ ID NO: 1570013 - RNA, 19 nt, Homo sapiens
  misc_RNA (1)...(19): siRNA sense strand
gaaaagaucaagagauggu

SEQ ID NO: 1570014 - RNA, 19 nt, Homo sapiens
  misc_RNA (1)...(19): siRNA sense strand
acacaauggccagcuauga

SEQ ID NO: 1570015 - RNA, 19 nt, Homo sapiens
  misc_RNA (1)...(19): siRNA sense strand
caggauccagcguauugua

SEQ ID NO: 1570016 - RNA, 19 nt, Homo sapiens
  misc_RNA (1)...(19): siRNA sense strand
agagaggauuaagcaguuu

SEQ ID NO: 1570017 - RNA, 19 nt, Homo sapiens
  misc_RNA (1)...(19): siRNA sense strand
uaaccagcauacaccaucu

SEQ ID NO: 1570018 - RNA, 19 nt, Homo sapiens
  misc_RNA (1)...(19): siRNA sense strand
ugcuacaguuugccaguaa

SEQ ID NO: 1570019 - RNA, 19 nt, Homo sapiens
  misc_RNA (1)...(19): siRNA sense strand
ucucacagaccuacucaau

SEQ ID NO: 1570020 - RNA, 19 nt, Homo sapiens
  misc_RNA (1)...(19): siRNA sense strand
aucaagagauggugaacug

SEQ ID NO: 1570021 - RNA, 19 nt, Homo sapiens
  misc_RNA (1)...(19): siRNA sense strand
cuacccaccuuggccagaa

SEQ ID NO: 1570022 - RNA, 19 nt, Homo sapiens
  misc_RNA (1)...(19): siRNA sense strand
ccagugaacagugacuuug

SEQ ID NO: 1570023 - RNA, 19 nt, Homo sapiens
  misc_RNA (1)...(19): siRNA sense strand
cuuggcaccucacacaaug

SEQ ID NO: 1570024 - RNA, 19 nt, Homo sapiens
  misc_RNA (1)...(19): siRNA sense strand
guguaaagaacuccaagga

SEQ ID NO: 1570025 - RNA, 19 nt, Homo sapiens
  misc_RNA (1)...(19): siRNA sense strand
caucagcugaccaagcauu

SEQ ID NO: 1570026 - RNA, 19 nt, Homo sapiens
  misc_RNA (1)...(19): siRNA sense strand
caccaucucauccgaaaca

SEQ ID NO: 1570027 - RNA, 19 nt, Homo sapiens
  misc_RNA (1)...(19): siRNA sense strand
gaaccggcauuggcgucau

SEQ ID NO: 1570028 - RNA, 19 nt, Homo sapiens
  misc_RNA (1)...(19): siRNA sense strand
ggaccagacacagcuagga

SEQ ID NO: 1570029 - RNA, 19 nt, Homo sapiens
  misc_RNA (1)...(19): siRNA sense strand
ucuaaacacccaagguugu

SEQ ID NO: 1570030 - RNA, 19 nt, Homo sapiens
  misc_RNA (1)...(19): siRNA sense strand
caccuuggccagaaagaug

SEQ ID NO: 1570031 - RNA, 19 nt, Homo sapiens
  misc_RNA (1)...(19): siRNA sense strand
cccagguacuaucuccuuu

SEQ ID NO: 1570032 - RNA, 19 nt, Homo sapiens
  misc_RNA (1)...(19): siRNA sense strand
agcaucagcugaccaagca

SEQ ID NO: 1570033 - RNA, 19 nt, Homo sapiens
  misc_RNA (1)...(19): siRNA sense strand
agggagaccugcuguuugc

SEQ ID NO: 1570034 - RNA, 19 nt, Homo sapiens
  misc_RNA (1)...(19): siRNA sense strand
auuuauaccuccucucaca

SEQ ID NO: 1570035 - RNA, 19 nt, Homo sapiens
  misc_RNA (1)...(19): siRNA sense strand
cagcguauuguagguguuu

SEQ ID NO: 1570036 - RNA, 19 nt, Homo sapiens
  misc_RNA (1)...(19): siRNA sense strand
gccagaaagaugaccauag

SEQ ID NO: 1570037 - RNA, 19 nt, Homo sapiens
  misc_RNA (1)...(19): siRNA sense strand
ggugagccuaugaaacuau

SEQ ID NO: 1570038 - RNA, 19 nt, Homo sapiens
  misc_RNA (1)...(19): siRNA sense strand
agucuaaacacccaagguu

SEQ ID NO: 1570039 - RNA, 19 nt, Homo sapiens
  misc_RNA (1)...(19): siRNA sense strand
ggccagaaagaugaccaua

SEQ ID NO: 1570040 - RNA, 19 nt, Homo sapiens
  misc_RNA (1)...(19): siRNA sense strand
gugagccuaugaaacuauc

SEQ ID NO: 1570041 - RNA, 19 nt, Homo sapiens
  misc_RNA (1)...(19): siRNA sense strand
cagguagaagggauguuaa

SEQ ID NO: 1570042 - RNA, 19 nt, Homo sapiens
  misc_RNA (1)...(19): siRNA sense strand
gcaggcaucgaucgaaggu

SEQ ID NO: 1570043 - RNA, 19 nt, Homo sapiens
  misc_RNA (1)...(19): siRNA sense strand
gguagaagggauguuaaag

SEQ ID NO: 1570044 - RNA, 19 nt, Homo sapiens
  misc_RNA (1)...(19): siRNA sense strand
uugcuacaguuugccagua

SEQ ID NO: 1570045 - RNA, 19 nt, Homo sapiens
  misc_RNA (1)...(19): siRNA sense strand
gaagaagccuugacaauac

SEQ ID NO: 1570046 - RNA, 19 nt, Homo sapiens
  misc_RNA (1)...(19): siRNA sense strand
gauaggaugucuucauuug

SEQ ID NO: 1570047 - RNA, 19 nt, Homo sapiens
  misc_RNA (1)...(19): siRNA sense strand
agaaguaucugaugguaua

SEQ ID NO: 1570048 - RNA, 19 nt, Homo sapiens
  misc_RNA (1)...(19): siRNA sense strand
caaggaggcuuuagguauu

SEQ ID NO: 1570049 - RNA, 19 nt, Homo sapiens
  misc_RNA (1)...(19): siRNA sense strand
ccaaugccaucgaucaaua

SEQ ID NO: 1570050 - RNA, 19 nt, Homo sapiens
  misc_RNA (1)...(19): siRNA sense strand
ggaaugaacccacaucaga

SEQ ID NO: 1570051 - RNA, 19 nt, Homo sapiens
  misc_RNA (1)...(19): siRNA sense strand
ggacagcagucucguauac

SEQ ID NO: 1570052 - RNA, 19 nt, Homo sapiens
  misc_RNA (1)...(19): siRNA sense strand
ggaccaaucuuacaaacca

SEQ ID NO: 1570053 - RNA, 19 nt, Homo sapiens
  misc_RNA (1)...(19): siRNA sense strand
gagauaaggcaaacuauug

SEQ ID NO: 1570054 - RNA, 19 nt, Homo sapiens
  misc_RNA (1)...(19): siRNA sense strand
gccaaagucugcaugguuu

SEQ ID NO: 1570055 - RNA, 19 nt, Homo sapiens
  misc_RNA (1)...(19): siRNA sense strand
gagcagaaaucuccaaugc

SEQ ID NO: 1570056 - RNA, 19 nt, Homo sapiens
  misc_RNA (1)...(19): siRNA sense strand
gcaaacuauugguggcuua

SEQ ID NO: 1570057 - RNA, 19 nt, Homo sapiens
  misc_RNA (1)...(19): siRNA sense strand
aauccuagcucguaauauu

SEQ ID NO: 1570058 - RNA, 19 nt, Homo sapiens
  misc_RNA (1)...(19): siRNA sense strand
ggaaucauccucgcucaua

SEQ ID NO: 1570059 - RNA, 19 nt, Homo sapiens
  misc_RNA (1)...(19): siRNA sense strand
gucgacaagucauuauuua

SEQ ID NO: 1570060 - RNA, 19 nt, Homo sapiens
  misc_RNA (1)...(19): siRNA sense strand
gaaggaauggguugagaaa

SEQ ID NO: 1570061 - RNA, 19 nt, Homo sapiens
  misc_RNA (1)...(19): siRNA sense strand
agaagaagccuugacaaua

SEQ ID NO: 1570062 - RNA, 19 nt, Homo sapiens
  misc_RNA (1)...(19): siRNA sense strand
ggaugaagauuugauaaag

SEQ ID NO: 1570063 - RNA, 19 nt, Homo sapiens
  misc_RNA (1)...(19): siRNA sense strand
ggaauccuagcucguaaua

SEQ ID NO: 1570064 - RNA, 19 nt, Homo sapiens
  misc_RNA (1)...(19): siRNA sense strand
ucaaguacacucagucuaa

SEQ ID NO: 1570065 - RNA, 19 nt, Homo sapiens
  misc_RNA (1)...(19): siRNA sense strand
ucucuuuggucuucauuua

SEQ ID NO: 1570066 - RNA, 19 nt, Homo sapiens
  misc_RNA (1)...(19): siRNA sense strand
ggagauaaggcaaacuauu

SEQ ID NO: 1570067 - RNA, 19 nt, Homo sapiens
  misc_RNA (1)...(19): siRNA sense strand
aaaccggccuuguggaauu

SEQ ID NO: 1570068 - RNA, 19 nt, Homo sapiens
  misc_RNA (1)...(19): siRNA sense strand
gccaagaacgggcagguua

SEQ ID NO: 1570069 - RNA, 19 nt, Homo sapiens
  misc_RNA (1)...(19): siRNA sense strand
cagaugcccuugagauaug

SEQ ID NO: 1570070 - RNA, 19 nt, Homo sapiens
  misc_RNA (1)...(19): siRNA sense strand
ugaggaagucccugaguua

SEQ ID NO: 1570071 - RNA, 19 nt, Homo sapiens
  misc_RNA (1)...(19): siRNA sense strand
ggccagcucgccuuauuua

SEQ ID NO: 1570072 - RNA, 19 nt, Homo sapiens
  misc_RNA (1)...(19): siRNA sense strand
cacaagugcuuucgaugaa

SEQ ID NO: 1570073 - RNA, 19 nt, Homo sapiens
  misc_RNA (1)...(19): siRNA sense strand
caucacaguucuaaaugga

SEQ ID NO: 1570074 - RNA, 19 nt, Homo sapiens
  misc_RNA (1)...(19): siRNA sense strand
acugagagcugcagccaaa

SEQ ID NO: 1570075 - RNA, 19 nt, Homo sapiens
  misc_RNA (1)...(19): siRNA sense strand
uaacguagacagagcuaaa

SEQ ID NO: 1570076 - RNA, 19 nt, Homo sapiens
  misc_RNA (1)...(19): siRNA sense strand
ccacaagugcuuucgauga

SEQ ID NO: 1570077 - RNA, 19 nt, Homo sapiens
  misc_RNA (1)...(19): siRNA sense strand
caaucucuaucccuuugua

SEQ ID NO: 1570078 - RNA, 19 nt, Homo sapiens
  misc_RNA (1)...(19): siRNA sense strand
aaaccacgcucgagugaca

SEQ ID NO: 1570079 - RNA, 19 nt, Homo sapiens
  misc_RNA (1)...(19): siRNA sense strand
ggaauggguugagaaacug

SEQ ID NO: 1570080 - RNA, 19 nt, Homo sapiens
  misc_RNA (1)...(19): siRNA sense strand
ucacucauacggcacaaua

SEQ ID NO: 1570081 - RNA, 19 nt, Homo sapiens
  misc_RNA (1)...(19): siRNA sense strand
ucaaggaggcuuuagguau

SEQ ID NO: 1570082 - RNA, 19 nt, Homo sapiens
  misc_RNA (1)...(19): siRNA sense strand
gaagaagaagccuugacaa

SEQ ID NO: 1570083 - RNA, 19 nt, Homo sapiens
  misc_RNA (1)...(19): siRNA sense strand
gagugacagugguguguga

SEQ ID NO: 1570084 - RNA, 19 nt, Homo sapiens
  misc_RNA (1)...(19): siRNA sense strand
gacaagucauuauuuagca

SEQ ID NO: 1570085 - RNA, 19 nt, Homo sapiens
  misc_RNA (1)...(19): siRNA sense strand
cccaggauaugaagaagaa

SEQ ID NO: 1570086 - RNA, 19 nt, Homo sapiens
  misc_RNA (1)...(19): siRNA sense strand
cugauaggaugucuucauu

SEQ ID NO: 1570087 - RNA, 19 nt, Homo sapiens
  misc_RNA (1)...(19): siRNA sense strand
cagcucgccuuauuuagug

SEQ ID NO: 1570088 - RNA, 19 nt, Homo sapiens
  misc_RNA (1)...(19): siRNA sense strand
gaggaugaagauuugauaa

SEQ ID NO: 1570089 - RNA, 19 nt, Homo sapiens
  misc_RNA (1)...(19): siRNA sense strand
augcagagcuccgagagua

SEQ ID NO: 1570090 - RNA, 19 nt, Homo sapiens
  misc_RNA (1)...(19): siRNA sense strand
ggagugguguggcguacau

SEQ ID NO: 1570091 - RNA, 19 nt, Homo sapiens
  misc_RNA (1)...(19): siRNA sense strand
ucacugaggcagagaagaa

SEQ ID NO: 1570092 - RNA, 19 nt, Homo sapiens
  misc_RNA (1)...(19): siRNA sense strand
uggcgaggaugaagauuug

SEQ ID NO: 1570093 - RNA, 19 nt, Homo sapiens
  misc_RNA (1)...(19): siRNA sense strand
agagaaguaucugauggua

SEQ ID NO: 1570094 - RNA, 19 nt, Homo sapiens
  misc_RNA (1)...(19): siRNA sense strand
uagcaauguuguuaccaaa

SEQ ID NO: 1570095 - RNA, 19 nt, Homo sapiens
  misc_RNA (1)...(19): siRNA sense strand
cgaacucucuuuggucuuc

SEQ ID NO: 1570096 - RNA, 19 nt, Homo sapiens
  misc_RNA (1)...(19): siRNA sense strand
ggagacuagacgccaguua

SEQ ID NO: 1570097 - RNA, 19 nt, Homo sapiens
  misc_RNA (1)...(19): siRNA sense strand
caccauugcugucaaguac

SEQ ID NO: 1570098 - RNA, 19 nt, Homo sapiens
  misc_RNA (1)...(19): siRNA sense strand
caaaccagaugaaaaugaa

SEQ ID NO: 1570099 - RNA, 19 nt, Homo sapiens
  misc_RNA (1)...(19): siRNA sense strand
ccuggcagcuggugaagga

SEQ ID NO: 1570100 - RNA, 19 nt, Homo sapiens
  misc_RNA (1)...(19): siRNA sense strand
ccugaccgcucuugguuug

SEQ ID NO: 1570101 - RNA, 19 nt, Homo sapiens
  misc_RNA (1)...(19): siRNA sense strand
gcuggaauccuagcucgua

SEQ ID NO: 1570102 - RNA, 19 nt, Homo sapiens
  misc_RNA (1)...(19): siRNA sense strand
ucucugaguugacgggauu

SEQ ID NO: 1570103 - RNA, 19 nt, Homo sapiens
  misc_RNA (1)...(19): siRNA sense strand
caggagauaaggcaaacua

SEQ ID NO: 1570104 - RNA, 19 nt, Homo sapiens
  misc_RNA (1)...(19): siRNA sense strand
gaaacuauuguguccuuca

SEQ ID NO: 1570105 - RNA, 19 nt, Homo sapiens
  misc_RNA (1)...(19): siRNA sense strand
cguaauauuccagaagaua

SEQ ID NO: 1570106 - RNA, 19 nt, Homo sapiens
  misc_RNA (1)...(19): siRNA sense strand
gaaucauccucgcucauac

SEQ ID NO: 1570107 - RNA, 19 nt, Homo sapiens
  misc_RNA (1)...(19): siRNA sense strand
cgaggaugaagauuugaua

SEQ ID NO: 1570108 - RNA, 19 nt, Homo sapiens
  misc_RNA (1)...(19): siRNA sense strand
caagugcuuucgaugaagu

SEQ ID NO: 1570109 - RNA, 19 nt, Homo sapiens
  misc_RNA (1)...(19): siRNA sense strand
gaagaugaggccaaagucu

SEQ ID NO: 1570110 - RNA, 19 nt, Homo sapiens
  misc_RNA (1)...(19): siRNA sense strand
ggagcaaauugacauuggu

SEQ ID NO: 1570111 - RNA, 19 nt, Homo sapiens
  misc_RNA (1)...(19): siRNA sense strand
gacauggccagacuugauu

SEQ ID NO: 1570112 - RNA, 19 nt, Homo sapiens
  misc_RNA (1)...(19): siRNA sense strand
ggccaaagucugcaugguu

SEQ ID NO: 1570113 - RNA, 19 nt, Homo sapiens
  misc_RNA (1)...(19): siRNA sense strand
gauugaggccugcgacgaa

SEQ ID NO: 1570114 - RNA, 19 nt, Homo sapiens
  misc_RNA (1)...(19): siRNA sense strand
gcaggacagcagucucgua

SEQ ID NO: 1570115 - RNA, 19 nt, Homo sapiens
  misc_RNA (1)...(19): siRNA sense strand
uaggaugucuucauuuggu

SEQ ID NO: 1570116 - RNA, 19 nt, Homo sapiens
  misc_RNA (1)...(19): siRNA sense strand
gagacuagacgccaguuag

SEQ ID NO: 1570117 - RNA, 19 nt, Homo sapiens
  misc_RNA (1)...(19): siRNA sense strand
ggagugaagagagcagaaa

SEQ ID NO: 1570118 - RNA, 19 nt, Homo sapiens
  misc_RNA (1)...(19): siRNA sense strand
gauggaccaaucuuacaaa

SEQ ID NO: 1570119 - RNA, 19 nt, Homo sapiens
  misc_RNA (1)...(19): siRNA sense strand
uggaaacuauuguguccuu

SEQ ID NO: 1570120 - RNA, 19 nt, Homo sapiens
  misc_RNA (1)...(19): siRNA sense strand
caugguuuaugaucucuau

SEQ ID NO: 1570121 - RNA, 19 nt, Homo sapiens
  misc_RNA (1)...(19): siRNA sense strand
ggcacaauaugaugaagca

SEQ ID NO: 1570122 - RNA, 19 nt, Homo sapiens
  misc_RNA (1)...(19): siRNA sense strand
ggaacucaaggaggcuuua

SEQ ID NO: 1570123 - RNA, 19 nt, Homo sapiens
  misc_RNA (1)...(19): siRNA sense strand
uugagaaacugacugaagu

SEQ ID NO: 1570124 - RNA, 19 nt, Homo sapiens
  misc_RNA (1)...(19): siRNA sense strand
agaagauaaugcugacaug

SEQ ID NO: 1570125 - RNA, 19 nt, Homo sapiens
  misc_RNA (1)...(19): siRNA sense strand
ugacauggccagacuugau

SEQ ID NO: 1570126 - RNA, 19 nt, Homo sapiens
  misc_RNA (1)...(19): siRNA sense strand
ccaaagucugcaugguuua

SEQ ID NO: 1570127 - RNA, 19 nt, Homo sapiens
  misc_RNA (1)...(19): siRNA sense strand
gaaggcacuguuugaggaa

SEQ ID NO: 1570128 - RNA, 19 nt, Homo sapiens
  misc_RNA (1)...(19): siRNA sense strand
cgucgacaagucauuauuu

SEQ ID NO: 1570129 - RNA, 19 nt, Homo sapiens
  misc_RNA (1)...(19): siRNA sense strand
cauuuaagccagaagagaa

SEQ ID NO: 1570130 - RNA, 19 nt, Homo sapiens
  misc_RNA (1)...(19): siRNA sense strand
ccggccagcucgccuuauu

SEQ ID NO: 1570131 - RNA, 19 nt, Homo sapiens
  misc_RNA (1)...(19): siRNA sense strand
ugaccgcucuugguuugaa

SEQ ID NO: 1570132 - RNA, 19 nt, Homo sapiens
  misc_RNA (1)...(19): siRNA sense strand
ugaggaggcuguggagcaa

SEQ ID NO: 1570133 - RNA, 19 nt, Homo sapiens
  misc_RNA (1)...(19): siRNA sense strand
gaaccauuggcgaggauga

SEQ ID NO: 1570134 - RNA, 19 nt, Homo sapiens
  misc_RNA (1)...(19): siRNA sense strand
uaagccagaagagaaauaa

SEQ ID NO: 1570135 - RNA, 19 nt, Homo sapiens
  misc_RNA (1)...(19): siRNA sense strand
ugaagaagaagccuugaca

SEQ ID NO: 1570136 - RNA, 19 nt, Homo sapiens
  misc_RNA (1)...(19): siRNA sense strand
aaacuugugcgaugcuuug

SEQ ID NO: 1570137 - RNA, 19 nt, Homo sapiens
  misc_RNA (1)...(19): siRNA sense strand
guacagcaaaggcguaucu

SEQ ID NO: 1570138 - RNA, 19 nt, Homo sapiens
  misc_RNA (1)...(19): siRNA sense strand
ugccaucgaucaauaugug

SEQ ID NO: 1570139 - RNA, 19 nt, Homo sapiens
  misc_RNA (1)...(19): siRNA sense strand
ugcuuucgaugaaguuuaa

SEQ ID NO: 1570140 - RNA, 19 nt, Homo sapiens
  misc_RNA (1)...(19): siRNA sense strand
aagaagaagccuugacaau

SEQ ID NO: 1570141 - RNA, 19 nt, Homo sapiens
  misc_RNA (1)...(19): siRNA sense strand
cagugaagaugaggccaaa

SEQ ID NO: 1570142 - RNA, 19 nt, Homo sapiens
  misc_RNA (1)...(19): siRNA sense strand
ugcaaucucuaucccuuug

SEQ ID NO: 1570143 - RNA, 19 nt, Homo sapiens
  misc_RNA (1)...(19): siRNA sense strand
ccuccgagaccucaucgua

SEQ ID NO: 1570144 - RNA, 19 nt, Homo sapiens
  misc_RNA (1)...(19): siRNA sense strand
uuagcaauguuguuaccaa

SEQ ID NO: 1570145 - RNA, 19 nt, Homo sapiens
  misc_RNA (1)...(19): siRNA sense strand
guacagaagcauauacuga

SEQ ID NO: 1570146 - RNA, 19 nt, Homo sapiens
  misc_RNA (1)...(19): siRNA sense strand
gaauaaggccauccaagga

SEQ ID NO: 1570147 - RNA, 19 nt, Homo sapiens
  misc_RNA (1)...(19): siRNA sense strand
ccacuucccugcaggacau

SEQ ID NO: 1570148 - RNA, 19 nt, Homo sapiens
  misc_RNA (1)...(19): siRNA sense strand
ccugagugcugcccuguug

SEQ ID NO: 1570149 - RNA, 19 nt, Homo sapiens
  misc_RNA (1)...(19): siRNA sense strand
cgucaucccugucaucuac

SEQ ID NO: 1570150 - RNA, 19 nt, Homo sapiens
  misc_RNA (1)...(19): siRNA sense strand
agaagcauauacugaggaa

SEQ ID NO: 1570151 - RNA, 19 nt, Homo sapiens
  misc_RNA (1)...(19): siRNA sense strand
aagcauauacugaggaaga

SEQ ID NO: 1570152 - RNA, 19 nt, Homo sapiens
  misc_RNA (1)...(19): siRNA sense strand
ggugucccaugcacagaaa

SEQ ID NO: 1570153 - RNA, 19 nt, Homo sapiens
  misc_RNA (1)...(19): siRNA sense strand
ugaggaagacaaaucaaug

SEQ ID NO: 1570154 - RNA, 19 nt, Homo sapiens
  misc_RNA (1)...(19): siRNA sense strand
ccacacggcagccaacuuc

SEQ ID NO: 1570155 - RNA, 19 nt, Homo sapiens
  misc_RNA (1)...(19): siRNA sense strand
gggcaucaccacacuguuc

SEQ ID NO: 1570156 - RNA, 19 nt, Homo sapiens
  misc_RNA (1)...(19): siRNA sense strand
gacaccgacucacccagaa

SEQ ID NO: 1570157 - RNA, 19 nt, Homo sapiens
  misc_RNA (1)...(19): siRNA sense strand
uccaaggacuccagcaguu

SEQ ID NO: 1570158 - RNA, 19 nt, Homo sapiens
  misc_RNA (1)...(19): siRNA sense strand
aagcugggaccuccgaaua

SEQ ID NO: 1570159 - RNA, 19 nt, Homo sapiens
  misc_RNA (1)...(19): siRNA sense strand
gcugggaccuccgaauaag

SEQ ID NO: 1570160 - RNA, 19 nt, Homo sapiens
  misc_RNA (1)...(19): siRNA sense strand
gaggaagacaaaucaaugg

SEQ ID NO: 1570161 - RNA, 19 nt, Homo sapiens
  misc_RNA (1)...(19): siRNA sense strand
cggcgaagccugugaugga

SEQ ID NO: 1570162 - RNA, 19 nt, Homo sapiens
  misc_RNA (1)...(19): siRNA sense strand
gcucacagccucggauauc

SEQ ID NO: 1570163 - RNA, 19 nt, Homo sapiens
  misc_RNA (1)...(19): siRNA sense strand
gggcaaacaaccacuugga

SEQ ID NO: 1570164 - RNA, 19 nt, Homo sapiens
  misc_RNA (1)...(19): siRNA sense strand
ccaaggacuccagcaguuu

SEQ ID NO: 1570165 - RNA, 19 nt, Homo sapiens
  misc_RNA (1)...(19): siRNA sense strand
gcccugcacuuuggcauca

SEQ ID NO: 1570166 - RNA, 19 nt, Homo sapiens
  misc_RNA (1)...(19): siRNA sense strand
cggccaacauccuggaguu

SEQ ID NO: 1570167 - RNA, 19 nt, Homo sapiens
  misc_RNA (1)...(19): siRNA sense strand
gcacagaaaagccagcauu

SEQ ID NO: 1570168 - RNA, 19 nt, Homo sapiens
  misc_RNA (1)...(19): siRNA sense strand
caaggacuccagcaguuuc

SEQ ID NO: 1570169 - RNA, 19 nt, Homo sapiens
  misc_RNA (1)...(19): siRNA sense strand
ggccucuacugcuuuguca

SEQ ID NO: 1570170 - RNA, 19 nt, Homo sapiens
  misc_RNA (1)...(19): siRNA sense strand
gcgcucacagccucggaua

SEQ ID NO: 1570171 - RNA, 19 nt, Homo sapiens
  misc_RNA (1)...(19): siRNA sense strand
guguguggcuggcgucauc

SEQ ID NO: 1570172 - RNA, 19 nt, Homo sapiens
  misc_RNA (1)...(19): siRNA sense strand
gaagcugggaccuccgaau

SEQ ID NO: 1570173 - RNA, 19 nt, Homo sapiens
  misc_RNA (1)...(19): siRNA sense strand
gccaacauccuggaguuug

SEQ ID NO: 1570174 - RNA, 19 nt, Homo sapiens
  misc_RNA (1)...(19): siRNA sense strand
ccaacauccuggaguuugc

SEQ ID NO: 1570175 - RNA, 19 nt, Homo sapiens
  misc_RNA (1)...(19): siRNA sense strand
guggagagacaccgacuca

SEQ ID NO: 1570176 - RNA, 19 nt, Homo sapiens
  misc_RNA (1)...(19): siRNA sense strand
ucaucccugucaucuacua

SEQ ID NO: 1570177 - RNA, 19 nt, Homo sapiens
  misc_RNA (1)...(19): siRNA sense strand
uaccugcccugcacuuugg

SEQ ID NO: 1570178 - RNA, 19 nt, Homo sapiens
  misc_RNA (1)...(19): siRNA sense strand
acugguggcuggacaugug

SEQ ID NO: 1570179 - RNA, 19 nt, Homo sapiens
  misc_RNA (1)...(19): siRNA sense strand
gaaaagccagcauucuugu

SEQ ID NO: 1570180 - RNA, 19 nt, Homo sapiens
  misc_RNA (1)...(19): siRNA sense strand
ccauccugcucacgguuga

SEQ ID NO: 1570181 - RNA, 19 nt, Homo sapiens
  misc_RNA (1)...(19): siRNA sense strand
cuaccugcccugcacuuug

SEQ ID NO: 1570182 - RNA, 19 nt, Homo sapiens
  misc_RNA (1)...(19): siRNA sense strand
gaagaggaauucccaagua

SEQ ID NO: 1570183 - RNA, 19 nt, Homo sapiens
  misc_RNA (1)...(19): siRNA sense strand
ccaaagaaaugucaauguu

SEQ ID NO: 1570184 - RNA, 19 nt, Homo sapiens
  misc_RNA (1)...(19): siRNA sense strand
gaacuuguguacugaaaga

SEQ ID NO: 1570185 - RNA, 19 nt, Homo sapiens
  misc_RNA (1)...(19): siRNA sense strand
gaauccaccuguauaauga

SEQ ID NO: 1570186 - RNA, 19 nt, Homo sapiens
  misc_RNA (1)...(19): siRNA sense strand
gcagaugaauuauugcaaa

SEQ ID NO: 1570187 - RNA, 19 nt, Homo sapiens
  misc_RNA (1)...(19): siRNA sense strand
caaauugccucgaacaguu

SEQ ID NO: 1570188 - RNA, 19 nt, Homo sapiens
  misc_RNA (1)...(19): siRNA sense strand
ccaaauacguuccaaagga

SEQ ID NO: 1570189 - RNA, 19 nt, Homo sapiens
  misc_RNA (1)...(19): siRNA sense strand
gaucguaauuccagagaaa

SEQ ID NO: 1570190 - RNA, 19 nt, Homo sapiens
  misc_RNA (1)...(19): siRNA sense strand
gaggaauacugcaauuuga

SEQ ID NO: 1570191 - RNA, 19 nt, Homo sapiens
  misc_RNA (1)...(19): siRNA sense strand
gaagauauggguucaauca

SEQ ID NO: 1570192 - RNA, 19 nt, Homo sapiens
  misc_RNA (1)...(19): siRNA sense strand
ggagggaaaugaaaucugu

SEQ ID NO: 1570193 - RNA, 19 nt, Homo sapiens
  misc_RNA (1)...(19): siRNA sense strand
caauguguauuacucguua

SEQ ID NO: 1570194 - RNA, 19 nt, Homo sapiens
  misc_RNA (1)...(19): siRNA sense strand
ccaauggugugaagacuuu

SEQ ID NO: 1570195 - RNA, 19 nt, Homo sapiens
  misc_RNA (1)...(19): siRNA sense strand
ugaggcagaugaauuauug

SEQ ID NO: 1570196 - RNA, 19 nt, Homo sapiens
  misc_RNA (1)...(19): siRNA sense strand
ugcaaagacugucaaauuu

SEQ ID NO: 1570197 - RNA, 19 nt, Homo sapiens
  misc_RNA (1)...(19): siRNA sense strand
ggacauggagugugugauu

SEQ ID NO: 1570198 - RNA, 19 nt, Homo sapiens
  misc_RNA (1)...(19): siRNA sense strand
ggaaucugcaguugaauuu

SEQ ID NO: 1570199 - RNA, 19 nt, Homo sapiens
  misc_RNA (1)...(19): siRNA sense strand
gaaagagcaucugggaaga

SEQ ID NO: 1570200 - RNA, 19 nt, Homo sapiens
  misc_RNA (1)...(19): siRNA sense strand
gaagauuaguuuguaccua

SEQ ID NO: 1570201 - RNA, 19 nt, Homo sapiens
  misc_RNA (1)...(19): siRNA sense strand
ccagauuuauuuccucuuu

SEQ ID NO: 1570202 - RNA, 19 nt, Homo sapiens
  misc_RNA (1)...(19): siRNA sense strand
gaauugagccucuggaauc

SEQ ID NO: 1570203 - RNA, 19 nt, Homo sapiens
  misc_RNA (1)...(19): siRNA sense strand
gaaaacaccuggcuucuag

SEQ ID NO: 1570204 - RNA, 19 nt, Homo sapiens
  misc_RNA (1)...(19): siRNA sense strand
ccuaaggccucaugauauu

SEQ ID NO: 1570205 - RNA, 19 nt, Homo sapiens
  misc_RNA (1)...(19): siRNA sense strand
gaaauacaaucucaaucag

SEQ ID NO: 1570206 - RNA, 19 nt, Homo sapiens
  misc_RNA (1)...(19): siRNA sense strand
gaaucuaaaucggaaggua

SEQ ID NO: 1570207 - RNA, 19 nt, Homo sapiens
  misc_RNA (1)...(19): siRNA sense strand
ggaacaauguguauuacuc

SEQ ID NO: 1570208 - RNA, 19 nt, Homo sapiens
  misc_RNA (1)...(19): siRNA sense strand
guaacaaccgcaauaguuu

SEQ ID NO: 1570209 - RNA, 19 nt, Homo sapiens
  misc_RNA (1)...(19): siRNA sense strand
uaagaggaauacugcaauu

SEQ ID NO: 1570210 - RNA, 19 nt, Homo sapiens
  misc_RNA (1)...(19): siRNA sense strand
ggaggcauuugcaguuauu

SEQ ID NO: 1570211 - RNA, 19 nt, Homo sapiens
  misc_RNA (1)...(19): siRNA sense strand
ggaaaagguucaagaaaug

SEQ ID NO: 1570212 - RNA, 19 nt, Homo sapiens
  misc_RNA (1)...(19): siRNA sense strand
ucaauggacuuucaugcaa

SEQ ID NO: 1570213 - RNA, 19 nt, Homo sapiens
  misc_RNA (1)...(19): siRNA sense strand
caaauacguuccaaaggau

SEQ ID NO: 1570214 - RNA, 19 nt, Homo sapiens
  misc_RNA (1)...(19): siRNA sense strand
ggaauacugcaauuugaaa

SEQ ID NO: 1570215 - RNA, 19 nt, Homo sapiens
  misc_RNA (1)...(19): siRNA sense strand
gaaagaacaaccaauggau

SEQ ID NO: 1570216 - RNA, 19 nt, Homo sapiens
  misc_RNA (1)...(19): siRNA sense strand
ccaaguagcgaaucuaaau

SEQ ID NO: 1570217 - RNA, 19 nt, Homo sapiens
  misc_RNA (1)...(19): siRNA sense strand
gcuauaagccuccaaacug

SEQ ID NO: 1570218 - RNA, 19 nt, Homo sapiens
  misc_RNA (1)...(19): siRNA sense strand
ggacugugcugcaaagacu

SEQ ID NO: 1570219 - RNA, 19 nt, Homo sapiens
  misc_RNA (1)...(19): siRNA sense strand
ucugauagcaugauaguaa

SEQ ID NO: 1570220 - RNA, 19 nt, Homo sapiens
  misc_RNA (1)...(19): siRNA sense strand
gaagguagcacacagacau

SEQ ID NO: 1570221 - RNA, 19 nt, Homo sapiens
  misc_RNA (1)...(19): siRNA sense strand
ccucauugcucuuccuauu

SEQ ID NO: 1570222 - RNA, 19 nt, Homo sapiens
  misc_RNA (1)...(19): siRNA sense strand
ccugcaagcuguugugauu

SEQ ID NO: 1570223 - RNA, 19 nt, Homo sapiens
  misc_RNA (1)...(19): siRNA sense strand
gugaugugauuuaugcuuu

SEQ ID NO: 1570224 - RNA, 19 nt, Homo sapiens
  misc_RNA (1)...(19): siRNA sense strand
ugucaaaugucuucagaau

SEQ ID NO: 1570225 - RNA, 19 nt, Homo sapiens
  misc_RNA (1)...(19): siRNA sense strand
caauggacuuucaugcaaa

SEQ ID NO: 1570226 - RNA, 19 nt, Homo sapiens
  misc_RNA (1)...(19): siRNA sense strand
aauggaagcucaccagaau

SEQ ID NO: 1570227 - RNA, 19 nt, Homo sapiens
  misc_RNA (1)...(19): siRNA sense strand
cugcaaagacugucaaauu

SEQ ID NO: 1570228 - RNA, 19 nt, Homo sapiens
  misc_RNA (1)...(19): siRNA sense strand
gacaguacccaaacacaaa

SEQ ID NO: 1570229 - RNA, 19 nt, Homo sapiens
  misc_RNA (1)...(19): siRNA sense strand
ggacaguacccaaacacaa

SEQ ID NO: 1570230 - RNA, 19 nt, Homo sapiens
  misc_RNA (1)...(19): siRNA sense strand
gcuucuagguuuccucauu

SEQ ID NO: 1570231 - RNA, 19 nt, Homo sapiens
  misc_RNA (1)...(19): siRNA sense strand
guaccuacccuacucgaaa

SEQ ID NO: 1570232 - RNA, 19 nt, Homo sapiens
  misc_RNA (1)...(19): siRNA sense strand
ucaauguucacccaauuua

SEQ ID NO: 1570233 - RNA, 19 nt, Homo sapiens
  misc_RNA (1)...(19): siRNA sense strand
caaaugacaguucagaaau

SEQ ID NO: 1570234 - RNA, 19 nt, Homo sapiens
  misc_RNA (1)...(19): siRNA sense strand
gaacugugguagggauaga

SEQ ID NO: 1570235 - RNA, 19 nt, Homo sapiens
  misc_RNA (1)...(19): siRNA sense strand
gaauaagccacaaaugcaa

SEQ ID NO: 1570236 - RNA, 19 nt, Homo sapiens
  misc_RNA (1)...(19): siRNA sense strand
gcaauccaauggugugaag

SEQ ID NO: 1570237 - RNA, 19 nt, Homo sapiens
  misc_RNA (1)...(19): siRNA sense strand
gauuuaugcuuucguacga

SEQ ID NO: 1570238 - RNA, 19 nt, Homo sapiens
  misc_RNA (1)...(19): siRNA sense strand
aaaugugggugucaaaugu

SEQ ID NO: 1570239 - RNA, 19 nt, Homo sapiens
  misc_RNA (1)...(19): siRNA sense strand
cuucagauauucagacuca

SEQ ID NO: 1570240 - RNA, 19 nt, Homo sapiens
  misc_RNA (1)...(19): siRNA sense strand
ugccugcuaugaagaaaua

SEQ ID NO: 1570241 - RNA, 19 nt, Homo sapiens
  misc_RNA (1)...(19): siRNA sense strand
acaaaugacaguucagaaa

SEQ ID NO: 1570242 - RNA, 19 nt, Homo sapiens
  misc_RNA (1)...(19): siRNA sense strand
acagaagccugaaagaaca

SEQ ID NO: 1570243 - RNA, 19 nt, Homo sapiens
  misc_RNA (1)...(19): siRNA sense strand
caaacacaaagcaguagua

SEQ ID NO: 1570244 - RNA, 19 nt, Homo sapiens
  misc_RNA (1)...(19): siRNA sense strand
caauagaugagaaacugua

SEQ ID NO: 1570245 - RNA, 19 nt, Homo sapiens
  misc_RNA (1)...(19): siRNA sense strand
uagcaaauccaaaucagaa

SEQ ID NO: 1570246 - RNA, 19 nt, Homo sapiens
  misc_RNA (1)...(19): siRNA sense strand
ggauggaggaaucuuauau

SEQ ID NO: 1570247 - RNA, 19 nt, Homo sapiens
  misc_RNA (1)...(19): siRNA sense strand
ugacaucgcugaaaauugu

SEQ ID NO: 1570248 - RNA, 19 nt, Homo sapiens
  misc_RNA (1)...(19): siRNA sense strand
ggugucaaaugucuucaga

SEQ ID NO: 1570249 - RNA, 19 nt, Homo sapiens
  misc_RNA (1)...(19): siRNA sense strand
gaaaugucaauguucagaa

SEQ ID NO: 1570250 - RNA, 19 nt, Homo sapiens
  misc_RNA (1)...(19): siRNA sense strand
ggaguuauggucagaugaa

SEQ ID NO: 1570251 - RNA, 19 nt, Homo sapiens
  misc_RNA (1)...(19): siRNA sense strand
ccuggaacaauguguauua

SEQ ID NO: 1570252 - RNA, 19 nt, Homo sapiens
  misc_RNA (1)...(19): siRNA sense strand
gcaaauccaaaucagaaga

SEQ ID NO: 1570253 - RNA, 19 nt, Homo sapiens
  misc_RNA (1)...(19): siRNA sense strand
gauacuagcaaauccaaau

SEQ ID NO: 1570254 - RNA, 19 nt, Homo sapiens
  misc_RNA (1)...(19): siRNA sense strand
agauauggguucaaucaug

SEQ ID NO: 1570255 - RNA, 19 nt, Homo sapiens
  misc_RNA (1)...(19): siRNA sense strand
ucuggaaucugcaguugaa

SEQ ID NO: 1570256 - RNA, 19 nt, Homo sapiens
  misc_RNA (1)...(19): siRNA sense strand
gagcaucugggaagacuga

SEQ ID NO: 1570257 - RNA, 19 nt, Homo sapiens
  misc_RNA (1)...(19): siRNA sense strand
uguggaagauuaguuugua

SEQ ID NO: 1570258 - RNA, 19 nt, Homo sapiens
  misc_RNA (1)...(19): siRNA sense strand
cgaaagcacauccugaaug

SEQ ID NO: 1570259 - RNA, 19 nt, Homo sapiens
  misc_RNA (1)...(19): siRNA sense strand
caaagaaaugucaauguuc

SEQ ID NO: 1570260 - RNA, 19 nt, Homo sapiens
  misc_RNA (1)...(19): siRNA sense strand
gcacucagucugggaauau

SEQ ID NO: 1570261 - RNA, 19 nt, Homo sapiens
  misc_RNA (1)...(19): siRNA sense strand
agauaacucuggaggcauu

SEQ ID NO: 1570262 - RNA, 19 nt, Homo sapiens
  misc_RNA (1)...(19): siRNA sense strand
cuauugugcugucaucauu

SEQ ID NO: 1570263 - RNA, 19 nt, Homo sapiens
  misc_RNA (1)...(19): siRNA sense strand
gggcucugauagcaugaua

SEQ ID NO: 1570264 - RNA, 19 nt, Homo sapiens
  misc_RNA (1)...(19): siRNA sense strand
aaccagcuguuccagauuu

SEQ ID NO: 1570265 - RNA, 19 nt, Homo sapiens
  misc_RNA (1)...(19): siRNA sense strand
ucagaauccaccuguauaa

SEQ ID NO: 1570266 - RNA, 19 nt, Homo sapiens
  misc_RNA (1)...(19): siRNA sense strand
acacaaagcaguaguaacu

SEQ ID NO: 1570267 - RNA, 19 nt, Homo sapiens
  misc_RNA (1)...(19): siRNA sense strand
uguguagaaucaaggauaa

SEQ ID NO: 1570268 - RNA, 19 nt, Homo sapiens
  misc_RNA (1)...(19): siRNA sense strand
caaauacaaaugacaguuc

SEQ ID NO: 1570269 - RNA, 19 nt, Homo sapiens
  misc_RNA (1)...(19): siRNA sense strand
ccuccaaacugccaaauac

SEQ ID NO: 1570270 - RNA, 19 nt, Homo sapiens
  misc_RNA (1)...(19): siRNA sense strand
gacuacaaauugccucgaa

SEQ ID NO: 1570271 - RNA, 19 nt, Homo sapiens
  misc_RNA (1)...(19): siRNA sense strand
gguccugacauaacuuuaa

SEQ ID NO: 1570272 - RNA, 19 nt, Homo sapiens
  misc_RNA (1)...(19): siRNA sense strand
gaaguugugcaauccaaug

SEQ ID NO: 1570273 - RNA, 19 nt, Homo sapiens
  misc_RNA (1)...(19): siRNA sense strand
gacagaagccugaaagaac

SEQ ID NO: 1570274 - RNA, 19 nt, Homo sapiens
  misc_RNA (1)...(19): siRNA sense strand
ugacagaagccugaaagaa

SEQ ID NO: 1570275 - RNA, 19 nt, Homo sapiens
  misc_RNA (1)...(19): siRNA sense strand
caaaccagaucagaaagca

SEQ ID NO: 1570276 - RNA, 19 nt, Homo sapiens
  misc_RNA (1)...(19): siRNA sense strand
gcaaagacugucaaauuuu

SEQ ID NO: 1570277 - RNA, 19 nt, Homo sapiens
  misc_RNA (1)...(19): siRNA sense strand
ugacaguucagaaauagaa

SEQ ID NO: 1570278 - RNA, 19 nt, Homo sapiens
  misc_RNA (1)...(19): siRNA sense strand
aaccuaaggccucaugaua

SEQ ID NO: 1570279 - RNA, 19 nt, Homo sapiens
  misc_RNA (1)...(19): siRNA sense strand
gaaggcagcacucagacau

SEQ ID NO: 1570280 - RNA, 19 nt, Homo sapiens
  misc_RNA (1)...(19): siRNA sense strand
uguaacaaccgcaauaguu

SEQ ID NO: 1570281 - RNA, 19 nt, Homo sapiens
  misc_RNA (1)...(19): siRNA sense strand
caaaugugggugucaaaug

SEQ ID NO: 1570282 - RNA, 19 nt, Homo sapiens
  misc_RNA (1)...(19): siRNA sense strand
gcaaggcgguguucuccau

SEQ ID NO: 1570283 - RNA, 19 nt, Homo sapiens
  misc_RNA (1)...(19): siRNA sense strand
ucaccugccugcacaacua

SEQ ID NO: 1570284 - RNA, 19 nt, Homo sapiens
  misc_RNA (1)...(19): siRNA sense strand
gaugugggcuaccucuuca

SEQ ID NO: 1570285 - RNA, 19 nt, Homo sapiens
  misc_RNA (1)...(19): siRNA sense strand
gcaggcacauggacaucuu

SEQ ID NO: 1570286 - RNA, 19 nt, Homo sapiens
  misc_RNA (1)...(19): siRNA sense strand
gcgccaagcccaucgucua

SEQ ID NO: 1570287 - RNA, 19 nt, Homo sapiens
  misc_RNA (1)...(19): siRNA sense strand
ccaagcccaucgucuacuu

SEQ ID NO: 1570288 - RNA, 19 nt, Homo sapiens
  misc_RNA (1)...(19): siRNA sense strand
gguguccuccaucuacuua

SEQ ID NO: 1570289 - RNA, 19 nt, Homo sapiens
  misc_RNA (1)...(19): siRNA sense strand
ucacugaccugugcaucug

SEQ ID NO: 1570290 - RNA, 19 nt, Homo sapiens
  misc_RNA (1)...(19): siRNA sense strand
gggcucugcauguuccuua

SEQ ID NO: 1570291 - RNA, 19 nt, Homo sapiens
  misc_RNA (1)...(19): siRNA sense strand
ccaacacagucaccaugga

SEQ ID NO: 1570292 - RNA, 19 nt, Homo sapiens
  misc_RNA (1)...(19): siRNA sense strand
caacuacuucugcguguuc

SEQ ID NO: 1570293 - RNA, 19 nt, Homo sapiens
  misc_RNA (1)...(19): siRNA sense strand
gcagcacgcccaacacagu

SEQ ID NO: 1570294 - RNA, 19 nt, Homo sapiens
  misc_RNA (1)...(19): siRNA sense strand
gaucgacugguuccucuuc

SEQ ID NO: 1570295 - RNA, 19 nt, Homo sapiens
  misc_RNA (1)...(19): siRNA sense strand
cgucaugaacuacaucuuc

SEQ ID NO: 1570296 - RNA, 19 nt, Homo sapiens
  misc_RNA (1)...(19): siRNA sense strand
gcuucuccaucaagaggaa

SEQ ID NO: 1570297 - RNA, 19 nt, Homo sapiens
  misc_RNA (1)...(19): siRNA sense strand
gcacguuugccgacuacau

SEQ ID NO: 1570298 - RNA, 19 nt, Homo sapiens
  misc_RNA (1)...(19): siRNA sense strand
ugggcuaccucuucagcaa

SEQ ID NO: 1570299 - RNA, 19 nt, Homo sapiens
  misc_RNA (1)...(19): siRNA sense strand
acuuagggaucgacugguu

SEQ ID NO: 1570300 - RNA, 19 nt, Homo sapiens
  misc_RNA (1)...(19): siRNA sense strand
ggccauggucuccgucuuc

SEQ ID NO: 1570301 - RNA, 19 nt, Homo sapiens
  misc_RNA (1)...(19): siRNA sense strand
cgaugugggcuaccucuuc

SEQ ID NO: 1570302 - RNA, 19 nt, Homo sapiens
  misc_RNA (1)...(19): siRNA sense strand
gagaggagcuugaaauaua

SEQ ID NO: 1570303 - RNA, 19 nt, Homo sapiens
  misc_RNA (1)...(19): siRNA sense strand
gcagguagauuacaugaaa

SEQ ID NO: 1570304 - RNA, 19 nt, Homo sapiens
  misc_RNA (1)...(19): siRNA sense strand
gagcaucccugaauccaua

SEQ ID NO: 1570305 - RNA, 19 nt, Homo sapiens
  misc_RNA (1)...(19): siRNA sense strand
caaagcuccugacaaauua

SEQ ID NO: 1570306 - RNA, 19 nt, Homo sapiens
  misc_RNA (1)...(19): siRNA sense strand
uaagaaagguugcaacuuc

SEQ ID NO: 1570307 - RNA, 19 nt, Homo sapiens
  misc_RNA (1)...(19): siRNA sense strand
caccaaagcuccugacaaa

SEQ ID NO: 1570308 - RNA, 19 nt, Homo sapiens
  misc_RNA (1)...(19): siRNA sense strand
guagaugccuggccagauu

SEQ ID NO: 1570309 - RNA, 19 nt, Homo sapiens
  misc_RNA (1)...(19): siRNA sense strand
cacaagaccucaaguaaug

SEQ ID NO: 1570310 - RNA, 19 nt, Homo sapiens
  misc_RNA (1)...(19): siRNA sense strand
gaugaaagaugaccaggau

SEQ ID NO: 1570311 - RNA, 19 nt, Homo sapiens
  misc_RNA (1)...(19): siRNA sense strand
ccaaagcuccugacaaauu

SEQ ID NO: 1570312 - RNA, 19 nt, Homo sapiens
  misc_RNA (1)...(19): siRNA sense strand
guaaucagcugggagcaaa

SEQ ID NO: 1570313 - RNA, 19 nt, Homo sapiens
  misc_RNA (1)...(19): siRNA sense strand
ucaaacauguucuuagaug

SEQ ID NO: 1570314 - RNA, 19 nt, Homo sapiens
  misc_RNA (1)...(19): siRNA sense strand
uacaggcacugaacaauuu

SEQ ID NO: 1570315 - RNA, 19 nt, Homo sapiens
  misc_RNA (1)...(19): siRNA sense strand
cagcuugucucuuggauug

SEQ ID NO: 1570316 - RNA, 19 nt, Homo sapiens
  misc_RNA (1)...(19): siRNA sense strand
gaacgguccugugaguuga

SEQ ID NO: 1570317 - RNA, 19 nt, Homo sapiens
  misc_RNA (1)...(19): siRNA sense strand
ggaguuauuugaaguggau

SEQ ID NO: 1570318 - RNA, 19 nt, Homo sapiens
  misc_RNA (1)...(19): siRNA sense strand
gaaaagagcaucccugaau

SEQ ID NO: 1570319 - RNA, 19 nt, Homo sapiens
  misc_RNA (1)...(19): siRNA sense strand
gauccaagguugccaagag

SEQ ID NO: 1570320 - RNA, 19 nt, Homo sapiens
  misc_RNA (1)...(19): siRNA sense strand
aacaggagaugaaagauga

SEQ ID NO: 1570321 - RNA, 19 nt, Homo sapiens
  misc_RNA (1)...(19): siRNA sense strand
ggaugaugauaacaagaaa

SEQ ID NO: 1570322 - RNA, 19 nt, Homo sapiens
  misc_RNA (1)...(19): siRNA sense strand
caagauggaguuauuugaa

SEQ ID NO: 1570323 - RNA, 19 nt, Homo sapiens
  misc_RNA (1)...(19): siRNA sense strand
aaacacaagaccucaagua

SEQ ID NO: 1570324 - RNA, 19 nt, Homo sapiens
  misc_RNA (1)...(19): siRNA sense strand
ggaacgguccugugaguug

SEQ ID NO: 1570325 - RNA, 19 nt, Homo sapiens
  misc_RNA (1)...(19): siRNA sense strand
gaugauaacaagaaaggaa

SEQ ID NO: 1570326 - RNA, 19 nt, Homo sapiens
  misc_RNA (1)...(19): siRNA sense strand
gaacgcugccuccaggauu

SEQ ID NO: 1570327 - RNA, 19 nt, Homo sapiens
  misc_RNA (1)...(19): siRNA sense strand
gaaagguugcaacuucaaa

SEQ ID NO: 1570328 - RNA, 19 nt, Homo sapiens
  misc_RNA (1)...(19): siRNA sense strand
guucuuagaugcuucacau

SEQ ID NO: 1570329 - RNA, 19 nt, Homo sapiens
  misc_RNA (1)...(19): siRNA sense strand
augcaggucuugugaauga

SEQ ID NO: 1570330 - RNA, 19 nt, Homo sapiens
  misc_RNA (1)...(19): siRNA sense strand
guaaugacaagauggaguu

SEQ ID NO: 1570331 - RNA, 19 nt, Homo sapiens
  misc_RNA (1)...(19): siRNA sense strand
uauuugaaguggaugauga

SEQ ID NO: 1570332 - RNA, 19 nt, Homo sapiens
  misc_RNA (1)...(19): siRNA sense strand
caacauggaggugcuggua

SEQ ID NO: 1570333 - RNA, 19 nt, Homo sapiens
  misc_RNA (1)...(19): siRNA sense strand
ugaaguggaugaugauaac

SEQ ID NO: 1570334 - RNA, 19 nt, Homo sapiens
  misc_RNA (1)...(19): siRNA sense strand
agaaacaggagaugaaaga

SEQ ID NO: 1570335 - RNA, 19 nt, Homo sapiens
  misc_RNA (1)...(19): siRNA sense strand
gaaugaacacugggccuuu

SEQ ID NO: 1570336 - RNA, 19 nt, Homo sapiens
  misc_RNA (1)...(19): siRNA sense strand
uaccaacacuuaccacauc

SEQ ID NO: 1570337 - RNA, 19 nt, Homo sapiens
  misc_RNA (1)...(19): siRNA sense strand
agaggagcuugaaauauau

SEQ ID NO: 1570338 - RNA, 19 nt, Homo sapiens
  misc_RNA (1)...(19): siRNA sense strand
gacaagauggaguuauuug

SEQ ID NO: 1570339 - RNA, 19 nt, Homo sapiens
  misc_RNA (1)...(19): siRNA sense strand
cugaauccauaaagguaua

SEQ ID NO: 1570340 - RNA, 19 nt, Homo sapiens
  misc_RNA (1)...(19): siRNA sense strand
gaaaaccauccucuuuaua

SEQ ID NO: 1570341 - RNA, 19 nt, Homo sapiens
  misc_RNA (1)...(19): siRNA sense strand
cuacaggcacugaacaauu

SEQ ID NO: 1570342 - RNA, 19 nt, Homo sapiens
  misc_RNA (1)...(19): siRNA sense strand
acacugggccuuugggaaa

SEQ ID NO: 1570343 - RNA, 19 nt, Homo sapiens
  misc_RNA (1)...(19): siRNA sense strand
gaguugagaauggguuaua

SEQ ID NO: 1570344 - RNA, 19 nt, Homo sapiens
  misc_RNA (1)...(19): siRNA sense strand
ugaaagaugaccaggauca

SEQ ID NO: 1570345 - RNA, 19 nt, Homo sapiens
  misc_RNA (1)...(19): siRNA sense strand
guuauacuguccccaaaua

SEQ ID NO: 1570346 - RNA, 19 nt, Homo sapiens
  misc_RNA (1)...(19): siRNA sense strand
ggaugaagcaauaagaaag

SEQ ID NO: 1570347 - RNA, 19 nt, Homo sapiens
  misc_RNA (1)...(19): siRNA sense strand
uaccacaucuucaccaaag

SEQ ID NO: 1570348 - RNA, 19 nt, Homo sapiens
  misc_RNA (1)...(19): siRNA sense strand
aagaaagguugcaacuuca

SEQ ID NO: 1570349 - RNA, 19 nt, Homo sapiens
  misc_RNA (1)...(19): siRNA sense strand
guuaccaucuugaaaagua

SEQ ID NO: 1570350 - RNA, 19 nt, Homo sapiens
  misc_RNA (1)...(19): siRNA sense strand
caaaaucagugcagguaga

SEQ ID NO: 1570351 - RNA, 19 nt, Homo sapiens
  misc_RNA (1)...(19): siRNA sense strand
ugaaaaccauccucuuuau

SEQ ID NO: 1570352 - RNA, 19 nt, Homo sapiens
  misc_RNA (1)...(19): siRNA sense strand
caaguaaugacaagaugga

SEQ ID NO: 1570353 - RNA, 19 nt, Homo sapiens
  misc_RNA (1)...(19): siRNA sense strand
acacaagaccucaaguaau

SEQ ID NO: 1570354 - RNA, 19 nt, Homo sapiens
  misc_RNA (1)...(19): siRNA sense strand
augacaagauggaguuauu

SEQ ID NO: 1570355 - RNA, 19 nt, Homo sapiens
  misc_RNA (1)...(19): siRNA sense strand
ggcagauaauaaugagaaa

SEQ ID NO: 1570356 - RNA, 19 nt, Homo sapiens
  misc_RNA (1)...(19): siRNA sense strand
aaacaggagaugaaagaug

SEQ ID NO: 1570357 - RNA, 19 nt, Homo sapiens
  misc_RNA (1)...(19): siRNA sense strand
ucucuuggauugugaugga

SEQ ID NO: 1570358 - RNA, 19 nt, Homo sapiens
  misc_RNA (1)...(19): siRNA sense strand
auaccggaauuaccaaaga

SEQ ID NO: 1570359 - RNA, 19 nt, Homo sapiens
  misc_RNA (1)...(19): siRNA sense strand
acauggaggugcugguaga

SEQ ID NO: 1570360 - RNA, 19 nt, Homo sapiens
  misc_RNA (1)...(19): siRNA sense strand
ugacaagauggaguuauuu

SEQ ID NO: 1570361 - RNA, 19 nt, Homo sapiens
  misc_RNA (1)...(19): siRNA sense strand
caacacuuaccacaucuuc

SEQ ID NO: 1570362 - RNA, 19 nt, Homo sapiens
  misc_RNA (1)...(19): siRNA sense strand
gaccucaaguaaugacaag

SEQ ID NO: 1570363 - RNA, 19 nt, Homo sapiens
  misc_RNA (1)...(19): siRNA sense strand
uaccggaauuaccaaagaa

SEQ ID NO: 1570364 - RNA, 19 nt, Homo sapiens
  misc_RNA (1)...(19): siRNA sense strand
acaugcaggucuugugaau

SEQ ID NO: 1570365 - RNA, 19 nt, Homo sapiens
  misc_RNA (1)...(19): siRNA sense strand
aacacaagaccucaaguaa

SEQ ID NO: 1570366 - RNA, 19 nt, Homo sapiens
  misc_RNA (1)...(19): siRNA sense strand
aagauggaguuauuugaag

SEQ ID NO: 1570367 - RNA, 19 nt, Homo sapiens
  misc_RNA (1)...(19): siRNA sense strand
ucagaaacaggagaugaaa

SEQ ID NO: 1570368 - RNA, 19 nt, Homo sapiens
  misc_RNA (1)...(19): siRNA sense strand
uggcagauaauaaugagaa

SEQ ID NO: 1570369 - RNA, 19 nt, Homo sapiens
  misc_RNA (1)...(19): siRNA sense strand
ccauguggcagauaauaau

SEQ ID NO: 1570370 - RNA, 19 nt, Homo sapiens
  misc_RNA (1)...(19): siRNA sense strand
ugagaggagcuugaaauau

SEQ ID NO: 1570371 - RNA, 19 nt, Homo sapiens
  misc_RNA (1)...(19): siRNA sense strand
ucucagaagcugcagauuc

SEQ ID NO: 1570372 - RNA, 19 nt, Homo sapiens
  misc_RNA (1)...(19): siRNA sense strand
ugauggaacgguccuguga

SEQ ID NO: 1570373 - RNA, 19 nt, Homo sapiens
  misc_RNA (1)...(19): siRNA sense strand
aaugaacacugggccuuug

SEQ ID NO: 1570374 - RNA, 19 nt, Homo sapiens
  misc_RNA (1)...(19): siRNA sense strand
gaugaagcaauaagaaagg

SEQ ID NO: 1570375 - RNA, 19 nt, Homo sapiens
  misc_RNA (1)...(19): siRNA sense strand
gaggagcuugaaauauauu

SEQ ID NO: 1570376 - RNA, 19 nt, Homo sapiens
  misc_RNA (1)...(19): siRNA sense strand
gauuaccagaucgucauua

SEQ ID NO: 1570377 - RNA, 19 nt, Homo sapiens
  misc_RNA (1)...(19): siRNA sense strand
uggaugaugauaacaagaa

SEQ ID NO: 1570378 - RNA, 19 nt, Homo sapiens
  misc_RNA (1)...(19): siRNA sense strand
gaaacaggagaugaaagau

SEQ ID NO: 1570379 - RNA, 19 nt, Homo sapiens
  misc_RNA (1)...(19): siRNA sense strand
uggaugaagcaauaagaaa

SEQ ID NO: 1570380 - RNA, 19 nt, Homo sapiens
  misc_RNA (1)...(19): siRNA sense strand
agggccagcuugucucuug

SEQ ID NO: 1570381 - RNA, 19 nt, Homo sapiens
  misc_RNA (1)...(19): siRNA sense strand
ggagcuugaaauauauuga

SEQ ID NO: 1570382 - RNA, 19 nt, Homo sapiens
  misc_RNA (1)...(19): siRNA sense strand
acaagauggaguuauuuga

SEQ ID NO: 1570383 - RNA, 19 nt, Homo sapiens
  misc_RNA (1)...(19): siRNA sense strand
gguugcaacuucaaaauca

SEQ ID NO: 1570384 - RNA, 19 nt, Homo sapiens
  misc_RNA (1)...(19): siRNA sense strand
uagaugccuggccagauua

SEQ ID NO: 1570385 - RNA, 19 nt, Homo sapiens
  misc_RNA (1)...(19): siRNA sense strand
caugaaaaccauccucuuu

SEQ ID NO: 1570386 - RNA, 19 nt, Homo sapiens
  misc_RNA (1)...(19): siRNA sense strand
aaugagaggagcuugaaau

SEQ ID NO: 1570387 - RNA, 19 nt, Homo sapiens
  misc_RNA (1)...(19): siRNA sense strand
ccagagggccagcuugucu

SEQ ID NO: 1570388 - RNA, 19 nt, Homo sapiens
  misc_RNA (1)...(19): siRNA sense strand
aacgcugccuccaggauuu

SEQ ID NO: 1570389 - RNA, 19 nt, Homo sapiens
  misc_RNA (1)...(19): siRNA sense strand
ucagcugggagcaaacuuu

SEQ ID NO: 1570390 - RNA, 19 nt, Homo sapiens
  misc_RNA (1)...(19): siRNA sense strand
gcuugucucuuggauugug

SEQ ID NO: 1570391 - RNA, 19 nt, Homo sapiens
  misc_RNA (1)...(19): siRNA sense strand
augagaggagcuugaaaua

SEQ ID NO: 1570392 - RNA, 19 nt, Homo sapiens
  misc_RNA (1)...(19): siRNA sense strand
caggaucauuauaccaaca

SEQ ID NO: 1570393 - RNA, 19 nt, Homo sapiens
  misc_RNA (1)...(19): siRNA sense strand
gaaacacaagaccucaagu

SEQ ID NO: 1570394 - RNA, 19 nt, Homo sapiens
  misc_RNA (1)...(19): siRNA sense strand
ucaccaaagcuccugacaa

SEQ ID NO: 1570395 - RNA, 19 nt, Homo sapiens
  misc_RNA (1)...(19): siRNA sense strand
agauggaguuauuugaagu

SEQ ID NO: 1570396 - RNA, 19 nt, Homo sapiens
  misc_RNA (1)...(19): siRNA sense strand
gaauuaccaaagaaacaca

SEQ ID NO: 1570397 - RNA, 19 nt, Homo sapiens
  misc_RNA (1)...(19): siRNA sense strand
gugcagguagauuacauga

SEQ ID NO: 1570398 - RNA, 19 nt, Homo sapiens
  misc_RNA (1)...(19): siRNA sense strand
ccugucauacuccaaugua

SEQ ID NO: 1570399 - RNA, 19 nt, Homo sapiens
  misc_RNA (1)...(19): siRNA sense strand
cuuagaugcuucacaugca

SEQ ID NO: 1570400 - RNA, 19 nt, Homo sapiens
  misc_RNA (1)...(19): siRNA sense strand
gugaguugagaauggguua

SEQ ID NO: 1570401 - RNA, 19 nt, Homo sapiens
  misc_RNA (1)...(19): siRNA sense strand
acauguugcaaauugguua

SEQ ID NO: 1570402 - RNA, 19 nt, Homo sapiens
  misc_RNA (1)...(19): siRNA sense strand
cauguugccuguuccuuua

SEQ ID NO: 1570403 - RNA, 19 nt, Homo sapiens
  misc_RNA (1)...(19): siRNA sense strand
caggugagcuuuccguuga

SEQ ID NO: 1570404 - RNA, 19 nt, Homo sapiens
  misc_RNA (1)...(19): siRNA sense strand
ggaacaagauccuccuaca

SEQ ID NO: 1570405 - RNA, 19 nt, Homo sapiens
  misc_RNA (1)...(19): siRNA sense strand
cacaaagggugcauaagaa

SEQ ID NO: 1570406 - RNA, 19 nt, Homo sapiens
  misc_RNA (1)...(19): siRNA sense strand
ccacagcucccaugcgaua

SEQ ID NO: 1570407 - RNA, 19 nt, Homo sapiens
  misc_RNA (1)...(19): siRNA sense strand
ggaggaauucuacaucuga

SEQ ID NO: 1570408 - RNA, 19 nt, Homo sapiens
  misc_RNA (1)...(19): siRNA sense strand
gcagacugauggagacaug

SEQ ID NO: 1570409 - RNA, 19 nt, Homo sapiens
  misc_RNA (1)...(19): siRNA sense strand
gggcuucccucccuuucuu

SEQ ID NO: 1570410 - RNA, 19 nt, Homo sapiens
  misc_RNA (1)...(19): siRNA sense strand
caucaugccuccgagaaga

SEQ ID NO: 1570411 - RNA, 19 nt, Homo sapiens
  misc_RNA (1)...(19): siRNA sense strand
guacacacggugacaaaga

SEQ ID NO: 1570412 - RNA, 19 nt, Homo sapiens
  misc_RNA (1)...(19): siRNA sense strand
ugaaaagacugcccuguga

SEQ ID NO: 1570413 - RNA, 19 nt, Homo sapiens
  misc_RNA (1)...(19): siRNA sense strand
gugcuggaguuccgaguga

SEQ ID NO: 1570414 - RNA, 19 nt, Homo sapiens
  misc_RNA (1)...(19): siRNA sense strand
auaacgacauggaggaauu

SEQ ID NO: 1570415 - RNA, 19 nt, Homo sapiens
  misc_RNA (1)...(19): siRNA sense strand
gcauaagaaguuuccuaaa

SEQ ID NO: 1570416 - RNA, 19 nt, Homo sapiens
  misc_RNA (1)...(19): siRNA sense strand
uccuaaaccuggcagagua

SEQ ID NO: 1570417 - RNA, 19 nt, Homo sapiens
  misc_RNA (1)...(19): siRNA sense strand
gaacaagauccuccuacag

SEQ ID NO: 1570418 - RNA, 19 nt, Homo sapiens
  misc_RNA (1)...(19): siRNA sense strand
gagaagaaacgucauucca

SEQ ID NO: 1570419 - RNA, 19 nt, Homo sapiens
  misc_RNA (1)...(19): siRNA sense strand
gaugccauguugccuguuc

SEQ ID NO: 1570420 - RNA, 19 nt, Homo sapiens
  misc_RNA (1)...(19): siRNA sense strand
ugucuguggucucugcaua

SEQ ID NO: 1570421 - RNA, 19 nt, Homo sapiens
  misc_RNA (1)...(19): siRNA sense strand
uacacacggugacaaagaa

SEQ ID NO: 1570422 - RNA, 19 nt, Homo sapiens
  misc_RNA (1)...(19): siRNA sense strand
gggcagcucacaaggauuc

SEQ ID NO: 1570423 - RNA, 19 nt, Homo sapiens
  misc_RNA (1)...(19): siRNA sense strand
aaacgucauuccacuccuu

SEQ ID NO: 1570424 - RNA, 19 nt, Homo sapiens
  misc_RNA (1)...(19): siRNA sense strand
gcgcuucaccgucuacugu

SEQ ID NO: 1570425 - RNA, 19 nt, Homo sapiens
  misc_RNA (1)...(19): siRNA sense strand
cgacauggaggaauucuac

SEQ ID NO: 1570426 - RNA, 19 nt, Homo sapiens
  misc_RNA (1)...(19): siRNA sense strand
aaagggugcauaagaaguu

SEQ ID NO: 1570427 - RNA, 19 nt, Homo sapiens
  misc_RNA (1)...(19): siRNA sense strand
ucagcagggugaccacaga

SEQ ID NO: 1570428 - RNA, 19 nt, Homo sapiens
  misc_RNA (1)...(19): siRNA sense strand
ccauguugccuguuccuuu

SEQ ID NO: 1570429 - RNA, 19 nt, Homo sapiens
  misc_RNA (1)...(19): siRNA sense strand
gcaccuccacccucacaga

SEQ ID NO: 1570430 - RNA, 19 nt, Homo sapiens
  misc_RNA (1)...(19): siRNA sense strand
gcacuacggcaaggaaauc

SEQ ID NO: 1570431 - RNA, 19 nt, Homo sapiens
  misc_RNA (1)...(19): siRNA sense strand
ggagacagacguggacaca

SEQ ID NO: 1570432 - RNA, 19 nt, Homo sapiens
  misc_RNA (1)...(19): siRNA sense strand
ggucagcauccacauaauc

SEQ ID NO: 1570433 - RNA, 19 nt, Homo sapiens
  misc_RNA (1)...(19): siRNA sense strand
ggaccacugcccacuguca

SEQ ID NO: 1570434 - RNA, 19 nt, Homo sapiens
  misc_RNA (1)...(19): siRNA sense strand
gugcauaagaaguuuccua

SEQ ID NO: 1570435 - RNA, 19 nt, Homo sapiens
  misc_RNA (1)...(19): siRNA sense strand
aaagcggacuucugcaucu

SEQ ID NO: 1570436 - RNA, 19 nt, Homo sapiens
  misc_RNA (1)...(19): siRNA sense strand
ugcauaagaaguuuccuaa

SEQ ID NO: 1570437 - RNA, 19 nt, Homo sapiens
  misc_RNA (1)...(19): siRNA sense strand
ccacugggcagcucacaag

SEQ ID NO: 1570438 - RNA, 19 nt, Homo sapiens
  misc_RNA (1)...(19): siRNA sense strand
gcaggaggccaucgacaac

SEQ ID NO: 1570439 - RNA, 19 nt, Homo sapiens
  misc_RNA (1)...(19): siRNA sense strand
ggauaacgacauggaggaa

SEQ ID NO: 1570440 - RNA, 19 nt, Homo sapiens
  misc_RNA (1)...(19): siRNA sense strand
ucuguggucucugcauauu

SEQ ID NO: 1570441 - RNA, 19 nt, Homo sapiens
  misc_RNA (1)...(19): siRNA sense strand
caaagggugcauaagaagu

SEQ ID NO: 1570442 - RNA, 19 nt, Homo sapiens
  misc_RNA (1)...(19): siRNA sense strand
uucugcaucuucccuauuu

SEQ ID NO: 1570443 - RNA, 19 nt, Homo sapiens
  misc_RNA (1)...(19): siRNA sense strand
aagaggcgcaggacccuuu

SEQ ID NO: 1570444 - RNA, 19 nt, Homo sapiens
  misc_RNA (1)...(19): siRNA sense strand
gcagacggaggaccaugau

SEQ ID NO: 1570445 - RNA, 19 nt, Homo sapiens
  misc_RNA (1)...(19): siRNA sense strand
cuggucagcauccacauaa

SEQ ID NO: 1570446 - RNA, 19 nt, Homo sapiens
  misc_RNA (1)...(19): siRNA sense strand
ggaggaguacggcgaagag

SEQ ID NO: 1570447 - RNA, 19 nt, Homo sapiens
  misc_RNA (1)...(19): siRNA sense strand
gggcacagggcaucagagu

SEQ ID NO: 1570448 - RNA, 19 nt, Homo sapiens
  misc_RNA (1)...(19): siRNA sense strand
gcauauucugcacccagua

SEQ ID NO: 1570449 - RNA, 19 nt, Homo sapiens
  misc_RNA (1)...(19): siRNA sense strand
uguggucucugcauauucu

SEQ ID NO: 1570450 - RNA, 19 nt, Homo sapiens
  misc_RNA (1)...(19): siRNA sense strand
ggcagacggaggaccauga

SEQ ID NO: 1570451 - RNA, 19 nt, Homo sapiens
  misc_RNA (1)...(19): siRNA sense strand
cugggcagcucacaaggau

SEQ ID NO: 1570452 - RNA, 19 nt, Homo sapiens
  misc_RNA (1)...(19): siRNA sense strand
ccaacccucccuggucuuu

SEQ ID NO: 1570453 - RNA, 19 nt, Homo sapiens
  misc_RNA (1)...(19): siRNA sense strand
uggaggaauucuacaucug

SEQ ID NO: 1570454 - RNA, 19 nt, Homo sapiens
  misc_RNA (1)...(19): siRNA sense strand
gauaacgacauggaggaau

SEQ ID NO: 1570455 - RNA, 19 nt, Homo sapiens
  misc_RNA (1)...(19): siRNA sense strand
cuccaucgaugaccuagag

SEQ ID NO: 1570456 - RNA, 19 nt, Homo sapiens
  misc_RNA (1)...(19): siRNA sense strand
aagggugcauaagaaguuu

SEQ ID NO: 1570457 - RNA, 19 nt, Homo sapiens
  misc_RNA (1)...(19): siRNA sense strand
gcuaugaggugcugaaguu

SEQ ID NO: 1570458 - RNA, 19 nt, Homo sapiens
  misc_RNA (1)...(19): siRNA sense strand
caagaucgccuucuaugug

SEQ ID NO: 1570459 - RNA, 19 nt, Homo sapiens
  misc_RNA (1)...(19): siRNA sense strand
gggcggaccucugcaagaa

SEQ ID NO: 1570460 - RNA, 19 nt, Homo sapiens
  misc_RNA (1)...(19): siRNA sense strand
gcucacggaggcaauaaua

SEQ ID NO: 1570461 - RNA, 19 nt, Homo sapiens
  misc_RNA (1)...(19): siRNA sense strand
gcaucuacuucuucaccua

SEQ ID NO: 1570462 - RNA, 19 nt, Homo sapiens
  misc_RNA (1)...(19): siRNA sense strand
gaggcaauaauaacaagua

SEQ ID NO: 1570463 - RNA, 19 nt, Homo sapiens
  misc_RNA (1)...(19): siRNA sense strand
ucaccaaccucggcaauca

SEQ ID NO: 1570464 - RNA, 19 nt, Homo sapiens
  misc_RNA (1)...(19): siRNA sense strand
gggacgaaguguaugugaa

SEQ ID NO: 1570465 - RNA, 19 nt, Homo sapiens
  misc_RNA (1)...(19): siRNA sense strand
caaguucagcugccaggua

SEQ ID NO: 1570466 - RNA, 19 nt, Homo sapiens
  misc_RNA (1)...(19): siRNA sense strand
gcaauaauaacaaguacag

SEQ ID NO: 1570467 - RNA, 19 nt, Homo sapiens
  misc_RNA (1)...(19): siRNA sense strand
ggacgaaguguaugugaag

SEQ ID NO: 1570468 - RNA, 19 nt, Homo sapiens
  misc_RNA (1)...(19): siRNA sense strand
caaccucggcaaucacuau

SEQ ID NO: 1570469 - RNA, 19 nt, Homo sapiens
  misc_RNA (1)...(19): siRNA sense strand
caacccuccuccuccuuuc

SEQ ID NO: 1570470 - RNA, 19 nt, Homo sapiens
  misc_RNA (1)...(19): siRNA sense strand
ccaacccuccuccuccuuu

SEQ ID NO: 1570471 - RNA, 19 nt, Homo sapiens
  misc_RNA (1)...(19): siRNA sense strand
ccaagaucgccuucuaugu

SEQ ID NO: 1570472 - RNA, 19 nt, Homo sapiens
  misc_RNA (1)...(19): siRNA sense strand
ucucgggcuuucuucugua

SEQ ID NO: 1570473 - RNA, 19 nt, Homo sapiens
  misc_RNA (1)...(19): siRNA sense strand
cgcaugaucugggaaccuu

SEQ ID NO: 1570474 - RNA, 19 nt, Homo sapiens
  misc_RNA (1)...(19): siRNA sense strand
ucacggaggcaauaauaac

SEQ ID NO: 1570475 - RNA, 19 nt, Homo sapiens
  misc_RNA (1)...(19): siRNA sense strand
gaucugggaaccuuacacu

SEQ ID NO: 1570476 - RNA, 19 nt, Homo sapiens
  misc_RNA (1)...(19): siRNA sense strand
gcaugaucugggaaccuua

SEQ ID NO: 1570477 - RNA, 19 nt, Homo sapiens
  misc_RNA (1)...(19): siRNA sense strand
gcaccugccgcaugaucug

SEQ ID NO: 1570478 - RNA, 19 nt, Homo sapiens
  misc_RNA (1)...(19): siRNA sense strand
cggaggcaauaauaacaag

SEQ ID NO: 1570479 - RNA, 19 nt, Homo sapiens
  misc_RNA (1)...(19): siRNA sense strand
cccaagaucgccuucuaug

SEQ ID NO: 1570480 - RNA, 19 nt, Homo sapiens
  misc_RNA (1)...(19): siRNA sense strand
guacgcggcaucuacuucu

SEQ ID NO: 1570481 - RNA, 19 nt, Homo sapiens
  misc_RNA (1)...(19): siRNA sense strand
ccagguacgcggcaucuac

SEQ ID NO: 1570482 - RNA, 19 nt, Homo sapiens
  misc_RNA (1)...(19): siRNA sense strand
ggagagagcuguaaaugau

SEQ ID NO: 1570483 - RNA, 19 nt, Homo sapiens
  misc_RNA (1)...(19): siRNA sense strand
gaaacaggcuuuacaggaa

SEQ ID NO: 1570484 - RNA, 19 nt, Homo sapiens
  misc_RNA (1)...(19): siRNA sense strand
ccacucaacugaugaauuu

SEQ ID NO: 1570485 - RNA, 19 nt, Homo sapiens
  misc_RNA (1)...(19): siRNA sense strand
ggacaaaggacaagugaua

SEQ ID NO: 1570486 - RNA, 19 nt, Homo sapiens
  misc_RNA (1)...(19): siRNA sense strand
gaagaaaccuauggacauu

SEQ ID NO: 1570487 - RNA, 19 nt, Homo sapiens
  misc_RNA (1)...(19): siRNA sense strand
gaaaguagcacgucuggaa

SEQ ID NO: 1570488 - RNA, 19 nt, Homo sapiens
  misc_RNA (1)...(19): siRNA sense strand
ggagaagaaccauuuguaa

SEQ ID NO: 1570489 - RNA, 19 nt, Homo sapiens
  misc_RNA (1)...(19): siRNA sense strand
gaacugaagaaucgccuua

SEQ ID NO: 1570490 - RNA, 19 nt, Homo sapiens
  misc_RNA (1)...(19): siRNA sense strand
acaaacagaugcaguguga

SEQ ID NO: 1570491 - RNA, 19 nt, Homo sapiens
  misc_RNA (1)...(19): siRNA sense strand
gagaagaaccauuuguaaa

SEQ ID NO: 1570492 - RNA, 19 nt, Homo sapiens
  misc_RNA (1)...(19): siRNA sense strand
ugaaagucauguugucuaa

SEQ ID NO: 1570493 - RNA, 19 nt, Homo sapiens
  misc_RNA (1)...(19): siRNA sense strand
gaacaaagaaagcugugaa

SEQ ID NO: 1570494 - RNA, 19 nt, Homo sapiens
  misc_RNA (1)...(19): siRNA sense strand
guuagaugcugaauacaaa

SEQ ID NO: 1570495 - RNA, 19 nt, Homo sapiens
  misc_RNA (1)...(19): siRNA sense strand
aagaagaugucuccagaaa

SEQ ID NO: 1570496 - RNA, 19 nt, Homo sapiens
  misc_RNA (1)...(19): siRNA sense strand
ucaaucagauggaagaaau

SEQ ID NO: 1570497 - RNA, 19 nt, Homo sapiens
  misc_RNA (1)...(19): siRNA sense strand
aagaagcacuuaaagaaga

SEQ ID NO: 1570498 - RNA, 19 nt, Homo sapiens
  misc_RNA (1)...(19): siRNA sense strand
ccaagaauauccacagauc

SEQ ID NO: 1570499 - RNA, 19 nt, Homo sapiens
  misc_RNA (1)...(19): siRNA sense strand
agaagaagcacuuaaagaa

SEQ ID NO: 1570500 - RNA, 19 nt, Homo sapiens
  misc_RNA (1)...(19): siRNA sense strand
gcaaguggguaauagucaa

SEQ ID NO: 1570501 - RNA, 19 nt, Homo sapiens
  misc_RNA (1)...(19): siRNA sense strand
ccuaagaucuccaccaaca

SEQ ID NO: 1570502 - RNA, 19 nt, Homo sapiens
  misc_RNA (1)...(19): siRNA sense strand
gaagcccacucaacugaug

SEQ ID NO: 1570503 - RNA, 19 nt, Homo sapiens
  misc_RNA (1)...(19): siRNA sense strand
ggaagaaaccuauggacau

SEQ ID NO: 1570504 - RNA, 19 nt, Homo sapiens
  misc_RNA (1)...(19): siRNA sense strand
uagcacgucuggaaauuga

SEQ ID NO: 1570505 - RNA, 19 nt, Homo sapiens
  misc_RNA (1)...(19): siRNA sense strand
gcuagaagaagcacuuaaa

SEQ ID NO: 1570506 - RNA, 19 nt, Homo sapiens
  misc_RNA (1)...(19): siRNA sense strand
gcccaaagcggaagacuga

SEQ ID NO: 1570507 - RNA, 19 nt, Homo sapiens
  misc_RNA (1)...(19): siRNA sense strand
gaagaagcacuuaaagaag

SEQ ID NO: 1570508 - RNA, 19 nt, Homo sapiens
  misc_RNA (1)...(19): siRNA sense strand
gaacuuacuaccagaagau

SEQ ID NO: 1570509 - RNA, 19 nt, Homo sapiens
  misc_RNA (1)...(19): siRNA sense strand
gaagaaccauuuguaaagc

SEQ ID NO: 1570510 - RNA, 19 nt, Homo sapiens
  misc_RNA (1)...(19): siRNA sense strand
aagaugaaaugaucggaaa

SEQ ID NO: 1570511 - RNA, 19 nt, Homo sapiens
  misc_RNA (1)...(19): siRNA sense strand
caacaaugcaaguggguaa

SEQ ID NO: 1570512 - RNA, 19 nt, Homo sapiens
  misc_RNA (1)...(19): siRNA sense strand
aaacagaugcagugugauu

SEQ ID NO: 1570513 - RNA, 19 nt, Homo sapiens
  misc_RNA (1)...(19): siRNA sense strand
gcaauugaaacaggcuuua

SEQ ID NO: 1570514 - RNA, 19 nt, Homo sapiens
  misc_RNA (1)...(19): siRNA sense strand
aaacagaggucuaaauccu

SEQ ID NO: 1570515 - RNA, 19 nt, Homo sapiens
  misc_RNA (1)...(19): siRNA sense strand
gcaggucaaucagauggaa

SEQ ID NO: 1570516 - RNA, 19 nt, Homo sapiens
  misc_RNA (1)...(19): siRNA sense strand
aagaaucgccuuaaacaga

SEQ ID NO: 1570517 - RNA, 19 nt, Homo sapiens
  misc_RNA (1)...(19): siRNA sense strand
guuccagcauuaacuacua

SEQ ID NO: 1570518 - RNA, 19 nt, Homo sapiens
  misc_RNA (1)...(19): siRNA sense strand
gaaauaguaaggcuuguac

SEQ ID NO: 1570519 - RNA, 19 nt, Homo sapiens
  misc_RNA (1)...(19): siRNA sense strand
uaaagaaaaucgaccagaa

SEQ ID NO: 1570520 - RNA, 19 nt, Homo sapiens
  misc_RNA (1)...(19): siRNA sense strand
ugaagaaucgccuuaaaca

SEQ ID NO: 1570521 - RNA, 19 nt, Homo sapiens
  misc_RNA (1)...(19): siRNA sense strand
gcacuuaaagaagaacaaa

SEQ ID NO: 1570522 - RNA, 19 nt, Homo sapiens
  misc_RNA (1)...(19): siRNA sense strand
guccuaagaucuccaccaa

SEQ ID NO: 1570523 - RNA, 19 nt, Homo sapiens
  misc_RNA (1)...(19): siRNA sense strand
gacaaaggacaagugauaa

SEQ ID NO: 1570524 - RNA, 19 nt, Homo sapiens
  misc_RNA (1)...(19): siRNA sense strand
uaguaaggcuuguacaaag

SEQ ID NO: 1570525 - RNA, 19 nt, Homo sapiens
  misc_RNA (1)...(19): siRNA sense strand
gaugguuguuuccacuuug

SEQ ID NO: 1570526 - RNA, 19 nt, Homo sapiens
  misc_RNA (1)...(19): siRNA sense strand
gcggaagacugauugaaaa

SEQ ID NO: 1570527 - RNA, 19 nt, Homo sapiens
  misc_RNA (1)...(19): siRNA sense strand
aaagaaagcugugaaaaca

SEQ ID NO: 1570528 - RNA, 19 nt, Homo sapiens
  misc_RNA (1)...(19): siRNA sense strand
uagaagaagcacuuaaaga

SEQ ID NO: 1570529 - RNA, 19 nt, Homo sapiens
  misc_RNA (1)...(19): siRNA sense strand
cgaguaagacaaagaacuu

SEQ ID NO: 1570530 - RNA, 19 nt, Homo sapiens
  misc_RNA (1)...(19): siRNA sense strand
gaucaaguacagaaaguag

SEQ ID NO: 1570531 - RNA, 19 nt, Homo sapiens
  misc_RNA (1)...(19): siRNA sense strand
uuaaugccauguugaaagu

SEQ ID NO: 1570532 - RNA, 19 nt, Homo sapiens
  misc_RNA (1)...(19): siRNA sense strand
gauuuaaugccauguugaa

SEQ ID NO: 1570533 - RNA, 19 nt, Homo sapiens
  misc_RNA (1)...(19): siRNA sense strand
uugaagaacugaagaaucg

SEQ ID NO: 1570534 - RNA, 19 nt, Homo sapiens
  misc_RNA (1)...(19): siRNA sense strand
gcaucaacuuaacuauuuc

SEQ ID NO: 1570535 - RNA, 19 nt, Homo sapiens
  misc_RNA (1)...(19): siRNA sense strand
caaagcggaagacugauug

SEQ ID NO: 1570536 - RNA, 19 nt, Homo sapiens
  misc_RNA (1)...(19): siRNA sense strand
agaagaaccauuuguaaag

SEQ ID NO: 1570537 - RNA, 19 nt, Homo sapiens
  misc_RNA (1)...(19): siRNA sense strand
ccaaagcggaagacugauu

SEQ ID NO: 1570538 - RNA, 19 nt, Homo sapiens
  misc_RNA (1)...(19): siRNA sense strand
ccacagaucacugcccaaa

SEQ ID NO: 1570539 - RNA, 19 nt, Homo sapiens
  misc_RNA (1)...(19): siRNA sense strand
aagaagauuuggaucaagu

SEQ ID NO: 1570540 - RNA, 19 nt, Homo sapiens
  misc_RNA (1)...(19): siRNA sense strand
guaacaaaucggcaaaugu

SEQ ID NO: 1570541 - RNA, 19 nt, Homo sapiens
  misc_RNA (1)...(19): siRNA sense strand
agaagcacuuaaagaagaa

SEQ ID NO: 1570542 - RNA, 19 nt, Homo sapiens
  misc_RNA (1)...(19): siRNA sense strand
gcagugugauuuucaguug

SEQ ID NO: 1570543 - RNA, 19 nt, Homo sapiens
  misc_RNA (1)...(19): siRNA sense strand
gaugcugaauacaaacaga

SEQ ID NO: 1570544 - RNA, 19 nt, Homo sapiens
  misc_RNA (1)...(19): siRNA sense strand
gaucaaguuuuguuagaug

SEQ ID NO: 1570545 - RNA, 19 nt, Homo sapiens
  misc_RNA (1)...(19): siRNA sense strand
acaaaggacaagugauaaa

SEQ ID NO: 1570546 - RNA, 19 nt, Homo sapiens
  misc_RNA (1)...(19): siRNA sense strand
acaagaaaaucacugguuu

SEQ ID NO: 1570547 - RNA, 19 nt, Homo sapiens
  misc_RNA (1)...(19): siRNA sense strand
cgaucagaauggagaagaa

SEQ ID NO: 1570548 - RNA, 19 nt, Homo sapiens
  misc_RNA (1)...(19): siRNA sense strand
ggagaaagaaacaagaaaa

SEQ ID NO: 1570549 - RNA, 19 nt, Homo sapiens
  misc_RNA (1)...(19): siRNA sense strand
caaugcaaguggguaauag

SEQ ID NO: 1570550 - RNA, 19 nt, Homo sapiens
  misc_RNA (1)...(19): siRNA sense strand
ggaaauugagaacaaaguc

SEQ ID NO: 1570551 - RNA, 19 nt, Homo sapiens
  misc_RNA (1)...(19): siRNA sense strand
agagagcuguaaaugauca

SEQ ID NO: 1570552 - RNA, 19 nt, Homo sapiens
  misc_RNA (1)...(19): siRNA sense strand
uagaagcccacucaacuga

SEQ ID NO: 1570553 - RNA, 19 nt, Homo sapiens
  misc_RNA (1)...(19): siRNA sense strand
gaaagucauguugucuaaa

SEQ ID NO: 1570554 - RNA, 19 nt, Homo sapiens
  misc_RNA (1)...(19): siRNA sense strand
uggagaagaaccauuugua

SEQ ID NO: 1570555 - RNA, 19 nt, Homo sapiens
  misc_RNA (1)...(19): siRNA sense strand
aguaaggcuuguacaaaga

SEQ ID NO: 1570556 - RNA, 19 nt, Homo sapiens
  misc_RNA (1)...(19): siRNA sense strand
acugaagaaucgccuuaaa

SEQ ID NO: 1570557 - RNA, 19 nt, Homo sapiens
  misc_RNA (1)...(19): siRNA sense strand
uuaaacagaggucuaaauc

SEQ ID NO: 1570558 - RNA, 19 nt, Homo sapiens
  misc_RNA (1)...(19): siRNA sense strand
uuuguuagaugcugaauac

SEQ ID NO: 1570559 - RNA, 19 nt, Homo sapiens
  misc_RNA (1)...(19): siRNA sense strand
aaaccaggcaaauauguug

SEQ ID NO: 1570560 - RNA, 19 nt, Homo sapiens
  misc_RNA (1)...(19): siRNA sense strand
gaaccacaaacugcucauu

SEQ ID NO: 1570561 - RNA, 19 nt, Homo sapiens
  misc_RNA (1)...(19): siRNA sense strand
caccugagcuaaaggaaaa

SEQ ID NO: 1570562 - RNA, 19 nt, Homo sapiens
  misc_RNA (1)...(19): siRNA sense strand
gugaaagucauguugucua

SEQ ID NO: 1570563 - RNA, 19 nt, Homo sapiens
  misc_RNA (1)...(19): siRNA sense strand
ucagauggaagaaauaagu

SEQ ID NO: 1570564 - RNA, 19 nt, Homo sapiens
  misc_RNA (1)...(19): siRNA sense strand
cccauuccaucgaguaaga

SEQ ID NO: 1570565 - RNA, 19 nt, Homo sapiens
  misc_RNA (1)...(19): siRNA sense strand
gcacgucuggaaauugaga

SEQ ID NO: 1570566 - RNA, 19 nt, Homo sapiens
  misc_RNA (1)...(19): siRNA sense strand
guugaaggacaaagagaaa

SEQ ID NO: 1570567 - RNA, 19 nt, Homo sapiens
  misc_RNA (1)...(19): siRNA sense strand
gcaacagaaccacaaacug

SEQ ID NO: 1570568 - RNA, 19 nt, Homo sapiens
  misc_RNA (1)...(19): siRNA sense strand
cagauggaagaaauaagua

SEQ ID NO: 1570569 - RNA, 19 nt, Homo sapiens
  misc_RNA (1)...(19): siRNA sense strand
ccaacaggagaauccauuu

SEQ ID NO: 1570570 - RNA, 19 nt, Homo sapiens
  misc_RNA (1)...(19): siRNA sense strand
acagaucacugcccaaagc

SEQ ID NO: 1570571 - RNA, 19 nt, Homo sapiens
  misc_RNA (1)...(19): siRNA sense strand
cauuaucaccugagcuaaa

SEQ ID NO: 1570572 - RNA, 19 nt, Homo sapiens
  misc_RNA (1)...(19): siRNA sense strand
ggaucaaguacagaaagua

SEQ ID NO: 1570573 - RNA, 19 nt, Homo sapiens
  misc_RNA (1)...(19): siRNA sense strand
ccacaaacugcucauucaa

SEQ ID NO: 1570574 - RNA, 19 nt, Homo sapiens
  misc_RNA (1)...(19): siRNA sense strand
cagaagcagugaaaaguug

SEQ ID NO: 1570575 - RNA, 19 nt, Homo sapiens
  misc_RNA (1)...(19): siRNA sense strand
gucuaaauccuccgugaaa

SEQ ID NO: 1570576 - RNA, 19 nt, Homo sapiens
  misc_RNA (1)...(19): siRNA sense strand
gaagaaucgccuuaaacag

SEQ ID NO: 1570577 - RNA, 19 nt, Homo sapiens
  misc_RNA (1)...(19): siRNA sense strand
ccaguaaagcaucuguuga

SEQ ID NO: 1570578 - RNA, 19 nt, Homo sapiens
  misc_RNA (1)...(19): siRNA sense strand
accagaagaugaaaugauc

SEQ ID NO: 1570579 - RNA, 19 nt, Homo sapiens
  misc_RNA (1)...(19): siRNA sense strand
agaugguuguuuccacuuu

SEQ ID NO: 1570580 - RNA, 19 nt, Homo sapiens
  misc_RNA (1)...(19): siRNA sense strand
gaagacugauugaaaagag

SEQ ID NO: 1570581 - RNA, 19 nt, Homo sapiens
  misc_RNA (1)...(19): siRNA sense strand
aaacugagacaacaaugca

SEQ ID NO: 1570582 - RNA, 19 nt, Homo sapiens
  misc_RNA (1)...(19): siRNA sense strand
gaacugaucuccaccaucu

SEQ ID NO: 1570583 - RNA, 19 nt, Homo sapiens
  misc_RNA (1)...(19): siRNA sense strand
ggaacacuccaucaaagua

SEQ ID NO: 1570584 - RNA, 19 nt, Homo sapiens
  misc_RNA (1)...(19): siRNA sense strand
gaacagucccugcaugaau

SEQ ID NO: 1570585 - RNA, 19 nt, Homo sapiens
  misc_RNA (1)...(19): siRNA sense strand
caucaaggcuggcauaaaa

SEQ ID NO: 1570586 - RNA, 19 nt, Homo sapiens
  misc_RNA (1)...(19): siRNA sense strand
ggugaugccugccuugaug

SEQ ID NO: 1570587 - RNA, 19 nt, Homo sapiens
  misc_RNA (1)...(19): siRNA sense strand
ugaggaagauguucagauc

SEQ ID NO: 1570588 - RNA, 19 nt, Homo sapiens
  misc_RNA (1)...(19): siRNA sense strand
gcaugauccugcacaguau

SEQ ID NO: 1570589 - RNA, 19 nt, Homo sapiens
  misc_RNA (1)...(19): siRNA sense strand
gcugaggccucugcuugua

SEQ ID NO: 1570590 - RNA, 19 nt, Homo sapiens
  misc_RNA (1)...(19): siRNA sense strand
gaauacacuuaaagcuuuc

SEQ ID NO: 1570591 - RNA, 19 nt, Homo sapiens
  misc_RNA (1)...(19): siRNA sense strand
ugagcuaccuggcacagaa

SEQ ID NO: 1570592 - RNA, 19 nt, Homo sapiens
  misc_RNA (1)...(19): siRNA sense strand
cgaucuaccugcucuacaa

SEQ ID NO: 1570593 - RNA, 19 nt, Homo sapiens
  misc_RNA (1)...(19): siRNA sense strand
gcccagucguuccuacuuu

SEQ ID NO: 1570594 - RNA, 19 nt, Homo sapiens
  misc_RNA (1)...(19): siRNA sense strand
caggaacacuccaucaaag

SEQ ID NO: 1570595 - RNA, 19 nt, Homo sapiens
  misc_RNA (1)...(19): siRNA sense strand
ccaggaacacuccaucaaa

SEQ ID NO: 1570596 - RNA, 19 nt, Homo sapiens
  misc_RNA (1)...(19): siRNA sense strand
gcuacaugcuggaugacaa

SEQ ID NO: 1570597 - RNA, 19 nt, Homo sapiens
  misc_RNA (1)...(19): siRNA sense strand
cccagucguuccuacuuua

SEQ ID NO: 1570598 - RNA, 19 nt, Homo sapiens
  misc_RNA (1)...(19): siRNA sense strand
ucaaaguacucgaacugau

SEQ ID NO: 1570599 - RNA, 19 nt, Homo sapiens
  misc_RNA (1)...(19): siRNA sense strand
acacggaacugcacauugc

SEQ ID NO: 1570600 - RNA, 19 nt, Homo sapiens
  misc_RNA (1)...(19): siRNA sense strand
caaaguacucgaacugauc

SEQ ID NO: 1570601 - RNA, 19 nt, Homo sapiens
  misc_RNA (1)...(19): siRNA sense strand
gaacacuccaucaaaguac

SEQ ID NO: 1570602 - RNA, 19 nt, Homo sapiens
  misc_RNA (1)...(19): siRNA sense strand
gaccuucucuaugacauuc

SEQ ID NO: 1570603 - RNA, 19 nt, Homo sapiens
  misc_RNA (1)...(19): siRNA sense strand
ucuaugacauucucaacug

SEQ ID NO: 1570604 - RNA, 19 nt, Homo sapiens
  misc_RNA (1)...(19): siRNA sense strand
ggacacggaacugcacauu

SEQ ID NO: 1570605 - RNA, 19 nt, Homo sapiens
  misc_RNA (1)...(19): siRNA sense strand
gcaacuggacauccgcaaa

SEQ ID NO: 1570606 - RNA, 19 nt, Homo sapiens
  misc_RNA (1)...(19): siRNA sense strand
caagcucugaauacacuua

SEQ ID NO: 1570607 - RNA, 19 nt, Homo sapiens
  misc_RNA (1)...(19): siRNA sense strand
ggucauccacccugaggaa

SEQ ID NO: 1570608 - RNA, 19 nt, Homo sapiens
  misc_RNA (1)...(19): siRNA sense strand
uguaugagguacugguguu

SEQ ID NO: 1570609 - RNA, 19 nt, Homo sapiens
  misc_RNA (1)...(19): siRNA sense strand
cugcaugaaucccucuuug

SEQ ID NO: 1570610 - RNA, 19 nt, Homo sapiens
  misc_RNA (1)...(19): siRNA sense strand
gcaacucacccaucugcau

SEQ ID NO: 1570611 - RNA, 19 nt, Homo sapiens
  misc_RNA (1)...(19): siRNA sense strand
caucaaaguacucgaacug

SEQ ID NO: 1570612 - RNA, 19 nt, Homo sapiens
  misc_RNA (1)...(19): siRNA sense strand
gaaugaccuucucuaugac

SEQ ID NO: 1570613 - RNA, 19 nt, Homo sapiens
  misc_RNA (1)...(19): siRNA sense strand
ccaacuuccuaaaccuguu

SEQ ID NO: 1570614 - RNA, 19 nt, Homo sapiens
  misc_RNA (1)...(19): siRNA sense strand
uguagcaacucacccaucu

SEQ ID NO: 1570615 - RNA, 19 nt, Homo sapiens
  misc_RNA (1)...(19): siRNA sense strand
gaaaauucaggcucaaaau

SEQ ID NO: 1570616 - RNA, 19 nt, Homo sapiens
  misc_RNA (1)...(19): siRNA sense strand
agcaugauccugcacagua

SEQ ID NO: 1570617 - RNA, 19 nt, Homo sapiens
  misc_RNA (1)...(19): siRNA sense strand
uggagauccugcagucaga

SEQ ID NO: 1570618 - RNA, 19 nt, Homo sapiens
  misc_RNA (1)...(19): siRNA sense strand
cugaauacacuuaaagcuu

SEQ ID NO: 1570619 - RNA, 19 nt, Homo sapiens
  misc_RNA (1)...(19): siRNA sense strand
gcucugaauacacuuaaag

SEQ ID NO: 1570620 - RNA, 19 nt, Homo sapiens
  misc_RNA (1)...(19): siRNA sense strand
cccaagcucugaauacacu

SEQ ID NO: 1570621 - RNA, 19 nt, Homo sapiens
  misc_RNA (1)...(19): siRNA sense strand
ugggcuacaugcuggauga

SEQ ID NO: 1570622 - RNA, 19 nt, Homo sapiens
  misc_RNA (1)...(19): siRNA sense strand
ccguacgacugcugagcua

SEQ ID NO: 1570623 - RNA, 19 nt, Homo sapiens
  misc_RNA (1)...(19): siRNA sense strand
aacagucccugcaugaauc

SEQ ID NO: 1570624 - RNA, 19 nt, Homo sapiens
  misc_RNA (1)...(19): siRNA sense strand
caacgaacagucccugcau

SEQ ID NO: 1570625 - RNA, 19 nt, Homo sapiens
  misc_RNA (1)...(19): siRNA sense strand
gacacggaacugcacauug

SEQ ID NO: 1570626 - RNA, 19 nt, Homo sapiens
  misc_RNA (1)...(19): siRNA sense strand
ccagucguuccuacuuuaa

SEQ ID NO: 1570627 - RNA, 19 nt, Homo sapiens
  misc_RNA (1)...(19): siRNA sense strand
cauccacccugaggaagau

SEQ ID NO: 1570628 - RNA, 19 nt, Homo sapiens
  misc_RNA (1)...(19): siRNA sense strand
uugcugagcggcugaguga

SEQ ID NO: 1570629 - RNA, 19 nt, Homo sapiens
  misc_RNA (1)...(19): siRNA sense strand
caacuggacauccgcaaaa

SEQ ID NO: 1570630 - RNA, 19 nt, Homo sapiens
  misc_RNA (1)...(19): siRNA sense strand
aggaagauguucagaucca

SEQ ID NO: 1570631 - RNA, 19 nt, Homo sapiens
  misc_RNA (1)...(19): siRNA sense strand
cugcaucgcccgugagugu

SEQ ID NO: 1570632 - RNA, 19 nt, Homo sapiens
  misc_RNA (1)...(19): siRNA sense strand
aacccaagcucugaauaca

SEQ ID NO: 1570633 - RNA, 19 nt, Homo sapiens
  misc_RNA (1)...(19): siRNA sense strand
gugcaaacaggaugaguac

SEQ ID NO: 1570634 - RNA, 19 nt, Homo sapiens
  misc_RNA (1)...(19): siRNA sense strand
gccucagacuccucaacaa

SEQ ID NO: 1570635 - RNA, 19 nt, Homo sapiens
  misc_RNA (1)...(19): siRNA sense strand
gcaaaccaccccucuguag

SEQ ID NO: 1570636 - RNA, 19 nt, Homo sapiens
  misc_RNA (1)...(19): siRNA sense strand
aaacccaagcucugaauac

SEQ ID NO: 1570637 - RNA, 19 nt, Homo sapiens
  misc_RNA (1)...(19): siRNA sense strand
cgaacagucccugcaugaa

SEQ ID NO: 1570638 - RNA, 19 nt, Homo sapiens
  misc_RNA (1)...(19): siRNA sense strand
aaagcuuucucuggcauca

SEQ ID NO: 1570639 - RNA, 19 nt, Homo sapiens
  misc_RNA (1)...(19): siRNA sense strand
caacuuccuaaaccuguuc

SEQ ID NO: 1570640 - RNA, 19 nt, Homo sapiens
  misc_RNA (1)...(19): siRNA sense strand
caggaugaguacgccaaga

SEQ ID NO: 1570641 - RNA, 19 nt, Homo sapiens
  misc_RNA (1)...(19): siRNA sense strand
ccaucaaggcuggcauaaa

SEQ ID NO: 1570642 - RNA, 19 nt, Homo sapiens
  misc_RNA (1)...(19): siRNA sense strand
gaaaugagcugaccgaauu

SEQ ID NO: 1570643 - RNA, 19 nt, Homo sapiens
  misc_RNA (1)...(19): siRNA sense strand
ggaggaagcuucugcaaua

SEQ ID NO: 1570644 - RNA, 19 nt, Homo sapiens
  misc_RNA (1)...(19): siRNA sense strand
gaacugacccuuuguacaa

SEQ ID NO: 1570645 - RNA, 19 nt, Homo sapiens
  misc_RNA (1)...(19): siRNA sense strand
gcaaucaacuccagcaaau

SEQ ID NO: 1570646 - RNA, 19 nt, Homo sapiens
  misc_RNA (1)...(19): siRNA sense strand
gaagaaaaguccucuaaaa

SEQ ID NO: 1570647 - RNA, 19 nt, Homo sapiens
  misc_RNA (1)...(19): siRNA sense strand
ggaacacgaucaugacuau

SEQ ID NO: 1570648 - RNA, 19 nt, Homo sapiens
  misc_RNA (1)...(19): siRNA sense strand
aaauggaagucuugcaaua

SEQ ID NO: 1570649 - RNA, 19 nt, Homo sapiens
  misc_RNA (1)...(19): siRNA sense strand
gagcagaaccgcaaagaug

SEQ ID NO: 1570650 - RNA, 19 nt, Homo sapiens
  misc_RNA (1)...(19): siRNA sense strand
ggaaauuacugcaaucaac

SEQ ID NO: 1570651 - RNA, 19 nt, Homo sapiens
  misc_RNA (1)...(19): siRNA sense strand
caacagauucgaacagaaa

SEQ ID NO: 1570652 - RNA, 19 nt, Homo sapiens
  misc_RNA (1)...(19): siRNA sense strand
gaucaugacuauagcagau

SEQ ID NO: 1570653 - RNA, 19 nt, Homo sapiens
  misc_RNA (1)...(19): siRNA sense strand
gaacagcuucuugauguaa

SEQ ID NO: 1570654 - RNA, 19 nt, Homo sapiens
  misc_RNA (1)...(19): siRNA sense strand
caaccgaccuggagauaca

SEQ ID NO: 1570655 - RNA, 19 nt, Homo sapiens
  misc_RNA (1)...(19): siRNA sense strand
gcaaauucaggaucagaua

SEQ ID NO: 1570656 - RNA, 19 nt, Homo sapiens
  misc_RNA (1)...(19): siRNA sense strand
caacagauuuccgaucaug

SEQ ID NO: 1570657 - RNA, 19 nt, Homo sapiens
  misc_RNA (1)...(19): siRNA sense strand
gaaggaaauuacugcaauc

SEQ ID NO: 1570658 - RNA, 19 nt, Homo sapiens
  misc_RNA (1)...(19): siRNA sense strand
gaacaacugcaacagauuc

SEQ ID NO: 1570659 - RNA, 19 nt, Homo sapiens
  misc_RNA (1)...(19): siRNA sense strand
ugaaggaaauuacugcaau

SEQ ID NO: 1570660 - RNA, 19 nt, Homo sapiens
  misc_RNA (1)...(19): siRNA sense strand
ggaaauggaagucuugcaa

SEQ ID NO: 1570661 - RNA, 19 nt, Homo sapiens
  misc_RNA (1)...(19): siRNA sense strand
gcaacagauucgaacagaa

SEQ ID NO: 1570662 - RNA, 19 nt, Homo sapiens
  misc_RNA (1)...(19): siRNA sense strand
ggacuuggcugagcagaac

SEQ ID NO: 1570663 - RNA, 19 nt, Homo sapiens
  misc_RNA (1)...(19): siRNA sense strand
gagcaacgaguaccuucua

SEQ ID NO: 1570664 - RNA, 19 nt, Homo sapiens
  misc_RNA (1)...(19): siRNA sense strand
caaauccacauguuacaaa

SEQ ID NO: 1570665 - RNA, 19 nt, Homo sapiens
  misc_RNA (1)...(19): siRNA sense strand
uggaugaacugacccuuug

SEQ ID NO: 1570666 - RNA, 19 nt, Homo sapiens
  misc_RNA (1)...(19): siRNA sense strand
uaagcaacauuacaguaga

SEQ ID NO: 1570667 - RNA, 19 nt, Homo sapiens
  misc_RNA (1)...(19): siRNA sense strand
gccaaagacucaacagaag

SEQ ID NO: 1570668 - RNA, 19 nt, Homo sapiens
  misc_RNA (1)...(19): siRNA sense strand
cauccuaccuggaccaugu

SEQ ID NO: 1570669 - RNA, 19 nt, Homo sapiens
  misc_RNA (1)...(19): siRNA sense strand
ggcaaucuccuuucacuga

SEQ ID NO: 1570670 - RNA, 19 nt, Homo sapiens
  misc_RNA (1)...(19): siRNA sense strand
gcagauacuucucagucau

SEQ ID NO: 1570671 - RNA, 19 nt, Homo sapiens
  misc_RNA (1)...(19): siRNA sense strand
auggaagucuugcaauaua

SEQ ID NO: 1570672 - RNA, 19 nt, Homo sapiens
  misc_RNA (1)...(19): siRNA sense strand
caaagacucaacagaagaa

SEQ ID NO: 1570673 - RNA, 19 nt, Homo sapiens
  misc_RNA (1)...(19): siRNA sense strand
ugugaaacauuccuaugaa

SEQ ID NO: 1570674 - RNA, 19 nt, Homo sapiens
  misc_RNA (1)...(19): siRNA sense strand
acgcagaccuggagcagaa

SEQ ID NO: 1570675 - RNA, 19 nt, Homo sapiens
  misc_RNA (1)...(19): siRNA sense strand
caacagaagaaacuauugu

SEQ ID NO: 1570676 - RNA, 19 nt, Homo sapiens
  misc_RNA (1)...(19): siRNA sense strand
cuuacuagauggagaagaa

SEQ ID NO: 1570677 - RNA, 19 nt, Homo sapiens
  misc_RNA (1)...(19): siRNA sense strand
gaaauggaagucuugcaau

SEQ ID NO: 1570678 - RNA, 19 nt, Homo sapiens
  misc_RNA (1)...(19): siRNA sense strand
aaagcaaauccacauguua

SEQ ID NO: 1570679 - RNA, 19 nt, Homo sapiens
  misc_RNA (1)...(19): siRNA sense strand
caacaugagggcugaguau

SEQ ID NO: 1570680 - RNA, 19 nt, Homo sapiens
  misc_RNA (1)...(19): siRNA sense strand
gaugaacugacccuuugua

SEQ ID NO: 1570681 - RNA, 19 nt, Homo sapiens
  misc_RNA (1)...(19): siRNA sense strand
gcaacgaguaccuucuaaa

SEQ ID NO: 1570682 - RNA, 19 nt, Homo sapiens
  misc_RNA (1)...(19): siRNA sense strand
ugaacagcuucuugaugua

SEQ ID NO: 1570683 - RNA, 19 nt, Homo sapiens
  misc_RNA (1)...(19): siRNA sense strand
aacaacagauuuccgauca

SEQ ID NO: 1570684 - RNA, 19 nt, Homo sapiens
  misc_RNA (1)...(19): siRNA sense strand
augaacagcuucuugaugu

SEQ ID NO: 1570685 - RNA, 19 nt, Homo sapiens
  misc_RNA (1)...(19): siRNA sense strand
ggaggaaauggaagucuug

SEQ ID NO: 1570686 - RNA, 19 nt, Homo sapiens
  misc_RNA (1)...(19): siRNA sense strand
caacgaguaccuucuaaag

SEQ ID NO: 1570687 - RNA, 19 nt, Homo sapiens
  misc_RNA (1)...(19): siRNA sense strand
caacuuacuagauggagaa

SEQ ID NO: 1570688 - RNA, 19 nt, Homo sapiens
  misc_RNA (1)...(19): siRNA sense strand
ggaacaacugcaacagauu

SEQ ID NO: 1570689 - RNA, 19 nt, Homo sapiens
  misc_RNA (1)...(19): siRNA sense strand
ugcaaacccuggaaauaga

SEQ ID NO: 1570690 - RNA, 19 nt, Homo sapiens
  misc_RNA (1)...(19): siRNA sense strand
caacauuacaguagagcaa

SEQ ID NO: 1570691 - RNA, 19 nt, Homo sapiens
  misc_RNA (1)...(19): siRNA sense strand
ccacauguuacaaaucaaa

SEQ ID NO: 1570692 - RNA, 19 nt, Homo sapiens
  misc_RNA (1)...(19): siRNA sense strand
gaggaacaacugcaacaga

SEQ ID NO: 1570693 - RNA, 19 nt, Homo sapiens
  misc_RNA (1)...(19): siRNA sense strand
gaaauuacugcaaucaacu

SEQ ID NO: 1570694 - RNA, 19 nt, Homo sapiens
  misc_RNA (1)...(19): siRNA sense strand
gcaaacccuggaaauagaa

SEQ ID NO: 1570695 - RNA, 19 nt, Homo sapiens
  misc_RNA (1)...(19): siRNA sense strand
ccacagcagccagaaauga

SEQ ID NO: 1570696 - RNA, 19 nt, Homo sapiens
  misc_RNA (1)...(19): siRNA sense strand
gcaaauccacauguuacaa

SEQ ID NO: 1570697 - RNA, 19 nt, Homo sapiens
  misc_RNA (1)...(19): siRNA sense strand
gaacacgaucaugacuaua

SEQ ID NO: 1570698 - RNA, 19 nt, Homo sapiens
  misc_RNA (1)...(19): siRNA sense strand
acgaguaccuucuaaagca

SEQ ID NO: 1570699 - RNA, 19 nt, Homo sapiens
  misc_RNA (1)...(19): siRNA sense strand
uauugcaacuuacuagaug

SEQ ID NO: 1570700 - RNA, 19 nt, Homo sapiens
  misc_RNA (1)...(19): siRNA sense strand
gaggaagcuucugcaauag

SEQ ID NO: 1570701 - RNA, 19 nt, Homo sapiens
  misc_RNA (1)...(19): siRNA sense strand
ccucauggcugugaaacau

SEQ ID NO: 1570702 - RNA, 19 nt, Homo sapiens
  misc_RNA (1)...(19): siRNA sense strand
cagauacuucucagucaua

SEQ ID NO: 1570703 - RNA, 19 nt, Homo sapiens
  misc_RNA (1)...(19): siRNA sense strand
gcagaguguuggaugaacu

SEQ ID NO: 1570704 - RNA, 19 nt, Homo sapiens
  misc_RNA (1)...(19): siRNA sense strand
gaggaacuggaucaaauug

SEQ ID NO: 1570705 - RNA, 19 nt, Homo sapiens
  misc_RNA (1)...(19): siRNA sense strand
aaacagugguugaggaacu

SEQ ID NO: 1570706 - RNA, 19 nt, Homo sapiens
  misc_RNA (1)...(19): siRNA sense strand
ccaaagacucaacagaaga

SEQ ID NO: 1570707 - RNA, 19 nt, Homo sapiens
  misc_RNA (1)...(19): siRNA sense strand
caacugcaacagauucgaa

SEQ ID NO: 1570708 - RNA, 19 nt, Homo sapiens
  misc_RNA (1)...(19): siRNA sense strand
gggaacacgaucaugacua

SEQ ID NO: 1570709 - RNA, 19 nt, Homo sapiens
  misc_RNA (1)...(19): siRNA sense strand
aggaacaacugcaacagau

SEQ ID NO: 1570710 - RNA, 19 nt, Homo sapiens
  misc_RNA (1)...(19): siRNA sense strand
gggaauguguguguuggau

SEQ ID NO: 1570711 - RNA, 19 nt, Homo sapiens
  misc_RNA (1)...(19): siRNA sense strand
gcucugcaccacaguguug

SEQ ID NO: 1570712 - RNA, 19 nt, Homo sapiens
  misc_RNA (1)...(19): siRNA sense strand
ggaaaucaagccaaagacu

SEQ ID NO: 1570713 - RNA, 19 nt, Homo sapiens
  misc_RNA (1)...(19): siRNA sense strand
gaaccgcaaagaugcugaa

SEQ ID NO: 1570714 - RNA, 19 nt, Homo sapiens
  misc_RNA (1)...(19): siRNA sense strand
uacaguagagcaacgagua

SEQ ID NO: 1570715 - RNA, 19 nt, Homo sapiens
  misc_RNA (1)...(19): siRNA sense strand
aaucaacuccagcaaauuc

SEQ ID NO: 1570716 - RNA, 19 nt, Homo sapiens
  misc_RNA (1)...(19): siRNA sense strand
cauagaagaucuuaaaagg

SEQ ID NO: 1570717 - RNA, 19 nt, Homo sapiens
  misc_RNA (1)...(19): siRNA sense strand
gaaugcuccuuggcugaga

SEQ ID NO: 1570718 - RNA, 19 nt, Homo sapiens
  misc_RNA (1)...(19): siRNA sense strand
ucauggcugugaaacauuc

SEQ ID NO: 1570719 - RNA, 19 nt, Homo sapiens
  misc_RNA (1)...(19): siRNA sense strand
gauucgaacagaaacagaa

SEQ ID NO: 1570720 - RNA, 19 nt, Homo sapiens
  misc_RNA (1)...(19): siRNA sense strand
ugaggaacuggaucaaauu

SEQ ID NO: 1570721 - RNA, 19 nt, Homo sapiens
  misc_RNA (1)...(19): siRNA sense strand
acugaccgcugaugacuuc

SEQ ID NO: 1570722 - RNA, 19 nt, Homo sapiens
  misc_RNA (1)...(19): siRNA sense strand
ugugaauucuggaaaucaa

SEQ ID NO: 1570723 - RNA, 19 nt, Homo sapiens
  misc_RNA (1)...(19): siRNA sense strand
gaguaugaacagcuucuug

SEQ ID NO: 1570724 - RNA, 19 nt, Homo sapiens
  misc_RNA (1)...(19): siRNA sense strand
ggcugagacugaaggaaau

SEQ ID NO: 1570725 - RNA, 19 nt, Homo sapiens
  misc_RNA (1)...(19): siRNA sense strand
uggcugagacugaaggaaa

SEQ ID NO: 1570726 - RNA, 19 nt, Homo sapiens
  misc_RNA (1)...(19): siRNA sense strand
caugagggcugaguaugag

SEQ ID NO: 1570727 - RNA, 19 nt, Homo sapiens
  misc_RNA (1)...(19): siRNA sense strand
ggaagucuugcaauauaca

SEQ ID NO: 1570728 - RNA, 19 nt, Homo sapiens
  misc_RNA (1)...(19): siRNA sense strand
gguggaggguugggaagug

SEQ ID NO: 1570729 - RNA, 19 nt, Homo sapiens
  misc_RNA (1)...(19): siRNA sense strand
gacuauagcagauacuucu

SEQ ID NO: 1570730 - RNA, 19 nt, Homo sapiens
  misc_RNA (1)...(19): siRNA sense strand
caaauucaggaucagauag

SEQ ID NO: 1570731 - RNA, 19 nt, Homo sapiens
  misc_RNA (1)...(19): siRNA sense strand
gcaacgcugcaacaacaga

SEQ ID NO: 1570732 - RNA, 19 nt, Homo sapiens
  misc_RNA (1)...(19): siRNA sense strand
ccaguggucuucgcagagu

SEQ ID NO: 1570733 - RNA, 19 nt, Homo sapiens
  misc_RNA (1)...(19): siRNA sense strand
aaaucaagccaaagacuca

SEQ ID NO: 1570734 - RNA, 19 nt, Homo sapiens
  misc_RNA (1)...(19): siRNA sense strand
aaaagcaaauccacauguu

SEQ ID NO: 1570735 - RNA, 19 nt, Homo sapiens
  misc_RNA (1)...(19): siRNA sense strand
acaugagggcugaguauga

SEQ ID NO: 1570736 - RNA, 19 nt, Homo sapiens
  misc_RNA (1)...(19): siRNA sense strand
ucagugaggaauugaccua

SEQ ID NO: 1570737 - RNA, 19 nt, Homo sapiens
  misc_RNA (1)...(19): siRNA sense strand
gauggaggaacaacugcaa

SEQ ID NO: 1570738 - RNA, 19 nt, Homo sapiens
  misc_RNA (1)...(19): siRNA sense strand
ugcaacagauucgaacaga

SEQ ID NO: 1570739 - RNA, 19 nt, Homo sapiens
  misc_RNA (1)...(19): siRNA sense strand
gcuguccgguggaggaaca

SEQ ID NO: 1570740 - RNA, 19 nt, Homo sapiens
  misc_RNA (1)...(19): siRNA sense strand
agccaaagacucaacagaa

SEQ ID NO: 1570741 - RNA, 19 nt, Homo sapiens
  misc_RNA (1)...(19): siRNA sense strand
ucugcaaacccuggaaaua

SEQ ID NO: 1570742 - RNA, 19 nt, Homo sapiens
  misc_RNA (1)...(19): siRNA sense strand
ggacuaaacugcugacaga

SEQ ID NO: 1570743 - RNA, 19 nt, Homo sapiens
  misc_RNA (1)...(19): siRNA sense strand
gauauugucuuuccauuug

SEQ ID NO: 1570744 - RNA, 19 nt, Homo sapiens
  misc_RNA (1)...(19): siRNA sense strand
gaugggacuuguaucauuu

SEQ ID NO: 1570745 - RNA, 19 nt, Homo sapiens
  misc_RNA (1)...(19): siRNA sense strand
gauacuagccaacaccuua

SEQ ID NO: 1570746 - RNA, 19 nt, Homo sapiens
  misc_RNA (1)...(19): siRNA sense strand
cgacugauguaugucauua

SEQ ID NO: 1570747 - RNA, 19 nt, Homo sapiens
  misc_RNA (1)...(19): siRNA sense strand
ucaagaagauucaguuaca

SEQ ID NO: 1570748 - RNA, 19 nt, Homo sapiens
  misc_RNA (1)...(19): siRNA sense strand
cagaagaaucgcacauuua

SEQ ID NO: 1570749 - RNA, 19 nt, Homo sapiens
  misc_RNA (1)...(19): siRNA sense strand
ggacaguaaucagagaauu

SEQ ID NO: 1570750 - RNA, 19 nt, Homo sapiens
  misc_RNA (1)...(19): siRNA sense strand
ggaguugccuguggaaaga

SEQ ID NO: 1570751 - RNA, 19 nt, Homo sapiens
  misc_RNA (1)...(19): siRNA sense strand
ggaugaugaugauagcuuu

SEQ ID NO: 1570752 - RNA, 19 nt, Homo sapiens
  misc_RNA (1)...(19): siRNA sense strand
gcauuagggugaagaggaa

SEQ ID NO: 1570753 - RNA, 19 nt, Homo sapiens
  misc_RNA (1)...(19): siRNA sense strand
cauagcgacuugucacuuu

SEQ ID NO: 1570754 - RNA, 19 nt, Homo sapiens
  misc_RNA (1)...(19): siRNA sense strand
acagaagaaucgcacauuu

SEQ ID NO: 1570755 - RNA, 19 nt, Homo sapiens
  misc_RNA (1)...(19): siRNA sense strand
gcaacaacgucuccugcuu

SEQ ID NO: 1570756 - RNA, 19 nt, Homo sapiens
  misc_RNA (1)...(19): siRNA sense strand
acagaaagauugcuuacug

SEQ ID NO: 1570757 - RNA, 19 nt, Homo sapiens
  misc_RNA (1)...(19): siRNA sense strand
ugucaaggauauugucuuu

SEQ ID NO: 1570758 - RNA, 19 nt, Homo sapiens
  misc_RNA (1)...(19): siRNA sense strand
cgaugggacuuguaucauu

SEQ ID NO: 1570759 - RNA, 19 nt, Homo sapiens
  misc_RNA (1)...(19): siRNA sense strand
guacaucgccuccggacaa

SEQ ID NO: 1570760 - RNA, 19 nt, Homo sapiens
  misc_RNA (1)...(19): siRNA sense strand
gcuacaaacccaucaagaa

SEQ ID NO: 1570761 - RNA, 19 nt, Homo sapiens
  misc_RNA (1)...(19): siRNA sense strand
ggaacagacagaaagauug

SEQ ID NO: 1570762 - RNA, 19 nt, Homo sapiens
  misc_RNA (1)...(19): siRNA sense strand
cauaugauuuauccucuug

SEQ ID NO: 1570763 - RNA, 19 nt, Homo sapiens
  misc_RNA (1)...(19): siRNA sense strand
guauuggaguggaugauga

SEQ ID NO: 1570764 - RNA, 19 nt, Homo sapiens
  misc_RNA (1)...(19): siRNA sense strand
ggauauugucuuuccauuu

SEQ ID NO: 1570765 - RNA, 19 nt, Homo sapiens
  misc_RNA (1)...(19): siRNA sense strand
ccgcauaaguccaggaaau

SEQ ID NO: 1570766 - RNA, 19 nt, Homo sapiens
  misc_RNA (1)...(19): siRNA sense strand
guucaaggcagacaucauu

SEQ ID NO: 1570767 - RNA, 19 nt, Homo sapiens
  misc_RNA (1)...(19): siRNA sense strand
cuaaacugcugacagaugu

SEQ ID NO: 1570768 - RNA, 19 nt, Homo sapiens
  misc_RNA (1)...(19): siRNA sense strand
gggaugagauguuuaugac

SEQ ID NO: 1570769 - RNA, 19 nt, Homo sapiens
  misc_RNA (1)...(19): siRNA sense strand
ggcaauaaauacuaaagag

SEQ ID NO: 1570770 - RNA, 19 nt, Homo sapiens
  misc_RNA (1)...(19): siRNA sense strand
caagaagauucaguuacaa

SEQ ID NO: 1570771 - RNA, 19 nt, Homo sapiens
  misc_RNA (1)...(19): siRNA sense strand
caucaagaagauucaguua

SEQ ID NO: 1570772 - RNA, 19 nt, Homo sapiens
  misc_RNA (1)...(19): siRNA sense strand
caccacgacuggagauauu

SEQ ID NO: 1570773 - RNA, 19 nt, Homo sapiens
  misc_RNA (1)...(19): siRNA sense strand
cggcaucacuucuaucaca

SEQ ID NO: 1570774 - RNA, 19 nt, Homo sapiens
  misc_RNA (1)...(19): siRNA sense strand
agaagaaucgcacauuuau

SEQ ID NO: 1570775 - RNA, 19 nt, Homo sapiens
  misc_RNA (1)...(19): siRNA sense strand
ggacacaguggcaacauca

SEQ ID NO: 1570776 - RNA, 19 nt, Homo sapiens
  misc_RNA (1)...(19): siRNA sense strand
ucaucaguguccugcauua

SEQ ID NO: 1570777 - RNA, 19 nt, Homo sapiens
  misc_RNA (1)...(19): siRNA sense strand
gcauaugauuuauccucuu

SEQ ID NO: 1570778 - RNA, 19 nt, Homo sapiens
  misc_RNA (1)...(19): siRNA sense strand
cgaaggacaaauucaguuu

SEQ ID NO: 1570779 - RNA, 19 nt, Homo sapiens
  misc_RNA (1)...(19): siRNA sense strand
accaggagcauaugauuua

SEQ ID NO: 1570780 - RNA, 19 nt, Homo sapiens
  misc_RNA (1)...(19): siRNA sense strand
gaacagacagaaagauugc

SEQ ID NO: 1570781 - RNA, 19 nt, Homo sapiens
  misc_RNA (1)...(19): siRNA sense strand
gagcauagccaagagagau

SEQ ID NO: 1570782 - RNA, 19 nt, Homo sapiens
  misc_RNA (1)...(19): siRNA sense strand
gaccaggagcauaugauuu

SEQ ID NO: 1570783 - RNA, 19 nt, Homo sapiens
  misc_RNA (1)...(19): siRNA sense strand
guuuaugacugcuggaaau

SEQ ID NO: 1570784 - RNA, 19 nt, Homo sapiens
  misc_RNA (1)...(19): siRNA sense strand
gaacagaagaaucgcacau

SEQ ID NO: 1570785 - RNA, 19 nt, Homo sapiens
  misc_RNA (1)...(19): siRNA sense strand
ggacugcuggucuucugua

SEQ ID NO: 1570786 - RNA, 19 nt, Homo sapiens
  misc_RNA (1)...(19): siRNA sense strand
cagagcaccuggacaugug

SEQ ID NO: 1570787 - RNA, 19 nt, Homo sapiens
  misc_RNA (1)...(19): siRNA sense strand
aguguuaccuuggcagaua

SEQ ID NO: 1570788 - RNA, 19 nt, Homo sapiens
  misc_RNA (1)...(19): siRNA sense strand
gcaccgaugggacuuguau

SEQ ID NO: 1570789 - RNA, 19 nt, Homo sapiens
  misc_RNA (1)...(19): siRNA sense strand
acaaacccaucaagaagau

SEQ ID NO: 1570790 - RNA, 19 nt, Homo sapiens
  misc_RNA (1)...(19): siRNA sense strand
gagacaggccgacugaugu

SEQ ID NO: 1570791 - RNA, 19 nt, Homo sapiens
  misc_RNA (1)...(19): siRNA sense strand
gggauuauaagaacagaga

SEQ ID NO: 1570792 - RNA, 19 nt, Homo sapiens
  misc_RNA (1)...(19): siRNA sense strand
gacaguaaucagagaauug

SEQ ID NO: 1570793 - RNA, 19 nt, Homo sapiens
  misc_RNA (1)...(19): siRNA sense strand
gcuaucacccugaggaguu

SEQ ID NO: 1570794 - RNA, 19 nt, Homo sapiens
  misc_RNA (1)...(19): siRNA sense strand
ggaggaggcccugaaggaa

SEQ ID NO: 1570795 - RNA, 19 nt, Homo sapiens
  misc_RNA (1)...(19): siRNA sense strand
uggcacugcugagcuauuu

SEQ ID NO: 1570796 - RNA, 19 nt, Homo sapiens
  misc_RNA (1)...(19): siRNA sense strand
uaucacacuucgaggagaa

SEQ ID NO: 1570797 - RNA, 19 nt, Homo sapiens
  misc_RNA (1)...(19): siRNA sense strand
aauugaagcucuggccuuu

SEQ ID NO: 1570798 - RNA, 19 nt, Homo sapiens
  misc_RNA (1)...(19): siRNA sense strand
ggagaaggacaccaguuuc

SEQ ID NO: 1570799 - RNA, 19 nt, Homo sapiens
  misc_RNA (1)...(19): siRNA sense strand
ccaaacaggacaguugaaa

SEQ ID NO: 1570800 - RNA, 19 nt, Homo sapiens
  misc_RNA (1)...(19): siRNA sense strand
cagcuucacggauuucaaa

SEQ ID NO: 1570801 - RNA, 19 nt, Homo sapiens
  misc_RNA (1)...(19): siRNA sense strand
gaucaucaccagcggaaca

SEQ ID NO: 1570802 - RNA, 19 nt, Homo sapiens
  misc_RNA (1)...(19): siRNA sense strand
gaaggaacacaagucauca

SEQ ID NO: 1570803 - RNA, 19 nt, Homo sapiens
  misc_RNA (1)...(19): siRNA sense strand
cagcauggaacgacgguaa

SEQ ID NO: 1570804 - RNA, 19 nt, Homo sapiens
  misc_RNA (1)...(19): siRNA sense strand
gagccggacugcuggucuu

SEQ ID NO: 1570805 - RNA, 19 nt, Homo sapiens
  misc_RNA (1)...(19): siRNA sense strand
ucaaggauauugucuuucc

SEQ ID NO: 1570806 - RNA, 19 nt, Homo sapiens
  misc_RNA (1)...(19): siRNA sense strand
cuacaaacccaucaagaag

SEQ ID NO: 1570807 - RNA, 19 nt, Homo sapiens
  misc_RNA (1)...(19): siRNA sense strand
cgauaaauggcauggauau

SEQ ID NO: 1570808 - RNA, 19 nt, Homo sapiens
  misc_RNA (1)...(19): siRNA sense strand
ugaaggaacacaagucauc

SEQ ID NO: 1570809 - RNA, 19 nt, Homo sapiens
  misc_RNA (1)...(19): siRNA sense strand
ccagagacaggccgacuga

SEQ ID NO: 1570810 - RNA, 19 nt, Homo sapiens
  misc_RNA (1)...(19): siRNA sense strand
caaggcggcaucacuucua

SEQ ID NO: 1570811 - RNA, 19 nt, Homo sapiens
  misc_RNA (1)...(19): siRNA sense strand
gugccgggaugagauguuu

SEQ ID NO: 1570812 - RNA, 19 nt, Homo sapiens
  misc_RNA (1)...(19): siRNA sense strand
gcauaaguccaggaaauca

SEQ ID NO: 1570813 - RNA, 19 nt, Homo sapiens
  misc_RNA (1)...(19): siRNA sense strand
ggaacaacgaggagugugu

SEQ ID NO: 1570814 - RNA, 19 nt, Homo sapiens
  misc_RNA (1)...(19): siRNA sense strand
gcgaaggacaaauucaguu

SEQ ID NO: 1570815 - RNA, 19 nt, Homo sapiens
  misc_RNA (1)...(19): siRNA sense strand
gcaccacgacuggagauau

SEQ ID NO: 1570816 - RNA, 19 nt, Homo sapiens
  misc_RNA (1)...(19): siRNA sense strand
gaacagagagcugcuugcu

SEQ ID NO: 1570817 - RNA, 19 nt, Homo sapiens
  misc_RNA (1)...(19): siRNA sense strand
gugaggguauggcagauag

SEQ ID NO: 1570818 - RNA, 19 nt, Homo sapiens
  misc_RNA (1)...(19): siRNA sense strand
gaagaaucgcacauuuauc

SEQ ID NO: 1570819 - RNA, 19 nt, Homo sapiens
  misc_RNA (1)...(19): siRNA sense strand
guacuugguaucacuagga

SEQ ID NO: 1570820 - RNA, 19 nt, Homo sapiens
  misc_RNA (1)...(19): siRNA sense strand
gcucggcugucccuucaca

SEQ ID NO: 1570821 - RNA, 19 nt, Homo sapiens
  misc_RNA (1)...(19): siRNA sense strand
gcaaugccaccaaugugau

SEQ ID NO: 1570822 - RNA, 19 nt, Homo sapiens
  misc_RNA (1)...(19): siRNA sense strand
gucgauaaauggcauggau

SEQ ID NO: 1570823 - RNA, 19 nt, Homo sapiens
  misc_RNA (1)...(19): siRNA sense strand
cggaacagacagaaagauu

SEQ ID NO: 1570824 - RNA, 19 nt, Homo sapiens
  misc_RNA (1)...(19): siRNA sense strand
ccaccaaugugaucuucuc

SEQ ID NO: 1570825 - RNA, 19 nt, Homo sapiens
  misc_RNA (1)...(19): siRNA sense strand
cgacuggagauauucuaaa

SEQ ID NO: 1570826 - RNA, 19 nt, Homo sapiens
  misc_RNA (1)...(19): siRNA sense strand
ccugaggaguuccagauca

SEQ ID NO: 1570827 - RNA, 19 nt, Homo sapiens
  misc_RNA (1)...(19): siRNA sense strand
gacugcuggucuucuguaa

SEQ ID NO: 1570828 - RNA, 19 nt, Homo sapiens
  misc_RNA (1)...(19): siRNA sense strand
gacuggagauauucuaaaa

SEQ ID NO: 1570829 - RNA, 19 nt, Homo sapiens
  misc_RNA (1)...(19): siRNA sense strand
ggccugcgaaggacaaauu

SEQ ID NO: 1570830 - RNA, 19 nt, Homo sapiens
  misc_RNA (1)...(19): siRNA sense strand
caucacacgcauccgcaua

SEQ ID NO: 1570831 - RNA, 19 nt, Homo sapiens
  misc_RNA (1)...(19): siRNA sense strand
caaccugugccaagaagga

SEQ ID NO: 1570832 - RNA, 19 nt, Homo sapiens
  misc_RNA (1)...(19): siRNA sense strand
ucaaagagacgcucauagc

SEQ ID NO: 1570833 - RNA, 19 nt, Homo sapiens
  misc_RNA (1)...(19): siRNA sense strand
ccaggagcauaugauuuau

SEQ ID NO: 1570834 - RNA, 19 nt, Homo sapiens
  misc_RNA (1)...(19): siRNA sense strand
uaaugagggugaagugacu

SEQ ID NO: 1570835 - RNA, 19 nt, Homo sapiens
  misc_RNA (1)...(19): siRNA sense strand
uaaauggcauggauaucac

SEQ ID NO: 1570836 - RNA, 19 nt, Homo sapiens
  misc_RNA (1)...(19): siRNA sense strand
auaaauggcauggauauca

SEQ ID NO: 1570837 - RNA, 19 nt, Homo sapiens
  misc_RNA (1)...(19): siRNA sense strand
cagacagaaagauugcuua

SEQ ID NO: 1570838 - RNA, 19 nt, Homo sapiens
  misc_RNA (1)...(19): siRNA sense strand
agacaggccgacugaugua

SEQ ID NO: 1570839 - RNA, 19 nt, Homo sapiens
  misc_RNA (1)...(19): siRNA sense strand
caucacuucuaucacacuu

SEQ ID NO: 1570840 - RNA, 19 nt, Homo sapiens
  misc_RNA (1)...(19): siRNA sense strand
uuacaaggcggcaucacuu

SEQ ID NO: 1570841 - RNA, 19 nt, Homo sapiens
  misc_RNA (1)...(19): siRNA sense strand
uggaguggaugaugaugau

SEQ ID NO: 1570842 - RNA, 19 nt, Homo sapiens
  misc_RNA (1)...(19): siRNA sense strand
ggacauagccaccuuccua

SEQ ID NO: 1570843 - RNA, 19 nt, Homo sapiens
  misc_RNA (1)...(19): siRNA sense strand
gaacuggcccugcguguug

SEQ ID NO: 1570844 - RNA, 19 nt, Homo sapiens
  misc_RNA (1)...(19): siRNA sense strand
gcaaggcugugcuggguau

SEQ ID NO: 1570845 - RNA, 19 nt, Homo sapiens
  misc_RNA (1)...(19): siRNA sense strand
gccgauagaugugcuguuu

SEQ ID NO: 1570846 - RNA, 19 nt, Homo sapiens
  misc_RNA (1)...(19): siRNA sense strand
ggccauguccugaauguga

SEQ ID NO: 1570847 - RNA, 19 nt, Homo sapiens
  misc_RNA (1)...(19): siRNA sense strand
gagaagcagacacucacua

SEQ ID NO: 1570848 - RNA, 19 nt, Homo sapiens
  misc_RNA (1)...(19): siRNA sense strand
gagccaccauccaggaguu

SEQ ID NO: 1570849 - RNA, 19 nt, Homo sapiens
  misc_RNA (1)...(19): siRNA sense strand
ggacacccaccucuuguuc

SEQ ID NO: 1570850 - RNA, 19 nt, Homo sapiens
  misc_RNA (1)...(19): siRNA sense strand
ugacucacauaccuucuuc

SEQ ID NO: 1570851 - RNA, 19 nt, Homo sapiens
  misc_RNA (1)...(19): siRNA sense strand
acauagccguguccaggua

SEQ ID NO: 1570852 - RNA, 19 nt, Homo sapiens
  misc_RNA (1)...(19): siRNA sense strand
ggagcagaguugagaaggu

SEQ ID NO: 1570853 - RNA, 19 nt, Homo sapiens
  misc_RNA (1)...(19): siRNA sense strand
gaggagaagcagacacuca

SEQ ID NO: 1570854 - RNA, 19 nt, Homo sapiens
  misc_RNA (1)...(19): siRNA sense strand
gaagcagacacucacuaga

SEQ ID NO: 1570855 - RNA, 19 nt, Homo sapiens
  misc_RNA (1)...(19): siRNA sense strand
caugcaaggugauguaaaa

SEQ ID NO: 1570856 - RNA, 19 nt, Homo sapiens
  misc_RNA (1)...(19): siRNA sense strand
caagauugccugcauaucc

SEQ ID NO: 1570857 - RNA, 19 nt, Homo sapiens
  misc_RNA (1)...(19): siRNA sense strand
gggaugacagguaccaaug

SEQ ID NO: 1570858 - RNA, 19 nt, Homo sapiens
  misc_RNA (1)...(19): siRNA sense strand
ggaacuggcccugcguguu

SEQ ID NO: 1570859 - RNA, 19 nt, Homo sapiens
  misc_RNA (1)...(19): siRNA sense strand
cacaaugacucacauaccu

SEQ ID NO: 1570860 - RNA, 19 nt, Homo sapiens
  misc_RNA (1)...(19): siRNA sense strand
cauggacacccaccucuug

SEQ ID NO: 1570861 - RNA, 19 nt, Homo sapiens
  misc_RNA (1)...(19): siRNA sense strand
ggaugacagguaccaaugu

SEQ ID NO: 1570862 - RNA, 19 nt, Homo sapiens
  misc_RNA (1)...(19): siRNA sense strand
gcugagggccuggacauag

SEQ ID NO: 1570863 - RNA, 19 nt, Homo sapiens
  misc_RNA (1)...(19): siRNA sense strand
aaaguauggcccaguucua

SEQ ID NO: 1570864 - RNA, 19 nt, Homo sapiens
  misc_RNA (1)...(19): siRNA sense strand
cacguucugugaagacugu

SEQ ID NO: 1570865 - RNA, 19 nt, Homo sapiens
  misc_RNA (1)...(19): siRNA sense strand
gccauguccugaaugugau

SEQ ID NO: 1570866 - RNA, 19 nt, Homo sapiens
  misc_RNA (1)...(19): siRNA sense strand
guggccauguccugaaugu

SEQ ID NO: 1570867 - RNA, 19 nt, Homo sapiens
  misc_RNA (1)...(19): siRNA sense strand
aagaugcacagcuccauga

SEQ ID NO: 1570868 - RNA, 19 nt, Homo sapiens
  misc_RNA (1)...(19): siRNA sense strand
gcccugccacguucuguga

SEQ ID NO: 1570869 - RNA, 19 nt, Homo sapiens
  misc_RNA (1)...(19): siRNA sense strand
ccaccuuccuagcccacaa

SEQ ID NO: 1570870 - RNA, 19 nt, Homo sapiens
  misc_RNA (1)...(19): siRNA sense strand
gcccacaaugacucacaua

SEQ ID NO: 1570871 - RNA, 19 nt, Homo sapiens
  misc_RNA (1)...(19): siRNA sense strand
agaagcagacacucacuag

SEQ ID NO: 1570872 - RNA, 19 nt, Homo sapiens
  misc_RNA (1)...(19): siRNA sense strand
gcacaaaucuuccucuucu

SEQ ID NO: 1570873 - RNA, 19 nt, Homo sapiens
  misc_RNA (1)...(19): siRNA sense strand
cuaaauacuuccuaacuuc

SEQ ID NO: 1570874 - RNA, 19 nt, Homo sapiens
  misc_RNA (1)...(19): siRNA sense strand
ccaaagagcaauuucaaga

SEQ ID NO: 1570875 - RNA, 19 nt, Homo sapiens
  misc_RNA (1)...(19): siRNA sense strand
gaaccuugccuugguagua

SEQ ID NO: 1570876 - RNA, 19 nt, Homo sapiens
  misc_RNA (1)...(19): siRNA sense strand
gaucuggcacugggaauua

SEQ ID NO: 1570877 - RNA, 19 nt, Homo sapiens
  misc_RNA (1)...(19): siRNA sense strand
cgagaaccuugccuuggua

SEQ ID NO: 1570878 - RNA, 19 nt, Homo sapiens
  misc_RNA (1)...(19): siRNA sense strand
ggaaaccaaagagcaauuu

SEQ ID NO: 1570879 - RNA, 19 nt, Homo sapiens
  misc_RNA (1)...(19): siRNA sense strand
caaagagcaauuucaagaa

SEQ ID NO: 1570880 - RNA, 19 nt, Homo sapiens
  misc_RNA (1)...(19): siRNA sense strand
aaagagcaauuucaagaag

SEQ ID NO: 1570881 - RNA, 19 nt, Homo sapiens
  misc_RNA (1)...(19): siRNA sense strand
aguauaaccugcaaucugu

SEQ ID NO: 1570882 - RNA, 19 nt, Homo sapiens
  misc_RNA (1)...(19): siRNA sense strand
guacccagcgcccucuaua

SEQ ID NO: 1570883 - RNA, 19 nt, Homo sapiens
  misc_RNA (1)...(19): siRNA sense strand
gagaagaccauuuuccuaa

SEQ ID NO: 1570884 - RNA, 19 nt, Homo sapiens
  misc_RNA (1)...(19): siRNA sense strand
acaaaucuuccucuucuaa

SEQ ID NO: 1570885 - RNA, 19 nt, Homo sapiens
  misc_RNA (1)...(19): siRNA sense strand
caaaucuuccucuucuaaa

SEQ ID NO: 1570886 - RNA, 19 nt, Homo sapiens
  misc_RNA (1)...(19): siRNA sense strand
uauauggguuucacucugu

SEQ ID NO: 1570887 - RNA, 19 nt, Homo sapiens
  misc_RNA (1)...(19): siRNA sense strand
cacaagaaagcaaccgaua

SEQ ID NO: 1570888 - RNA, 19 nt, Homo sapiens
  misc_RNA (1)...(19): siRNA sense strand
gugaugagcagagugaauu

SEQ ID NO: 1570889 - RNA, 19 nt, Homo sapiens
  misc_RNA (1)...(19): siRNA sense strand
ccagaugcccagcuccuuu

SEQ ID NO: 1570890 - RNA, 19 nt, Homo sapiens
  misc_RNA (1)...(19): siRNA sense strand
agagugaauucguguguca

SEQ ID NO: 1570891 - RNA, 19 nt, Homo sapiens
  misc_RNA (1)...(19): siRNA sense strand
ggaccuggaagcacaaauc

SEQ ID NO: 1570892 - RNA, 19 nt, Homo sapiens
  misc_RNA (1)...(19): siRNA sense strand
ucaggcugcucugggcuua

SEQ ID NO: 1570893 - RNA, 19 nt, Homo sapiens
  misc_RNA (1)...(19): siRNA sense strand
gcaauuucaagaagcaguu

SEQ ID NO: 1570894 - RNA, 19 nt, Homo sapiens
  misc_RNA (1)...(19): siRNA sense strand
gcagagugaauucgugugu

SEQ ID NO: 1570895 - RNA, 19 nt, Homo sapiens
  misc_RNA (1)...(19): siRNA sense strand
ccgagaaccuugccuuggu

SEQ ID NO: 1570896 - RNA, 19 nt, Homo sapiens
  misc_RNA (1)...(19): siRNA sense strand
caccagaagacacaagaaa

SEQ ID NO: 1570897 - RNA, 19 nt, Homo sapiens
  misc_RNA (1)...(19): siRNA sense strand
cagugggccuggagucuau

SEQ ID NO: 1570898 - RNA, 19 nt, Homo sapiens
  misc_RNA (1)...(19): siRNA sense strand
cgguuucugucucuuguuu

SEQ ID NO: 1570899 - RNA, 19 nt, Homo sapiens
  misc_RNA (1)...(19): siRNA sense strand
gcccagcuccuuugcaugu

SEQ ID NO: 1570900 - RNA, 19 nt, Homo sapiens
  misc_RNA (1)...(19): siRNA sense strand
aagcacaaaucuuccucuu

SEQ ID NO: 1570901 - RNA, 19 nt, Homo sapiens
  misc_RNA (1)...(19): siRNA sense strand
gagagcaccagaagacaca

SEQ ID NO: 1570902 - RNA, 19 nt, Homo sapiens
  misc_RNA (1)...(19): siRNA sense strand
gaagaccauuuuccuaaag

SEQ ID NO: 1570903 - RNA, 19 nt, Homo sapiens
  misc_RNA (1)...(19): siRNA sense strand
ccaguuggacccagagaug

SEQ ID NO: 1570904 - RNA, 19 nt, Homo sapiens
  misc_RNA (1)...(19): siRNA sense strand
caagaaagcaaccgauagc

SEQ ID NO: 1570905 - RNA, 19 nt, Homo sapiens
  misc_RNA (1)...(19): siRNA sense strand
cacaaaucuuccucuucua

SEQ ID NO: 1570906 - RNA, 19 nt, Homo sapiens
  misc_RNA (1)...(19): siRNA sense strand
gguaguauaaccugcaauc

SEQ ID NO: 1570907 - RNA, 19 nt, Homo sapiens
  misc_RNA (1)...(19): siRNA sense strand
gguggaaaccaaagagcaa

SEQ ID NO: 1570908 - RNA, 19 nt, Homo sapiens
  misc_RNA (1)...(19): siRNA sense strand
gcaccagaagacacaagaa

SEQ ID NO: 1570909 - RNA, 19 nt, Homo sapiens
  misc_RNA (1)...(19): siRNA sense strand
ucagagagcaccagaagac

SEQ ID NO: 1570910 - RNA, 19 nt, Homo sapiens
  misc_RNA (1)...(19): siRNA sense strand
gaugguggaggaccuggaa

SEQ ID NO: 1570911 - RNA, 19 nt, Homo sapiens
  misc_RNA (1)...(19): siRNA sense strand
aaaccaaagagcaauuuca

SEQ ID NO: 1570912 - RNA, 19 nt, Homo sapiens
  misc_RNA (1)...(19): siRNA sense strand
ggucuuccaggucaucuug

SEQ ID NO: 1570913 - RNA, 19 nt, Homo sapiens
  misc_RNA (1)...(19): siRNA sense strand
gacgggagggcaacacaga

SEQ ID NO: 1570914 - RNA, 19 nt, Homo sapiens
  misc_RNA (1)...(19): siRNA sense strand
gcaugucgccgagaaccuu

SEQ ID NO: 1570915 - RNA, 19 nt, Homo sapiens
  misc_RNA (1)...(19): siRNA sense strand
aaccuugccuugguaguau

SEQ ID NO: 1570916 - RNA, 19 nt, Homo sapiens
  misc_RNA (1)...(19): siRNA sense strand
aaccaaagagcaauuucaa

SEQ ID NO: 1570917 - RNA, 19 nt, Homo sapiens
  misc_RNA (1)...(19): siRNA sense strand
acaagaaagcaaccgauag

SEQ ID NO: 1570918 - RNA, 19 nt, Homo sapiens
  misc_RNA (1)...(19): siRNA sense strand
agagcaauuucaagaagca

SEQ ID NO: 1570919 - RNA, 19 nt, Homo sapiens
  misc_RNA (1)...(19): siRNA sense strand
cagaugcccagcuccuuug

SEQ ID NO: 1570920 - RNA, 19 nt, Homo sapiens
  misc_RNA (1)...(19): siRNA sense strand
uaguauaaccugcaaucug

SEQ ID NO: 1570921 - RNA, 19 nt, Homo sapiens
  misc_RNA (1)...(19): siRNA sense strand
cacugggaauuaucaggaa

SEQ ID NO: 1570922 - RNA, 19 nt, Homo sapiens
  misc_RNA (1)...(19): siRNA sense strand
ccagaagacacaagaaagc

SEQ ID NO: 1570923 - RNA, 19 nt, Homo sapiens
  misc_RNA (1)...(19): siRNA sense strand
aauacuuccuaacuucaga

SEQ ID NO: 1570924 - RNA, 19 nt, Homo sapiens
  misc_RNA (1)...(19): siRNA sense strand
agaagaccauuuuccuaaa

SEQ ID NO: 1570925 - RNA, 19 nt, Homo sapiens
  misc_RNA (1)...(19): siRNA sense strand
guuucugucucuuguuuac

SEQ ID NO: 1570926 - RNA, 19 nt, Homo sapiens
  misc_RNA (1)...(19): siRNA sense strand
ggugaugagcagagugaau

SEQ ID NO: 1570927 - RNA, 19 nt, Homo sapiens
  misc_RNA (1)...(19): siRNA sense strand
gauccaagcugccuacauu

SEQ ID NO: 1570928 - RNA, 19 nt, Homo sapiens
  misc_RNA (1)...(19): siRNA sense strand
gauaaugacuuccucuuug

SEQ ID NO: 1570929 - RNA, 19 nt, Homo sapiens
  misc_RNA (1)...(19): siRNA sense strand
gaagaugguucuaucaaug

SEQ ID NO: 1570930 - RNA, 19 nt, Homo sapiens
  misc_RNA (1)...(19): siRNA sense strand
gaagcucaccaucauauuu

SEQ ID NO: 1570931 - RNA, 19 nt, Homo sapiens
  misc_RNA (1)...(19): siRNA sense strand
ggauaaugacuuccucuuu

SEQ ID NO: 1570932 - RNA, 19 nt, Homo sapiens
  misc_RNA (1)...(19): siRNA sense strand
ccucuuagcuccacuccuu

SEQ ID NO: 1570933 - RNA, 19 nt, Homo sapiens
  misc_RNA (1)...(19): siRNA sense strand
ggagcuauaaccauugaua

SEQ ID NO: 1570934 - RNA, 19 nt, Homo sapiens
  misc_RNA (1)...(19): siRNA sense strand
gcacaacuauaaucauucg

SEQ ID NO: 1570935 - RNA, 19 nt, Homo sapiens
  misc_RNA (1)...(19): siRNA sense strand
ggaaugcauugaucagaag

SEQ ID NO: 1570936 - RNA, 19 nt, Homo sapiens
  misc_RNA (1)...(19): siRNA sense strand
uggcacaacuauaaucauu

SEQ ID NO: 1570937 - RNA, 19 nt, Homo sapiens
  misc_RNA (1)...(19): siRNA sense strand
uuaagaacaugcaggaaug

SEQ ID NO: 1570938 - RNA, 19 nt, Homo sapiens
  misc_RNA (1)...(19): siRNA sense strand
gcauugaucagaaggugua

SEQ ID NO: 1570939 - RNA, 19 nt, Homo sapiens
  misc_RNA (1)...(19): siRNA sense strand
ugaagaugguucuaucaau

SEQ ID NO: 1570940 - RNA, 19 nt, Homo sapiens
  misc_RNA (1)...(19): siRNA sense strand
uacauuggcacaacuauaa

SEQ ID NO: 1570941 - RNA, 19 nt, Homo sapiens
  misc_RNA (1)...(19): siRNA sense strand
aagcucaccaucauauuua

SEQ ID NO: 1570942 - RNA, 19 nt, Homo sapiens
  misc_RNA (1)...(19): siRNA sense strand
ggccucuacuggauaauga

SEQ ID NO: 1570943 - RNA, 19 nt, Homo sapiens
  misc_RNA (1)...(19): siRNA sense strand
ccagacggcugugcaagga

SEQ ID NO: 1570944 - RNA, 19 nt, Homo sapiens
  misc_RNA (1)...(19): siRNA sense strand
ggauccaguuugucgauuc

SEQ ID NO: 1570945 - RNA, 19 nt, Homo sapiens
  misc_RNA (1)...(19): siRNA sense strand
gauccaguuugucgauuca

SEQ ID NO: 1570946 - RNA, 19 nt, Homo sapiens
  misc_RNA (1)...(19): siRNA sense strand
caccaucacuuucacacau

SEQ ID NO: 1570947 - RNA, 19 nt, Homo sapiens
  misc_RNA (1)...(19): siRNA sense strand
uaaucuuccuguagccuuu

SEQ ID NO: 1570948 - RNA, 19 nt, Homo sapiens
  misc_RNA (1)...(19): siRNA sense strand
aggaaugcauugaucagaa

SEQ ID NO: 1570949 - RNA, 19 nt, Homo sapiens
  misc_RNA (1)...(19): siRNA sense strand
cagcuuccaccaucacuuu

SEQ ID NO: 1570950 - RNA, 19 nt, Homo sapiens
  misc_RNA (1)...(19): siRNA sense strand
gguggauaaucuuccugua

SEQ ID NO: 1570951 - RNA, 19 nt, Homo sapiens
  misc_RNA (1)...(19): siRNA sense strand
ggacccuugugacuaugaa

SEQ ID NO: 1570952 - RNA, 19 nt, Homo sapiens
  misc_RNA (1)...(19): siRNA sense strand
auaaugacuuccucuuugu

SEQ ID NO: 1570953 - RNA, 19 nt, Homo sapiens
  misc_RNA (1)...(19): siRNA sense strand
aggcugagguggauaaucu

SEQ ID NO: 1570954 - RNA, 19 nt, Homo sapiens
  misc_RNA (1)...(19): siRNA sense strand
ggaagcucaccaucauauu

SEQ ID NO: 1570955 - RNA, 19 nt, Homo sapiens
  misc_RNA (1)...(19): siRNA sense strand
cuacauuggcacaacuaua

SEQ ID NO: 1570956 - RNA, 19 nt, Homo sapiens
  misc_RNA (1)...(19): siRNA sense strand
gagccuuccugccagacuu

SEQ ID NO: 1570957 - RNA, 19 nt, Homo sapiens
  misc_RNA (1)...(19): siRNA sense strand
gaccugcagcucuguguug

SEQ ID NO: 1570958 - RNA, 19 nt, Homo sapiens
  misc_RNA (1)...(19): siRNA sense strand
cggaagcucaccaucauau

SEQ ID NO: 1570959 - RNA, 19 nt, Homo sapiens
  misc_RNA (1)...(19): siRNA sense strand
cacaugccguguccaagga

SEQ ID NO: 1570960 - RNA, 19 nt, Homo sapiens
  misc_RNA (1)...(19): siRNA sense strand
gcuauaaccauugauacug

SEQ ID NO: 1570961 - RNA, 19 nt, Homo sapiens
  misc_RNA (1)...(19): siRNA sense strand
gggauccaguuugucgauu

SEQ ID NO: 1570962 - RNA, 19 nt, Homo sapiens
  misc_RNA (1)...(19): siRNA sense strand
cccggacccuugugacuau

SEQ ID NO: 1570963 - RNA, 19 nt, Homo sapiens
  misc_RNA (1)...(19): siRNA sense strand
ccuguagccuuugaagaug

SEQ ID NO: 1570964 - RNA, 19 nt, Homo sapiens
  misc_RNA (1)...(19): siRNA sense strand
cagcgacucucucgaucag

SEQ ID NO: 1570965 - RNA, 19 nt, Homo sapiens
  misc_RNA (1)...(19): siRNA sense strand
ucuacuggauaaugacuuc

SEQ ID NO: 1570966 - RNA, 19 nt, Homo sapiens
  misc_RNA (1)...(19): siRNA sense strand
gagcuauaaccauugauac

SEQ ID NO: 1570967 - RNA, 19 nt, Homo sapiens
  misc_RNA (1)...(19): siRNA sense strand
cccggaagcucaccaucau

SEQ ID NO: 1570968 - RNA, 19 nt, Homo sapiens
  misc_RNA (1)...(19): siRNA sense strand
ugacuaugaaggccgguuu

SEQ ID NO: 1570969 - RNA, 19 nt, Homo sapiens
  misc_RNA (1)...(19): siRNA sense strand
cuuggccucuacuggauaa

SEQ ID NO: 1570970 - RNA, 19 nt, Homo sapiens
  misc_RNA (1)...(19): siRNA sense strand
uuucugggcucuuuguucu

SEQ ID NO: 1570971 - RNA, 19 nt, Homo sapiens
  misc_RNA (1)...(19): siRNA sense strand
guggauaaucuuccuguag

SEQ ID NO: 1570972 - RNA, 19 nt, Homo sapiens
  misc_RNA (1)...(19): siRNA sense strand
cgagguagcagaggaugug

SEQ ID NO: 1570973 - RNA, 19 nt, Homo sapiens
  misc_RNA (1)...(19): siRNA sense strand
uauaaucauucggcagaca

SEQ ID NO: 1570974 - RNA, 19 nt, Homo sapiens
  misc_RNA (1)...(19): siRNA sense strand
ggaccugcagcucuguguu

SEQ ID NO: 1570975 - RNA, 19 nt, Homo sapiens
  misc_RNA (1)...(19): siRNA sense strand
uuuaagaacaugcaggaau

SEQ ID NO: 1570976 - RNA, 19 nt, Homo sapiens
  misc_RNA (1)...(19): siRNA sense strand
guucuguggcuuugcauuc

SEQ ID NO: 1570977 - RNA, 19 nt, Homo sapiens
  misc_RNA (1)...(19): siRNA sense strand
ccauuccugugucuuugau

SEQ ID NO: 1570978 - RNA, 19 nt, Homo sapiens
  misc_RNA (1)...(19): siRNA sense strand
ggggagcuauaaccauuga

SEQ ID NO: 1570979 - RNA, 19 nt, Homo sapiens
  misc_RNA (1)...(19): siRNA sense strand
cuuugaagaugguucuauc

SEQ ID NO: 1570980 - RNA, 19 nt, Homo sapiens
  misc_RNA (1)...(19): siRNA sense strand
gcaggaaugcauugaucag

SEQ ID NO: 1570981 - RNA, 19 nt, Homo sapiens
  misc_RNA (1)...(19): siRNA sense strand
ggaaagacagggaagauug

SEQ ID NO: 1570982 - RNA, 19 nt, Homo sapiens
  misc_RNA (1)...(19): siRNA sense strand
gaaaggagaagagguggua

SEQ ID NO: 1570983 - RNA, 19 nt, Homo sapiens
  misc_RNA (1)...(19): siRNA sense strand
gaagaggccagggcaauuu

SEQ ID NO: 1570984 - RNA, 19 nt, Homo sapiens
  misc_RNA (1)...(19): siRNA sense strand
cagaaagccuggaacaugu

SEQ ID NO: 1570985 - RNA, 19 nt, Homo sapiens
  misc_RNA (1)...(19): siRNA sense strand
gaagagaggcugagaagcu

SEQ ID NO: 1570986 - RNA, 19 nt, Homo sapiens
  misc_RNA (1)...(19): siRNA sense strand
gagaaggccugugaaagca

SEQ ID NO: 1570987 - RNA, 19 nt, Homo sapiens
  misc_RNA (1)...(19): siRNA sense strand
ccagagaaacugaggauga

SEQ ID NO: 1570988 - RNA, 19 nt, Homo sapiens
  misc_RNA (1)...(19): siRNA sense strand
ggagaugacagaagacaug

SEQ ID NO: 1570989 - RNA, 19 nt, Homo sapiens
  misc_RNA (1)...(19): siRNA sense strand
ggaagaagaggcuguugga

SEQ ID NO: 1570990 - RNA, 19 nt, Homo sapiens
  misc_RNA (1)...(19): siRNA sense strand
ugacagaacauccagaaga

SEQ ID NO: 1570991 - RNA, 19 nt, Homo sapiens
  misc_RNA (1)...(19): siRNA sense strand
ccgagagucugaacuauca

SEQ ID NO: 1570992 - RNA, 19 nt, Homo sapiens
  misc_RNA (1)...(19): siRNA sense strand
gaagugaacagagaagaga

SEQ ID NO: 1570993 - RNA, 19 nt, Homo sapiens
  misc_RNA (1)...(19): siRNA sense strand
gaaagacagggaagauugu

SEQ ID NO: 1570994 - RNA, 19 nt, Homo sapiens
  misc_RNA (1)...(19): siRNA sense strand
caaggagacugagccagaa

SEQ ID NO: 1570995 - RNA, 19 nt, Homo sapiens
  misc_RNA (1)...(19): siRNA sense strand
gacagaacauccagaagag

SEQ ID NO: 1570996 - RNA, 19 nt, Homo sapiens
  misc_RNA (1)...(19): siRNA sense strand
ggagaaggccugugaaagc

SEQ ID NO: 1570997 - RNA, 19 nt, Homo sapiens
  misc_RNA (1)...(19): siRNA sense strand
gcaugcaggugggcaagaa

SEQ ID NO: 1570998 - RNA, 19 nt, Homo sapiens
  misc_RNA (1)...(19): siRNA sense strand
gagaagagaggcugagaag

SEQ ID NO: 1570999 - RNA, 19 nt, Homo sapiens
  misc_RNA (1)...(19): siRNA sense strand
gcacugaaagaacagaaga

SEQ ID NO: 1571000 - RNA, 19 nt, Homo sapiens
  misc_RNA (1)...(19): siRNA sense strand
ggaagaggccagggcaauu

SEQ ID NO: 1571001 - RNA, 19 nt, Homo sapiens
  misc_RNA (1)...(19): siRNA sense strand
ggacauggagagaggaaau

SEQ ID NO: 1571002 - RNA, 19 nt, Homo sapiens
  misc_RNA (1)...(19): siRNA sense strand
ggacgcuguuggaagaaga

SEQ ID NO: 1571003 - RNA, 19 nt, Homo sapiens
  misc_RNA (1)...(19): siRNA sense strand
cagacagacucaauaugga

SEQ ID NO: 1571004 - RNA, 19 nt, Homo sapiens
  misc_RNA (1)...(19): siRNA sense strand
gccuggagaugacagaaga

SEQ ID NO: 1571005 - RNA, 19 nt, Homo sapiens
  misc_RNA (1)...(19): siRNA sense strand
ugacagaagacaugaagug

SEQ ID NO: 1571006 - RNA, 19 nt, Homo sapiens
  misc_RNA (1)...(19): siRNA sense strand
guaaggaggcugagaugag

SEQ ID NO: 1571007 - RNA, 19 nt, Homo sapiens
  misc_RNA (1)...(19): siRNA sense strand
ggcugggacucgaaagaaa

SEQ ID NO: 1571008 - RNA, 19 nt, Homo sapiens
  misc_RNA (1)...(19): siRNA sense strand
gaccgagagucugaacuau

SEQ ID NO: 1571009 - RNA, 19 nt, Homo sapiens
  misc_RNA (1)...(19): siRNA sense strand
gagagggccuggagaugac

SEQ ID NO: 1571010 - RNA, 19 nt, Homo sapiens
  misc_RNA (1)...(19): siRNA sense strand
gcaaggcugggacucgaaa

SEQ ID NO: 1571011 - RNA, 19 nt, Homo sapiens
  misc_RNA (1)...(19): siRNA sense strand
ucagacagacucaauaugg

SEQ ID NO: 1571012 - RNA, 19 nt, Homo sapiens
  misc_RNA (1)...(19): siRNA sense strand
ugagagggccuggagauga

SEQ ID NO: 1571013 - RNA, 19 nt, Homo sapiens
  misc_RNA (1)...(19): siRNA sense strand
ggagggcucagcagaggaa

SEQ ID NO: 1571014 - RNA, 19 nt, Homo sapiens
  misc_RNA (1)...(19): siRNA sense strand
ggcggaggcugacagaaca

SEQ ID NO: 1571015 - RNA, 19 nt, Homo sapiens
  misc_RNA (1)...(19): siRNA sense strand
gcaggaagugaacagagaa

SEQ ID NO: 1571016 - RNA, 19 nt, Homo sapiens
  misc_RNA (1)...(19): siRNA sense strand
ggaggaagccaggacaauc

SEQ ID NO: 1571017 - RNA, 19 nt, Homo sapiens
  misc_RNA (1)...(19): siRNA sense strand
gggaaagacagggaagauu

SEQ ID NO: 1571018 - RNA, 19 nt, Homo sapiens
  misc_RNA (1)...(19): siRNA sense strand
cagagaaacugaggaugag

SEQ ID NO: 1571019 - RNA, 19 nt, Homo sapiens
  misc_RNA (1)...(19): siRNA sense strand
gagaaaggacauggagaga

SEQ ID NO: 1571020 - RNA, 19 nt, Homo sapiens
  misc_RNA (1)...(19): siRNA sense strand
gagcuuugagggccaggua

SEQ ID NO: 1571021 - RNA, 19 nt, Homo sapiens
  misc_RNA (1)...(19): siRNA sense strand
gacucaauauggagcaguu

SEQ ID NO: 1571022 - RNA, 19 nt, Homo sapiens
  misc_RNA (1)...(19): siRNA sense strand
gaugacagaagacaugaag

SEQ ID NO: 1571023 - RNA, 19 nt, Homo sapiens
  misc_RNA (1)...(19): siRNA sense strand
aguggacgcuguuggaaga

SEQ ID NO: 1571024 - RNA, 19 nt, Homo sapiens
  misc_RNA (1)...(19): siRNA sense strand
gcugacagaacauccagaa

SEQ ID NO: 1571025 - RNA, 19 nt, Homo sapiens
  misc_RNA (1)...(19): siRNA sense strand
gacauggagagaggaaaua

SEQ ID NO: 1571026 - RNA, 19 nt, Homo sapiens
  misc_RNA (1)...(19): siRNA sense strand
gaggaagccaggacaaucu

SEQ ID NO: 1571027 - RNA, 19 nt, Homo sapiens
  misc_RNA (1)...(19): siRNA sense strand
ggagucccaugagcaggaa

SEQ ID NO: 1571028 - RNA, 19 nt, Homo sapiens
  misc_RNA (1)...(19): siRNA sense strand
ggaccuggagggccuuaga

SEQ ID NO: 1571029 - RNA, 19 nt, Homo sapiens
  misc_RNA (1)...(19): siRNA sense strand
gcacgagaaaggacaugga

SEQ ID NO: 1571030 - RNA, 19 nt, Homo sapiens
  misc_RNA (1)...(19): siRNA sense strand
ggaaugggguggccucaca

SEQ ID NO: 1571031 - RNA, 19 nt, Homo sapiens
  misc_RNA (1)...(19): siRNA sense strand
ggaagugaacagagaagag

SEQ ID NO: 1571032 - RNA, 19 nt, Homo sapiens
  misc_RNA (1)...(19): siRNA sense strand
gcagaggcagccaaguaga

SEQ ID NO: 1571033 - RNA, 19 nt, Homo sapiens
  misc_RNA (1)...(19): siRNA sense strand
gcaggugggcaagaauuug

SEQ ID NO: 1571034 - RNA, 19 nt, Homo sapiens
  misc_RNA (1)...(19): siRNA sense strand
gaagaggucagggcaagag

SEQ ID NO: 1571035 - RNA, 19 nt, Homo sapiens
  misc_RNA (1)...(19): siRNA sense strand
gagaugacagaagacauga

SEQ ID NO: 1571036 - RNA, 19 nt, Homo sapiens
  misc_RNA (1)...(19): siRNA sense strand
gaaagccuggaacauguca

SEQ ID NO: 1571037 - RNA, 19 nt, Homo sapiens
  misc_RNA (1)...(19): siRNA sense strand
acacacagcgucaccaaag

SEQ ID NO: 1571038 - RNA, 19 nt, Homo sapiens
  misc_RNA (1)...(19): siRNA sense strand
ggacaaccucaggcaaaga

SEQ ID NO: 1571039 - RNA, 19 nt, Homo sapiens
  misc_RNA (1)...(19): siRNA sense strand
ccugggcacugaaagaaca

SEQ ID NO: 1571040 - RNA, 19 nt, Homo sapiens
  misc_RNA (1)...(19): siRNA sense strand
gaagauuguagaggaggaa

SEQ ID NO: 1571041 - RNA, 19 nt, Homo sapiens
  misc_RNA (1)...(19): siRNA sense strand
agacagggaagauuguaga

SEQ ID NO: 1571042 - RNA, 19 nt, Homo sapiens
  misc_RNA (1)...(19): siRNA sense strand
gggaaaaccgcacgagaaa

SEQ ID NO: 1571043 - RNA, 19 nt, Homo sapiens
  misc_RNA (1)...(19): siRNA sense strand
ggugagcccuuuccccaaa

SEQ ID NO: 1571044 - RNA, 19 nt, Homo sapiens
  misc_RNA (1)...(19): siRNA sense strand
guggagaaggccugugaaa

SEQ ID NO: 1571045 - RNA, 19 nt, Homo sapiens
  misc_RNA (1)...(19): siRNA sense strand
gggaagaggccagggcaau

SEQ ID NO: 1571046 - RNA, 19 nt, Homo sapiens
  misc_RNA (1)...(19): siRNA sense strand
gaagaagaggcuguuggau

SEQ ID NO: 1571047 - RNA, 19 nt, Homo sapiens
  misc_RNA (1)...(19): siRNA sense strand
gguagaggccgaggaaucu

SEQ ID NO: 1571048 - RNA, 19 nt, Homo sapiens
  misc_RNA (1)...(19): siRNA sense strand
gacuagcuguggccuacug

SEQ ID NO: 1571049 - RNA, 19 nt, Homo sapiens
  misc_RNA (1)...(19): siRNA sense strand
ggggaaggcuggugcuguu

SEQ ID NO: 1571050 - RNA, 19 nt, Homo sapiens
  misc_RNA (1)...(19): siRNA sense strand
gcgugcaccucucgagaag

SEQ ID NO: 1571051 - RNA, 19 nt, Homo sapiens
  misc_RNA (1)...(19): siRNA sense strand
ggguagaggccgaggaauc

SEQ ID NO: 1571052 - RNA, 19 nt, Homo sapiens
  misc_RNA (1)...(19): siRNA sense strand
gacgaggccuggacaaccu

SEQ ID NO: 1571053 - RNA, 19 nt, Homo sapiens
  misc_RNA (1)...(19): siRNA sense strand
gaaaaccgcacgagaaagg

SEQ ID NO: 1571054 - RNA, 19 nt, Homo sapiens
  misc_RNA (1)...(19): siRNA sense strand
gugcaccucucgagaagcu

SEQ ID NO: 1571055 - RNA, 19 nt, Homo sapiens
  misc_RNA (1)...(19): siRNA sense strand
gcugagagggccuggagau

SEQ ID NO: 1571056 - RNA, 19 nt, Homo sapiens
  misc_RNA (1)...(19): siRNA sense strand
agcaggaagugaacagaga

SEQ ID NO: 1571057 - RNA, 19 nt, Homo sapiens
  misc_RNA (1)...(19): siRNA sense strand
aaagacagggaagauugua

SEQ ID NO: 1571058 - RNA, 19 nt, Homo sapiens
  misc_RNA (1)...(19): siRNA sense strand
gguaaggaggcugagauga

SEQ ID NO: 1571059 - RNA, 19 nt, Homo sapiens
  misc_RNA (1)...(19): siRNA sense strand
ccuagaggcuacuggaaaa

SEQ ID NO: 1571060 - RNA, 19 nt, Homo sapiens
  misc_RNA (1)...(19): siRNA sense strand
cgaaggggcugggaaagga

SEQ ID NO: 1571061 - RNA, 19 nt, Homo sapiens
  misc_RNA (1)...(19): siRNA sense strand
cuaagcaacccgaggaaag

SEQ ID NO: 1571062 - RNA, 19 nt, Homo sapiens
  misc_RNA (1)...(19): siRNA sense strand
gguccugggcacugaaaga

SEQ ID NO: 1571063 - RNA, 19 nt, Homo sapiens
  misc_RNA (1)...(19): siRNA sense strand
ggaagaggucagggcaaga

SEQ ID NO: 1571064 - RNA, 19 nt, Homo sapiens
  misc_RNA (1)...(19): siRNA sense strand
agagagaacagagggaaga

SEQ ID NO: 1571065 - RNA, 19 nt, Homo sapiens
  misc_RNA (1)...(19): siRNA sense strand
ggcagaggcagccaaguag

SEQ ID NO: 1571066 - RNA, 19 nt, Homo sapiens
  misc_RNA (1)...(19): siRNA sense strand
agaggccuaugccagagaa

SEQ ID NO: 1571067 - RNA, 19 nt, Homo sapiens
  misc_RNA (1)...(19): siRNA sense strand
gggacaaccgggagaugga

SEQ ID NO: 1571068 - RNA, 19 nt, Homo sapiens
  misc_RNA (1)...(19): siRNA sense strand
ccacuuggaggccagaaag

SEQ ID NO: 1571069 - RNA, 19 nt, Homo sapiens
  misc_RNA (1)...(19): siRNA sense strand
gagaggaggccaggacaac

SEQ ID NO: 1571070 - RNA, 19 nt, Homo sapiens
  misc_RNA (1)...(19): siRNA sense strand
cccaugagcaggaagugaa

SEQ ID NO: 1571071 - RNA, 19 nt, Homo sapiens
  misc_RNA (1)...(19): siRNA sense strand
ucacacacagcgucaccaa

SEQ ID NO: 1571072 - RNA, 19 nt, Homo sapiens
  misc_RNA (1)...(19): siRNA sense strand
caggauggaagagcuggua

SEQ ID NO: 1571073 - RNA, 19 nt, Homo sapiens
  misc_RNA (1)...(19): siRNA sense strand
gcaccuuugucuccuaccu

SEQ ID NO: 1571074 - RNA, 19 nt, Homo sapiens
  misc_RNA (1)...(19): siRNA sense strand
cagaggccaaggagacuga

SEQ ID NO: 1571075 - RNA, 19 nt, Homo sapiens
  misc_RNA (1)...(19): siRNA sense strand
ggaagccaggacaaucuca

SEQ ID NO: 1571076 - RNA, 19 nt, Homo sapiens
  misc_RNA (1)...(19): siRNA sense strand
gggaggaagccaggacaau

SEQ ID NO: 1571077 - RNA, 19 nt, Homo sapiens
  misc_RNA (1)...(19): siRNA sense strand
ggaaagacagggaagauug

SEQ ID NO: 1571078 - RNA, 19 nt, Homo sapiens
  misc_RNA (1)...(19): siRNA sense strand
gaaaggagaagagguggua

SEQ ID NO: 1571079 - RNA, 19 nt, Homo sapiens
  misc_RNA (1)...(19): siRNA sense strand
gaagaggccagggcaauuu

SEQ ID NO: 1571080 - RNA, 19 nt, Homo sapiens
  misc_RNA (1)...(19): siRNA sense strand
cagaaagccuggaacaugu

SEQ ID NO: 1571081 - RNA, 19 nt, Homo sapiens
  misc_RNA (1)...(19): siRNA sense strand
gaagagaggcugagaagcu

SEQ ID NO: 1571082 - RNA, 19 nt, Homo sapiens
  misc_RNA (1)...(19): siRNA sense strand
gagaaggccugugaaagca

SEQ ID NO: 1571083 - RNA, 19 nt, Homo sapiens
  misc_RNA (1)...(19): siRNA sense strand
ccagagaaacugaggauga

SEQ ID NO: 1571084 - RNA, 19 nt, Homo sapiens
  misc_RNA (1)...(19): siRNA sense strand
ggagaugacagaagacaug

SEQ ID NO: 1571085 - RNA, 19 nt, Homo sapiens
  misc_RNA (1)...(19): siRNA sense strand
ggaagaagaggcuguugga

SEQ ID NO: 1571086 - RNA, 19 nt, Homo sapiens
  misc_RNA (1)...(19): siRNA sense strand
ugacagaacauccagaaga

SEQ ID NO: 1571087 - RNA, 19 nt, Homo sapiens
  misc_RNA (1)...(19): siRNA sense strand
ccgagagucugaacuauca

SEQ ID NO: 1571088 - RNA, 19 nt, Homo sapiens
  misc_RNA (1)...(19): siRNA sense strand
gaagugaacagagaagaga

SEQ ID NO: 1571089 - RNA, 19 nt, Homo sapiens
  misc_RNA (1)...(19): siRNA sense strand
gaaagacagggaagauugu

SEQ ID NO: 1571090 - RNA, 19 nt, Homo sapiens
  misc_RNA (1)...(19): siRNA sense strand
caaggagacugagccagaa

SEQ ID NO: 1571091 - RNA, 19 nt, Homo sapiens
  misc_RNA (1)...(19): siRNA sense strand
gacagaacauccagaagag

SEQ ID NO: 1571092 - RNA, 19 nt, Homo sapiens
  misc_RNA (1)...(19): siRNA sense strand
ggagaaggccugugaaagc

SEQ ID NO: 1571093 - RNA, 19 nt, Homo sapiens
  misc_RNA (1)...(19): siRNA sense strand
gcaugcaggugggcaagaa

SEQ ID NO: 1571094 - RNA, 19 nt, Homo sapiens
  misc_RNA (1)...(19): siRNA sense strand
gagaagagaggcugagaag

SEQ ID NO: 1571095 - RNA, 19 nt, Homo sapiens
  misc_RNA (1)...(19): siRNA sense strand
gcacugaaagaacagaaga

SEQ ID NO: 1571096 - RNA, 19 nt, Homo sapiens
  misc_RNA (1)...(19): siRNA sense strand
ggaagaggccagggcaauu

SEQ ID NO: 1571097 - RNA, 19 nt, Homo sapiens
  misc_RNA (1)...(19): siRNA sense strand
ggacauggagagaggaaau

SEQ ID NO: 1571098 - RNA, 19 nt, Homo sapiens
  misc_RNA (1)...(19): siRNA sense strand
ggacgcuguuggaagaaga

SEQ ID NO: 1571099 - RNA, 19 nt, Homo sapiens
  misc_RNA (1)...(19): siRNA sense strand
cagacagacucaauaugga

SEQ ID NO: 1571100 - RNA, 19 nt, Homo sapiens
  misc_RNA (1)...(19): siRNA sense strand
gccuggagaugacagaaga

SEQ ID NO: 1571101 - RNA, 19 nt, Homo sapiens
  misc_RNA (1)...(19): siRNA sense strand
ugacagaagacaugaagug

SEQ ID NO: 1571102 - RNA, 19 nt, Homo sapiens
  misc_RNA (1)...(19): siRNA sense strand
guaaggaggcugagaugag

SEQ ID NO: 1571103 - RNA, 19 nt, Homo sapiens
  misc_RNA (1)...(19): siRNA sense strand
ggcugggacucgaaagaaa

SEQ ID NO: 1571104 - RNA, 19 nt, Homo sapiens
  misc_RNA (1)...(19): siRNA sense strand
gaccgagagucugaacuau

SEQ ID NO: 1571105 - RNA, 19 nt, Homo sapiens
  misc_RNA (1)...(19): siRNA sense strand
gagagggccuggagaugac

SEQ ID NO: 1571106 - RNA, 19 nt, Homo sapiens
  misc_RNA (1)...(19): siRNA sense strand
gcaaggcugggacucgaaa

SEQ ID NO: 1571107 - RNA, 19 nt, Homo sapiens
  misc_RNA (1)...(19): siRNA sense strand
ucagacagacucaauaugg

SEQ ID NO: 1571108 - RNA, 19 nt, Homo sapiens
  misc_RNA (1)...(19): siRNA sense strand
ugagagggccuggagauga

SEQ ID NO: 1571109 - RNA, 19 nt, Homo sapiens
  misc_RNA (1)...(19): siRNA sense strand
ggagggcucagcagaggaa

SEQ ID NO: 1571110 - RNA, 19 nt, Homo sapiens
  misc_RNA (1)...(19): siRNA sense strand
ggcggaggcugacagaaca

SEQ ID NO: 1571111 - RNA, 19 nt, Homo sapiens
  misc_RNA (1)...(19): siRNA sense strand
gcaggaagugaacagagaa

SEQ ID NO: 1571112 - RNA, 19 nt, Homo sapiens
  misc_RNA (1)...(19): siRNA sense strand
ggaggaagccaggacaauc

SEQ ID NO: 1571113 - RNA, 19 nt, Homo sapiens
  misc_RNA (1)...(19): siRNA sense strand
gggaaagacagggaagauu

SEQ ID NO: 1571114 - RNA, 19 nt, Homo sapiens
  misc_RNA (1)...(19): siRNA sense strand
cagagaaacugaggaugag

SEQ ID NO: 1571115 - RNA, 19 nt, Homo sapiens
  misc_RNA (1)...(19): siRNA sense strand
gagaaaggacauggagaga

SEQ ID NO: 1571116 - RNA, 19 nt, Homo sapiens
  misc_RNA (1)...(19): siRNA sense strand
gagcuuugagggccaggua

SEQ ID NO: 1571117 - RNA, 19 nt, Homo sapiens
  misc_RNA (1)...(19): siRNA sense strand
gacucaauauggagcaguu

SEQ ID NO: 1571118 - RNA, 19 nt, Homo sapiens
  misc_RNA (1)...(19): siRNA sense strand
gaugacagaagacaugaag

SEQ ID NO: 1571119 - RNA, 19 nt, Homo sapiens
  misc_RNA (1)...(19): siRNA sense strand
aguggacgcuguuggaaga

SEQ ID NO: 1571120 - RNA, 19 nt, Homo sapiens
  misc_RNA (1)...(19): siRNA sense strand
gcugacagaacauccagaa

SEQ ID NO: 1571121 - RNA, 19 nt, Homo sapiens
  misc_RNA (1)...(19): siRNA sense strand
gacauggagagaggaaaua

SEQ ID NO: 1571122 - RNA, 19 nt, Homo sapiens
  misc_RNA (1)...(19): siRNA sense strand
gaggaagccaggacaaucu

SEQ ID NO: 1571123 - RNA, 19 nt, Homo sapiens
  misc_RNA (1)...(19): siRNA sense strand
ggagucccaugagcaggaa

SEQ ID NO: 1571124 - RNA, 19 nt, Homo sapiens
  misc_RNA (1)...(19): siRNA sense strand
ggaccuggagggccuuaga

SEQ ID NO: 1571125 - RNA, 19 nt, Homo sapiens
  misc_RNA (1)...(19): siRNA sense strand
gcacgagaaaggacaugga

SEQ ID NO: 1571126 - RNA, 19 nt, Homo sapiens
  misc_RNA (1)...(19): siRNA sense strand
ggaaugggguggccucaca

SEQ ID NO: 1571127 - RNA, 19 nt, Homo sapiens
  misc_RNA (1)...(19): siRNA sense strand
ggaagugaacagagaagag

SEQ ID NO: 1571128 - RNA, 19 nt, Homo sapiens
  misc_RNA (1)...(19): siRNA sense strand
gcagaggcagccaaguaga

SEQ ID NO: 1571129 - RNA, 19 nt, Homo sapiens
  misc_RNA (1)...(19): siRNA sense strand
gcaggugggcaagaauuug

SEQ ID NO: 1571130 - RNA, 19 nt, Homo sapiens
  misc_RNA (1)...(19): siRNA sense strand
gaagaggucagggcaagag

SEQ ID NO: 1571131 - RNA, 19 nt, Homo sapiens
  misc_RNA (1)...(19): siRNA sense strand
gagaugacagaagacauga

SEQ ID NO: 1571132 - RNA, 19 nt, Homo sapiens
  misc_RNA (1)...(19): siRNA sense strand
gaaagccuggaacauguca

SEQ ID NO: 1571133 - RNA, 19 nt, Homo sapiens
  misc_RNA (1)...(19): siRNA sense strand
acacacagcgucaccaaag

SEQ ID NO: 1571134 - RNA, 19 nt, Homo sapiens
  misc_RNA (1)...(19): siRNA sense strand
ggacaaccucaggcaaaga

SEQ ID NO: 1571135 - RNA, 19 nt, Homo sapiens
  misc_RNA (1)...(19): siRNA sense strand
ccugggcacugaaagaaca

SEQ ID NO: 1571136 - RNA, 19 nt, Homo sapiens
  misc_RNA (1)...(19): siRNA sense strand
gaagauuguagaggaggaa

SEQ ID NO: 1571137 - RNA, 19 nt, Homo sapiens
  misc_RNA (1)...(19): siRNA sense strand
agacagggaagauuguaga

SEQ ID NO: 1571138 - RNA, 19 nt, Homo sapiens
  misc_RNA (1)...(19): siRNA sense strand
gggaaaaccgcacgagaaa

SEQ ID NO: 1571139 - RNA, 19 nt, Homo sapiens
  misc_RNA (1)...(19): siRNA sense strand
ggugagcccuuuccccaaa

SEQ ID NO: 1571140 - RNA, 19 nt, Homo sapiens
  misc_RNA (1)...(19): siRNA sense strand
guggagaaggccugugaaa

SEQ ID NO: 1571141 - RNA, 19 nt, Homo sapiens
  misc_RNA (1)...(19): siRNA sense strand
gggaagaggccagggcaau

SEQ ID NO: 1571142 - RNA, 19 nt, Homo sapiens
  misc_RNA (1)...(19): siRNA sense strand
gaagaagaggcuguuggau

SEQ ID NO: 1571143 - RNA, 19 nt, Homo sapiens
  misc_RNA (1)...(19): siRNA sense strand
gguagaggccgaggaaucu

SEQ ID NO: 1571144 - RNA, 19 nt, Homo sapiens
  misc_RNA (1)...(19): siRNA sense strand
gacuagcuguggccuacug

SEQ ID NO: 1571145 - RNA, 19 nt, Homo sapiens
  misc_RNA (1)...(19): siRNA sense strand
ggggaaggcuggugcuguu

SEQ ID NO: 1571146 - RNA, 19 nt, Homo sapiens
  misc_RNA (1)...(19): siRNA sense strand
gcgugcaccucucgagaag

SEQ ID NO: 1571147 - RNA, 19 nt, Homo sapiens
  misc_RNA (1)...(19): siRNA sense strand
ggguagaggccgaggaauc

SEQ ID NO: 1571148 - RNA, 19 nt, Homo sapiens
  misc_RNA (1)...(19): siRNA sense strand
gacgaggccuggacaaccu

SEQ ID NO: 1571149 - RNA, 19 nt, Homo sapiens
  misc_RNA (1)...(19): siRNA sense strand
gaaaaccgcacgagaaagg

SEQ ID NO: 1571150 - RNA, 19 nt, Homo sapiens
  misc_RNA (1)...(19): siRNA sense strand
gugcaccucucgagaagcu

SEQ ID NO: 1571151 - RNA, 19 nt, Homo sapiens
  misc_RNA (1)...(19): siRNA sense strand
gcugagagggccuggagau

SEQ ID NO: 1571152 - RNA, 19 nt, Homo sapiens
  misc_RNA (1)...(19): siRNA sense strand
agcaggaagugaacagaga

SEQ ID NO: 1571153 - RNA, 19 nt, Homo sapiens
  misc_RNA (1)...(19): siRNA sense strand
aaagacagggaagauugua

SEQ ID NO: 1571154 - RNA, 19 nt, Homo sapiens
  misc_RNA (1)...(19): siRNA sense strand
gguaaggaggcugagauga

SEQ ID NO: 1571155 - RNA, 19 nt, Homo sapiens
  misc_RNA (1)...(19): siRNA sense strand
ccuagaggcuacuggaaaa

SEQ ID NO: 1571156 - RNA, 19 nt, Homo sapiens
  misc_RNA (1)...(19): siRNA sense strand
cgaaggggcugggaaagga

SEQ ID NO: 1571157 - RNA, 19 nt, Homo sapiens
  misc_RNA (1)...(19): siRNA sense strand
cuaagcaacccgaggaaag

SEQ ID NO: 1571158 - RNA, 19 nt, Homo sapiens
  misc_RNA (1)...(19): siRNA sense strand
gguccugggcacugaaaga

SEQ ID NO: 1571159 - RNA, 19 nt, Homo sapiens
  misc_RNA (1)...(19): siRNA sense strand
ggaagaggucagggcaaga

SEQ ID NO: 1571160 - RNA, 19 nt, Homo sapiens
  misc_RNA (1)...(19): siRNA sense strand
agagagaacagagggaaga

SEQ ID NO: 1571161 - RNA, 19 nt, Homo sapiens
  misc_RNA (1)...(19): siRNA sense strand
ggcagaggcagccaaguag

SEQ ID NO: 1571162 - RNA, 19 nt, Homo sapiens
  misc_RNA (1)...(19): siRNA sense strand
agaggccuaugccagagaa

SEQ ID NO: 1571163 - RNA, 19 nt, Homo sapiens
  misc_RNA (1)...(19): siRNA sense strand
gggacaaccgggagaugga

SEQ ID NO: 1571164 - RNA, 19 nt, Homo sapiens
  misc_RNA (1)...(19): siRNA sense strand
ccacuuggaggccagaaag

SEQ ID NO: 1571165 - RNA, 19 nt, Homo sapiens
  misc_RNA (1)...(19): siRNA sense strand
gagaggaggccaggacaac

SEQ ID NO: 1571166 - RNA, 19 nt, Homo sapiens
  misc_RNA (1)...(19): siRNA sense strand
cccaugagcaggaagugaa

SEQ ID NO: 1571167 - RNA, 19 nt, Homo sapiens
  misc_RNA (1)...(19): siRNA sense strand
ucacacacagcgucaccaa

SEQ ID NO: 1571168 - RNA, 19 nt, Homo sapiens
  misc_RNA (1)...(19): siRNA sense strand
caggauggaagagcuggua

SEQ ID NO: 1571169 - RNA, 19 nt, Homo sapiens
  misc_RNA (1)...(19): siRNA sense strand
gcaccuuugucuccuaccu

SEQ ID NO: 1571170 - RNA, 19 nt, Homo sapiens
  misc_RNA (1)...(19): siRNA sense strand
cagaggccaaggagacuga

SEQ ID NO: 1571171 - RNA, 19 nt, Homo sapiens
  misc_RNA (1)...(19): siRNA sense strand
ggaagccaggacaaucuca

SEQ ID NO: 1571172 - RNA, 19 nt, Homo sapiens
  misc_RNA (1)...(19): siRNA sense strand
gggaggaagccaggacaau

SEQ ID NO: 1571173 - RNA, 19 nt, Homo sapiens
  misc_RNA (1)...(19): siRNA sense strand
gcacugagaucacaccaaa

SEQ ID NO: 1571174 - RNA, 19 nt, Homo sapiens
  misc_RNA (1)...(19): siRNA sense strand
agacauguaucucaucuuu

SEQ ID NO: 1571175 - RNA, 19 nt, Homo sapiens
  misc_RNA (1)...(19): siRNA sense strand
gcaaacgucguaauacaaa

SEQ ID NO: 1571176 - RNA, 19 nt, Homo sapiens
  misc_RNA (1)...(19): siRNA sense strand
aggcagagcuuccacacua

SEQ ID NO: 1571177 - RNA, 19 nt, Homo sapiens
  misc_RNA (1)...(19): siRNA sense strand
acauguaucucaucuuuga

SEQ ID NO: 1571178 - RNA, 19 nt, Homo sapiens
  misc_RNA (1)...(19): siRNA sense strand
uaauacaaauccucaccaa

SEQ ID NO: 1571179 - RNA, 19 nt, Homo sapiens
  misc_RNA (1)...(19): siRNA sense strand
uacaagagacgaauuucua

SEQ ID NO: 1571180 - RNA, 19 nt, Homo sapiens
  misc_RNA (1)...(19): siRNA sense strand
guagauacacaauagaugu

SEQ ID NO: 1571181 - RNA, 19 nt, Homo sapiens
  misc_RNA (1)...(19): siRNA sense strand
uaucucaucuuugaacaga

SEQ ID NO: 1571182 - RNA, 19 nt, Homo sapiens
  misc_RNA (1)...(19): siRNA sense strand
gagccagggcaauauaauu

SEQ ID NO: 1571183 - RNA, 19 nt, Homo sapiens
  misc_RNA (1)...(19): siRNA sense strand
gggugcaaguaacaucaua

SEQ ID NO: 1571184 - RNA, 19 nt, Homo sapiens
  misc_RNA (1)...(19): siRNA sense strand
guagacauguaucucaucu

SEQ ID NO: 1571185 - RNA, 19 nt, Homo sapiens
  misc_RNA (1)...(19): siRNA sense strand
caucuacauugucuggauu

SEQ ID NO: 1571186 - RNA, 19 nt, Homo sapiens
  misc_RNA (1)...(19): siRNA sense strand
cuuccacacuagcauauuu

SEQ ID NO: 1571187 - RNA, 19 nt, Homo sapiens
  misc_RNA (1)...(19): siRNA sense strand
gagcuuccacacuagcaua

SEQ ID NO: 1571188 - RNA, 19 nt, Homo sapiens
  misc_RNA (1)...(19): siRNA sense strand
uacaaauccucaccaacaa

SEQ ID NO: 1571189 - RNA, 19 nt, Homo sapiens
  misc_RNA (1)...(19): siRNA sense strand
uuaaagaggucagaaucau

SEQ ID NO: 1571190 - RNA, 19 nt, Homo sapiens
  misc_RNA (1)...(19): siRNA sense strand
auacaaauccucaccaaca

SEQ ID NO: 1571191 - RNA, 19 nt, Homo sapiens
  misc_RNA (1)...(19): siRNA sense strand
caaauccucaccaacaaug

SEQ ID NO: 1571192 - RNA, 19 nt, Homo sapiens
  misc_RNA (1)...(19): siRNA sense strand
cagcaguggugugggauga

SEQ ID NO: 1571193 - RNA, 19 nt, Homo sapiens
  misc_RNA (1)...(19): siRNA sense strand
cugcaaacgucguaauaca

SEQ ID NO: 1571194 - RNA, 19 nt, Homo sapiens
  misc_RNA (1)...(19): siRNA sense strand
gugcaaguaacaucauaaa

SEQ ID NO: 1571195 - RNA, 19 nt, Homo sapiens
  misc_RNA (1)...(19): siRNA sense strand
caaacgucguaauacaaau

SEQ ID NO: 1571196 - RNA, 19 nt, Homo sapiens
  misc_RNA (1)...(19): siRNA sense strand
gaaucccaguacuuugaga

SEQ ID NO: 1571197 - RNA, 19 nt, Homo sapiens
  misc_RNA (1)...(19): siRNA sense strand
ucaccaacaaugacuuuga

SEQ ID NO: 1571198 - RNA, 19 nt, Homo sapiens
  misc_RNA (1)...(19): siRNA sense strand
uaaagaggucagaaucaug

SEQ ID NO: 1571199 - RNA, 19 nt, Homo sapiens
  misc_RNA (1)...(19): siRNA sense strand
uggaaucccaguacuuuga

SEQ ID NO: 1571200 - RNA, 19 nt, Homo sapiens
  misc_RNA (1)...(19): siRNA sense strand
ugaaacugcaaacgucgua

SEQ ID NO: 1571201 - RNA, 19 nt, Homo sapiens
  misc_RNA (1)...(19): siRNA sense strand
gagaucacaccaaaguaca

SEQ ID NO: 1571202 - RNA, 19 nt, Homo sapiens
  misc_RNA (1)...(19): siRNA sense strand
agccagggcaauauaauuu

SEQ ID NO: 1571203 - RNA, 19 nt, Homo sapiens
  misc_RNA (1)...(19): siRNA sense strand
ggagccagggcaauauaau

SEQ ID NO: 1571204 - RNA, 19 nt, Homo sapiens
  misc_RNA (1)...(19): siRNA sense strand
ggccuggucaucuacauug

SEQ ID NO: 1571205 - RNA, 19 nt, Homo sapiens
  misc_RNA (1)...(19): siRNA sense strand
cagaagcaccuagggaaug

SEQ ID NO: 1571206 - RNA, 19 nt, Homo sapiens
  misc_RNA (1)...(19): siRNA sense strand
gaaacugcaaacgucguaa

SEQ ID NO: 1571207 - RNA, 19 nt, Homo sapiens
  misc_RNA (1)...(19): siRNA sense strand
ggugcaaguaacaucauaa

SEQ ID NO: 1571208 - RNA, 19 nt, Homo sapiens
  misc_RNA (1)...(19): siRNA sense strand
caagagacgaauuucuaca

SEQ ID NO: 1571209 - RNA, 19 nt, Homo sapiens
  misc_RNA (1)...(19): siRNA sense strand
ggcaauauaauuuccuaca

SEQ ID NO: 1571210 - RNA, 19 nt, Homo sapiens
  misc_RNA (1)...(19): siRNA sense strand
cauuaaagaggucagaauc

SEQ ID NO: 1571211 - RNA, 19 nt, Homo sapiens
  misc_RNA (1)...(19): siRNA sense strand
ucaucuacauugucuggau

SEQ ID NO: 1571212 - RNA, 19 nt, Homo sapiens
  misc_RNA (1)...(19): siRNA sense strand
ucucaucuuugaacagaag

SEQ ID NO: 1571213 - RNA, 19 nt, Homo sapiens
  misc_RNA (1)...(19): siRNA sense strand
caaaaugggcaccguguug

SEQ ID NO: 1571214 - RNA, 19 nt, Homo sapiens
  misc_RNA (1)...(19): siRNA sense strand
ugagaucacaccaaaguac

SEQ ID NO: 1571215 - RNA, 19 nt, Homo sapiens
  misc_RNA (1)...(19): siRNA sense strand
ggcagagcuuccacacuag

SEQ ID NO: 1571216 - RNA, 19 nt, Homo sapiens
  misc_RNA (1)...(19): siRNA sense strand
gaauuucuacagcggagau

SEQ ID NO: 1571217 - RNA, 19 nt, Homo sapiens
  misc_RNA (1)...(19): siRNA sense strand
guuucuggauguucuuugu

SEQ ID NO: 1571218 - RNA, 19 nt, Homo sapiens
  misc_RNA (1)...(19): siRNA sense strand
cagaaucaugcgcugguuu

SEQ ID NO: 1571219 - RNA, 19 nt, Homo sapiens
  misc_RNA (1)...(19): siRNA sense strand
uucaucaucugcuggaguu

SEQ ID NO: 1571220 - RNA, 19 nt, Homo sapiens
  misc_RNA (1)...(19): siRNA sense strand
agaagcaccuagggaaugg

SEQ ID NO: 1571221 - RNA, 19 nt, Homo sapiens
  misc_RNA (1)...(19): siRNA sense strand
agaaucaugcgcugguuug

SEQ ID NO: 1571222 - RNA, 19 nt, Homo sapiens
  misc_RNA (1)...(19): siRNA sense strand
gcaguggugugggaugacu

SEQ ID NO: 1571223 - RNA, 19 nt, Homo sapiens
  misc_RNA (1)...(19): siRNA sense strand
ucagcugcuuccuccugua

SEQ ID NO: 1571224 - RNA, 19 nt, Homo sapiens
  misc_RNA (1)...(19): siRNA sense strand
ucagaaucaugcgcugguu

SEQ ID NO: 1571225 - RNA, 19 nt, Homo sapiens
  misc_RNA (1)...(19): siRNA sense strand
caccaacaaugacuuugac

SEQ ID NO: 1571226 - RNA, 19 nt, Homo sapiens
  misc_RNA (1)...(19): siRNA sense strand
ccucaccaacaaugacuuu

SEQ ID NO: 1571227 - RNA, 19 nt, Homo sapiens
  misc_RNA (1)...(19): siRNA sense strand
aaacgucguaauacaaauc

SEQ ID NO: 1571228 - RNA, 19 nt, Homo sapiens
  misc_RNA (1)...(19): siRNA sense strand
ccggagccagggcaauaua

SEQ ID NO: 1571229 - RNA, 19 nt, Homo sapiens
  misc_RNA (1)...(19): siRNA sense strand
aaccggagccagggcaaua

SEQ ID NO: 1571230 - RNA, 19 nt, Homo sapiens
  misc_RNA (1)...(19): siRNA sense strand
guacaggggugcaaguaac

SEQ ID NO: 1571231 - RNA, 19 nt, Homo sapiens
  misc_RNA (1)...(19): siRNA sense strand
cauauuuaccugucugucu

SEQ ID NO: 1571232 - RNA, 19 nt, Homo sapiens
  misc_RNA (1)...(19): siRNA sense strand
agggcaauauaauuuccua

SEQ ID NO: 1571233 - RNA, 19 nt, Homo sapiens
  misc_RNA (1)...(19): siRNA sense strand
ggacagaggagcccuaaga

SEQ ID NO: 1571234 - RNA, 19 nt, Homo sapiens
  misc_RNA (1)...(19): siRNA sense strand
gaacuuaaccuggucuaug

SEQ ID NO: 1571235 - RNA, 19 nt, Homo sapiens
  misc_RNA (1)...(19): siRNA sense strand
ggagagaccgcauagauuc

SEQ ID NO: 1571236 - RNA, 19 nt, Homo sapiens
  misc_RNA (1)...(19): siRNA sense strand
gaagaugauggcgaacuua

SEQ ID NO: 1571237 - RNA, 19 nt, Homo sapiens
  misc_RNA (1)...(19): siRNA sense strand
gaagugcccagauccaaga

SEQ ID NO: 1571238 - RNA, 19 nt, Homo sapiens
  misc_RNA (1)...(19): siRNA sense strand
cgaagaugauggcgaacuu

SEQ ID NO: 1571239 - RNA, 19 nt, Homo sapiens
  misc_RNA (1)...(19): siRNA sense strand
ccgcauagauucgaagaug

SEQ ID NO: 1571240 - RNA, 19 nt, Homo sapiens
  misc_RNA (1)...(19): siRNA sense strand
cacagaagcuccugcucuu

SEQ ID NO: 1571241 - RNA, 19 nt, Homo sapiens
  misc_RNA (1)...(19): siRNA sense strand
acagucagcuacuuucaug

SEQ ID NO: 1571242 - RNA, 19 nt, Homo sapiens
  misc_RNA (1)...(19): siRNA sense strand
caagcagcauccuucagaa

SEQ ID NO: 1571243 - RNA, 19 nt, Homo sapiens
  misc_RNA (1)...(19): siRNA sense strand
ccaagcagcauccuucaga

SEQ ID NO: 1571244 - RNA, 19 nt, Homo sapiens
  misc_RNA (1)...(19): siRNA sense strand
aacuuaaccuggucuauga

SEQ ID NO: 1571245 - RNA, 19 nt, Homo sapiens
  misc_RNA (1)...(19): siRNA sense strand
gcagcauccuucagaaucu

SEQ ID NO: 1571246 - RNA, 19 nt, Homo sapiens
  misc_RNA (1)...(19): siRNA sense strand
gaagaucuccagggacaga

SEQ ID NO: 1571247 - RNA, 19 nt, Homo sapiens
  misc_RNA (1)...(19): siRNA sense strand
gcaggaggacagucaguga

SEQ ID NO: 1571248 - RNA, 19 nt, Homo sapiens
  misc_RNA (1)...(19): siRNA sense strand
gaucaccuauccauacacu

SEQ ID NO: 1571249 - RNA, 19 nt, Homo sapiens
  misc_RNA (1)...(19): siRNA sense strand
cagaagcuccugcucuuug

SEQ ID NO: 1571250 - RNA, 19 nt, Homo sapiens
  misc_RNA (1)...(19): siRNA sense strand
cuaagaagccaacaaacug

SEQ ID NO: 1571251 - RNA, 19 nt, Homo sapiens
  misc_RNA (1)...(19): siRNA sense strand
gcccuaagaagccaacaaa

SEQ ID NO: 1571252 - RNA, 19 nt, Homo sapiens
  misc_RNA (1)...(19): siRNA sense strand
ucagcuacuuucaugaaga

SEQ ID NO: 1571253 - RNA, 19 nt, Homo sapiens
  misc_RNA (1)...(19): siRNA sense strand
caggagagaccgcauagau

SEQ ID NO: 1571254 - RNA, 19 nt, Homo sapiens
  misc_RNA (1)...(19): siRNA sense strand
cagcuacuuucaugaagau

SEQ ID NO: 1571255 - RNA, 19 nt, Homo sapiens
  misc_RNA (1)...(19): siRNA sense strand
ucaccggccuccugagugu

SEQ ID NO: 1571256 - RNA, 19 nt, Homo sapiens
  misc_RNA (1)...(19): siRNA sense strand
gcauagauucgaagaugau

SEQ ID NO: 1571257 - RNA, 19 nt, Homo sapiens
  misc_RNA (1)...(19): siRNA sense strand
gacagaggagcccuaagaa

SEQ ID NO: 1571258 - RNA, 19 nt, Homo sapiens
  misc_RNA (1)...(19): siRNA sense strand
cugcugcucuggaacaaga

SEQ ID NO: 1571259 - RNA, 19 nt, Homo sapiens
  misc_RNA (1)...(19): siRNA sense strand
gcaaggaccccaccaggaa

SEQ ID NO: 1571260 - RNA, 19 nt, Homo sapiens
  misc_RNA (1)...(19): siRNA sense strand
gagaccgcauagauucgaa

SEQ ID NO: 1571261 - RNA, 19 nt, Homo sapiens
  misc_RNA (1)...(19): siRNA sense strand
cgcauagauucgaagauga

SEQ ID NO: 1571262 - RNA, 19 nt, Homo sapiens
  misc_RNA (1)...(19): siRNA sense strand
aagaugauggcgaacuuaa

SEQ ID NO: 1571263 - RNA, 19 nt, Homo sapiens
  misc_RNA (1)...(19): siRNA sense strand
ccuaagaagccaacaaacu

SEQ ID NO: 1571264 - RNA, 19 nt, Homo sapiens
  misc_RNA (1)...(19): siRNA sense strand
acacagcuaucuccuucag

SEQ ID NO: 1571265 - RNA, 19 nt, Homo sapiens
  misc_RNA (1)...(19): siRNA sense strand
ccacuggcaccuacuacug

SEQ ID NO: 1571266 - RNA, 19 nt, Homo sapiens
  misc_RNA (1)...(19): siRNA sense strand
aggagagaccgcauagauu

SEQ ID NO: 1571267 - RNA, 19 nt, Homo sapiens
  misc_RNA (1)...(19): siRNA sense strand
ccaacacagcuaucuccuu

SEQ ID NO: 1571268 - RNA, 19 nt, Homo sapiens
  misc_RNA (1)...(19): siRNA sense strand
agucagcuacuuucaugaa

SEQ ID NO: 1571269 - RNA, 19 nt, Homo sapiens
  misc_RNA (1)...(19): siRNA sense strand
gaagauggcuccuguucua

SEQ ID NO: 1571270 - RNA, 19 nt, Homo sapiens
  misc_RNA (1)...(19): siRNA sense strand
ggaaugagcuuaccgagau

SEQ ID NO: 1571271 - RNA, 19 nt, Homo sapiens
  misc_RNA (1)...(19): siRNA sense strand
gccagaagcucgaguauga

SEQ ID NO: 1571272 - RNA, 19 nt, Homo sapiens
  misc_RNA (1)...(19): siRNA sense strand
gcagauauuucccaauuau

SEQ ID NO: 1571273 - RNA, 19 nt, Homo sapiens
  misc_RNA (1)...(19): siRNA sense strand
gaagagaaauccaccaaag

SEQ ID NO: 1571274 - RNA, 19 nt, Homo sapiens
  misc_RNA (1)...(19): siRNA sense strand
gagcugaccuugugcagaa

SEQ ID NO: 1571275 - RNA, 19 nt, Homo sapiens
  misc_RNA (1)...(19): siRNA sense strand
cagcagauauuucccaauu

SEQ ID NO: 1571276 - RNA, 19 nt, Homo sapiens
  misc_RNA (1)...(19): siRNA sense strand
ugacagagaccgagaguaa

SEQ ID NO: 1571277 - RNA, 19 nt, Homo sapiens
  misc_RNA (1)...(19): siRNA sense strand
gaacuucagucccucuuag

SEQ ID NO: 1571278 - RNA, 19 nt, Homo sapiens
  misc_RNA (1)...(19): siRNA sense strand
ucgcuuaccucaagaagaa

SEQ ID NO: 1571279 - RNA, 19 nt, Homo sapiens
  misc_RNA (1)...(19): siRNA sense strand
gauagauccucguggcaaa

SEQ ID NO: 1571280 - RNA, 19 nt, Homo sapiens
  misc_RNA (1)...(19): siRNA sense strand
ccaccaaagucaacaacaa

SEQ ID NO: 1571281 - RNA, 19 nt, Homo sapiens
  misc_RNA (1)...(19): siRNA sense strand
ggagcucgcuuaccucaag

SEQ ID NO: 1571282 - RNA, 19 nt, Homo sapiens
  misc_RNA (1)...(19): siRNA sense strand
gaagaaucaugaggaggaa

SEQ ID NO: 1571283 - RNA, 19 nt, Homo sapiens
  misc_RNA (1)...(19): siRNA sense strand
acuaacagcugaugacuuc

SEQ ID NO: 1571284 - RNA, 19 nt, Homo sapiens
  misc_RNA (1)...(19): siRNA sense strand
ccugauagauggagaagau

SEQ ID NO: 1571285 - RNA, 19 nt, Homo sapiens
  misc_RNA (1)...(19): siRNA sense strand
gaaacgcacucuucaaacc

SEQ ID NO: 1571286 - RNA, 19 nt, Homo sapiens
  misc_RNA (1)...(19): siRNA sense strand
gagaugaaacgcacucuuc

SEQ ID NO: 1571287 - RNA, 19 nt, Homo sapiens
  misc_RNA (1)...(19): siRNA sense strand
gcacagauccaggcucaga

SEQ ID NO: 1571288 - RNA, 19 nt, Homo sapiens
  misc_RNA (1)...(19): siRNA sense strand
uggaugagcugaccuugug

SEQ ID NO: 1571289 - RNA, 19 nt, Homo sapiens
  misc_RNA (1)...(19): siRNA sense strand
gagaagauggcuccuguuc

SEQ ID NO: 1571290 - RNA, 19 nt, Homo sapiens
  misc_RNA (1)...(19): siRNA sense strand
gccguggccuugaucauga

SEQ ID NO: 1571291 - RNA, 19 nt, Homo sapiens
  misc_RNA (1)...(19): siRNA sense strand
ucagugaggagcucgcuua

SEQ ID NO: 1571292 - RNA, 19 nt, Homo sapiens
  misc_RNA (1)...(19): siRNA sense strand
ggaagagaaauccaccaaa

SEQ ID NO: 1571293 - RNA, 19 nt, Homo sapiens
  misc_RNA (1)...(19): siRNA sense strand
gauggcuccuguucuaaau

SEQ ID NO: 1571294 - RNA, 19 nt, Homo sapiens
  misc_RNA (1)...(19): siRNA sense strand
gaucaugauuacagcagau

SEQ ID NO: 1571295 - RNA, 19 nt, Homo sapiens
  misc_RNA (1)...(19): siRNA sense strand
gaccuacugccuccugaua

SEQ ID NO: 1571296 - RNA, 19 nt, Homo sapiens
  misc_RNA (1)...(19): siRNA sense strand
ccaggagacuuggcucuug

SEQ ID NO: 1571297 - RNA, 19 nt, Homo sapiens
  misc_RNA (1)...(19): siRNA sense strand
gcaaaaugauaaugcaaga

SEQ ID NO: 1571298 - RNA, 19 nt, Homo sapiens
  misc_RNA (1)...(19): siRNA sense strand
gcaaugagaaggugaccau

SEQ ID NO: 1571299 - RNA, 19 nt, Homo sapiens
  misc_RNA (1)...(19): siRNA sense strand
gaacagagggugucuuccu

SEQ ID NO: 1571300 - RNA, 19 nt, Homo sapiens
  misc_RNA (1)...(19): siRNA sense strand
aggcggacaucaaugguuu

SEQ ID NO: 1571301 - RNA, 19 nt, Homo sapiens
  misc_RNA (1)...(19): siRNA sense strand
gagaaauccaccaaaguca

SEQ ID NO: 1571302 - RNA, 19 nt, Homo sapiens
  misc_RNA (1)...(19): siRNA sense strand
gaaugagcuuaccgagaug

SEQ ID NO: 1571303 - RNA, 19 nt, Homo sapiens
  misc_RNA (1)...(19): siRNA sense strand
caucaaugguuugcgaaga

SEQ ID NO: 1571304 - RNA, 19 nt, Homo sapiens
  misc_RNA (1)...(19): siRNA sense strand
gugaggagcucgcuuaccu

SEQ ID NO: 1571305 - RNA, 19 nt, Homo sapiens
  misc_RNA (1)...(19): siRNA sense strand
caaagucaacaacaagaau

SEQ ID NO: 1571306 - RNA, 19 nt, Homo sapiens
  misc_RNA (1)...(19): siRNA sense strand
ggguagaccucacgguucu

SEQ ID NO: 1571307 - RNA, 19 nt, Homo sapiens
  misc_RNA (1)...(19): siRNA sense strand
uaugcgagcugaguacgaa

SEQ ID NO: 1571308 - RNA, 19 nt, Homo sapiens
  misc_RNA (1)...(19): siRNA sense strand
gaaauccaccaaagucaac

SEQ ID NO: 1571309 - RNA, 19 nt, Homo sapiens
  misc_RNA (1)...(19): siRNA sense strand
ccaaagucaacaacaagaa

SEQ ID NO: 1571310 - RNA, 19 nt, Homo sapiens
  misc_RNA (1)...(19): siRNA sense strand
gcagaacggaccuggagau

SEQ ID NO: 1571311 - RNA, 19 nt, Homo sapiens
  misc_RNA (1)...(19): siRNA sense strand
ccuacugccuccugauaga

SEQ ID NO: 1571312 - RNA, 19 nt, Homo sapiens
  misc_RNA (1)...(19): siRNA sense strand
agcagauauuucccaauua

SEQ ID NO: 1571313 - RNA, 19 nt, Homo sapiens
  misc_RNA (1)...(19): siRNA sense strand
cauccagaguucacacugu

SEQ ID NO: 1571314 - RNA, 19 nt, Homo sapiens
  misc_RNA (1)...(19): siRNA sense strand
gcccaggaaaucaaacaaa

SEQ ID NO: 1571315 - RNA, 19 nt, Homo sapiens
  misc_RNA (1)...(19): siRNA sense strand
ggaggccaacgcugacuug

SEQ ID NO: 1571316 - RNA, 19 nt, Homo sapiens
  misc_RNA (1)...(19): siRNA sense strand
gaaauuuggaccugguucu

SEQ ID NO: 1571317 - RNA, 19 nt, Homo sapiens
  misc_RNA (1)...(19): siRNA sense strand
caugauuacagcagauauu

SEQ ID NO: 1571318 - RNA, 19 nt, Homo sapiens
  misc_RNA (1)...(19): siRNA sense strand
agagaaauccaccaaaguc

SEQ ID NO: 1571319 - RNA, 19 nt, Homo sapiens
  misc_RNA (1)...(19): siRNA sense strand
caaacuuaagaaccagaua

SEQ ID NO: 1571320 - RNA, 19 nt, Homo sapiens
  misc_RNA (1)...(19): siRNA sense strand
gauaaugcaagacuaacag

SEQ ID NO: 1571321 - RNA, 19 nt, Homo sapiens
  misc_RNA (1)...(19): siRNA sense strand
ggaggcccaggaaaucaaa

SEQ ID NO: 1571322 - RNA, 19 nt, Homo sapiens
  misc_RNA (1)...(19): siRNA sense strand
gagugcuccuugacagaga

SEQ ID NO: 1571323 - RNA, 19 nt, Homo sapiens
  misc_RNA (1)...(19): siRNA sense strand
gagcucgcuuaccucaaga

SEQ ID NO: 1571324 - RNA, 19 nt, Homo sapiens
  misc_RNA (1)...(19): siRNA sense strand
ccaguaaugcccauguugu

SEQ ID NO: 1571325 - RNA, 19 nt, Homo sapiens
  misc_RNA (1)...(19): siRNA sense strand
uggcuccuguucuaaauca

SEQ ID NO: 1571326 - RNA, 19 nt, Homo sapiens
  misc_RNA (1)...(19): siRNA sense strand
gcaagacuaacagcugaug

SEQ ID NO: 1571327 - RNA, 19 nt, Homo sapiens
  misc_RNA (1)...(19): siRNA sense strand
acaauaugcgagcugagua

SEQ ID NO: 1571328 - RNA, 19 nt, Homo sapiens
  misc_RNA (1)...(19): siRNA sense strand
gcuccuguucuaaaucaaa

SEQ ID NO: 1571329 - RNA, 19 nt, Homo sapiens
  misc_RNA (1)...(19): siRNA sense strand
gagcuuaccgagaugaaac

SEQ ID NO: 1571330 - RNA, 19 nt, Homo sapiens
  misc_RNA (1)...(19): siRNA sense strand
gaggccugguucaacgaaa

SEQ ID NO: 1571331 - RNA, 19 nt, Homo sapiens
  misc_RNA (1)...(19): siRNA sense strand
uaccaguaaugcccauguu

SEQ ID NO: 1571332 - RNA, 19 nt, Homo sapiens
  misc_RNA (1)...(19): siRNA sense strand
guggcaaaguucucucauc

SEQ ID NO: 1571333 - RNA, 19 nt, Homo sapiens
  misc_RNA (1)...(19): siRNA sense strand
ugcgaagaguccuggauga

SEQ ID NO: 1571334 - RNA, 19 nt, Homo sapiens
  misc_RNA (1)...(19): siRNA sense strand
uugacaaacuuaagaacca

SEQ ID NO: 1571335 - RNA, 19 nt, Homo sapiens
  misc_RNA (1)...(19): siRNA sense strand
aaagucaacaacaagaaug

SEQ ID NO: 1571336 - RNA, 19 nt, Homo sapiens
  misc_RNA (1)...(19): siRNA sense strand
agaaauccaccaaagucaa

SEQ ID NO: 1571337 - RNA, 19 nt, Homo sapiens
  misc_RNA (1)...(19): siRNA sense strand
gagaaauuuggaccugguu

SEQ ID NO: 1571338 - RNA, 19 nt, Homo sapiens
  misc_RNA (1)...(19): siRNA sense strand
caacaacaagaaugaacag

SEQ ID NO: 1571339 - RNA, 19 nt, Homo sapiens
  misc_RNA (1)...(19): siRNA sense strand
caagacuaacagcugauga

SEQ ID NO: 1571340 - RNA, 19 nt, Homo sapiens
  misc_RNA (1)...(19): siRNA sense strand
acgcugacuuggagcagaa

SEQ ID NO: 1571341 - RNA, 19 nt, Homo sapiens
  misc_RNA (1)...(19): siRNA sense strand
ggggugguaugagaaauuu

SEQ ID NO: 1571342 - RNA, 19 nt, Homo sapiens
  misc_RNA (1)...(19): siRNA sense strand
uaaaaccaccauugucaaa

SEQ ID NO: 1571343 - RNA, 19 nt, Homo sapiens
  misc_RNA (1)...(19): siRNA sense strand
gaggcggacaucaaugguu

SEQ ID NO: 1571344 - RNA, 19 nt, Homo sapiens
  misc_RNA (1)...(19): siRNA sense strand
aaaacgagcuagcgcuuca

SEQ ID NO: 1571345 - RNA, 19 nt, Homo sapiens
  misc_RNA (1)...(19): siRNA sense strand
gauuacagcagauauuucc

SEQ ID NO: 1571346 - RNA, 19 nt, Homo sapiens
  misc_RNA (1)...(19): siRNA sense strand
gaggaaaugaaagcucuuc

SEQ ID NO: 1571347 - RNA, 19 nt, Homo sapiens
  misc_RNA (1)...(19): siRNA sense strand
ucaacaacaagaaugaaca

SEQ ID NO: 1571348 - RNA, 19 nt, Homo sapiens
  misc_RNA (1)...(19): siRNA sense strand
agaaggugaccaugcagaa

SEQ ID NO: 1571349 - RNA, 19 nt, Homo sapiens
  misc_RNA (1)...(19): siRNA sense strand
uggcuucucuugugcuuuu

SEQ ID NO: 1571350 - RNA, 19 nt, Homo sapiens
  misc_RNA (1)...(19): siRNA sense strand
ggccuccucucuggcaaug

SEQ ID NO: 1571351 - RNA, 19 nt, Homo sapiens
  misc_RNA (1)...(19): siRNA sense strand
gauccucguggcaaaguuc

SEQ ID NO: 1571352 - RNA, 19 nt, Homo sapiens
  misc_RNA (1)...(19): siRNA sense strand
cccaggaaaucaaacaaaa

SEQ ID NO: 1571353 - RNA, 19 nt, Homo sapiens
  misc_RNA (1)...(19): siRNA sense strand
gcuauggaggcccaggaaa

SEQ ID NO: 1571354 - RNA, 19 nt, Homo sapiens
  misc_RNA (1)...(19): siRNA sense strand
ggaggccugguucaacgaa

SEQ ID NO: 1571355 - RNA, 19 nt, Homo sapiens
  misc_RNA (1)...(19): siRNA sense strand
uuucugcaacuaccaguaa

SEQ ID NO: 1571356 - RNA, 19 nt, Homo sapiens
  misc_RNA (1)...(19): siRNA sense strand
ggugguaugagaaauuugg

SEQ ID NO: 1571357 - RNA, 19 nt, Homo sapiens
  misc_RNA (1)...(19): siRNA sense strand
ucugugaggcucucuagug

SEQ ID NO: 1571358 - RNA, 19 nt, Homo sapiens
  misc_RNA (1)...(19): siRNA sense strand
cuauggaggcccaggaaau

SEQ ID NO: 1571359 - RNA, 19 nt, Homo sapiens
  misc_RNA (1)...(19): siRNA sense strand
agauggcuccuguucuaaa

SEQ ID NO: 1571360 - RNA, 19 nt, Homo sapiens
  misc_RNA (1)...(19): siRNA sense strand
caugagaccuggcgcuuug

SEQ ID NO: 1571361 - RNA, 19 nt, Homo sapiens
  misc_RNA (1)...(19): siRNA sense strand
ucaccuaccucaacagugu

SEQ ID NO: 1571362 - RNA, 19 nt, Homo sapiens
  misc_RNA (1)...(19): siRNA sense strand
ggcgaggucucucuggaaa

SEQ ID NO: 1571363 - RNA, 19 nt, Homo sapiens
  misc_RNA (1)...(19): siRNA sense strand
caaagucaaccucuucaug

SEQ ID NO: 1571364 - RNA, 19 nt, Homo sapiens
  misc_RNA (1)...(19): siRNA sense strand
gcgcucauccucuuugcua

SEQ ID NO: 1571365 - RNA, 19 nt, Homo sapiens
  misc_RNA (1)...(19): siRNA sense strand
guagaagacuccagaaccu

SEQ ID NO: 1571366 - RNA, 19 nt, Homo sapiens
  misc_RNA (1)...(19): siRNA sense strand
acuacuaccuccuccauga

SEQ ID NO: 1571367 - RNA, 19 nt, Homo sapiens
  misc_RNA (1)...(19): siRNA sense strand
ucacagccaucgcacucaa

SEQ ID NO: 1571368 - RNA, 19 nt, Homo sapiens
  misc_RNA (1)...(19): siRNA sense strand
gcugcugccugcaaaguca

SEQ ID NO: 1571369 - RNA, 19 nt, Homo sapiens
  misc_RNA (1)...(19): siRNA sense strand
gugccaaucaucccacuuu

SEQ ID NO: 1571370 - RNA, 19 nt, Homo sapiens
  misc_RNA (1)...(19): siRNA sense strand
ccauggaacuucauaaccu

SEQ ID NO: 1571371 - RNA, 19 nt, Homo sapiens
  misc_RNA (1)...(19): siRNA sense strand
cacuguaccugcuggaguu

SEQ ID NO: 1571372 - RNA, 19 nt, Homo sapiens
  misc_RNA (1)...(19): siRNA sense strand
gaacaguuuggcccucuuc

SEQ ID NO: 1571373 - RNA, 19 nt, Homo sapiens
  misc_RNA (1)...(19): siRNA sense strand
ggaacaguuuggcccucuu

SEQ ID NO: 1571374 - RNA, 19 nt, Homo sapiens
  misc_RNA (1)...(19): siRNA sense strand
uggcuuccaugguggcuuu

SEQ ID NO: 1571375 - RNA, 19 nt, Homo sapiens
  misc_RNA (1)...(19): siRNA sense strand
gcucauccucuuugcuauu

SEQ ID NO: 1571376 - RNA, 19 nt, Homo sapiens
  misc_RNA (1)...(19): siRNA sense strand
ccaagcagcccauggaacu

SEQ ID NO: 1571377 - RNA, 19 nt, Homo sapiens
  misc_RNA (1)...(19): siRNA sense strand
ggacuacuaccuccuccau

SEQ ID NO: 1571378 - RNA, 19 nt, Homo sapiens
  misc_RNA (1)...(19): siRNA sense strand
gcuacagggugggcacgaa

SEQ ID NO: 1571379 - RNA, 19 nt, Homo sapiens
  misc_RNA (1)...(19): siRNA sense strand
aaccugagcucuccaucuc

SEQ ID NO: 1571380 - RNA, 19 nt, Homo sapiens
  misc_RNA (1)...(19): siRNA sense strand
gugcucuacugcuucucua

SEQ ID NO: 1571381 - RNA, 19 nt, Homo sapiens
  misc_RNA (1)...(19): siRNA sense strand
guuuggcccucuucaucuu

SEQ ID NO: 1571382 - RNA, 19 nt, Homo sapiens
  misc_RNA (1)...(19): siRNA sense strand
gggcgaggucucucuggaa

SEQ ID NO: 1571383 - RNA, 19 nt, Homo sapiens
  misc_RNA (1)...(19): siRNA sense strand
cgacgagagcuccuaccaa

SEQ ID NO: 1571384 - RNA, 19 nt, Homo sapiens
  misc_RNA (1)...(19): siRNA sense strand
ucugcucccucugccuuua

SEQ ID NO: 1571385 - RNA, 19 nt, Homo sapiens
  misc_RNA (1)...(19): siRNA sense strand
gcaaagucaaccucuucau

SEQ ID NO: 1571386 - RNA, 19 nt, Homo sapiens
  misc_RNA (1)...(19): siRNA sense strand
ccucugccuuuaccacugu

SEQ ID NO: 1571387 - RNA, 19 nt, Homo sapiens
  misc_RNA (1)...(19): siRNA sense strand
ccauagggaagcugaaagu

SEQ ID NO: 1571388 - RNA, 19 nt, Homo sapiens
  misc_RNA (1)...(19): siRNA sense strand
ggccauagggaagcugaaa

SEQ ID NO: 1571389 - RNA, 19 nt, Homo sapiens
  misc_RNA (1)...(19): siRNA sense strand
uaggaaggcggaggccaua

SEQ ID NO: 1571390 - RNA, 19 nt, Homo sapiens
  misc_RNA (1)...(19): siRNA sense strand
ccauggugguggccgucua

SEQ ID NO: 1571391 - RNA, 19 nt, Homo sapiens
  misc_RNA (1)...(19): siRNA sense strand
cauccucuuugcuauugug

SEQ ID NO: 1571392 - RNA, 19 nt, Homo sapiens
  misc_RNA (1)...(19): siRNA sense strand
cuacaccaucugcuucuug

SEQ ID NO: 1571393 - RNA, 19 nt, Homo sapiens
  misc_RNA (1)...(19): siRNA sense strand
gcacggccagcguugucuu

SEQ ID NO: 1571394 - RNA, 19 nt, Homo sapiens
  misc_RNA (1)...(19): siRNA sense strand
aauccuggcccuggaguuu

SEQ ID NO: 1571395 - RNA, 19 nt, Homo sapiens
  misc_RNA (1)...(19): siRNA sense strand
cucauccucuuugcuauug

SEQ ID NO: 1571396 - RNA, 19 nt, Homo sapiens
  misc_RNA (1)...(19): siRNA sense strand
gaagacaacuccagacaua

SEQ ID NO: 1571397 - RNA, 19 nt, Homo sapiens
  misc_RNA (1)...(19): siRNA sense strand
gagagaagauucagaaguu

SEQ ID NO: 1571398 - RNA, 19 nt, Homo sapiens
  misc_RNA (1)...(19): siRNA sense strand
gggaaacgguguagaaaga

SEQ ID NO: 1571399 - RNA, 19 nt, Homo sapiens
  misc_RNA (1)...(19): siRNA sense strand
gaaccuggcuggaggacuu

SEQ ID NO: 1571400 - RNA, 19 nt, Homo sapiens
  misc_RNA (1)...(19): siRNA sense strand
guagaagacucuccuuuca

SEQ ID NO: 1571401 - RNA, 19 nt, Homo sapiens
  misc_RNA (1)...(19): siRNA sense strand
caggagaacuggaucagaa

SEQ ID NO: 1571402 - RNA, 19 nt, Homo sapiens
  misc_RNA (1)...(19): siRNA sense strand
gaaccagcccagaaacuaa

SEQ ID NO: 1571403 - RNA, 19 nt, Homo sapiens
  misc_RNA (1)...(19): siRNA sense strand
cccagaaacuaaaggauaa

SEQ ID NO: 1571404 - RNA, 19 nt, Homo sapiens
  misc_RNA (1)...(19): siRNA sense strand
gaacuuauacacggaagaa

SEQ ID NO: 1571405 - RNA, 19 nt, Homo sapiens
  misc_RNA (1)...(19): siRNA sense strand
ccagggaauucaacuguga

SEQ ID NO: 1571406 - RNA, 19 nt, Homo sapiens
  misc_RNA (1)...(19): siRNA sense strand
gaagaguccauuuaggaaa

SEQ ID NO: 1571407 - RNA, 19 nt, Homo sapiens
  misc_RNA (1)...(19): siRNA sense strand
gcccagaaacuaaaggaua

SEQ ID NO: 1571408 - RNA, 19 nt, Homo sapiens
  misc_RNA (1)...(19): siRNA sense strand
ggaaccagcccagaaacua

SEQ ID NO: 1571409 - RNA, 19 nt, Homo sapiens
  misc_RNA (1)...(19): siRNA sense strand
ggaauucaacugugacuuc

SEQ ID NO: 1571410 - RNA, 19 nt, Homo sapiens
  misc_RNA (1)...(19): siRNA sense strand
uaugugaugucuccaagaa

SEQ ID NO: 1571411 - RNA, 19 nt, Homo sapiens
  misc_RNA (1)...(19): siRNA sense strand
agagaagauucagaaguua

SEQ ID NO: 1571412 - RNA, 19 nt, Homo sapiens
  misc_RNA (1)...(19): siRNA sense strand
aaaguaacgucuuaucagu

SEQ ID NO: 1571413 - RNA, 19 nt, Homo sapiens
  misc_RNA (1)...(19): siRNA sense strand
gcaugucacucuccucagu

SEQ ID NO: 1571414 - RNA, 19 nt, Homo sapiens
  misc_RNA (1)...(19): siRNA sense strand
caagaagaguccauuuagg

SEQ ID NO: 1571415 - RNA, 19 nt, Homo sapiens
  misc_RNA (1)...(19): siRNA sense strand
gagaugaggauguggaugu

SEQ ID NO: 1571416 - RNA, 19 nt, Homo sapiens
  misc_RNA (1)...(19): siRNA sense strand
caacuccagacauaauuaa

SEQ ID NO: 1571417 - RNA, 19 nt, Homo sapiens
  misc_RNA (1)...(19): siRNA sense strand
acgaagagguguuuguuuc

SEQ ID NO: 1571418 - RNA, 19 nt, Homo sapiens
  misc_RNA (1)...(19): siRNA sense strand
gaaguuaguaagaguaaag

SEQ ID NO: 1571419 - RNA, 19 nt, Homo sapiens
  misc_RNA (1)...(19): siRNA sense strand
ccaagaagaguccauuuag

SEQ ID NO: 1571420 - RNA, 19 nt, Homo sapiens
  misc_RNA (1)...(19): siRNA sense strand
agaagacucuccuuucagu

SEQ ID NO: 1571421 - RNA, 19 nt, Homo sapiens
  misc_RNA (1)...(19): siRNA sense strand
guucuucccuccacuguag

SEQ ID NO: 1571422 - RNA, 19 nt, Homo sapiens
  misc_RNA (1)...(19): siRNA sense strand
cagcagguccuuaagcaaa

SEQ ID NO: 1571423 - RNA, 19 nt, Homo sapiens
  misc_RNA (1)...(19): siRNA sense strand
ugugaugucuccaagaaga

SEQ ID NO: 1571424 - RNA, 19 nt, Homo sapiens
  misc_RNA (1)...(19): siRNA sense strand
ccacaggacgcccaucuug

SEQ ID NO: 1571425 - RNA, 19 nt, Homo sapiens
  misc_RNA (1)...(19): siRNA sense strand
uggcauuggugacuugaaa

SEQ ID NO: 1571426 - RNA, 19 nt, Homo sapiens
  misc_RNA (1)...(19): siRNA sense strand
gaauucaacugugacuucu

SEQ ID NO: 1571427 - RNA, 19 nt, Homo sapiens
  misc_RNA (1)...(19): siRNA sense strand
gagccucucuccucagucu

SEQ ID NO: 1571428 - RNA, 19 nt, Homo sapiens
  misc_RNA (1)...(19): siRNA sense strand
guuuaccucuccuuuaugu

SEQ ID NO: 1571429 - RNA, 19 nt, Homo sapiens
  misc_RNA (1)...(19): siRNA sense strand
gcaaagaccccagagauga

SEQ ID NO: 1571430 - RNA, 19 nt, Homo sapiens
  misc_RNA (1)...(19): siRNA sense strand
gaagauucagaaguuagua

SEQ ID NO: 1571431 - RNA, 19 nt, Homo sapiens
  misc_RNA (1)...(19): siRNA sense strand
gaaacuaaaggauaaagcu

SEQ ID NO: 1571432 - RNA, 19 nt, Homo sapiens
  misc_RNA (1)...(19): siRNA sense strand
cuccagacauaauuaaaga

SEQ ID NO: 1571433 - RNA, 19 nt, Homo sapiens
  misc_RNA (1)...(19): siRNA sense strand
uccaagaagaguccauuua

SEQ ID NO: 1571434 - RNA, 19 nt, Homo sapiens
  misc_RNA (1)...(19): siRNA sense strand
gacgaagagguguuuguuu

SEQ ID NO: 1571435 - RNA, 19 nt, Homo sapiens
  misc_RNA (1)...(19): siRNA sense strand
gaaaaguaacgucuuauca

SEQ ID NO: 1571436 - RNA, 19 nt, Homo sapiens
  misc_RNA (1)...(19): siRNA sense strand
ccacagacucuagagauga

SEQ ID NO: 1571437 - RNA, 19 nt, Homo sapiens
  misc_RNA (1)...(19): siRNA sense strand
aagaagaguccauuuagga

SEQ ID NO: 1571438 - RNA, 19 nt, Homo sapiens
  misc_RNA (1)...(19): siRNA sense strand
cccaucagcagaacuuaua

SEQ ID NO: 1571439 - RNA, 19 nt, Homo sapiens
  misc_RNA (1)...(19): siRNA sense strand
ucacagagagcuacauugg

SEQ ID NO: 1571440 - RNA, 19 nt, Homo sapiens
  misc_RNA (1)...(19): siRNA sense strand
cuguuuaccucuccuuuau

SEQ ID NO: 1571441 - RNA, 19 nt, Homo sapiens
  misc_RNA (1)...(19): siRNA sense strand
cagaaguuaguaagaguaa

SEQ ID NO: 1571442 - RNA, 19 nt, Homo sapiens
  misc_RNA (1)...(19): siRNA sense strand
gacaacuccagacauaauu

SEQ ID NO: 1571443 - RNA, 19 nt, Homo sapiens
  misc_RNA (1)...(19): siRNA sense strand
gccagcagguccuuaagca

SEQ ID NO: 1571444 - RNA, 19 nt, Homo sapiens
  misc_RNA (1)...(19): siRNA sense strand
gagaacuggaucagaaaga

SEQ ID NO: 1571445 - RNA, 19 nt, Homo sapiens
  misc_RNA (1)...(19): siRNA sense strand
gagaagauucagaaguuag

SEQ ID NO: 1571446 - RNA, 19 nt, Homo sapiens
  misc_RNA (1)...(19): siRNA sense strand
gaccagggaauucaacugu

SEQ ID NO: 1571447 - RNA, 19 nt, Homo sapiens
  misc_RNA (1)...(19): siRNA sense strand
cagcuuggcauuccacaga

SEQ ID NO: 1571448 - RNA, 19 nt, Homo sapiens
  misc_RNA (1)...(19): siRNA sense strand
aaagaggggucuccaaguu

SEQ ID NO: 1571449 - RNA, 19 nt, Homo sapiens
  misc_RNA (1)...(19): siRNA sense strand
ccaggaacagcaugccuaa

SEQ ID NO: 1571450 - RNA, 19 nt, Homo sapiens
  misc_RNA (1)...(19): siRNA sense strand
ggaagacaacuccagacau

SEQ ID NO: 1571451 - RNA, 19 nt, Homo sapiens
  misc_RNA (1)...(19): siRNA sense strand
acaacuccagacauaauua

SEQ ID NO: 1571452 - RNA, 19 nt, Homo sapiens
  misc_RNA (1)...(19): siRNA sense strand
gggcacgccucagaaucaa

SEQ ID NO: 1571453 - RNA, 19 nt, Homo sapiens
  misc_RNA (1)...(19): siRNA sense strand
uuaccucuccuuuauguga

SEQ ID NO: 1571454 - RNA, 19 nt, Homo sapiens
  misc_RNA (1)...(19): siRNA sense strand
aaggaucugugaccugaga

SEQ ID NO: 1571455 - RNA, 19 nt, Homo sapiens
  misc_RNA (1)...(19): siRNA sense strand
agacaacuccagacauaau

SEQ ID NO: 1571456 - RNA, 19 nt, Homo sapiens
  misc_RNA (1)...(19): siRNA sense strand
cuucccaaacuucgaauua

SEQ ID NO: 1571457 - RNA, 19 nt, Homo sapiens
  misc_RNA (1)...(19): siRNA sense strand
caagugacacagagcaugu

SEQ ID NO: 1571458 - RNA, 19 nt, Homo sapiens
  misc_RNA (1)...(19): siRNA sense strand
gaagggaccgagccucucu

SEQ ID NO: 1571459 - RNA, 19 nt, Homo sapiens
  misc_RNA (1)...(19): siRNA sense strand
ggagcaucguggaguguca

SEQ ID NO: 1571460 - RNA, 19 nt, Homo sapiens
  misc_RNA (1)...(19): siRNA sense strand
cagaggaaccagcccagaa

SEQ ID NO: 1571461 - RNA, 19 nt, Homo sapiens
  misc_RNA (1)...(19): siRNA sense strand
ccauggcauuggugacuug

SEQ ID NO: 1571462 - RNA, 19 nt, Homo sapiens
  misc_RNA (1)...(19): siRNA sense strand
agaggaaccagcccagaaa

SEQ ID NO: 1571463 - RNA, 19 nt, Homo sapiens
  misc_RNA (1)...(19): siRNA sense strand
gaagacucuccuuucaguu

SEQ ID NO: 1571464 - RNA, 19 nt, Homo sapiens
  misc_RNA (1)...(19): siRNA sense strand
ucagaaguuaguaagagua

SEQ ID NO: 1571465 - RNA, 19 nt, Homo sapiens
  misc_RNA (1)...(19): siRNA sense strand
gggaagacaacuccagaca

SEQ ID NO: 1571466 - RNA, 19 nt, Homo sapiens
  misc_RNA (1)...(19): siRNA sense strand
gcaaaccugaacccaccua

SEQ ID NO: 1571467 - RNA, 19 nt, Homo sapiens
  misc_RNA (1)...(19): siRNA sense strand
ccaaacuucgaauuaagaa

SEQ ID NO: 1571468 - RNA, 19 nt, Homo sapiens
  misc_RNA (1)...(19): siRNA sense strand
guugggaaacgguguagaa

SEQ ID NO: 1571469 - RNA, 19 nt, Homo sapiens
  misc_RNA (1)...(19): siRNA sense strand
agaagaguccauuuaggaa

SEQ ID NO: 1571470 - RNA, 19 nt, Homo sapiens
  misc_RNA (1)...(19): siRNA sense strand
ggacaguuuggguugaguu

SEQ ID NO: 1571471 - RNA, 19 nt, Homo sapiens
  misc_RNA (1)...(19): siRNA sense strand
ucugugaccugagagaaga

SEQ ID NO: 1571472 - RNA, 19 nt, Homo sapiens
  misc_RNA (1)...(19): siRNA sense strand
cuugaaaaguaacgucuua

SEQ ID NO: 1571473 - RNA, 19 nt, Homo sapiens
  misc_RNA (1)...(19): siRNA sense strand
gggagacgaagagguguuu

SEQ ID NO: 1571474 - RNA, 19 nt, Homo sapiens
  misc_RNA (1)...(19): siRNA sense strand
gaaucaaacacaccaacag

SEQ ID NO: 1571475 - RNA, 19 nt, Homo sapiens
  misc_RNA (1)...(19): siRNA sense strand
uucccaaacuucgaauuaa

SEQ ID NO: 1571476 - RNA, 19 nt, Homo sapiens
  misc_RNA (1)...(19): siRNA sense strand
gagacgaagagguguuugu

SEQ ID NO: 1571477 - RNA, 19 nt, Homo sapiens
  misc_RNA (1)...(19): siRNA sense strand
gaccacggccuugaacuca

SEQ ID NO: 1571478 - RNA, 19 nt, Homo sapiens
  misc_RNA (1)...(19): siRNA sense strand
aaccugaacccaccuaugu

SEQ ID NO: 1571479 - RNA, 19 nt, Homo sapiens
  misc_RNA (1)...(19): siRNA sense strand
auucaacugugacuucuuc

SEQ ID NO: 1571480 - RNA, 19 nt, Homo sapiens
  misc_RNA (1)...(19): siRNA sense strand
ggaccacggccuugaacuc

SEQ ID NO: 1571481 - RNA, 19 nt, Homo sapiens
  misc_RNA (1)...(19): siRNA sense strand
uaacgucuuaucaguggaa

SEQ ID NO: 1571482 - RNA, 19 nt, Homo sapiens
  misc_RNA (1)...(19): siRNA sense strand
uguagaagacucuccuuuc

SEQ ID NO: 1571483 - RNA, 19 nt, Homo sapiens
  misc_RNA (1)...(19): siRNA sense strand
ugagagaagauucagaagu

SEQ ID NO: 1571484 - RNA, 19 nt, Homo sapiens
  misc_RNA (1)...(19): siRNA sense strand
gccuggcucuccucugaug

SEQ ID NO: 1571485 - RNA, 19 nt, Homo sapiens
  misc_RNA (1)...(19): siRNA sense strand
cccacagacucuagagaug

SEQ ID NO: 1571486 - RNA, 19 nt, Homo sapiens
  misc_RNA (1)...(19): siRNA sense strand
gagcaaagaccccagagau

SEQ ID NO: 1571487 - RNA, 19 nt, Homo sapiens
  misc_RNA (1)...(19): siRNA sense strand
gaucugugaccugagagaa

SEQ ID NO: 1571488 - RNA, 19 nt, Homo sapiens
  misc_RNA (1)...(19): siRNA sense strand
gguguagaaagaccucuga

SEQ ID NO: 1571489 - RNA, 19 nt, Homo sapiens
  misc_RNA (1)...(19): siRNA sense strand
aagacucuccuuucaguug

SEQ ID NO: 1571490 - RNA, 19 nt, Homo sapiens
  misc_RNA (1)...(19): siRNA sense strand
acccacggcccuucuagua

SEQ ID NO: 1571491 - RNA, 19 nt, Homo sapiens
  misc_RNA (1)...(19): siRNA sense strand
ucccaaacuucgaauuaag

SEQ ID NO: 1571492 - RNA, 19 nt, Homo sapiens
  misc_RNA (1)...(19): siRNA sense strand
ccucuccucugcucauuac

SEQ ID NO: 1571493 - RNA, 19 nt, Homo sapiens
  misc_RNA (1)...(19): siRNA sense strand
gaccccagcucuucauuag

SEQ ID NO: 1571494 - RNA, 19 nt, Homo sapiens
  misc_RNA (1)...(19): siRNA sense strand
ggagaacuggaucagaaag

SEQ ID NO: 1571495 - RNA, 19 nt, Homo sapiens
  misc_RNA (1)...(19): siRNA sense strand
acaggacgcccaucuugga

SEQ ID NO: 1571496 - RNA, 19 nt, Homo sapiens
  misc_RNA (1)...(19): siRNA sense strand
guaaccagguaaagaauuu

SEQ ID NO: 1571497 - RNA, 19 nt, Homo sapiens
  misc_RNA (1)...(19): siRNA sense strand
gcagaaguguuccgugaug

SEQ ID NO: 1571498 - RNA, 19 nt, Homo sapiens
  misc_RNA (1)...(19): siRNA sense strand
uaugauaaguaaccaggua

SEQ ID NO: 1571499 - RNA, 19 nt, Homo sapiens
  misc_RNA (1)...(19): siRNA sense strand
ggacuuggauaccauaaaa

SEQ ID NO: 1571500 - RNA, 19 nt, Homo sapiens
  misc_RNA (1)...(19): siRNA sense strand
uaaguaaccagguaaagaa

SEQ ID NO: 1571501 - RNA, 19 nt, Homo sapiens
  misc_RNA (1)...(19): siRNA sense strand
ccucagaguucaucucaga

SEQ ID NO: 1571502 - RNA, 19 nt, Homo sapiens
  misc_RNA (1)...(19): siRNA sense strand
ggauuuaccugaagaucuc

SEQ ID NO: 1571503 - RNA, 19 nt, Homo sapiens
  misc_RNA (1)...(19): siRNA sense strand
gagaggaguaugaggagua

SEQ ID NO: 1571504 - RNA, 19 nt, Homo sapiens
  misc_RNA (1)...(19): siRNA sense strand
ugaaauggaugagaaucaa

SEQ ID NO: 1571505 - RNA, 19 nt, Homo sapiens
  misc_RNA (1)...(19): siRNA sense strand
agagugaaauggaugagaa

SEQ ID NO: 1571506 - RNA, 19 nt, Homo sapiens
  misc_RNA (1)...(19): siRNA sense strand
gcaaaugauugaggagaag

SEQ ID NO: 1571507 - RNA, 19 nt, Homo sapiens
  misc_RNA (1)...(19): siRNA sense strand
gaaauggaugagaaucaaa

SEQ ID NO: 1571508 - RNA, 19 nt, Homo sapiens
  misc_RNA (1)...(19): siRNA sense strand
aggagaagauggaaagaga

SEQ ID NO: 1571509 - RNA, 19 nt, Homo sapiens
  misc_RNA (1)...(19): siRNA sense strand
aaugguagaugaagaucaa

SEQ ID NO: 1571510 - RNA, 19 nt, Homo sapiens
  misc_RNA (1)...(19): siRNA sense strand
agaaggaggugcaucugau

SEQ ID NO: 1571511 - RNA, 19 nt, Homo sapiens
  misc_RNA (1)...(19): siRNA sense strand
gaaguguuccgugauguga

SEQ ID NO: 1571512 - RNA, 19 nt, Homo sapiens
  misc_RNA (1)...(19): siRNA sense strand
uacagaaucuccagaacau

SEQ ID NO: 1571513 - RNA, 19 nt, Homo sapiens
  misc_RNA (1)...(19): siRNA sense strand
aagaagaggaagaagauaa

SEQ ID NO: 1571514 - RNA, 19 nt, Homo sapiens
  misc_RNA (1)...(19): siRNA sense strand
gagaagauggaaagagaug

SEQ ID NO: 1571515 - RNA, 19 nt, Homo sapiens
  misc_RNA (1)...(19): siRNA sense strand
gggcaugccucagaguuca

SEQ ID NO: 1571516 - RNA, 19 nt, Homo sapiens
  misc_RNA (1)...(19): siRNA sense strand
gguggugggucugaagaaa

SEQ ID NO: 1571517 - RNA, 19 nt, Homo sapiens
  misc_RNA (1)...(19): siRNA sense strand
uggagaugauguggauuua

SEQ ID NO: 1571518 - RNA, 19 nt, Homo sapiens
  misc_RNA (1)...(19): siRNA sense strand
ucaagaagaggaagaagau

SEQ ID NO: 1571519 - RNA, 19 nt, Homo sapiens
  misc_RNA (1)...(19): siRNA sense strand
ggaaaaugguagaugaaga

SEQ ID NO: 1571520 - RNA, 19 nt, Homo sapiens
  misc_RNA (1)...(19): siRNA sense strand
cagcggagcagaaguguuc

SEQ ID NO: 1571521 - RNA, 19 nt, Homo sapiens
  misc_RNA (1)...(19): siRNA sense strand
agaaagggcaugccucaga

SEQ ID NO: 1571522 - RNA, 19 nt, Homo sapiens
  misc_RNA (1)...(19): siRNA sense strand
gagaugauguggauuuacc

SEQ ID NO: 1571523 - RNA, 19 nt, Homo sapiens
  misc_RNA (1)...(19): siRNA sense strand
aaauacaggcucccaaaga

SEQ ID NO: 1571524 - RNA, 19 nt, Homo sapiens
  misc_RNA (1)...(19): siRNA sense strand
caaagagugaaauggauga

SEQ ID NO: 1571525 - RNA, 19 nt, Homo sapiens
  misc_RNA (1)...(19): siRNA sense strand
agaugaagaucaagaagag

SEQ ID NO: 1571526 - RNA, 19 nt, Homo sapiens
  misc_RNA (1)...(19): siRNA sense strand
ugauguggauuuaccugaa

SEQ ID NO: 1571527 - RNA, 19 nt, Homo sapiens
  misc_RNA (1)...(19): siRNA sense strand
agaagaggaagaagauaaa

SEQ ID NO: 1571528 - RNA, 19 nt, Homo sapiens
  misc_RNA (1)...(19): siRNA sense strand
gaggaagaagauaaagauu

SEQ ID NO: 1571529 - RNA, 19 nt, Homo sapiens
  misc_RNA (1)...(19): siRNA sense strand
ugacuagagaggaguauga

SEQ ID NO: 1571530 - RNA, 19 nt, Homo sapiens
  misc_RNA (1)...(19): siRNA sense strand
gaagaucuccggaaaaugg

SEQ ID NO: 1571531 - RNA, 19 nt, Homo sapiens
  misc_RNA (1)...(19): siRNA sense strand
gauguggauuuaccugaag

SEQ ID NO: 1571532 - RNA, 19 nt, Homo sapiens
  misc_RNA (1)...(19): siRNA sense strand
gauacagaaucuccagaac

SEQ ID NO: 1571533 - RNA, 19 nt, Homo sapiens
  misc_RNA (1)...(19): siRNA sense strand
caagaagaggaagaagaua

SEQ ID NO: 1571534 - RNA, 19 nt, Homo sapiens
  misc_RNA (1)...(19): siRNA sense strand
gguagaugaagaucaagaa

SEQ ID NO: 1571535 - RNA, 19 nt, Homo sapiens
  misc_RNA (1)...(19): siRNA sense strand
cucaagggaugacuagaga

SEQ ID NO: 1571536 - RNA, 19 nt, Homo sapiens
  misc_RNA (1)...(19): siRNA sense strand
gaaggaggugcaucugauc

SEQ ID NO: 1571537 - RNA, 19 nt, Homo sapiens
  misc_RNA (1)...(19): siRNA sense strand
gaaaaugguagaugaagau

SEQ ID NO: 1571538 - RNA, 19 nt, Homo sapiens
  misc_RNA (1)...(19): siRNA sense strand
aauacaggcucccaaagag

SEQ ID NO: 1571539 - RNA, 19 nt, Homo sapiens
  misc_RNA (1)...(19): siRNA sense strand
ggcuggagaugauguggau

SEQ ID NO: 1571540 - RNA, 19 nt, Homo sapiens
  misc_RNA (1)...(19): siRNA sense strand
gcagacagcggagcagaag

SEQ ID NO: 1571541 - RNA, 19 nt, Homo sapiens
  misc_RNA (1)...(19): siRNA sense strand
cagaacauggacuuggaua

SEQ ID NO: 1571542 - RNA, 19 nt, Homo sapiens
  misc_RNA (1)...(19): siRNA sense strand
agaggaagaagauaaagau

SEQ ID NO: 1571543 - RNA, 19 nt, Homo sapiens
  misc_RNA (1)...(19): siRNA sense strand
uagaugaagaucaagaaga

SEQ ID NO: 1571544 - RNA, 19 nt, Homo sapiens
  misc_RNA (1)...(19): siRNA sense strand
gugaaauggaugagaauca

SEQ ID NO: 1571545 - RNA, 19 nt, Homo sapiens
  misc_RNA (1)...(19): siRNA sense strand
gaagaaggaggugcaucug

SEQ ID NO: 1571546 - RNA, 19 nt, Homo sapiens
  misc_RNA (1)...(19): siRNA sense strand
gaacauggacuuggauacc

SEQ ID NO: 1571547 - RNA, 19 nt, Homo sapiens
  misc_RNA (1)...(19): siRNA sense strand
gaagaggaagaagauaaag

SEQ ID NO: 1571548 - RNA, 19 nt, Homo sapiens
  misc_RNA (1)...(19): siRNA sense strand
cccaaagagugaaauggau

SEQ ID NO: 1571549 - RNA, 19 nt, Homo sapiens
  misc_RNA (1)...(19): siRNA sense strand
gcucaagggaugacuagag

SEQ ID NO: 1571550 - RNA, 19 nt, Homo sapiens
  misc_RNA (1)...(19): siRNA sense strand
ggagaagauggaaagagau

SEQ ID NO: 1571551 - RNA, 19 nt, Homo sapiens
  misc_RNA (1)...(19): siRNA sense strand
gaagauggaaagagaugcu

SEQ ID NO: 1571552 - RNA, 19 nt, Homo sapiens
  misc_RNA (1)...(19): siRNA sense strand
gcagcucaagggaugacua

SEQ ID NO: 1571553 - RNA, 19 nt, Homo sapiens
  misc_RNA (1)...(19): siRNA sense strand
gaguaugaggaguaucaaa

SEQ ID NO: 1571554 - RNA, 19 nt, Homo sapiens
  misc_RNA (1)...(19): siRNA sense strand
agcaaaugauugaggagaa

SEQ ID NO: 1571555 - RNA, 19 nt, Homo sapiens
  misc_RNA (1)...(19): siRNA sense strand
ggaugacuagagaggagua

SEQ ID NO: 1571556 - RNA, 19 nt, Homo sapiens
  misc_RNA (1)...(19): siRNA sense strand
agaggaguaugaggaguau

SEQ ID NO: 1571557 - RNA, 19 nt, Homo sapiens
  misc_RNA (1)...(19): siRNA sense strand
gauaaguaaccagguaaag

SEQ ID NO: 1571558 - RNA, 19 nt, Homo sapiens
  misc_RNA (1)...(19): siRNA sense strand
agacagcggagcagaagug

SEQ ID NO: 1571559 - RNA, 19 nt, Homo sapiens
  misc_RNA (1)...(19): siRNA sense strand
auaaguaaccagguaaaga

SEQ ID NO: 1571560 - RNA, 19 nt, Homo sapiens
  misc_RNA (1)...(19): siRNA sense strand
cuggagaugauguggauuu

SEQ ID NO: 1571561 - RNA, 19 nt, Homo sapiens
  misc_RNA (1)...(19): siRNA sense strand
cagaaguguuccgugaugu

SEQ ID NO: 1571562 - RNA, 19 nt, Homo sapiens
  misc_RNA (1)...(19): siRNA sense strand
aggaagaagauaaagauuc

SEQ ID NO: 1571563 - RNA, 19 nt, Homo sapiens
  misc_RNA (1)...(19): siRNA sense strand
agaagaaggaggugcaucu

SEQ ID NO: 1571564 - RNA, 19 nt, Homo sapiens
  misc_RNA (1)...(19): siRNA sense strand
aagaaggaggugcaucuga

SEQ ID NO: 1571565 - RNA, 19 nt, Homo sapiens
  misc_RNA (1)...(19): siRNA sense strand
caaaugauugaggagaaga

SEQ ID NO: 1571566 - RNA, 19 nt, Homo sapiens
  misc_RNA (1)...(19): siRNA sense strand
aagaggaagaagauaaaga

SEQ ID NO: 1571567 - RNA, 19 nt, Homo sapiens
  misc_RNA (1)...(19): siRNA sense strand
auacagaaucuccagaaca

SEQ ID NO: 1571568 - RNA, 19 nt, Homo sapiens
  misc_RNA (1)...(19): siRNA sense strand
ugauaaguaaccagguaaa

SEQ ID NO: 1571569 - RNA, 19 nt, Homo sapiens
  misc_RNA (1)...(19): siRNA sense strand
guaaagaccugcaauguua

SEQ ID NO: 1571570 - RNA, 19 nt, Homo sapiens
  misc_RNA (1)...(19): siRNA sense strand
gaacaacuguccugugaau

SEQ ID NO: 1571571 - RNA, 19 nt, Homo sapiens
  misc_RNA (1)...(19): siRNA sense strand
guacacaacucaaagaaug

SEQ ID NO: 1571572 - RNA, 19 nt, Homo sapiens
  misc_RNA (1)...(19): siRNA sense strand
uaaagaaaguguuggauga

SEQ ID NO: 1571573 - RNA, 19 nt, Homo sapiens
  misc_RNA (1)...(19): siRNA sense strand
gaucuacacuugagcacua

SEQ ID NO: 1571574 - RNA, 19 nt, Homo sapiens
  misc_RNA (1)...(19): siRNA sense strand
cccaauaccucaucucaua

SEQ ID NO: 1571575 - RNA, 19 nt, Homo sapiens
  misc_RNA (1)...(19): siRNA sense strand
gauuguacaucacaucuuu

SEQ ID NO: 1571576 - RNA, 19 nt, Homo sapiens
  misc_RNA (1)...(19): siRNA sense strand
cagaaacucuaaucaacua

SEQ ID NO: 1571577 - RNA, 19 nt, Homo sapiens
  misc_RNA (1)...(19): siRNA sense strand
cagaacaacuguccuguga

SEQ ID NO: 1571578 - RNA, 19 nt, Homo sapiens
  misc_RNA (1)...(19): siRNA sense strand
uaagcagaauuccaaguua

SEQ ID NO: 1571579 - RNA, 19 nt, Homo sapiens
  misc_RNA (1)...(19): siRNA sense strand
guaagucucuaauuucaga

SEQ ID NO: 1571580 - RNA, 19 nt, Homo sapiens
  misc_RNA (1)...(19): siRNA sense strand
gucaguaagucucuaauuu

SEQ ID NO: 1571581 - RNA, 19 nt, Homo sapiens
  misc_RNA (1)...(19): siRNA sense strand
gggaaaagccugaacauua

SEQ ID NO: 1571582 - RNA, 19 nt, Homo sapiens
  misc_RNA (1)...(19): siRNA sense strand
gagaccagcugcuucaaga

SEQ ID NO: 1571583 - RNA, 19 nt, Homo sapiens
  misc_RNA (1)...(19): siRNA sense strand
ggaaaagccugaacauuau

SEQ ID NO: 1571584 - RNA, 19 nt, Homo sapiens
  misc_RNA (1)...(19): siRNA sense strand
gaggaagaaucauuguuug

SEQ ID NO: 1571585 - RNA, 19 nt, Homo sapiens
  misc_RNA (1)...(19): siRNA sense strand
guacaucacaucuuucaaa

SEQ ID NO: 1571586 - RNA, 19 nt, Homo sapiens
  misc_RNA (1)...(19): siRNA sense strand
gaagaaucauuguuugaag

SEQ ID NO: 1571587 - RNA, 19 nt, Homo sapiens
  misc_RNA (1)...(19): siRNA sense strand
cauaauauauccgugauug

SEQ ID NO: 1571588 - RNA, 19 nt, Homo sapiens
  misc_RNA (1)...(19): siRNA sense strand
gaucguugcuguuuaccaa

SEQ ID NO: 1571589 - RNA, 19 nt, Homo sapiens
  misc_RNA (1)...(19): siRNA sense strand
uaacagugguucugauugu

SEQ ID NO: 1571590 - RNA, 19 nt, Homo sapiens
  misc_RNA (1)...(19): siRNA sense strand
ucuaagaccuuuggcuaua

SEQ ID NO: 1571591 - RNA, 19 nt, Homo sapiens
  misc_RNA (1)...(19): siRNA sense strand
aaucagaaguugaaucaga

SEQ ID NO: 1571592 - RNA, 19 nt, Homo sapiens
  misc_RNA (1)...(19): siRNA sense strand
ggaauucccuugcaaaaug

SEQ ID NO: 1571593 - RNA, 19 nt, Homo sapiens
  misc_RNA (1)...(19): siRNA sense strand
gaaguugaaucagagcuau

SEQ ID NO: 1571594 - RNA, 19 nt, Homo sapiens
  misc_RNA (1)...(19): siRNA sense strand
ggaagaaucauuguuugaa

SEQ ID NO: 1571595 - RNA, 19 nt, Homo sapiens
  misc_RNA (1)...(19): siRNA sense strand
caaagaaaguggccauaac

SEQ ID NO: 1571596 - RNA, 19 nt, Homo sapiens
  misc_RNA (1)...(19): siRNA sense strand
aagguacacugcaaacaua

SEQ ID NO: 1571597 - RNA, 19 nt, Homo sapiens
  misc_RNA (1)...(19): siRNA sense strand
aagcagaauuccaaguuaa

SEQ ID NO: 1571598 - RNA, 19 nt, Homo sapiens
  misc_RNA (1)...(19): siRNA sense strand
aauguuagaccaccaaaua

SEQ ID NO: 1571599 - RNA, 19 nt, Homo sapiens
  misc_RNA (1)...(19): siRNA sense strand
gaaucuagucaacccaaua

SEQ ID NO: 1571600 - RNA, 19 nt, Homo sapiens
  misc_RNA (1)...(19): siRNA sense strand
gguaaagaccugcaauguu

SEQ ID NO: 1571601 - RNA, 19 nt, Homo sapiens
  misc_RNA (1)...(19): siRNA sense strand
ucagaaagguacacugcaa

SEQ ID NO: 1571602 - RNA, 19 nt, Homo sapiens
  misc_RNA (1)...(19): siRNA sense strand
ugaggaagaaucauuguuu

SEQ ID NO: 1571603 - RNA, 19 nt, Homo sapiens
  misc_RNA (1)...(19): siRNA sense strand
caguaagucucuaauuuca

SEQ ID NO: 1571604 - RNA, 19 nt, Homo sapiens
  misc_RNA (1)...(19): siRNA sense strand
agaaccagaugaaguaaug

SEQ ID NO: 1571605 - RNA, 19 nt, Homo sapiens
  misc_RNA (1)...(19): siRNA sense strand
gaaauuaaagggaagaaac

SEQ ID NO: 1571606 - RNA, 19 nt, Homo sapiens
  misc_RNA (1)...(19): siRNA sense strand
gccagaaccagaugaagua

SEQ ID NO: 1571607 - RNA, 19 nt, Homo sapiens
  misc_RNA (1)...(19): siRNA sense strand
caaauacugcuuuagauca

SEQ ID NO: 1571608 - RNA, 19 nt, Homo sapiens
  misc_RNA (1)...(19): siRNA sense strand
caucuacuuucuggcauua

SEQ ID NO: 1571609 - RNA, 19 nt, Homo sapiens
  misc_RNA (1)...(19): siRNA sense strand
caaauuaaagcugucagua

SEQ ID NO: 1571610 - RNA, 19 nt, Homo sapiens
  misc_RNA (1)...(19): siRNA sense strand
ccacaggaaucuauuucug

SEQ ID NO: 1571611 - RNA, 19 nt, Homo sapiens
  misc_RNA (1)...(19): siRNA sense strand
gaagcagcauauccugaga

SEQ ID NO: 1571612 - RNA, 19 nt, Homo sapiens
  misc_RNA (1)...(19): siRNA sense strand
gacccauuaugacaugaua

SEQ ID NO: 1571613 - RNA, 19 nt, Homo sapiens
  misc_RNA (1)...(19): siRNA sense strand
gaaagaaagcuugguagca

SEQ ID NO: 1571614 - RNA, 19 nt, Homo sapiens
  misc_RNA (1)...(19): siRNA sense strand
aagcauaauucaucccauu

SEQ ID NO: 1571615 - RNA, 19 nt, Homo sapiens
  misc_RNA (1)...(19): siRNA sense strand
gaaugaagcacaguucuca

SEQ ID NO: 1571616 - RNA, 19 nt, Homo sapiens
  misc_RNA (1)...(19): siRNA sense strand
gcaaaccacucggaaaauu

SEQ ID NO: 1571617 - RNA, 19 nt, Homo sapiens
  misc_RNA (1)...(19): siRNA sense strand
uggcauuacugauuuaugu

SEQ ID NO: 1571618 - RNA, 19 nt, Homo sapiens
  misc_RNA (1)...(19): siRNA sense strand
caacuacagccaauucgaa

SEQ ID NO: 1571619 - RNA, 19 nt, Homo sapiens
  misc_RNA (1)...(19): siRNA sense strand
cauaauucaucccauuuca

SEQ ID NO: 1571620 - RNA, 19 nt, Homo sapiens
  misc_RNA (1)...(19): siRNA sense strand
gaaguaaugagcuuucagu

SEQ ID NO: 1571621 - RNA, 19 nt, Homo sapiens
  misc_RNA (1)...(19): siRNA sense strand
caguucaugucuucucuaa

SEQ ID NO: 1571622 - RNA, 19 nt, Homo sapiens
  misc_RNA (1)...(19): siRNA sense strand
gcaaacauaaagaaagugu

SEQ ID NO: 1571623 - RNA, 19 nt, Homo sapiens
  misc_RNA (1)...(19): siRNA sense strand
gcaucuacuuucuggcauu

SEQ ID NO: 1571624 - RNA, 19 nt, Homo sapiens
  misc_RNA (1)...(19): siRNA sense strand
guaauucuccagcuauuca

SEQ ID NO: 1571625 - RNA, 19 nt, Homo sapiens
  misc_RNA (1)...(19): siRNA sense strand
ucaaagaaaguggccauaa

SEQ ID NO: 1571626 - RNA, 19 nt, Homo sapiens
  misc_RNA (1)...(19): siRNA sense strand
cguauuaagccuaaagaaa

SEQ ID NO: 1571627 - RNA, 19 nt, Homo sapiens
  misc_RNA (1)...(19): siRNA sense strand
gcuaaguacacaacucaaa

SEQ ID NO: 1571628 - RNA, 19 nt, Homo sapiens
  misc_RNA (1)...(19): siRNA sense strand
caauacuucugucccuuau

SEQ ID NO: 1571629 - RNA, 19 nt, Homo sapiens
  misc_RNA (1)...(19): siRNA sense strand
ucaauacuucugucccuua

SEQ ID NO: 1571630 - RNA, 19 nt, Homo sapiens
  misc_RNA (1)...(19): siRNA sense strand
cuucaggauuugccuuuaa

SEQ ID NO: 1571631 - RNA, 19 nt, Homo sapiens
  misc_RNA (1)...(19): siRNA sense strand
aauuaaagcugucaguaag

SEQ ID NO: 1571632 - RNA, 19 nt, Homo sapiens
  misc_RNA (1)...(19): siRNA sense strand
cagaugaaguaaugagcuu

SEQ ID NO: 1571633 - RNA, 19 nt, Homo sapiens
  misc_RNA (1)...(19): siRNA sense strand
agaaauugcugguacuuuu

SEQ ID NO: 1571634 - RNA, 19 nt, Homo sapiens
  misc_RNA (1)...(19): siRNA sense strand
auacuucugucccuuauuc

SEQ ID NO: 1571635 - RNA, 19 nt, Homo sapiens
  misc_RNA (1)...(19): siRNA sense strand
caacauggagaauuugcuu

SEQ ID NO: 1571636 - RNA, 19 nt, Homo sapiens
  misc_RNA (1)...(19): siRNA sense strand
gaagaguguuugccuugac

SEQ ID NO: 1571637 - RNA, 19 nt, Homo sapiens
  misc_RNA (1)...(19): siRNA sense strand
gagaaauugcugguacuuu

SEQ ID NO: 1571638 - RNA, 19 nt, Homo sapiens
  misc_RNA (1)...(19): siRNA sense strand
gcuaacagugguucugauu

SEQ ID NO: 1571639 - RNA, 19 nt, Homo sapiens
  misc_RNA (1)...(19): siRNA sense strand
ugaggauucugaugggauu

SEQ ID NO: 1571640 - RNA, 19 nt, Homo sapiens
  misc_RNA (1)...(19): siRNA sense strand
ccugauggcuuugaaaaua

SEQ ID NO: 1571641 - RNA, 19 nt, Homo sapiens
  misc_RNA (1)...(19): siRNA sense strand
aaucagaaauggaguucau

SEQ ID NO: 1571642 - RNA, 19 nt, Homo sapiens
  misc_RNA (1)...(19): siRNA sense strand
caaagaaugaagcacaguu

SEQ ID NO: 1571643 - RNA, 19 nt, Homo sapiens
  misc_RNA (1)...(19): siRNA sense strand
cuaaucaacuacagccaau

SEQ ID NO: 1571644 - RNA, 19 nt, Homo sapiens
  misc_RNA (1)...(19): siRNA sense strand
uuucuggcauuacugauuu

SEQ ID NO: 1571645 - RNA, 19 nt, Homo sapiens
  misc_RNA (1)...(19): siRNA sense strand
acccacaugugaaaucuuu

SEQ ID NO: 1571646 - RNA, 19 nt, Homo sapiens
  misc_RNA (1)...(19): siRNA sense strand
caauugaggaagaaucauu

SEQ ID NO: 1571647 - RNA, 19 nt, Homo sapiens
  misc_RNA (1)...(19): siRNA sense strand
acauggagaauuugcuuua

SEQ ID NO: 1571648 - RNA, 19 nt, Homo sapiens
  misc_RNA (1)...(19): siRNA sense strand
ugagaucguugcuguuuac

SEQ ID NO: 1571649 - RNA, 19 nt, Homo sapiens
  misc_RNA (1)...(19): siRNA sense strand
caccaaauacugcuuuaga

SEQ ID NO: 1571650 - RNA, 19 nt, Homo sapiens
  misc_RNA (1)...(19): siRNA sense strand
uagcagaaacucuaaucaa

SEQ ID NO: 1571651 - RNA, 19 nt, Homo sapiens
  misc_RNA (1)...(19): siRNA sense strand
aaaguggccauaacgagua

SEQ ID NO: 1571652 - RNA, 19 nt, Homo sapiens
  misc_RNA (1)...(19): siRNA sense strand
ugauuuaugucuucaggau

SEQ ID NO: 1571653 - RNA, 19 nt, Homo sapiens
  misc_RNA (1)...(19): siRNA sense strand
cugcaaacauaaagaaagu

SEQ ID NO: 1571654 - RNA, 19 nt, Homo sapiens
  misc_RNA (1)...(19): siRNA sense strand
gauugcugaucuacacuug

SEQ ID NO: 1571655 - RNA, 19 nt, Homo sapiens
  misc_RNA (1)...(19): siRNA sense strand
ucaguaagucucuaauuuc

SEQ ID NO: 1571656 - RNA, 19 nt, Homo sapiens
  misc_RNA (1)...(19): siRNA sense strand
gcagaaacucuaaucaacu

SEQ ID NO: 1571657 - RNA, 19 nt, Homo sapiens
  misc_RNA (1)...(19): siRNA sense strand
guuaagacucgaaucagaa

SEQ ID NO: 1571658 - RNA, 19 nt, Homo sapiens
  misc_RNA (1)...(19): siRNA sense strand
uguuaagacucgaaucaga

SEQ ID NO: 1571659 - RNA, 19 nt, Homo sapiens
  misc_RNA (1)...(19): siRNA sense strand
gcagaauuccaaguuaaau

SEQ ID NO: 1571660 - RNA, 19 nt, Homo sapiens
  misc_RNA (1)...(19): siRNA sense strand
uaaguacacaacucaaaga

SEQ ID NO: 1571661 - RNA, 19 nt, Homo sapiens
  misc_RNA (1)...(19): siRNA sense strand
aaccagaugucaaccugaa

SEQ ID NO: 1571662 - RNA, 19 nt, Homo sapiens
  misc_RNA (1)...(19): siRNA sense strand
ccaauaccucaucucauaa

SEQ ID NO: 1571663 - RNA, 19 nt, Homo sapiens
  misc_RNA (1)...(19): siRNA sense strand
ugaacauuaugcuauggaa

SEQ ID NO: 1571664 - RNA, 19 nt, Homo sapiens
  misc_RNA (1)...(19): siRNA sense strand
gcauaauucaucccauuuc

SEQ ID NO: 1571665 - RNA, 19 nt, Homo sapiens
  misc_RNA (1)...(19): siRNA sense strand
ggaaagcuaaguacacaac

SEQ ID NO: 1571666 - RNA, 19 nt, Homo sapiens
  misc_RNA (1)...(19): siRNA sense strand
gaucauaguagaaaaguug

SEQ ID NO: 1571667 - RNA, 19 nt, Homo sapiens
  misc_RNA (1)...(19): siRNA sense strand
ccaaauacugcuuuagauc

SEQ ID NO: 1571668 - RNA, 19 nt, Homo sapiens
  misc_RNA (1)...(19): siRNA sense strand
gaaagguacacugcaaaca

SEQ ID NO: 1571669 - RNA, 19 nt, Homo sapiens
  misc_RNA (1)...(19): siRNA sense strand
gaugguggcuuccagaugu

SEQ ID NO: 1571670 - RNA, 19 nt, Homo sapiens
  misc_RNA (1)...(19): siRNA sense strand
gccacagcauuuaauauaa

SEQ ID NO: 1571671 - RNA, 19 nt, Homo sapiens
  misc_RNA (1)...(19): siRNA sense strand
gauauuugccacagcauuu

SEQ ID NO: 1571672 - RNA, 19 nt, Homo sapiens
  misc_RNA (1)...(19): siRNA sense strand
ggccagagccggagaauag

SEQ ID NO: 1571673 - RNA, 19 nt, Homo sapiens
  misc_RNA (1)...(19): siRNA sense strand
ucacgccucuuccuauuug

SEQ ID NO: 1571674 - RNA, 19 nt, Homo sapiens
  misc_RNA (1)...(19): siRNA sense strand
ggauuuggauuuggagaug

SEQ ID NO: 1571675 - RNA, 19 nt, Homo sapiens
  misc_RNA (1)...(19): siRNA sense strand
ucaaggauuuggauuugga

SEQ ID NO: 1571676 - RNA, 19 nt, Homo sapiens
  misc_RNA (1)...(19): siRNA sense strand
ccagaugucuuuuggaauu

SEQ ID NO: 1571677 - RNA, 19 nt, Homo sapiens
  misc_RNA (1)...(19): siRNA sense strand
ugccacagcauuuaauaua

SEQ ID NO: 1571678 - RNA, 19 nt, Homo sapiens
  misc_RNA (1)...(19): siRNA sense strand
gguguguccuguuugcaaa

SEQ ID NO: 1571679 - RNA, 19 nt, Homo sapiens
  misc_RNA (1)...(19): siRNA sense strand
ugucacgccucuuccuauu

SEQ ID NO: 1571680 - RNA, 19 nt, Homo sapiens
  misc_RNA (1)...(19): siRNA sense strand
uuucaaggauuuggauuug

SEQ ID NO: 1571681 - RNA, 19 nt, Homo sapiens
  misc_RNA (1)...(19): siRNA sense strand
ggacgagcaguuccuguca

SEQ ID NO: 1571682 - RNA, 19 nt, Homo sapiens
  misc_RNA (1)...(19): siRNA sense strand
guggccaccucuucuguug

SEQ ID NO: 1571683 - RNA, 19 nt, Homo sapiens
  misc_RNA (1)...(19): siRNA sense strand
ggauauuugccacagcauu

SEQ ID NO: 1571684 - RNA, 19 nt, Homo sapiens
  misc_RNA (1)...(19): siRNA sense strand
ggagaccagaccuaacaga

SEQ ID NO: 1571685 - RNA, 19 nt, Homo sapiens
  misc_RNA (1)...(19): siRNA sense strand
caacaucugcuuggacaca

SEQ ID NO: 1571686 - RNA, 19 nt, Homo sapiens
  misc_RNA (1)...(19): siRNA sense strand
caacaggaccccagagaga

SEQ ID NO: 1571687 - RNA, 19 nt, Homo sapiens
  misc_RNA (1)...(19): siRNA sense strand
gagggcaggacagcacuuu

SEQ ID NO: 1571688 - RNA, 19 nt, Homo sapiens
  misc_RNA (1)...(19): siRNA sense strand
gguuggagaccagaccuaa

SEQ ID NO: 1571689 - RNA, 19 nt, Homo sapiens
  misc_RNA (1)...(19): siRNA sense strand
ggauuucaaggauuuggau

SEQ ID NO: 1571690 - RNA, 19 nt, Homo sapiens
  misc_RNA (1)...(19): siRNA sense strand
gagaugguggcuuccagau

SEQ ID NO: 1571691 - RNA, 19 nt, Homo sapiens
  misc_RNA (1)...(19): siRNA sense strand
gaacugggcaacaucuaca

SEQ ID NO: 1571692 - RNA, 19 nt, Homo sapiens
  misc_RNA (1)...(19): siRNA sense strand
ucuaucaccucuuuaugug

SEQ ID NO: 1571693 - RNA, 19 nt, Homo sapiens
  misc_RNA (1)...(19): siRNA sense strand
gggcaacucccaccagauc

SEQ ID NO: 1571694 - RNA, 19 nt, Homo sapiens
  misc_RNA (1)...(19): siRNA sense strand
caccugcaguucaauaagu

SEQ ID NO: 1571695 - RNA, 19 nt, Homo sapiens
  misc_RNA (1)...(19): siRNA sense strand
ggaccuggccgcuuugacu

SEQ ID NO: 1571696 - RNA, 19 nt, Homo sapiens
  misc_RNA (1)...(19): siRNA sense strand
cgugcucuaucaccucuuu

SEQ ID NO: 1571697 - RNA, 19 nt, Homo sapiens
  misc_RNA (1)...(19): siRNA sense strand
gaccuggccgcuuugacua

SEQ ID NO: 1571698 - RNA, 19 nt, Homo sapiens
  misc_RNA (1)...(19): siRNA sense strand
gggagugggucuggguuca

SEQ ID NO: 1571699 - RNA, 19 nt, Homo sapiens
  misc_RNA (1)...(19): siRNA sense strand
acaacgaacugggcaacau

SEQ ID NO: 1571700 - RNA, 19 nt, Homo sapiens
  misc_RNA (1)...(19): siRNA sense strand
caacgaacugggcaacauc

SEQ ID NO: 1571701 - RNA, 19 nt, Homo sapiens
  misc_RNA (1)...(19): siRNA sense strand
caggcuccgugcucuauca

SEQ ID NO: 1571702 - RNA, 19 nt, Homo sapiens
  misc_RNA (1)...(19): siRNA sense strand
gcucuaucaccucuuuaug

SEQ ID NO: 1571703 - RNA, 19 nt, Homo sapiens
  misc_RNA (1)...(19): siRNA sense strand
cgccgcaccugcaguucaa

SEQ ID NO: 1571704 - RNA, 19 nt, Homo sapiens
  misc_RNA (1)...(19): siRNA sense strand
gcaacucccaccagaucau

SEQ ID NO: 1571705 - RNA, 19 nt, Homo sapiens
  misc_RNA (1)...(19): siRNA sense strand
gcaccugcaguucaauaag

SEQ ID NO: 1571706 - RNA, 19 nt, Homo sapiens
  misc_RNA (1)...(19): siRNA sense strand
ccgcaccugcaguucaaua

SEQ ID NO: 1571707 - RNA, 19 nt, Homo sapiens
  misc_RNA (1)...(19): siRNA sense strand
gcagcacccucuucacuau

SEQ ID NO: 1571708 - RNA, 19 nt, Homo sapiens
  misc_RNA (1)...(19): siRNA sense strand
agauaucgcuggaccugua

SEQ ID NO: 1571709 - RNA, 19 nt, Homo sapiens
  misc_RNA (1)...(19): siRNA sense strand
gaugugcccuugggaacua

SEQ ID NO: 1571710 - RNA, 19 nt, Homo sapiens
  misc_RNA (1)...(19): siRNA sense strand
gggcaacucuucaucuaca

SEQ ID NO: 1571711 - RNA, 19 nt, Homo sapiens
  misc_RNA (1)...(19): siRNA sense strand
gcgggcaacucuucaucua

SEQ ID NO: 1571712 - RNA, 19 nt, Homo sapiens
  misc_RNA (1)...(19): siRNA sense strand
ccucagagaucgucaccuu

SEQ ID NO: 1571713 - RNA, 19 nt, Homo sapiens
  misc_RNA (1)...(19): siRNA sense strand
caccuuaccugaguacauu

SEQ ID NO: 1571714 - RNA, 19 nt, Homo sapiens
  misc_RNA (1)...(19): siRNA sense strand
ggaccgggaugaccuuugg

SEQ ID NO: 1571715 - RNA, 19 nt, Homo sapiens
  misc_RNA (1)...(19): siRNA sense strand
ccacagaguguccagauug

SEQ ID NO: 1571716 - RNA, 19 nt, Homo sapiens
  misc_RNA (1)...(19): siRNA sense strand
caacagcgggcaacucuuc

SEQ ID NO: 1571717 - RNA, 19 nt, Homo sapiens
  misc_RNA (1)...(19): siRNA sense strand
gcucuggccucuucauugg

SEQ ID NO: 1571718 - RNA, 19 nt, Homo sapiens
  misc_RNA (1)...(19): siRNA sense strand
gcacugggauacccucaac

SEQ ID NO: 1571719 - RNA, 19 nt, Homo sapiens
  misc_RNA (1)...(19): siRNA sense strand
gaggucggcugcuccaaca

SEQ ID NO: 1571720 - RNA, 19 nt, Homo sapiens
  misc_RNA (1)...(19): siRNA sense strand
cacagaguguccagauuga

SEQ ID NO: 1571721 - RNA, 19 nt, Homo sapiens
  misc_RNA (1)...(19): siRNA sense strand
ucgcugaccuccaucuuca

SEQ ID NO: 1571722 - RNA, 19 nt, Homo sapiens
  misc_RNA (1)...(19): siRNA sense strand
ccaucuacaucuccucaga

SEQ ID NO: 1571723 - RNA, 19 nt, Homo sapiens
  misc_RNA (1)...(19): siRNA sense strand
guacagacgccaugcacau

SEQ ID NO: 1571724 - RNA, 19 nt, Homo sapiens
  misc_RNA (1)...(19): siRNA sense strand
gcuccauccuggccagcua

SEQ ID NO: 1571725 - RNA, 19 nt, Homo sapiens
  misc_RNA (1)...(19): siRNA sense strand
gcccgaaacaccaccauug

SEQ ID NO: 1571726 - RNA, 19 nt, Homo sapiens
  misc_RNA (1)...(19): siRNA sense strand
cccaggugcucaugucuau

SEQ ID NO: 1571727 - RNA, 19 nt, Homo sapiens
  misc_RNA (1)...(19): siRNA sense strand
cgaggcugguccuggaauu

SEQ ID NO: 1571728 - RNA, 19 nt, Homo sapiens
  misc_RNA (1)...(19): siRNA sense strand
ccagcuaccucaagaugcu

SEQ ID NO: 1571729 - RNA, 19 nt, Homo sapiens
  misc_RNA (1)...(19): siRNA sense strand
ggaacuaaagcaggugaug

SEQ ID NO: 1571730 - RNA, 19 nt, Homo sapiens
  misc_RNA (1)...(19): siRNA sense strand
guccgucucucgaacagau

SEQ ID NO: 1571731 - RNA, 19 nt, Homo sapiens
  misc_RNA (1)...(19): siRNA sense strand
cagaguguccagauugaga

SEQ ID NO: 1571732 - RNA, 19 nt, Homo sapiens
  misc_RNA (1)...(19): siRNA sense strand
uguacaccaucgcagcuuu

SEQ ID NO: 1571733 - RNA, 19 nt, Homo sapiens
  misc_RNA (1)...(19): siRNA sense strand
ggugggacgcacugggaua

SEQ ID NO: 1571734 - RNA, 19 nt, Homo sapiens
  misc_RNA (1)...(19): siRNA sense strand
ugucgucgcugaccuccau

SEQ ID NO: 1571735 - RNA, 19 nt, Homo sapiens
  misc_RNA (1)...(19): siRNA sense strand
ggccagcuaccucaagaug

SEQ ID NO: 1571736 - RNA, 19 nt, Homo sapiens
  misc_RNA (1)...(19): siRNA sense strand
gcaacucuucaucuacaug

SEQ ID NO: 1571737 - RNA, 19 nt, Homo sapiens
  misc_RNA (1)...(19): siRNA sense strand
caaguguccgucucucgaa

SEQ ID NO: 1571738 - RNA, 19 nt, Homo sapiens
  misc_RNA (1)...(19): siRNA sense strand
ucagagaucgucaccuuac

SEQ ID NO: 1571739 - RNA, 19 nt, Homo sapiens
  misc_RNA (1)...(19): siRNA sense strand
uggcaggcuucgaguggaa

SEQ ID NO: 1571740 - RNA, 19 nt, Homo sapiens
  misc_RNA (1)...(19): siRNA sense strand
ucaaugccauccuccucau

SEQ ID NO: 1571741 - RNA, 19 nt, Homo sapiens
  misc_RNA (1)...(19): siRNA sense strand
guccagauugagaaccuua

SEQ ID NO: 1571742 - RNA, 19 nt, Homo sapiens
  misc_RNA (1)...(19): siRNA sense strand
ucaucuacaugcagucagu

SEQ ID NO: 1571743 - RNA, 19 nt, Homo sapiens
  misc_RNA (1)...(19): siRNA sense strand
gggcugaugaucgcaguga

SEQ ID NO: 1571744 - RNA, 19 nt, Homo sapiens
  misc_RNA (1)...(19): siRNA sense strand
gcccgugucuguggcuuca

SEQ ID NO: 1571745 - RNA, 19 nt, Homo sapiens
  misc_RNA (1)...(19): siRNA sense strand
gcugaugaucgcagugaug

SEQ ID NO: 1571746 - RNA, 19 nt, Homo sapiens
  misc_RNA (1)...(19): siRNA sense strand
ugaccuccaucuucaacag

SEQ ID NO: 1571747 - RNA, 19 nt, Homo sapiens
  misc_RNA (1)...(19): siRNA sense strand
guucccaggugcucauguc

SEQ ID NO: 1571748 - RNA, 19 nt, Homo sapiens
  misc_RNA (1)...(19): siRNA sense strand
cccacagaguguccagauu

SEQ ID NO: 1571749 - RNA, 19 nt, Homo sapiens
  misc_RNA (1)...(19): siRNA sense strand
gggcucuggccucuucauu

SEQ ID NO: 1571750 - RNA, 19 nt, Homo sapiens
  misc_RNA (1)...(19): siRNA sense strand
gcacccucuucacuaugga

SEQ ID NO: 1571751 - RNA, 19 nt, Homo sapiens
  misc_RNA (1)...(19): siRNA sense strand
cagcagcacccucuucacu

SEQ ID NO: 1571752 - RNA, 19 nt, Homo sapiens
  misc_RNA (1)...(19): siRNA sense strand
ccaagcuggucauggaacu

SEQ ID NO: 1571753 - RNA, 19 nt, Homo sapiens
  misc_RNA (1)...(19): siRNA sense strand
acucaguggugcuguugug

SEQ ID NO: 1571754 - RNA, 19 nt, Homo sapiens
  misc_RNA (1)...(19): siRNA sense strand
ggguguucgugcccaucua

SEQ ID NO: 1571755 - RNA, 19 nt, Homo sapiens
  misc_RNA (1)...(19): siRNA sense strand
gaaagaacucacacuauua

SEQ ID NO: 1571756 - RNA, 19 nt, Homo sapiens
  misc_RNA (1)...(19): siRNA sense strand
ugaaagaacucacacuauu

SEQ ID NO: 1571757 - RNA, 19 nt, Homo sapiens
  misc_RNA (1)...(19): siRNA sense strand
gagaagccauauaaacaua

SEQ ID NO: 1571758 - RNA, 19 nt, Homo sapiens
  misc_RNA (1)...(19): siRNA sense strand
gagagaagccguacaaaug

SEQ ID NO: 1571759 - RNA, 19 nt, Homo sapiens
  misc_RNA (1)...(19): siRNA sense strand
ccacauaagugucagaaau

SEQ ID NO: 1571760 - RNA, 19 nt, Homo sapiens
  misc_RNA (1)...(19): siRNA sense strand
gagaaacgauaugaaugua

SEQ ID NO: 1571761 - RNA, 19 nt, Homo sapiens
  misc_RNA (1)...(19): siRNA sense strand
agagaaaccuuaccaaugu

SEQ ID NO: 1571762 - RNA, 19 nt, Homo sapiens
  misc_RNA (1)...(19): siRNA sense strand
ggagagaggccucauaaau

SEQ ID NO: 1571763 - RNA, 19 nt, Homo sapiens
  misc_RNA (1)...(19): siRNA sense strand
gagagaaacccuacaaaug

SEQ ID NO: 1571764 - RNA, 19 nt, Homo sapiens
  misc_RNA (1)...(19): siRNA sense strand
gggaaagccuucauucguu

SEQ ID NO: 1571765 - RNA, 19 nt, Homo sapiens
  misc_RNA (1)...(19): siRNA sense strand
gagaaacccuaugaaugua

SEQ ID NO: 1571766 - RNA, 19 nt, Homo sapiens
  misc_RNA (1)...(19): siRNA sense strand
gggaaagccuucacuuguu

SEQ ID NO: 1571767 - RNA, 19 nt, Homo sapiens
  misc_RNA (1)...(19): siRNA sense strand
gggaaagccuucacuuguu

SEQ ID NO: 1571768 - RNA, 19 nt, Homo sapiens
  misc_RNA (1)...(19): siRNA sense strand
ggaaagccuucacuuguuc

SEQ ID NO: 1571769 - RNA, 19 nt, Homo sapiens
  misc_RNA (1)...(19): siRNA sense strand
ggaaagccuucacuuguuc

SEQ ID NO: 1571770 - RNA, 19 nt, Homo sapiens
  misc_RNA (1)...(19): siRNA sense strand
ggagauggaccuuauaaau

SEQ ID NO: 1571771 - RNA, 19 nt, Homo sapiens
  misc_RNA (1)...(19): siRNA sense strand
gagagaggccucauaaaug

SEQ ID NO: 1571772 - RNA, 19 nt, Homo sapiens
  misc_RNA (1)...(19): siRNA sense strand
guuuauaccuuacccauga

SEQ ID NO: 1571773 - RNA, 19 nt, Homo sapiens
  misc_RNA (1)...(19): siRNA sense strand
ccacuucguuucaauauca

SEQ ID NO: 1571774 - RNA, 19 nt, Homo sapiens
  misc_RNA (1)...(19): siRNA sense strand
gagagaaaccuuaccaaug

SEQ ID NO: 1571775 - RNA, 19 nt, Homo sapiens
  misc_RNA (1)...(19): siRNA sense strand
gagaaaccuuaccaaugua

SEQ ID NO: 1571776 - RNA, 19 nt, Homo sapiens
  misc_RNA (1)...(19): siRNA sense strand
gagaaaucuucaugggaua

SEQ ID NO: 1571777 - RNA, 19 nt, Homo sapiens
  misc_RNA (1)...(19): siRNA sense strand
gagauggaccuuauaaaug

SEQ ID NO: 1571778 - RNA, 19 nt, Homo sapiens
  misc_RNA (1)...(19): siRNA sense strand
gcaagcauucgaagauaua

SEQ ID NO: 1571779 - RNA, 19 nt, Homo sapiens
  misc_RNA (1)...(19): siRNA sense strand
gaagacaugcugaacaaga

SEQ ID NO: 1571780 - RNA, 19 nt, Homo sapiens
  misc_RNA (1)...(19): siRNA sense strand
ggagagaaacgauaugaau

SEQ ID NO: 1571781 - RNA, 19 nt, Homo sapiens
  misc_RNA (1)...(19): siRNA sense strand
ugugucagcuccuuucaua

SEQ ID NO: 1571782 - RNA, 19 nt, Homo sapiens
  misc_RNA (1)...(19): siRNA sense strand
ugaaaggccucacacuaga

SEQ ID NO: 1571783 - RNA, 19 nt, Homo sapiens
  misc_RNA (1)...(19): siRNA sense strand
gaauguaaacaauguggua

SEQ ID NO: 1571784 - RNA, 19 nt, Homo sapiens
  misc_RNA (1)...(19): siRNA sense strand
gagaagccauaugaaugua

SEQ ID NO: 1571785 - RNA, 19 nt, Homo sapiens
  misc_RNA (1)...(19): siRNA sense strand
ggagagaaacccuacaaau

SEQ ID NO: 1571786 - RNA, 19 nt, Homo sapiens
  misc_RNA (1)...(19): siRNA sense strand
ggagaagccauaugaaugu

SEQ ID NO: 1571787 - RNA, 19 nt, Homo sapiens
  misc_RNA (1)...(19): siRNA sense strand
ugagaaacccuaugaaugu

SEQ ID NO: 1571788 - RNA, 19 nt, Homo sapiens
  misc_RNA (1)...(19): siRNA sense strand
agagaggccucauaaaugu

SEQ ID NO: 1571789 - RNA, 19 nt, Homo sapiens
  misc_RNA (1)...(19): siRNA sense strand
ggaguaaaaucaugugaaa

SEQ ID NO: 1571790 - RNA, 19 nt, Homo sapiens
  misc_RNA (1)...(19): siRNA sense strand
agauggaccuuauaaaugu

SEQ ID NO: 1571791 - RNA, 19 nt, Homo sapiens
  misc_RNA (1)...(19): siRNA sense strand
gagaaacccuacaaaugca

SEQ ID NO: 1571792 - RNA, 19 nt, Homo sapiens
  misc_RNA (1)...(19): siRNA sense strand
agcauuaucucgccuuaua

SEQ ID NO: 1571793 - RNA, 19 nt, Homo sapiens
  misc_RNA (1)...(19): siRNA sense strand
gggaaagccuucaauuguc

SEQ ID NO: 1571794 - RNA, 19 nt, Homo sapiens
  misc_RNA (1)...(19): siRNA sense strand
ggagagaagccguacaaau

SEQ ID NO: 1571795 - RNA, 19 nt, Homo sapiens
  misc_RNA (1)...(19): siRNA sense strand
ugucucaguuuauaccuua

SEQ ID NO: 1571796 - RNA, 19 nt, Homo sapiens
  misc_RNA (1)...(19): siRNA sense strand
ggaaagccuuggauugucu

SEQ ID NO: 1571797 - RNA, 19 nt, Homo sapiens
  misc_RNA (1)...(19): siRNA sense strand
cggaagacaugcugaacaa

SEQ ID NO: 1571798 - RNA, 19 nt, Homo sapiens
  misc_RNA (1)...(19): siRNA sense strand
aggaaagccuugagccaua

SEQ ID NO: 1571799 - RNA, 19 nt, Homo sapiens
  misc_RNA (1)...(19): siRNA sense strand
ggagagaaaccuuaccaau

SEQ ID NO: 1571800 - RNA, 19 nt, Homo sapiens
  misc_RNA (1)...(19): siRNA sense strand
gggaaagccuucagaucug

SEQ ID NO: 1571801 - RNA, 19 nt, Homo sapiens
  misc_RNA (1)...(19): siRNA sense strand
gggagaagccauaugaaug

SEQ ID NO: 1571802 - RNA, 19 nt, Homo sapiens
  misc_RNA (1)...(19): siRNA sense strand
gauggaccuuauaaaugua

SEQ ID NO: 1571803 - RNA, 19 nt, Homo sapiens
  misc_RNA (1)...(19): siRNA sense strand
ucaaaggcaugaaagaagu

SEQ ID NO: 1571804 - RNA, 19 nt, Homo sapiens
  misc_RNA (1)...(19): siRNA sense strand
gaagacacaugagaaugca

SEQ ID NO: 1571805 - RNA, 19 nt, Homo sapiens
  misc_RNA (1)...(19): siRNA sense strand
uggauugucucaguuuaua

SEQ ID NO: 1571806 - RNA, 19 nt, Homo sapiens
  misc_RNA (1)...(19): siRNA sense strand
gagagaaacgauaugaaug

SEQ ID NO: 1571807 - RNA, 19 nt, Homo sapiens
  misc_RNA (1)...(19): siRNA sense strand
aaacauaaacaacguagga

SEQ ID NO: 1571808 - RNA, 19 nt, Homo sapiens
  misc_RNA (1)...(19): siRNA sense strand
gaagccauaugaauguaag

SEQ ID NO: 1571809 - RNA, 19 nt, Homo sapiens
  misc_RNA (1)...(19): siRNA sense strand
caugaaaggccucacacua

SEQ ID NO: 1571810 - RNA, 19 nt, Homo sapiens
  misc_RNA (1)...(19): siRNA sense strand
ggaaagccuugagccauag

SEQ ID NO: 1571811 - RNA, 19 nt, Homo sapiens
  misc_RNA (1)...(19): siRNA sense strand
ccaaguacauucgaauaca

SEQ ID NO: 1571812 - RNA, 19 nt, Homo sapiens
  misc_RNA (1)...(19): siRNA sense strand
cauagccacugcuuucgaa

SEQ ID NO: 1571813 - RNA, 19 nt, Homo sapiens
  misc_RNA (1)...(19): siRNA sense strand
gaaacccuaugaauguaag

SEQ ID NO: 1571814 - RNA, 19 nt, Homo sapiens
  misc_RNA (1)...(19): siRNA sense strand
ugugggaaaucauucaauu

SEQ ID NO: 1571815 - RNA, 19 nt, Homo sapiens
  misc_RNA (1)...(19): siRNA sense strand
uagagaagccauauaaaca

SEQ ID NO: 1571816 - RNA, 19 nt, Homo sapiens
  misc_RNA (1)...(19): siRNA sense strand
caugaaagaacucacacua

SEQ ID NO: 1571817 - RNA, 19 nt, Homo sapiens
  misc_RNA (1)...(19): siRNA sense strand
gugagaaacccuaugaaug

SEQ ID NO: 1571818 - RNA, 19 nt, Homo sapiens
  misc_RNA (1)...(19): siRNA sense strand
gaacucacacuggagagaa

SEQ ID NO: 1571819 - RNA, 19 nt, Homo sapiens
  misc_RNA (1)...(19): siRNA sense strand
ggacaccaaccacauaagu

SEQ ID NO: 1571820 - RNA, 19 nt, Homo sapiens
  misc_RNA (1)...(19): siRNA sense strand
gguagucaguguggagaaa

SEQ ID NO: 1571821 - RNA, 19 nt, Homo sapiens
  misc_RNA (1)...(19): siRNA sense strand
cuucagaucugccaaguac

SEQ ID NO: 1571822 - RNA, 19 nt, Homo sapiens
  misc_RNA (1)...(19): siRNA sense strand
cuuauaagcuuucgaagac

SEQ ID NO: 1571823 - RNA, 19 nt, Homo sapiens
  misc_RNA (1)...(19): siRNA sense strand
ucaauugucccaguucuuu

SEQ ID NO: 1571824 - RNA, 19 nt, Homo sapiens
  misc_RNA (1)...(19): siRNA sense strand
gagagaaaccuuuugauug

SEQ ID NO: 1571825 - RNA, 19 nt, Homo sapiens
  misc_RNA (1)...(19): siRNA sense strand
aaagcauuaucucgccuua

SEQ ID NO: 1571826 - RNA, 19 nt, Homo sapiens
  misc_RNA (1)...(19): siRNA sense strand
caaguacauucgaauacau

SEQ ID NO: 1571827 - RNA, 19 nt, Homo sapiens
  misc_RNA (1)...(19): siRNA sense strand
aagacaugcugaacaagaa

SEQ ID NO: 1571828 - RNA, 19 nt, Homo sapiens
  misc_RNA (1)...(19): siRNA sense strand
uaaacuauaugggaaagca

SEQ ID NO: 1571829 - RNA, 19 nt, Homo sapiens
  misc_RNA (1)...(19): siRNA sense strand
caguggagauggaccuuau

SEQ ID NO: 1571830 - RNA, 19 nt, Homo sapiens
  misc_RNA (1)...(19): siRNA sense strand
ucacccagguuccggaaga

SEQ ID NO: 1571831 - RNA, 19 nt, Homo sapiens
  misc_RNA (1)...(19): siRNA sense strand
ggugagaaacccuaugaau

SEQ ID NO: 1571832 - RNA, 19 nt, Homo sapiens
  misc_RNA (1)...(19): siRNA sense strand
uaaggagugugggaaauca

SEQ ID NO: 1571833 - RNA, 19 nt, Homo sapiens
  misc_RNA (1)...(19): siRNA sense strand
cugcaagcauucgaagaua

SEQ ID NO: 1571834 - RNA, 19 nt, Homo sapiens
  misc_RNA (1)...(19): siRNA sense strand
gacucacacuggagagaaa

SEQ ID NO: 1571835 - RNA, 19 nt, Homo sapiens
  misc_RNA (1)...(19): siRNA sense strand
ugggaaagccuucaauugu

SEQ ID NO: 1571836 - RNA, 19 nt, Homo sapiens
  misc_RNA (1)...(19): siRNA sense strand
gggaaagccuuggauuguc

SEQ ID NO: 1571837 - RNA, 19 nt, Homo sapiens
  misc_RNA (1)...(19): siRNA sense strand
cacauaagugucagaaauu

SEQ ID NO: 1571838 - RNA, 19 nt, Homo sapiens
  misc_RNA (1)...(19): siRNA sense strand
agccuucacuuguuccaua

SEQ ID NO: 1571839 - RNA, 19 nt, Homo sapiens
  misc_RNA (1)...(19): siRNA sense strand
gaaaucuucaugggauauu

SEQ ID NO: 1571840 - RNA, 19 nt, Homo sapiens
  misc_RNA (1)...(19): siRNA sense strand
agagaaaccuuuugauugu

SEQ ID NO: 1571841 - RNA, 19 nt, Homo sapiens
  misc_RNA (1)...(19): siRNA sense strand
gaagucacacuggagagaa

SEQ ID NO: 1571842 - RNA, 19 nt, Homo sapiens
  misc_RNA (1)...(19): siRNA sense strand
uaucucgccuuauaagcuu

SEQ ID NO: 1571843 - RNA, 19 nt, Homo sapiens
  misc_RNA (1)...(19): siRNA sense strand
guggagauggaccuuauaa

SEQ ID NO: 1571844 - RNA, 19 nt, Homo sapiens
  misc_RNA (1)...(19): siRNA sense strand
agagaaacccuacaaaugc

SEQ ID NO: 1571845 - RNA, 19 nt, Homo sapiens
  misc_RNA (1)...(19): siRNA sense strand
gugggaaagccuucaauug

SEQ ID NO: 1571846 - RNA, 19 nt, Homo sapiens
  misc_RNA (1)...(19): siRNA sense strand
agagaaacgauaugaaugu

SEQ ID NO: 1571847 - RNA, 19 nt, Homo sapiens
  misc_RNA (1)...(19): siRNA sense strand
gagaggccucauaaaugua

SEQ ID NO: 1571848 - RNA, 19 nt, Homo sapiens
  misc_RNA (1)...(19): siRNA sense strand
acacuggagagaaaccuua

SEQ ID NO: 1571849 - RNA, 19 nt, Homo sapiens
  misc_RNA (1)...(19): siRNA sense strand
ggacucacacuggagagaa

SEQ ID NO: 1571850 - RNA, 19 nt, Homo sapiens
  misc_RNA (1)...(19): siRNA sense strand
gagaaaccuuuugauugua

SEQ ID NO: 1571851 - RNA, 19 nt, Homo sapiens
  misc_RNA (1)...(19): siRNA sense strand
ggacacacacaggagagaa

SEQ ID NO: 1571852 - RNA, 19 nt, Homo sapiens
  misc_RNA (1)...(19): siRNA sense strand
ugucagcuccuuucauaga

SEQ ID NO: 1571853 - RNA, 19 nt, Homo sapiens
  misc_RNA (1)...(19): siRNA sense strand
ucucccaguucauuucaaa

SEQ ID NO: 1571854 - RNA, 19 nt, Homo sapiens
  misc_RNA (1)...(19): siRNA sense strand
caggagagaagccguacaa

SEQ ID NO: 1571855 - RNA, 19 nt, Homo sapiens
  misc_RNA (1)...(19): siRNA sense strand
ggaaacagaucaaugcaaa

SEQ ID NO: 1571856 - RNA, 19 nt, Homo sapiens
  misc_RNA (1)...(19): siRNA sense strand
caugagagaucagcauuua

SEQ ID NO: 1571857 - RNA, 19 nt, Homo sapiens
  misc_RNA (1)...(19): siRNA sense strand
caacaacucucucuacuac

SEQ ID NO: 1571858 - RNA, 19 nt, Homo sapiens
  misc_RNA (1)...(19): siRNA sense strand
gaugauaccuugguuggaa

SEQ ID NO: 1571859 - RNA, 19 nt, Homo sapiens
  misc_RNA (1)...(19): siRNA sense strand
gagaucagcauuuauauuc

SEQ ID NO: 1571860 - RNA, 19 nt, Homo sapiens
  misc_RNA (1)...(19): siRNA sense strand
gaaagugacagagacauuu

SEQ ID NO: 1571861 - RNA, 19 nt, Homo sapiens
  misc_RNA (1)...(19): siRNA sense strand
ugagagaucagcauuuaua

SEQ ID NO: 1571862 - RNA, 19 nt, Homo sapiens
  misc_RNA (1)...(19): siRNA sense strand
acagaucaaugcaaacuuu

SEQ ID NO: 1571863 - RNA, 19 nt, Homo sapiens
  misc_RNA (1)...(19): siRNA sense strand
gauaugagggucacauuug

SEQ ID NO: 1571864 - RNA, 19 nt, Homo sapiens
  misc_RNA (1)...(19): siRNA sense strand
caagagugaugaccggauu

SEQ ID NO: 1571865 - RNA, 19 nt, Homo sapiens
  misc_RNA (1)...(19): siRNA sense strand
ucaacuaccuuaaaucagu

SEQ ID NO: 1571866 - RNA, 19 nt, Homo sapiens
  misc_RNA (1)...(19): siRNA sense strand
cuaauacccuagugagauu

SEQ ID NO: 1571867 - RNA, 19 nt, Homo sapiens
  misc_RNA (1)...(19): siRNA sense strand
cagaauccaugaucacuuc

SEQ ID NO: 1571868 - RNA, 19 nt, Homo sapiens
  misc_RNA (1)...(19): siRNA sense strand
ucacagacaccaaagauau

SEQ ID NO: 1571869 - RNA, 19 nt, Homo sapiens
  misc_RNA (1)...(19): siRNA sense strand
cuagugagauuugaauuug

SEQ ID NO: 1571870 - RNA, 19 nt, Homo sapiens
  misc_RNA (1)...(19): siRNA sense strand
uaagagagucugcuaacaa

SEQ ID NO: 1571871 - RNA, 19 nt, Homo sapiens
  misc_RNA (1)...(19): siRNA sense strand
uggaaaagcugaugagaaa

SEQ ID NO: 1571872 - RNA, 19 nt, Homo sapiens
  misc_RNA (1)...(19): siRNA sense strand
ccacguacccuaaauccaa

SEQ ID NO: 1571873 - RNA, 19 nt, Homo sapiens
  misc_RNA (1)...(19): siRNA sense strand
gcaucaugguuaaggaauu

SEQ ID NO: 1571874 - RNA, 19 nt, Homo sapiens
  misc_RNA (1)...(19): siRNA sense strand
gaaagccagugaacaccau

SEQ ID NO: 1571875 - RNA, 19 nt, Homo sapiens
  misc_RNA (1)...(19): siRNA sense strand
uuacuucaaucuagcugua

SEQ ID NO: 1571876 - RNA, 19 nt, Homo sapiens
  misc_RNA (1)...(19): siRNA sense strand
gaaacaucccaaacucuga

SEQ ID NO: 1571877 - RNA, 19 nt, Homo sapiens
  misc_RNA (1)...(19): siRNA sense strand
gcugugggcacguugcuua

SEQ ID NO: 1571878 - RNA, 19 nt, Homo sapiens
  misc_RNA (1)...(19): siRNA sense strand
caagcagaauccaugauca

SEQ ID NO: 1571879 - RNA, 19 nt, Homo sapiens
  misc_RNA (1)...(19): siRNA sense strand
ucacauuugccuuugauuu

SEQ ID NO: 1571880 - RNA, 19 nt, Homo sapiens
  misc_RNA (1)...(19): siRNA sense strand
cccaaacucugaagcuuga

SEQ ID NO: 1571881 - RNA, 19 nt, Homo sapiens
  misc_RNA (1)...(19): siRNA sense strand
guacugaaagugacagaga

SEQ ID NO: 1571882 - RNA, 19 nt, Homo sapiens
  misc_RNA (1)...(19): siRNA sense strand
uuaaggaauucaaggauca

SEQ ID NO: 1571883 - RNA, 19 nt, Homo sapiens
  misc_RNA (1)...(19): siRNA sense strand
ucauccaccuuccauacua

SEQ ID NO: 1571884 - RNA, 19 nt, Homo sapiens
  misc_RNA (1)...(19): siRNA sense strand
ggauaagagagucugcuaa

SEQ ID NO: 1571885 - RNA, 19 nt, Homo sapiens
  misc_RNA (1)...(19): siRNA sense strand
ggagggaaacagaucaaug

SEQ ID NO: 1571886 - RNA, 19 nt, Homo sapiens
  misc_RNA (1)...(19): siRNA sense strand
ggucacauuugccuuugau

SEQ ID NO: 1571887 - RNA, 19 nt, Homo sapiens
  misc_RNA (1)...(19): siRNA sense strand
guggacggcucgagcauuc

SEQ ID NO: 1571888 - RNA, 19 nt, Homo sapiens
  misc_RNA (1)...(19): siRNA sense strand
uuuaagaacuucccagucu

SEQ ID NO: 1571889 - RNA, 19 nt, Homo sapiens
  misc_RNA (1)...(19): siRNA sense strand
gagggucacauuugccuuu

SEQ ID NO: 1571890 - RNA, 19 nt, Homo sapiens
  misc_RNA (1)...(19): siRNA sense strand
gugcaaguacugaaaguga

SEQ ID NO: 1571891 - RNA, 19 nt, Homo sapiens
  misc_RNA (1)...(19): siRNA sense strand
gggaagauggccauuuaau

SEQ ID NO: 1571892 - RNA, 19 nt, Homo sapiens
  misc_RNA (1)...(19): siRNA sense strand
caggaaacaucccaaacuc

SEQ ID NO: 1571893 - RNA, 19 nt, Homo sapiens
  misc_RNA (1)...(19): siRNA sense strand
caucaugguuaaggaauuc

SEQ ID NO: 1571894 - RNA, 19 nt, Homo sapiens
  misc_RNA (1)...(19): siRNA sense strand
uuucaggcaucaugguuaa

SEQ ID NO: 1571895 - RNA, 19 nt, Homo sapiens
  misc_RNA (1)...(19): siRNA sense strand
ucaauaccacguacccuaa

SEQ ID NO: 1571896 - RNA, 19 nt, Homo sapiens
  misc_RNA (1)...(19): siRNA sense strand
gauaagagagucugcuaac

SEQ ID NO: 1571897 - RNA, 19 nt, Homo sapiens
  misc_RNA (1)...(19): siRNA sense strand
gagagaucagcauuuauau

SEQ ID NO: 1571898 - RNA, 19 nt, Homo sapiens
  misc_RNA (1)...(19): siRNA sense strand
gcauacaacaugagagauc

SEQ ID NO: 1571899 - RNA, 19 nt, Homo sapiens
  misc_RNA (1)...(19): siRNA sense strand
gggagaccauggugaacug

SEQ ID NO: 1571900 - RNA, 19 nt, Homo sapiens
  misc_RNA (1)...(19): siRNA sense strand
gcagaauccaugaucacuu

SEQ ID NO: 1571901 - RNA, 19 nt, Homo sapiens
  misc_RNA (1)...(19): siRNA sense strand
ccuagugagauuugaauuu

SEQ ID NO: 1571902 - RNA, 19 nt, Homo sapiens
  misc_RNA (1)...(19): siRNA sense strand
aaggagauguguccaacga

SEQ ID NO: 1571903 - RNA, 19 nt, Homo sapiens
  misc_RNA (1)...(19): siRNA sense strand
cauacaacaugagagauca

SEQ ID NO: 1571904 - RNA, 19 nt, Homo sapiens
  misc_RNA (1)...(19): siRNA sense strand
cacauuugccuuugauuug

SEQ ID NO: 1571905 - RNA, 19 nt, Homo sapiens
  misc_RNA (1)...(19): siRNA sense strand
aagagagucugcuaacaag

SEQ ID NO: 1571906 - RNA, 19 nt, Homo sapiens
  misc_RNA (1)...(19): siRNA sense strand
aaagggagaccauggugaa

SEQ ID NO: 1571907 - RNA, 19 nt, Homo sapiens
  misc_RNA (1)...(19): siRNA sense strand
ugaaagugacagagacauu

SEQ ID NO: 1571908 - RNA, 19 nt, Homo sapiens
  misc_RNA (1)...(19): siRNA sense strand
gagggaaacagaucaaugc

SEQ ID NO: 1571909 - RNA, 19 nt, Homo sapiens
  misc_RNA (1)...(19): siRNA sense strand
gcuuuauccugugcaguuu

SEQ ID NO: 1571910 - RNA, 19 nt, Homo sapiens
  misc_RNA (1)...(19): siRNA sense strand
uagcauacaacaugagaga

SEQ ID NO: 1571911 - RNA, 19 nt, Homo sapiens
  misc_RNA (1)...(19): siRNA sense strand
caaaugaugauaccuuggu

SEQ ID NO: 1571912 - RNA, 19 nt, Homo sapiens
  misc_RNA (1)...(19): siRNA sense strand
acagagacauuugggacuu

SEQ ID NO: 1571913 - RNA, 19 nt, Homo sapiens
  misc_RNA (1)...(19): siRNA sense strand
ccacaagcagaauccauga

SEQ ID NO: 1571914 - RNA, 19 nt, Homo sapiens
  misc_RNA (1)...(19): siRNA sense strand
agaaaagggugacaaagga

SEQ ID NO: 1571915 - RNA, 19 nt, Homo sapiens
  misc_RNA (1)...(19): siRNA sense strand
ugucaacuaccuuaaauca

SEQ ID NO: 1571916 - RNA, 19 nt, Homo sapiens
  misc_RNA (1)...(19): siRNA sense strand
gaaacccagugcaaguacu

SEQ ID NO: 1571917 - RNA, 19 nt, Homo sapiens
  misc_RNA (1)...(19): siRNA sense strand
gauuaucuaugcgucaagu

SEQ ID NO: 1571918 - RNA, 19 nt, Homo sapiens
  misc_RNA (1)...(19): siRNA sense strand
cauccaccuuccauacuau

SEQ ID NO: 1571919 - RNA, 19 nt, Homo sapiens
  misc_RNA (1)...(19): siRNA sense strand
gagagucugcuaacaagag

SEQ ID NO: 1571920 - RNA, 19 nt, Homo sapiens
  misc_RNA (1)...(19): siRNA sense strand
aaacaucccaaacucugaa

SEQ ID NO: 1571921 - RNA, 19 nt, Homo sapiens
  misc_RNA (1)...(19): siRNA sense strand
acaacucucucuacuacca

SEQ ID NO: 1571922 - RNA, 19 nt, Homo sapiens
  misc_RNA (1)...(19): siRNA sense strand
gcaguuacacguucaucca

SEQ ID NO: 1571923 - RNA, 19 nt, Homo sapiens
  misc_RNA (1)...(19): siRNA sense strand
gugggcacguugcuuacaa

SEQ ID NO: 1571924 - RNA, 19 nt, Homo sapiens
  misc_RNA (1)...(19): siRNA sense strand
caauaccacguacccuaaa

SEQ ID NO: 1571925 - RNA, 19 nt, Homo sapiens
  misc_RNA (1)...(19): siRNA sense strand
ggacggcucgagcauucuu

SEQ ID NO: 1571926 - RNA, 19 nt, Homo sapiens
  misc_RNA (1)...(19): siRNA sense strand
acaacaacucucucuacua

SEQ ID NO: 1571927 - RNA, 19 nt, Homo sapiens
  misc_RNA (1)...(19): siRNA sense strand
gcaaguacugaaagugaca

SEQ ID NO: 1571928 - RNA, 19 nt, Homo sapiens
  misc_RNA (1)...(19): siRNA sense strand
caacaugagagaucagcau

SEQ ID NO: 1571929 - RNA, 19 nt, Homo sapiens
  misc_RNA (1)...(19): siRNA sense strand
gggaaacagaucaaugcaa

SEQ ID NO: 1571930 - RNA, 19 nt, Homo sapiens
  misc_RNA (1)...(19): siRNA sense strand
gcuggcaacgccuucauug

SEQ ID NO: 1571931 - RNA, 19 nt, Homo sapiens
  misc_RNA (1)...(19): siRNA sense strand
gaauuuggccaggaaacau

SEQ ID NO: 1571932 - RNA, 19 nt, Homo sapiens
  misc_RNA (1)...(19): siRNA sense strand
cagagacauuugggacuug

SEQ ID NO: 1571933 - RNA, 19 nt, Homo sapiens
  misc_RNA (1)...(19): siRNA sense strand
aaaugaugauaccuugguu

SEQ ID NO: 1571934 - RNA, 19 nt, Homo sapiens
  misc_RNA (1)...(19): siRNA sense strand
uaagaacuucccagucugu

SEQ ID NO: 1571935 - RNA, 19 nt, Homo sapiens
  misc_RNA (1)...(19): siRNA sense strand
aggugagacuugugccaua

SEQ ID NO: 1571936 - RNA, 19 nt, Homo sapiens
  misc_RNA (1)...(19): siRNA sense strand
caaacucugaagcuugaaa

SEQ ID NO: 1571937 - RNA, 19 nt, Homo sapiens
  misc_RNA (1)...(19): siRNA sense strand
ggaaacccagugcaaguac

SEQ ID NO: 1571938 - RNA, 19 nt, Homo sapiens
  misc_RNA (1)...(19): siRNA sense strand
aaaaggagcaaauggaaaa

SEQ ID NO: 1571939 - RNA, 19 nt, Homo sapiens
  misc_RNA (1)...(19): siRNA sense strand
aaagugacagagacauuug

SEQ ID NO: 1571940 - RNA, 19 nt, Homo sapiens
  misc_RNA (1)...(19): siRNA sense strand
agacuugugccauaccaaa

SEQ ID NO: 1571941 - RNA, 19 nt, Homo sapiens
  misc_RNA (1)...(19): siRNA sense strand
ccaggaaacaucccaaacu

SEQ ID NO: 1571942 - RNA, 19 nt, Homo sapiens
  misc_RNA (1)...(19): siRNA sense strand
uacaacaacucucucuacu

SEQ ID NO: 1571943 - RNA, 19 nt, Homo sapiens
  misc_RNA (1)...(19): siRNA sense strand
gaugagaaagccagugaac

SEQ ID NO: 1571944 - RNA, 19 nt, Homo sapiens
  misc_RNA (1)...(19): siRNA sense strand
cauuugccuuugauuuguu

SEQ ID NO: 1571945 - RNA, 19 nt, Homo sapiens
  misc_RNA (1)...(19): siRNA sense strand
acauuugccuuugauuugu

SEQ ID NO: 1571946 - RNA, 19 nt, Homo sapiens
  misc_RNA (1)...(19): siRNA sense strand
ggugagacuugugccauac

SEQ ID NO: 1571947 - RNA, 19 nt, Homo sapiens
  misc_RNA (1)...(19): siRNA sense strand
gccuuuggauuaucuaugc

SEQ ID NO: 1571948 - RNA, 19 nt, Homo sapiens
  misc_RNA (1)...(19): siRNA sense strand
ugagaaagccagugaacac

SEQ ID NO: 1571949 - RNA, 19 nt, Homo sapiens
  misc_RNA (1)...(19): siRNA sense strand
agucuguucuugccauguu

SEQ ID NO: 1571950 - RNA, 19 nt, Homo sapiens
  misc_RNA (1)...(19): siRNA sense strand
acauuugggacuuggauaa

SEQ ID NO: 1571951 - RNA, 19 nt, Homo sapiens
  misc_RNA (1)...(19): siRNA sense strand
cuugugccauaccaaauga

SEQ ID NO: 1571952 - RNA, 19 nt, Homo sapiens
  misc_RNA (1)...(19): siRNA sense strand
gucacagacaccaaagaua

SEQ ID NO: 1571953 - RNA, 19 nt, Homo sapiens
  misc_RNA (1)...(19): siRNA sense strand
gccaggacacaacggauug

SEQ ID NO: 1571954 - RNA, 19 nt, Homo sapiens
  misc_RNA (1)...(19): siRNA sense strand
agauaugagggucacauuu

SEQ ID NO: 1571955 - RNA, 19 nt, Homo sapiens
  misc_RNA (1)...(19): siRNA sense strand
gaagagagcuccaauuuag

SEQ ID NO: 1571956 - RNA, 19 nt, Homo sapiens
  misc_RNA (1)...(19): siRNA sense strand
uauaugagcuggaguuuaa

SEQ ID NO: 1571957 - RNA, 19 nt, Homo sapiens
  misc_RNA (1)...(19): siRNA sense strand
gggcaugccuccuguugua

SEQ ID NO: 1571958 - RNA, 19 nt, Homo sapiens
  misc_RNA (1)...(19): siRNA sense strand
ccagaagagucgaaacuaa

SEQ ID NO: 1571959 - RNA, 19 nt, Homo sapiens
  misc_RNA (1)...(19): siRNA sense strand
gagaagcacuacaaacaug

SEQ ID NO: 1571960 - RNA, 19 nt, Homo sapiens
  misc_RNA (1)...(19): siRNA sense strand
ggaagaaagccucuaaaga

SEQ ID NO: 1571961 - RNA, 19 nt, Homo sapiens
  misc_RNA (1)...(19): siRNA sense strand
gaacaagacaagauuucua

SEQ ID NO: 1571962 - RNA, 19 nt, Homo sapiens
  misc_RNA (1)...(19): siRNA sense strand
aagaagauaugcccacuaa

SEQ ID NO: 1571963 - RNA, 19 nt, Homo sapiens
  misc_RNA (1)...(19): siRNA sense strand
agagaaagcugaaccugaa

SEQ ID NO: 1571964 - RNA, 19 nt, Homo sapiens
  misc_RNA (1)...(19): siRNA sense strand
ggaaaugucuggguauaca

SEQ ID NO: 1571965 - RNA, 19 nt, Homo sapiens
  misc_RNA (1)...(19): siRNA sense strand
gaaagguugucaggaauga

SEQ ID NO: 1571966 - RNA, 19 nt, Homo sapiens
  misc_RNA (1)...(19): siRNA sense strand
gcaucuaaguuaagagaaa

SEQ ID NO: 1571967 - RNA, 19 nt, Homo sapiens
  misc_RNA (1)...(19): siRNA sense strand
cccuaaagcugaauuaauu

SEQ ID NO: 1571968 - RNA, 19 nt, Homo sapiens
  misc_RNA (1)...(19): siRNA sense strand
gcauuaacuucaaggauga

SEQ ID NO: 1571969 - RNA, 19 nt, Homo sapiens
  misc_RNA (1)...(19): siRNA sense strand
ccaacaagguaaaugguuu

SEQ ID NO: 1571970 - RNA, 19 nt, Homo sapiens
  misc_RNA (1)...(19): siRNA sense strand
gaggagacaucacccaaau

SEQ ID NO: 1571971 - RNA, 19 nt, Homo sapiens
  misc_RNA (1)...(19): siRNA sense strand
caagggaacagacucauuu

SEQ ID NO: 1571972 - RNA, 19 nt, Homo sapiens
  misc_RNA (1)...(19): siRNA sense strand
gauagcauguggaaagguu

SEQ ID NO: 1571973 - RNA, 19 nt, Homo sapiens
  misc_RNA (1)...(19): siRNA sense strand
aaagauccgucgccuguuu

SEQ ID NO: 1571974 - RNA, 19 nt, Homo sapiens
  misc_RNA (1)...(19): siRNA sense strand
ggacaacacaaauauucua

SEQ ID NO: 1571975 - RNA, 19 nt, Homo sapiens
  misc_RNA (1)...(19): siRNA sense strand
cugaaugucuggcaucuaa

SEQ ID NO: 1571976 - RNA, 19 nt, Homo sapiens
  misc_RNA (1)...(19): siRNA sense strand
ggaacagacucauuucucu

SEQ ID NO: 1571977 - RNA, 19 nt, Homo sapiens
  misc_RNA (1)...(19): siRNA sense strand
guggaaagguugucaggaa

SEQ ID NO: 1571978 - RNA, 19 nt, Homo sapiens
  misc_RNA (1)...(19): siRNA sense strand
gaagagucgaaacuaaaua

SEQ ID NO: 1571979 - RNA, 19 nt, Homo sapiens
  misc_RNA (1)...(19): siRNA sense strand
gaauaagggcuuggaauug

SEQ ID NO: 1571980 - RNA, 19 nt, Homo sapiens
  misc_RNA (1)...(19): siRNA sense strand
guucgagccuucucuaaga

SEQ ID NO: 1571981 - RNA, 19 nt, Homo sapiens
  misc_RNA (1)...(19): siRNA sense strand
aagaagagagcuccaauuu

SEQ ID NO: 1571982 - RNA, 19 nt, Homo sapiens
  misc_RNA (1)...(19): siRNA sense strand
ucacaguucugguauaaag

SEQ ID NO: 1571983 - RNA, 19 nt, Homo sapiens
  misc_RNA (1)...(19): siRNA sense strand
gcuuugaaccguuauauug

SEQ ID NO: 1571984 - RNA, 19 nt, Homo sapiens
  misc_RNA (1)...(19): siRNA sense strand
caccauccauucuggcaua

SEQ ID NO: 1571985 - RNA, 19 nt, Homo sapiens
  misc_RNA (1)...(19): siRNA sense strand
gagcuccaauuuaggcauu

SEQ ID NO: 1571986 - RNA, 19 nt, Homo sapiens
  misc_RNA (1)...(19): siRNA sense strand
gcaagaaucaguguuggaa

SEQ ID NO: 1571987 - RNA, 19 nt, Homo sapiens
  misc_RNA (1)...(19): siRNA sense strand
ggguauacaucaauaucuu

SEQ ID NO: 1571988 - RNA, 19 nt, Homo sapiens
  misc_RNA (1)...(19): siRNA sense strand
uccaagauuugucugauaa

SEQ ID NO: 1571989 - RNA, 19 nt, Homo sapiens
  misc_RNA (1)...(19): siRNA sense strand
gaaacaguaacaugucuau

SEQ ID NO: 1571990 - RNA, 19 nt, Homo sapiens
  misc_RNA (1)...(19): siRNA sense strand
agaagagagcuccaauuua

SEQ ID NO: 1571991 - RNA, 19 nt, Homo sapiens
  misc_RNA (1)...(19): siRNA sense strand
caacuaagaaacaguaaca

SEQ ID NO: 1571992 - RNA, 19 nt, Homo sapiens
  misc_RNA (1)...(19): siRNA sense strand
caacacaaauauucuaucc

SEQ ID NO: 1571993 - RNA, 19 nt, Homo sapiens
  misc_RNA (1)...(19): siRNA sense strand
ugucaggaaugagcucuua

SEQ ID NO: 1571994 - RNA, 19 nt, Homo sapiens
  misc_RNA (1)...(19): siRNA sense strand
cagaagagucgaaacuaaa

SEQ ID NO: 1571995 - RNA, 19 nt, Homo sapiens
  misc_RNA (1)...(19): siRNA sense strand
ugucacaguucugguauaa

SEQ ID NO: 1571996 - RNA, 19 nt, Homo sapiens
  misc_RNA (1)...(19): siRNA sense strand
gaucaagccggcaacagaa

SEQ ID NO: 1571997 - RNA, 19 nt, Homo sapiens
  misc_RNA (1)...(19): siRNA sense strand
ggccagacauuuugcaaua

SEQ ID NO: 1571998 - RNA, 19 nt, Homo sapiens
  misc_RNA (1)...(19): siRNA sense strand
gaaacaggagcaacgaaug

SEQ ID NO: 1571999 - RNA, 19 nt, Homo sapiens
  misc_RNA (1)...(19): siRNA sense strand
gcagcgaucuaagagcauu

SEQ ID NO: 1572000 - RNA, 19 nt, Homo sapiens
  misc_RNA (1)...(19): siRNA sense strand
aaagcaaccuuccuaccuu

SEQ ID NO: 1572001 - RNA, 19 nt, Homo sapiens
  misc_RNA (1)...(19): siRNA sense strand
gaugggacaacacaaauau

SEQ ID NO: 1572002 - RNA, 19 nt, Homo sapiens
  misc_RNA (1)...(19): siRNA sense strand
ggaaacaggagcaacgaau

SEQ ID NO: 1572003 - RNA, 19 nt, Homo sapiens
  misc_RNA (1)...(19): siRNA sense strand
guagugaggucgacagacu

SEQ ID NO: 1572004 - RNA, 19 nt, Homo sapiens
  misc_RNA (1)...(19): siRNA sense strand
ggaggucaauauucagauc

SEQ ID NO: 1572005 - RNA, 19 nt, Homo sapiens
  misc_RNA (1)...(19): siRNA sense strand
gcuaucaucccaauggaaa

SEQ ID NO: 1572006 - RNA, 19 nt, Homo sapiens
  misc_RNA (1)...(19): siRNA sense strand
caaauauucuauccaucug

SEQ ID NO: 1572007 - RNA, 19 nt, Homo sapiens
  misc_RNA (1)...(19): siRNA sense strand
aaagugcaaucgaggaaga

SEQ ID NO: 1572008 - RNA, 19 nt, Homo sapiens
  misc_RNA (1)...(19): siRNA sense strand
agaauaagggcuuggaauu

SEQ ID NO: 1572009 - RNA, 19 nt, Homo sapiens
  misc_RNA (1)...(19): siRNA sense strand
ggucaaauuccaucacuuc

SEQ ID NO: 1572010 - RNA, 19 nt, Homo sapiens
  misc_RNA (1)...(19): siRNA sense strand
ucauaaacuugaaggaugu

SEQ ID NO: 1572011 - RNA, 19 nt, Homo sapiens
  misc_RNA (1)...(19): siRNA sense strand
ccaauccuccgauacguaa

SEQ ID NO: 1572012 - RNA, 19 nt, Homo sapiens
  misc_RNA (1)...(19): siRNA sense strand
gguaauuaauccagaagag

SEQ ID NO: 1572013 - RNA, 19 nt, Homo sapiens
  misc_RNA (1)...(19): siRNA sense strand
uagagaagcacuacaaaca

SEQ ID NO: 1572014 - RNA, 19 nt, Homo sapiens
  misc_RNA (1)...(19): siRNA sense strand
agauuugucugauaaagug

SEQ ID NO: 1572015 - RNA, 19 nt, Homo sapiens
  misc_RNA (1)...(19): siRNA sense strand
caauuuaggcauuaacuuc

SEQ ID NO: 1572016 - RNA, 19 nt, Homo sapiens
  misc_RNA (1)...(19): siRNA sense strand
ugucuggcaucuaaguuaa

SEQ ID NO: 1572017 - RNA, 19 nt, Homo sapiens
  misc_RNA (1)...(19): siRNA sense strand
gaagauaugcccacuaacc

SEQ ID NO: 1572018 - RNA, 19 nt, Homo sapiens
  misc_RNA (1)...(19): siRNA sense strand
ccagaugggacaacacaaa

SEQ ID NO: 1572019 - RNA, 19 nt, Homo sapiens
  misc_RNA (1)...(19): siRNA sense strand
gaaagcugaaccugaaugu

SEQ ID NO: 1572020 - RNA, 19 nt, Homo sapiens
  misc_RNA (1)...(19): siRNA sense strand
cuaagaaacaguaacaugu

SEQ ID NO: 1572021 - RNA, 19 nt, Homo sapiens
  misc_RNA (1)...(19): siRNA sense strand
ggaggagacaucacccaaa

SEQ ID NO: 1572022 - RNA, 19 nt, Homo sapiens
  misc_RNA (1)...(19): siRNA sense strand
ggaaagguugucaggaaug

SEQ ID NO: 1572023 - RNA, 19 nt, Homo sapiens
  misc_RNA (1)...(19): siRNA sense strand
caagauuugucugauaaag

SEQ ID NO: 1572024 - RNA, 19 nt, Homo sapiens
  misc_RNA (1)...(19): siRNA sense strand
ggaaaccuagccaucauuc

SEQ ID NO: 1572025 - RNA, 19 nt, Homo sapiens
  misc_RNA (1)...(19): siRNA sense strand
aagcaaccuuccuaccuuu

SEQ ID NO: 1572026 - RNA, 19 nt, Homo sapiens
  misc_RNA (1)...(19): siRNA sense strand
guacaaacagaagaaaguu

SEQ ID NO: 1572027 - RNA, 19 nt, Homo sapiens
  misc_RNA (1)...(19): siRNA sense strand
agacucauuucucugaaga

SEQ ID NO: 1572028 - RNA, 19 nt, Homo sapiens
  misc_RNA (1)...(19): siRNA sense strand
cacuaacccugcuauccua

SEQ ID NO: 1572029 - RNA, 19 nt, Homo sapiens
  misc_RNA (1)...(19): siRNA sense strand
acaugucuaucauuuguug

SEQ ID NO: 1572030 - RNA, 19 nt, Homo sapiens
  misc_RNA (1)...(19): siRNA sense strand
aauaagggcuuggaauugg

SEQ ID NO: 1572031 - RNA, 19 nt, Homo sapiens
  misc_RNA (1)...(19): siRNA sense strand
caaagaagagagcuccaau

SEQ ID NO: 1572032 - RNA, 19 nt, Homo sapiens
  misc_RNA (1)...(19): siRNA sense strand
guucugguauaaagcaaga

SEQ ID NO: 1572033 - RNA, 19 nt, Homo sapiens
  misc_RNA (1)...(19): siRNA sense strand
uauuggaguccgcaucuua

SEQ ID NO: 1572034 - RNA, 19 nt, Homo sapiens
  misc_RNA (1)...(19): siRNA sense strand
cuugggaggucaauauuca

SEQ ID NO: 1572035 - RNA, 19 nt, Homo sapiens
  misc_RNA (1)...(19): siRNA sense strand
gcuccaauuuaggcauuaa

SEQ ID NO: 1572036 - RNA, 19 nt, Homo sapiens
  misc_RNA (1)...(19): siRNA sense strand
cuccaagauuugucugaua

SEQ ID NO: 1572037 - RNA, 19 nt, Homo sapiens
  misc_RNA (1)...(19): siRNA sense strand
cauccauucuggcauacaa

SEQ ID NO: 1572038 - RNA, 19 nt, Homo sapiens
  misc_RNA (1)...(19): siRNA sense strand
caaccuuccuaccuuucuu

SEQ ID NO: 1572039 - RNA, 19 nt, Homo sapiens
  misc_RNA (1)...(19): siRNA sense strand
aaacuugaaggauguguga

SEQ ID NO: 1572040 - RNA, 19 nt, Homo sapiens
  misc_RNA (1)...(19): siRNA sense strand
caagccggcaacagaauaa

SEQ ID NO: 1572041 - RNA, 19 nt, Homo sapiens
  misc_RNA (1)...(19): siRNA sense strand
agaaguuccugcuaucauc

SEQ ID NO: 1572042 - RNA, 19 nt, Homo sapiens
  misc_RNA (1)...(19): siRNA sense strand
caugggagcaaguuucuga

SEQ ID NO: 1572043 - RNA, 19 nt, Homo sapiens
  misc_RNA (1)...(19): siRNA sense strand
ucaacuuucuguggauauu

SEQ ID NO: 1572044 - RNA, 19 nt, Homo sapiens
  misc_RNA (1)...(19): siRNA sense strand
ggaauuccaguaucaguac

SEQ ID NO: 1572045 - RNA, 19 nt, Homo sapiens
  misc_RNA (1)...(19): siRNA sense strand
ccaaagugaagcuaccaaa

SEQ ID NO: 1572046 - RNA, 19 nt, Homo sapiens
  misc_RNA (1)...(19): siRNA sense strand
ucuaugaggagcaaauaaa

SEQ ID NO: 1572047 - RNA, 19 nt, Homo sapiens
  misc_RNA (1)...(19): siRNA sense strand
caucggaccaccauccauu

SEQ ID NO: 1572048 - RNA, 19 nt, Homo sapiens
  misc_RNA (1)...(19): siRNA sense strand
ugaaggaugugugaauuuu

SEQ ID NO: 1572049 - RNA, 19 nt, Homo sapiens
  misc_RNA (1)...(19): siRNA sense strand
cacccuuuguuucauuuaa

SEQ ID NO: 1572050 - RNA, 19 nt, Homo sapiens
  misc_RNA (1)...(19): siRNA sense strand
ccucacccuuuguuucauu

SEQ ID NO: 1572051 - RNA, 19 nt, Homo sapiens
  misc_RNA (1)...(19): siRNA sense strand
ucaagccggcaacagaaua

SEQ ID NO: 1572052 - RNA, 19 nt, Homo sapiens
  misc_RNA (1)...(19): siRNA sense strand
acaguaacaugucuaucau

SEQ ID NO: 1572053 - RNA, 19 nt, Homo sapiens
  misc_RNA (1)...(19): siRNA sense strand
uaagaaacaguaacauguc

SEQ ID NO: 1572054 - RNA, 19 nt, Homo sapiens
  misc_RNA (1)...(19): siRNA sense strand
uaucuugggaggucaauau

SEQ ID NO: 1572055 - RNA, 19 nt, Homo sapiens
  misc_RNA (1)...(19): siRNA sense strand
gagaagugcgcccuguuua

SEQ ID NO: 1572056 - RNA, 19 nt, Homo sapiens
  misc_RNA (1)...(19): siRNA sense strand
ggagaagugcgcccuguuu

SEQ ID NO: 1572057 - RNA, 19 nt, Homo sapiens
  misc_RNA (1)...(19): siRNA sense strand
caagaaauccaaagagcaa

SEQ ID NO: 1572058 - RNA, 19 nt, Homo sapiens
  misc_RNA (1)...(19): siRNA sense strand
gcaaacagugcacggagaa

SEQ ID NO: 1572059 - RNA, 19 nt, Homo sapiens
  misc_RNA (1)...(19): siRNA sense strand
ugcgaaagcucuccaagau

SEQ ID NO: 1572060 - RNA, 19 nt, Homo sapiens
  misc_RNA (1)...(19): siRNA sense strand
gcagcaagaaauccaaaga

SEQ ID NO: 1572061 - RNA, 19 nt, Homo sapiens
  misc_RNA (1)...(19): siRNA sense strand
caagaacuacauccucaug

SEQ ID NO: 1572062 - RNA, 19 nt, Homo sapiens
  misc_RNA (1)...(19): siRNA sense strand
agaagugcgcccuguuuaa

SEQ ID NO: 1572063 - RNA, 19 nt, Homo sapiens
  misc_RNA (1)...(19): siRNA sense strand
gaagugcgcccuguuuaac

SEQ ID NO: 1572064 - RNA, 19 nt, Homo sapiens
  misc_RNA (1)...(19): siRNA sense strand
gcgcugcggcuuaacauca

SEQ ID NO: 1572065 - RNA, 19 nt, Homo sapiens
  misc_RNA (1)...(19): siRNA sense strand
caaaaggcgcugcggcuua

SEQ ID NO: 1572066 - RNA, 19 nt, Homo sapiens
  misc_RNA (1)...(19): siRNA sense strand
aaaaggcgcugcggcuuaa

SEQ ID NO: 1572067 - RNA, 19 nt, Homo sapiens
  misc_RNA (1)...(19): siRNA sense strand
agaacuacauccucaugca

SEQ ID NO: 1572068 - RNA, 19 nt, Homo sapiens
  misc_RNA (1)...(19): siRNA sense strand
gugcgaaagcucuccaaga

SEQ ID NO: 1572069 - RNA, 19 nt, Homo sapiens
  misc_RNA (1)...(19): siRNA sense strand
cagcagcagcagcaagaaa

SEQ ID NO: 1572070 - RNA, 19 nt, Homo sapiens
  misc_RNA (1)...(19): siRNA sense strand
gcgaaagcucuccaagauc

SEQ ID NO: 1572071 - RNA, 19 nt, Homo sapiens
  misc_RNA (1)...(19): siRNA sense strand
gcagcagcagcaagaaauc

SEQ ID NO: 1572072 - RNA, 19 nt, Homo sapiens
  misc_RNA (1)...(19): siRNA sense strand
cagcagcaagaaauccaaa

SEQ ID NO: 1572073 - RNA, 19 nt, Homo sapiens
  misc_RNA (1)...(19): siRNA sense strand
ggaggcaaaugcugaauua

SEQ ID NO: 1572074 - RNA, 19 nt, Homo sapiens
  misc_RNA (1)...(19): siRNA sense strand
gauaucaccuaacaauuga

SEQ ID NO: 1572075 - RNA, 19 nt, Homo sapiens
  misc_RNA (1)...(19): siRNA sense strand
caauggaggugcaggcuuu

SEQ ID NO: 1572076 - RNA, 19 nt, Homo sapiens
  misc_RNA (1)...(19): siRNA sense strand
ggaaauucaugcuccaaau

SEQ ID NO: 1572077 - RNA, 19 nt, Homo sapiens
  misc_RNA (1)...(19): siRNA sense strand
gaucaugacuauagcagau

SEQ ID NO: 1572078 - RNA, 19 nt, Homo sapiens
  misc_RNA (1)...(19): siRNA sense strand
gcagauaucaccuaacaau

SEQ ID NO: 1572079 - RNA, 19 nt, Homo sapiens
  misc_RNA (1)...(19): siRNA sense strand
uaaagacagugguugaaga

SEQ ID NO: 1572080 - RNA, 19 nt, Homo sapiens
  misc_RNA (1)...(19): siRNA sense strand
ggacuccucucuggaaaug

SEQ ID NO: 1572081 - RNA, 19 nt, Homo sapiens
  misc_RNA (1)...(19): siRNA sense strand
guacgcagcuggcgcagau

SEQ ID NO: 1572082 - RNA, 19 nt, Homo sapiens
  misc_RNA (1)...(19): siRNA sense strand
uagcagauaucaccuaaca

SEQ ID NO: 1572083 - RNA, 19 nt, Homo sapiens
  misc_RNA (1)...(19): siRNA sense strand
ggaaaugcugcuuguauug

SEQ ID NO: 1572084 - RNA, 19 nt, Homo sapiens
  misc_RNA (1)...(19): siRNA sense strand
accaggagcugcaauauga

SEQ ID NO: 1572085 - RNA, 19 nt, Homo sapiens
  misc_RNA (1)...(19): siRNA sense strand
gaaaugagaaggugaccau

SEQ ID NO: 1572086 - RNA, 19 nt, Homo sapiens
  misc_RNA (1)...(19): siRNA sense strand
uauagcagauaucaccuaa

SEQ ID NO: 1572087 - RNA, 19 nt, Homo sapiens
  misc_RNA (1)...(19): siRNA sense strand
gacagugguugaagagcua

SEQ ID NO: 1572088 - RNA, 19 nt, Homo sapiens
  misc_RNA (1)...(19): siRNA sense strand
gcggaggccugguucaaug

SEQ ID NO: 1572089 - RNA, 19 nt, Homo sapiens
  misc_RNA (1)...(19): siRNA sense strand
caauugaggaucuuaagaa

SEQ ID NO: 1572090 - RNA, 19 nt, Homo sapiens
  misc_RNA (1)...(19): siRNA sense strand
uggaaaugcugcuuguauu

SEQ ID NO: 1572091 - RNA, 19 nt, Homo sapiens
  misc_RNA (1)...(19): siRNA sense strand
ugagugaggagaugacaua

SEQ ID NO: 1572092 - RNA, 19 nt, Homo sapiens
  misc_RNA (1)...(19): siRNA sense strand
ggcaaaugcugaauuagag

SEQ ID NO: 1572093 - RNA, 19 nt, Homo sapiens
  misc_RNA (1)...(19): siRNA sense strand
gccguggacuugaucauga

SEQ ID NO: 1572094 - RNA, 19 nt, Homo sapiens
  misc_RNA (1)...(19): siRNA sense strand
ccugauagauggagaugga

SEQ ID NO: 1572095 - RNA, 19 nt, Homo sapiens
  misc_RNA (1)...(19): siRNA sense strand
gagcucacccuucaccaaa

SEQ ID NO: 1572096 - RNA, 19 nt, Homo sapiens
  misc_RNA (1)...(19): siRNA sense strand
ccacuacuacuaaugcuaa

SEQ ID NO: 1572097 - RNA, 19 nt, Homo sapiens
  misc_RNA (1)...(19): siRNA sense strand
caucaaggauucacuccau

SEQ ID NO: 1572098 - RNA, 19 nt, Homo sapiens
  misc_RNA (1)...(19): siRNA sense strand
agauggagauggaaauuca

SEQ ID NO: 1572099 - RNA, 19 nt, Homo sapiens
  misc_RNA (1)...(19): siRNA sense strand
gaaauucaugcuccaaauc

SEQ ID NO: 1572100 - RNA, 19 nt, Homo sapiens
  misc_RNA (1)...(19): siRNA sense strand
agauaucaccuaacaauug

SEQ ID NO: 1572101 - RNA, 19 nt, Homo sapiens
  misc_RNA (1)...(19): siRNA sense strand
aaaaugagcucacccuuca

SEQ ID NO: 1572102 - RNA, 19 nt, Homo sapiens
  misc_RNA (1)...(19): siRNA sense strand
gaucaacgugguaaaguuc

SEQ ID NO: 1572103 - RNA, 19 nt, Homo sapiens
  misc_RNA (1)...(19): siRNA sense strand
gaccuacugccgccugaua

SEQ ID NO: 1572104 - RNA, 19 nt, Homo sapiens
  misc_RNA (1)...(19): siRNA sense strand
gagaaggugaccaugcaaa

SEQ ID NO: 1572105 - RNA, 19 nt, Homo sapiens
  misc_RNA (1)...(19): siRNA sense strand
cagacuggcugcugaugau

SEQ ID NO: 1572106 - RNA, 19 nt, Homo sapiens
  misc_RNA (1)...(19): siRNA sense strand
aaucaaggguugguaugaa

SEQ ID NO: 1572107 - RNA, 19 nt, Homo sapiens
  misc_RNA (1)...(19): siRNA sense strand
uguauuggcuuugcuggaa

SEQ ID NO: 1572108 - RNA, 19 nt, Homo sapiens
  misc_RNA (1)...(19): siRNA sense strand
gcaaaugcugaauuagaga

SEQ ID NO: 1572109 - RNA, 19 nt, Homo sapiens
  misc_RNA (1)...(19): siRNA sense strand
gaaaugcugcuuguauugg

SEQ ID NO: 1572110 - RNA, 19 nt, Homo sapiens
  misc_RNA (1)...(19): siRNA sense strand
aauaugagucucugaguga

SEQ ID NO: 1572111 - RNA, 19 nt, Homo sapiens
  misc_RNA (1)...(19): siRNA sense strand
gcccugggaauucaucuaa

SEQ ID NO: 1572112 - RNA, 19 nt, Homo sapiens
  misc_RNA (1)...(19): siRNA sense strand
ugacggagaccgagagcaa

SEQ ID NO: 1572113 - RNA, 19 nt, Homo sapiens
  misc_RNA (1)...(19): siRNA sense strand
caaggauucacuccauuga

SEQ ID NO: 1572114 - RNA, 19 nt, Homo sapiens
  misc_RNA (1)...(19): siRNA sense strand
agaucaacgugguaaaguu

SEQ ID NO: 1572115 - RNA, 19 nt, Homo sapiens
  misc_RNA (1)...(19): siRNA sense strand
ggaggaggcaaaugcugaa

SEQ ID NO: 1572116 - RNA, 19 nt, Homo sapiens
  misc_RNA (1)...(19): siRNA sense strand
guucuuucaucaaggauuc

SEQ ID NO: 1572117 - RNA, 19 nt, Homo sapiens
  misc_RNA (1)...(19): siRNA sense strand
gauccaggcauguuugcuu

SEQ ID NO: 1572118 - RNA, 19 nt, Homo sapiens
  misc_RNA (1)...(19): siRNA sense strand
gaccaggagcugcaauaug

SEQ ID NO: 1572119 - RNA, 19 nt, Homo sapiens
  misc_RNA (1)...(19): siRNA sense strand
ggacuugaucaugacuaua

SEQ ID NO: 1572120 - RNA, 19 nt, Homo sapiens
  misc_RNA (1)...(19): siRNA sense strand
gacuugaucaugacuauag

SEQ ID NO: 1572121 - RNA, 19 nt, Homo sapiens
  misc_RNA (1)...(19): siRNA sense strand
gaugauuucaggcuaaagu

SEQ ID NO: 1572122 - RNA, 19 nt, Homo sapiens
  misc_RNA (1)...(19): siRNA sense strand
gagcuagaucaacguggua

SEQ ID NO: 1572123 - RNA, 19 nt, Homo sapiens
  misc_RNA (1)...(19): siRNA sense strand
ggguagaccucgcgguuuu

SEQ ID NO: 1572124 - RNA, 19 nt, Homo sapiens
  misc_RNA (1)...(19): siRNA sense strand
gcaauaugagucucugagu

SEQ ID NO: 1572125 - RNA, 19 nt, Homo sapiens
  misc_RNA (1)...(19): siRNA sense strand
auccaggcauguuugcuua

SEQ ID NO: 1572126 - RNA, 19 nt, Homo sapiens
  misc_RNA (1)...(19): siRNA sense strand
gguaaagacagugguugaa

SEQ ID NO: 1572127 - RNA, 19 nt, Homo sapiens
  misc_RNA (1)...(19): siRNA sense strand
gaaccacgaagaggagaug

SEQ ID NO: 1572128 - RNA, 19 nt, Homo sapiens
  misc_RNA (1)...(19): siRNA sense strand
aaacguagaggccgacauc

SEQ ID NO: 1572129 - RNA, 19 nt, Homo sapiens
  misc_RNA (1)...(19): siRNA sense strand
ucaugacuauagcagauau

SEQ ID NO: 1572130 - RNA, 19 nt, Homo sapiens
  misc_RNA (1)...(19): siRNA sense strand
gauuucaggcuaaaguaug

SEQ ID NO: 1572131 - RNA, 19 nt, Homo sapiens
  misc_RNA (1)...(19): siRNA sense strand
gauagauggagauggaaau

SEQ ID NO: 1572132 - RNA, 19 nt, Homo sapiens
  misc_RNA (1)...(19): siRNA sense strand
guaugagcaucuccucgau

SEQ ID NO: 1572133 - RNA, 19 nt, Homo sapiens
  misc_RNA (1)...(19): siRNA sense strand
acagaucucccacgacuca

SEQ ID NO: 1572134 - RNA, 19 nt, Homo sapiens
  misc_RNA (1)...(19): siRNA sense strand
ucaaggauucacuccauug

SEQ ID NO: 1572135 - RNA, 19 nt, Homo sapiens
  misc_RNA (1)...(19): siRNA sense strand
gcgcagauccaggcucaga

SEQ ID NO: 1572136 - RNA, 19 nt, Homo sapiens
  misc_RNA (1)...(19): siRNA sense strand
aggcaaaugcugaauuaga

SEQ ID NO: 1572137 - RNA, 19 nt, Homo sapiens
  misc_RNA (1)...(19): siRNA sense strand
guaaagacagugguugaag

SEQ ID NO: 1572138 - RNA, 19 nt, Homo sapiens
  misc_RNA (1)...(19): siRNA sense strand
ccugggaauucaucuaaag

SEQ ID NO: 1572139 - RNA, 19 nt, Homo sapiens
  misc_RNA (1)...(19): siRNA sense strand
cagauaucaccuaacaauu

SEQ ID NO: 1572140 - RNA, 19 nt, Homo sapiens
  misc_RNA (1)...(19): siRNA sense strand
gaucuugccguggacuuga

SEQ ID NO: 1572141 - RNA, 19 nt, Homo sapiens
  misc_RNA (1)...(19): siRNA sense strand
cuacuacuaaugcuaaugu

SEQ ID NO: 1572142 - RNA, 19 nt, Homo sapiens
  misc_RNA (1)...(19): siRNA sense strand
gaggccugguucaaugaga

SEQ ID NO: 1572143 - RNA, 19 nt, Homo sapiens
  misc_RNA (1)...(19): siRNA sense strand
aaauucaugcuccaaauca

SEQ ID NO: 1572144 - RNA, 19 nt, Homo sapiens
  misc_RNA (1)...(19): siRNA sense strand
uggacuugaucaugacuau

SEQ ID NO: 1572145 - RNA, 19 nt, Homo sapiens
  misc_RNA (1)...(19): siRNA sense strand
caacggcaagacagaacaa

SEQ ID NO: 1572146 - RNA, 19 nt, Homo sapiens
  misc_RNA (1)...(19): siRNA sense strand
gcaugugguggcucuguug

SEQ ID NO: 1572147 - RNA, 19 nt, Homo sapiens
  misc_RNA (1)...(19): siRNA sense strand
gacuggcugcugaugauuu

SEQ ID NO: 1572148 - RNA, 19 nt, Homo sapiens
  misc_RNA (1)...(19): siRNA sense strand
gucauucugcagauugaua

SEQ ID NO: 1572149 - RNA, 19 nt, Homo sapiens
  misc_RNA (1)...(19): siRNA sense strand
gaagcuggaguaugagcau

SEQ ID NO: 1572150 - RNA, 19 nt, Homo sapiens
  misc_RNA (1)...(19): siRNA sense strand
ggccgacaucaacggauua

SEQ ID NO: 1572151 - RNA, 19 nt, Homo sapiens
  misc_RNA (1)...(19): siRNA sense strand
aucaaggguugguaugaaa

SEQ ID NO: 1572152 - RNA, 19 nt, Homo sapiens
  misc_RNA (1)...(19): siRNA sense strand
aggaagcccugggaauuca

SEQ ID NO: 1572153 - RNA, 19 nt, Homo sapiens
  misc_RNA (1)...(19): siRNA sense strand
gcaggcagcagugcaugug

SEQ ID NO: 1572154 - RNA, 19 nt, Homo sapiens
  misc_RNA (1)...(19): siRNA sense strand
ucauucugcagauugauaa

SEQ ID NO: 1572155 - RNA, 19 nt, Homo sapiens
  misc_RNA (1)...(19): siRNA sense strand
ucaacgugguaaaguucuu

SEQ ID NO: 1572156 - RNA, 19 nt, Homo sapiens
  misc_RNA (1)...(19): siRNA sense strand
gcuaaaguaugaaaaugag

SEQ ID NO: 1572157 - RNA, 19 nt, Homo sapiens
  misc_RNA (1)...(19): siRNA sense strand
gaccaacggcaagacagaa

SEQ ID NO: 1572158 - RNA, 19 nt, Homo sapiens
  misc_RNA (1)...(19): siRNA sense strand
ccaggcauguuugcuuaag

SEQ ID NO: 1572159 - RNA, 19 nt, Homo sapiens
  misc_RNA (1)...(19): siRNA sense strand
ggaguacgaagcccuugca

SEQ ID NO: 1572160 - RNA, 19 nt, Homo sapiens
  misc_RNA (1)...(19): siRNA sense strand
gguggugcccuuggaaaug

SEQ ID NO: 1572161 - RNA, 19 nt, Homo sapiens
  misc_RNA (1)...(19): siRNA sense strand
acaauugaggaucuuaaga

SEQ ID NO: 1572162 - RNA, 19 nt, Homo sapiens
  misc_RNA (1)...(19): siRNA sense strand
aggccgacaucaacggauu

SEQ ID NO: 1572163 - RNA, 19 nt, Homo sapiens
  misc_RNA (1)...(19): siRNA sense strand
augcugaauuagagagaaa

SEQ ID NO: 1572164 - RNA, 19 nt, Homo sapiens
  misc_RNA (1)...(19): siRNA sense strand
ccacgaagaggagaugaag

SEQ ID NO: 1572165 - RNA, 19 nt, Homo sapiens
  misc_RNA (1)...(19): siRNA sense strand
cuacuaaugcuaaugucau

SEQ ID NO: 1572166 - RNA, 19 nt, Homo sapiens
  misc_RNA (1)...(19): siRNA sense strand
ccuaacaauugaggaucuu

SEQ ID NO: 1572167 - RNA, 19 nt, Homo sapiens
  misc_RNA (1)...(19): siRNA sense strand
aaaucaaggguugguauga

SEQ ID NO: 1572168 - RNA, 19 nt, Homo sapiens
  misc_RNA (1)...(19): siRNA sense strand
ccuuggaaaugcugcuugu

SEQ ID NO: 1572169 - RNA, 19 nt, Homo sapiens
  misc_RNA (1)...(19): siRNA sense strand
ugaccaacggcaagacaga

SEQ ID NO: 1572170 - RNA, 19 nt, Homo sapiens
  misc_RNA (1)...(19): siRNA sense strand
uuggaaaugcugcuuguau

SEQ ID NO: 1572171 - RNA, 19 nt, Homo sapiens
  misc_RNA (1)...(19): siRNA sense strand
cgaccaggagcugcaauau

SEQ ID NO: 1572172 - RNA, 19 nt, Homo sapiens
  misc_RNA (1)...(19): siRNA sense strand
ccgaccaggagcugcaaua

SEQ ID NO: 1572173 - RNA, 19 nt, Homo sapiens
  misc_RNA (1)...(19): siRNA sense strand
gaagauggcuguuaaggaa

SEQ ID NO: 1572174 - RNA, 19 nt, Homo sapiens
  misc_RNA (1)...(19): siRNA sense strand
caaagaagauggcuguuaa

SEQ ID NO: 1572175 - RNA, 19 nt, Homo sapiens
  misc_RNA (1)...(19): siRNA sense strand
gaaacucucugcuauggua

SEQ ID NO: 1572176 - RNA, 19 nt, Homo sapiens
  misc_RNA (1)...(19): siRNA sense strand
caaauuccuuccuuuagua

SEQ ID NO: 1572177 - RNA, 19 nt, Homo sapiens
  misc_RNA (1)...(19): siRNA sense strand
gaaguaugguauuggauuu

SEQ ID NO: 1572178 - RNA, 19 nt, Homo sapiens
  misc_RNA (1)...(19): siRNA sense strand
gcaaagaagauggcuguua

SEQ ID NO: 1572179 - RNA, 19 nt, Homo sapiens
  misc_RNA (1)...(19): siRNA sense strand
gaauagcaguguuuaaugg

SEQ ID NO: 1572180 - RNA, 19 nt, Homo sapiens
  misc_RNA (1)...(19): siRNA sense strand
gaaaggcauugaacgaaau

SEQ ID NO: 1572181 - RNA, 19 nt, Homo sapiens
  misc_RNA (1)...(19): siRNA sense strand
guuaagaacuuggaauuug

SEQ ID NO: 1572182 - RNA, 19 nt, Homo sapiens
  misc_RNA (1)...(19): siRNA sense strand
gcaaaugccagaagaaguu

SEQ ID NO: 1572183 - RNA, 19 nt, Homo sapiens
  misc_RNA (1)...(19): siRNA sense strand
uaaagaauuucgugaagga

SEQ ID NO: 1572184 - RNA, 19 nt, Homo sapiens
  misc_RNA (1)...(19): siRNA sense strand
acuaauggcugcuuacaaa

SEQ ID NO: 1572185 - RNA, 19 nt, Homo sapiens
  misc_RNA (1)...(19): siRNA sense strand
ugaaaggcauugaacgaaa

SEQ ID NO: 1572186 - RNA, 19 nt, Homo sapiens
  misc_RNA (1)...(19): siRNA sense strand
gaccaaauuccuuccuuua

SEQ ID NO: 1572187 - RNA, 19 nt, Homo sapiens
  misc_RNA (1)...(19): siRNA sense strand
gaaauaucagccacgaaua

SEQ ID NO: 1572188 - RNA, 19 nt, Homo sapiens
  misc_RNA (1)...(19): siRNA sense strand
ggacuuaagagaucaguug

SEQ ID NO: 1572189 - RNA, 19 nt, Homo sapiens
  misc_RNA (1)...(19): siRNA sense strand
ggaaguaugguauuggauu

SEQ ID NO: 1572190 - RNA, 19 nt, Homo sapiens
  misc_RNA (1)...(19): siRNA sense strand
agacaaaguucauuacuac

SEQ ID NO: 1572191 - RNA, 19 nt, Homo sapiens
  misc_RNA (1)...(19): siRNA sense strand
gcaagaggcuccaaaagga

SEQ ID NO: 1572192 - RNA, 19 nt, Homo sapiens
  misc_RNA (1)...(19): siRNA sense strand
gaaggaggacguauucuag

SEQ ID NO: 1572193 - RNA, 19 nt, Homo sapiens
  misc_RNA (1)...(19): siRNA sense strand
ccaaauuccuuccuuuagu

SEQ ID NO: 1572194 - RNA, 19 nt, Homo sapiens
  misc_RNA (1)...(19): siRNA sense strand
cuuaagagaucaguugaaa

SEQ ID NO: 1572195 - RNA, 19 nt, Homo sapiens
  misc_RNA (1)...(19): siRNA sense strand
ugcaagaugugcucaguuu

SEQ ID NO: 1572196 - RNA, 19 nt, Homo sapiens
  misc_RNA (1)...(19): siRNA sense strand
ccaagaggaugcaaagaag

SEQ ID NO: 1572197 - RNA, 19 nt, Homo sapiens
  misc_RNA (1)...(19): siRNA sense strand
gcaauauacauuugaccua

SEQ ID NO: 1572198 - RNA, 19 nt, Homo sapiens
  misc_RNA (1)...(19): siRNA sense strand
gaggugcaauauacauuug

SEQ ID NO: 1572199 - RNA, 19 nt, Homo sapiens
  misc_RNA (1)...(19): siRNA sense strand
gaaauauggacguucaaga

SEQ ID NO: 1572200 - RNA, 19 nt, Homo sapiens
  misc_RNA (1)...(19): siRNA sense strand
ggaaguguuuguuuauguc

SEQ ID NO: 1572201 - RNA, 19 nt, Homo sapiens
  misc_RNA (1)...(19): siRNA sense strand
ggcugaagcuccuaauaug

SEQ ID NO: 1572202 - RNA, 19 nt, Homo sapiens
  misc_RNA (1)...(19): siRNA sense strand
ggaguuaagaggagaauca

SEQ ID NO: 1572203 - RNA, 19 nt, Homo sapiens
  misc_RNA (1)...(19): siRNA sense strand
gaacacaagaacaggaaga

SEQ ID NO: 1572204 - RNA, 19 nt, Homo sapiens
  misc_RNA (1)...(19): siRNA sense strand
aagcugaacuucugaccaa

SEQ ID NO: 1572205 - RNA, 19 nt, Homo sapiens
  misc_RNA (1)...(19): siRNA sense strand
gaacagcaaaugccagaag

SEQ ID NO: 1572206 - RNA, 19 nt, Homo sapiens
  misc_RNA (1)...(19): siRNA sense strand
ccagggaaguaugguauug

SEQ ID NO: 1572207 - RNA, 19 nt, Homo sapiens
  misc_RNA (1)...(19): siRNA sense strand
agaccaaauuccuuccuuu

SEQ ID NO: 1572208 - RNA, 19 nt, Homo sapiens
  misc_RNA (1)...(19): siRNA sense strand
ugaaggaggacguauucua

SEQ ID NO: 1572209 - RNA, 19 nt, Homo sapiens
  misc_RNA (1)...(19): siRNA sense strand
uaagagaucaguugaaagg

SEQ ID NO: 1572210 - RNA, 19 nt, Homo sapiens
  misc_RNA (1)...(19): siRNA sense strand
aggaggacguauucuagua

SEQ ID NO: 1572211 - RNA, 19 nt, Homo sapiens
  misc_RNA (1)...(19): siRNA sense strand
guucaagaggugcaauaua

SEQ ID NO: 1572212 - RNA, 19 nt, Homo sapiens
  misc_RNA (1)...(19): siRNA sense strand
uagcaguguuuaauggaaa

SEQ ID NO: 1572213 - RNA, 19 nt, Homo sapiens
  misc_RNA (1)...(19): siRNA sense strand
ccacgaauagcaguguuua

SEQ ID NO: 1572214 - RNA, 19 nt, Homo sapiens
  misc_RNA (1)...(19): siRNA sense strand
uaauauggcaguugugaau

SEQ ID NO: 1572215 - RNA, 19 nt, Homo sapiens
  misc_RNA (1)...(19): siRNA sense strand
ugaaccauauggaugauca

SEQ ID NO: 1572216 - RNA, 19 nt, Homo sapiens
  misc_RNA (1)...(19): siRNA sense strand
cauaaacccgggacuaaug

SEQ ID NO: 1572217 - RNA, 19 nt, Homo sapiens
  misc_RNA (1)...(19): siRNA sense strand
ggacguauucuaguacaga

SEQ ID NO: 1572218 - RNA, 19 nt, Homo sapiens
  misc_RNA (1)...(19): siRNA sense strand
ggcauaaacccgggacuaa

SEQ ID NO: 1572219 - RNA, 19 nt, Homo sapiens
  misc_RNA (1)...(19): siRNA sense strand
cugaaggacuuaagagauc

SEQ ID NO: 1572220 - RNA, 19 nt, Homo sapiens
  misc_RNA (1)...(19): siRNA sense strand
cgaauagcaguguuuaaug

SEQ ID NO: 1572221 - RNA, 19 nt, Homo sapiens
  misc_RNA (1)...(19): siRNA sense strand
cacaagaacaggaagaaga

SEQ ID NO: 1572222 - RNA, 19 nt, Homo sapiens
  misc_RNA (1)...(19): siRNA sense strand
agaaauaucagccacgaau

SEQ ID NO: 1572223 - RNA, 19 nt, Homo sapiens
  misc_RNA (1)...(19): siRNA sense strand
uggaaguguuuguuuaugu

SEQ ID NO: 1572224 - RNA, 19 nt, Homo sapiens
  misc_RNA (1)...(19): siRNA sense strand
acaagaacaggaagaagaa

SEQ ID NO: 1572225 - RNA, 19 nt, Homo sapiens
  misc_RNA (1)...(19): siRNA sense strand
uucaagaggugcaauauac

SEQ ID NO: 1572226 - RNA, 19 nt, Homo sapiens
  misc_RNA (1)...(19): siRNA sense strand
gaggacguauucuaguaca

SEQ ID NO: 1572227 - RNA, 19 nt, Homo sapiens
  misc_RNA (1)...(19): siRNA sense strand
ucucuccaguaaagaauuu

SEQ ID NO: 1572228 - RNA, 19 nt, Homo sapiens
  misc_RNA (1)...(19): siRNA sense strand
ccauauggaugaucacacu

SEQ ID NO: 1572229 - RNA, 19 nt, Homo sapiens
  misc_RNA (1)...(19): siRNA sense strand
gcauaaacccgggacuaau

SEQ ID NO: 1572230 - RNA, 19 nt, Homo sapiens
  misc_RNA (1)...(19): siRNA sense strand
cccaagacaaaguucauua

SEQ ID NO: 1572231 - RNA, 19 nt, Homo sapiens
  misc_RNA (1)...(19): siRNA sense strand
uuaagaacuuggaauuugg

SEQ ID NO: 1572232 - RNA, 19 nt, Homo sapiens
  misc_RNA (1)...(19): siRNA sense strand
gguuaagaacuuggaauuu

SEQ ID NO: 1572233 - RNA, 19 nt, Homo sapiens
  misc_RNA (1)...(19): siRNA sense strand
aaagaaaaguagaccguuu

SEQ ID NO: 1572234 - RNA, 19 nt, Homo sapiens
  misc_RNA (1)...(19): siRNA sense strand
gcauugaacgaaauaugga

SEQ ID NO: 1572235 - RNA, 19 nt, Homo sapiens
  misc_RNA (1)...(19): siRNA sense strand
ccaagacucuccccgauau

SEQ ID NO: 1572236 - RNA, 19 nt, Homo sapiens
  misc_RNA (1)...(19): siRNA sense strand
uaagauuccagacacagaa

SEQ ID NO: 1572237 - RNA, 19 nt, Homo sapiens
  misc_RNA (1)...(19): siRNA sense strand
cccaagaggaugcaaagaa

SEQ ID NO: 1572238 - RNA, 19 nt, Homo sapiens
  misc_RNA (1)...(19): siRNA sense strand
auauggcaguugugaauga

SEQ ID NO: 1572239 - RNA, 19 nt, Homo sapiens
  misc_RNA (1)...(19): siRNA sense strand
uaauugagagcguggaguu

SEQ ID NO: 1572240 - RNA, 19 nt, Homo sapiens
  misc_RNA (1)...(19): siRNA sense strand
aauaugauccagguuauga

SEQ ID NO: 1572241 - RNA, 19 nt, Homo sapiens
  misc_RNA (1)...(19): siRNA sense strand
uggcugaagcuccuaauau

SEQ ID NO: 1572242 - RNA, 19 nt, Homo sapiens
  misc_RNA (1)...(19): siRNA sense strand
uuacaaagggcaucauuac

SEQ ID NO: 1572243 - RNA, 19 nt, Homo sapiens
  misc_RNA (1)...(19): siRNA sense strand
ccuuguggcuucucuucaa

SEQ ID NO: 1572244 - RNA, 19 nt, Homo sapiens
  misc_RNA (1)...(19): siRNA sense strand
aguaaagaauuucgugaag

SEQ ID NO: 1572245 - RNA, 19 nt, Homo sapiens
  misc_RNA (1)...(19): siRNA sense strand
cagaccaaauuccuuccuu

SEQ ID NO: 1572246 - RNA, 19 nt, Homo sapiens
  misc_RNA (1)...(19): siRNA sense strand
uaagaggagaaucagcuuu

SEQ ID NO: 1572247 - RNA, 19 nt, Homo sapiens
  misc_RNA (1)...(19): siRNA sense strand
caagaggaugcaaagaaga

SEQ ID NO: 1572248 - RNA, 19 nt, Homo sapiens
  misc_RNA (1)...(19): siRNA sense strand
ccauaagauuccagacaca

SEQ ID NO: 1572249 - RNA, 19 nt, Homo sapiens
  misc_RNA (1)...(19): siRNA sense strand
cgggacuaauggcugcuua

SEQ ID NO: 1572250 - RNA, 19 nt, Homo sapiens
  misc_RNA (1)...(19): siRNA sense strand
ccuaaugggcaguggauga

SEQ ID NO: 1572251 - RNA, 19 nt, Homo sapiens
  misc_RNA (1)...(19): siRNA sense strand
gggcagcuauucccuucag

SEQ ID NO: 1572252 - RNA, 19 nt, Homo sapiens
  misc_RNA (1)...(19): siRNA sense strand
ugaaggacuuaagagauca

SEQ ID NO: 1572253 - RNA, 19 nt, Homo sapiens
  misc_RNA (1)...(19): siRNA sense strand
aaauaucagccacgaauag

SEQ ID NO: 1572254 - RNA, 19 nt, Homo sapiens
  misc_RNA (1)...(19): siRNA sense strand
ccagaacaacagaaccaaa

SEQ ID NO: 1572255 - RNA, 19 nt, Homo sapiens
  misc_RNA (1)...(19): siRNA sense strand
uauggaugaucacacucua

SEQ ID NO: 1572256 - RNA, 19 nt, Homo sapiens
  misc_RNA (1)...(19): siRNA sense strand
gaaguguuuguuuauguca

SEQ ID NO: 1572257 - RNA, 19 nt, Homo sapiens
  misc_RNA (1)...(19): siRNA sense strand
ggacuaauggcugcuuaca

SEQ ID NO: 1572258 - RNA, 19 nt, Homo sapiens
  misc_RNA (1)...(19): siRNA sense strand
cuuacaaagggcaucauua

SEQ ID NO: 1572259 - RNA, 19 nt, Homo sapiens
  misc_RNA (1)...(19): siRNA sense strand
caagaggugcaauauacau

SEQ ID NO: 1572260 - RNA, 19 nt, Homo sapiens
  misc_RNA (1)...(19): siRNA sense strand
caguaaagaauuucgugaa

SEQ ID NO: 1572261 - RNA, 19 nt, Homo sapiens
  misc_RNA (1)...(19): siRNA sense strand
cauugucauuauuggcaua

SEQ ID NO: 1572262 - RNA, 19 nt, Homo sapiens
  misc_RNA (1)...(19): siRNA sense strand
agauggcuguuaaggaaga

SEQ ID NO: 1572263 - RNA, 19 nt, Homo sapiens
  misc_RNA (1)...(19): siRNA sense strand
agaggugcaauauacauuu

SEQ ID NO: 1572264 - RNA, 19 nt, Homo sapiens
  misc_RNA (1)...(19): siRNA sense strand
aaaggcauugaacgaaaua

SEQ ID NO: 1572265 - RNA, 19 nt, Homo sapiens
  misc_RNA (1)...(19): siRNA sense strand
guugaaaggcauugaacga

SEQ ID NO: 1572266 - RNA, 19 nt, Homo sapiens
  misc_RNA (1)...(19): siRNA sense strand
uggcaagucugcaaaauca

SEQ ID NO: 1572267 - RNA, 19 nt, Homo sapiens
  misc_RNA (1)...(19): siRNA sense strand
aacagcaaaugccagaaga

SEQ ID NO: 1572268 - RNA, 19 nt, Homo sapiens
  misc_RNA (1)...(19): siRNA sense strand
aaauauggacguucaagag

SEQ ID NO: 1572269 - RNA, 19 nt, Homo sapiens
  misc_RNA (1)...(19): siRNA sense strand
ccagucauuuacagaccaa

SEQ ID NO: 1572270 - RNA, 19 nt, Homo sapiens
  misc_RNA (1)...(19): siRNA sense strand
ggaagaagaaagccaugcu

SEQ ID NO: 1572271 - RNA, 19 nt, Homo sapiens
  misc_RNA (1)...(19): siRNA sense strand
caagaacaggaagaagaaa

SEQ ID NO: 1572272 - RNA, 19 nt, Homo sapiens
  misc_RNA (1)...(19): siRNA sense strand
ccuaauauggcaguuguga

SEQ ID NO: 1572273 - RNA, 19 nt, Homo sapiens
  misc_RNA (1)...(19): siRNA sense strand
caagaucucugguguauga

SEQ ID NO: 1572274 - RNA, 19 nt, Homo sapiens
  misc_RNA (1)...(19): siRNA sense strand
caacggcacuacuuaaauu

SEQ ID NO: 1572275 - RNA, 19 nt, Homo sapiens
  misc_RNA (1)...(19): siRNA sense strand
ucagauaucucaacuucua

SEQ ID NO: 1572276 - RNA, 19 nt, Homo sapiens
  misc_RNA (1)...(19): siRNA sense strand
ggaggcaccaugauuauua

SEQ ID NO: 1572277 - RNA, 19 nt, Homo sapiens
  misc_RNA (1)...(19): siRNA sense strand
guacagaaccacagaauga

SEQ ID NO: 1572278 - RNA, 19 nt, Homo sapiens
  misc_RNA (1)...(19): siRNA sense strand
ggacaaagggcaacacuga

SEQ ID NO: 1572279 - RNA, 19 nt, Homo sapiens
  misc_RNA (1)...(19): siRNA sense strand
guacaaaccauauccauga

SEQ ID NO: 1572280 - RNA, 19 nt, Homo sapiens
  misc_RNA (1)...(19): siRNA sense strand
gugcugguauucaucauua

SEQ ID NO: 1572281 - RNA, 19 nt, Homo sapiens
  misc_RNA (1)...(19): siRNA sense strand
aagggaagcuuauuucaaa

SEQ ID NO: 1572282 - RNA, 19 nt, Homo sapiens
  misc_RNA (1)...(19): siRNA sense strand
gaaugaagccgucacaaau

SEQ ID NO: 1572283 - RNA, 19 nt, Homo sapiens
  misc_RNA (1)...(19): siRNA sense strand
gauccugguucuucagaua

SEQ ID NO: 1572284 - RNA, 19 nt, Homo sapiens
  misc_RNA (1)...(19): siRNA sense strand
ggaaagauuuugccaauau

SEQ ID NO: 1572285 - RNA, 19 nt, Homo sapiens
  misc_RNA (1)...(19): siRNA sense strand
uaauuaagcucccucacuu

SEQ ID NO: 1572286 - RNA, 19 nt, Homo sapiens
  misc_RNA (1)...(19): siRNA sense strand
gaucucugguguaugauaa

SEQ ID NO: 1572287 - RNA, 19 nt, Homo sapiens
  misc_RNA (1)...(19): siRNA sense strand
acaaucagcugacuuuaau

SEQ ID NO: 1572288 - RNA, 19 nt, Homo sapiens
  misc_RNA (1)...(19): siRNA sense strand
gcacaaagccaaguacaga

SEQ ID NO: 1572289 - RNA, 19 nt, Homo sapiens
  misc_RNA (1)...(19): siRNA sense strand
gagcacauauaaagccaaa

SEQ ID NO: 1572290 - RNA, 19 nt, Homo sapiens
  misc_RNA (1)...(19): siRNA sense strand
gcaauucacuggauuucuc

SEQ ID NO: 1572291 - RNA, 19 nt, Homo sapiens
  misc_RNA (1)...(19): siRNA sense strand
gguauaagguuugcaacaa

SEQ ID NO: 1572292 - RNA, 19 nt, Homo sapiens
  misc_RNA (1)...(19): siRNA sense strand
gcacauauaaagccaaaug

SEQ ID NO: 1572293 - RNA, 19 nt, Homo sapiens
  misc_RNA (1)...(19): siRNA sense strand
uaacggaacacuugacauu

SEQ ID NO: 1572294 - RNA, 19 nt, Homo sapiens
  misc_RNA (1)...(19): siRNA sense strand
ggcagaagcuacaucauca

SEQ ID NO: 1572295 - RNA, 19 nt, Homo sapiens
  misc_RNA (1)...(19): siRNA sense strand
gcucagaucuguccaaagc

SEQ ID NO: 1572296 - RNA, 19 nt, Homo sapiens
  misc_RNA (1)...(19): siRNA sense strand
caagucagguucuaauaca

SEQ ID NO: 1572297 - RNA, 19 nt, Homo sapiens
  misc_RNA (1)...(19): siRNA sense strand
gaagggaagcuuauuucaa

SEQ ID NO: 1572298 - RNA, 19 nt, Homo sapiens
  misc_RNA (1)...(19): siRNA sense strand
gagaaugcccaguguugua

SEQ ID NO: 1572299 - RNA, 19 nt, Homo sapiens
  misc_RNA (1)...(19): siRNA sense strand
caaauccaguacaauggua

SEQ ID NO: 1572300 - RNA, 19 nt, Homo sapiens
  misc_RNA (1)...(19): siRNA sense strand
caagaugacucgguuagau

SEQ ID NO: 1572301 - RNA, 19 nt, Homo sapiens
  misc_RNA (1)...(19): siRNA sense strand
aaagaaauaucccuggaau

SEQ ID NO: 1572302 - RNA, 19 nt, Homo sapiens
  misc_RNA (1)...(19): siRNA sense strand
ggaauacguauguuucaaa

SEQ ID NO: 1572303 - RNA, 19 nt, Homo sapiens
  misc_RNA (1)...(19): siRNA sense strand
gaucuguccuauaauaauc

SEQ ID NO: 1572304 - RNA, 19 nt, Homo sapiens
  misc_RNA (1)...(19): siRNA sense strand
cagagaagaugacuuagag

SEQ ID NO: 1572305 - RNA, 19 nt, Homo sapiens
  misc_RNA (1)...(19): siRNA sense strand
guccagagaagaugacuua

SEQ ID NO: 1572306 - RNA, 19 nt, Homo sapiens
  misc_RNA (1)...(19): siRNA sense strand
gaacaacaaucagcugacu

SEQ ID NO: 1572307 - RNA, 19 nt, Homo sapiens
  misc_RNA (1)...(19): siRNA sense strand
ggaagcaacacaaauagug

SEQ ID NO: 1572308 - RNA, 19 nt, Homo sapiens
  misc_RNA (1)...(19): siRNA sense strand
uaucacaacuguaaaggau

SEQ ID NO: 1572309 - RNA, 19 nt, Homo sapiens
  misc_RNA (1)...(19): siRNA sense strand
cuggaucuguccuauaaua

SEQ ID NO: 1572310 - RNA, 19 nt, Homo sapiens
  misc_RNA (1)...(19): siRNA sense strand
caacacaaauaguggaucu

SEQ ID NO: 1572311 - RNA, 19 nt, Homo sapiens
  misc_RNA (1)...(19): siRNA sense strand
gaagaugguuagcuugcau

SEQ ID NO: 1572312 - RNA, 19 nt, Homo sapiens
  misc_RNA (1)...(19): siRNA sense strand
ugacuaauguugaccagau

SEQ ID NO: 1572313 - RNA, 19 nt, Homo sapiens
  misc_RNA (1)...(19): siRNA sense strand
guauaagguuugcaacaau

SEQ ID NO: 1572314 - RNA, 19 nt, Homo sapiens
  misc_RNA (1)...(19): siRNA sense strand
caaauaaauugcagaagcu

SEQ ID NO: 1572315 - RNA, 19 nt, Homo sapiens
  misc_RNA (1)...(19): siRNA sense strand
cagaagaacuguggaacug

SEQ ID NO: 1572316 - RNA, 19 nt, Homo sapiens
  misc_RNA (1)...(19): siRNA sense strand
ucagcgagcucagguacua

SEQ ID NO: 1572317 - RNA, 19 nt, Homo sapiens
  misc_RNA (1)...(19): siRNA sense strand
cuacagcguuugaugaugu

SEQ ID NO: 1572318 - RNA, 19 nt, Homo sapiens
  misc_RNA (1)...(19): siRNA sense strand
caaauaguggaucuucaua

SEQ ID NO: 1572319 - RNA, 19 nt, Homo sapiens
  misc_RNA (1)...(19): siRNA sense strand
ccaggaauacaauaaguuu

SEQ ID NO: 1572320 - RNA, 19 nt, Homo sapiens
  misc_RNA (1)...(19): siRNA sense strand
cacagaggcuggaguuaau

SEQ ID NO: 1572321 - RNA, 19 nt, Homo sapiens
  misc_RNA (1)...(19): siRNA sense strand
gaggcaccaugauuauuau

SEQ ID NO: 1572322 - RNA, 19 nt, Homo sapiens
  misc_RNA (1)...(19): siRNA sense strand
cuucagauaucucaacuuc

SEQ ID NO: 1572323 - RNA, 19 nt, Homo sapiens
  misc_RNA (1)...(19): siRNA sense strand
caacaagaucucuggugua

SEQ ID NO: 1572324 - RNA, 19 nt, Homo sapiens
  misc_RNA (1)...(19): siRNA sense strand
gcacaagaugacucgguua

SEQ ID NO: 1572325 - RNA, 19 nt, Homo sapiens
  misc_RNA (1)...(19): siRNA sense strand
ucgcugaccuacgaaauuu

SEQ ID NO: 1572326 - RNA, 19 nt, Homo sapiens
  misc_RNA (1)...(19): siRNA sense strand
aaagaaagacuggcacaaa

SEQ ID NO: 1572327 - RNA, 19 nt, Homo sapiens
  misc_RNA (1)...(19): siRNA sense strand
cgaagagaaugcccagugu

SEQ ID NO: 1572328 - RNA, 19 nt, Homo sapiens
  misc_RNA (1)...(19): siRNA sense strand
uaacggggcucaaauacaa

SEQ ID NO: 1572329 - RNA, 19 nt, Homo sapiens
  misc_RNA (1)...(19): siRNA sense strand
ucaccaagguuagcaaugu

SEQ ID NO: 1572330 - RNA, 19 nt, Homo sapiens
  misc_RNA (1)...(19): siRNA sense strand
gcauuugaauagcaacaga

SEQ ID NO: 1572331 - RNA, 19 nt, Homo sapiens
  misc_RNA (1)...(19): siRNA sense strand
ucaguggucuuuccaaucu

SEQ ID NO: 1572332 - RNA, 19 nt, Homo sapiens
  misc_RNA (1)...(19): siRNA sense strand
ggaaucauaagcccaucua

SEQ ID NO: 1572333 - RNA, 19 nt, Homo sapiens
  misc_RNA (1)...(19): siRNA sense strand
gggaugcuguugagaagau

SEQ ID NO: 1572334 - RNA, 19 nt, Homo sapiens
  misc_RNA (1)...(19): siRNA sense strand
gcacuucugugucccaaaa

SEQ ID NO: 1572335 - RNA, 19 nt, Homo sapiens
  misc_RNA (1)...(19): siRNA sense strand
caccaaacauugacagaag

SEQ ID NO: 1572336 - RNA, 19 nt, Homo sapiens
  misc_RNA (1)...(19): siRNA sense strand
ucuaauacaagcaguagua

SEQ ID NO: 1572337 - RNA, 19 nt, Homo sapiens
  misc_RNA (1)...(19): siRNA sense strand
cucccucacuuacuaaaua

SEQ ID NO: 1572338 - RNA, 19 nt, Homo sapiens
  misc_RNA (1)...(19): siRNA sense strand
aacaagaucucugguguau

SEQ ID NO: 1572339 - RNA, 19 nt, Homo sapiens
  misc_RNA (1)...(19): siRNA sense strand
gguggaaacccauugcauu

SEQ ID NO: 1572340 - RNA, 19 nt, Homo sapiens
  misc_RNA (1)...(19): siRNA sense strand
gggcaacacugaggugcaa

SEQ ID NO: 1572341 - RNA, 19 nt, Homo sapiens
  misc_RNA (1)...(19): siRNA sense strand
gaagagaaugcccaguguu

SEQ ID NO: 1572342 - RNA, 19 nt, Homo sapiens
  misc_RNA (1)...(19): siRNA sense strand
uaugauaacggaacacuug

SEQ ID NO: 1572343 - RNA, 19 nt, Homo sapiens
  misc_RNA (1)...(19): siRNA sense strand
acaacaaucagcugacuuu

SEQ ID NO: 1572344 - RNA, 19 nt, Homo sapiens
  misc_RNA (1)...(19): siRNA sense strand
aagaaagacuggcacaaag

SEQ ID NO: 1572345 - RNA, 19 nt, Homo sapiens
  misc_RNA (1)...(19): siRNA sense strand
cacaaggucaccaagguua

SEQ ID NO: 1572346 - RNA, 19 nt, Homo sapiens
  misc_RNA (1)...(19): siRNA sense strand
ggaacacuugacauucuua

SEQ ID NO: 1572347 - RNA, 19 nt, Homo sapiens
  misc_RNA (1)...(19): siRNA sense strand
ggucaauuccugaagaaga

SEQ ID NO: 1572348 - RNA, 19 nt, Homo sapiens
  misc_RNA (1)...(19): siRNA sense strand
caucaacggcacuacuuaa

SEQ ID NO: 1572349 - RNA, 19 nt, Homo sapiens
  misc_RNA (1)...(19): siRNA sense strand
acacagaggcuggaguuaa

SEQ ID NO: 1572350 - RNA, 19 nt, Homo sapiens
  misc_RNA (1)...(19): siRNA sense strand
agaaugaagccgucacaaa

SEQ ID NO: 1572351 - RNA, 19 nt, Homo sapiens
  misc_RNA (1)...(19): siRNA sense strand
ggcaccaugauuauuauua

SEQ ID NO: 1572352 - RNA, 19 nt, Homo sapiens
  misc_RNA (1)...(19): siRNA sense strand
cuacggaacaggauuaugu

SEQ ID NO: 1572353 - RNA, 19 nt, Homo sapiens
  misc_RNA (1)...(19): siRNA sense strand
caaagaaauaucccuggaa

SEQ ID NO: 1572354 - RNA, 19 nt, Homo sapiens
  misc_RNA (1)...(19): siRNA sense strand
gagcuggaucuguccuaua

SEQ ID NO: 1572355 - RNA, 19 nt, Homo sapiens
  misc_RNA (1)...(19): siRNA sense strand
gcccaguguuguaaagcua

SEQ ID NO: 1572356 - RNA, 19 nt, Homo sapiens
  misc_RNA (1)...(19): siRNA sense strand
ggaacuauguaugacuugu

SEQ ID NO: 1572357 - RNA, 19 nt, Homo sapiens
  misc_RNA (1)...(19): siRNA sense strand
ucacaacuguaaaggauac

SEQ ID NO: 1572358 - RNA, 19 nt, Homo sapiens
  misc_RNA (1)...(19): siRNA sense strand
caacaaucagcugacuuua

SEQ ID NO: 1572359 - RNA, 19 nt, Homo sapiens
  misc_RNA (1)...(19): siRNA sense strand
ugacacccuuguuuacaga

SEQ ID NO: 1572360 - RNA, 19 nt, Homo sapiens
  misc_RNA (1)...(19): siRNA sense strand
gaacacuugacauucuuau

SEQ ID NO: 1572361 - RNA, 19 nt, Homo sapiens
  misc_RNA (1)...(19): siRNA sense strand
ggagcuggaucuguccuau

SEQ ID NO: 1572362 - RNA, 19 nt, Homo sapiens
  misc_RNA (1)...(19): siRNA sense strand
guggaaacccauugcauug

SEQ ID NO: 1572363 - RNA, 19 nt, Homo sapiens
  misc_RNA (1)...(19): siRNA sense strand
aaacacagaggcuggaguu

SEQ ID NO: 1572364 - RNA, 19 nt, Homo sapiens
  misc_RNA (1)...(19): siRNA sense strand
gacuaauguugaccagauu

SEQ ID NO: 1572365 - RNA, 19 nt, Homo sapiens
  misc_RNA (1)...(19): siRNA sense strand
agugaaagcucagaucugu

SEQ ID NO: 1572366 - RNA, 19 nt, Homo sapiens
  misc_RNA (1)...(19): siRNA sense strand
gaagccgucacaaauguug

SEQ ID NO: 1572367 - RNA, 19 nt, Homo sapiens
  misc_RNA (1)...(19): siRNA sense strand
ggacuucaagcacuucugu

SEQ ID NO: 1572368 - RNA, 19 nt, Homo sapiens
  misc_RNA (1)...(19): siRNA sense strand
uaugaugacacccuuguuu

SEQ ID NO: 1572369 - RNA, 19 nt, Homo sapiens
  misc_RNA (1)...(19): siRNA sense strand
acaaugguacuuaugauga

SEQ ID NO: 1572370 - RNA, 19 nt, Homo sapiens
  misc_RNA (1)...(19): siRNA sense strand
aaauaucccuggaauacgu

SEQ ID NO: 1572371 - RNA, 19 nt, Homo sapiens
  misc_RNA (1)...(19): siRNA sense strand
agaaauaucccuggaauac

SEQ ID NO: 1572372 - RNA, 19 nt, Homo sapiens
  misc_RNA (1)...(19): siRNA sense strand
ccagagaagaugacuuaga

SEQ ID NO: 1572373 - RNA, 19 nt, Homo sapiens
  misc_RNA (1)...(19): siRNA sense strand
gaauauggcuuucuuagga

SEQ ID NO: 1572374 - RNA, 19 nt, Homo sapiens
  misc_RNA (1)...(19): siRNA sense strand
gaaaucaucacaagaguua

SEQ ID NO: 1572375 - RNA, 19 nt, Homo sapiens
  misc_RNA (1)...(19): siRNA sense strand
gagaagagcuuaagugaag

SEQ ID NO: 1572376 - RNA, 19 nt, Homo sapiens
  misc_RNA (1)...(19): siRNA sense strand
aaucagagcucaagccuua

SEQ ID NO: 1572377 - RNA, 19 nt, Homo sapiens
  misc_RNA (1)...(19): siRNA sense strand
gagagagacccuauaaaua

SEQ ID NO: 1572378 - RNA, 19 nt, Homo sapiens
  misc_RNA (1)...(19): siRNA sense strand
gagcuuaagugaaguccua

SEQ ID NO: 1572379 - RNA, 19 nt, Homo sapiens
  misc_RNA (1)...(19): siRNA sense strand
gagagaaaccuuauaaaug

SEQ ID NO: 1572380 - RNA, 19 nt, Homo sapiens
  misc_RNA (1)...(19): siRNA sense strand
ggagagagacccuauaaau

SEQ ID NO: 1572381 - RNA, 19 nt, Homo sapiens
  misc_RNA (1)...(19): siRNA sense strand
agagaaaccuuaucaaugu

SEQ ID NO: 1572382 - RNA, 19 nt, Homo sapiens
  misc_RNA (1)...(19): siRNA sense strand
gaagugcgcuuggagaaga

SEQ ID NO: 1572383 - RNA, 19 nt, Homo sapiens
  misc_RNA (1)...(19): siRNA sense strand
caacucagcugcaccuguu

SEQ ID NO: 1572384 - RNA, 19 nt, Homo sapiens
  misc_RNA (1)...(19): siRNA sense strand
ggacauuacuugcaagauc

SEQ ID NO: 1572385 - RNA, 19 nt, Homo sapiens
  misc_RNA (1)...(19): siRNA sense strand
ggagagaaaccuuauaaau

SEQ ID NO: 1572386 - RNA, 19 nt, Homo sapiens
  misc_RNA (1)...(19): siRNA sense strand
gcucaagccuuaucauuca

SEQ ID NO: 1572387 - RNA, 19 nt, Homo sapiens
  misc_RNA (1)...(19): siRNA sense strand
gggaaaugcuucaaucaga

SEQ ID NO: 1572388 - RNA, 19 nt, Homo sapiens
  misc_RNA (1)...(19): siRNA sense strand
ugaagaggauacugagaua

SEQ ID NO: 1572389 - RNA, 19 nt, Homo sapiens
  misc_RNA (1)...(19): siRNA sense strand
ggauauuucugaggaagua

SEQ ID NO: 1572390 - RNA, 19 nt, Homo sapiens
  misc_RNA (1)...(19): siRNA sense strand
acagucagcucccaaguaa

SEQ ID NO: 1572391 - RNA, 19 nt, Homo sapiens
  misc_RNA (1)...(19): siRNA sense strand
gagagaaaccuuaucaaug

SEQ ID NO: 1572392 - RNA, 19 nt, Homo sapiens
  misc_RNA (1)...(19): siRNA sense strand
ucacaagaguuauuaagug

SEQ ID NO: 1572393 - RNA, 19 nt, Homo sapiens
  misc_RNA (1)...(19): siRNA sense strand
gaagcaagcugaggaagca

SEQ ID NO: 1572394 - RNA, 19 nt, Homo sapiens
  misc_RNA (1)...(19): siRNA sense strand
aggagaagcucaaaccuuu

SEQ ID NO: 1572395 - RNA, 19 nt, Homo sapiens
  misc_RNA (1)...(19): siRNA sense strand
ggaagauucugaugaugau

SEQ ID NO: 1572396 - RNA, 19 nt, Homo sapiens
  misc_RNA (1)...(19): siRNA sense strand
cagaagagcuaucggaaag

SEQ ID NO: 1572397 - RNA, 19 nt, Homo sapiens
  misc_RNA (1)...(19): siRNA sense strand
ggagagaaaccuuaucaau

SEQ ID NO: 1572398 - RNA, 19 nt, Homo sapiens
  misc_RNA (1)...(19): siRNA sense strand
uaagugaaguccuaaguca

SEQ ID NO: 1572399 - RNA, 19 nt, Homo sapiens
  misc_RNA (1)...(19): siRNA sense strand
agagagacccuauaaauau

SEQ ID NO: 1572400 - RNA, 19 nt, Homo sapiens
  misc_RNA (1)...(19): siRNA sense strand
cguggaagauuuagaaaga

SEQ ID NO: 1572401 - RNA, 19 nt, Homo sapiens
  misc_RNA (1)...(19): siRNA sense strand
gcugagagguuaugggaau

SEQ ID NO: 1572402 - RNA, 19 nt, Homo sapiens
  misc_RNA (1)...(19): siRNA sense strand
caagaguuauuaaguguuc

SEQ ID NO: 1572403 - RNA, 19 nt, Homo sapiens
  misc_RNA (1)...(19): siRNA sense strand
ggaagacagugggcaaaga

SEQ ID NO: 1572404 - RNA, 19 nt, Homo sapiens
  misc_RNA (1)...(19): siRNA sense strand
ccagaacgcuccucgcaau

SEQ ID NO: 1572405 - RNA, 19 nt, Homo sapiens
  misc_RNA (1)...(19): siRNA sense strand
gguccaaacucccuucuca

SEQ ID NO: 1572406 - RNA, 19 nt, Homo sapiens
  misc_RNA (1)...(19): siRNA sense strand
gagagacccuauaaauauc

SEQ ID NO: 1572407 - RNA, 19 nt, Homo sapiens
  misc_RNA (1)...(19): siRNA sense strand
gcaaugagagugacuguag

SEQ ID NO: 1572408 - RNA, 19 nt, Homo sapiens
  misc_RNA (1)...(19): siRNA sense strand
uugaagagauggaugcuuu

SEQ ID NO: 1572409 - RNA, 19 nt, Homo sapiens
  misc_RNA (1)...(19): siRNA sense strand
guucaaaggucuccagaag

SEQ ID NO: 1572410 - RNA, 19 nt, Homo sapiens
  misc_RNA (1)...(19): siRNA sense strand
gaagcuggauuugagaaug

SEQ ID NO: 1572411 - RNA, 19 nt, Homo sapiens
  misc_RNA (1)...(19): siRNA sense strand
ucaaaggucuccagaagag

SEQ ID NO: 1572412 - RNA, 19 nt, Homo sapiens
  misc_RNA (1)...(19): siRNA sense strand
gguaagugcuucaguaaaa

SEQ ID NO: 1572413 - RNA, 19 nt, Homo sapiens
  misc_RNA (1)...(19): siRNA sense strand
gaagagcuaucggaaaguc

SEQ ID NO: 1572414 - RNA, 19 nt, Homo sapiens
  misc_RNA (1)...(19): siRNA sense strand
agacuuaccuugcaauucu

SEQ ID NO: 1572415 - RNA, 19 nt, Homo sapiens
  misc_RNA (1)...(19): siRNA sense strand
ccauauaaaugugcugauu

SEQ ID NO: 1572416 - RNA, 19 nt, Homo sapiens
  misc_RNA (1)...(19): siRNA sense strand
ugcaagaucugaaaggaaa

SEQ ID NO: 1572417 - RNA, 19 nt, Homo sapiens
  misc_RNA (1)...(19): siRNA sense strand
caggaacaauguccagaaa

SEQ ID NO: 1572418 - RNA, 19 nt, Homo sapiens
  misc_RNA (1)...(19): siRNA sense strand
cauaggacauuacuugcaa

SEQ ID NO: 1572419 - RNA, 19 nt, Homo sapiens
  misc_RNA (1)...(19): siRNA sense strand
gaaguacaacugcauagga

SEQ ID NO: 1572420 - RNA, 19 nt, Homo sapiens
  misc_RNA (1)...(19): siRNA sense strand
caaauuucaucacccauag

SEQ ID NO: 1572421 - RNA, 19 nt, Homo sapiens
  misc_RNA (1)...(19): siRNA sense strand
caggaucacuggagcuuug

SEQ ID NO: 1572422 - RNA, 19 nt, Homo sapiens
  misc_RNA (1)...(19): siRNA sense strand
gaaaagcccuaucaaugug

SEQ ID NO: 1572423 - RNA, 19 nt, Homo sapiens
  misc_RNA (1)...(19): siRNA sense strand
uaagagagaauggcacuaa

SEQ ID NO: 1572424 - RNA, 19 nt, Homo sapiens
  misc_RNA (1)...(19): siRNA sense strand
caaaccagcuaucggaaag

SEQ ID NO: 1572425 - RNA, 19 nt, Homo sapiens
  misc_RNA (1)...(19): siRNA sense strand
ucauugcccugcccaguaa

SEQ ID NO: 1572426 - RNA, 19 nt, Homo sapiens
  misc_RNA (1)...(19): siRNA sense strand
gggaaaagcuucugacaca

SEQ ID NO: 1572427 - RNA, 19 nt, Homo sapiens
  misc_RNA (1)...(19): siRNA sense strand
gagaaaagcccuaucaaug

SEQ ID NO: 1572428 - RNA, 19 nt, Homo sapiens
  misc_RNA (1)...(19): siRNA sense strand
gaacgcuccucgcaauucu

SEQ ID NO: 1572429 - RNA, 19 nt, Homo sapiens
  misc_RNA (1)...(19): siRNA sense strand
ccagagaccugucccuucu

SEQ ID NO: 1572430 - RNA, 19 nt, Homo sapiens
  misc_RNA (1)...(19): siRNA sense strand
augaagagaccaagacuua

SEQ ID NO: 1572431 - RNA, 19 nt, Homo sapiens
  misc_RNA (1)...(19): siRNA sense strand
ccaaggagcagauuguaga

SEQ ID NO: 1572432 - RNA, 19 nt, Homo sapiens
  misc_RNA (1)...(19): siRNA sense strand
ggccaaaucagcucuaaga

SEQ ID NO: 1572433 - RNA, 19 nt, Homo sapiens
  misc_RNA (1)...(19): siRNA sense strand
gagcucaagccuuaucauu

SEQ ID NO: 1572434 - RNA, 19 nt, Homo sapiens
  misc_RNA (1)...(19): siRNA sense strand
cgacagcguuucaggagau

SEQ ID NO: 1572435 - RNA, 19 nt, Homo sapiens
  misc_RNA (1)...(19): siRNA sense strand
guaaaggcaaugagaguga

SEQ ID NO: 1572436 - RNA, 19 nt, Homo sapiens
  misc_RNA (1)...(19): siRNA sense strand
gcaaaccagcuaucggaaa

SEQ ID NO: 1572437 - RNA, 19 nt, Homo sapiens
  misc_RNA (1)...(19): siRNA sense strand
cacaagaguuauuaagugu

SEQ ID NO: 1572438 - RNA, 19 nt, Homo sapiens
  misc_RNA (1)...(19): siRNA sense strand
caaacucccuucucaugca

SEQ ID NO: 1572439 - RNA, 19 nt, Homo sapiens
  misc_RNA (1)...(19): siRNA sense strand
ggcagugacucucguggaa

SEQ ID NO: 1572440 - RNA, 19 nt, Homo sapiens
  misc_RNA (1)...(19): siRNA sense strand
gcacaucggaggauacaca

SEQ ID NO: 1572441 - RNA, 19 nt, Homo sapiens
  misc_RNA (1)...(19): siRNA sense strand
gagaaaccuuaucaaugug

SEQ ID NO: 1572442 - RNA, 19 nt, Homo sapiens
  misc_RNA (1)...(19): siRNA sense strand
ggagaagagcuuaagugaa

SEQ ID NO: 1572443 - RNA, 19 nt, Homo sapiens
  misc_RNA (1)...(19): siRNA sense strand
agaggaagauucugaugau

SEQ ID NO: 1572444 - RNA, 19 nt, Homo sapiens
  misc_RNA (1)...(19): siRNA sense strand
gugaugacauggaucuaga

SEQ ID NO: 1572445 - RNA, 19 nt, Homo sapiens
  misc_RNA (1)...(19): siRNA sense strand
ggaacaauguccagaaaau

SEQ ID NO: 1572446 - RNA, 19 nt, Homo sapiens
  misc_RNA (1)...(19): siRNA sense strand
gagagugacuguagaucag

SEQ ID NO: 1572447 - RNA, 19 nt, Homo sapiens
  misc_RNA (1)...(19): siRNA sense strand
ucaaauuucaucacccaua

SEQ ID NO: 1572448 - RNA, 19 nt, Homo sapiens
  misc_RNA (1)...(19): siRNA sense strand
ugacagugaugacauggau

SEQ ID NO: 1572449 - RNA, 19 nt, Homo sapiens
  misc_RNA (1)...(19): siRNA sense strand
uaaaagcucugcccuuaau

SEQ ID NO: 1572450 - RNA, 19 nt, Homo sapiens
  misc_RNA (1)...(19): siRNA sense strand
ugugguaagugcuucagua

SEQ ID NO: 1572451 - RNA, 19 nt, Homo sapiens
  misc_RNA (1)...(19): siRNA sense strand
gcuccaguguuauuccaaa

SEQ ID NO: 1572452 - RNA, 19 nt, Homo sapiens
  misc_RNA (1)...(19): siRNA sense strand
agagaccugucccuucuuu

SEQ ID NO: 1572453 - RNA, 19 nt, Homo sapiens
  misc_RNA (1)...(19): siRNA sense strand
gcacuaacucugagaccuu

SEQ ID NO: 1572454 - RNA, 19 nt, Homo sapiens
  misc_RNA (1)...(19): siRNA sense strand
gacauuacuugcaagaucu

SEQ ID NO: 1572455 - RNA, 19 nt, Homo sapiens
  misc_RNA (1)...(19): siRNA sense strand
gaggaaguacaacugcaua

SEQ ID NO: 1572456 - RNA, 19 nt, Homo sapiens
  misc_RNA (1)...(19): siRNA sense strand
gcaccaaggagcagauugu

SEQ ID NO: 1572457 - RNA, 19 nt, Homo sapiens
  misc_RNA (1)...(19): siRNA sense strand
gagaaaccuuauaaauguc

SEQ ID NO: 1572458 - RNA, 19 nt, Homo sapiens
  misc_RNA (1)...(19): siRNA sense strand
gagaaaagaggaaaacuga

SEQ ID NO: 1572459 - RNA, 19 nt, Homo sapiens
  misc_RNA (1)...(19): siRNA sense strand
agaaagagagccuggaaga

SEQ ID NO: 1572460 - RNA, 19 nt, Homo sapiens
  misc_RNA (1)...(19): siRNA sense strand
ugacuuacgugcacaucau

SEQ ID NO: 1572461 - RNA, 19 nt, Homo sapiens
  misc_RNA (1)...(19): siRNA sense strand
acacaggagagaaaccuua

SEQ ID NO: 1572462 - RNA, 19 nt, Homo sapiens
  misc_RNA (1)...(19): siRNA sense strand
aagcuggauuugagaauga

SEQ ID NO: 1572463 - RNA, 19 nt, Homo sapiens
  misc_RNA (1)...(19): siRNA sense strand
gaacagugucggaccaagu

SEQ ID NO: 1572464 - RNA, 19 nt, Homo sapiens
  misc_RNA (1)...(19): siRNA sense strand
gugcacgacucauuagaca

SEQ ID NO: 1572465 - RNA, 19 nt, Homo sapiens
  misc_RNA (1)...(19): siRNA sense strand
ugacucucguggaagauuu

SEQ ID NO: 1572466 - RNA, 19 nt, Homo sapiens
  misc_RNA (1)...(19): siRNA sense strand
caaugagagugacuguaga

SEQ ID NO: 1572467 - RNA, 19 nt, Homo sapiens
  misc_RNA (1)...(19): siRNA sense strand
gaacagugucggaccaagu

SEQ ID NO: 1572468 - RNA, 19 nt, Homo sapiens
  misc_RNA (1)...(19): siRNA sense strand
agugcaugcugaucuguua

SEQ ID NO: 1572469 - RNA, 19 nt, Homo sapiens
  misc_RNA (1)...(19): siRNA sense strand
cgugacaguucaaauuuca

SEQ ID NO: 1572470 - RNA, 19 nt, Homo sapiens
  misc_RNA (1)...(19): siRNA sense strand
aacccgugcuccaguguua

SEQ ID NO: 1572471 - RNA, 19 nt, Homo sapiens
  misc_RNA (1)...(19): siRNA sense strand
ccagcuaucggaaaguuaa

SEQ ID NO: 1572472 - RNA, 19 nt, Homo sapiens
  misc_RNA (1)...(19): siRNA sense strand
gcagauuguagaacuguug

SEQ ID NO: 1572473 - RNA, 19 nt, Homo sapiens
  misc_RNA (1)...(19): siRNA sense strand
ggacacugcugaaaguaaa

SEQ ID NO: 1572474 - RNA, 19 nt, Homo sapiens
  misc_RNA (1)...(19): siRNA sense strand
ugacggagcucuacacaga

SEQ ID NO: 1572475 - RNA, 19 nt, Homo sapiens
  misc_RNA (1)...(19): siRNA sense strand
caccacaccuggcuaauuu

SEQ ID NO: 1572476 - RNA, 19 nt, Homo sapiens
  misc_RNA (1)...(19): siRNA sense strand
gaaaguaaagccaccauug

SEQ ID NO: 1572477 - RNA, 19 nt, Homo sapiens
  misc_RNA (1)...(19): siRNA sense strand
caacagagccaggacuaua

SEQ ID NO: 1572478 - RNA, 19 nt, Homo sapiens
  misc_RNA (1)...(19): siRNA sense strand
gagcugaggccaucggaua

SEQ ID NO: 1572479 - RNA, 19 nt, Homo sapiens
  misc_RNA (1)...(19): siRNA sense strand
ggagagagccaccgucuuc

SEQ ID NO: 1572480 - RNA, 19 nt, Homo sapiens
  misc_RNA (1)...(19): siRNA sense strand
gcaggagccucaugaccaa

SEQ ID NO: 1572481 - RNA, 19 nt, Homo sapiens
  misc_RNA (1)...(19): siRNA sense strand
gagacaggguuucaucaug

SEQ ID NO: 1572482 - RNA, 19 nt, Homo sapiens
  misc_RNA (1)...(19): siRNA sense strand
ccaaguaccuaagagaguu

SEQ ID NO: 1572483 - RNA, 19 nt, Homo sapiens
  misc_RNA (1)...(19): siRNA sense strand
uaacugggcauccuguauu

SEQ ID NO: 1572484 - RNA, 19 nt, Homo sapiens
  misc_RNA (1)...(19): siRNA sense strand
agacaggguuucaucaugu

SEQ ID NO: 1572485 - RNA, 19 nt, Homo sapiens
  misc_RNA (1)...(19): siRNA sense strand
cgggacaucuucauggaaa

SEQ ID NO: 1572486 - RNA, 19 nt, Homo sapiens
  misc_RNA (1)...(19): siRNA sense strand
ggaguacaguggcgcaauc

SEQ ID NO: 1572487 - RNA, 19 nt, Homo sapiens
  misc_RNA (1)...(19): siRNA sense strand
ccagucauguucuguggaa

SEQ ID NO: 1572488 - RNA, 19 nt, Homo sapiens
  misc_RNA (1)...(19): siRNA sense strand
gcuggacacugcugaaagu

SEQ ID NO: 1572489 - RNA, 19 nt, Homo sapiens
  misc_RNA (1)...(19): siRNA sense strand
ccaacaugauggacuugaa

SEQ ID NO: 1572490 - RNA, 19 nt, Homo sapiens
  misc_RNA (1)...(19): siRNA sense strand
gacaggguuucaucauguu

SEQ ID NO: 1572491 - RNA, 19 nt, Homo sapiens
  misc_RNA (1)...(19): siRNA sense strand
gcgccaacaugauggacuu

SEQ ID NO: 1572492 - RNA, 19 nt, Homo sapiens
  misc_RNA (1)...(19): siRNA sense strand
ccagagaucccuccacuac

SEQ ID NO: 1572493 - RNA, 19 nt, Homo sapiens
  misc_RNA (1)...(19): siRNA sense strand
gagagccaccgucuuccua

SEQ ID NO: 1572494 - RNA, 19 nt, Homo sapiens
  misc_RNA (1)...(19): siRNA sense strand
gagccaccgucuuccuaga

SEQ ID NO: 1572495 - RNA, 19 nt, Homo sapiens
  misc_RNA (1)...(19): siRNA sense strand
gcagaaacagcaggaagga

SEQ ID NO: 1572496 - RNA, 19 nt, Homo sapiens
  misc_RNA (1)...(19): siRNA sense strand
gcugagugaucccaaguac

SEQ ID NO: 1572497 - RNA, 19 nt, Homo sapiens
  misc_RNA (1)...(19): siRNA sense strand
guagagacaggguuucauc

SEQ ID NO: 1572498 - RNA, 19 nt, Homo sapiens
  misc_RNA (1)...(19): siRNA sense strand
guaacugggcauccuguau

SEQ ID NO: 1572499 - RNA, 19 nt, Homo sapiens
  misc_RNA (1)...(19): siRNA sense strand
ccaccacaccuggcuaauu

SEQ ID NO: 1572500 - RNA, 19 nt, Homo sapiens
  misc_RNA (1)...(19): siRNA sense strand
uucaauaucagcagcauuu

SEQ ID NO: 1572501 - RNA, 19 nt, Homo sapiens
  misc_RNA (1)...(19): siRNA sense strand
gccugaugcugaagaugaa

SEQ ID NO: 1572502 - RNA, 19 nt, Homo sapiens
  misc_RNA (1)...(19): siRNA sense strand
ggagccugaugcugaagau

SEQ ID NO: 1572503 - RNA, 19 nt, Homo sapiens
  misc_RNA (1)...(19): siRNA sense strand
gaucccaaguaccuaagag

SEQ ID NO: 1572504 - RNA, 19 nt, Homo sapiens
  misc_RNA (1)...(19): siRNA sense strand
ccaaagugugggauuauag

SEQ ID NO: 1572505 - RNA, 19 nt, Homo sapiens
  misc_RNA (1)...(19): siRNA sense strand
gaacuccugaucucaagag

SEQ ID NO: 1572506 - RNA, 19 nt, Homo sapiens
  misc_RNA (1)...(19): siRNA sense strand
ucggcucacugcaaccuuu

SEQ ID NO: 1572507 - RNA, 19 nt, Homo sapiens
  misc_RNA (1)...(19): siRNA sense strand
aacugggcauccuguauuu

SEQ ID NO: 1572508 - RNA, 19 nt, Homo sapiens
  misc_RNA (1)...(19): siRNA sense strand
cagauggaccagucauguu

SEQ ID NO: 1572509 - RNA, 19 nt, Homo sapiens
  misc_RNA (1)...(19): siRNA sense strand
agagaucccuccacuaccu

SEQ ID NO: 1572510 - RNA, 19 nt, Homo sapiens
  misc_RNA (1)...(19): siRNA sense strand
ggaggcugccauccagaga

SEQ ID NO: 1572511 - RNA, 19 nt, Homo sapiens
  misc_RNA (1)...(19): siRNA sense strand
ccuccuggguucaagcaau

SEQ ID NO: 1572512 - RNA, 19 nt, Homo sapiens
  misc_RNA (1)...(19): siRNA sense strand
agagugaagaggcgagaaa

SEQ ID NO: 1572513 - RNA, 19 nt, Homo sapiens
  misc_RNA (1)...(19): siRNA sense strand
ggacuauaucaaccucuuc

SEQ ID NO: 1572514 - RNA, 19 nt, Homo sapiens
  misc_RNA (1)...(19): siRNA sense strand
gagccaggacuauaucaac

SEQ ID NO: 1572515 - RNA, 19 nt, Homo sapiens
  misc_RNA (1)...(19): siRNA sense strand
ugaaaguaaagccaccauu

SEQ ID NO: 1572516 - RNA, 19 nt, Homo sapiens
  misc_RNA (1)...(19): siRNA sense strand
gggcuggacacugcugaaa

SEQ ID NO: 1572517 - RNA, 19 nt, Homo sapiens
  misc_RNA (1)...(19): siRNA sense strand
cuccuggguucaagcaauu

SEQ ID NO: 1572518 - RNA, 19 nt, Homo sapiens
  misc_RNA (1)...(19): siRNA sense strand
acggagcucuacacagaug

SEQ ID NO: 1572519 - RNA, 19 nt, Homo sapiens
  misc_RNA (1)...(19): siRNA sense strand
caacaugauggacuugaac

SEQ ID NO: 1572520 - RNA, 19 nt, Homo sapiens
  misc_RNA (1)...(19): siRNA sense strand
aaaguaaagccaccauugc

SEQ ID NO: 1572521 - RNA, 19 nt, Homo sapiens
  misc_RNA (1)...(19): siRNA sense strand
gaaucuguguacuguauuu

SEQ ID NO: 1572522 - RNA, 19 nt, Homo sapiens
  misc_RNA (1)...(19): siRNA sense strand
gaagccagcugugcucuau

SEQ ID NO: 1572523 - RNA, 19 nt, Homo sapiens
  misc_RNA (1)...(19): siRNA sense strand
cagcugugcucuaugauug

SEQ ID NO: 1572524 - RNA, 19 nt, Homo sapiens
  misc_RNA (1)...(19): siRNA sense strand
gggcuuggcuuccugacuu

SEQ ID NO: 1572525 - RNA, 19 nt, Homo sapiens
  misc_RNA (1)...(19): siRNA sense strand
gaaaacagccugauuguca

SEQ ID NO: 1572526 - RNA, 19 nt, Homo sapiens
  misc_RNA (1)...(19): siRNA sense strand
gcauguaugucagcacuug

SEQ ID NO: 1572527 - RNA, 19 nt, Homo sapiens
  misc_RNA (1)...(19): siRNA sense strand
ggacuucacauccuugaga

SEQ ID NO: 1572528 - RNA, 19 nt, Homo sapiens
  misc_RNA (1)...(19): siRNA sense strand
gaccucagaacccgauuua

SEQ ID NO: 1572529 - RNA, 19 nt, Homo sapiens
  misc_RNA (1)...(19): siRNA sense strand
gcugagaucaucacacauu

SEQ ID NO: 1572530 - RNA, 19 nt, Homo sapiens
  misc_RNA (1)...(19): siRNA sense strand
caauccugcucuauucuuu

SEQ ID NO: 1572531 - RNA, 19 nt, Homo sapiens
  misc_RNA (1)...(19): siRNA sense strand
gauuuaggacucagaauga

SEQ ID NO: 1572532 - RNA, 19 nt, Homo sapiens
  misc_RNA (1)...(19): siRNA sense strand
gacaacugcuuagcucuga

SEQ ID NO: 1572533 - RNA, 19 nt, Homo sapiens
  misc_RNA (1)...(19): siRNA sense strand
gcucuaugauugcaacugu

SEQ ID NO: 1572534 - RNA, 19 nt, Homo sapiens
  misc_RNA (1)...(19): siRNA sense strand
uggaaucuguguacuguau

SEQ ID NO: 1572535 - RNA, 19 nt, Homo sapiens
  misc_RNA (1)...(19): siRNA sense strand
cagaaugacuuugcugauc

SEQ ID NO: 1572536 - RNA, 19 nt, Homo sapiens
  misc_RNA (1)...(19): siRNA sense strand
gcuucuagaucucauguca

SEQ ID NO: 1572537 - RNA, 19 nt, Homo sapiens
  misc_RNA (1)...(19): siRNA sense strand
gggcuauccuguucccuau

SEQ ID NO: 1572538 - RNA, 19 nt, Homo sapiens
  misc_RNA (1)...(19): siRNA sense strand
uggcugagaucaucacaca

SEQ ID NO: 1572539 - RNA, 19 nt, Homo sapiens
  misc_RNA (1)...(19): siRNA sense strand
ggagaaaacagccugauug

SEQ ID NO: 1572540 - RNA, 19 nt, Homo sapiens
  misc_RNA (1)...(19): siRNA sense strand
uaccauagccuuuguggau

SEQ ID NO: 1572541 - RNA, 19 nt, Homo sapiens
  misc_RNA (1)...(19): siRNA sense strand
ggaccagcuucaggacuug

SEQ ID NO: 1572542 - RNA, 19 nt, Homo sapiens
  misc_RNA (1)...(19): siRNA sense strand
gggagaugacaacugcuua

SEQ ID NO: 1572543 - RNA, 19 nt, Homo sapiens
  misc_RNA (1)...(19): siRNA sense strand
gcuauccuguucccuauac

SEQ ID NO: 1572544 - RNA, 19 nt, Homo sapiens
  misc_RNA (1)...(19): siRNA sense strand
agaaugacuuugcugaucu

SEQ ID NO: 1572545 - RNA, 19 nt, Homo sapiens
  misc_RNA (1)...(19): siRNA sense strand
ggccugagggacauucuaa

SEQ ID NO: 1572546 - RNA, 19 nt, Homo sapiens
  misc_RNA (1)...(19): siRNA sense strand
caagccaucugccuucacu

SEQ ID NO: 1572547 - RNA, 19 nt, Homo sapiens
  misc_RNA (1)...(19): siRNA sense strand
ggacucagaaugacuuugc

SEQ ID NO: 1572548 - RNA, 19 nt, Homo sapiens
  misc_RNA (1)...(19): siRNA sense strand
gaacccgauuuaggacuca

SEQ ID NO: 1572549 - RNA, 19 nt, Homo sapiens
  misc_RNA (1)...(19): siRNA sense strand
ggugcugcuugguaccaua

SEQ ID NO: 1572550 - RNA, 19 nt, Homo sapiens
  misc_RNA (1)...(19): siRNA sense strand
gaaugacuuugcugaucuc

SEQ ID NO: 1572551 - RNA, 19 nt, Homo sapiens
  misc_RNA (1)...(19): siRNA sense strand
agccagcugugcucuauga

SEQ ID NO: 1572552 - RNA, 19 nt, Homo sapiens
  misc_RNA (1)...(19): siRNA sense strand
ggagaugacaacugcuuag

SEQ ID NO: 1572553 - RNA, 19 nt, Homo sapiens
  misc_RNA (1)...(19): siRNA sense strand
cugagaucaucacacauuu

SEQ ID NO: 1572554 - RNA, 19 nt, Homo sapiens
  misc_RNA (1)...(19): siRNA sense strand
ccauagccuuuguggaugu

SEQ ID NO: 1572555 - RNA, 19 nt, Homo sapiens
  misc_RNA (1)...(19): siRNA sense strand
guccugagcauguauguca

SEQ ID NO: 1572556 - RNA, 19 nt, Homo sapiens
  misc_RNA (1)...(19): siRNA sense strand
ggaccucagaacccgauuu

SEQ ID NO: 1572557 - RNA, 19 nt, Homo sapiens
  misc_RNA (1)...(19): siRNA sense strand
cgauuuaggacucagaaug

SEQ ID NO: 1572558 - RNA, 19 nt, Homo sapiens
  misc_RNA (1)...(19): siRNA sense strand
ucacauccuugagauugga

SEQ ID NO: 1572559 - RNA, 19 nt, Homo sapiens
  misc_RNA (1)...(19): siRNA sense strand
ccucguggcugagaucauc

SEQ ID NO: 1572560 - RNA, 19 nt, Homo sapiens
  misc_RNA (1)...(19): siRNA sense strand
uggaccagcuucaggacuu

SEQ ID NO: 1572561 - RNA, 19 nt, Homo sapiens
  misc_RNA (1)...(19): siRNA sense strand
gagaucaucacacauuugc

SEQ ID NO: 1572562 - RNA, 19 nt, Homo sapiens
  misc_RNA (1)...(19): siRNA sense strand
ugagggacauucuaaacac

SEQ ID NO: 1572563 - RNA, 19 nt, Homo sapiens
  misc_RNA (1)...(19): siRNA sense strand
gaaccagggagaugacaac

SEQ ID NO: 1572564 - RNA, 19 nt, Homo sapiens
  misc_RNA (1)...(19): siRNA sense strand
agccaucugccuucacuua

SEQ ID NO: 1572565 - RNA, 19 nt, Homo sapiens
  misc_RNA (1)...(19): siRNA sense strand
ccucugagauagucacacu

SEQ ID NO: 1572566 - RNA, 19 nt, Homo sapiens
  misc_RNA (1)...(19): siRNA sense strand
ccucagaacccgauuuagg

SEQ ID NO: 1572567 - RNA, 19 nt, Homo sapiens
  misc_RNA (1)...(19): siRNA sense strand
ggaaucuguguacuguauu

SEQ ID NO: 1572568 - RNA, 19 nt, Homo sapiens
  misc_RNA (1)...(19): siRNA sense strand
ucacugcccggaucucaug

SEQ ID NO: 1572569 - RNA, 19 nt, Homo sapiens
  misc_RNA (1)...(19): siRNA sense strand
gacuucacauccuugagau

SEQ ID NO: 1572570 - RNA, 19 nt, Homo sapiens
  misc_RNA (1)...(19): siRNA sense strand
ggcuuggcuuccugacuuu

SEQ ID NO: 1572571 - RNA, 19 nt, Homo sapiens
  misc_RNA (1)...(19): siRNA sense strand
ccagcugugcucuaugauu

SEQ ID NO: 1572572 - RNA, 19 nt, Homo sapiens
  misc_RNA (1)...(19): siRNA sense strand
acuggaaucuguguacugu

SEQ ID NO: 1572573 - RNA, 19 nt, Homo sapiens
  misc_RNA (1)...(19): siRNA sense strand
ccuguucccuauaccuuuc

SEQ ID NO: 1572574 - RNA, 19 nt, Homo sapiens
  misc_RNA (1)...(19): siRNA sense strand
cuucacauccuugagauug

SEQ ID NO: 1572575 - RNA, 19 nt, Homo sapiens
  misc_RNA (1)...(19): siRNA sense strand
ugagaucaucacacauuug

SEQ ID NO: 1572576 - RNA, 19 nt, Homo sapiens
  misc_RNA (1)...(19): siRNA sense strand
ccaauccugcucuauucuu

SEQ ID NO: 1572577 - RNA, 19 nt, Homo sapiens
  misc_RNA (1)...(19): siRNA sense strand
gagaaaacagccugauugu

SEQ ID NO: 1572578 - RNA, 19 nt, Homo sapiens
  misc_RNA (1)...(19): siRNA sense strand
gggagaaggaccucagaac

SEQ ID NO: 1572579 - RNA, 19 nt, Homo sapiens
  misc_RNA (1)...(19): siRNA sense strand
cuccugggcuauccuguuc

SEQ ID NO: 1572580 - RNA, 19 nt, Homo sapiens
  misc_RNA (1)...(19): siRNA sense strand
uucuagaucucaugucauc

SEQ ID NO: 1572581 - RNA, 19 nt, Homo sapiens
  misc_RNA (1)...(19): siRNA sense strand
cucagaacccgauuuagga

SEQ ID NO: 1572582 - RNA, 19 nt, Homo sapiens
  misc_RNA (1)...(19): siRNA sense strand
cagcgucacccuucugucu

SEQ ID NO: 1572583 - RNA, 19 nt, Homo sapiens
  misc_RNA (1)...(19): siRNA sense strand
ggaaugagcugacugaaau

SEQ ID NO: 1572584 - RNA, 19 nt, Homo sapiens
  misc_RNA (1)...(19): siRNA sense strand
ggagaugacuuaccucaaa

SEQ ID NO: 1572585 - RNA, 19 nt, Homo sapiens
  misc_RNA (1)...(19): siRNA sense strand
gaaauaacccugugcagaa

SEQ ID NO: 1572586 - RNA, 19 nt, Homo sapiens
  misc_RNA (1)...(19): siRNA sense strand
gaccuacugucuccuuaua

SEQ ID NO: 1572587 - RNA, 19 nt, Homo sapiens
  misc_RNA (1)...(19): siRNA sense strand
gaucaugacuauagcagau

SEQ ID NO: 1572588 - RNA, 19 nt, Homo sapiens
  misc_RNA (1)...(19): siRNA sense strand
gcuuacagcugaugauuuc

SEQ ID NO: 1572589 - RNA, 19 nt, Homo sapiens
  misc_RNA (1)...(19): siRNA sense strand
ccaaagccauagugguuaa

SEQ ID NO: 1572590 - RNA, 19 nt, Homo sapiens
  misc_RNA (1)...(19): siRNA sense strand
gggcugguaugagaaauuu

SEQ ID NO: 1572591 - RNA, 19 nt, Homo sapiens
  misc_RNA (1)...(19): siRNA sense strand
ugagugaggagaugacuua

SEQ ID NO: 1572592 - RNA, 19 nt, Homo sapiens
  misc_RNA (1)...(19): siRNA sense strand
gguuacaagucuaaagauu

SEQ ID NO: 1572593 - RNA, 19 nt, Homo sapiens
  misc_RNA (1)...(19): siRNA sense strand
gaaaguucuugaggaggua

SEQ ID NO: 1572594 - RNA, 19 nt, Homo sapiens
  misc_RNA (1)...(19): siRNA sense strand
gauuauggaucuggaaaug

SEQ ID NO: 1572595 - RNA, 19 nt, Homo sapiens
  misc_RNA (1)...(19): siRNA sense strand
cauccuaccuggacagugu

SEQ ID NO: 1572596 - RNA, 19 nt, Homo sapiens
  misc_RNA (1)...(19): siRNA sense strand
aaagaaccauaaagaggaa

SEQ ID NO: 1572597 - RNA, 19 nt, Homo sapiens
  misc_RNA (1)...(19): siRNA sense strand
gccguggucuugaucauga

SEQ ID NO: 1572598 - RNA, 19 nt, Homo sapiens
  misc_RNA (1)...(19): siRNA sense strand
uguagaggcugaugucaau

SEQ ID NO: 1572599 - RNA, 19 nt, Homo sapiens
  misc_RNA (1)...(19): siRNA sense strand
gaagaucaagggcugguau

SEQ ID NO: 1572600 - RNA, 19 nt, Homo sapiens
  misc_RNA (1)...(19): siRNA sense strand
ugacagagaccgagagcaa

SEQ ID NO: 1572601 - RNA, 19 nt, Homo sapiens
  misc_RNA (1)...(19): siRNA sense strand
gagaugauggagccuguaa

SEQ ID NO: 1572602 - RNA, 19 nt, Homo sapiens
  misc_RNA (1)...(19): siRNA sense strand
caacgcagcaaaauacuua

SEQ ID NO: 1572603 - RNA, 19 nt, Homo sapiens
  misc_RNA (1)...(19): siRNA sense strand
gcaaugagaaggugaccau

SEQ ID NO: 1572604 - RNA, 19 nt, Homo sapiens
  misc_RNA (1)...(19): siRNA sense strand
ccauagugguuaagaaagu

SEQ ID NO: 1572605 - RNA, 19 nt, Homo sapiens
  misc_RNA (1)...(19): siRNA sense strand
uggaaauucuuguggcauu

SEQ ID NO: 1572606 - RNA, 19 nt, Homo sapiens
  misc_RNA (1)...(19): siRNA sense strand
ugugggaagucaagucaaa

SEQ ID NO: 1572607 - RNA, 19 nt, Homo sapiens
  misc_RNA (1)...(19): siRNA sense strand
caugcgagcugaguacgaa

SEQ ID NO: 1572608 - RNA, 19 nt, Homo sapiens
  misc_RNA (1)...(19): siRNA sense strand
ggaaaugugggaagucaag

SEQ ID NO: 1572609 - RNA, 19 nt, Homo sapiens
  misc_RNA (1)...(19): siRNA sense strand
acgcugaccuggagcagaa

SEQ ID NO: 1572610 - RNA, 19 nt, Homo sapiens
  misc_RNA (1)...(19): siRNA sense strand
uuauggaucuggaaaugug

SEQ ID NO: 1572611 - RNA, 19 nt, Homo sapiens
  misc_RNA (1)...(19): siRNA sense strand
gucaauggguuacgaagag

SEQ ID NO: 1572612 - RNA, 19 nt, Homo sapiens
  misc_RNA (1)...(19): siRNA sense strand
gaugauggagccuguaagu

SEQ ID NO: 1572613 - RNA, 19 nt, Homo sapiens
  misc_RNA (1)...(19): siRNA sense strand
cuucaaacccuggaaauug

SEQ ID NO: 1572614 - RNA, 19 nt, Homo sapiens
  misc_RNA (1)...(19): siRNA sense strand
cuaaugcuguucugcagau

SEQ ID NO: 1572615 - RNA, 19 nt, Homo sapiens
  misc_RNA (1)...(19): siRNA sense strand
gccaaagccauagugguua

SEQ ID NO: 1572616 - RNA, 19 nt, Homo sapiens
  misc_RNA (1)...(19): siRNA sense strand
ccauaaagaggaaaugcaa

SEQ ID NO: 1572617 - RNA, 19 nt, Homo sapiens
  misc_RNA (1)...(19): siRNA sense strand
cauagugguuaagaaaguu

SEQ ID NO: 1572618 - RNA, 19 nt, Homo sapiens
  misc_RNA (1)...(19): siRNA sense strand
caagggcugguaugagaaa

SEQ ID NO: 1572619 - RNA, 19 nt, Homo sapiens
  misc_RNA (1)...(19): siRNA sense strand
gauaaugccaggcuuacag

SEQ ID NO: 1572620 - RNA, 19 nt, Homo sapiens
  misc_RNA (1)...(19): siRNA sense strand
ugagcugacugaaaugaag

SEQ ID NO: 1572621 - RNA, 19 nt, Homo sapiens
  misc_RNA (1)...(19): siRNA sense strand
gagaugacuuaccucaaaa

SEQ ID NO: 1572622 - RNA, 19 nt, Homo sapiens
  misc_RNA (1)...(19): siRNA sense strand
gugaggagaugacuuaccu

SEQ ID NO: 1572623 - RNA, 19 nt, Homo sapiens
  misc_RNA (1)...(19): siRNA sense strand
cggaaugagcugacugaaa

SEQ ID NO: 1572624 - RNA, 19 nt, Homo sapiens
  misc_RNA (1)...(19): siRNA sense strand
agucaaagacccagccaaa

SEQ ID NO: 1572625 - RNA, 19 nt, Homo sapiens
  misc_RNA (1)...(19): siRNA sense strand
ccaugcagaaccucaauga

SEQ ID NO: 1572626 - RNA, 19 nt, Homo sapiens
  misc_RNA (1)...(19): siRNA sense strand
gaagaguuuuggaugaaau

SEQ ID NO: 1572627 - RNA, 19 nt, Homo sapiens
  misc_RNA (1)...(19): siRNA sense strand
ucaugacuauagcagauau

SEQ ID NO: 1572628 - RNA, 19 nt, Homo sapiens
  misc_RNA (1)...(19): siRNA sense strand
aucaagggcugguaugaga

SEQ ID NO: 1572629 - RNA, 19 nt, Homo sapiens
  misc_RNA (1)...(19): siRNA sense strand
gauuucagacucaaguaug

SEQ ID NO: 1572630 - RNA, 19 nt, Homo sapiens
  misc_RNA (1)...(19): siRNA sense strand
agacccagccaaagccaua

SEQ ID NO: 1572631 - RNA, 19 nt, Homo sapiens
  misc_RNA (1)...(19): siRNA sense strand
cagcuuugguacuggaaau

SEQ ID NO: 1572632 - RNA, 19 nt, Homo sapiens
  misc_RNA (1)...(19): siRNA sense strand
ggguggaccucacaguucu

SEQ ID NO: 1572633 - RNA, 19 nt, Homo sapiens
  misc_RNA (1)...(19): siRNA sense strand
gcgcagauccaggcucaga

SEQ ID NO: 1572634 - RNA, 19 nt, Homo sapiens
  misc_RNA (1)...(19): siRNA sense strand
caacaugcgagcugaguac

SEQ ID NO: 1572635 - RNA, 19 nt, Homo sapiens
  misc_RNA (1)...(19): siRNA sense strand
aagaggaaaugcaaguucu

SEQ ID NO: 1572636 - RNA, 19 nt, Homo sapiens
  misc_RNA (1)...(19): siRNA sense strand
ugauggagccuguaagucu

SEQ ID NO: 1572637 - RNA, 19 nt, Homo sapiens
  misc_RNA (1)...(19): siRNA sense strand
gagugcuccuugacagaga

SEQ ID NO: 1572638 - RNA, 19 nt, Homo sapiens
  misc_RNA (1)...(19): siRNA sense strand
uaaagaggaaaugcaaguu

SEQ ID NO: 1572639 - RNA, 19 nt, Homo sapiens
  misc_RNA (1)...(19): siRNA sense strand
ucaaagacccagccaaagc

SEQ ID NO: 1572640 - RNA, 19 nt, Homo sapiens
  misc_RNA (1)...(19): siRNA sense strand
caaccucagcccggaauga

SEQ ID NO: 1572641 - RNA, 19 nt, Homo sapiens
  misc_RNA (1)...(19): siRNA sense strand
aaagaggaaaugcaaguuc

SEQ ID NO: 1572642 - RNA, 19 nt, Homo sapiens
  misc_RNA (1)...(19): siRNA sense strand
gaugauuucagacucaagu

SEQ ID NO: 1572643 - RNA, 19 nt, Homo sapiens
  misc_RNA (1)...(19): siRNA sense strand
gcaaugcuaaugcuguucu

SEQ ID NO: 1572644 - RNA, 19 nt, Homo sapiens
  misc_RNA (1)...(19): siRNA sense strand
uauaggaggagaugaugga

SEQ ID NO: 1572645 - RNA, 19 nt, Homo sapiens
  misc_RNA (1)...(19): siRNA sense strand
gaaccauaaagaggaaaug

SEQ ID NO: 1572646 - RNA, 19 nt, Homo sapiens
  misc_RNA (1)...(19): siRNA sense strand
aguaugaaacccugaguga

SEQ ID NO: 1572647 - RNA, 19 nt, Homo sapiens
  misc_RNA (1)...(19): siRNA sense strand
gcuguucugcagaucgaua

SEQ ID NO: 1572648 - RNA, 19 nt, Homo sapiens
  misc_RNA (1)...(19): siRNA sense strand
gaucaagggcugguaugag

SEQ ID NO: 1572649 - RNA, 19 nt, Homo sapiens
  misc_RNA (1)...(19): siRNA sense strand
aaauaacccugugcagaac

SEQ ID NO: 1572650 - RNA, 19 nt, Homo sapiens
  misc_RNA (1)...(19): siRNA sense strand
aagccauagugguuaagaa

SEQ ID NO: 1572651 - RNA, 19 nt, Homo sapiens
  misc_RNA (1)...(19): siRNA sense strand
agccaaagccauagugguu

SEQ ID NO: 1572652 - RNA, 19 nt, Homo sapiens
  misc_RNA (1)...(19): siRNA sense strand
gaaugagcugacugaaaug

SEQ ID NO: 1572653 - RNA, 19 nt, Homo sapiens
  misc_RNA (1)...(19): siRNA sense strand
gacuauagcagauauuucc

SEQ ID NO: 1572654 - RNA, 19 nt, Homo sapiens
  misc_RNA (1)...(19): siRNA sense strand
gguagaccaacgcagcaaa

SEQ ID NO: 1572655 - RNA, 19 nt, Homo sapiens
  misc_RNA (1)...(19): siRNA sense strand
ggcuuacagcugaugauuu

SEQ ID NO: 1572656 - RNA, 19 nt, Homo sapiens
  misc_RNA (1)...(19): siRNA sense strand
gcuccuuucuggcaaugag

SEQ ID NO: 1572657 - RNA, 19 nt, Homo sapiens
  misc_RNA (1)...(19): siRNA sense strand
cuggaaaugugggaaguca

SEQ ID NO: 1572658 - RNA, 19 nt, Homo sapiens
  misc_RNA (1)...(19): siRNA sense strand
ggagaugauggagccugua

SEQ ID NO: 1572659 - RNA, 19 nt, Homo sapiens
  misc_RNA (1)...(19): siRNA sense strand
agaaggugaccaugcagaa

SEQ ID NO: 1572660 - RNA, 19 nt, Homo sapiens
  misc_RNA (1)...(19): siRNA sense strand
gaugucaauggguuacgaa

SEQ ID NO: 1572661 - RNA, 19 nt, Homo sapiens
  misc_RNA (1)...(19): siRNA sense strand
cuggaucacucagacucua

SEQ ID NO: 1572662 - RNA, 19 nt, Homo sapiens
  misc_RNA (1)...(19): siRNA sense strand
gcugguaugagaaauuugg

SEQ ID NO: 1572663 - RNA, 19 nt, Homo sapiens
  misc_RNA (1)...(19): siRNA sense strand
auaaagaggaaaugcaagu

SEQ ID NO: 1572664 - RNA, 19 nt, Homo sapiens
  misc_RNA (1)...(19): siRNA sense strand
auuucagacucaaguauga

SEQ ID NO: 1572665 - RNA, 19 nt, Homo sapiens
  misc_RNA (1)...(19): siRNA sense strand
gcauccaccaccagcaaug

SEQ ID NO: 1572666 - RNA, 19 nt, Homo sapiens
  misc_RNA (1)...(19): siRNA sense strand
gaaaaucacucaacuaaga

SEQ ID NO: 1572667 - RNA, 19 nt, Homo sapiens
  misc_RNA (1)...(19): siRNA sense strand
gcaagugccugucucagaa

SEQ ID NO: 1572668 - RNA, 19 nt, Homo sapiens
  misc_RNA (1)...(19): siRNA sense strand
ggaaggaaguacaucuuug

SEQ ID NO: 1572669 - RNA, 19 nt, Homo sapiens
  misc_RNA (1)...(19): siRNA sense strand
gcagcagaauguaaugaaa

SEQ ID NO: 1572670 - RNA, 19 nt, Homo sapiens
  misc_RNA (1)...(19): siRNA sense strand
ccaggacugucaaaggaua

SEQ ID NO: 1572671 - RNA, 19 nt, Homo sapiens
  misc_RNA (1)...(19): siRNA sense strand
gaugauggccuucggaaau

SEQ ID NO: 1572672 - RNA, 19 nt, Homo sapiens
  misc_RNA (1)...(19): siRNA sense strand
gcagggacccagccaagaa

SEQ ID NO: 1572673 - RNA, 19 nt, Homo sapiens
  misc_RNA (1)...(19): siRNA sense strand
gccaucagcgugugacaua

SEQ ID NO: 1572674 - RNA, 19 nt, Homo sapiens
  misc_RNA (1)...(19): siRNA sense strand
gcuugacccugcugugaaa

SEQ ID NO: 1572675 - RNA, 19 nt, Homo sapiens
  misc_RNA (1)...(19): siRNA sense strand
ccagacaccaguaacuuaa

SEQ ID NO: 1572676 - RNA, 19 nt, Homo sapiens
  misc_RNA (1)...(19): siRNA sense strand
gccaggcucugcaaacuca

SEQ ID NO: 1572677 - RNA, 19 nt, Homo sapiens
  misc_RNA (1)...(19): siRNA sense strand
cgugugacauaagagauua

SEQ ID NO: 1572678 - RNA, 19 nt, Homo sapiens
  misc_RNA (1)...(19): siRNA sense strand
gaaggaaguacaucuuugg

SEQ ID NO: 1572679 - RNA, 19 nt, Homo sapiens
  misc_RNA (1)...(19): siRNA sense strand
cagcgaggcuuucaguucu

SEQ ID NO: 1572680 - RNA, 19 nt, Homo sapiens
  misc_RNA (1)...(19): siRNA sense strand
gcgaggcuuucaguucuuu

SEQ ID NO: 1572681 - RNA, 19 nt, Homo sapiens
  misc_RNA (1)...(19): siRNA sense strand
ggacugucaaaggauauua

SEQ ID NO: 1572682 - RNA, 19 nt, Homo sapiens
  misc_RNA (1)...(19): siRNA sense strand
agacaccaguaacuuaaau

SEQ ID NO: 1572683 - RNA, 19 nt, Homo sapiens
  misc_RNA (1)...(19): siRNA sense strand
caacagcgaggcuuucagu

SEQ ID NO: 1572684 - RNA, 19 nt, Homo sapiens
  misc_RNA (1)...(19): siRNA sense strand
ugaaaggccagucagagaa

SEQ ID NO: 1572685 - RNA, 19 nt, Homo sapiens
  misc_RNA (1)...(19): siRNA sense strand
cagaaaaucacucaacuaa

SEQ ID NO: 1572686 - RNA, 19 nt, Homo sapiens
  misc_RNA (1)...(19): siRNA sense strand
gugaaaggccagucagaga

SEQ ID NO: 1572687 - RNA, 19 nt, Homo sapiens
  misc_RNA (1)...(19): siRNA sense strand
gaaaggccagucagagaag

SEQ ID NO: 1572688 - RNA, 19 nt, Homo sapiens
  misc_RNA (1)...(19): siRNA sense strand
ugucaaaggauauuacuca

SEQ ID NO: 1572689 - RNA, 19 nt, Homo sapiens
  misc_RNA (1)...(19): siRNA sense strand
gaggaaggaaguacaucuu

SEQ ID NO: 1572690 - RNA, 19 nt, Homo sapiens
  misc_RNA (1)...(19): siRNA sense strand
ccagggacacccacuucua

SEQ ID NO: 1572691 - RNA, 19 nt, Homo sapiens
  misc_RNA (1)...(19): siRNA sense strand
gacaccaguaacuuaaaua

SEQ ID NO: 1572692 - RNA, 19 nt, Homo sapiens
  misc_RNA (1)...(19): siRNA sense strand
cagagaaggaagaggauga

SEQ ID NO: 1572693 - RNA, 19 nt, Homo sapiens
  misc_RNA (1)...(19): siRNA sense strand
uguaaugaaagaccuguaa

SEQ ID NO: 1572694 - RNA, 19 nt, Homo sapiens
  misc_RNA (1)...(19): siRNA sense strand
ugaaauguuuggucaucca

SEQ ID NO: 1572695 - RNA, 19 nt, Homo sapiens
  misc_RNA (1)...(19): siRNA sense strand
acccaggacugucaaagga

SEQ ID NO: 1572696 - RNA, 19 nt, Homo sapiens
  misc_RNA (1)...(19): siRNA sense strand
ggaggaaggaaguacaucu

SEQ ID NO: 1572697 - RNA, 19 nt, Homo sapiens
  misc_RNA (1)...(19): siRNA sense strand
aguaugcccuccgcaguuu

SEQ ID NO: 1572698 - RNA, 19 nt, Homo sapiens
  misc_RNA (1)...(19): siRNA sense strand
gcuuucaguucuuuggaau

SEQ ID NO: 1572699 - RNA, 19 nt, Homo sapiens
  misc_RNA (1)...(19): siRNA sense strand
agcagaauguaaugaaaga

SEQ ID NO: 1572700 - RNA, 19 nt, Homo sapiens
  misc_RNA (1)...(19): siRNA sense strand
uccagacaccaguaacuua

SEQ ID NO: 1572701 - RNA, 19 nt, Homo sapiens
  misc_RNA (1)...(19): siRNA sense strand
ggcuuucaguucuuuggaa

SEQ ID NO: 1572702 - RNA, 19 nt, Homo sapiens
  misc_RNA (1)...(19): siRNA sense strand
ggaugauggccuucggaaa

SEQ ID NO: 1572703 - RNA, 19 nt, Homo sapiens
  misc_RNA (1)...(19): siRNA sense strand
uuucaguucuuuggaauuc

SEQ ID NO: 1572704 - RNA, 19 nt, Homo sapiens
  misc_RNA (1)...(19): siRNA sense strand
ccaucagcgugugacauaa

SEQ ID NO: 1572705 - RNA, 19 nt, Homo sapiens
  misc_RNA (1)...(19): siRNA sense strand
caagugccugucucagaaa

SEQ ID NO: 1572706 - RNA, 19 nt, Homo sapiens
  misc_RNA (1)...(19): siRNA sense strand
gcgugugacauaagagauu

SEQ ID NO: 1572707 - RNA, 19 nt, Homo sapiens
  misc_RNA (1)...(19): siRNA sense strand
gccaaacccaggacuguca

SEQ ID NO: 1572708 - RNA, 19 nt, Homo sapiens
  misc_RNA (1)...(19): siRNA sense strand
aggaaggaaguacaucuuu

SEQ ID NO: 1572709 - RNA, 19 nt, Homo sapiens
  misc_RNA (1)...(19): siRNA sense strand
gucaaaggauauuacucau

SEQ ID NO: 1572710 - RNA, 19 nt, Homo sapiens
  misc_RNA (1)...(19): siRNA sense strand
cagcagaauguaaugaaag

SEQ ID NO: 1572711 - RNA, 19 nt, Homo sapiens
  misc_RNA (1)...(19): siRNA sense strand
uauuacucauuuccucuug

SEQ ID NO: 1572712 - RNA, 19 nt, Homo sapiens
  misc_RNA (1)...(19): siRNA sense strand
acagcgaggcuuucaguuc

SEQ ID NO: 1572713 - RNA, 19 nt, Homo sapiens
  misc_RNA (1)...(19): siRNA sense strand
gauccagacaccaguaacu

SEQ ID NO: 1572714 - RNA, 19 nt, Homo sapiens
  misc_RNA (1)...(19): siRNA sense strand
gcaaacucacucucugcau

SEQ ID NO: 1572715 - RNA, 19 nt, Homo sapiens
  misc_RNA (1)...(19): siRNA sense strand
cagacaccaguaacuuaaa

SEQ ID NO: 1572716 - RNA, 19 nt, Homo sapiens
  misc_RNA (1)...(19): siRNA sense strand
uuacucauuuccucuugca

SEQ ID NO: 1572717 - RNA, 19 nt, Homo sapiens
  misc_RNA (1)...(19): siRNA sense strand
gaagaggaaucgcgaguuc

SEQ ID NO: 1572718 - RNA, 19 nt, Homo sapiens
  misc_RNA (1)...(19): siRNA sense strand
cgacagcucuuuccugaga

SEQ ID NO: 1572719 - RNA, 19 nt, Homo sapiens
  misc_RNA (1)...(19): siRNA sense strand
gaguguggcucuauacaaa

SEQ ID NO: 1572720 - RNA, 19 nt, Homo sapiens
  misc_RNA (1)...(19): siRNA sense strand
gaggugacaugcccaauca

SEQ ID NO: 1572721 - RNA, 19 nt, Homo sapiens
  misc_RNA (1)...(19): siRNA sense strand
gcauggaauuaauauguug

SEQ ID NO: 1572722 - RNA, 19 nt, Homo sapiens
  misc_RNA (1)...(19): siRNA sense strand
ucagaugccucaagagaau

SEQ ID NO: 1572723 - RNA, 19 nt, Homo sapiens
  misc_RNA (1)...(19): siRNA sense strand
caauuuggacguucaguuu

SEQ ID NO: 1572724 - RNA, 19 nt, Homo sapiens
  misc_RNA (1)...(19): siRNA sense strand
cauagagacucauccaauc

SEQ ID NO: 1572725 - RNA, 19 nt, Homo sapiens
  misc_RNA (1)...(19): siRNA sense strand
cagauuaaguuuccagaag

SEQ ID NO: 1572726 - RNA, 19 nt, Homo sapiens
  misc_RNA (1)...(19): siRNA sense strand
ggcauggaauuaauauguu

SEQ ID NO: 1572727 - RNA, 19 nt, Homo sapiens
  misc_RNA (1)...(19): siRNA sense strand
gcucagaugccucaagaga

SEQ ID NO: 1572728 - RNA, 19 nt, Homo sapiens
  misc_RNA (1)...(19): siRNA sense strand
ucaauaaccauguggauuc

SEQ ID NO: 1572729 - RNA, 19 nt, Homo sapiens
  misc_RNA (1)...(19): siRNA sense strand
ggaaagaaaagaacagauu

SEQ ID NO: 1572730 - RNA, 19 nt, Homo sapiens
  misc_RNA (1)...(19): siRNA sense strand
ccugaugccuugacuuuua

SEQ ID NO: 1572731 - RNA, 19 nt, Homo sapiens
  misc_RNA (1)...(19): siRNA sense strand
caauaaccauguggauuca

SEQ ID NO: 1572732 - RNA, 19 nt, Homo sapiens
  misc_RNA (1)...(19): siRNA sense strand
ucucuugagcucuuucuua

SEQ ID NO: 1572733 - RNA, 19 nt, Homo sapiens
  misc_RNA (1)...(19): siRNA sense strand
cucuugagcucuuucuuaa

SEQ ID NO: 1572734 - RNA, 19 nt, Homo sapiens
  misc_RNA (1)...(19): siRNA sense strand
gauuaaguuuccagaagca

SEQ ID NO: 1572735 - RNA, 19 nt, Homo sapiens
  misc_RNA (1)...(19): siRNA sense strand
ccauagagacucauccaau

SEQ ID NO: 1572736 - RNA, 19 nt, Homo sapiens
  misc_RNA (1)...(19): siRNA sense strand
ggggaaaccugcucagaug

SEQ ID NO: 1572737 - RNA, 19 nt, Homo sapiens
  misc_RNA (1)...(19): siRNA sense strand
ggaagaggaaucgcgaguu

SEQ ID NO: 1572738 - RNA, 19 nt, Homo sapiens
  misc_RNA (1)...(19): siRNA sense strand
cugcucagaugccucaaga

SEQ ID NO: 1572739 - RNA, 19 nt, Homo sapiens
  misc_RNA (1)...(19): siRNA sense strand
gaaagcugggacuccauga

SEQ ID NO: 1572740 - RNA, 19 nt, Homo sapiens
  misc_RNA (1)...(19): siRNA sense strand
gaucugaguguggcucuau

SEQ ID NO: 1572741 - RNA, 19 nt, Homo sapiens
  misc_RNA (1)...(19): siRNA sense strand
aagaacagauuaaguuucc

SEQ ID NO: 1572742 - RNA, 19 nt, Homo sapiens
  misc_RNA (1)...(19): siRNA sense strand
ucaaaggacccggaagguu

SEQ ID NO: 1572743 - RNA, 19 nt, Homo sapiens
  misc_RNA (1)...(19): siRNA sense strand
uggcauggaauuaauaugu

SEQ ID NO: 1572744 - RNA, 19 nt, Homo sapiens
  misc_RNA (1)...(19): siRNA sense strand
ggugacaugcccaaucaga

SEQ ID NO: 1572745 - RNA, 19 nt, Homo sapiens
  misc_RNA (1)...(19): siRNA sense strand
gggaguuccuggcccaucu

SEQ ID NO: 1572746 - RNA, 19 nt, Homo sapiens
  misc_RNA (1)...(19): siRNA sense strand
cuggauggagggaguguua

SEQ ID NO: 1572747 - RNA, 19 nt, Homo sapiens
  misc_RNA (1)...(19): siRNA sense strand
aagcugggacuccaugauu

SEQ ID NO: 1572748 - RNA, 19 nt, Homo sapiens
  misc_RNA (1)...(19): siRNA sense strand
gcaaaacaaaccauagaga

SEQ ID NO: 1572749 - RNA, 19 nt, Homo sapiens
  misc_RNA (1)...(19): siRNA sense strand
guguggcucuauacaaaca

SEQ ID NO: 1572750 - RNA, 19 nt, Homo sapiens
  misc_RNA (1)...(19): siRNA sense strand
aacaaaccauagagacuca

SEQ ID NO: 1572751 - RNA, 19 nt, Homo sapiens
  misc_RNA (1)...(19): siRNA sense strand
gcaaggcgucuccgaaagc

SEQ ID NO: 1572752 - RNA, 19 nt, Homo sapiens
  misc_RNA (1)...(19): siRNA sense strand
gaauguccuuuuccugaug

SEQ ID NO: 1572753 - RNA, 19 nt, Homo sapiens
  misc_RNA (1)...(19): siRNA sense strand
aagguucucuugagcucuu

SEQ ID NO: 1572754 - RNA, 19 nt, Homo sapiens
  misc_RNA (1)...(19): siRNA sense strand
cuugagcucuuucuuaagc

SEQ ID NO: 1572755 - RNA, 19 nt, Homo sapiens
  misc_RNA (1)...(19): siRNA sense strand
gucaauaaccauguggauu

SEQ ID NO: 1572756 - RNA, 19 nt, Homo sapiens
  misc_RNA (1)...(19): siRNA sense strand
cugcaaggcgucuccgaaa

SEQ ID NO: 1572757 - RNA, 19 nt, Homo sapiens
  misc_RNA (1)...(19): siRNA sense strand
ggaucugaguguggcucua

SEQ ID NO: 1572758 - RNA, 19 nt, Homo sapiens
  misc_RNA (1)...(19): siRNA sense strand
ugaguguggcucuauacaa

SEQ ID NO: 1572759 - RNA, 19 nt, Homo sapiens
  misc_RNA (1)...(19): siRNA sense strand
ggauggagggaguguuaag

SEQ ID NO: 1572760 - RNA, 19 nt, Homo sapiens
  misc_RNA (1)...(19): siRNA sense strand
agcugggacuccaugauuu

SEQ ID NO: 1572761 - RNA, 19 nt, Homo sapiens
  misc_RNA (1)...(19): siRNA sense strand
auaaccauguggauucauc

SEQ ID NO: 1572762 - RNA, 19 nt, Homo sapiens
  misc_RNA (1)...(19): siRNA sense strand
gcucuuucuuaagccaauu

SEQ ID NO: 1572763 - RNA, 19 nt, Homo sapiens
  misc_RNA (1)...(19): siRNA sense strand
caacaacucugacaaauca

SEQ ID NO: 1572764 - RNA, 19 nt, Homo sapiens
  misc_RNA (1)...(19): siRNA sense strand
ggaaaccacugaagccaaa

SEQ ID NO: 1572765 - RNA, 19 nt, Homo sapiens
  misc_RNA (1)...(19): siRNA sense strand
ccaauuaaauccuauccua

SEQ ID NO: 1572766 - RNA, 19 nt, Homo sapiens
  misc_RNA (1)...(19): siRNA sense strand
gaagauaaagggaaguuaa

SEQ ID NO: 1572767 - RNA, 19 nt, Homo sapiens
  misc_RNA (1)...(19): siRNA sense strand
gaaguaaacaugccaagaa

SEQ ID NO: 1572768 - RNA, 19 nt, Homo sapiens
  misc_RNA (1)...(19): siRNA sense strand
gauuaaagaugcagaaugg

SEQ ID NO: 1572769 - RNA, 19 nt, Homo sapiens
  misc_RNA (1)...(19): siRNA sense strand
ccaaagaagaaacaaguua

SEQ ID NO: 1572770 - RNA, 19 nt, Homo sapiens
  misc_RNA (1)...(19): siRNA sense strand
gcauaaagaucgaguugca

SEQ ID NO: 1572771 - RNA, 19 nt, Homo sapiens
  misc_RNA (1)...(19): siRNA sense strand
auacagcccuuacaacaaa

SEQ ID NO: 1572772 - RNA, 19 nt, Homo sapiens
  misc_RNA (1)...(19): siRNA sense strand
ggucaggacuacagaacaa

SEQ ID NO: 1572773 - RNA, 19 nt, Homo sapiens
  misc_RNA (1)...(19): siRNA sense strand
agaccuggaucaagauuaa

SEQ ID NO: 1572774 - RNA, 19 nt, Homo sapiens
  misc_RNA (1)...(19): siRNA sense strand
ccucaaaucuggcacaaca

SEQ ID NO: 1572775 - RNA, 19 nt, Homo sapiens
  misc_RNA (1)...(19): siRNA sense strand
guacuguuguugaaucaga

SEQ ID NO: 1572776 - RNA, 19 nt, Homo sapiens
  misc_RNA (1)...(19): siRNA sense strand
caacucaaacagcacauuu

SEQ ID NO: 1572777 - RNA, 19 nt, Homo sapiens
  misc_RNA (1)...(19): siRNA sense strand
cagcggagcccgaguauuc

SEQ ID NO: 1572778 - RNA, 19 nt, Homo sapiens
  misc_RNA (1)...(19): siRNA sense strand
gcgcacaccuacccugaug

SEQ ID NO: 1572779 - RNA, 19 nt, Homo sapiens
  misc_RNA (1)...(19): siRNA sense strand
ucaaacagcacauuucuag

SEQ ID NO: 1572780 - RNA, 19 nt, Homo sapiens
  misc_RNA (1)...(19): siRNA sense strand
gcacacaacacaggaucua

SEQ ID NO: 1572781 - RNA, 19 nt, Homo sapiens
  misc_RNA (1)...(19): siRNA sense strand
ucugugauguucauguuaa

SEQ ID NO: 1572782 - RNA, 19 nt, Homo sapiens
  misc_RNA (1)...(19): siRNA sense strand
ggcaacaacucugacaaau

SEQ ID NO: 1572783 - RNA, 19 nt, Homo sapiens
  misc_RNA (1)...(19): siRNA sense strand
ccagaaagauaugaugaag

SEQ ID NO: 1572784 - RNA, 19 nt, Homo sapiens
  misc_RNA (1)...(19): siRNA sense strand
aaacuugcauuccagaaag

SEQ ID NO: 1572785 - RNA, 19 nt, Homo sapiens
  misc_RNA (1)...(19): siRNA sense strand
aagauaugaugaagccuuu

SEQ ID NO: 1572786 - RNA, 19 nt, Homo sapiens
  misc_RNA (1)...(19): siRNA sense strand
ccucuuugcuccguacuaa

SEQ ID NO: 1572787 - RNA, 19 nt, Homo sapiens
  misc_RNA (1)...(19): siRNA sense strand
ucugucagcuucgcuuuaa

SEQ ID NO: 1572788 - RNA, 19 nt, Homo sapiens
  misc_RNA (1)...(19): siRNA sense strand
gcaacaacucugacaaauc

SEQ ID NO: 1572789 - RNA, 19 nt, Homo sapiens
  misc_RNA (1)...(19): siRNA sense strand
ccaucaagcucugaaagug

SEQ ID NO: 1572790 - RNA, 19 nt, Homo sapiens
  misc_RNA (1)...(19): siRNA sense strand
ugugaaaucugugauguuc

SEQ ID NO: 1572791 - RNA, 19 nt, Homo sapiens
  misc_RNA (1)...(19): siRNA sense strand
gaucaagauuaaagaugca

SEQ ID NO: 1572792 - RNA, 19 nt, Homo sapiens
  misc_RNA (1)...(19): siRNA sense strand
gaucuaaacacaagaccau

SEQ ID NO: 1572793 - RNA, 19 nt, Homo sapiens
  misc_RNA (1)...(19): siRNA sense strand
cuggauaucaaaccauuua

SEQ ID NO: 1572794 - RNA, 19 nt, Homo sapiens
  misc_RNA (1)...(19): siRNA sense strand
caagaaggucaaagcacua

SEQ ID NO: 1572795 - RNA, 19 nt, Homo sapiens
  misc_RNA (1)...(19): siRNA sense strand
guaaacaugccaagaaggu

SEQ ID NO: 1572796 - RNA, 19 nt, Homo sapiens
  misc_RNA (1)...(19): siRNA sense strand
ggaaguaaacaugccaaga

SEQ ID NO: 1572797 - RNA, 19 nt, Homo sapiens
  misc_RNA (1)...(19): siRNA sense strand
cuacagaacaagacauuuc

SEQ ID NO: 1572798 - RNA, 19 nt, Homo sapiens
  misc_RNA (1)...(19): siRNA sense strand
gaugcagccuucacuggau

SEQ ID NO: 1572799 - RNA, 19 nt, Homo sapiens
  misc_RNA (1)...(19): siRNA sense strand
cgaguauucuagcagcaaa

SEQ ID NO: 1572800 - RNA, 19 nt, Homo sapiens
  misc_RNA (1)...(19): siRNA sense strand
guacaugccacacuacuac

SEQ ID NO: 1572801 - RNA, 19 nt, Homo sapiens
  misc_RNA (1)...(19): siRNA sense strand
ggauaucaaaccauuuaug

SEQ ID NO: 1572802 - RNA, 19 nt, Homo sapiens
  misc_RNA (1)...(19): siRNA sense strand
cagaacaagacauuucauu

SEQ ID NO: 1572803 - RNA, 19 nt, Homo sapiens
  misc_RNA (1)...(19): siRNA sense strand
gcaaaguggcugugaacuc

SEQ ID NO: 1572804 - RNA, 19 nt, Homo sapiens
  misc_RNA (1)...(19): siRNA sense strand
aaauacagcccuuacaaca

SEQ ID NO: 1572805 - RNA, 19 nt, Homo sapiens
  misc_RNA (1)...(19): siRNA sense strand
cacaggaucuaaacacaag

SEQ ID NO: 1572806 - RNA, 19 nt, Homo sapiens
  misc_RNA (1)...(19): siRNA sense strand
acacaacacaggaucuaaa

SEQ ID NO: 1572807 - RNA, 19 nt, Homo sapiens
  misc_RNA (1)...(19): siRNA sense strand
aaucccagcugcuccauca

SEQ ID NO: 1572808 - RNA, 19 nt, Homo sapiens
  misc_RNA (1)...(19): siRNA sense strand
agaacaagacauuucauug

SEQ ID NO: 1572809 - RNA, 19 nt, Homo sapiens
  misc_RNA (1)...(19): siRNA sense strand
uaaccauacauuuggagua

SEQ ID NO: 1572810 - RNA, 19 nt, Homo sapiens
  misc_RNA (1)...(19): siRNA sense strand
aaucugugauguucauguu

SEQ ID NO: 1572811 - RNA, 19 nt, Homo sapiens
  misc_RNA (1)...(19): siRNA sense strand
ucacaggcaacaacucuga

SEQ ID NO: 1572812 - RNA, 19 nt, Homo sapiens
  misc_RNA (1)...(19): siRNA sense strand
gcacaccuacccugaugau

SEQ ID NO: 1572813 - RNA, 19 nt, Homo sapiens
  misc_RNA (1)...(19): siRNA sense strand
ggagcucccgguacuguug

SEQ ID NO: 1572814 - RNA, 19 nt, Homo sapiens
  misc_RNA (1)...(19): siRNA sense strand
uaauggggcugguccaauu

SEQ ID NO: 1572815 - RNA, 19 nt, Homo sapiens
  misc_RNA (1)...(19): siRNA sense strand
ccacuacaaaggaaguaaa

SEQ ID NO: 1572816 - RNA, 19 nt, Homo sapiens
  misc_RNA (1)...(19): siRNA sense strand
cacuggauaucaaaccauu

SEQ ID NO: 1572817 - RNA, 19 nt, Homo sapiens
  misc_RNA (1)...(19): siRNA sense strand
gacuacagaacaagacauu

SEQ ID NO: 1572818 - RNA, 19 nt, Homo sapiens
  misc_RNA (1)...(19): siRNA sense strand
caagauuaaagaugcagaa

SEQ ID NO: 1572819 - RNA, 19 nt, Homo sapiens
  misc_RNA (1)...(19): siRNA sense strand
gggcugguccaauuaaauc

SEQ ID NO: 1572820 - RNA, 19 nt, Homo sapiens
  misc_RNA (1)...(19): siRNA sense strand
gcuagaggcacacaacaca

SEQ ID NO: 1572821 - RNA, 19 nt, Homo sapiens
  misc_RNA (1)...(19): siRNA sense strand
aaauggagcucccgguacu

SEQ ID NO: 1572822 - RNA, 19 nt, Homo sapiens
  misc_RNA (1)...(19): siRNA sense strand
ggacagcgcaaaggcuaau

SEQ ID NO: 1572823 - RNA, 19 nt, Homo sapiens
  misc_RNA (1)...(19): siRNA sense strand
uccuagaccuggaucaaga

SEQ ID NO: 1572824 - RNA, 19 nt, Homo sapiens
  misc_RNA (1)...(19): siRNA sense strand
gaggcccacuacaaaggaa

SEQ ID NO: 1572825 - RNA, 19 nt, Homo sapiens
  misc_RNA (1)...(19): siRNA sense strand
caacacaggaucuaaacac

SEQ ID NO: 1572826 - RNA, 19 nt, Homo sapiens
  misc_RNA (1)...(19): siRNA sense strand
ccacuucucccuccaagag

SEQ ID NO: 1572827 - RNA, 19 nt, Homo sapiens
  misc_RNA (1)...(19): siRNA sense strand
uggcucauuucuccucaaa

SEQ ID NO: 1572828 - RNA, 19 nt, Homo sapiens
  misc_RNA (1)...(19): siRNA sense strand
gcacuagacgcaacgaaaa

SEQ ID NO: 1572829 - RNA, 19 nt, Homo sapiens
  misc_RNA (1)...(19): siRNA sense strand
cuacaaaggaaguaaacau

SEQ ID NO: 1572830 - RNA, 19 nt, Homo sapiens
  misc_RNA (1)...(19): siRNA sense strand
caaaauacagcccuuacaa

SEQ ID NO: 1572831 - RNA, 19 nt, Homo sapiens
  misc_RNA (1)...(19): siRNA sense strand
aaguaaacaugccaagaag

SEQ ID NO: 1572832 - RNA, 19 nt, Homo sapiens
  misc_RNA (1)...(19): siRNA sense strand
caccuacccugaugaugca

SEQ ID NO: 1572833 - RNA, 19 nt, Homo sapiens
  misc_RNA (1)...(19): siRNA sense strand
ccaaaaugguuccuuccaa

SEQ ID NO: 1572834 - RNA, 19 nt, Homo sapiens
  misc_RNA (1)...(19): siRNA sense strand
caauggauccugugcaaaa

SEQ ID NO: 1572835 - RNA, 19 nt, Homo sapiens
  misc_RNA (1)...(19): siRNA sense strand
gugauguucauguuaauuc

SEQ ID NO: 1572836 - RNA, 19 nt, Homo sapiens
  misc_RNA (1)...(19): siRNA sense strand
uaugcaaaguggcugugaa

SEQ ID NO: 1572837 - RNA, 19 nt, Homo sapiens
  misc_RNA (1)...(19): siRNA sense strand
gcucugaaaguggcucauu

SEQ ID NO: 1572838 - RNA, 19 nt, Homo sapiens
  misc_RNA (1)...(19): siRNA sense strand
cuccaucacuccaaucaca

SEQ ID NO: 1572839 - RNA, 19 nt, Homo sapiens
  misc_RNA (1)...(19): siRNA sense strand
uacaaaggaaguaaacaug

SEQ ID NO: 1572840 - RNA, 19 nt, Homo sapiens
  misc_RNA (1)...(19): siRNA sense strand
gaaggucaaagcacuagac

SEQ ID NO: 1572841 - RNA, 19 nt, Homo sapiens
  misc_RNA (1)...(19): siRNA sense strand
gauaugaugaagccuuugg

SEQ ID NO: 1572842 - RNA, 19 nt, Homo sapiens
  misc_RNA (1)...(19): siRNA sense strand
agaucgaguugcagggaaa

SEQ ID NO: 1572843 - RNA, 19 nt, Homo sapiens
  misc_RNA (1)...(19): siRNA sense strand
gaugcagaauggcaguaag

SEQ ID NO: 1572844 - RNA, 19 nt, Homo sapiens
  misc_RNA (1)...(19): siRNA sense strand
cucugaaaguggcucauuu

SEQ ID NO: 1572845 - RNA, 19 nt, Homo sapiens
  misc_RNA (1)...(19): siRNA sense strand
aggcaacaacucugacaaa

SEQ ID NO: 1572846 - RNA, 19 nt, Homo sapiens
  misc_RNA (1)...(19): siRNA sense strand
augcagccuucacuggaua

SEQ ID NO: 1572847 - RNA, 19 nt, Homo sapiens
  misc_RNA (1)...(19): siRNA sense strand
gcggagcccgaguauucua

SEQ ID NO: 1572848 - RNA, 19 nt, Homo sapiens
  misc_RNA (1)...(19): siRNA sense strand
cagaagauaaagggaaguu

SEQ ID NO: 1572849 - RNA, 19 nt, Homo sapiens
  misc_RNA (1)...(19): siRNA sense strand
ccgguacuguuguugaauc

SEQ ID NO: 1572850 - RNA, 19 nt, Homo sapiens
  misc_RNA (1)...(19): siRNA sense strand
ccgaaggcauaaagaucga

SEQ ID NO: 1572851 - RNA, 19 nt, Homo sapiens
  misc_RNA (1)...(19): siRNA sense strand
acacaggaucuaaacacaa

SEQ ID NO: 1572852 - RNA, 19 nt, Homo sapiens
  misc_RNA (1)...(19): siRNA sense strand
gcugcuccaucacuccaau

SEQ ID NO: 1572853 - RNA, 19 nt, Homo sapiens
  misc_RNA (1)...(19): siRNA sense strand
cagaaauucaacucaaaca

SEQ ID NO: 1572854 - RNA, 19 nt, Homo sapiens
  misc_RNA (1)...(19): siRNA sense strand
agccuucacuggauaucaa

SEQ ID NO: 1572855 - RNA, 19 nt, Homo sapiens
  misc_RNA (1)...(19): siRNA sense strand
acacaagaccaugguugaa

SEQ ID NO: 1572856 - RNA, 19 nt, Homo sapiens
  misc_RNA (1)...(19): siRNA sense strand
uguugaaucagaagaagaa

SEQ ID NO: 1572857 - RNA, 19 nt, Homo sapiens
  misc_RNA (1)...(19): siRNA sense strand
agaagauaaagggaaguua

SEQ ID NO: 1572858 - RNA, 19 nt, Homo sapiens
  misc_RNA (1)...(19): siRNA sense strand
aauacagcccuuacaacaa

SEQ ID NO: 1572859 - RNA, 19 nt, Homo sapiens
  misc_RNA (1)...(19): siRNA sense strand
gccaucaagcucugaaagu

SEQ ID NO: 1572860 - RNA, 19 nt, Homo sapiens
  misc_RNA (1)...(19): siRNA sense strand
gagcccgaguauucuagca

SEQ ID NO: 1572861 - RNA, 19 nt, Homo sapiens
  misc_RNA (1)...(19): siRNA sense strand
aacacaggaucuaaacaca

SEQ ID NO: 1572862 - RNA, 19 nt, Homo sapiens
  misc_RNA (1)...(19): siRNA sense strand
ucccgguacuguuguugaa

SEQ ID NO: 1572863 - RNA, 19 nt, Homo sapiens
  misc_RNA (1)...(19): siRNA sense strand
gaacagaucccgugacaaa

SEQ ID NO: 1572864 - RNA, 19 nt, Homo sapiens
  misc_RNA (1)...(19): siRNA sense strand
gcaaaugaguuacuggaua

SEQ ID NO: 1572865 - RNA, 19 nt, Homo sapiens
  misc_RNA (1)...(19): siRNA sense strand
gaagaacacuguaauuaag

SEQ ID NO: 1572866 - RNA, 19 nt, Homo sapiens
  misc_RNA (1)...(19): siRNA sense strand
aaacaaagcugugaaaugu

SEQ ID NO: 1572867 - RNA, 19 nt, Homo sapiens
  misc_RNA (1)...(19): siRNA sense strand
caaaugaguuacuggauaa

SEQ ID NO: 1572868 - RNA, 19 nt, Homo sapiens
  misc_RNA (1)...(19): siRNA sense strand
gagaagaacacuguaauua

SEQ ID NO: 1572869 - RNA, 19 nt, Homo sapiens
  misc_RNA (1)...(19): siRNA sense strand
gaugauaagcggaauaaua

SEQ ID NO: 1572870 - RNA, 19 nt, Homo sapiens
  misc_RNA (1)...(19): siRNA sense strand
guagauaucccucuuguaa

SEQ ID NO: 1572871 - RNA, 19 nt, Homo sapiens
  misc_RNA (1)...(19): siRNA sense strand
ccacagaagugcacucauu

SEQ ID NO: 1572872 - RNA, 19 nt, Homo sapiens
  misc_RNA (1)...(19): siRNA sense strand
cgagaaagcuacaguggaa

SEQ ID NO: 1572873 - RNA, 19 nt, Homo sapiens
  misc_RNA (1)...(19): siRNA sense strand
auaaagaacugcagacauu

SEQ ID NO: 1572874 - RNA, 19 nt, Homo sapiens
  misc_RNA (1)...(19): siRNA sense strand
gaauuuauguucuccuaug

SEQ ID NO: 1572875 - RNA, 19 nt, Homo sapiens
  misc_RNA (1)...(19): siRNA sense strand
uaaagagucugauagugaa

SEQ ID NO: 1572876 - RNA, 19 nt, Homo sapiens
  misc_RNA (1)...(19): siRNA sense strand
cugaauacauggauagaua

SEQ ID NO: 1572877 - RNA, 19 nt, Homo sapiens
  misc_RNA (1)...(19): siRNA sense strand
cagaaagggugcuucauug

SEQ ID NO: 1572878 - RNA, 19 nt, Homo sapiens
  misc_RNA (1)...(19): siRNA sense strand
ucgaugaagugaaguauuu

SEQ ID NO: 1572879 - RNA, 19 nt, Homo sapiens
  misc_RNA (1)...(19): siRNA sense strand
gagaaaggccugacuauac

SEQ ID NO: 1572880 - RNA, 19 nt, Homo sapiens
  misc_RNA (1)...(19): siRNA sense strand
gaucaaggcuuuuaggaaa

SEQ ID NO: 1572881 - RNA, 19 nt, Homo sapiens
  misc_RNA (1)...(19): siRNA sense strand
cgacggcccugccuaagaa

SEQ ID NO: 1572882 - RNA, 19 nt, Homo sapiens
  misc_RNA (1)...(19): siRNA sense strand
gcucagaugauauccauaa

SEQ ID NO: 1572883 - RNA, 19 nt, Homo sapiens
  misc_RNA (1)...(19): siRNA sense strand
guuagggaguguucagaua

SEQ ID NO: 1572884 - RNA, 19 nt, Homo sapiens
  misc_RNA (1)...(19): siRNA sense strand
gaacgucaaucagaaagca

SEQ ID NO: 1572885 - RNA, 19 nt, Homo sapiens
  misc_RNA (1)...(19): siRNA sense strand
gugaagaacuggaaauaac

SEQ ID NO: 1572886 - RNA, 19 nt, Homo sapiens
  misc_RNA (1)...(19): siRNA sense strand
gaaccaaucggaccaagau

SEQ ID NO: 1572887 - RNA, 19 nt, Homo sapiens
  misc_RNA (1)...(19): siRNA sense strand
ccggauaucaugcacauua

SEQ ID NO: 1572888 - RNA, 19 nt, Homo sapiens
  misc_RNA (1)...(19): siRNA sense strand
aaaucaagaucaaggcuuu

SEQ ID NO: 1572889 - RNA, 19 nt, Homo sapiens
  misc_RNA (1)...(19): siRNA sense strand
guuaaaaccucuucagaaa

SEQ ID NO: 1572890 - RNA, 19 nt, Homo sapiens
  misc_RNA (1)...(19): siRNA sense strand
ggaccaagauaauucaacu

SEQ ID NO: 1572891 - RNA, 19 nt, Homo sapiens
  misc_RNA (1)...(19): siRNA sense strand
ucgcaucucuauaaacaaa

SEQ ID NO: 1572892 - RNA, 19 nt, Homo sapiens
  misc_RNA (1)...(19): siRNA sense strand
guaauuaaguucgaugaag

SEQ ID NO: 1572893 - RNA, 19 nt, Homo sapiens
  misc_RNA (1)...(19): siRNA sense strand
agauaucccucuuguaaau

SEQ ID NO: 1572894 - RNA, 19 nt, Homo sapiens
  misc_RNA (1)...(19): siRNA sense strand
uuaaagagucugauaguga

SEQ ID NO: 1572895 - RNA, 19 nt, Homo sapiens
  misc_RNA (1)...(19): siRNA sense strand
gaguagauaucccucuugu

SEQ ID NO: 1572896 - RNA, 19 nt, Homo sapiens
  misc_RNA (1)...(19): siRNA sense strand
uaaguucgaugaagugaag

SEQ ID NO: 1572897 - RNA, 19 nt, Homo sapiens
  misc_RNA (1)...(19): siRNA sense strand
ggaaauaacacaggagaca

SEQ ID NO: 1572898 - RNA, 19 nt, Homo sapiens
  misc_RNA (1)...(19): siRNA sense strand
aaagcagacucaucucuau

SEQ ID NO: 1572899 - RNA, 19 nt, Homo sapiens
  misc_RNA (1)...(19): siRNA sense strand
caacugcugaugcuucuaa

SEQ ID NO: 1572900 - RNA, 19 nt, Homo sapiens
  misc_RNA (1)...(19): siRNA sense strand
gaugagaagaacacuguaa

SEQ ID NO: 1572901 - RNA, 19 nt, Homo sapiens
  misc_RNA (1)...(19): siRNA sense strand
uaaacaaagcugugaaaug

SEQ ID NO: 1572902 - RNA, 19 nt, Homo sapiens
  misc_RNA (1)...(19): siRNA sense strand
aaaacgugcuuucuuguua

SEQ ID NO: 1572903 - RNA, 19 nt, Homo sapiens
  misc_RNA (1)...(19): siRNA sense strand
aagcuacaguggaaaguuu

SEQ ID NO: 1572904 - RNA, 19 nt, Homo sapiens
  misc_RNA (1)...(19): siRNA sense strand
ggauagauaaagcuaacua

SEQ ID NO: 1572905 - RNA, 19 nt, Homo sapiens
  misc_RNA (1)...(19): siRNA sense strand
guucuccuauggaaacuuu

SEQ ID NO: 1572906 - RNA, 19 nt, Homo sapiens
  misc_RNA (1)...(19): siRNA sense strand
aagaggagcuugaaaauau

SEQ ID NO: 1572907 - RNA, 19 nt, Homo sapiens
  misc_RNA (1)...(19): siRNA sense strand
uaacacaggagacaccaaa

SEQ ID NO: 1572908 - RNA, 19 nt, Homo sapiens
  misc_RNA (1)...(19): siRNA sense strand
ucaucaggcuuaguucaua

SEQ ID NO: 1572909 - RNA, 19 nt, Homo sapiens
  misc_RNA (1)...(19): siRNA sense strand
ucagaaagggugcuucauu

SEQ ID NO: 1572910 - RNA, 19 nt, Homo sapiens
  misc_RNA (1)...(19): siRNA sense strand
gauacaucuuuaugaggua

SEQ ID NO: 1572911 - RNA, 19 nt, Homo sapiens
  misc_RNA (1)...(19): siRNA sense strand
acauaaggauucugaggaa

SEQ ID NO: 1572912 - RNA, 19 nt, Homo sapiens
  misc_RNA (1)...(19): siRNA sense strand
cacaggagacaccaaauuu

SEQ ID NO: 1572913 - RNA, 19 nt, Homo sapiens
  misc_RNA (1)...(19): siRNA sense strand
ugagaaaggccugacuaua

SEQ ID NO: 1572914 - RNA, 19 nt, Homo sapiens
  misc_RNA (1)...(19): siRNA sense strand
ugaggaagcugaaacuacu

SEQ ID NO: 1572915 - RNA, 19 nt, Homo sapiens
  misc_RNA (1)...(19): siRNA sense strand
gaaaaguaaucaaccugaa

SEQ ID NO: 1572916 - RNA, 19 nt, Homo sapiens
  misc_RNA (1)...(19): siRNA sense strand
acaaagcugugaaauguac

SEQ ID NO: 1572917 - RNA, 19 nt, Homo sapiens
  misc_RNA (1)...(19): siRNA sense strand
cagaugauauccauaacca

SEQ ID NO: 1572918 - RNA, 19 nt, Homo sapiens
  misc_RNA (1)...(19): siRNA sense strand
gaaagcaugccagacagaa

SEQ ID NO: 1572919 - RNA, 19 nt, Homo sapiens
  misc_RNA (1)...(19): siRNA sense strand
gggaaaggcuggaaaagau

SEQ ID NO: 1572920 - RNA, 19 nt, Homo sapiens
  misc_RNA (1)...(19): siRNA sense strand
ggagguggaauuuauguuc

SEQ ID NO: 1572921 - RNA, 19 nt, Homo sapiens
  misc_RNA (1)...(19): siRNA sense strand
gcagacauuuuaugccuaa

SEQ ID NO: 1572922 - RNA, 19 nt, Homo sapiens
  misc_RNA (1)...(19): siRNA sense strand
uauggaaacuuugguuaug

SEQ ID NO: 1572923 - RNA, 19 nt, Homo sapiens
  misc_RNA (1)...(19): siRNA sense strand
ggcuggagguggaauuuau

SEQ ID NO: 1572924 - RNA, 19 nt, Homo sapiens
  misc_RNA (1)...(19): siRNA sense strand
gcauucauauaaagaacug

SEQ ID NO: 1572925 - RNA, 19 nt, Homo sapiens
  misc_RNA (1)...(19): siRNA sense strand
uuucaggauuguucagaua

SEQ ID NO: 1572926 - RNA, 19 nt, Homo sapiens
  misc_RNA (1)...(19): siRNA sense strand
gaagaggagcuugaaaaua

SEQ ID NO: 1572927 - RNA, 19 nt, Homo sapiens
  misc_RNA (1)...(19): siRNA sense strand
acugagccauccauguuua

SEQ ID NO: 1572928 - RNA, 19 nt, Homo sapiens
  misc_RNA (1)...(19): siRNA sense strand
cggauaucaugcacauuaa

SEQ ID NO: 1572929 - RNA, 19 nt, Homo sapiens
  misc_RNA (1)...(19): siRNA sense strand
caccacagacaguagaaua

SEQ ID NO: 1572930 - RNA, 19 nt, Homo sapiens
  misc_RNA (1)...(19): siRNA sense strand
caucaggcuuaguucauau

SEQ ID NO: 1572931 - RNA, 19 nt, Homo sapiens
  misc_RNA (1)...(19): siRNA sense strand
ucaggauuguucagauaaa

SEQ ID NO: 1572932 - RNA, 19 nt, Homo sapiens
  misc_RNA (1)...(19): siRNA sense strand
uugaagagguccaaguguu

SEQ ID NO: 1572933 - RNA, 19 nt, Homo sapiens
  misc_RNA (1)...(19): siRNA sense strand
ucagaaagcaugccagaca

SEQ ID NO: 1572934 - RNA, 19 nt, Homo sapiens
  misc_RNA (1)...(19): siRNA sense strand
aagaacagaucccgugaca

SEQ ID NO: 1572935 - RNA, 19 nt, Homo sapiens
  misc_RNA (1)...(19): siRNA sense strand
ugagaagaacacuguaauu

SEQ ID NO: 1572936 - RNA, 19 nt, Homo sapiens
  misc_RNA (1)...(19): siRNA sense strand
uuacugagccauccauguu

SEQ ID NO: 1572937 - RNA, 19 nt, Homo sapiens
  misc_RNA (1)...(19): siRNA sense strand
ggauaucaugcacauuaaa

SEQ ID NO: 1572938 - RNA, 19 nt, Homo sapiens
  misc_RNA (1)...(19): siRNA sense strand
uggaauuuauguucuccua

SEQ ID NO: 1572939 - RNA, 19 nt, Homo sapiens
  misc_RNA (1)...(19): siRNA sense strand
gagguggaauuuauguucu

SEQ ID NO: 1572940 - RNA, 19 nt, Homo sapiens
  misc_RNA (1)...(19): siRNA sense strand
uaaagaacugcagacauuu

SEQ ID NO: 1572941 - RNA, 19 nt, Homo sapiens
  misc_RNA (1)...(19): siRNA sense strand
aauaaaagcaggcagaaua

SEQ ID NO: 1572942 - RNA, 19 nt, Homo sapiens
  misc_RNA (1)...(19): siRNA sense strand
gaaacuacugcaaaugagu

SEQ ID NO: 1572943 - RNA, 19 nt, Homo sapiens
  misc_RNA (1)...(19): siRNA sense strand
ggaaacuaauauagaugag

SEQ ID NO: 1572944 - RNA, 19 nt, Homo sapiens
  misc_RNA (1)...(19): siRNA sense strand
gagccauccauguuuauga

SEQ ID NO: 1572945 - RNA, 19 nt, Homo sapiens
  misc_RNA (1)...(19): siRNA sense strand
gaaacuuugguuauggauu

SEQ ID NO: 1572946 - RNA, 19 nt, Homo sapiens
  misc_RNA (1)...(19): siRNA sense strand
acacaggagacaccaaauu

SEQ ID NO: 1572947 - RNA, 19 nt, Homo sapiens
  misc_RNA (1)...(19): siRNA sense strand
cauaaggauucugaggaaa

SEQ ID NO: 1572948 - RNA, 19 nt, Homo sapiens
  misc_RNA (1)...(19): siRNA sense strand
aaacgugcuuucuuguuag

SEQ ID NO: 1572949 - RNA, 19 nt, Homo sapiens
  misc_RNA (1)...(19): siRNA sense strand
guacagguucccagacguu

SEQ ID NO: 1572950 - RNA, 19 nt, Homo sapiens
  misc_RNA (1)...(19): siRNA sense strand
gauaucaugcacauuaaag

SEQ ID NO: 1572951 - RNA, 19 nt, Homo sapiens
  misc_RNA (1)...(19): siRNA sense strand
gaaaucugaauacauggau

SEQ ID NO: 1572952 - RNA, 19 nt, Homo sapiens
  misc_RNA (1)...(19): siRNA sense strand
ugaagagguccaaguguug

SEQ ID NO: 1572953 - RNA, 19 nt, Homo sapiens
  misc_RNA (1)...(19): siRNA sense strand
ucauucgcaucucuauaaa

SEQ ID NO: 1572954 - RNA, 19 nt, Homo sapiens
  misc_RNA (1)...(19): siRNA sense strand
augaguuacuggauaauga

SEQ ID NO: 1572955 - RNA, 19 nt, Homo sapiens
  misc_RNA (1)...(19): siRNA sense strand
cugaaacuacugcaaauga

SEQ ID NO: 1572956 - RNA, 19 nt, Homo sapiens
  misc_RNA (1)...(19): siRNA sense strand
aaaguaaucaaccugaaga

SEQ ID NO: 1572957 - RNA, 19 nt, Homo sapiens
  misc_RNA (1)...(19): siRNA sense strand
gaccugaauguuacuguug

SEQ ID NO: 1572958 - RNA, 19 nt, Homo sapiens
  misc_RNA (1)...(19): siRNA sense strand
guuuacaagucgucgaaug

SEQ ID NO: 1572959 - RNA, 19 nt, Homo sapiens
  misc_RNA (1)...(19): siRNA sense strand
ugaaacuacugcaaaugag

SEQ ID NO: 1572960 - RNA, 19 nt, Homo sapiens
  misc_RNA (1)...(19): siRNA sense strand
ggugaacgucaaucagaaa

SEQ ID NO: 1572961 - RNA, 19 nt, Homo sapiens
  misc_RNA (1)...(19): siRNA sense strand
acaagucgucgaaugguuu

SEQ ID NO: 1572962 - RNA, 19 nt, Homo sapiens
  misc_RNA (1)...(19): siRNA sense strand
guuaacaagcaacgagaaa

SEQ ID NO: 1572963 - RNA, 19 nt, Homo sapiens
  misc_RNA (1)...(19): siRNA sense strand
caacaaagccuggcaccuu

SEQ ID NO: 1572964 - RNA, 19 nt, Homo sapiens
  misc_RNA (1)...(19): siRNA sense strand
gaaggccaccugccacugu

SEQ ID NO: 1572965 - RNA, 19 nt, Homo sapiens
  misc_RNA (1)...(19): siRNA sense strand
gcagggcaggccauccaua

SEQ ID NO: 1572966 - RNA, 19 nt, Homo sapiens
  misc_RNA (1)...(19): siRNA sense strand
gcagcugccugaguacaag

SEQ ID NO: 1572967 - RNA, 19 nt, Homo sapiens
  misc_RNA (1)...(19): siRNA sense strand
gaugaccccucgucucuga

SEQ ID NO: 1572968 - RNA, 19 nt, Homo sapiens
  misc_RNA (1)...(19): siRNA sense strand
ccacauggagcccuuccuu

SEQ ID NO: 1572969 - RNA, 19 nt, Homo sapiens
  misc_RNA (1)...(19): siRNA sense strand
gcaagagugcgcugaccau

SEQ ID NO: 1572970 - RNA, 19 nt, Homo sapiens
  misc_RNA (1)...(19): siRNA sense strand
gugccuggcugucugugau

SEQ ID NO: 1572971 - RNA, 19 nt, Homo sapiens
  misc_RNA (1)...(19): siRNA sense strand
cgucuucgcucucgaugac

SEQ ID NO: 1572972 - RNA, 19 nt, Homo sapiens
  misc_RNA (1)...(19): siRNA sense strand
agagugcgcugaccaucca

SEQ ID NO: 1572973 - RNA, 19 nt, Homo sapiens
  misc_RNA (1)...(19): siRNA sense strand
ggaguugacccuggacagu

SEQ ID NO: 1572974 - RNA, 19 nt, Homo sapiens
  misc_RNA (1)...(19): siRNA sense strand
gaccacugcuggagaugcu

SEQ ID NO: 1572975 - RNA, 19 nt, Homo sapiens
  misc_RNA (1)...(19): siRNA sense strand
gggcaacaagugugaccuu

SEQ ID NO: 1572976 - RNA, 19 nt, Homo sapiens
  misc_RNA (1)...(19): siRNA sense strand
gaagacccggcaccagaag

SEQ ID NO: 1572977 - RNA, 19 nt, Homo sapiens
  misc_RNA (1)...(19): siRNA sense strand
agaagacccggcaccagaa

SEQ ID NO: 1572978 - RNA, 19 nt, Homo sapiens
  misc_RNA (1)...(19): siRNA sense strand
guggagaccucggccaaaa

SEQ ID NO: 1572979 - RNA, 19 nt, Homo sapiens
  misc_RNA (1)...(19): siRNA sense strand
gcagugcuacuacgucuuc

SEQ ID NO: 1572980 - RNA, 19 nt, Homo sapiens
  misc_RNA (1)...(19): siRNA sense strand
ucaacaagaucaccuucuc

SEQ ID NO: 1572981 - RNA, 19 nt, Homo sapiens
  misc_RNA (1)...(19): siRNA sense strand
ggcacacggucaacaagau

SEQ ID NO: 1572982 - RNA, 19 nt, Homo sapiens
  misc_RNA (1)...(19): siRNA sense strand
ggaaguacgccagcagcuu

SEQ ID NO: 1572983 - RNA, 19 nt, Homo sapiens
  misc_RNA (1)...(19): siRNA sense strand
cgaccaaggccuauacagu

SEQ ID NO: 1572984 - RNA, 19 nt, Homo sapiens
  misc_RNA (1)...(19): siRNA sense strand
ccagugggacuucggauca

SEQ ID NO: 1572985 - RNA, 19 nt, Homo sapiens
  misc_RNA (1)...(19): siRNA sense strand
gcacacggucaacaagauc

SEQ ID NO: 1572986 - RNA, 19 nt, Homo sapiens
  misc_RNA (1)...(19): siRNA sense strand
gcagagugaagggagcaaa

SEQ ID NO: 1572987 - RNA, 19 nt, Homo sapiens
  misc_RNA (1)...(19): siRNA sense strand
ggggaucucugcagcaauc

SEQ ID NO: 1572988 - RNA, 19 nt, Homo sapiens
  misc_RNA (1)...(19): siRNA sense strand
gcagugcuacuacgucuuc

SEQ ID NO: 1572989 - RNA, 19 nt, Homo sapiens
  misc_RNA (1)...(19): siRNA sense strand
ucaacaagaucaccuucuc

SEQ ID NO: 1572990 - RNA, 19 nt, Homo sapiens
  misc_RNA (1)...(19): siRNA sense strand
ggcacacggucaacaagau

SEQ ID NO: 1572991 - RNA, 19 nt, Homo sapiens
  misc_RNA (1)...(19): siRNA sense strand
ggaaguacgccagcagcuu

SEQ ID NO: 1572992 - RNA, 19 nt, Homo sapiens
  misc_RNA (1)...(19): siRNA sense strand
cgaccaaggccuauacagu

SEQ ID NO: 1572993 - RNA, 19 nt, Homo sapiens
  misc_RNA (1)...(19): siRNA sense strand
ccagugggacuucggauca

SEQ ID NO: 1572994 - RNA, 19 nt, Homo sapiens
  misc_RNA (1)...(19): siRNA sense strand
gcacacggucaacaagauc

SEQ ID NO: 1572995 - RNA, 19 nt, Homo sapiens
  misc_RNA (1)...(19): siRNA sense strand
gcagagugaagggagcaaa

SEQ ID NO: 1572996 - RNA, 19 nt, Homo sapiens
  misc_RNA (1)...(19): siRNA sense strand
ggggaucucugcagcaauc

SEQ ID NO: 1572997 - RNA, 19 nt, Homo sapiens
  misc_RNA (1)...(19): siRNA sense strand
gcagugcuacuacgucuuc

SEQ ID NO: 1572998 - RNA, 19 nt, Homo sapiens
  misc_RNA (1)...(19): siRNA sense strand
ucaacaagaucaccuucuc

SEQ ID NO: 1572999 - RNA, 19 nt, Homo sapiens
  misc_RNA (1)...(19): siRNA sense strand
ggcacacggucaacaagau

SEQ ID NO: 1573000 - RNA, 19 nt, Homo sapiens
  misc_RNA (1)...(19): siRNA sense strand
ggaaguacgccagcagcuu

SEQ ID NO: 1573001 - RNA, 19 nt, Homo sapiens
  misc_RNA (1)...(19): siRNA sense strand
cgaccaaggccuauacagu

SEQ ID NO: 1573002 - RNA, 19 nt, Homo sapiens
  misc_RNA (1)...(19): siRNA sense strand
ccagugggacuucggauca

SEQ ID NO: 1573003 - RNA, 19 nt, Homo sapiens
  misc_RNA (1)...(19): siRNA sense strand
gcacacggucaacaagauc

SEQ ID NO: 1573004 - RNA, 19 nt, Homo sapiens
  misc_RNA (1)...(19): siRNA sense strand
gcagagugaagggagcaaa

SEQ ID NO: 1573005 - RNA, 19 nt, Homo sapiens
  misc_RNA (1)...(19): siRNA sense strand
ggggaucucugcagcaauc

SEQ ID NO: 1573006 - RNA, 19 nt, Homo sapiens
  misc_RNA (1)...(19): siRNA sense strand
caaaugaugugaugguuaa

SEQ ID NO: 1573007 - RNA, 19 nt, Homo sapiens
  misc_RNA (1)...(19): siRNA sense strand
ccucaaagcucuaaugaau

SEQ ID NO: 1573008 - RNA, 19 nt, Homo sapiens
  misc_RNA (1)...(19): siRNA sense strand
gacugggacucuucaauua

SEQ ID NO: 1573009 - RNA, 19 nt, Homo sapiens
  misc_RNA (1)...(19): siRNA sense strand
gcaaagaacaggaagaaga

SEQ ID NO: 1573010 - RNA, 19 nt, Homo sapiens
  misc_RNA (1)...(19): siRNA sense strand
cugcggaucuggccaauua

SEQ ID NO: 1573011 - RNA, 19 nt, Homo sapiens
  misc_RNA (1)...(19): siRNA sense strand
ggagacaacuuaguagaga

SEQ ID NO: 1573012 - RNA, 19 nt, Homo sapiens
  misc_RNA (1)...(19): siRNA sense strand
ucaaagcucuaaugaauca

SEQ ID NO: 1573013 - RNA, 19 nt, Homo sapiens
  misc_RNA (1)...(19): siRNA sense strand
gaugugcaccuccuuaaua

SEQ ID NO: 1573014 - RNA, 19 nt, Homo sapiens
  misc_RNA (1)...(19): siRNA sense strand
gaagaucauuucagcacuu

SEQ ID NO: 1573015 - RNA, 19 nt, Homo sapiens
  misc_RNA (1)...(19): siRNA sense strand
ucacugcacuccauacuga

SEQ ID NO: 1573016 - RNA, 19 nt, Homo sapiens
  misc_RNA (1)...(19): siRNA sense strand
gcacaaagaggcagugaug

SEQ ID NO: 1573017 - RNA, 19 nt, Homo sapiens
  misc_RNA (1)...(19): siRNA sense strand
gcagucacuuccaguauug

SEQ ID NO: 1573018 - RNA, 19 nt, Homo sapiens
  misc_RNA (1)...(19): siRNA sense strand
ggacugggacucuucaauu

SEQ ID NO: 1573019 - RNA, 19 nt, Homo sapiens
  misc_RNA (1)...(19): siRNA sense strand
gguguuccaugucccguua

SEQ ID NO: 1573020 - RNA, 19 nt, Homo sapiens
  misc_RNA (1)...(19): siRNA sense strand
gaucagaugccuaguguca

SEQ ID NO: 1573021 - RNA, 19 nt, Homo sapiens
  misc_RNA (1)...(19): siRNA sense strand
cagauuccguugauauuga

SEQ ID NO: 1573022 - RNA, 19 nt, Homo sapiens
  misc_RNA (1)...(19): siRNA sense strand
gcugauccuucucauauau

SEQ ID NO: 1573023 - RNA, 19 nt, Homo sapiens
  misc_RNA (1)...(19): siRNA sense strand
caauguccguuguguuaaa

SEQ ID NO: 1573024 - RNA, 19 nt, Homo sapiens
  misc_RNA (1)...(19): siRNA sense strand
gaagcaaguuguggaggaa

SEQ ID NO: 1573025 - RNA, 19 nt, Homo sapiens
  misc_RNA (1)...(19): siRNA sense strand
uggaugaacucuuuacuuc

SEQ ID NO: 1573026 - RNA, 19 nt, Homo sapiens
  misc_RNA (1)...(19): siRNA sense strand
cacagucucugaagugaaa

SEQ ID NO: 1573027 - RNA, 19 nt, Homo sapiens
  misc_RNA (1)...(19): siRNA sense strand
gagaaaaccugccaaucaa

SEQ ID NO: 1573028 - RNA, 19 nt, Homo sapiens
  misc_RNA (1)...(19): siRNA sense strand
aagcuuuacugaacacuaa

SEQ ID NO: 1573029 - RNA, 19 nt, Homo sapiens
  misc_RNA (1)...(19): siRNA sense strand
cagcucauguccuauauuc

SEQ ID NO: 1573030 - RNA, 19 nt, Homo sapiens
  misc_RNA (1)...(19): siRNA sense strand
gaauggaugggcaacauga

SEQ ID NO: 1573031 - RNA, 19 nt, Homo sapiens
  misc_RNA (1)...(19): siRNA sense strand
cagaucagaugccuagugu

SEQ ID NO: 1573032 - RNA, 19 nt, Homo sapiens
  misc_RNA (1)...(19): siRNA sense strand
gugugaacauuuaggagua

SEQ ID NO: 1573033 - RNA, 19 nt, Homo sapiens
  misc_RNA (1)...(19): siRNA sense strand
gggacaacuuucuggcuuu

SEQ ID NO: 1573034 - RNA, 19 nt, Homo sapiens
  misc_RNA (1)...(19): siRNA sense strand
gaacugcugauccuucuca

SEQ ID NO: 1573035 - RNA, 19 nt, Homo sapiens
  misc_RNA (1)...(19): siRNA sense strand
gagaagcugugugaaugga

SEQ ID NO: 1573036 - RNA, 19 nt, Homo sapiens
  misc_RNA (1)...(19): siRNA sense strand
gaacaaccucaaagcucua

SEQ ID NO: 1573037 - RNA, 19 nt, Homo sapiens
  misc_RNA (1)...(19): siRNA sense strand
gaaguucggagacaucuag

SEQ ID NO: 1573038 - RNA, 19 nt, Homo sapiens
  misc_RNA (1)...(19): siRNA sense strand
gagacaacuuaguagagaa

SEQ ID NO: 1573039 - RNA, 19 nt, Homo sapiens
  misc_RNA (1)...(19): siRNA sense strand
gaggagaagcugugugaau

SEQ ID NO: 1573040 - RNA, 19 nt, Homo sapiens
  misc_RNA (1)...(19): siRNA sense strand
ugugaugguuaacaugaua

SEQ ID NO: 1573041 - RNA, 19 nt, Homo sapiens
  misc_RNA (1)...(19): siRNA sense strand
ggacuacagcccugaggaa

SEQ ID NO: 1573042 - RNA, 19 nt, Homo sapiens
  misc_RNA (1)...(19): siRNA sense strand
ucgagcagcuggaggagaa

SEQ ID NO: 1573043 - RNA, 19 nt, Homo sapiens
  misc_RNA (1)...(19): siRNA sense strand
ggaggaaaauuauaaugug

SEQ ID NO: 1573044 - RNA, 19 nt, Homo sapiens
  misc_RNA (1)...(19): siRNA sense strand
uggcucaggucuucuguga

SEQ ID NO: 1573045 - RNA, 19 nt, Homo sapiens
  misc_RNA (1)...(19): siRNA sense strand
cuggagagcucacgguaga

SEQ ID NO: 1573046 - RNA, 19 nt, Homo sapiens
  misc_RNA (1)...(19): siRNA sense strand
ggucaucgcugcggaucug

SEQ ID NO: 1573047 - RNA, 19 nt, Homo sapiens
  misc_RNA (1)...(19): siRNA sense strand
gcaaguuguggaggaaaua

SEQ ID NO: 1573048 - RNA, 19 nt, Homo sapiens
  misc_RNA (1)...(19): siRNA sense strand
uuacuucacuucgggauau

SEQ ID NO: 1573049 - RNA, 19 nt, Homo sapiens
  misc_RNA (1)...(19): siRNA sense strand
gcaccaggcugucuuucac

SEQ ID NO: 1573050 - RNA, 19 nt, Homo sapiens
  misc_RNA (1)...(19): siRNA sense strand
ucauggagacaacuuagua

SEQ ID NO: 1573051 - RNA, 19 nt, Homo sapiens
  misc_RNA (1)...(19): siRNA sense strand
caaagaggcagugauggaa

SEQ ID NO: 1573052 - RNA, 19 nt, Homo sapiens
  misc_RNA (1)...(19): siRNA sense strand
ugccguggaugaacucuuu

SEQ ID NO: 1573053 - RNA, 19 nt, Homo sapiens
  misc_RNA (1)...(19): siRNA sense strand
ccucacagcuaaucauguc

SEQ ID NO: 1573054 - RNA, 19 nt, Homo sapiens
  misc_RNA (1)...(19): siRNA sense strand
ccucacugaucuccuuaaa

SEQ ID NO: 1573055 - RNA, 19 nt, Homo sapiens
  misc_RNA (1)...(19): siRNA sense strand
agcaauguccguuguguua

SEQ ID NO: 1573056 - RNA, 19 nt, Homo sapiens
  misc_RNA (1)...(19): siRNA sense strand
ucggagacaucuaguggaa

SEQ ID NO: 1573057 - RNA, 19 nt, Homo sapiens
  misc_RNA (1)...(19): siRNA sense strand
acaaaugaugugaugguua

SEQ ID NO: 1573058 - RNA, 19 nt, Homo sapiens
  misc_RNA (1)...(19): siRNA sense strand
aggagaagcugugugaaug

SEQ ID NO: 1573059 - RNA, 19 nt, Homo sapiens
  misc_RNA (1)...(19): siRNA sense strand
gacaaagaccugugugaag

SEQ ID NO: 1573060 - RNA, 19 nt, Homo sapiens
  misc_RNA (1)...(19): siRNA sense strand
ggacuggccacagcucaaa

SEQ ID NO: 1573061 - RNA, 19 nt, Homo sapiens
  misc_RNA (1)...(19): siRNA sense strand
gcagaucagaugccuagug

SEQ ID NO: 1573062 - RNA, 19 nt, Homo sapiens
  misc_RNA (1)...(19): siRNA sense strand
gaagcuuuacugaacacua

SEQ ID NO: 1573063 - RNA, 19 nt, Homo sapiens
  misc_RNA (1)...(19): siRNA sense strand
ggacagaacccuggaucuc

SEQ ID NO: 1573064 - RNA, 19 nt, Homo sapiens
  misc_RNA (1)...(19): siRNA sense strand
gcaauguccguuguguuaa

SEQ ID NO: 1573065 - RNA, 19 nt, Homo sapiens
  misc_RNA (1)...(19): siRNA sense strand
ggucacagucucugaagug

SEQ ID NO: 1573066 - RNA, 19 nt, Homo sapiens
  misc_RNA (1)...(19): siRNA sense strand
gcuguagguuccuuaaguc

SEQ ID NO: 1573067 - RNA, 19 nt, Homo sapiens
  misc_RNA (1)...(19): siRNA sense strand
gaggccagauuccguugau

SEQ ID NO: 1573068 - RNA, 19 nt, Homo sapiens
  misc_RNA (1)...(19): siRNA sense strand
ggaagcggcaagcagagaa

SEQ ID NO: 1573069 - RNA, 19 nt, Homo sapiens
  misc_RNA (1)...(19): siRNA sense strand
cgcagucacuuccaguauu

SEQ ID NO: 1573070 - RNA, 19 nt, Homo sapiens
  misc_RNA (1)...(19): siRNA sense strand
ggaggaguguuuugcugua

SEQ ID NO: 1573071 - RNA, 19 nt, Homo sapiens
  misc_RNA (1)...(19): siRNA sense strand
gaagccaggaacccaggua

SEQ ID NO: 1573072 - RNA, 19 nt, Homo sapiens
  misc_RNA (1)...(19): siRNA sense strand
cuuauaagccauuguugaa

SEQ ID NO: 1573073 - RNA, 19 nt, Homo sapiens
  misc_RNA (1)...(19): siRNA sense strand
cuacagcccugaggaacug

SEQ ID NO: 1573074 - RNA, 19 nt, Homo sapiens
  misc_RNA (1)...(19): siRNA sense strand
gaagcggcaagcagagaaa

SEQ ID NO: 1573075 - RNA, 19 nt, Homo sapiens
  misc_RNA (1)...(19): siRNA sense strand
caucuuauaagccauuguu

SEQ ID NO: 1573076 - RNA, 19 nt, Homo sapiens
  misc_RNA (1)...(19): siRNA sense strand
aaacuggauuuagcauguu

SEQ ID NO: 1573077 - RNA, 19 nt, Homo sapiens
  misc_RNA (1)...(19): siRNA sense strand
ggccagauuccguugauau

SEQ ID NO: 1573078 - RNA, 19 nt, Homo sapiens
  misc_RNA (1)...(19): siRNA sense strand
gacagaacccuggaucuca

SEQ ID NO: 1573079 - RNA, 19 nt, Homo sapiens
  misc_RNA (1)...(19): siRNA sense strand
ccugagcuguuauuugcaa

SEQ ID NO: 1573080 - RNA, 19 nt, Homo sapiens
  misc_RNA (1)...(19): siRNA sense strand
gaucuuguggcaucguuga

SEQ ID NO: 1573081 - RNA, 19 nt, Homo sapiens
  misc_RNA (1)...(19): siRNA sense strand
ucacugaucuccuuaaaac

SEQ ID NO: 1573082 - RNA, 19 nt, Homo sapiens
  misc_RNA (1)...(19): siRNA sense strand
ggaugggcaacaugaacua

SEQ ID NO: 1573083 - RNA, 19 nt, Homo sapiens
  misc_RNA (1)...(19): siRNA sense strand
cugcugauccuucucauau

SEQ ID NO: 1573084 - RNA, 19 nt, Homo sapiens
  misc_RNA (1)...(19): siRNA sense strand
ggacaacuuucuggcuuuu

SEQ ID NO: 1573085 - RNA, 19 nt, Homo sapiens
  misc_RNA (1)...(19): siRNA sense strand
caaccucaaagcucuaaug

SEQ ID NO: 1573086 - RNA, 19 nt, Homo sapiens
  misc_RNA (1)...(19): siRNA sense strand
acaaagaggcagugaugga

SEQ ID NO: 1573087 - RNA, 19 nt, Homo sapiens
  misc_RNA (1)...(19): siRNA sense strand
cggccgagguguuccaugu

SEQ ID NO: 1573088 - RNA, 19 nt, Homo sapiens
  misc_RNA (1)...(19): siRNA sense strand
gugaauggaugggcaacau

SEQ ID NO: 1573089 - RNA, 19 nt, Homo sapiens
  misc_RNA (1)...(19): siRNA sense strand
agaccugugugaagcagaa

SEQ ID NO: 1573090 - RNA, 19 nt, Homo sapiens
  misc_RNA (1)...(19): siRNA sense strand
agacaaagaccugugugaa

SEQ ID NO: 1573091 - RNA, 19 nt, Homo sapiens
  misc_RNA (1)...(19): siRNA sense strand
guucgagcccgacgcaauu

SEQ ID NO: 1573092 - RNA, 19 nt, Homo sapiens
  misc_RNA (1)...(19): siRNA sense strand
caaagaacaggaagaagac

SEQ ID NO: 1573093 - RNA, 19 nt, Homo sapiens
  misc_RNA (1)...(19): siRNA sense strand
ggucuucugugaggaaucu

SEQ ID NO: 1573094 - RNA, 19 nt, Homo sapiens
  misc_RNA (1)...(19): siRNA sense strand
gaguacgggaggaguguuu

SEQ ID NO: 1573095 - RNA, 19 nt, Homo sapiens
  misc_RNA (1)...(19): siRNA sense strand
caguuuaagucuguauaug

SEQ ID NO: 1573096 - RNA, 19 nt, Homo sapiens
  misc_RNA (1)...(19): siRNA sense strand
gcucauguccuauauucag

SEQ ID NO: 1573097 - RNA, 19 nt, Homo sapiens
  misc_RNA (1)...(19): siRNA sense strand
gaaaaccugccaaucaaga

SEQ ID NO: 1573098 - RNA, 19 nt, Homo sapiens
  misc_RNA (1)...(19): siRNA sense strand
gauggaaguucggagacau

SEQ ID NO: 1573099 - RNA, 19 nt, Homo sapiens
  misc_RNA (1)...(19): siRNA sense strand
caggcugucuuucacaauc

SEQ ID NO: 1573100 - RNA, 19 nt, Homo sapiens
  misc_RNA (1)...(19): siRNA sense strand
auacugaggaggaaaauua

SEQ ID NO: 1573101 - RNA, 19 nt, Homo sapiens
  misc_RNA (1)...(19): siRNA sense strand
gaacacuaagcacaaagag

SEQ ID NO: 1573102 - RNA, 19 nt, Homo sapiens
  misc_RNA (1)...(19): siRNA sense strand
gagcuguuauuugcaacug

SEQ ID NO: 1573103 - RNA, 19 nt, Homo sapiens
  misc_RNA (1)...(19): siRNA sense strand
gccagauuccguugauauu

SEQ ID NO: 1573104 - RNA, 19 nt, Homo sapiens
  misc_RNA (1)...(19): siRNA sense strand
cugggacucuucaauuaau

SEQ ID NO: 1573105 - RNA, 19 nt, Homo sapiens
  misc_RNA (1)...(19): siRNA sense strand
gaaccaacgaggacuacag

SEQ ID NO: 1573106 - RNA, 19 nt, Homo sapiens
  misc_RNA (1)...(19): siRNA sense strand
gaaaucaacuucucauuca

SEQ ID NO: 1573107 - RNA, 19 nt, Homo sapiens
  misc_RNA (1)...(19): siRNA sense strand
ccaugaagcugaccauuga

SEQ ID NO: 1573108 - RNA, 19 nt, Homo sapiens
  misc_RNA (1)...(19): siRNA sense strand
gucaacagcugccuuaauu

SEQ ID NO: 1573109 - RNA, 19 nt, Homo sapiens
  misc_RNA (1)...(19): siRNA sense strand
caagaaguauuggagauuu

SEQ ID NO: 1573110 - RNA, 19 nt, Homo sapiens
  misc_RNA (1)...(19): siRNA sense strand
ggagaaauguauuauggau

SEQ ID NO: 1573111 - RNA, 19 nt, Homo sapiens
  misc_RNA (1)...(19): siRNA sense strand
uagcagaaccugaaacuaa

SEQ ID NO: 1573112 - RNA, 19 nt, Homo sapiens
  misc_RNA (1)...(19): siRNA sense strand
gagaagaacuuggaaacuc

SEQ ID NO: 1573113 - RNA, 19 nt, Homo sapiens
  misc_RNA (1)...(19): siRNA sense strand
aagaaaggaucaagaaaug

SEQ ID NO: 1573114 - RNA, 19 nt, Homo sapiens
  misc_RNA (1)...(19): siRNA sense strand
cagaugagguccuguacuu

SEQ ID NO: 1573115 - RNA, 19 nt, Homo sapiens
  misc_RNA (1)...(19): siRNA sense strand
gcagcugauuucugucaua

SEQ ID NO: 1573116 - RNA, 19 nt, Homo sapiens
  misc_RNA (1)...(19): siRNA sense strand
gaaauguggugguuuugua

SEQ ID NO: 1573117 - RNA, 19 nt, Homo sapiens
  misc_RNA (1)...(19): siRNA sense strand
ucaagagauuugugacuuu

SEQ ID NO: 1573118 - RNA, 19 nt, Homo sapiens
  misc_RNA (1)...(19): siRNA sense strand
gaaaggaucaagaaaugug

SEQ ID NO: 1573119 - RNA, 19 nt, Homo sapiens
  misc_RNA (1)...(19): siRNA sense strand
gaucugggauaaccgcauu

SEQ ID NO: 1573120 - RNA, 19 nt, Homo sapiens
  misc_RNA (1)...(19): siRNA sense strand
uaagaacucugaaaucaac

SEQ ID NO: 1573121 - RNA, 19 nt, Homo sapiens
  misc_RNA (1)...(19): siRNA sense strand
gaacuuggaaacucuguug

SEQ ID NO: 1573122 - RNA, 19 nt, Homo sapiens
  misc_RNA (1)...(19): siRNA sense strand
gcaaacggaaagagaauga

SEQ ID NO: 1573123 - RNA, 19 nt, Homo sapiens
  misc_RNA (1)...(19): siRNA sense strand
caagagauuugugacuuug

SEQ ID NO: 1573124 - RNA, 19 nt, Homo sapiens
  misc_RNA (1)...(19): siRNA sense strand
ucgcucagcugacagauga

SEQ ID NO: 1573125 - RNA, 19 nt, Homo sapiens
  misc_RNA (1)...(19): siRNA sense strand
gaaacuaagaggauuaagu

SEQ ID NO: 1573126 - RNA, 19 nt, Homo sapiens
  misc_RNA (1)...(19): siRNA sense strand
caagaaauguggugguuuu

SEQ ID NO: 1573127 - RNA, 19 nt, Homo sapiens
  misc_RNA (1)...(19): siRNA sense strand
gggauaaccgcauugauga

SEQ ID NO: 1573128 - RNA, 19 nt, Homo sapiens
  misc_RNA (1)...(19): siRNA sense strand
gacaagaaguauuggagau

SEQ ID NO: 1573129 - RNA, 19 nt, Homo sapiens
  misc_RNA (1)...(19): siRNA sense strand
guaaauggcaggcuugcaa

SEQ ID NO: 1573130 - RNA, 19 nt, Homo sapiens
  misc_RNA (1)...(19): siRNA sense strand
cuaagaggauuaaguuaca

SEQ ID NO: 1573131 - RNA, 19 nt, Homo sapiens
  misc_RNA (1)...(19): siRNA sense strand
gaugagguccuguacuuug

SEQ ID NO: 1573132 - RNA, 19 nt, Homo sapiens
  misc_RNA (1)...(19): siRNA sense strand
ggugaauagucaagagauu

SEQ ID NO: 1573133 - RNA, 19 nt, Homo sapiens
  misc_RNA (1)...(19): siRNA sense strand
gaaggagagugcugcuaag

SEQ ID NO: 1573134 - RNA, 19 nt, Homo sapiens
  misc_RNA (1)...(19): siRNA sense strand
gaccuuggcuuuucuagaa

SEQ ID NO: 1573135 - RNA, 19 nt, Homo sapiens
  misc_RNA (1)...(19): siRNA sense strand
ugaccauacuccagaaaga

SEQ ID NO: 1573136 - RNA, 19 nt, Homo sapiens
  misc_RNA (1)...(19): siRNA sense strand
ugaaaucaacuucucauuc

SEQ ID NO: 1573137 - RNA, 19 nt, Homo sapiens
  misc_RNA (1)...(19): siRNA sense strand
uggaaacucuguugaccuu

SEQ ID NO: 1573138 - RNA, 19 nt, Homo sapiens
  misc_RNA (1)...(19): siRNA sense strand
cagcugccuuaauuacuuu

SEQ ID NO: 1573139 - RNA, 19 nt, Homo sapiens
  misc_RNA (1)...(19): siRNA sense strand
gaaugaagaucgguuugac

SEQ ID NO: 1573140 - RNA, 19 nt, Homo sapiens
  misc_RNA (1)...(19): siRNA sense strand
caacagcugccuuaauuac

SEQ ID NO: 1573141 - RNA, 19 nt, Homo sapiens
  misc_RNA (1)...(19): siRNA sense strand
ugacuucgcucagcugaca

SEQ ID NO: 1573142 - RNA, 19 nt, Homo sapiens
  misc_RNA (1)...(19): siRNA sense strand
aggauuaaguuacaucaug

SEQ ID NO: 1573143 - RNA, 19 nt, Homo sapiens
  misc_RNA (1)...(19): siRNA sense strand
agaaggagagugcugcuaa

SEQ ID NO: 1573144 - RNA, 19 nt, Homo sapiens
  misc_RNA (1)...(19): siRNA sense strand
ccacagauggaauuaacuu

SEQ ID NO: 1573145 - RNA, 19 nt, Homo sapiens
  misc_RNA (1)...(19): siRNA sense strand
acagcugccuuaauuacuu

SEQ ID NO: 1573146 - RNA, 19 nt, Homo sapiens
  misc_RNA (1)...(19): siRNA sense strand
gugaauagucaagagauuu

SEQ ID NO: 1573147 - RNA, 19 nt, Homo sapiens
  misc_RNA (1)...(19): siRNA sense strand
ucaacagcugccuuaauua

SEQ ID NO: 1573148 - RNA, 19 nt, Homo sapiens
  misc_RNA (1)...(19): siRNA sense strand
uuauggauuugcuuccuaa

SEQ ID NO: 1573149 - RNA, 19 nt, Homo sapiens
  misc_RNA (1)...(19): siRNA sense strand
caccacagauggaauuaac

SEQ ID NO: 1573150 - RNA, 19 nt, Homo sapiens
  misc_RNA (1)...(19): siRNA sense strand
ugucauagcagaaccugaa

SEQ ID NO: 1573151 - RNA, 19 nt, Homo sapiens
  misc_RNA (1)...(19): siRNA sense strand
agaagaacuuggaaacucu

SEQ ID NO: 1573152 - RNA, 19 nt, Homo sapiens
  misc_RNA (1)...(19): siRNA sense strand
gaccauacuccagaaagaa

SEQ ID NO: 1573153 - RNA, 19 nt, Homo sapiens
  misc_RNA (1)...(19): siRNA sense strand
gccuagguguucucgguuu

SEQ ID NO: 1573154 - RNA, 19 nt, Homo sapiens
  misc_RNA (1)...(19): siRNA sense strand
ugaauagucaagagauuug

SEQ ID NO: 1573155 - RNA, 19 nt, Homo sapiens
  misc_RNA (1)...(19): siRNA sense strand
cagauggaauuaacuucau

SEQ ID NO: 1573156 - RNA, 19 nt, Homo sapiens
  misc_RNA (1)...(19): siRNA sense strand
gcaagccaauucccaaaau

SEQ ID NO: 1573157 - RNA, 19 nt, Homo sapiens
  misc_RNA (1)...(19): siRNA sense strand
ugacugaacaggcaauaca

SEQ ID NO: 1573158 - RNA, 19 nt, Homo sapiens
  misc_RNA (1)...(19): siRNA sense strand
gagaaugaagaucgguuug

SEQ ID NO: 1573159 - RNA, 19 nt, Homo sapiens
  misc_RNA (1)...(19): siRNA sense strand
gcagaaccugaaacuaaga

SEQ ID NO: 1573160 - RNA, 19 nt, Homo sapiens
  misc_RNA (1)...(19): siRNA sense strand
aagaaguauuggagauuug

SEQ ID NO: 1573161 - RNA, 19 nt, Homo sapiens
  misc_RNA (1)...(19): siRNA sense strand
cuucugaccucugggacua

SEQ ID NO: 1573162 - RNA, 19 nt, Homo sapiens
  misc_RNA (1)...(19): siRNA sense strand
gggugcgccucacagauug

SEQ ID NO: 1573163 - RNA, 19 nt, Homo sapiens
  misc_RNA (1)...(19): siRNA sense strand
gaacucugaaaucaacuuc

SEQ ID NO: 1573164 - RNA, 19 nt, Homo sapiens
  misc_RNA (1)...(19): siRNA sense strand
uuggagauuuggaccuuaa

SEQ ID NO: 1573165 - RNA, 19 nt, Homo sapiens
  misc_RNA (1)...(19): siRNA sense strand
cuaaggagaagaacuugga

SEQ ID NO: 1573166 - RNA, 19 nt, Homo sapiens
  misc_RNA (1)...(19): siRNA sense strand
ugggauaaccgcauugaug

SEQ ID NO: 1573167 - RNA, 19 nt, Homo sapiens
  misc_RNA (1)...(19): siRNA sense strand
gcgagaugguauugaacug

SEQ ID NO: 1573168 - RNA, 19 nt, Homo sapiens
  misc_RNA (1)...(19): siRNA sense strand
gcugaugcaacucuucuga

SEQ ID NO: 1573169 - RNA, 19 nt, Homo sapiens
  misc_RNA (1)...(19): siRNA sense strand
ggagauuuggaccuuaaga

SEQ ID NO: 1573170 - RNA, 19 nt, Homo sapiens
  misc_RNA (1)...(19): siRNA sense strand
gguagugggaguccagcua

SEQ ID NO: 1573171 - RNA, 19 nt, Homo sapiens
  misc_RNA (1)...(19): siRNA sense strand
auacccacauggagaaaug

SEQ ID NO: 1573172 - RNA, 19 nt, Homo sapiens
  misc_RNA (1)...(19): siRNA sense strand
ccugaaacuaagaggauua

SEQ ID NO: 1573173 - RNA, 19 nt, Homo sapiens
  misc_RNA (1)...(19): siRNA sense strand
ccacccagcauuaaguaug

SEQ ID NO: 1573174 - RNA, 19 nt, Homo sapiens
  misc_RNA (1)...(19): siRNA sense strand
cuuaauuacuuuggucaga

SEQ ID NO: 1573175 - RNA, 19 nt, Homo sapiens
  misc_RNA (1)...(19): siRNA sense strand
auggagaaauguauuaugg

SEQ ID NO: 1573176 - RNA, 19 nt, Homo sapiens
  misc_RNA (1)...(19): siRNA sense strand
cuucagagccuagguguuc

SEQ ID NO: 1573177 - RNA, 19 nt, Homo sapiens
  misc_RNA (1)...(19): siRNA sense strand
cugaacaggcaauacagua

SEQ ID NO: 1573178 - RNA, 19 nt, Homo sapiens
  misc_RNA (1)...(19): siRNA sense strand
uaauuacuuuggucagaag

SEQ ID NO: 1573179 - RNA, 19 nt, Homo sapiens
  misc_RNA (1)...(19): siRNA sense strand
cagcuaccugggacaauuu

SEQ ID NO: 1573180 - RNA, 19 nt, Homo sapiens
  misc_RNA (1)...(19): siRNA sense strand
guagcccuauugcgagaug

SEQ ID NO: 1573181 - RNA, 19 nt, Homo sapiens
  misc_RNA (1)...(19): siRNA sense strand
ggagaagaacuuggaaacu

SEQ ID NO: 1573182 - RNA, 19 nt, Homo sapiens
  misc_RNA (1)...(19): siRNA sense strand
gagaaggagagugcugcua

SEQ ID NO: 1573183 - RNA, 19 nt, Homo sapiens
  misc_RNA (1)...(19): siRNA sense strand
ccuguacuuugcaguguau

SEQ ID NO: 1573184 - RNA, 19 nt, Homo sapiens
  misc_RNA (1)...(19): siRNA sense strand
gugccaugaucccaacgaa

SEQ ID NO: 1573185 - RNA, 19 nt, Homo sapiens
  misc_RNA (1)...(19): siRNA sense strand
cagcugauuucugucauac

SEQ ID NO: 1573186 - RNA, 19 nt, Homo sapiens
  misc_RNA (1)...(19): siRNA sense strand
ucauucagcagaagcuuug

SEQ ID NO: 1573187 - RNA, 19 nt, Homo sapiens
  misc_RNA (1)...(19): siRNA sense strand
acaagaaguauuggagauu

SEQ ID NO: 1573188 - RNA, 19 nt, Homo sapiens
  misc_RNA (1)...(19): siRNA sense strand
aagcugaccauugaccaua

SEQ ID NO: 1573189 - RNA, 19 nt, Homo sapiens
  misc_RNA (1)...(19): siRNA sense strand
gaagcugaccauugaccau

SEQ ID NO: 1573190 - RNA, 19 nt, Homo sapiens
  misc_RNA (1)...(19): siRNA sense strand
agagaaugaagaucgguuu

SEQ ID NO: 1573191 - RNA, 19 nt, Homo sapiens
  misc_RNA (1)...(19): siRNA sense strand
agauggaauuaacuucaug

SEQ ID NO: 1573192 - RNA, 19 nt, Homo sapiens
  misc_RNA (1)...(19): siRNA sense strand
acagauggaauuaacuuca

SEQ ID NO: 1573193 - RNA, 19 nt, Homo sapiens
  misc_RNA (1)...(19): siRNA sense strand
ccucaccacagauggaauu

SEQ ID NO: 1573194 - RNA, 19 nt, Homo sapiens
  misc_RNA (1)...(19): siRNA sense strand
uauuggagauuuggaccuu

SEQ ID NO: 1573195 - RNA, 19 nt, Homo sapiens
  misc_RNA (1)...(19): siRNA sense strand
gaaaaggaaaacccaugaa

SEQ ID NO: 1573196 - RNA, 19 nt, Homo sapiens
  misc_RNA (1)...(19): siRNA sense strand
agaaugaagaucgguuuga

SEQ ID NO: 1573197 - RNA, 19 nt, Homo sapiens
  misc_RNA (1)...(19): siRNA sense strand
cugcaacaguagcccuauu

SEQ ID NO: 1573198 - RNA, 19 nt, Homo sapiens
  misc_RNA (1)...(19): siRNA sense strand
cccaugaagcugaccauug

SEQ ID NO: 1573199 - RNA, 19 nt, Homo sapiens
  misc_RNA (1)...(19): siRNA sense strand
cacccagcauuaaguaugg

SEQ ID NO: 1573200 - RNA, 19 nt, Homo sapiens
  misc_RNA (1)...(19): siRNA sense strand
cccaugcggugacugaaca

SEQ ID NO: 1573201 - RNA, 19 nt, Homo sapiens
  misc_RNA (1)...(19): siRNA sense strand
agagauuugugacuuuguc

SEQ ID NO: 1573202 - RNA, 19 nt, Homo sapiens
  misc_RNA (1)...(19): siRNA sense strand
aaaaucagcuuggaaaagg

SEQ ID NO: 1573203 - RNA, 19 nt, Homo sapiens
  misc_RNA (1)...(19): siRNA sense strand
ccuagguguucucgguuug

SEQ ID NO: 1573204 - RNA, 19 nt, Homo sapiens
  misc_RNA (1)...(19): siRNA sense strand
uaaauggcaggcuugcaau

SEQ ID NO: 1573205 - RNA, 19 nt, Homo sapiens
  misc_RNA (1)...(19): siRNA sense strand
agcagaaccugaaacuaag

SEQ ID NO: 1573206 - RNA, 19 nt, Homo sapiens
  misc_RNA (1)...(19): siRNA sense strand
gaaauuaggugcuguguau

SEQ ID NO: 1573207 - RNA, 19 nt, Homo sapiens
  misc_RNA (1)...(19): siRNA sense strand
uaacauagaugccgcaaua

SEQ ID NO: 1573208 - RNA, 19 nt, Homo sapiens
  misc_RNA (1)...(19): siRNA sense strand
caacauaaguuucccauug

SEQ ID NO: 1573209 - RNA, 19 nt, Homo sapiens
  misc_RNA (1)...(19): siRNA sense strand
gaagaugccuugaacuuga

SEQ ID NO: 1573210 - RNA, 19 nt, Homo sapiens
  misc_RNA (1)...(19): siRNA sense strand
ggacacacuucagaaauua

SEQ ID NO: 1573211 - RNA, 19 nt, Homo sapiens
  misc_RNA (1)...(19): siRNA sense strand
gaacagaauuugcucauag

SEQ ID NO: 1573212 - RNA, 19 nt, Homo sapiens
  misc_RNA (1)...(19): siRNA sense strand
ccaaucaguuugcaauuua

SEQ ID NO: 1573213 - RNA, 19 nt, Homo sapiens
  misc_RNA (1)...(19): siRNA sense strand
ggaaaggcaucaacuguga

SEQ ID NO: 1573214 - RNA, 19 nt, Homo sapiens
  misc_RNA (1)...(19): siRNA sense strand
gaugagagaugccggaauu

SEQ ID NO: 1573215 - RNA, 19 nt, Homo sapiens
  misc_RNA (1)...(19): siRNA sense strand
acacauaccucgcauuauu

SEQ ID NO: 1573216 - RNA, 19 nt, Homo sapiens
  misc_RNA (1)...(19): siRNA sense strand
caacuuacaucaucugaau

SEQ ID NO: 1573217 - RNA, 19 nt, Homo sapiens
  misc_RNA (1)...(19): siRNA sense strand
gauguagcguugcaaauuu

SEQ ID NO: 1573218 - RNA, 19 nt, Homo sapiens
  misc_RNA (1)...(19): siRNA sense strand
ggaggucuaugaauauaaa

SEQ ID NO: 1573219 - RNA, 19 nt, Homo sapiens
  misc_RNA (1)...(19): siRNA sense strand
gaaagaggcugugacaaca

SEQ ID NO: 1573220 - RNA, 19 nt, Homo sapiens
  misc_RNA (1)...(19): siRNA sense strand
guacaaggauggacguuau

SEQ ID NO: 1573221 - RNA, 19 nt, Homo sapiens
  misc_RNA (1)...(19): siRNA sense strand
ugaaggagaugaaagagaa

SEQ ID NO: 1573222 - RNA, 19 nt, Homo sapiens
  misc_RNA (1)...(19): siRNA sense strand
caucgugacucuaggguua

SEQ ID NO: 1573223 - RNA, 19 nt, Homo sapiens
  misc_RNA (1)...(19): siRNA sense strand
gaaggauguucuuaucaaa

SEQ ID NO: 1573224 - RNA, 19 nt, Homo sapiens
  misc_RNA (1)...(19): siRNA sense strand
agagauugauugcuucuua

SEQ ID NO: 1573225 - RNA, 19 nt, Homo sapiens
  misc_RNA (1)...(19): siRNA sense strand
uaucagaccucacuauuuc

SEQ ID NO: 1573226 - RNA, 19 nt, Homo sapiens
  misc_RNA (1)...(19): siRNA sense strand
ucaaaggaaugcaagaauu

SEQ ID NO: 1573227 - RNA, 19 nt, Homo sapiens
  misc_RNA (1)...(19): siRNA sense strand
acagauguguugcaaauaa

SEQ ID NO: 1573228 - RNA, 19 nt, Homo sapiens
  misc_RNA (1)...(19): siRNA sense strand
agaauuugcucauaggaua

SEQ ID NO: 1573229 - RNA, 19 nt, Homo sapiens
  misc_RNA (1)...(19): siRNA sense strand
uauaagagauguccuaaag

SEQ ID NO: 1573230 - RNA, 19 nt, Homo sapiens
  misc_RNA (1)...(19): siRNA sense strand
ggagcgagauaacagaauu

SEQ ID NO: 1573231 - RNA, 19 nt, Homo sapiens
  misc_RNA (1)...(19): siRNA sense strand
gauuaaggaugcucacuug

SEQ ID NO: 1573232 - RNA, 19 nt, Homo sapiens
  misc_RNA (1)...(19): siRNA sense strand
gauguuaaauggacucgaa

SEQ ID NO: 1573233 - RNA, 19 nt, Homo sapiens
  misc_RNA (1)...(19): siRNA sense strand
gagacuagaucuuucuguu

SEQ ID NO: 1573234 - RNA, 19 nt, Homo sapiens
  misc_RNA (1)...(19): siRNA sense strand
ugacagauguguugcaaau

SEQ ID NO: 1573235 - RNA, 19 nt, Homo sapiens
  misc_RNA (1)...(19): siRNA sense strand
gcucuaugaucucuucuuu

SEQ ID NO: 1573236 - RNA, 19 nt, Homo sapiens
  misc_RNA (1)...(19): siRNA sense strand
ccaagaugcuauuaacauu

SEQ ID NO: 1573237 - RNA, 19 nt, Homo sapiens
  misc_RNA (1)...(19): siRNA sense strand
caacugauuuccuggcaaa

SEQ ID NO: 1573238 - RNA, 19 nt, Homo sapiens
  misc_RNA (1)...(19): siRNA sense strand
gggacacacuucagaaauu

SEQ ID NO: 1573239 - RNA, 19 nt, Homo sapiens
  misc_RNA (1)...(19): siRNA sense strand
gaagagagaacagaauuug

SEQ ID NO: 1573240 - RNA, 19 nt, Homo sapiens
  misc_RNA (1)...(19): siRNA sense strand
cuacagcaaucucauuaaa

SEQ ID NO: 1573241 - RNA, 19 nt, Homo sapiens
  misc_RNA (1)...(19): siRNA sense strand
agaagaauuugaccgcuua

SEQ ID NO: 1573242 - RNA, 19 nt, Homo sapiens
  misc_RNA (1)...(19): siRNA sense strand
gacggaagcuguuggcuau

SEQ ID NO: 1573243 - RNA, 19 nt, Homo sapiens
  misc_RNA (1)...(19): siRNA sense strand
caacagccgccucaucaua

SEQ ID NO: 1573244 - RNA, 19 nt, Homo sapiens
  misc_RNA (1)...(19): siRNA sense strand
uaaggaugcucacuuguug

SEQ ID NO: 1573245 - RNA, 19 nt, Homo sapiens
  misc_RNA (1)...(19): siRNA sense strand
gaagauggcccaagugucu

SEQ ID NO: 1573246 - RNA, 19 nt, Homo sapiens
  misc_RNA (1)...(19): siRNA sense strand
gaauuugaccgcuuagauu

SEQ ID NO: 1573247 - RNA, 19 nt, Homo sapiens
  misc_RNA (1)...(19): siRNA sense strand
uaagagauguccuaaagca

SEQ ID NO: 1573248 - RNA, 19 nt, Homo sapiens
  misc_RNA (1)...(19): siRNA sense strand
gugauuccaugcuuugaua

SEQ ID NO: 1573249 - RNA, 19 nt, Homo sapiens
  misc_RNA (1)...(19): siRNA sense strand
gugcuuuacucgccaauaa

SEQ ID NO: 1573250 - RNA, 19 nt, Homo sapiens
  misc_RNA (1)...(19): siRNA sense strand
uagcagaaauccuuagaga

SEQ ID NO: 1573251 - RNA, 19 nt, Homo sapiens
  misc_RNA (1)...(19): siRNA sense strand
gccauugacugcuaugaaa

SEQ ID NO: 1573252 - RNA, 19 nt, Homo sapiens
  misc_RNA (1)...(19): siRNA sense strand
gaacuaaagcuugaagaga

SEQ ID NO: 1573253 - RNA, 19 nt, Homo sapiens
  misc_RNA (1)...(19): siRNA sense strand
gcauacaauucccucauga

SEQ ID NO: 1573254 - RNA, 19 nt, Homo sapiens
  misc_RNA (1)...(19): siRNA sense strand
cacagaagcuauuugaaug

SEQ ID NO: 1573255 - RNA, 19 nt, Homo sapiens
  misc_RNA (1)...(19): siRNA sense strand
cuaaagcacuguaugaaca

SEQ ID NO: 1573256 - RNA, 19 nt, Homo sapiens
  misc_RNA (1)...(19): siRNA sense strand
acagagauguggugcaauu

SEQ ID NO: 1573257 - RNA, 19 nt, Homo sapiens
  misc_RNA (1)...(19): siRNA sense strand
gccaaucaguuugcaauuu

SEQ ID NO: 1573258 - RNA, 19 nt, Homo sapiens
  misc_RNA (1)...(19): siRNA sense strand
aagcaaacauucaaccaaa

SEQ ID NO: 1573259 - RNA, 19 nt, Homo sapiens
  misc_RNA (1)...(19): siRNA sense strand
uggaugaucuguuucuaaa

SEQ ID NO: 1573260 - RNA, 19 nt, Homo sapiens
  misc_RNA (1)...(19): siRNA sense strand
ggaauaaaauccaagaaga

SEQ ID NO: 1573261 - RNA, 19 nt, Homo sapiens
  misc_RNA (1)...(19): siRNA sense strand
ucaaauacauugcccaucu

SEQ ID NO: 1573262 - RNA, 19 nt, Homo sapiens
  misc_RNA (1)...(19): siRNA sense strand
gaacuggccgcauuccaaa

SEQ ID NO: 1573263 - RNA, 19 nt, Homo sapiens
  misc_RNA (1)...(19): siRNA sense strand
caggaaacauauacagauu

SEQ ID NO: 1573264 - RNA, 19 nt, Homo sapiens
  misc_RNA (1)...(19): siRNA sense strand
caguaugucucagaaauuu

SEQ ID NO: 1573265 - RNA, 19 nt, Homo sapiens
  misc_RNA (1)...(19): siRNA sense strand
gcagaaccauccaccaaca

SEQ ID NO: 1573266 - RNA, 19 nt, Homo sapiens
  misc_RNA (1)...(19): siRNA sense strand
agacacauaccucgcauua

SEQ ID NO: 1573267 - RNA, 19 nt, Homo sapiens
  misc_RNA (1)...(19): siRNA sense strand
gaggugaaauugaaacagu

SEQ ID NO: 1573268 - RNA, 19 nt, Homo sapiens
  misc_RNA (1)...(19): siRNA sense strand
uggagaagaugaauguaaa

SEQ ID NO: 1573269 - RNA, 19 nt, Homo sapiens
  misc_RNA (1)...(19): siRNA sense strand
guaagaaguuaaaggaagu

SEQ ID NO: 1573270 - RNA, 19 nt, Homo sapiens
  misc_RNA (1)...(19): siRNA sense strand
uggagaagcuaacagacua

SEQ ID NO: 1573271 - RNA, 19 nt, Homo sapiens
  misc_RNA (1)...(19): siRNA sense strand
caugaagggugauguugaa

SEQ ID NO: 1573272 - RNA, 19 nt, Homo sapiens
  misc_RNA (1)...(19): siRNA sense strand
gagauugauugcuucuuau

SEQ ID NO: 1573273 - RNA, 19 nt, Homo sapiens
  misc_RNA (1)...(19): siRNA sense strand
caucaacugugaaaucugu

SEQ ID NO: 1573274 - RNA, 19 nt, Homo sapiens
  misc_RNA (1)...(19): siRNA sense strand
gcagaccccuucuagguua

SEQ ID NO: 1573275 - RNA, 19 nt, Homo sapiens
  misc_RNA (1)...(19): siRNA sense strand
ucgaagaacuggccgcauu

SEQ ID NO: 1573276 - RNA, 19 nt, Homo sapiens
  misc_RNA (1)...(19): siRNA sense strand
gaaccauccaccaacauaa

SEQ ID NO: 1573277 - RNA, 19 nt, Homo sapiens
  misc_RNA (1)...(19): siRNA sense strand
caaaggaaugcaagaauug

SEQ ID NO: 1573278 - RNA, 19 nt, Homo sapiens
  misc_RNA (1)...(19): siRNA sense strand
gaagauguagcguugcaaa

SEQ ID NO: 1573279 - RNA, 19 nt, Homo sapiens
  misc_RNA (1)...(19): siRNA sense strand
guaaucuccuggaaagcua

SEQ ID NO: 1573280 - RNA, 19 nt, Homo sapiens
  misc_RNA (1)...(19): siRNA sense strand
uaccagagauugauugcuu

SEQ ID NO: 1573281 - RNA, 19 nt, Homo sapiens
  misc_RNA (1)...(19): siRNA sense strand
ugauugggcucuaaugaga

SEQ ID NO: 1573282 - RNA, 19 nt, Homo sapiens
  misc_RNA (1)...(19): siRNA sense strand
caggaggucuaugaauaua

SEQ ID NO: 1573283 - RNA, 19 nt, Homo sapiens
  misc_RNA (1)...(19): siRNA sense strand
caagcuggauugagaagug

SEQ ID NO: 1573284 - RNA, 19 nt, Homo sapiens
  misc_RNA (1)...(19): siRNA sense strand
uaaaggaaguccagaugca

SEQ ID NO: 1573285 - RNA, 19 nt, Homo sapiens
  misc_RNA (1)...(19): siRNA sense strand
gaagcaaacauucaaccaa

SEQ ID NO: 1573286 - RNA, 19 nt, Homo sapiens
  misc_RNA (1)...(19): siRNA sense strand
ugugaaaucuguguuagaa

SEQ ID NO: 1573287 - RNA, 19 nt, Homo sapiens
  misc_RNA (1)...(19): siRNA sense strand
gaagcuauuugaaugugau

SEQ ID NO: 1573288 - RNA, 19 nt, Homo sapiens
  misc_RNA (1)...(19): siRNA sense strand
gaaaggcgagacugaucua

SEQ ID NO: 1573289 - RNA, 19 nt, Homo sapiens
  misc_RNA (1)...(19): siRNA sense strand
gaaugcauaugcugagaag

SEQ ID NO: 1573290 - RNA, 19 nt, Homo sapiens
  misc_RNA (1)...(19): siRNA sense strand
cuaaugagacuagaucuuu

SEQ ID NO: 1573291 - RNA, 19 nt, Homo sapiens
  misc_RNA (1)...(19): siRNA sense strand
gcaaauaaucagguugaaa

SEQ ID NO: 1573292 - RNA, 19 nt, Homo sapiens
  misc_RNA (1)...(19): siRNA sense strand
ggaccgugauuuacugcaa

SEQ ID NO: 1573293 - RNA, 19 nt, Homo sapiens
  misc_RNA (1)...(19): siRNA sense strand
gaaaucuguguuagaauug

SEQ ID NO: 1573294 - RNA, 19 nt, Homo sapiens
  misc_RNA (1)...(19): siRNA sense strand
cuacagagauguggugcaa

SEQ ID NO: 1573295 - RNA, 19 nt, Homo sapiens
  misc_RNA (1)...(19): siRNA sense strand
auaaaccugucacugauuu

SEQ ID NO: 1573296 - RNA, 19 nt, Homo sapiens
  misc_RNA (1)...(19): siRNA sense strand
uaacauugcuuuggcucaa

SEQ ID NO: 1573297 - RNA, 19 nt, Homo sapiens
  misc_RNA (1)...(19): siRNA sense strand
uaguggagcugacacagaa

SEQ ID NO: 1573298 - RNA, 19 nt, Homo sapiens
  misc_RNA (1)...(19): siRNA sense strand
cugcaaggcuucagugguu

SEQ ID NO: 1573299 - RNA, 19 nt, Homo sapiens
  misc_RNA (1)...(19): siRNA sense strand
caugaugucuuguguaaac

SEQ ID NO: 1573300 - RNA, 19 nt, Homo sapiens
  misc_RNA (1)...(19): siRNA sense strand
guauguaggccuuguaaga

SEQ ID NO: 1573301 - RNA, 19 nt, Homo sapiens
  misc_RNA (1)...(19): siRNA sense strand
gcuaccauguuccugaauu

SEQ ID NO: 1573302 - RNA, 19 nt, Homo sapiens
  misc_RNA (1)...(19): siRNA sense strand
agacuacuguaagaaguua

SEQ ID NO: 1573303 - RNA, 19 nt, Homo sapiens
  misc_RNA (1)...(19): siRNA sense strand
aaaggaagauggcccaagu

SEQ ID NO: 1573304 - RNA, 19 nt, Homo sapiens
  misc_RNA (1)...(19): siRNA sense strand
aggcgagacugaucuaauu

SEQ ID NO: 1573305 - RNA, 19 nt, Homo sapiens
  misc_RNA (1)...(19): siRNA sense strand
ugacacagaagcuauuuga

SEQ ID NO: 1573306 - RNA, 19 nt, Homo sapiens
  misc_RNA (1)...(19): siRNA sense strand
gaauaaagaguuucaggua

SEQ ID NO: 1573307 - RNA, 19 nt, Homo sapiens
  misc_RNA (1)...(19): siRNA sense strand
ggaagagacugcagaaaca

SEQ ID NO: 1573308 - RNA, 19 nt, Homo sapiens
  misc_RNA (1)...(19): siRNA sense strand
ggaaucaaauggucuguca

SEQ ID NO: 1573309 - RNA, 19 nt, Homo sapiens
  misc_RNA (1)...(19): siRNA sense strand
caaauggucugucaguuca

SEQ ID NO: 1573310 - RNA, 19 nt, Homo sapiens
  misc_RNA (1)...(19): siRNA sense strand
gcuguuaacugaaccucua

SEQ ID NO: 1573311 - RNA, 19 nt, Homo sapiens
  misc_RNA (1)...(19): siRNA sense strand
aaacacaacuuuccuaugc

SEQ ID NO: 1573312 - RNA, 19 nt, Homo sapiens
  misc_RNA (1)...(19): siRNA sense strand
gugcugcugucaaguguua

SEQ ID NO: 1573313 - RNA, 19 nt, Homo sapiens
  misc_RNA (1)...(19): siRNA sense strand
gaccugagggugccauuua

SEQ ID NO: 1573314 - RNA, 19 nt, Homo sapiens
  misc_RNA (1)...(19): siRNA sense strand
uggaagagauuguggaaga

SEQ ID NO: 1573315 - RNA, 19 nt, Homo sapiens
  misc_RNA (1)...(19): siRNA sense strand
gcuaaugccugcaccaauc

SEQ ID NO: 1573316 - RNA, 19 nt, Homo sapiens
  misc_RNA (1)...(19): siRNA sense strand
guggugggcuguuaacuga

SEQ ID NO: 1573317 - RNA, 19 nt, Homo sapiens
  misc_RNA (1)...(19): siRNA sense strand
gaaucgacccuguggauga

SEQ ID NO: 1573318 - RNA, 19 nt, Homo sapiens
  misc_RNA (1)...(19): siRNA sense strand
ggugguucuuuauucauua

SEQ ID NO: 1573319 - RNA, 19 nt, Homo sapiens
  misc_RNA (1)...(19): siRNA sense strand
cagugggacucuacagaua

SEQ ID NO: 1573320 - RNA, 19 nt, Homo sapiens
  misc_RNA (1)...(19): siRNA sense strand
ccauaugguucaaauccua

SEQ ID NO: 1573321 - RNA, 19 nt, Homo sapiens
  misc_RNA (1)...(19): siRNA sense strand
ggaugaacaaggaguauau

SEQ ID NO: 1573322 - RNA, 19 nt, Homo sapiens
  misc_RNA (1)...(19): siRNA sense strand
gaaguuguagaacauguga

SEQ ID NO: 1573323 - RNA, 19 nt, Homo sapiens
  misc_RNA (1)...(19): siRNA sense strand
gaacaugugauugaucuag

SEQ ID NO: 1573324 - RNA, 19 nt, Homo sapiens
  misc_RNA (1)...(19): siRNA sense strand
caaugaauacagaaccaua

SEQ ID NO: 1573325 - RNA, 19 nt, Homo sapiens
  misc_RNA (1)...(19): siRNA sense strand
ugguaggaaugcucuauaa

SEQ ID NO: 1573326 - RNA, 19 nt, Homo sapiens
  misc_RNA (1)...(19): siRNA sense strand
gggcuucaguuauuggaau

SEQ ID NO: 1573327 - RNA, 19 nt, Homo sapiens
  misc_RNA (1)...(19): siRNA sense strand
gcacaaugccauaaaucau

SEQ ID NO: 1573328 - RNA, 19 nt, Homo sapiens
  misc_RNA (1)...(19): siRNA sense strand
gugggacucuacagauaaa

SEQ ID NO: 1573329 - RNA, 19 nt, Homo sapiens
  misc_RNA (1)...(19): siRNA sense strand
uagaacaugugauugaucu

SEQ ID NO: 1573330 - RNA, 19 nt, Homo sapiens
  misc_RNA (1)...(19): siRNA sense strand
uagggacaaucuucugaaa

SEQ ID NO: 1573331 - RNA, 19 nt, Homo sapiens
  misc_RNA (1)...(19): siRNA sense strand
guauaugcaccucuucauu

SEQ ID NO: 1573332 - RNA, 19 nt, Homo sapiens
  misc_RNA (1)...(19): siRNA sense strand
gaaaauaccagccuuaacu

SEQ ID NO: 1573333 - RNA, 19 nt, Homo sapiens
  misc_RNA (1)...(19): siRNA sense strand
gaagagauuguggaagaga

SEQ ID NO: 1573334 - RNA, 19 nt, Homo sapiens
  misc_RNA (1)...(19): siRNA sense strand
caauccagcugugcaugaa

SEQ ID NO: 1573335 - RNA, 19 nt, Homo sapiens
  misc_RNA (1)...(19): siRNA sense strand
ggcccuggcucacaaaugg

SEQ ID NO: 1573336 - RNA, 19 nt, Homo sapiens
  misc_RNA (1)...(19): siRNA sense strand
ucaaauggucugucaguuc

SEQ ID NO: 1573337 - RNA, 19 nt, Homo sapiens
  misc_RNA (1)...(19): siRNA sense strand
cugagggugccauuuauua

SEQ ID NO: 1573338 - RNA, 19 nt, Homo sapiens
  misc_RNA (1)...(19): siRNA sense strand
caaauggugggaugaacaa

SEQ ID NO: 1573339 - RNA, 19 nt, Homo sapiens
  misc_RNA (1)...(19): siRNA sense strand
gaaauccaggguccaggaa

SEQ ID NO: 1573340 - RNA, 19 nt, Homo sapiens
  misc_RNA (1)...(19): siRNA sense strand
gauaagagaauagaguaca

SEQ ID NO: 1573341 - RNA, 19 nt, Homo sapiens
  misc_RNA (1)...(19): siRNA sense strand
cgacagcggugagguaaaa

SEQ ID NO: 1573342 - RNA, 19 nt, Homo sapiens
  misc_RNA (1)...(19): siRNA sense strand
gaacagaauaaagaguuuc

SEQ ID NO: 1573343 - RNA, 19 nt, Homo sapiens
  misc_RNA (1)...(19): siRNA sense strand
uugcaaguauuguaccaaa

SEQ ID NO: 1573344 - RNA, 19 nt, Homo sapiens
  misc_RNA (1)...(19): siRNA sense strand
ccucggcgguuuaugugaa

SEQ ID NO: 1573345 - RNA, 19 nt, Homo sapiens
  misc_RNA (1)...(19): siRNA sense strand
ggaagagauuguggaagag

SEQ ID NO: 1573346 - RNA, 19 nt, Homo sapiens
  misc_RNA (1)...(19): siRNA sense strand
aaacagcacaaugccauaa

SEQ ID NO: 1573347 - RNA, 19 nt, Homo sapiens
  misc_RNA (1)...(19): siRNA sense strand
uauaugcaccucuucauuc

SEQ ID NO: 1573348 - RNA, 19 nt, Homo sapiens
  misc_RNA (1)...(19): siRNA sense strand
augaaaagcugaagaaaug

SEQ ID NO: 1573349 - RNA, 19 nt, Homo sapiens
  misc_RNA (1)...(19): siRNA sense strand
ggacgaucuuuuccuguuu

SEQ ID NO: 1573350 - RNA, 19 nt, Homo sapiens
  misc_RNA (1)...(19): siRNA sense strand
agaauagaguacagagugu

SEQ ID NO: 1573351 - RNA, 19 nt, Homo sapiens
  misc_RNA (1)...(19): siRNA sense strand
gggaugaacaaggaguaua

SEQ ID NO: 1573352 - RNA, 19 nt, Homo sapiens
  misc_RNA (1)...(19): siRNA sense strand
gaaacacuagagagcauuc

SEQ ID NO: 1573353 - RNA, 19 nt, Homo sapiens
  misc_RNA (1)...(19): siRNA sense strand
caaauugcaaguauuguac

SEQ ID NO: 1573354 - RNA, 19 nt, Homo sapiens
  misc_RNA (1)...(19): siRNA sense strand
ugugauugaucuagaaaca

SEQ ID NO: 1573355 - RNA, 19 nt, Homo sapiens
  misc_RNA (1)...(19): siRNA sense strand
ucagguuacuggcauugga

SEQ ID NO: 1573356 - RNA, 19 nt, Homo sapiens
  misc_RNA (1)...(19): siRNA sense strand
uuaauuuccucggcgguuu

SEQ ID NO: 1573357 - RNA, 19 nt, Homo sapiens
  misc_RNA (1)...(19): siRNA sense strand
ucaaacagugguaggaaug

SEQ ID NO: 1573358 - RNA, 19 nt, Homo sapiens
  misc_RNA (1)...(19): siRNA sense strand
uggauaagagaauagagua

SEQ ID NO: 1573359 - RNA, 19 nt, Homo sapiens
  misc_RNA (1)...(19): siRNA sense strand
acagcacaaugccauaaau

SEQ ID NO: 1573360 - RNA, 19 nt, Homo sapiens
  misc_RNA (1)...(19): siRNA sense strand
gcugcgcgucccuuaauuu

SEQ ID NO: 1573361 - RNA, 19 nt, Homo sapiens
  misc_RNA (1)...(19): siRNA sense strand
ccaauccagcugugcauga

SEQ ID NO: 1573362 - RNA, 19 nt, Homo sapiens
  misc_RNA (1)...(19): siRNA sense strand
acaugugauugaucuagaa

SEQ ID NO: 1573363 - RNA, 19 nt, Homo sapiens
  misc_RNA (1)...(19): siRNA sense strand
agagacugcagaaacauuu

SEQ ID NO: 1573364 - RNA, 19 nt, Homo sapiens
  misc_RNA (1)...(19): siRNA sense strand
uaauuuccucggcgguuua

SEQ ID NO: 1573365 - RNA, 19 nt, Homo sapiens
  misc_RNA (1)...(19): siRNA sense strand
cggugguucuuuauucauu

SEQ ID NO: 1573366 - RNA, 19 nt, Homo sapiens
  misc_RNA (1)...(19): siRNA sense strand
gaagagacugcagaaacau

SEQ ID NO: 1573367 - RNA, 19 nt, Homo sapiens
  misc_RNA (1)...(19): siRNA sense strand
guacuucccaaaccacugu

SEQ ID NO: 1573368 - RNA, 19 nt, Homo sapiens
  misc_RNA (1)...(19): siRNA sense strand
gcuuggggcuucaguuauu

SEQ ID NO: 1573369 - RNA, 19 nt, Homo sapiens
  misc_RNA (1)...(19): siRNA sense strand
ucacaaauggugggaugaa

SEQ ID NO: 1573370 - RNA, 19 nt, Homo sapiens
  misc_RNA (1)...(19): siRNA sense strand
caaaagguacucauacaug

SEQ ID NO: 1573371 - RNA, 19 nt, Homo sapiens
  misc_RNA (1)...(19): siRNA sense strand
cuaaucaccagccaggaaa

SEQ ID NO: 1573372 - RNA, 19 nt, Homo sapiens
  misc_RNA (1)...(19): siRNA sense strand
gcgcgucccuuaauuuccu

SEQ ID NO: 1573373 - RNA, 19 nt, Homo sapiens
  misc_RNA (1)...(19): siRNA sense strand
gugguaggaaugcucuaua

SEQ ID NO: 1573374 - RNA, 19 nt, Homo sapiens
  misc_RNA (1)...(19): siRNA sense strand
gaguauaugcaccucuuca

SEQ ID NO: 1573375 - RNA, 19 nt, Homo sapiens
  misc_RNA (1)...(19): siRNA sense strand
gggacaaucuucugaaaac

SEQ ID NO: 1573376 - RNA, 19 nt, Homo sapiens
  misc_RNA (1)...(19): siRNA sense strand
uaaagggagaaacagaaga

SEQ ID NO: 1573377 - RNA, 19 nt, Homo sapiens
  misc_RNA (1)...(19): siRNA sense strand
auaccagccuuaacuaugc

SEQ ID NO: 1573378 - RNA, 19 nt, Homo sapiens
  misc_RNA (1)...(19): siRNA sense strand
uaagagaauagaguacaga

SEQ ID NO: 1573379 - RNA, 19 nt, Homo sapiens
  misc_RNA (1)...(19): siRNA sense strand
ccuaaucaccagccaggaa

SEQ ID NO: 1573380 - RNA, 19 nt, Homo sapiens
  misc_RNA (1)...(19): siRNA sense strand
gaaaacaauuccuaaucac

SEQ ID NO: 1573381 - RNA, 19 nt, Homo sapiens
  misc_RNA (1)...(19): siRNA sense strand
gaugaacaaggaguauaug

SEQ ID NO: 1573382 - RNA, 19 nt, Homo sapiens
  misc_RNA (1)...(19): siRNA sense strand
caugggagaaguuuguuuc

SEQ ID NO: 1573383 - RNA, 19 nt, Homo sapiens
  misc_RNA (1)...(19): siRNA sense strand
uguagaacaugugauugau

SEQ ID NO: 1573384 - RNA, 19 nt, Homo sapiens
  misc_RNA (1)...(19): siRNA sense strand
ggugggcuguuaacugaac

SEQ ID NO: 1573385 - RNA, 19 nt, Homo sapiens
  misc_RNA (1)...(19): siRNA sense strand
aggaguauaugcaccucuu

SEQ ID NO: 1573386 - RNA, 19 nt, Homo sapiens
  misc_RNA (1)...(19): siRNA sense strand
aaauaccagccuuaacuau

SEQ ID NO: 1573387 - RNA, 19 nt, Homo sapiens
  misc_RNA (1)...(19): siRNA sense strand
aauggucugucaguucaaa

SEQ ID NO: 1573388 - RNA, 19 nt, Homo sapiens
  misc_RNA (1)...(19): siRNA sense strand
aguccuggauaagagaaua

SEQ ID NO: 1573389 - RNA, 19 nt, Homo sapiens
  misc_RNA (1)...(19): siRNA sense strand
aauaccagccuuaacuaug

SEQ ID NO: 1573390 - RNA, 19 nt, Homo sapiens
  misc_RNA (1)...(19): siRNA sense strand
guucaaacagugguaggaa

SEQ ID NO: 1573391 - RNA, 19 nt, Homo sapiens
  misc_RNA (1)...(19): siRNA sense strand
auacaugggagaaguuugu

SEQ ID NO: 1573392 - RNA, 19 nt, Homo sapiens
  misc_RNA (1)...(19): siRNA sense strand
aacaugugauugaucuaga

SEQ ID NO: 1573393 - RNA, 19 nt, Homo sapiens
  misc_RNA (1)...(19): siRNA sense strand
guagaacaugugauugauc

SEQ ID NO: 1573394 - RNA, 19 nt, Homo sapiens
  misc_RNA (1)...(19): siRNA sense strand
gagacugcagaaacauuug

SEQ ID NO: 1573395 - RNA, 19 nt, Homo sapiens
  misc_RNA (1)...(19): siRNA sense strand
gguggugggcuguuaacug

SEQ ID NO: 1573396 - RNA, 19 nt, Homo sapiens
  misc_RNA (1)...(19): siRNA sense strand
cugcugaguuuguuuuaaa

SEQ ID NO: 1573397 - RNA, 19 nt, Homo sapiens
  misc_RNA (1)...(19): siRNA sense strand
cugaaacacuagagagcau

SEQ ID NO: 1573398 - RNA, 19 nt, Homo sapiens
  misc_RNA (1)...(19): siRNA sense strand
acucauacaugggagaagu

SEQ ID NO: 1573399 - RNA, 19 nt, Homo sapiens
  misc_RNA (1)...(19): siRNA sense strand
uggaagagacugcagaaac

SEQ ID NO: 1573400 - RNA, 19 nt, Homo sapiens
  misc_RNA (1)...(19): siRNA sense strand
ugaacaaggaguauaugca

SEQ ID NO: 1573401 - RNA, 19 nt, Homo sapiens
  misc_RNA (1)...(19): siRNA sense strand
aauccaggguccaggaaca

SEQ ID NO: 1573402 - RNA, 19 nt, Homo sapiens
  misc_RNA (1)...(19): siRNA sense strand
uuacuggcauuggagugaa

SEQ ID NO: 1573403 - RNA, 19 nt, Homo sapiens
  misc_RNA (1)...(19): siRNA sense strand
ucagugggacucuacagau

SEQ ID NO: 1573404 - RNA, 19 nt, Homo sapiens
  misc_RNA (1)...(19): siRNA sense strand
guacucauacaugggagaa

SEQ ID NO: 1573405 - RNA, 19 nt, Homo sapiens
  misc_RNA (1)...(19): siRNA sense strand
uccuaugccuugggaauug

SEQ ID NO: 1573406 - RNA, 19 nt, Homo sapiens
  misc_RNA (1)...(19): siRNA sense strand
gcacagaagucaagaauug

SEQ ID NO: 1573407 - RNA, 19 nt, Homo sapiens
  misc_RNA (1)...(19): siRNA sense strand
gggaaccucugccuagauu

SEQ ID NO: 1573408 - RNA, 19 nt, Homo sapiens
  misc_RNA (1)...(19): siRNA sense strand
gagcacagaagucaagaau

SEQ ID NO: 1573409 - RNA, 19 nt, Homo sapiens
  misc_RNA (1)...(19): siRNA sense strand
gaaccucugccuagauuuc

SEQ ID NO: 1573410 - RNA, 19 nt, Homo sapiens
  misc_RNA (1)...(19): siRNA sense strand
gaaugucucuagggcaugu

SEQ ID NO: 1573411 - RNA, 19 nt, Homo sapiens
  misc_RNA (1)...(19): siRNA sense strand
cagaggauguauggaaaug

SEQ ID NO: 1573412 - RNA, 19 nt, Homo sapiens
  misc_RNA (1)...(19): siRNA sense strand
gcucuuugcagccuugaaa

SEQ ID NO: 1573413 - RNA, 19 nt, Homo sapiens
  misc_RNA (1)...(19): siRNA sense strand
gcuaaaaggggccaacaua

SEQ ID NO: 1573414 - RNA, 19 nt, Homo sapiens
  misc_RNA (1)...(19): siRNA sense strand
acugcagccucucccauua

SEQ ID NO: 1573415 - RNA, 19 nt, Homo sapiens
  misc_RNA (1)...(19): siRNA sense strand
acauacagcucaggccauu

SEQ ID NO: 1573416 - RNA, 19 nt, Homo sapiens
  misc_RNA (1)...(19): siRNA sense strand
ugcagccucucccauuaua

SEQ ID NO: 1573417 - RNA, 19 nt, Homo sapiens
  misc_RNA (1)...(19): siRNA sense strand
ggccauuguuucagagagu

SEQ ID NO: 1573418 - RNA, 19 nt, Homo sapiens
  misc_RNA (1)...(19): siRNA sense strand
cagcucaggccauuguuuc

SEQ ID NO: 1573419 - RNA, 19 nt, Homo sapiens
  misc_RNA (1)...(19): siRNA sense strand
uucagaggauguauggaaa

SEQ ID NO: 1573420 - RNA, 19 nt, Homo sapiens
  misc_RNA (1)...(19): siRNA sense strand
uuucagaggauguauggaa

SEQ ID NO: 1573421 - RNA, 19 nt, Homo sapiens
  misc_RNA (1)...(19): siRNA sense strand
gauuucagaggauguaugg

SEQ ID NO: 1573422 - RNA, 19 nt, Homo sapiens
  misc_RNA (1)...(19): siRNA sense strand
ggagcacagaagucaagaa

SEQ ID NO: 1573423 - RNA, 19 nt, Homo sapiens
  misc_RNA (1)...(19): siRNA sense strand
gaacaaauuuccacuagag

SEQ ID NO: 1573424 - RNA, 19 nt, Homo sapiens
  misc_RNA (1)...(19): siRNA sense strand
gggaucaucugcauucuug

SEQ ID NO: 1573425 - RNA, 19 nt, Homo sapiens
  misc_RNA (1)...(19): siRNA sense strand
gacacugacuuauuuguuc

SEQ ID NO: 1573426 - RNA, 19 nt, Homo sapiens
  misc_RNA (1)...(19): siRNA sense strand
caacggauucuacgauuga

SEQ ID NO: 1573427 - RNA, 19 nt, Homo sapiens
  misc_RNA (1)...(19): siRNA sense strand
gaucaucugcauucuugua

SEQ ID NO: 1573428 - RNA, 19 nt, Homo sapiens
  misc_RNA (1)...(19): siRNA sense strand
gaucacaguuguacaugag

SEQ ID NO: 1573429 - RNA, 19 nt, Homo sapiens
  misc_RNA (1)...(19): siRNA sense strand
uaucuuauguggagacuuc

SEQ ID NO: 1573430 - RNA, 19 nt, Homo sapiens
  misc_RNA (1)...(19): siRNA sense strand
caauguauguuacuacucu

SEQ ID NO: 1573431 - RNA, 19 nt, Homo sapiens
  misc_RNA (1)...(19): siRNA sense strand
ucgaugugaucauugcuua

SEQ ID NO: 1573432 - RNA, 19 nt, Homo sapiens
  misc_RNA (1)...(19): siRNA sense strand
gggauuauauuaguuggau

SEQ ID NO: 1573433 - RNA, 19 nt, Homo sapiens
  misc_RNA (1)...(19): siRNA sense strand
uacgaacacuuaugcaaga

SEQ ID NO: 1573434 - RNA, 19 nt, Homo sapiens
  misc_RNA (1)...(19): siRNA sense strand
uuaguuggauuauggauca

SEQ ID NO: 1573435 - RNA, 19 nt, Homo sapiens
  misc_RNA (1)...(19): siRNA sense strand
gacuauauccaaauugcua

SEQ ID NO: 1573436 - RNA, 19 nt, Homo sapiens
  misc_RNA (1)...(19): siRNA sense strand
gaugugaucauugcuuauu

SEQ ID NO: 1573437 - RNA, 19 nt, Homo sapiens
  misc_RNA (1)...(19): siRNA sense strand
aaauugcuaugcccacuga

SEQ ID NO: 1573438 - RNA, 19 nt, Homo sapiens
  misc_RNA (1)...(19): siRNA sense strand
gcacacgaacacuacacua

SEQ ID NO: 1573439 - RNA, 19 nt, Homo sapiens
  misc_RNA (1)...(19): siRNA sense strand
cagcaaaacuugaagaaca

SEQ ID NO: 1573440 - RNA, 19 nt, Homo sapiens
  misc_RNA (1)...(19): siRNA sense strand
cgcugacacugacuuauuu

SEQ ID NO: 1573441 - RNA, 19 nt, Homo sapiens
  misc_RNA (1)...(19): siRNA sense strand
ucucuucacagacuaauuu

SEQ ID NO: 1573442 - RNA, 19 nt, Homo sapiens
  misc_RNA (1)...(19): siRNA sense strand
ccuccuggcugcuucaaau

SEQ ID NO: 1573443 - RNA, 19 nt, Homo sapiens
  misc_RNA (1)...(19): siRNA sense strand
gugauccuacgaacacuua

SEQ ID NO: 1573444 - RNA, 19 nt, Homo sapiens
  misc_RNA (1)...(19): siRNA sense strand
acacuacacuaucgaugug

SEQ ID NO: 1573445 - RNA, 19 nt, Homo sapiens
  misc_RNA (1)...(19): siRNA sense strand
ucaacggauucuacgauug

SEQ ID NO: 1573446 - RNA, 19 nt, Homo sapiens
  misc_RNA (1)...(19): siRNA sense strand
gagauacaagucaauagug

SEQ ID NO: 1573447 - RNA, 19 nt, Homo sapiens
  misc_RNA (1)...(19): siRNA sense strand
gaaucaaggaacaaauuuc

SEQ ID NO: 1573448 - RNA, 19 nt, Homo sapiens
  misc_RNA (1)...(19): siRNA sense strand
ccgcugaaccuguugaaga

SEQ ID NO: 1573449 - RNA, 19 nt, Homo sapiens
  misc_RNA (1)...(19): siRNA sense strand
cuucaaaucaucaugcaaa

SEQ ID NO: 1573450 - RNA, 19 nt, Homo sapiens
  misc_RNA (1)...(19): siRNA sense strand
cggauucuacgauugauuu

SEQ ID NO: 1573451 - RNA, 19 nt, Homo sapiens
  misc_RNA (1)...(19): siRNA sense strand
aaaaguacccggacuauau

SEQ ID NO: 1573452 - RNA, 19 nt, Homo sapiens
  misc_RNA (1)...(19): siRNA sense strand
cgcugaaccuguugaagaa

SEQ ID NO: 1573453 - RNA, 19 nt, Homo sapiens
  misc_RNA (1)...(19): siRNA sense strand
gauuucuggugguggauug

SEQ ID NO: 1573454 - RNA, 19 nt, Homo sapiens
  misc_RNA (1)...(19): siRNA sense strand
gugaagacaaugagaaauc

SEQ ID NO: 1573455 - RNA, 19 nt, Homo sapiens
  misc_RNA (1)...(19): siRNA sense strand
ugaucacaguuguacauga

SEQ ID NO: 1573456 - RNA, 19 nt, Homo sapiens
  misc_RNA (1)...(19): siRNA sense strand
acacugacuuauuuguuca

SEQ ID NO: 1573457 - RNA, 19 nt, Homo sapiens
  misc_RNA (1)...(19): siRNA sense strand
uuacauugauagggugaaa

SEQ ID NO: 1573458 - RNA, 19 nt, Homo sapiens
  misc_RNA (1)...(19): siRNA sense strand
ggcaaaaguucaacggauu

SEQ ID NO: 1573459 - RNA, 19 nt, Homo sapiens
  misc_RNA (1)...(19): siRNA sense strand
auaacuggaucacauaucu

SEQ ID NO: 1573460 - RNA, 19 nt, Homo sapiens
  misc_RNA (1)...(19): siRNA sense strand
gguaaacccaagagcuuau

SEQ ID NO: 1573461 - RNA, 19 nt, Homo sapiens
  misc_RNA (1)...(19): siRNA sense strand
cacuaucgaugugaucauu

SEQ ID NO: 1573462 - RNA, 19 nt, Homo sapiens
  misc_RNA (1)...(19): siRNA sense strand
ugacacugacuuauuuguu

SEQ ID NO: 1573463 - RNA, 19 nt, Homo sapiens
  misc_RNA (1)...(19): siRNA sense strand
caaccgucaugaucacagu

SEQ ID NO: 1573464 - RNA, 19 nt, Homo sapiens
  misc_RNA (1)...(19): siRNA sense strand
caucugcauucuuguagca

SEQ ID NO: 1573465 - RNA, 19 nt, Homo sapiens
  misc_RNA (1)...(19): siRNA sense strand
aacuggaucacauaucuua

SEQ ID NO: 1573466 - RNA, 19 nt, Homo sapiens
  misc_RNA (1)...(19): siRNA sense strand
ugaaccuguugaagaagaa

SEQ ID NO: 1573467 - RNA, 19 nt, Homo sapiens
  misc_RNA (1)...(19): siRNA sense strand
aaauguacaaggcucaauu

SEQ ID NO: 1573468 - RNA, 19 nt, Homo sapiens
  misc_RNA (1)...(19): siRNA sense strand
ggugguaucauuuaaucug

SEQ ID NO: 1573469 - RNA, 19 nt, Homo sapiens
  misc_RNA (1)...(19): siRNA sense strand
cugaaucaaggaacaaauu

SEQ ID NO: 1573470 - RNA, 19 nt, Homo sapiens
  misc_RNA (1)...(19): siRNA sense strand
ugaagacaaugagaaaucg

SEQ ID NO: 1573471 - RNA, 19 nt, Homo sapiens
  misc_RNA (1)...(19): siRNA sense strand
cugaaccuguugaagaaga

SEQ ID NO: 1573472 - RNA, 19 nt, Homo sapiens
  misc_RNA (1)...(19): siRNA sense strand
cuucuggugguaucauuua

SEQ ID NO: 1573473 - RNA, 19 nt, Homo sapiens
  misc_RNA (1)...(19): siRNA sense strand
ugagauacaagucaauagu

SEQ ID NO: 1573474 - RNA, 19 nt, Homo sapiens
  misc_RNA (1)...(19): siRNA sense strand
gcccuccacucccagacaa

SEQ ID NO: 1573475 - RNA, 19 nt, Homo sapiens
  misc_RNA (1)...(19): siRNA sense strand
gaucacccaguggcuguuu

SEQ ID NO: 1573476 - RNA, 19 nt, Homo sapiens
  misc_RNA (1)...(19): siRNA sense strand
uguggagacuuccucuuca

SEQ ID NO: 1573477 - RNA, 19 nt, Homo sapiens
  misc_RNA (1)...(19): siRNA sense strand
gaagacaaugagaaaucga

SEQ ID NO: 1573478 - RNA, 19 nt, Homo sapiens
  misc_RNA (1)...(19): siRNA sense strand
ucagaagauuggugaagac

SEQ ID NO: 1573479 - RNA, 19 nt, Homo sapiens
  misc_RNA (1)...(19): siRNA sense strand
cuucacagacuaauuucuu

SEQ ID NO: 1573480 - RNA, 19 nt, Homo sapiens
  misc_RNA (1)...(19): siRNA sense strand
gauccuacgaacacuuaug

SEQ ID NO: 1573481 - RNA, 19 nt, Homo sapiens
  misc_RNA (1)...(19): siRNA sense strand
cagacuaauuucuuaucuc

SEQ ID NO: 1573482 - RNA, 19 nt, Homo sapiens
  misc_RNA (1)...(19): siRNA sense strand
cacgaacacuacacuaucg

SEQ ID NO: 1573483 - RNA, 19 nt, Homo sapiens
  misc_RNA (1)...(19): siRNA sense strand
cacacgaacacuacacuau

SEQ ID NO: 1573484 - RNA, 19 nt, Homo sapiens
  misc_RNA (1)...(19): siRNA sense strand
uuucugagauacaagucaa

SEQ ID NO: 1573485 - RNA, 19 nt, Homo sapiens
  misc_RNA (1)...(19): siRNA sense strand
cccggacuauauccaaauu

SEQ ID NO: 1573486 - RNA, 19 nt, Homo sapiens
  misc_RNA (1)...(19): siRNA sense strand
cggacuauauccaaauugc

SEQ ID NO: 1573487 - RNA, 19 nt, Homo sapiens
  misc_RNA (1)...(19): siRNA sense strand
ucaauuccuugcugcuucu

SEQ ID NO: 1573488 - RNA, 19 nt, Homo sapiens
  misc_RNA (1)...(19): siRNA sense strand
cuggugguaucauuuaauc

SEQ ID NO: 1573489 - RNA, 19 nt, Homo sapiens
  misc_RNA (1)...(19): siRNA sense strand
acgcugacacugacuuauu

SEQ ID NO: 1573490 - RNA, 19 nt, Homo sapiens
  misc_RNA (1)...(19): siRNA sense strand
guucaacggauucuacgau

SEQ ID NO: 1573491 - RNA, 19 nt, Homo sapiens
  misc_RNA (1)...(19): siRNA sense strand
aaagcucaauggagacucu

SEQ ID NO: 1573492 - RNA, 19 nt, Homo sapiens
  misc_RNA (1)...(19): siRNA sense strand
ucugagauacaagucaaua

SEQ ID NO: 1573493 - RNA, 19 nt, Homo sapiens
  misc_RNA (1)...(19): siRNA sense strand
caugaucacaguuguacau

SEQ ID NO: 1573494 - RNA, 19 nt, Homo sapiens
  misc_RNA (1)...(19): siRNA sense strand
guacccggacuauauccaa

SEQ ID NO: 1573495 - RNA, 19 nt, Homo sapiens
  misc_RNA (1)...(19): siRNA sense strand
uacccggacuauauccaaa

SEQ ID NO: 1573496 - RNA, 19 nt, Homo sapiens
  misc_RNA (1)...(19): siRNA sense strand
gauaucauagagacagcaa

SEQ ID NO: 1573497 - RNA, 19 nt, Homo sapiens
  misc_RNA (1)...(19): siRNA sense strand
gcaaugguaaacccaagag

SEQ ID NO: 1573498 - RNA, 19 nt, Homo sapiens
  misc_RNA (1)...(19): siRNA sense strand
ccagugauccuacgaacac

SEQ ID NO: 1573499 - RNA, 19 nt, Homo sapiens
  misc_RNA (1)...(19): siRNA sense strand
acacgaacacuacacuauc

SEQ ID NO: 1573500 - RNA, 19 nt, Homo sapiens
  misc_RNA (1)...(19): siRNA sense strand
uuacgcugacacugacuua

SEQ ID NO: 1573501 - RNA, 19 nt, Homo sapiens
  misc_RNA (1)...(19): siRNA sense strand
uucaacggauucuacgauu

SEQ ID NO: 1573502 - RNA, 19 nt, Homo sapiens
  misc_RNA (1)...(19): siRNA sense strand
aagacccgcugaaccuguu

SEQ ID NO: 1573503 - RNA, 19 nt, Homo sapiens
  misc_RNA (1)...(19): siRNA sense strand
cuucauauaugcaguuuuc

SEQ ID NO: 1573504 - RNA, 19 nt, Homo sapiens
  misc_RNA (1)...(19): siRNA sense strand
aaaguacccggacuauauc

SEQ ID NO: 1573505 - RNA, 19 nt, Homo sapiens
  misc_RNA (1)...(19): siRNA sense strand
gaaccuguugaagaagaaa

SEQ ID NO: 1573506 - RNA, 19 nt, Homo sapiens
  misc_RNA (1)...(19): siRNA sense strand
gccgggaucaucugcauuc

SEQ ID NO: 1573507 - RNA, 19 nt, Homo sapiens
  misc_RNA (1)...(19): siRNA sense strand
cgucaugaucacaguugua

SEQ ID NO: 1573508 - RNA, 19 nt, Homo sapiens
  misc_RNA (1)...(19): siRNA sense strand
gccuucauauaugcaguuu

SEQ ID NO: 1573509 - RNA, 19 nt, Homo sapiens
  misc_RNA (1)...(19): siRNA sense strand
ugguaaacccaagagcuua

SEQ ID NO: 1573510 - RNA, 19 nt, Homo sapiens
  misc_RNA (1)...(19): siRNA sense strand
auucacggguucagaagau

SEQ ID NO: 1573511 - RNA, 19 nt, Homo sapiens
  misc_RNA (1)...(19): siRNA sense strand
ucuccuggccgcugucuug

SEQ ID NO: 1573512 - RNA, 19 nt, Homo sapiens
  misc_RNA (1)...(19): siRNA sense strand
gcucaauuccuugcugcuu

SEQ ID NO: 1573513 - RNA, 19 nt, Homo sapiens
  misc_RNA (1)...(19): siRNA sense strand
uaacuggaucacauaucuu

SEQ ID NO: 1573514 - RNA, 19 nt, Homo sapiens
  misc_RNA (1)...(19): siRNA sense strand
aaaguucaacggauucuac

SEQ ID NO: 1573515 - RNA, 19 nt, Homo sapiens
  misc_RNA (1)...(19): siRNA sense strand
ggacagaaccuauuacuaa

SEQ ID NO: 1573516 - RNA, 19 nt, Homo sapiens
  misc_RNA (1)...(19): siRNA sense strand
caagagaagcuuccaauua

SEQ ID NO: 1573517 - RNA, 19 nt, Homo sapiens
  misc_RNA (1)...(19): siRNA sense strand
gaagaaugccaaagaauug

SEQ ID NO: 1573518 - RNA, 19 nt, Homo sapiens
  misc_RNA (1)...(19): siRNA sense strand
ggaagaaugccaaagaauu

SEQ ID NO: 1573519 - RNA, 19 nt, Homo sapiens
  misc_RNA (1)...(19): siRNA sense strand
cuacagaaaugccagauug

SEQ ID NO: 1573520 - RNA, 19 nt, Homo sapiens
  misc_RNA (1)...(19): siRNA sense strand
gaacagcagacuccucuuu

SEQ ID NO: 1573521 - RNA, 19 nt, Homo sapiens
  misc_RNA (1)...(19): siRNA sense strand
gacagaaccuauuacuaaa

SEQ ID NO: 1573522 - RNA, 19 nt, Homo sapiens
  misc_RNA (1)...(19): siRNA sense strand
gcaaagaaguagacauuuu

SEQ ID NO: 1573523 - RNA, 19 nt, Homo sapiens
  misc_RNA (1)...(19): siRNA sense strand
ggagaaaacugauguggaa

SEQ ID NO: 1573524 - RNA, 19 nt, Homo sapiens
  misc_RNA (1)...(19): siRNA sense strand
aagagaagcuuccaauuag

SEQ ID NO: 1573525 - RNA, 19 nt, Homo sapiens
  misc_RNA (1)...(19): siRNA sense strand
ccacaggccuauuucaaug

SEQ ID NO: 1573526 - RNA, 19 nt, Homo sapiens
  misc_RNA (1)...(19): siRNA sense strand
gaaugaugacaacuucuua

SEQ ID NO: 1573527 - RNA, 19 nt, Homo sapiens
  misc_RNA (1)...(19): siRNA sense strand
ccaaagaauugcagagcuu

SEQ ID NO: 1573528 - RNA, 19 nt, Homo sapiens
  misc_RNA (1)...(19): siRNA sense strand
gggcaaagaaguagacauu

SEQ ID NO: 1573529 - RNA, 19 nt, Homo sapiens
  misc_RNA (1)...(19): siRNA sense strand
cagaaccuauuacuaaaga

SEQ ID NO: 1573530 - RNA, 19 nt, Homo sapiens
  misc_RNA (1)...(19): siRNA sense strand
cagcagagcucccacuucu

SEQ ID NO: 1573531 - RNA, 19 nt, Homo sapiens
  misc_RNA (1)...(19): siRNA sense strand
caaaccaauuccagugaaa

SEQ ID NO: 1573532 - RNA, 19 nt, Homo sapiens
  misc_RNA (1)...(19): siRNA sense strand
gcacugcuguaccucauuc

SEQ ID NO: 1573533 - RNA, 19 nt, Homo sapiens
  misc_RNA (1)...(19): siRNA sense strand
aaaccuaacucaguaugaa

SEQ ID NO: 1573534 - RNA, 19 nt, Homo sapiens
  misc_RNA (1)...(19): siRNA sense strand
gaucuccccucaagaguua

SEQ ID NO: 1573535 - RNA, 19 nt, Homo sapiens
  misc_RNA (1)...(19): siRNA sense strand
uaaggaagaaugccaaaga

SEQ ID NO: 1573536 - RNA, 19 nt, Homo sapiens
  misc_RNA (1)...(19): siRNA sense strand
gaagagaacaguccacacu

SEQ ID NO: 1573537 - RNA, 19 nt, Homo sapiens
  misc_RNA (1)...(19): siRNA sense strand
gcaagagaagcuuccaauu

SEQ ID NO: 1573538 - RNA, 19 nt, Homo sapiens
  misc_RNA (1)...(19): siRNA sense strand
caauccaaaucucaucaaa

SEQ ID NO: 1573539 - RNA, 19 nt, Homo sapiens
  misc_RNA (1)...(19): siRNA sense strand
gccuaucucuucagcauga

SEQ ID NO: 1573540 - RNA, 19 nt, Homo sapiens
  misc_RNA (1)...(19): siRNA sense strand
ucagaaugaugacaacuuc

SEQ ID NO: 1573541 - RNA, 19 nt, Homo sapiens
  misc_RNA (1)...(19): siRNA sense strand
aaagcuacaugucaggaaa

SEQ ID NO: 1573542 - RNA, 19 nt, Homo sapiens
  misc_RNA (1)...(19): siRNA sense strand
ccucaagaguuacugaaga

SEQ ID NO: 1573543 - RNA, 19 nt, Homo sapiens
  misc_RNA (1)...(19): siRNA sense strand
ggacaucaggcucauggaa

SEQ ID NO: 1573544 - RNA, 19 nt, Homo sapiens
  misc_RNA (1)...(19): siRNA sense strand
ugaauaggcugagcaugga

SEQ ID NO: 1573545 - RNA, 19 nt, Homo sapiens
  misc_RNA (1)...(19): siRNA sense strand
ccaaagacgaauacacaaa

SEQ ID NO: 1573546 - RNA, 19 nt, Homo sapiens
  misc_RNA (1)...(19): siRNA sense strand
caaagaauugcagagcuua

SEQ ID NO: 1573547 - RNA, 19 nt, Homo sapiens
  misc_RNA (1)...(19): siRNA sense strand
ggaacuggagcaggaauuu

SEQ ID NO: 1573548 - RNA, 19 nt, Homo sapiens
  misc_RNA (1)...(19): siRNA sense strand
ccaaaucucaucaaaccaa

SEQ ID NO: 1573549 - RNA, 19 nt, Homo sapiens
  misc_RNA (1)...(19): siRNA sense strand
caagacacccaacacagaa

SEQ ID NO: 1573550 - RNA, 19 nt, Homo sapiens
  misc_RNA (1)...(19): siRNA sense strand
caacaagacacccaacaca

SEQ ID NO: 1573551 - RNA, 19 nt, Homo sapiens
  misc_RNA (1)...(19): siRNA sense strand
gcagcucuguccagccauu

SEQ ID NO: 1573552 - RNA, 19 nt, Homo sapiens
  misc_RNA (1)...(19): siRNA sense strand
ucaaaccaauuccagugaa

SEQ ID NO: 1573553 - RNA, 19 nt, Homo sapiens
  misc_RNA (1)...(19): siRNA sense strand
aaggaagaaugccaaagaa

SEQ ID NO: 1573554 - RNA, 19 nt, Homo sapiens
  misc_RNA (1)...(19): siRNA sense strand
ccagugaaacccagugaaa

SEQ ID NO: 1573555 - RNA, 19 nt, Homo sapiens
  misc_RNA (1)...(19): siRNA sense strand
caucaaggccaaagacgaa

SEQ ID NO: 1573556 - RNA, 19 nt, Homo sapiens
  misc_RNA (1)...(19): siRNA sense strand
ucgagaaacuucagaguac

SEQ ID NO: 1573557 - RNA, 19 nt, Homo sapiens
  misc_RNA (1)...(19): siRNA sense strand
aaacaagugugacccuagu

SEQ ID NO: 1573558 - RNA, 19 nt, Homo sapiens
  misc_RNA (1)...(19): siRNA sense strand
gaaaaccggccuugugaaa

SEQ ID NO: 1573559 - RNA, 19 nt, Homo sapiens
  misc_RNA (1)...(19): siRNA sense strand
ggccaaagacgaauacaca

SEQ ID NO: 1573560 - RNA, 19 nt, Homo sapiens
  misc_RNA (1)...(19): siRNA sense strand
caaagacgaauacacaaag

SEQ ID NO: 1573561 - RNA, 19 nt, Homo sapiens
  misc_RNA (1)...(19): siRNA sense strand
caaaucucaucaaaccaau

SEQ ID NO: 1573562 - RNA, 19 nt, Homo sapiens
  misc_RNA (1)...(19): siRNA sense strand
gauaaggaagaaugccaaa

SEQ ID NO: 1573563 - RNA, 19 nt, Homo sapiens
  misc_RNA (1)...(19): siRNA sense strand
gaauugcagagcuuaugaa

SEQ ID NO: 1573564 - RNA, 19 nt, Homo sapiens
  misc_RNA (1)...(19): siRNA sense strand
gggcagcaaacaaguguga

SEQ ID NO: 1573565 - RNA, 19 nt, Homo sapiens
  misc_RNA (1)...(19): siRNA sense strand
cucaagaguuacugaagaa

SEQ ID NO: 1573566 - RNA, 19 nt, Homo sapiens
  misc_RNA (1)...(19): siRNA sense strand
caaggucugcuucuccaaa

SEQ ID NO: 1573567 - RNA, 19 nt, Homo sapiens
  misc_RNA (1)...(19): siRNA sense strand
uggcagcucuggagugauc

SEQ ID NO: 1573568 - RNA, 19 nt, Homo sapiens
  misc_RNA (1)...(19): siRNA sense strand
aaagacgaauacacaaagu

SEQ ID NO: 1573569 - RNA, 19 nt, Homo sapiens
  misc_RNA (1)...(19): siRNA sense strand
acaagacacccaacacaga

SEQ ID NO: 1573570 - RNA, 19 nt, Homo sapiens
  misc_RNA (1)...(19): siRNA sense strand
acaucaggcucauggaaga

SEQ ID NO: 1573571 - RNA, 19 nt, Homo sapiens
  misc_RNA (1)...(19): siRNA sense strand
cuacaugucaggaaacugu

SEQ ID NO: 1573572 - RNA, 19 nt, Homo sapiens
  misc_RNA (1)...(19): siRNA sense strand
gaacuggagcaggaauuuc

SEQ ID NO: 1573573 - RNA, 19 nt, Homo sapiens
  misc_RNA (1)...(19): siRNA sense strand
ucacaacauuggaacuucu

SEQ ID NO: 1573574 - RNA, 19 nt, Homo sapiens
  misc_RNA (1)...(19): siRNA sense strand
gaaguagacauuuuacgaa

SEQ ID NO: 1573575 - RNA, 19 nt, Homo sapiens
  misc_RNA (1)...(19): siRNA sense strand
gaaaacugauguggaagga

SEQ ID NO: 1573576 - RNA, 19 nt, Homo sapiens
  misc_RNA (1)...(19): siRNA sense strand
gaacuucucgugguguaca

SEQ ID NO: 1573577 - RNA, 19 nt, Homo sapiens
  misc_RNA (1)...(19): siRNA sense strand
gaaagcccaucagggaacu

SEQ ID NO: 1573578 - RNA, 19 nt, Homo sapiens
  misc_RNA (1)...(19): siRNA sense strand
ccucagcgcaucccugcua

SEQ ID NO: 1573579 - RNA, 19 nt, Homo sapiens
  misc_RNA (1)...(19): siRNA sense strand
gcagaccuccacccauugu

SEQ ID NO: 1573580 - RNA, 19 nt, Homo sapiens
  misc_RNA (1)...(19): siRNA sense strand
uacgcucccuguccuauga

SEQ ID NO: 1573581 - RNA, 19 nt, Homo sapiens
  misc_RNA (1)...(19): siRNA sense strand
ggagagggcaaagaaguag

SEQ ID NO: 1573582 - RNA, 19 nt, Homo sapiens
  misc_RNA (1)...(19): siRNA sense strand
caguuccucugccaucuau

SEQ ID NO: 1573583 - RNA, 19 nt, Homo sapiens
  misc_RNA (1)...(19): siRNA sense strand
gacucaagcagccaugaaa

SEQ ID NO: 1573584 - RNA, 19 nt, Homo sapiens
  misc_RNA (1)...(19): siRNA sense strand
gaaccuauuacuaaagacu

SEQ ID NO: 1573585 - RNA, 19 nt, Homo sapiens
  misc_RNA (1)...(19): siRNA sense strand
ccagaacucagaaccuguu

SEQ ID NO: 1573586 - RNA, 19 nt, Homo sapiens
  misc_RNA (1)...(19): siRNA sense strand
uggaacuucucguggugua

SEQ ID NO: 1573587 - RNA, 19 nt, Homo sapiens
  misc_RNA (1)...(19): siRNA sense strand
gcaggacaaagcuacaugu

SEQ ID NO: 1573588 - RNA, 19 nt, Homo sapiens
  misc_RNA (1)...(19): siRNA sense strand
ccucugccaucuaugacaa

SEQ ID NO: 1573589 - RNA, 19 nt, Homo sapiens
  misc_RNA (1)...(19): siRNA sense strand
ucaaggccaaagacgaaua

SEQ ID NO: 1573590 - RNA, 19 nt, Homo sapiens
  misc_RNA (1)...(19): siRNA sense strand
aagccuaucucuucagcau

SEQ ID NO: 1573591 - RNA, 19 nt, Homo sapiens
  misc_RNA (1)...(19): siRNA sense strand
ggcaaagaaguagacauuu

SEQ ID NO: 1573592 - RNA, 19 nt, Homo sapiens
  misc_RNA (1)...(19): siRNA sense strand
caaagcuacaugucaggaa

SEQ ID NO: 1573593 - RNA, 19 nt, Homo sapiens
  misc_RNA (1)...(19): siRNA sense strand
gaaaugccagauuguccau

SEQ ID NO: 1573594 - RNA, 19 nt, Homo sapiens
  misc_RNA (1)...(19): siRNA sense strand
ugcuguaccucauucagaa

SEQ ID NO: 1573595 - RNA, 19 nt, Homo sapiens
  misc_RNA (1)...(19): siRNA sense strand
gccagggucuccucacaac

SEQ ID NO: 1573596 - RNA, 19 nt, Homo sapiens
  misc_RNA (1)...(19): siRNA sense strand
cagccagggucuccucaca

SEQ ID NO: 1573597 - RNA, 19 nt, Homo sapiens
  misc_RNA (1)...(19): siRNA sense strand
guuccucugccaucuauga

SEQ ID NO: 1573598 - RNA, 19 nt, Homo sapiens
  misc_RNA (1)...(19): siRNA sense strand
caccacaggccuauuucaa

SEQ ID NO: 1573599 - RNA, 19 nt, Homo sapiens
  misc_RNA (1)...(19): siRNA sense strand
aaaccggccuugugaaaau

SEQ ID NO: 1573600 - RNA, 19 nt, Homo sapiens
  misc_RNA (1)...(19): siRNA sense strand
guccagccauucagaaacu

SEQ ID NO: 1573601 - RNA, 19 nt, Homo sapiens
  misc_RNA (1)...(19): siRNA sense strand
ccagugauccucaauucag

SEQ ID NO: 1573602 - RNA, 19 nt, Homo sapiens
  misc_RNA (1)...(19): siRNA sense strand
gcagcccacucaccaagcu

SEQ ID NO: 1573603 - RNA, 19 nt, Homo sapiens
  misc_RNA (1)...(19): siRNA sense strand
agccuuggccgcuaaguuu

SEQ ID NO: 1573604 - RNA, 19 nt, Homo sapiens
  misc_RNA (1)...(19): siRNA sense strand
agaauugcagagcuuauga

SEQ ID NO: 1573605 - RNA, 19 nt, Homo sapiens
  misc_RNA (1)...(19): siRNA sense strand
gaagcaggacaaagcuaca

SEQ ID NO: 1573606 - RNA, 19 nt, Homo sapiens
  misc_RNA (1)...(19): siRNA sense strand
gacaauccaaaucucauca

SEQ ID NO: 1573607 - RNA, 19 nt, Homo sapiens
  misc_RNA (1)...(19): siRNA sense strand
caggagagggcaaagaagu

SEQ ID NO: 1573608 - RNA, 19 nt, Homo sapiens
  misc_RNA (1)...(19): siRNA sense strand
acuggcagcucuggaguga

SEQ ID NO: 1573609 - RNA, 19 nt, Homo sapiens
  misc_RNA (1)...(19): siRNA sense strand
gcagcagagcucccacuuc

SEQ ID NO: 1573610 - RNA, 19 nt, Homo sapiens
  misc_RNA (1)...(19): siRNA sense strand
gggaagcaggacaaagcua

SEQ ID NO: 1573611 - RNA, 19 nt, Homo sapiens
  misc_RNA (1)...(19): siRNA sense strand
gaauaggcugagcauggaa

SEQ ID NO: 1573612 - RNA, 19 nt, Homo sapiens
  misc_RNA (1)...(19): siRNA sense strand
gggaacuggagcaggaauu

SEQ ID NO: 1573613 - RNA, 19 nt, Homo sapiens
  misc_RNA (1)...(19): siRNA sense strand
gcagcugcaugccucuaac

SEQ ID NO: 1573614 - RNA, 19 nt, Homo sapiens
  misc_RNA (1)...(19): siRNA sense strand
gggaaacccuuggaauccu

SEQ ID NO: 1573615 - RNA, 19 nt, Homo sapiens
  misc_RNA (1)...(19): siRNA sense strand
guaaagugcugccagauua

SEQ ID NO: 1573616 - RNA, 19 nt, Homo sapiens
  misc_RNA (1)...(19): siRNA sense strand
ggaaggagaggauuguaaa

SEQ ID NO: 1573617 - RNA, 19 nt, Homo sapiens
  misc_RNA (1)...(19): siRNA sense strand
gagagucugugcuaaguca

SEQ ID NO: 1573618 - RNA, 19 nt, Homo sapiens
  misc_RNA (1)...(19): siRNA sense strand
gaaaugguggugucacaug

SEQ ID NO: 1573619 - RNA, 19 nt, Homo sapiens
  misc_RNA (1)...(19): siRNA sense strand
cacaggugcugcaauaaga

SEQ ID NO: 1573620 - RNA, 19 nt, Homo sapiens
  misc_RNA (1)...(19): siRNA sense strand
gcaauaagaaccgcauaga

SEQ ID NO: 1573621 - RNA, 19 nt, Homo sapiens
  misc_RNA (1)...(19): siRNA sense strand
gcaauaaagucaaaacuac

SEQ ID NO: 1573622 - RNA, 19 nt, Homo sapiens
  misc_RNA (1)...(19): siRNA sense strand
caauaagaaccgcauagaa

SEQ ID NO: 1573623 - RNA, 19 nt, Homo sapiens
  misc_RNA (1)...(19): siRNA sense strand
gcaggucaccaccaaauca

SEQ ID NO: 1573624 - RNA, 19 nt, Homo sapiens
  misc_RNA (1)...(19): siRNA sense strand
ggaugagagucugugcuaa

SEQ ID NO: 1573625 - RNA, 19 nt, Homo sapiens
  misc_RNA (1)...(19): siRNA sense strand
ucacaugaauccguguuug

SEQ ID NO: 1573626 - RNA, 19 nt, Homo sapiens
  misc_RNA (1)...(19): siRNA sense strand
guugaagcuuccauuguga

SEQ ID NO: 1573627 - RNA, 19 nt, Homo sapiens
  misc_RNA (1)...(19): siRNA sense strand
cagaaaugguggugucaca

SEQ ID NO: 1573628 - RNA, 19 nt, Homo sapiens
  misc_RNA (1)...(19): siRNA sense strand
aaaugguggugucacauga

SEQ ID NO: 1573629 - RNA, 19 nt, Homo sapiens
  misc_RNA (1)...(19): siRNA sense strand
aauaagaaccgcauagaag

SEQ ID NO: 1573630 - RNA, 19 nt, Homo sapiens
  misc_RNA (1)...(19): siRNA sense strand
uguugaagcuuccauugug

SEQ ID NO: 1573631 - RNA, 19 nt, Homo sapiens
  misc_RNA (1)...(19): siRNA sense strand
gggcucaaccuucuugugu

SEQ ID NO: 1573632 - RNA, 19 nt, Homo sapiens
  misc_RNA (1)...(19): siRNA sense strand
ggucacaaacggucaagug

SEQ ID NO: 1573633 - RNA, 19 nt, Homo sapiens
  misc_RNA (1)...(19): siRNA sense strand
cuuucuagccuacguguua

SEQ ID NO: 1573634 - RNA, 19 nt, Homo sapiens
  misc_RNA (1)...(19): siRNA sense strand
aggagaggauuguaaagug

SEQ ID NO: 1573635 - RNA, 19 nt, Homo sapiens
  misc_RNA (1)...(19): siRNA sense strand
aagcuuccauugugauuca

SEQ ID NO: 1573636 - RNA, 19 nt, Homo sapiens
  misc_RNA (1)...(19): siRNA sense strand
gggcacaacucgggcucaa

SEQ ID NO: 1573637 - RNA, 19 nt, Homo sapiens
  misc_RNA (1)...(19): siRNA sense strand
gaugagagucugugcuaag

SEQ ID NO: 1573638 - RNA, 19 nt, Homo sapiens
  misc_RNA (1)...(19): siRNA sense strand
auaagaaccgcauagaaga

SEQ ID NO: 1573639 - RNA, 19 nt, Homo sapiens
  misc_RNA (1)...(19): siRNA sense strand
gaaggagaggauuguaaag

SEQ ID NO: 1573640 - RNA, 19 nt, Homo sapiens
  misc_RNA (1)...(19): siRNA sense strand
uagaagagcggucacaaac

SEQ ID NO: 1573641 - RNA, 19 nt, Homo sapiens
  misc_RNA (1)...(19): siRNA sense strand
caguggcaauaaagucaaa

SEQ ID NO: 1573642 - RNA, 19 nt, Homo sapiens
  misc_RNA (1)...(19): siRNA sense strand
ggcucaaccuucuuguguu

SEQ ID NO: 1573643 - RNA, 19 nt, Homo sapiens
  misc_RNA (1)...(19): siRNA sense strand
uguaaagugcugccagauu

SEQ ID NO: 1573644 - RNA, 19 nt, Homo sapiens
  misc_RNA (1)...(19): siRNA sense strand
gaauccguguuuggaagga

SEQ ID NO: 1573645 - RNA, 19 nt, Homo sapiens
  misc_RNA (1)...(19): siRNA sense strand
uggaaggagaggauuguaa

SEQ ID NO: 1573646 - RNA, 19 nt, Homo sapiens
  misc_RNA (1)...(19): siRNA sense strand
ucaagcaagggaccuguga

SEQ ID NO: 1573647 - RNA, 19 nt, Homo sapiens
  misc_RNA (1)...(19): siRNA sense strand
cuguagcaguggcaauaaa

SEQ ID NO: 1573648 - RNA, 19 nt, Homo sapiens
  misc_RNA (1)...(19): siRNA sense strand
acaugcaggucaccaccaa

SEQ ID NO: 1573649 - RNA, 19 nt, Homo sapiens
  misc_RNA (1)...(19): siRNA sense strand
gcaguggcaauaaagucaa

SEQ ID NO: 1573650 - RNA, 19 nt, Homo sapiens
  misc_RNA (1)...(19): siRNA sense strand
uagccuacguguuaauggu

SEQ ID NO: 1573651 - RNA, 19 nt, Homo sapiens
  misc_RNA (1)...(19): siRNA sense strand
uuaauggugugcuguaagc

SEQ ID NO: 1573652 - RNA, 19 nt, Homo sapiens
  misc_RNA (1)...(19): siRNA sense strand
ccagauuacucagguuggu

SEQ ID NO: 1573653 - RNA, 19 nt, Homo sapiens
  misc_RNA (1)...(19): siRNA sense strand
uguuaauggugugcuguaa

SEQ ID NO: 1573654 - RNA, 19 nt, Homo sapiens
  misc_RNA (1)...(19): siRNA sense strand
auagaagagcggucacaaa

SEQ ID NO: 1573655 - RNA, 19 nt, Homo sapiens
  misc_RNA (1)...(19): siRNA sense strand
ggcaauaaagucaaaacua

SEQ ID NO: 1573656 - RNA, 19 nt, Homo sapiens
  misc_RNA (1)...(19): siRNA sense strand
caugaauccguguuuggaa

SEQ ID NO: 1573657 - RNA, 19 nt, Homo sapiens
  misc_RNA (1)...(19): siRNA sense strand
aggaugagagucugugcua

SEQ ID NO: 1573658 - RNA, 19 nt, Homo sapiens
  misc_RNA (1)...(19): siRNA sense strand
gaagcuuccauugugauuc

SEQ ID NO: 1573659 - RNA, 19 nt, Homo sapiens
  misc_RNA (1)...(19): siRNA sense strand
ugaagcuuccauugugauu

SEQ ID NO: 1573660 - RNA, 19 nt, Homo sapiens
  misc_RNA (1)...(19): siRNA sense strand
uaagaaccgcauagaagag

SEQ ID NO: 1573661 - RNA, 19 nt, Homo sapiens
  misc_RNA (1)...(19): siRNA sense strand
uuucuagccuacguguuaa

SEQ ID NO: 1573662 - RNA, 19 nt, Homo sapiens
  misc_RNA (1)...(19): siRNA sense strand
ggaauugucuuaaguguag

SEQ ID NO: 1573663 - RNA, 19 nt, Homo sapiens
  misc_RNA (1)...(19): siRNA sense strand
gaacagggagggaugauuu

SEQ ID NO: 1573664 - RNA, 19 nt, Homo sapiens
  misc_RNA (1)...(19): siRNA sense strand
ggaaggaggaauugucuua

SEQ ID NO: 1573665 - RNA, 19 nt, Homo sapiens
  misc_RNA (1)...(19): siRNA sense strand
gagaaaagcuuacaaauac

SEQ ID NO: 1573666 - RNA, 19 nt, Homo sapiens
  misc_RNA (1)...(19): siRNA sense strand
aguaagagcuuucgaguau

SEQ ID NO: 1573667 - RNA, 19 nt, Homo sapiens
  misc_RNA (1)...(19): siRNA sense strand
uuaaagaggcaaugacuua

SEQ ID NO: 1573668 - RNA, 19 nt, Homo sapiens
  misc_RNA (1)...(19): siRNA sense strand
gaaggcuguuguucagaua

SEQ ID NO: 1573669 - RNA, 19 nt, Homo sapiens
  misc_RNA (1)...(19): siRNA sense strand
ccuacaagcuccuaacaaa

SEQ ID NO: 1573670 - RNA, 19 nt, Homo sapiens
  misc_RNA (1)...(19): siRNA sense strand
caaaugacaugugguuaau

SEQ ID NO: 1573671 - RNA, 19 nt, Homo sapiens
  misc_RNA (1)...(19): siRNA sense strand
gggaugauuuggaagauau

SEQ ID NO: 1573672 - RNA, 19 nt, Homo sapiens
  misc_RNA (1)...(19): siRNA sense strand
gacaugugguuaaugauga

SEQ ID NO: 1573673 - RNA, 19 nt, Homo sapiens
  misc_RNA (1)...(19): siRNA sense strand
ccugaaauaugcuggagua

SEQ ID NO: 1573674 - RNA, 19 nt, Homo sapiens
  misc_RNA (1)...(19): siRNA sense strand
gaccaaacacugugacaaa

SEQ ID NO: 1573675 - RNA, 19 nt, Homo sapiens
  misc_RNA (1)...(19): siRNA sense strand
gcuagcaguuugccugaaa

SEQ ID NO: 1573676 - RNA, 19 nt, Homo sapiens
  misc_RNA (1)...(19): siRNA sense strand
cuuaacagccuucucaaua

SEQ ID NO: 1573677 - RNA, 19 nt, Homo sapiens
  misc_RNA (1)...(19): siRNA sense strand
uuaacagccuucucaauau

SEQ ID NO: 1573678 - RNA, 19 nt, Homo sapiens
  misc_RNA (1)...(19): siRNA sense strand
gcauggagcucaguaagag

SEQ ID NO: 1573679 - RNA, 19 nt, Homo sapiens
  misc_RNA (1)...(19): siRNA sense strand
caaaugguucugacaauga

SEQ ID NO: 1573680 - RNA, 19 nt, Homo sapiens
  misc_RNA (1)...(19): siRNA sense strand
guagaaggcuguuguucag

SEQ ID NO: 1573681 - RNA, 19 nt, Homo sapiens
  misc_RNA (1)...(19): siRNA sense strand
uaucuaggccacacuauaa

SEQ ID NO: 1573682 - RNA, 19 nt, Homo sapiens
  misc_RNA (1)...(19): siRNA sense strand
aaugacaugugguuaauga

SEQ ID NO: 1573683 - RNA, 19 nt, Homo sapiens
  misc_RNA (1)...(19): siRNA sense strand
ugucuuaaguguagaauca

SEQ ID NO: 1573684 - RNA, 19 nt, Homo sapiens
  misc_RNA (1)...(19): siRNA sense strand
aagcagaguucuucaguuc

SEQ ID NO: 1573685 - RNA, 19 nt, Homo sapiens
  misc_RNA (1)...(19): siRNA sense strand
gcaguuugccugaaauaug

SEQ ID NO: 1573686 - RNA, 19 nt, Homo sapiens
  misc_RNA (1)...(19): siRNA sense strand
uaacagccuucucaauauc

SEQ ID NO: 1573687 - RNA, 19 nt, Homo sapiens
  misc_RNA (1)...(19): siRNA sense strand
cuggagaccuugaauaugu

SEQ ID NO: 1573688 - RNA, 19 nt, Homo sapiens
  misc_RNA (1)...(19): siRNA sense strand
guaagagcuuucgaguaua

SEQ ID NO: 1573689 - RNA, 19 nt, Homo sapiens
  misc_RNA (1)...(19): siRNA sense strand
ccaaaugguucugacaaug

SEQ ID NO: 1573690 - RNA, 19 nt, Homo sapiens
  misc_RNA (1)...(19): siRNA sense strand
caucacagccuuucuaucu

SEQ ID NO: 1573691 - RNA, 19 nt, Homo sapiens
  misc_RNA (1)...(19): siRNA sense strand
gaggaauugucuuaagugu

SEQ ID NO: 1573692 - RNA, 19 nt, Homo sapiens
  misc_RNA (1)...(19): siRNA sense strand
gaaggaggaauugucuuaa

SEQ ID NO: 1573693 - RNA, 19 nt, Homo sapiens
  misc_RNA (1)...(19): siRNA sense strand
uaagagcuuucgaguauac

SEQ ID NO: 1573694 - RNA, 19 nt, Homo sapiens
  misc_RNA (1)...(19): siRNA sense strand
acaaaugacaugugguuaa

SEQ ID NO: 1573695 - RNA, 19 nt, Homo sapiens
  misc_RNA (1)...(19): siRNA sense strand
caaacacugugacaaagca

SEQ ID NO: 1573696 - RNA, 19 nt, Homo sapiens
  misc_RNA (1)...(19): siRNA sense strand
ucuguugggcuuucuauua

SEQ ID NO: 1573697 - RNA, 19 nt, Homo sapiens
  misc_RNA (1)...(19): siRNA sense strand
cagaagaugcugauggaaa

SEQ ID NO: 1573698 - RNA, 19 nt, Homo sapiens
  misc_RNA (1)...(19): siRNA sense strand
ugacaaagcagaguucuuc

SEQ ID NO: 1573699 - RNA, 19 nt, Homo sapiens
  misc_RNA (1)...(19): siRNA sense strand
cuguugggcuuucuauuaa

SEQ ID NO: 1573700 - RNA, 19 nt, Homo sapiens
  misc_RNA (1)...(19): siRNA sense strand
ucacagccuuucuaucuag

SEQ ID NO: 1573701 - RNA, 19 nt, Homo sapiens
  misc_RNA (1)...(19): siRNA sense strand
ccaaaucagaugcauguga

SEQ ID NO: 1573702 - RNA, 19 nt, Homo sapiens
  misc_RNA (1)...(19): siRNA sense strand
ggagggaugauuuggaaga

SEQ ID NO: 1573703 - RNA, 19 nt, Homo sapiens
  misc_RNA (1)...(19): siRNA sense strand
guucagauauggcuguuac

SEQ ID NO: 1573704 - RNA, 19 nt, Homo sapiens
  misc_RNA (1)...(19): siRNA sense strand
aagaggcaaugacuuauca

SEQ ID NO: 1573705 - RNA, 19 nt, Homo sapiens
  misc_RNA (1)...(19): siRNA sense strand
cagauauggcuguuacuuu

SEQ ID NO: 1573706 - RNA, 19 nt, Homo sapiens
  misc_RNA (1)...(19): siRNA sense strand
uacaagcuccuaacaaaga

SEQ ID NO: 1573707 - RNA, 19 nt, Homo sapiens
  misc_RNA (1)...(19): siRNA sense strand
ccacuacguuugcuaucau

SEQ ID NO: 1573708 - RNA, 19 nt, Homo sapiens
  misc_RNA (1)...(19): siRNA sense strand
agaugcaugugaugaugua

SEQ ID NO: 1573709 - RNA, 19 nt, Homo sapiens
  misc_RNA (1)...(19): siRNA sense strand
gcuggaguauuugcagaaa

SEQ ID NO: 1573710 - RNA, 19 nt, Homo sapiens
  misc_RNA (1)...(19): siRNA sense strand
aauacgccuuugauaagua

SEQ ID NO: 1573711 - RNA, 19 nt, Homo sapiens
  misc_RNA (1)...(19): siRNA sense strand
ggaggaauugucuuaagug

SEQ ID NO: 1573712 - RNA, 19 nt, Homo sapiens
  misc_RNA (1)...(19): siRNA sense strand
uauaaaaucuggagaccuu

SEQ ID NO: 1573713 - RNA, 19 nt, Homo sapiens
  misc_RNA (1)...(19): siRNA sense strand
caaagcagaguucuucagu

SEQ ID NO: 1573714 - RNA, 19 nt, Homo sapiens
  misc_RNA (1)...(19): siRNA sense strand
aaagcagaguucuucaguu

SEQ ID NO: 1573715 - RNA, 19 nt, Homo sapiens
  misc_RNA (1)...(19): siRNA sense strand
agacuuaacagccuucuca

SEQ ID NO: 1573716 - RNA, 19 nt, Homo sapiens
  misc_RNA (1)...(19): siRNA sense strand
gggcauauuuucaaugaug

SEQ ID NO: 1573717 - RNA, 19 nt, Homo sapiens
  misc_RNA (1)...(19): siRNA sense strand
ucagaugcaugugaugaug

SEQ ID NO: 1573718 - RNA, 19 nt, Homo sapiens
  misc_RNA (1)...(19): siRNA sense strand
agauauggcuguuacuuuu

SEQ ID NO: 1573719 - RNA, 19 nt, Homo sapiens
  misc_RNA (1)...(19): siRNA sense strand
uaggauuggucauggaaau

SEQ ID NO: 1573720 - RNA, 19 nt, Homo sapiens
  misc_RNA (1)...(19): siRNA sense strand
gcuaggacacauuaggauu

SEQ ID NO: 1573721 - RNA, 19 nt, Homo sapiens
  misc_RNA (1)...(19): siRNA sense strand
gauuggucauggaaauaga

SEQ ID NO: 1573722 - RNA, 19 nt, Homo sapiens
  misc_RNA (1)...(19): siRNA sense strand
ugacaugugguuaaugaug

SEQ ID NO: 1573723 - RNA, 19 nt, Homo sapiens
  misc_RNA (1)...(19): siRNA sense strand
agaaggcuguuguucagau

SEQ ID NO: 1573724 - RNA, 19 nt, Homo sapiens
  misc_RNA (1)...(19): siRNA sense strand
gcuccuaacaaagaagaua

SEQ ID NO: 1573725 - RNA, 19 nt, Homo sapiens
  misc_RNA (1)...(19): siRNA sense strand
gagggaugauuuggaagau

SEQ ID NO: 1573726 - RNA, 19 nt, Homo sapiens
  misc_RNA (1)...(19): siRNA sense strand
agggagggaugauuuggaa

SEQ ID NO: 1573727 - RNA, 19 nt, Homo sapiens
  misc_RNA (1)...(19): siRNA sense strand
acaagcuccuaacaaagaa

SEQ ID NO: 1573728 - RNA, 19 nt, Homo sapiens
  misc_RNA (1)...(19): siRNA sense strand
ggaccaaacacugugacaa

SEQ ID NO: 1573729 - RNA, 19 nt, Homo sapiens
  misc_RNA (1)...(19): siRNA sense strand
gguaguagaaggcuguugu

SEQ ID NO: 1573730 - RNA, 19 nt, Homo sapiens
  misc_RNA (1)...(19): siRNA sense strand
agaagaugcugauggaaaa

SEQ ID NO: 1573731 - RNA, 19 nt, Homo sapiens
  misc_RNA (1)...(19): siRNA sense strand
ugcagaagaugcugaugga

SEQ ID NO: 1573732 - RNA, 19 nt, Homo sapiens
  misc_RNA (1)...(19): siRNA sense strand
aaauacgccuuugauaagu

SEQ ID NO: 1573733 - RNA, 19 nt, Homo sapiens
  misc_RNA (1)...(19): siRNA sense strand
ugauaaguauagagaccaa

SEQ ID NO: 1573734 - RNA, 19 nt, Homo sapiens
  misc_RNA (1)...(19): siRNA sense strand
caguuugccugaaauaugc

SEQ ID NO: 1573735 - RNA, 19 nt, Homo sapiens
  misc_RNA (1)...(19): siRNA sense strand
caguaagagcuuucgagua

SEQ ID NO: 1573736 - RNA, 19 nt, Homo sapiens
  misc_RNA (1)...(19): siRNA sense strand
uuuggaagauaucugaaga

SEQ ID NO: 1573737 - RNA, 19 nt, Homo sapiens
  misc_RNA (1)...(19): siRNA sense strand
gcaguaaaggagacuugga

SEQ ID NO: 1573738 - RNA, 19 nt, Homo sapiens
  misc_RNA (1)...(19): siRNA sense strand
uuucuuaccuccaaauggu

SEQ ID NO: 1573739 - RNA, 19 nt, Homo sapiens
  misc_RNA (1)...(19): siRNA sense strand
uaaagaggcaaugacuuau

SEQ ID NO: 1573740 - RNA, 19 nt, Homo sapiens
  misc_RNA (1)...(19): siRNA sense strand
ggguauggaaggaggaauu

SEQ ID NO: 1573741 - RNA, 19 nt, Homo sapiens
  misc_RNA (1)...(19): siRNA sense strand
cuaucuaggccacacuaua

SEQ ID NO: 1573742 - RNA, 19 nt, Homo sapiens
  misc_RNA (1)...(19): siRNA sense strand
cuaggacacauuaggauug

SEQ ID NO: 1573743 - RNA, 19 nt, Homo sapiens
  misc_RNA (1)...(19): siRNA sense strand
gaugagaaaagcuuacaaa

SEQ ID NO: 1573744 - RNA, 19 nt, Homo sapiens
  misc_RNA (1)...(19): siRNA sense strand
ugauuuggaagauaucuga

SEQ ID NO: 1573745 - RNA, 19 nt, Homo sapiens
  misc_RNA (1)...(19): siRNA sense strand
ggauuggucauggaaauag

SEQ ID NO: 1573746 - RNA, 19 nt, Homo sapiens
  misc_RNA (1)...(19): siRNA sense strand
uccaaaugguucugacaau

SEQ ID NO: 1573747 - RNA, 19 nt, Homo sapiens
  misc_RNA (1)...(19): siRNA sense strand
uagcaguuugccugaaaua

SEQ ID NO: 1573748 - RNA, 19 nt, Homo sapiens
  misc_RNA (1)...(19): siRNA sense strand
aggaggaauugucuuaagu

SEQ ID NO: 1573749 - RNA, 19 nt, Homo sapiens
  misc_RNA (1)...(19): siRNA sense strand
aaggaggaauugucuuaag

SEQ ID NO: 1573750 - RNA, 19 nt, Homo sapiens
  misc_RNA (1)...(19): siRNA sense strand
aaucuggagaccuugaaua

SEQ ID NO: 1573751 - RNA, 19 nt, Homo sapiens
  misc_RNA (1)...(19): siRNA sense strand
uacguuugcuaucauugaa

SEQ ID NO: 1573752 - RNA, 19 nt, Homo sapiens
  misc_RNA (1)...(19): siRNA sense strand
acuaugcuaggacacauua

SEQ ID NO: 1573753 - RNA, 19 nt, Homo sapiens
  misc_RNA (1)...(19): siRNA sense strand
ugugguuaaugaugagaaa

SEQ ID NO: 1573754 - RNA, 19 nt, Homo sapiens
  misc_RNA (1)...(19): siRNA sense strand
gauauggcuguuacuuuua

SEQ ID NO: 1573755 - RNA, 19 nt, Homo sapiens
  misc_RNA (1)...(19): siRNA sense strand
guaguagaaggcuguuguu

SEQ ID NO: 1573756 - RNA, 19 nt, Homo sapiens
  misc_RNA (1)...(19): siRNA sense strand
cuacguuugcuaucauuga

SEQ ID NO: 1573757 - RNA, 19 nt, Homo sapiens
  misc_RNA (1)...(19): siRNA sense strand
ccaauacaacugguucuuc

SEQ ID NO: 1573758 - RNA, 19 nt, Homo sapiens
  misc_RNA (1)...(19): siRNA sense strand
gguauggaaggaggaauug

SEQ ID NO: 1573759 - RNA, 19 nt, Homo sapiens
  misc_RNA (1)...(19): siRNA sense strand
ggucauggaaauagaaugc

SEQ ID NO: 1573760 - RNA, 19 nt, Homo sapiens
  misc_RNA (1)...(19): siRNA sense strand
agggaugauuuggaagaua

SEQ ID NO: 1573761 - RNA, 19 nt, Homo sapiens
  misc_RNA (1)...(19): siRNA sense strand
cuuagggcauuugggcaua

SEQ ID NO: 1573762 - RNA, 19 nt, Homo sapiens
  misc_RNA (1)...(19): siRNA sense strand
gauagaagccuuugucugu

SEQ ID NO: 1573763 - RNA, 19 nt, Homo sapiens
  misc_RNA (1)...(19): siRNA sense strand
gaugaaaugucagaggaaa

SEQ ID NO: 1573764 - RNA, 19 nt, Homo sapiens
  misc_RNA (1)...(19): siRNA sense strand
gagccaggaugaaauguca

SEQ ID NO: 1573765 - RNA, 19 nt, Homo sapiens
  misc_RNA (1)...(19): siRNA sense strand
ggaucgggcucaccuacaa

SEQ ID NO: 1573766 - RNA, 19 nt, Homo sapiens
  misc_RNA (1)...(19): siRNA sense strand
ggacauccucgccuucuau

SEQ ID NO: 1573767 - RNA, 19 nt, Homo sapiens
  misc_RNA (1)...(19): siRNA sense strand
cgacggagacugcuucaug

SEQ ID NO: 1573768 - RNA, 19 nt, Homo sapiens
  misc_RNA (1)...(19): siRNA sense strand
caccaggccuucaccaguu

SEQ ID NO: 1573769 - RNA, 19 nt, Homo sapiens
  misc_RNA (1)...(19): siRNA sense strand
cagaggcagacaccuauua

SEQ ID NO: 1573770 - RNA, 19 nt, Homo sapiens
  misc_RNA (1)...(19): siRNA sense strand
gaacgaccagcgcugcaaa

SEQ ID NO: 1573771 - RNA, 19 nt, Homo sapiens
  misc_RNA (1)...(19): siRNA sense strand
uuacagagccaggaugaaa

SEQ ID NO: 1573772 - RNA, 19 nt, Homo sapiens
  misc_RNA (1)...(19): siRNA sense strand
gcaagugggcuggaacaug

SEQ ID NO: 1573773 - RNA, 19 nt, Homo sapiens
  misc_RNA (1)...(19): siRNA sense strand
gcaaaacccgaaaccguua

SEQ ID NO: 1573774 - RNA, 19 nt, Homo sapiens
  misc_RNA (1)...(19): siRNA sense strand
gaacaggaaggagaguuuc

SEQ ID NO: 1573775 - RNA, 19 nt, Homo sapiens
  misc_RNA (1)...(19): siRNA sense strand
cguuacaucugccaguuug

SEQ ID NO: 1573776 - RNA, 19 nt, Homo sapiens
  misc_RNA (1)...(19): siRNA sense strand
ccauggacgucucaacauc

SEQ ID NO: 1573777 - RNA, 19 nt, Homo sapiens
  misc_RNA (1)...(19): siRNA sense strand
ggaaggagaguuucuugcu

SEQ ID NO: 1573778 - RNA, 19 nt, Homo sapiens
  misc_RNA (1)...(19): siRNA sense strand
ggcagacaccuauuacaga

SEQ ID NO: 1573779 - RNA, 19 nt, Homo sapiens
  misc_RNA (1)...(19): siRNA sense strand
ugaacaggaaggagaguuu

SEQ ID NO: 1573780 - RNA, 19 nt, Homo sapiens
  misc_RNA (1)...(19): siRNA sense strand
gaucaagagccagaaagug

SEQ ID NO: 1573781 - RNA, 19 nt, Homo sapiens
  misc_RNA (1)...(19): siRNA sense strand
ggagugcucgugcgucugu

SEQ ID NO: 1573782 - RNA, 19 nt, Homo sapiens
  misc_RNA (1)...(19): siRNA sense strand
cagcugccuucaacuggaa

SEQ ID NO: 1573783 - RNA, 19 nt, Homo sapiens
  misc_RNA (1)...(19): siRNA sense strand
gccagaaagugcaggacau

SEQ ID NO: 1573784 - RNA, 19 nt, Homo sapiens
  misc_RNA (1)...(19): siRNA sense strand
ggaugaaaugucagaggaa

SEQ ID NO: 1573785 - RNA, 19 nt, Homo sapiens
  misc_RNA (1)...(19): siRNA sense strand
acgaggugauugacaguga

SEQ ID NO: 1573786 - RNA, 19 nt, Homo sapiens
  misc_RNA (1)...(19): siRNA sense strand
gaggucaacgggaagacaa

SEQ ID NO: 1573787 - RNA, 19 nt, Homo sapiens
  misc_RNA (1)...(19): siRNA sense strand
ugucucaggcugcuucaaa

SEQ ID NO: 1573788 - RNA, 19 nt, Homo sapiens
  misc_RNA (1)...(19): siRNA sense strand
cuucagaggcagacaccua

SEQ ID NO: 1573789 - RNA, 19 nt, Homo sapiens
  misc_RNA (1)...(19): siRNA sense strand
ccagaucaagagccagaaa

SEQ ID NO: 1573790 - RNA, 19 nt, Homo sapiens
  misc_RNA (1)...(19): siRNA sense strand
caggaaggagaguuucuug

SEQ ID NO: 1573791 - RNA, 19 nt, Homo sapiens
  misc_RNA (1)...(19): siRNA sense strand
ggaacgaccagcgcugcaa

SEQ ID NO: 1573792 - RNA, 19 nt, Homo sapiens
  misc_RNA (1)...(19): siRNA sense strand
gcuucauggugucuucaga

SEQ ID NO: 1573793 - RNA, 19 nt, Homo sapiens
  misc_RNA (1)...(19): siRNA sense strand
ccuacaagaccgccaagga

SEQ ID NO: 1573794 - RNA, 19 nt, Homo sapiens
  misc_RNA (1)...(19): siRNA sense strand
uauuacagagccaggauga

SEQ ID NO: 1573795 - RNA, 19 nt, Homo sapiens
  misc_RNA (1)...(19): siRNA sense strand
aggcuggacuggagugaca

SEQ ID NO: 1573796 - RNA, 19 nt, Homo sapiens
  misc_RNA (1)...(19): siRNA sense strand
ggcuucagcugccuucaac

SEQ ID NO: 1573797 - RNA, 19 nt, Homo sapiens
  misc_RNA (1)...(19): siRNA sense strand
acagagccaggaugaaaug

SEQ ID NO: 1573798 - RNA, 19 nt, Homo sapiens
  misc_RNA (1)...(19): siRNA sense strand
ggugauugacagugacuuc

SEQ ID NO: 1573799 - RNA, 19 nt, Homo sapiens
  misc_RNA (1)...(19): siRNA sense strand
cauccucgccuucuaucug

SEQ ID NO: 1573800 - RNA, 19 nt, Homo sapiens
  misc_RNA (1)...(19): siRNA sense strand
gauagaagccuuugucugu

SEQ ID NO: 1573801 - RNA, 19 nt, Homo sapiens
  misc_RNA (1)...(19): siRNA sense strand
gaugaaaugucagaggaaa

SEQ ID NO: 1573802 - RNA, 19 nt, Homo sapiens
  misc_RNA (1)...(19): siRNA sense strand
gagccaggaugaaauguca

SEQ ID NO: 1573803 - RNA, 19 nt, Homo sapiens
  misc_RNA (1)...(19): siRNA sense strand
ggaucgggcucaccuacaa

SEQ ID NO: 1573804 - RNA, 19 nt, Homo sapiens
  misc_RNA (1)...(19): siRNA sense strand
ggacauccucgccuucuau

SEQ ID NO: 1573805 - RNA, 19 nt, Homo sapiens
  misc_RNA (1)...(19): siRNA sense strand
cgacggagacugcuucaug

SEQ ID NO: 1573806 - RNA, 19 nt, Homo sapiens
  misc_RNA (1)...(19): siRNA sense strand
caccaggccuucaccaguu

SEQ ID NO: 1573807 - RNA, 19 nt, Homo sapiens
  misc_RNA (1)...(19): siRNA sense strand
cagaggcagacaccuauua

SEQ ID NO: 1573808 - RNA, 19 nt, Homo sapiens
  misc_RNA (1)...(19): siRNA sense strand
gaacgaccagcgcugcaaa

SEQ ID NO: 1573809 - RNA, 19 nt, Homo sapiens
  misc_RNA (1)...(19): siRNA sense strand
uuacagagccaggaugaaa

SEQ ID NO: 1573810 - RNA, 19 nt, Homo sapiens
  misc_RNA (1)...(19): siRNA sense strand
gcaagugggcuggaacaug

SEQ ID NO: 1573811 - RNA, 19 nt, Homo sapiens
  misc_RNA (1)...(19): siRNA sense strand
gcaaaacccgaaaccguua

SEQ ID NO: 1573812 - RNA, 19 nt, Homo sapiens
  misc_RNA (1)...(19): siRNA sense strand
gaacaggaaggagaguuuc

SEQ ID NO: 1573813 - RNA, 19 nt, Homo sapiens
  misc_RNA (1)...(19): siRNA sense strand
cguuacaucugccaguuug

SEQ ID NO: 1573814 - RNA, 19 nt, Homo sapiens
  misc_RNA (1)...(19): siRNA sense strand
ccauggacgucucaacauc

SEQ ID NO: 1573815 - RNA, 19 nt, Homo sapiens
  misc_RNA (1)...(19): siRNA sense strand
ggaaggagaguuucuugcu

SEQ ID NO: 1573816 - RNA, 19 nt, Homo sapiens
  misc_RNA (1)...(19): siRNA sense strand
ggcagacaccuauuacaga

SEQ ID NO: 1573817 - RNA, 19 nt, Homo sapiens
  misc_RNA (1)...(19): siRNA sense strand
ugaacaggaaggagaguuu

SEQ ID NO: 1573818 - RNA, 19 nt, Homo sapiens
  misc_RNA (1)...(19): siRNA sense strand
gaucaagagccagaaagug

SEQ ID NO: 1573819 - RNA, 19 nt, Homo sapiens
  misc_RNA (1)...(19): siRNA sense strand
ggagugcucgugcgucugu

SEQ ID NO: 1573820 - RNA, 19 nt, Homo sapiens
  misc_RNA (1)...(19): siRNA sense strand
cagcugccuucaacuggaa

SEQ ID NO: 1573821 - RNA, 19 nt, Homo sapiens
  misc_RNA (1)...(19): siRNA sense strand
gccagaaagugcaggacau

SEQ ID NO: 1573822 - RNA, 19 nt, Homo sapiens
  misc_RNA (1)...(19): siRNA sense strand
ggaugaaaugucagaggaa

SEQ ID NO: 1573823 - RNA, 19 nt, Homo sapiens
  misc_RNA (1)...(19): siRNA sense strand
acgaggugauugacaguga

SEQ ID NO: 1573824 - RNA, 19 nt, Homo sapiens
  misc_RNA (1)...(19): siRNA sense strand
gaggucaacgggaagacaa

SEQ ID NO: 1573825 - RNA, 19 nt, Homo sapiens
  misc_RNA (1)...(19): siRNA sense strand
ugucucaggcugcuucaaa

SEQ ID NO: 1573826 - RNA, 19 nt, Homo sapiens
  misc_RNA (1)...(19): siRNA sense strand
cuucagaggcagacaccua

SEQ ID NO: 1573827 - RNA, 19 nt, Homo sapiens
  misc_RNA (1)...(19): siRNA sense strand
ccagaucaagagccagaaa

SEQ ID NO: 1573828 - RNA, 19 nt, Homo sapiens
  misc_RNA (1)...(19): siRNA sense strand
caggaaggagaguuucuug

SEQ ID NO: 1573829 - RNA, 19 nt, Homo sapiens
  misc_RNA (1)...(19): siRNA sense strand
ggaacgaccagcgcugcaa

SEQ ID NO: 1573830 - RNA, 19 nt, Homo sapiens
  misc_RNA (1)...(19): siRNA sense strand
gcuucauggugucuucaga

SEQ ID NO: 1573831 - RNA, 19 nt, Homo sapiens
  misc_RNA (1)...(19): siRNA sense strand
ccuacaagaccgccaagga

SEQ ID NO: 1573832 - RNA, 19 nt, Homo sapiens
  misc_RNA (1)...(19): siRNA sense strand
uauuacagagccaggauga

SEQ ID NO: 1573833 - RNA, 19 nt, Homo sapiens
  misc_RNA (1)...(19): siRNA sense strand
aggcuggacuggagugaca

SEQ ID NO: 1573834 - RNA, 19 nt, Homo sapiens
  misc_RNA (1)...(19): siRNA sense strand
ggcuucagcugccuucaac

SEQ ID NO: 1573835 - RNA, 19 nt, Homo sapiens
  misc_RNA (1)...(19): siRNA sense strand
acagagccaggaugaaaug

SEQ ID NO: 1573836 - RNA, 19 nt, Homo sapiens
  misc_RNA (1)...(19): siRNA sense strand
ggugauugacagugacuuc

SEQ ID NO: 1573837 - RNA, 19 nt, Homo sapiens
  misc_RNA (1)...(19): siRNA sense strand
cauccucgccuucuaucug

SEQ ID NO: 1573838 - RNA, 19 nt, Homo sapiens
  misc_RNA (1)...(19): siRNA sense strand
ggaggcacauuucgucuaa

SEQ ID NO: 1573839 - RNA, 19 nt, Homo sapiens
  misc_RNA (1)...(19): siRNA sense strand
gcagagcacuccuaugucu

SEQ ID NO: 1573840 - RNA, 19 nt, Homo sapiens
  misc_RNA (1)...(19): siRNA sense strand
gcugaaguaugucaucaaa

SEQ ID NO: 1573841 - RNA, 19 nt, Homo sapiens
  misc_RNA (1)...(19): siRNA sense strand
cagcagagcacuccuaugu

SEQ ID NO: 1573842 - RNA, 19 nt, Homo sapiens
  misc_RNA (1)...(19): siRNA sense strand
gcacuccuaugucuugauc

SEQ ID NO: 1573843 - RNA, 19 nt, Homo sapiens
  misc_RNA (1)...(19): siRNA sense strand
gaccagggcacaccaaaga

SEQ ID NO: 1573844 - RNA, 19 nt, Homo sapiens
  misc_RNA (1)...(19): siRNA sense strand
gagcuuccucccugagauu

SEQ ID NO: 1573845 - RNA, 19 nt, Homo sapiens
  misc_RNA (1)...(19): siRNA sense strand
gagcacuccuaugucuuga

SEQ ID NO: 1573846 - RNA, 19 nt, Homo sapiens
  misc_RNA (1)...(19): siRNA sense strand
ugauuacucuggacucgau

SEQ ID NO: 1573847 - RNA, 19 nt, Homo sapiens
  misc_RNA (1)...(19): siRNA sense strand
gucuuuggguucuaucuga

SEQ ID NO: 1573848 - RNA, 19 nt, Homo sapiens
  misc_RNA (1)...(19): siRNA sense strand
ugaaguaugucaucaaaag

SEQ ID NO: 1573849 - RNA, 19 nt, Homo sapiens
  misc_RNA (1)...(19): siRNA sense strand
caucugaccuccccgaguu

SEQ ID NO: 1573850 - RNA, 19 nt, Homo sapiens
  misc_RNA (1)...(19): siRNA sense strand
ccuaugucuugaucagaaa

SEQ ID NO: 1573851 - RNA, 19 nt, Homo sapiens
  misc_RNA (1)...(19): siRNA sense strand
uccuaugucuugaucagaa

SEQ ID NO: 1573852 - RNA, 19 nt, Homo sapiens
  misc_RNA (1)...(19): siRNA sense strand
aaucgauccugcccugguu

SEQ ID NO: 1573853 - RNA, 19 nt, Homo sapiens
  misc_RNA (1)...(19): siRNA sense strand
guuagucuuuggguucuau

SEQ ID NO: 1573854 - RNA, 19 nt, Homo sapiens
  misc_RNA (1)...(19): siRNA sense strand
acucuggacucgaucuuca

SEQ ID NO: 1573855 - RNA, 19 nt, Homo sapiens
  misc_RNA (1)...(19): siRNA sense strand
acccggcuccugaugauua

SEQ ID NO: 1573856 - RNA, 19 nt, Homo sapiens
  misc_RNA (1)...(19): siRNA sense strand
agacccggcuccugaugau

SEQ ID NO: 1573857 - RNA, 19 nt, Homo sapiens
  misc_RNA (1)...(19): siRNA sense strand
caaagacccggcuccugau

SEQ ID NO: 1573858 - RNA, 19 nt, Homo sapiens
  misc_RNA (1)...(19): siRNA sense strand
gaguuagucuuuggguucu

SEQ ID NO: 1573859 - RNA, 19 nt, Homo sapiens
  misc_RNA (1)...(19): siRNA sense strand
agagcacuccuaugucuug

SEQ ID NO: 1573860 - RNA, 19 nt, Homo sapiens
  misc_RNA (1)...(19): siRNA sense strand
ucccugagauuuucaagaa

SEQ ID NO: 1573861 - RNA, 19 nt, Homo sapiens
  misc_RNA (1)...(19): siRNA sense strand
gguguuggaggcacauuuc

SEQ ID NO: 1573862 - RNA, 19 nt, Homo sapiens
  misc_RNA (1)...(19): siRNA sense strand
aauacaggcuggaauauga

SEQ ID NO: 1573863 - RNA, 19 nt, Homo sapiens
  misc_RNA (1)...(19): siRNA sense strand
uuaaaggaauugucaguga

SEQ ID NO: 1573864 - RNA, 19 nt, Homo sapiens
  misc_RNA (1)...(19): siRNA sense strand
ucacaugccagauuuauga

SEQ ID NO: 1573865 - RNA, 19 nt, Homo sapiens
  misc_RNA (1)...(19): siRNA sense strand
gagaguaagagccgcauuu

SEQ ID NO: 1573866 - RNA, 19 nt, Homo sapiens
  misc_RNA (1)...(19): siRNA sense strand
gaaaucaagacuaaucauc

SEQ ID NO: 1573867 - RNA, 19 nt, Homo sapiens
  misc_RNA (1)...(19): siRNA sense strand
gagcagaaagagaguaaga

SEQ ID NO: 1573868 - RNA, 19 nt, Homo sapiens
  misc_RNA (1)...(19): siRNA sense strand
gcuggaauaugaaaucaag

SEQ ID NO: 1573869 - RNA, 19 nt, Homo sapiens
  misc_RNA (1)...(19): siRNA sense strand
uaaaggaauugucagugau

SEQ ID NO: 1573870 - RNA, 19 nt, Homo sapiens
  misc_RNA (1)...(19): siRNA sense strand
gaucuggauuacauucaau

SEQ ID NO: 1573871 - RNA, 19 nt, Homo sapiens
  misc_RNA (1)...(19): siRNA sense strand
ucgauaagcuggaacugau

SEQ ID NO: 1573872 - RNA, 19 nt, Homo sapiens
  misc_RNA (1)...(19): siRNA sense strand
aaauccaguuacacucuua

SEQ ID NO: 1573873 - RNA, 19 nt, Homo sapiens
  misc_RNA (1)...(19): siRNA sense strand
ggaggucgauaagcuggaa

SEQ ID NO: 1573874 - RNA, 19 nt, Homo sapiens
  misc_RNA (1)...(19): siRNA sense strand
caguuacacucuuaaagga

SEQ ID NO: 1573875 - RNA, 19 nt, Homo sapiens
  misc_RNA (1)...(19): siRNA sense strand
aaaggaauugucagugaua

SEQ ID NO: 1573876 - RNA, 19 nt, Homo sapiens
  misc_RNA (1)...(19): siRNA sense strand
uuaaaccaguugcuguuga

SEQ ID NO: 1573877 - RNA, 19 nt, Homo sapiens
  misc_RNA (1)...(19): siRNA sense strand
guuacacucuuaaaggaau

SEQ ID NO: 1573878 - RNA, 19 nt, Homo sapiens
  misc_RNA (1)...(19): siRNA sense strand
ggaauugucagugauaaag

SEQ ID NO: 1573879 - RNA, 19 nt, Homo sapiens
  misc_RNA (1)...(19): siRNA sense strand
agucugaucuggauuacau

SEQ ID NO: 1573880 - RNA, 19 nt, Homo sapiens
  misc_RNA (1)...(19): siRNA sense strand
cauuugugcuacugugaaa

SEQ ID NO: 1573881 - RNA, 19 nt, Homo sapiens
  misc_RNA (1)...(19): siRNA sense strand
aguaagagccgcauuugug

SEQ ID NO: 1573882 - RNA, 19 nt, Homo sapiens
  misc_RNA (1)...(19): siRNA sense strand
aauuucacaugccagauuu

SEQ ID NO: 1573883 - RNA, 19 nt, Homo sapiens
  misc_RNA (1)...(19): siRNA sense strand
uggauuacauucaauacag

SEQ ID NO: 1573884 - RNA, 19 nt, Homo sapiens
  misc_RNA (1)...(19): siRNA sense strand
uaaaccaguugcuguugag

SEQ ID NO: 1573885 - RNA, 19 nt, Homo sapiens
  misc_RNA (1)...(19): siRNA sense strand
ugaucuggauuacauucaa

SEQ ID NO: 1573886 - RNA, 19 nt, Homo sapiens
  misc_RNA (1)...(19): siRNA sense strand
ccaguuacacucuuaaagg

SEQ ID NO: 1573887 - RNA, 19 nt, Homo sapiens
  misc_RNA (1)...(19): siRNA sense strand
caauacaggcuggaauaug

SEQ ID NO: 1573888 - RNA, 19 nt, Homo sapiens
  misc_RNA (1)...(19): siRNA sense strand
gauaagcuggaacugaugu

SEQ ID NO: 1573889 - RNA, 19 nt, Homo sapiens
  misc_RNA (1)...(19): siRNA sense strand
gcauuugugcuacugugaa

SEQ ID NO: 1573890 - RNA, 19 nt, Homo sapiens
  misc_RNA (1)...(19): siRNA sense strand
aaauuucacaugccagauu

SEQ ID NO: 1573891 - RNA, 19 nt, Homo sapiens
  misc_RNA (1)...(19): siRNA sense strand
aaggaauugucagugauaa

SEQ ID NO: 1573892 - RNA, 19 nt, Homo sapiens
  misc_RNA (1)...(19): siRNA sense strand
cuggagcugucaccacuga

SEQ ID NO: 1573893 - RNA, 19 nt, Homo sapiens
  misc_RNA (1)...(19): siRNA sense strand
gaguaagagccgcauuugu

SEQ ID NO: 1573894 - RNA, 19 nt, Homo sapiens
  misc_RNA (1)...(19): siRNA sense strand
gaauugucagugauaaagu

SEQ ID NO: 1573895 - RNA, 19 nt, Homo sapiens
  misc_RNA (1)...(19): siRNA sense strand
ugauucagcaagugagaaa

SEQ ID NO: 1573896 - RNA, 19 nt, Homo sapiens
  misc_RNA (1)...(19): siRNA sense strand
cugagucugaucuggauua

SEQ ID NO: 1573897 - RNA, 19 nt, Homo sapiens
  misc_RNA (1)...(19): siRNA sense strand
gaaagcugagucugaucug

SEQ ID NO: 1573898 - RNA, 19 nt, Homo sapiens
  misc_RNA (1)...(19): siRNA sense strand
uucaauacaggcuggaaua

SEQ ID NO: 1573899 - RNA, 19 nt, Homo sapiens
  misc_RNA (1)...(19): siRNA sense strand
uaaagucucgauaucaaac

SEQ ID NO: 1573900 - RNA, 19 nt, Homo sapiens
  misc_RNA (1)...(19): siRNA sense strand
ucaauacaggcuggaauau

SEQ ID NO: 1573901 - RNA, 19 nt, Homo sapiens
  misc_RNA (1)...(19): siRNA sense strand
ggaauaugaaaucaagacu

SEQ ID NO: 1573902 - RNA, 19 nt, Homo sapiens
  misc_RNA (1)...(19): siRNA sense strand
agugauaaagucucgauau

SEQ ID NO: 1573903 - RNA, 19 nt, Homo sapiens
  misc_RNA (1)...(19): siRNA sense strand
caaagauagugucaacuua

SEQ ID NO: 1573904 - RNA, 19 nt, Homo sapiens
  misc_RNA (1)...(19): siRNA sense strand
ccaagagaauggagaaaua

SEQ ID NO: 1573905 - RNA, 19 nt, Homo sapiens
  misc_RNA (1)...(19): siRNA sense strand
gauuaucacugucaacuuu

SEQ ID NO: 1573906 - RNA, 19 nt, Homo sapiens
  misc_RNA (1)...(19): siRNA sense strand
gcaauaaguucaguucaaa

SEQ ID NO: 1573907 - RNA, 19 nt, Homo sapiens
  misc_RNA (1)...(19): siRNA sense strand
ugacagaaguccucuuaaa

SEQ ID NO: 1573908 - RNA, 19 nt, Homo sapiens
  misc_RNA (1)...(19): siRNA sense strand
guacaaauuucgucuagga

SEQ ID NO: 1573909 - RNA, 19 nt, Homo sapiens
  misc_RNA (1)...(19): siRNA sense strand
ggagaaauaacccuuguaa

SEQ ID NO: 1573910 - RNA, 19 nt, Homo sapiens
  misc_RNA (1)...(19): siRNA sense strand
caacuuaccuacaggaauc

SEQ ID NO: 1573911 - RNA, 19 nt, Homo sapiens
  misc_RNA (1)...(19): siRNA sense strand
gcaaagugaaguacaaauu

SEQ ID NO: 1573912 - RNA, 19 nt, Homo sapiens
  misc_RNA (1)...(19): siRNA sense strand
guaaggaagccaucaauga

SEQ ID NO: 1573913 - RNA, 19 nt, Homo sapiens
  misc_RNA (1)...(19): siRNA sense strand
ccagggacauguuaugaaa

SEQ ID NO: 1573914 - RNA, 19 nt, Homo sapiens
  misc_RNA (1)...(19): siRNA sense strand
acagaaguccucuuaaaua

SEQ ID NO: 1573915 - RNA, 19 nt, Homo sapiens
  misc_RNA (1)...(19): siRNA sense strand
uguaaagcgucguauauuu

SEQ ID NO: 1573916 - RNA, 19 nt, Homo sapiens
  misc_RNA (1)...(19): siRNA sense strand
gaagaaaggcuggaugaga

SEQ ID NO: 1573917 - RNA, 19 nt, Homo sapiens
  misc_RNA (1)...(19): siRNA sense strand
gcaagucucucauagaaaa

SEQ ID NO: 1573918 - RNA, 19 nt, Homo sapiens
  misc_RNA (1)...(19): siRNA sense strand
uuaaugaucuggucaguuc

SEQ ID NO: 1573919 - RNA, 19 nt, Homo sapiens
  misc_RNA (1)...(19): siRNA sense strand
aagaaaggcuggaugagaa

SEQ ID NO: 1573920 - RNA, 19 nt, Homo sapiens
  misc_RNA (1)...(19): siRNA sense strand
ccaacucucuccugaagaa

SEQ ID NO: 1573921 - RNA, 19 nt, Homo sapiens
  misc_RNA (1)...(19): siRNA sense strand
gaagaaaagugguuuaaag

SEQ ID NO: 1573922 - RNA, 19 nt, Homo sapiens
  misc_RNA (1)...(19): siRNA sense strand
gggcauauaaugagaauga

SEQ ID NO: 1573923 - RNA, 19 nt, Homo sapiens
  misc_RNA (1)...(19): siRNA sense strand
guaaagcgucguauauuug

SEQ ID NO: 1573924 - RNA, 19 nt, Homo sapiens
  misc_RNA (1)...(19): siRNA sense strand
aagaaaugcugcaguguga

SEQ ID NO: 1573925 - RNA, 19 nt, Homo sapiens
  misc_RNA (1)...(19): siRNA sense strand
guacagaagaucaguauag

SEQ ID NO: 1573926 - RNA, 19 nt, Homo sapiens
  misc_RNA (1)...(19): siRNA sense strand
ccaggaauuugaagacuau

SEQ ID NO: 1573927 - RNA, 19 nt, Homo sapiens
  misc_RNA (1)...(19): siRNA sense strand
agaaauaacccuuguaaag

SEQ ID NO: 1573928 - RNA, 19 nt, Homo sapiens
  misc_RNA (1)...(19): siRNA sense strand
ggagaaauuuaaugaucug

SEQ ID NO: 1573929 - RNA, 19 nt, Homo sapiens
  misc_RNA (1)...(19): siRNA sense strand
cuaaaucuacggacaagua

SEQ ID NO: 1573930 - RNA, 19 nt, Homo sapiens
  misc_RNA (1)...(19): siRNA sense strand
ucaaagaaaucgcuuccau

SEQ ID NO: 1573931 - RNA, 19 nt, Homo sapiens
  misc_RNA (1)...(19): siRNA sense strand
ggaaggcaacccgcucuua

SEQ ID NO: 1573932 - RNA, 19 nt, Homo sapiens
  misc_RNA (1)...(19): siRNA sense strand
gaaauaacccuuguaaagc

SEQ ID NO: 1573933 - RNA, 19 nt, Homo sapiens
  misc_RNA (1)...(19): siRNA sense strand
gcaaguaccgcagauuuau

SEQ ID NO: 1573934 - RNA, 19 nt, Homo sapiens
  misc_RNA (1)...(19): siRNA sense strand
gaaagcaccuaaaauagau

SEQ ID NO: 1573935 - RNA, 19 nt, Homo sapiens
  misc_RNA (1)...(19): siRNA sense strand
cagaaguccucuuaaauac

SEQ ID NO: 1573936 - RNA, 19 nt, Homo sapiens
  misc_RNA (1)...(19): siRNA sense strand
gaaguccucuuaaauacac

SEQ ID NO: 1573937 - RNA, 19 nt, Homo sapiens
  misc_RNA (1)...(19): siRNA sense strand
gcuccacccuccacaaaug

SEQ ID NO: 1573938 - RNA, 19 nt, Homo sapiens
  misc_RNA (1)...(19): siRNA sense strand
cuacaggaaucccagaaga

SEQ ID NO: 1573939 - RNA, 19 nt, Homo sapiens
  misc_RNA (1)...(19): siRNA sense strand
ggacauguuaugaaaucua

SEQ ID NO: 1573940 - RNA, 19 nt, Homo sapiens
  misc_RNA (1)...(19): siRNA sense strand
cagaagaucaguauagaga

SEQ ID NO: 1573941 - RNA, 19 nt, Homo sapiens
  misc_RNA (1)...(19): siRNA sense strand
gaggagcuuugcuacaaga

SEQ ID NO: 1573942 - RNA, 19 nt, Homo sapiens
  misc_RNA (1)...(19): siRNA sense strand
caagagaauggagaaauaa

SEQ ID NO: 1573943 - RNA, 19 nt, Homo sapiens
  misc_RNA (1)...(19): siRNA sense strand
ugagaaagcaccuaaaaua

SEQ ID NO: 1573944 - RNA, 19 nt, Homo sapiens
  misc_RNA (1)...(19): siRNA sense strand
ggaagugcaaagugaagua

SEQ ID NO: 1573945 - RNA, 19 nt, Homo sapiens
  misc_RNA (1)...(19): siRNA sense strand
uugcaagucucucauagaa

SEQ ID NO: 1573946 - RNA, 19 nt, Homo sapiens
  misc_RNA (1)...(19): siRNA sense strand
ucagagguauugagugguu

SEQ ID NO: 1573947 - RNA, 19 nt, Homo sapiens
  misc_RNA (1)...(19): siRNA sense strand
aggagacaaugccaucuua

SEQ ID NO: 1573948 - RNA, 19 nt, Homo sapiens
  misc_RNA (1)...(19): siRNA sense strand
ucaaggaacggaaggcuaa

SEQ ID NO: 1573949 - RNA, 19 nt, Homo sapiens
  misc_RNA (1)...(19): siRNA sense strand
gcaacccgcucuuacuuac

SEQ ID NO: 1573950 - RNA, 19 nt, Homo sapiens
  misc_RNA (1)...(19): siRNA sense strand
agaaugaugugauccuaau

SEQ ID NO: 1573951 - RNA, 19 nt, Homo sapiens
  misc_RNA (1)...(19): siRNA sense strand
gccaggaauuugaagacua

SEQ ID NO: 1573952 - RNA, 19 nt, Homo sapiens
  misc_RNA (1)...(19): siRNA sense strand
uaggaagcccucaaagaua

SEQ ID NO: 1573953 - RNA, 19 nt, Homo sapiens
  misc_RNA (1)...(19): siRNA sense strand
gacagaaguccucuuaaau

SEQ ID NO: 1573954 - RNA, 19 nt, Homo sapiens
  misc_RNA (1)...(19): siRNA sense strand
gaaaugcugcagugugaug

SEQ ID NO: 1573955 - RNA, 19 nt, Homo sapiens
  misc_RNA (1)...(19): siRNA sense strand
ucucacagcuguacagaag

SEQ ID NO: 1573956 - RNA, 19 nt, Homo sapiens
  misc_RNA (1)...(19): siRNA sense strand
gaagcaauaaguucaguuc

SEQ ID NO: 1573957 - RNA, 19 nt, Homo sapiens
  misc_RNA (1)...(19): siRNA sense strand
acaaugccaucuuaagguu

SEQ ID NO: 1573958 - RNA, 19 nt, Homo sapiens
  misc_RNA (1)...(19): siRNA sense strand
ggaugagaaugaucagcuu

SEQ ID NO: 1573959 - RNA, 19 nt, Homo sapiens
  misc_RNA (1)...(19): siRNA sense strand
gaaguacaaauuucgucua

SEQ ID NO: 1573960 - RNA, 19 nt, Homo sapiens
  misc_RNA (1)...(19): siRNA sense strand
gaaaauguccuugcucaaa

SEQ ID NO: 1573961 - RNA, 19 nt, Homo sapiens
  misc_RNA (1)...(19): siRNA sense strand
ccaaagauggccauacaga

SEQ ID NO: 1573962 - RNA, 19 nt, Homo sapiens
  misc_RNA (1)...(19): siRNA sense strand
ucaaagauagugucaacuu

SEQ ID NO: 1573963 - RNA, 19 nt, Homo sapiens
  misc_RNA (1)...(19): siRNA sense strand
gagaaauaacccuuguaaa

SEQ ID NO: 1573964 - RNA, 19 nt, Homo sapiens
  misc_RNA (1)...(19): siRNA sense strand
gagaaugaugugauccuaa

SEQ ID NO: 1573965 - RNA, 19 nt, Homo sapiens
  misc_RNA (1)...(19): siRNA sense strand
ucacagcuguacagaagau

SEQ ID NO: 1573966 - RNA, 19 nt, Homo sapiens
  misc_RNA (1)...(19): siRNA sense strand
caacgggaagcaauaaguu

SEQ ID NO: 1573967 - RNA, 19 nt, Homo sapiens
  misc_RNA (1)...(19): siRNA sense strand
cuaguaagcgccaggaauu

SEQ ID NO: 1573968 - RNA, 19 nt, Homo sapiens
  misc_RNA (1)...(19): siRNA sense strand
ggccaacucucuccugaag

SEQ ID NO: 1573969 - RNA, 19 nt, Homo sapiens
  misc_RNA (1)...(19): siRNA sense strand
caaagauggccauacagaa

SEQ ID NO: 1573970 - RNA, 19 nt, Homo sapiens
  misc_RNA (1)...(19): siRNA sense strand
cagaagaaaggcuggauga

SEQ ID NO: 1573971 - RNA, 19 nt, Homo sapiens
  misc_RNA (1)...(19): siRNA sense strand
ggagacaaugccaucuuaa

SEQ ID NO: 1573972 - RNA, 19 nt, Homo sapiens
  misc_RNA (1)...(19): siRNA sense strand
caacacaucgggacguuca

SEQ ID NO: 1573973 - RNA, 19 nt, Homo sapiens
  misc_RNA (1)...(19): siRNA sense strand
uaccgcagauuuauguuga

SEQ ID NO: 1573974 - RNA, 19 nt, Homo sapiens
  misc_RNA (1)...(19): siRNA sense strand
cuaggaagcccucaaagau

SEQ ID NO: 1573975 - RNA, 19 nt, Homo sapiens
  misc_RNA (1)...(19): siRNA sense strand
gauagugucaacuuaccua

SEQ ID NO: 1573976 - RNA, 19 nt, Homo sapiens
  misc_RNA (1)...(19): siRNA sense strand
uacagaagaucaguauaga

SEQ ID NO: 1573977 - RNA, 19 nt, Homo sapiens
  misc_RNA (1)...(19): siRNA sense strand
caaacuuacucagccaaga

SEQ ID NO: 1573978 - RNA, 19 nt, Homo sapiens
  misc_RNA (1)...(19): siRNA sense strand
ggcaacccgcucuuacuua

SEQ ID NO: 1573979 - RNA, 19 nt, Homo sapiens
  misc_RNA (1)...(19): siRNA sense strand
acagagggcuaccuagauc

SEQ ID NO: 1573980 - RNA, 19 nt, Homo sapiens
  misc_RNA (1)...(19): siRNA sense strand
ugagaaugaucagcuuuau

SEQ ID NO: 1573981 - RNA, 19 nt, Homo sapiens
  misc_RNA (1)...(19): siRNA sense strand
ugagaaugaugugauccua

SEQ ID NO: 1573982 - RNA, 19 nt, Homo sapiens
  misc_RNA (1)...(19): siRNA sense strand
gggugaaugucccugaguu

SEQ ID NO: 1573983 - RNA, 19 nt, Homo sapiens
  misc_RNA (1)...(19): siRNA sense strand
aggaagcccucaaagauag

SEQ ID NO: 1573984 - RNA, 19 nt, Homo sapiens
  misc_RNA (1)...(19): siRNA sense strand
cuaaugcgguccaaaauga

SEQ ID NO: 1573985 - RNA, 19 nt, Homo sapiens
  misc_RNA (1)...(19): siRNA sense strand
uaaugagaaugaugugauc

SEQ ID NO: 1573986 - RNA, 19 nt, Homo sapiens
  misc_RNA (1)...(19): siRNA sense strand
ccucaaagauagugucaac

SEQ ID NO: 1573987 - RNA, 19 nt, Homo sapiens
  misc_RNA (1)...(19): siRNA sense strand
uaaauacacagcacuugga

SEQ ID NO: 1573988 - RNA, 19 nt, Homo sapiens
  misc_RNA (1)...(19): siRNA sense strand
gaaggcaacccgcucuuac

SEQ ID NO: 1573989 - RNA, 19 nt, Homo sapiens
  misc_RNA (1)...(19): siRNA sense strand
ucacagagggcuaccuaga

SEQ ID NO: 1573990 - RNA, 19 nt, Homo sapiens
  misc_RNA (1)...(19): siRNA sense strand
guaagcgccaggaauuuga

SEQ ID NO: 1573991 - RNA, 19 nt, Homo sapiens
  misc_RNA (1)...(19): siRNA sense strand
gauuugcaagucucucaua

SEQ ID NO: 1573992 - RNA, 19 nt, Homo sapiens
  misc_RNA (1)...(19): siRNA sense strand
ucaaugagacccagaaacu

SEQ ID NO: 1573993 - RNA, 19 nt, Homo sapiens
  misc_RNA (1)...(19): siRNA sense strand
uugaggagcuuugcuacaa

SEQ ID NO: 1573994 - RNA, 19 nt, Homo sapiens
  misc_RNA (1)...(19): siRNA sense strand
cccagaaacuugacagaag

SEQ ID NO: 1573995 - RNA, 19 nt, Homo sapiens
  misc_RNA (1)...(19): siRNA sense strand
caccacaagcacacuguua

SEQ ID NO: 1573996 - RNA, 19 nt, Homo sapiens
  misc_RNA (1)...(19): siRNA sense strand
guuucacgcucaaauagga

SEQ ID NO: 1573997 - RNA, 19 nt, Homo sapiens
  misc_RNA (1)...(19): siRNA sense strand
ccauacagaagaucaguga

SEQ ID NO: 1573998 - RNA, 19 nt, Homo sapiens
  misc_RNA (1)...(19): siRNA sense strand
gaugagaaugaucagcuuu

SEQ ID NO: 1573999 - RNA, 19 nt, Homo sapiens
  misc_RNA (1)...(19): siRNA sense strand
cuacaagaacccaaagaug

SEQ ID NO: 1574000 - RNA, 19 nt, Homo sapiens
  misc_RNA (1)...(19): siRNA sense strand
cuacggacaaguauccuuu

SEQ ID NO: 1574001 - RNA, 19 nt, Homo sapiens
  misc_RNA (1)...(19): siRNA sense strand
caucacagagggcuaccua

SEQ ID NO: 1574002 - RNA, 19 nt, Homo sapiens
  misc_RNA (1)...(19): siRNA sense strand
ccacagcacacaacacauc

SEQ ID NO: 1574003 - RNA, 19 nt, Homo sapiens
  misc_RNA (1)...(19): siRNA sense strand
gaaagaaacugccaaaggu

SEQ ID NO: 1574004 - RNA, 19 nt, Homo sapiens
  misc_RNA (1)...(19): siRNA sense strand
gcaagccacuuaauaauga

SEQ ID NO: 1574005 - RNA, 19 nt, Homo sapiens
  misc_RNA (1)...(19): siRNA sense strand
gcacuuugcucaacucuga

SEQ ID NO: 1574006 - RNA, 19 nt, Homo sapiens
  misc_RNA (1)...(19): siRNA sense strand
ugacuggacuucagaauuu

SEQ ID NO: 1574007 - RNA, 19 nt, Homo sapiens
  misc_RNA (1)...(19): siRNA sense strand
cgaauacucugaauccaua

SEQ ID NO: 1574008 - RNA, 19 nt, Homo sapiens
  misc_RNA (1)...(19): siRNA sense strand
gaacaagaagcuuuaguuu

SEQ ID NO: 1574009 - RNA, 19 nt, Homo sapiens
  misc_RNA (1)...(19): siRNA sense strand
gaagaacucccuaaaugaa

SEQ ID NO: 1574010 - RNA, 19 nt, Homo sapiens
  misc_RNA (1)...(19): siRNA sense strand
ugaagaacaugguguauau

SEQ ID NO: 1574011 - RNA, 19 nt, Homo sapiens
  misc_RNA (1)...(19): siRNA sense strand
ggccauccauccucuguua

SEQ ID NO: 1574012 - RNA, 19 nt, Homo sapiens
  misc_RNA (1)...(19): siRNA sense strand
gagaagaaauuaucaacag

SEQ ID NO: 1574013 - RNA, 19 nt, Homo sapiens
  misc_RNA (1)...(19): siRNA sense strand
gcacacugcuuucacuaau

SEQ ID NO: 1574014 - RNA, 19 nt, Homo sapiens
  misc_RNA (1)...(19): siRNA sense strand
ugaagaauguuguguguuc

SEQ ID NO: 1574015 - RNA, 19 nt, Homo sapiens
  misc_RNA (1)...(19): siRNA sense strand
caagauuuauggcugguuu

SEQ ID NO: 1574016 - RNA, 19 nt, Homo sapiens
  misc_RNA (1)...(19): siRNA sense strand
acacugcuuucacuaauaa

SEQ ID NO: 1574017 - RNA, 19 nt, Homo sapiens
  misc_RNA (1)...(19): siRNA sense strand
uacaggagauguuaugauu

SEQ ID NO: 1574018 - RNA, 19 nt, Homo sapiens
  misc_RNA (1)...(19): siRNA sense strand
gaacagcuuccaaucuuga

SEQ ID NO: 1574019 - RNA, 19 nt, Homo sapiens
  misc_RNA (1)...(19): siRNA sense strand
uagaagcccuuucauggaa

SEQ ID NO: 1574020 - RNA, 19 nt, Homo sapiens
  misc_RNA (1)...(19): siRNA sense strand
uugaagaacucccuaaaug

SEQ ID NO: 1574021 - RNA, 19 nt, Homo sapiens
  misc_RNA (1)...(19): siRNA sense strand
aaacccaggugaacaagaa

SEQ ID NO: 1574022 - RNA, 19 nt, Homo sapiens
  misc_RNA (1)...(19): siRNA sense strand
ggacugccuucuacauuca

SEQ ID NO: 1574023 - RNA, 19 nt, Homo sapiens
  misc_RNA (1)...(19): siRNA sense strand
gaaguucgacuccuagaau

SEQ ID NO: 1574024 - RNA, 19 nt, Homo sapiens
  misc_RNA (1)...(19): siRNA sense strand
ggaaagaaacugccaaagg

SEQ ID NO: 1574025 - RNA, 19 nt, Homo sapiens
  misc_RNA (1)...(19): siRNA sense strand
gaacaugguguauaucauc

SEQ ID NO: 1574026 - RNA, 19 nt, Homo sapiens
  misc_RNA (1)...(19): siRNA sense strand
uaacacuggugauaucaug

SEQ ID NO: 1574027 - RNA, 19 nt, Homo sapiens
  misc_RNA (1)...(19): siRNA sense strand
uaucaacagccuucaguua

SEQ ID NO: 1574028 - RNA, 19 nt, Homo sapiens
  misc_RNA (1)...(19): siRNA sense strand
guacccagcaaucaaauaa

SEQ ID NO: 1574029 - RNA, 19 nt, Homo sapiens
  misc_RNA (1)...(19): siRNA sense strand
gcaguauucuuguucuugu

SEQ ID NO: 1574030 - RNA, 19 nt, Homo sapiens
  misc_RNA (1)...(19): siRNA sense strand
gggaaaggcggaacaagaa

SEQ ID NO: 1574031 - RNA, 19 nt, Homo sapiens
  misc_RNA (1)...(19): siRNA sense strand
ggacugaaaugaaaaggaa

SEQ ID NO: 1574032 - RNA, 19 nt, Homo sapiens
  misc_RNA (1)...(19): siRNA sense strand
ugaauucucuacaccuuug

SEQ ID NO: 1574033 - RNA, 19 nt, Homo sapiens
  misc_RNA (1)...(19): siRNA sense strand
gagugugaaugaauuguug

SEQ ID NO: 1574034 - RNA, 19 nt, Homo sapiens
  misc_RNA (1)...(19): siRNA sense strand
uuuaagggauugugcuaua

SEQ ID NO: 1574035 - RNA, 19 nt, Homo sapiens
  misc_RNA (1)...(19): siRNA sense strand
ggacuucagaauuucauaa

SEQ ID NO: 1574036 - RNA, 19 nt, Homo sapiens
  misc_RNA (1)...(19): siRNA sense strand
ggaguuggguagcgaauac

SEQ ID NO: 1574037 - RNA, 19 nt, Homo sapiens
  misc_RNA (1)...(19): siRNA sense strand
aauaucagcuagagacuau

SEQ ID NO: 1574038 - RNA, 19 nt, Homo sapiens
  misc_RNA (1)...(19): siRNA sense strand
gcaggaaacuccgaagucu

SEQ ID NO: 1574039 - RNA, 19 nt, Homo sapiens
  misc_RNA (1)...(19): siRNA sense strand
gcuagagacuauuucugaa

SEQ ID NO: 1574040 - RNA, 19 nt, Homo sapiens
  misc_RNA (1)...(19): siRNA sense strand
caacuuaccagcguuuauu

SEQ ID NO: 1574041 - RNA, 19 nt, Homo sapiens
  misc_RNA (1)...(19): siRNA sense strand
uaaaguagccaaaggauac

SEQ ID NO: 1574042 - RNA, 19 nt, Homo sapiens
  misc_RNA (1)...(19): siRNA sense strand
gaaaggaagaugcuagaag

SEQ ID NO: 1574043 - RNA, 19 nt, Homo sapiens
  misc_RNA (1)...(19): siRNA sense strand
gcagaaagacaccaguuca

SEQ ID NO: 1574044 - RNA, 19 nt, Homo sapiens
  misc_RNA (1)...(19): siRNA sense strand
ucaaagagagagagaagaa

SEQ ID NO: 1574045 - RNA, 19 nt, Homo sapiens
  misc_RNA (1)...(19): siRNA sense strand
caacagccuucaguuacaa

SEQ ID NO: 1574046 - RNA, 19 nt, Homo sapiens
  misc_RNA (1)...(19): siRNA sense strand
ugaagaacucccuaaauga

SEQ ID NO: 1574047 - RNA, 19 nt, Homo sapiens
  misc_RNA (1)...(19): siRNA sense strand
cuaagaugaccuugaauuu

SEQ ID NO: 1574048 - RNA, 19 nt, Homo sapiens
  misc_RNA (1)...(19): siRNA sense strand
gggcagaggaacaaauauu

SEQ ID NO: 1574049 - RNA, 19 nt, Homo sapiens
  misc_RNA (1)...(19): siRNA sense strand
agagagagagaagaaauua

SEQ ID NO: 1574050 - RNA, 19 nt, Homo sapiens
  misc_RNA (1)...(19): siRNA sense strand
gcauauaccguuggaaguu

SEQ ID NO: 1574051 - RNA, 19 nt, Homo sapiens
  misc_RNA (1)...(19): siRNA sense strand
uugugcagcuuuccacuua

SEQ ID NO: 1574052 - RNA, 19 nt, Homo sapiens
  misc_RNA (1)...(19): siRNA sense strand
gaaagauaaaguagccaaa

SEQ ID NO: 1574053 - RNA, 19 nt, Homo sapiens
  misc_RNA (1)...(19): siRNA sense strand
ggcagaggaacaaauauuu

SEQ ID NO: 1574054 - RNA, 19 nt, Homo sapiens
  misc_RNA (1)...(19): siRNA sense strand
ggaaaggcggaacaagaaa

SEQ ID NO: 1574055 - RNA, 19 nt, Homo sapiens
  misc_RNA (1)...(19): siRNA sense strand
caugaagaauguugugugu

SEQ ID NO: 1574056 - RNA, 19 nt, Homo sapiens
  misc_RNA (1)...(19): siRNA sense strand
cauccucuguuaucuaaga

SEQ ID NO: 1574057 - RNA, 19 nt, Homo sapiens
  misc_RNA (1)...(19): siRNA sense strand
gugcagcuuuccacuuauu

SEQ ID NO: 1574058 - RNA, 19 nt, Homo sapiens
  misc_RNA (1)...(19): siRNA sense strand
gguguaaguuccaugagau

SEQ ID NO: 1574059 - RNA, 19 nt, Homo sapiens
  misc_RNA (1)...(19): siRNA sense strand
guuggaaguucgacuccua

SEQ ID NO: 1574060 - RNA, 19 nt, Homo sapiens
  misc_RNA (1)...(19): siRNA sense strand
ugauguaccugcuaaacug

SEQ ID NO: 1574061 - RNA, 19 nt, Homo sapiens
  misc_RNA (1)...(19): siRNA sense strand
gaaguugucacugcucuga

SEQ ID NO: 1574062 - RNA, 19 nt, Homo sapiens
  misc_RNA (1)...(19): siRNA sense strand
ugguuugccuccacuauaa

SEQ ID NO: 1574063 - RNA, 19 nt, Homo sapiens
  misc_RNA (1)...(19): siRNA sense strand
caggagauguuaugauuuu

SEQ ID NO: 1574064 - RNA, 19 nt, Homo sapiens
  misc_RNA (1)...(19): siRNA sense strand
gcaagucccgcgucauuca

SEQ ID NO: 1574065 - RNA, 19 nt, Homo sapiens
  misc_RNA (1)...(19): siRNA sense strand
caaaacagcaguauucuug

SEQ ID NO: 1574066 - RNA, 19 nt, Homo sapiens
  misc_RNA (1)...(19): siRNA sense strand
cacacugcuuucacuaaua

SEQ ID NO: 1574067 - RNA, 19 nt, Homo sapiens
  misc_RNA (1)...(19): siRNA sense strand
ugaacaagaagcuuuaguu

SEQ ID NO: 1574068 - RNA, 19 nt, Homo sapiens
  misc_RNA (1)...(19): siRNA sense strand
guaguacccagcaaucaaa

SEQ ID NO: 1574069 - RNA, 19 nt, Homo sapiens
  misc_RNA (1)...(19): siRNA sense strand
gaacaagaaaagcugaaua

SEQ ID NO: 1574070 - RNA, 19 nt, Homo sapiens
  misc_RNA (1)...(19): siRNA sense strand
guuguguguucuuucauaa

SEQ ID NO: 1574071 - RNA, 19 nt, Homo sapiens
  misc_RNA (1)...(19): siRNA sense strand
gaacucccuaaaugaagua

SEQ ID NO: 1574072 - RNA, 19 nt, Homo sapiens
  misc_RNA (1)...(19): siRNA sense strand
ucacugcucugaccacucu

SEQ ID NO: 1574073 - RNA, 19 nt, Homo sapiens
  misc_RNA (1)...(19): siRNA sense strand
gcucugaccacucuuggaa

SEQ ID NO: 1574074 - RNA, 19 nt, Homo sapiens
  misc_RNA (1)...(19): siRNA sense strand
ucaacagccuucaguuaca

SEQ ID NO: 1574075 - RNA, 19 nt, Homo sapiens
  misc_RNA (1)...(19): siRNA sense strand
gaaaacauucgucuauuug

SEQ ID NO: 1574076 - RNA, 19 nt, Homo sapiens
  misc_RNA (1)...(19): siRNA sense strand
ggaugagcagguuguagua

SEQ ID NO: 1574077 - RNA, 19 nt, Homo sapiens
  misc_RNA (1)...(19): siRNA sense strand
guacuuugguccagauaac

SEQ ID NO: 1574078 - RNA, 19 nt, Homo sapiens
  misc_RNA (1)...(19): siRNA sense strand
uagcaagucccgcgucauu

SEQ ID NO: 1574079 - RNA, 19 nt, Homo sapiens
  misc_RNA (1)...(19): siRNA sense strand
aaagaaacugccaaaggua

SEQ ID NO: 1574080 - RNA, 19 nt, Homo sapiens
  misc_RNA (1)...(19): siRNA sense strand
gauaagaaacuggaugagu

SEQ ID NO: 1574081 - RNA, 19 nt, Homo sapiens
  misc_RNA (1)...(19): siRNA sense strand
uccauccucuguuaucuaa

SEQ ID NO: 1574082 - RNA, 19 nt, Homo sapiens
  misc_RNA (1)...(19): siRNA sense strand
gcauuacugugaaguuguc

SEQ ID NO: 1574083 - RNA, 19 nt, Homo sapiens
  misc_RNA (1)...(19): siRNA sense strand
ugugaaugcugaacuuugu

SEQ ID NO: 1574084 - RNA, 19 nt, Homo sapiens
  misc_RNA (1)...(19): siRNA sense strand
caaauccaguuuuccgaua

SEQ ID NO: 1574085 - RNA, 19 nt, Homo sapiens
  misc_RNA (1)...(19): siRNA sense strand
uaucaggaccuuccaaauc

SEQ ID NO: 1574086 - RNA, 19 nt, Homo sapiens
  misc_RNA (1)...(19): siRNA sense strand
ccuacugagugauaagaaa

SEQ ID NO: 1574087 - RNA, 19 nt, Homo sapiens
  misc_RNA (1)...(19): siRNA sense strand
ggcaagccacuuaauaaug

SEQ ID NO: 1574088 - RNA, 19 nt, Homo sapiens
  misc_RNA (1)...(19): siRNA sense strand
ucaugacccugaaauucuu

SEQ ID NO: 1574089 - RNA, 19 nt, Homo sapiens
  misc_RNA (1)...(19): siRNA sense strand
cuuccaaucuugaguguca

SEQ ID NO: 1574090 - RNA, 19 nt, Homo sapiens
  misc_RNA (1)...(19): siRNA sense strand
gggcagaguucuauuuuag

SEQ ID NO: 1574091 - RNA, 19 nt, Homo sapiens
  misc_RNA (1)...(19): siRNA sense strand
ccaaguccauguuuucaaa

SEQ ID NO: 1574092 - RNA, 19 nt, Homo sapiens
  misc_RNA (1)...(19): siRNA sense strand
guacuuucuugcuucacaa

SEQ ID NO: 1574093 - RNA, 19 nt, Homo sapiens
  misc_RNA (1)...(19): siRNA sense strand
aaacauucgucuauuugag

SEQ ID NO: 1574094 - RNA, 19 nt, Homo sapiens
  misc_RNA (1)...(19): siRNA sense strand
uguuguguguucuuucaua

SEQ ID NO: 1574095 - RNA, 19 nt, Homo sapiens
  misc_RNA (1)...(19): siRNA sense strand
aagaugaccuugaauuuug

SEQ ID NO: 1574096 - RNA, 19 nt, Homo sapiens
  misc_RNA (1)...(19): siRNA sense strand
ccagaucccagugagauuu

SEQ ID NO: 1574097 - RNA, 19 nt, Homo sapiens
  misc_RNA (1)...(19): siRNA sense strand
gagagagaagaaauuauca

SEQ ID NO: 1574098 - RNA, 19 nt, Homo sapiens
  misc_RNA (1)...(19): siRNA sense strand
aaagagagagagaagaaau

SEQ ID NO: 1574099 - RNA, 19 nt, Homo sapiens
  misc_RNA (1)...(19): siRNA sense strand
gcagagugugaaugaauug

SEQ ID NO: 1574100 - RNA, 19 nt, Homo sapiens
  misc_RNA (1)...(19): siRNA sense strand
ggaaguucgacuccuagaa

SEQ ID NO: 1574101 - RNA, 19 nt, Homo sapiens
  misc_RNA (1)...(19): siRNA sense strand
gauaaaguagccaaaggau

SEQ ID NO: 1574102 - RNA, 19 nt, Homo sapiens
  misc_RNA (1)...(19): siRNA sense strand
uaucagcuagagacuauuu

SEQ ID NO: 1574103 - RNA, 19 nt, Homo sapiens
  misc_RNA (1)...(19): siRNA sense strand
uaagggagcuuucucaaaa

SEQ ID NO: 1574104 - RNA, 19 nt, Homo sapiens
  misc_RNA (1)...(19): siRNA sense strand
ccaaguuccuggugacauu

SEQ ID NO: 1574105 - RNA, 19 nt, Homo sapiens
  misc_RNA (1)...(19): siRNA sense strand
ucucggagcuggaagcaaa

SEQ ID NO: 1574106 - RNA, 19 nt, Homo sapiens
  misc_RNA (1)...(19): siRNA sense strand
ccaggaccaugucaagaaa

SEQ ID NO: 1574107 - RNA, 19 nt, Homo sapiens
  misc_RNA (1)...(19): siRNA sense strand
gaccaugucaagaaagauu

SEQ ID NO: 1574108 - RNA, 19 nt, Homo sapiens
  misc_RNA (1)...(19): siRNA sense strand
cagaaacuccagagacuga

SEQ ID NO: 1574109 - RNA, 19 nt, Homo sapiens
  misc_RNA (1)...(19): siRNA sense strand
caagaucccaggaccaugu

SEQ ID NO: 1574110 - RNA, 19 nt, Homo sapiens
  misc_RNA (1)...(19): siRNA sense strand
caacaucagcggcaugaag

SEQ ID NO: 1574111 - RNA, 19 nt, Homo sapiens
  misc_RNA (1)...(19): siRNA sense strand
uccagagacugaaccguaa

SEQ ID NO: 1574112 - RNA, 19 nt, Homo sapiens
  misc_RNA (1)...(19): siRNA sense strand
ugaaggagcggcuguccaa

SEQ ID NO: 1574113 - RNA, 19 nt, Homo sapiens
  misc_RNA (1)...(19): siRNA sense strand
cagcuucgccgacuuuaca

SEQ ID NO: 1574114 - RNA, 19 nt, Homo sapiens
  misc_RNA (1)...(19): siRNA sense strand
uuaagggagcuuucucaaa

SEQ ID NO: 1574115 - RNA, 19 nt, Homo sapiens
  misc_RNA (1)...(19): siRNA sense strand
agaggaagaggauaaagga

SEQ ID NO: 1574116 - RNA, 19 nt, Homo sapiens
  misc_RNA (1)...(19): siRNA sense strand
aaccaaaacucaagaggaa

SEQ ID NO: 1574117 - RNA, 19 nt, Homo sapiens
  misc_RNA (1)...(19): siRNA sense strand
ucaagaggaagaggauaaa

SEQ ID NO: 1574118 - RNA, 19 nt, Homo sapiens
  misc_RNA (1)...(19): siRNA sense strand
gaggaagaggauaaaggaa

SEQ ID NO: 1574119 - RNA, 19 nt, Homo sapiens
  misc_RNA (1)...(19): siRNA sense strand
cccagaaacuccagagacu

SEQ ID NO: 1574120 - RNA, 19 nt, Homo sapiens
  misc_RNA (1)...(19): siRNA sense strand
cccaggaccaugucaagaa

SEQ ID NO: 1574121 - RNA, 19 nt, Homo sapiens
  misc_RNA (1)...(19): siRNA sense strand
aggaccaugucaagaaaga

SEQ ID NO: 1574122 - RNA, 19 nt, Homo sapiens
  misc_RNA (1)...(19): siRNA sense strand
cccaagcucugccaugcau

SEQ ID NO: 1574123 - RNA, 19 nt, Homo sapiens
  misc_RNA (1)...(19): siRNA sense strand
cucaagaggaagaggauaa

SEQ ID NO: 1574124 - RNA, 19 nt, Homo sapiens
  misc_RNA (1)...(19): siRNA sense strand
gauaaaggaagccccagaa

SEQ ID NO: 1574125 - RNA, 19 nt, Homo sapiens
  misc_RNA (1)...(19): siRNA sense strand
ggaagaaggugauucagua

SEQ ID NO: 1574126 - RNA, 19 nt, Homo sapiens
  misc_RNA (1)...(19): siRNA sense strand
ggacagcugugcccaguuu

SEQ ID NO: 1574127 - RNA, 19 nt, Homo sapiens
  misc_RNA (1)...(19): siRNA sense strand
gggcaaagcuggagaagug

SEQ ID NO: 1574128 - RNA, 19 nt, Homo sapiens
  misc_RNA (1)...(19): siRNA sense strand
ccacagaccugaagacaga

SEQ ID NO: 1574129 - RNA, 19 nt, Homo sapiens
  misc_RNA (1)...(19): siRNA sense strand
ucagagaccuggagaagaa

SEQ ID NO: 1574130 - RNA, 19 nt, Homo sapiens
  misc_RNA (1)...(19): siRNA sense strand
gcaaggaggaugaggauaa

SEQ ID NO: 1574131 - RNA, 19 nt, Homo sapiens
  misc_RNA (1)...(19): siRNA sense strand
ccaagaagcugcucuacca

SEQ ID NO: 1574132 - RNA, 19 nt, Homo sapiens
  misc_RNA (1)...(19): siRNA sense strand
agaagaagcugucagagau

SEQ ID NO: 1574133 - RNA, 19 nt, Homo sapiens
  misc_RNA (1)...(19): siRNA sense strand
ccaaggagaccaucaagaa

SEQ ID NO: 1574134 - RNA, 19 nt, Homo sapiens
  misc_RNA (1)...(19): siRNA sense strand
gagaagaagcugucagaga

SEQ ID NO: 1574135 - RNA, 19 nt, Homo sapiens
  misc_RNA (1)...(19): siRNA sense strand
cgaccacugugcucaagua

SEQ ID NO: 1574136 - RNA, 19 nt, Homo sapiens
  misc_RNA (1)...(19): siRNA sense strand
ggacaaugacagaguacua

SEQ ID NO: 1574137 - RNA, 19 nt, Homo sapiens
  misc_RNA (1)...(19): siRNA sense strand
ggaucaacaugcaggauug

SEQ ID NO: 1574138 - RNA, 19 nt, Homo sapiens
  misc_RNA (1)...(19): siRNA sense strand
gauaaacgaugaggaugau

SEQ ID NO: 1574139 - RNA, 19 nt, Homo sapiens
  misc_RNA (1)...(19): siRNA sense strand
gaagaccuguaccugaguu

SEQ ID NO: 1574140 - RNA, 19 nt, Homo sapiens
  misc_RNA (1)...(19): siRNA sense strand
ccaggacaaugacagagua

SEQ ID NO: 1574141 - RNA, 19 nt, Homo sapiens
  misc_RNA (1)...(19): siRNA sense strand
cacaagaacuacuggauca

SEQ ID NO: 1574142 - RNA, 19 nt, Homo sapiens
  misc_RNA (1)...(19): siRNA sense strand
uaugaggacuugcagugua

SEQ ID NO: 1574143 - RNA, 19 nt, Homo sapiens
  misc_RNA (1)...(19): siRNA sense strand
ggauaaacgaugaggauga

SEQ ID NO: 1574144 - RNA, 19 nt, Homo sapiens
  misc_RNA (1)...(19): siRNA sense strand
caaggacacuauugacauc

SEQ ID NO: 1574145 - RNA, 19 nt, Homo sapiens
  misc_RNA (1)...(19): siRNA sense strand
caacaaggccaaccucauc

SEQ ID NO: 1574146 - RNA, 19 nt, Homo sapiens
  misc_RNA (1)...(19): siRNA sense strand
gacuugcaguguaccaaua

SEQ ID NO: 1574147 - RNA, 19 nt, Homo sapiens
  misc_RNA (1)...(19): siRNA sense strand
gaacuccuuugacuucagu

SEQ ID NO: 1574148 - RNA, 19 nt, Homo sapiens
  misc_RNA (1)...(19): siRNA sense strand
gaagacgacagugggauaa

SEQ ID NO: 1574149 - RNA, 19 nt, Homo sapiens
  misc_RNA (1)...(19): siRNA sense strand
agaagcugcucuaccagua

SEQ ID NO: 1574150 - RNA, 19 nt, Homo sapiens
  misc_RNA (1)...(19): siRNA sense strand
ccuaagaaguauaccauca

SEQ ID NO: 1574151 - RNA, 19 nt, Homo sapiens
  misc_RNA (1)...(19): siRNA sense strand
guaccuggcucuggaggaa

SEQ ID NO: 1574152 - RNA, 19 nt, Homo sapiens
  misc_RNA (1)...(19): siRNA sense strand
gaucagagcccaggagaag

SEQ ID NO: 1574153 - RNA, 19 nt, Homo sapiens
  misc_RNA (1)...(19): siRNA sense strand
gcccagacuuccucuccua

SEQ ID NO: 1574154 - RNA, 19 nt, Homo sapiens
  misc_RNA (1)...(19): siRNA sense strand
gcagguggcagacaacuuc

SEQ ID NO: 1574155 - RNA, 19 nt, Homo sapiens
  misc_RNA (1)...(19): siRNA sense strand
ggaaugagaagagcaagga

SEQ ID NO: 1574156 - RNA, 19 nt, Homo sapiens
  misc_RNA (1)...(19): siRNA sense strand
cgaugaggaugauguggaa

SEQ ID NO: 1574157 - RNA, 19 nt, Homo sapiens
  misc_RNA (1)...(19): siRNA sense strand
ucuccaagcugcccauuuc

SEQ ID NO: 1574158 - RNA, 19 nt, Homo sapiens
  misc_RNA (1)...(19): siRNA sense strand
aggaggaaaucaccuuaaa

SEQ ID NO: 1574159 - RNA, 19 nt, Homo sapiens
  misc_RNA (1)...(19): siRNA sense strand
caauagcaauggccuugug

SEQ ID NO: 1574160 - RNA, 19 nt, Homo sapiens
  misc_RNA (1)...(19): siRNA sense strand
ccacugugcucaaguacca

SEQ ID NO: 1574161 - RNA, 19 nt, Homo sapiens
  misc_RNA (1)...(19): siRNA sense strand
gagcugaaacacauaaaca

SEQ ID NO: 1574162 - RNA, 19 nt, Homo sapiens
  misc_RNA (1)...(19): siRNA sense strand
agaaggugauucaguacaa

SEQ ID NO: 1574163 - RNA, 19 nt, Homo sapiens
  misc_RNA (1)...(19): siRNA sense strand
gaaaaggugcugccuaaga

SEQ ID NO: 1574164 - RNA, 19 nt, Homo sapiens
  misc_RNA (1)...(19): siRNA sense strand
gagacacccaggacaauga

SEQ ID NO: 1574165 - RNA, 19 nt, Homo sapiens
  misc_RNA (1)...(19): siRNA sense strand
ugagauggaccgugucauu

SEQ ID NO: 1574166 - RNA, 19 nt, Homo sapiens
  misc_RNA (1)...(19): siRNA sense strand
acagugggauaaacgauga

SEQ ID NO: 1574167 - RNA, 19 nt, Homo sapiens
  misc_RNA (1)...(19): siRNA sense strand
gaacuacuggaucaacaug

SEQ ID NO: 1574168 - RNA, 19 nt, Homo sapiens
  misc_RNA (1)...(19): siRNA sense strand
uaaaggagugguaccagaa

SEQ ID NO: 1574169 - RNA, 19 nt, Homo sapiens
  misc_RNA (1)...(19): siRNA sense strand
ccauggagcacaccaagaa

SEQ ID NO: 1574170 - RNA, 19 nt, Homo sapiens
  misc_RNA (1)...(19): siRNA sense strand
gagauggaccgugucauug

SEQ ID NO: 1574171 - RNA, 19 nt, Homo sapiens
  misc_RNA (1)...(19): siRNA sense strand
ggauaagagcuucgacaug

SEQ ID NO: 1574172 - RNA, 19 nt, Homo sapiens
  misc_RNA (1)...(19): siRNA sense strand
gagaagagcaaggaauauc

SEQ ID NO: 1574173 - RNA, 19 nt, Homo sapiens
  misc_RNA (1)...(19): siRNA sense strand
ugaagaagcagcaggagau

SEQ ID NO: 1574174 - RNA, 19 nt, Homo sapiens
  misc_RNA (1)...(19): siRNA sense strand
gaaggugauucaguacaag

SEQ ID NO: 1574175 - RNA, 19 nt, Homo sapiens
  misc_RNA (1)...(19): siRNA sense strand
caacuucucccgccaguac

SEQ ID NO: 1574176 - RNA, 19 nt, Homo sapiens
  misc_RNA (1)...(19): siRNA sense strand
gaggaaaucaccuuaaagc

SEQ ID NO: 1574177 - RNA, 19 nt, Homo sapiens
  misc_RNA (1)...(19): siRNA sense strand
gaggagacacccaggacaa

SEQ ID NO: 1574178 - RNA, 19 nt, Homo sapiens
  misc_RNA (1)...(19): siRNA sense strand
caaggaggaugaggauaag

SEQ ID NO: 1574179 - RNA, 19 nt, Homo sapiens
  misc_RNA (1)...(19): siRNA sense strand
cugcucugcuccaugcuua

SEQ ID NO: 1574180 - RNA, 19 nt, Homo sapiens
  misc_RNA (1)...(19): siRNA sense strand
uaucggcucuggcuaugau

SEQ ID NO: 1574181 - RNA, 19 nt, Homo sapiens
  misc_RNA (1)...(19): siRNA sense strand
ggagagaaacuaacaugcu

SEQ ID NO: 1574182 - RNA, 19 nt, Homo sapiens
  misc_RNA (1)...(19): siRNA sense strand
gucaagaagcucacucuga

SEQ ID NO: 1574183 - RNA, 19 nt, Homo sapiens
  misc_RNA (1)...(19): siRNA sense strand
ugaaacacauaaacaagac

SEQ ID NO: 1574184 - RNA, 19 nt, Homo sapiens
  misc_RNA (1)...(19): siRNA sense strand
cgaggugccugagaacuuc

SEQ ID NO: 1574185 - RNA, 19 nt, Homo sapiens
  misc_RNA (1)...(19): siRNA sense strand
aaaaggugcugccuaagaa

SEQ ID NO: 1574186 - RNA, 19 nt, Homo sapiens
  misc_RNA (1)...(19): siRNA sense strand
caacacacccaaggaggaa

SEQ ID NO: 1574187 - RNA, 19 nt, Homo sapiens
  misc_RNA (1)...(19): siRNA sense strand
ggacagcaaaggcaacaag

SEQ ID NO: 1574188 - RNA, 19 nt, Homo sapiens
  misc_RNA (1)...(19): siRNA sense strand
gacaaugacagaguacuau

SEQ ID NO: 1574189 - RNA, 19 nt, Homo sapiens
  misc_RNA (1)...(19): siRNA sense strand
aggaaaagcucuacaagga

SEQ ID NO: 1574190 - RNA, 19 nt, Homo sapiens
  misc_RNA (1)...(19): siRNA sense strand
aaaagaagcagcaguggua

SEQ ID NO: 1574191 - RNA, 19 nt, Homo sapiens
  misc_RNA (1)...(19): siRNA sense strand
acaccaagcggaaugagaa

SEQ ID NO: 1574192 - RNA, 19 nt, Homo sapiens
  misc_RNA (1)...(19): siRNA sense strand
cagcaaaggcaacaagauc

SEQ ID NO: 1574193 - RNA, 19 nt, Homo sapiens
  misc_RNA (1)...(19): siRNA sense strand
ccaagcugcccauuuccua

SEQ ID NO: 1574194 - RNA, 19 nt, Homo sapiens
  misc_RNA (1)...(19): siRNA sense strand
gcaaaggcaacaagaucau

SEQ ID NO: 1574195 - RNA, 19 nt, Homo sapiens
  misc_RNA (1)...(19): siRNA sense strand
gacagaguacuaucaagga

SEQ ID NO: 1574196 - RNA, 19 nt, Homo sapiens
  misc_RNA (1)...(19): siRNA sense strand
gaagaagcugucagagauc

SEQ ID NO: 1574197 - RNA, 19 nt, Homo sapiens
  misc_RNA (1)...(19): siRNA sense strand
ucagagcccaggagaagaa

SEQ ID NO: 1574198 - RNA, 19 nt, Homo sapiens
  misc_RNA (1)...(19): siRNA sense strand
gguuugagcaggagcaaga

SEQ ID NO: 1574199 - RNA, 19 nt, Homo sapiens
  misc_RNA (1)...(19): siRNA sense strand
gaagaaggugauucaguac

SEQ ID NO: 1574200 - RNA, 19 nt, Homo sapiens
  misc_RNA (1)...(19): siRNA sense strand
gcgaggugccugagaacuu

SEQ ID NO: 1574201 - RNA, 19 nt, Homo sapiens
  misc_RNA (1)...(19): siRNA sense strand
gcucuggcuaugaugcuua

SEQ ID NO: 1574202 - RNA, 19 nt, Homo sapiens
  misc_RNA (1)...(19): siRNA sense strand
ucaaggacgcccagacuuc

SEQ ID NO: 1574203 - RNA, 19 nt, Homo sapiens
  misc_RNA (1)...(19): siRNA sense strand
ggacuugcaguguaccaau

SEQ ID NO: 1574204 - RNA, 19 nt, Homo sapiens
  misc_RNA (1)...(19): siRNA sense strand
gggaagaaggugauucagu

SEQ ID NO: 1574205 - RNA, 19 nt, Homo sapiens
  misc_RNA (1)...(19): siRNA sense strand
gaacgggaagaaggugauu

SEQ ID NO: 1574206 - RNA, 19 nt, Homo sapiens
  misc_RNA (1)...(19): siRNA sense strand
agaagacgacagugggaua

SEQ ID NO: 1574207 - RNA, 19 nt, Homo sapiens
  misc_RNA (1)...(19): siRNA sense strand
agcaagaggugaagaagca

SEQ ID NO: 1574208 - RNA, 19 nt, Homo sapiens
  misc_RNA (1)...(19): siRNA sense strand
ggaggaaaucaccuuaaag

SEQ ID NO: 1574209 - RNA, 19 nt, Homo sapiens
  misc_RNA (1)...(19): siRNA sense strand
agugugaagugcccaaguu

SEQ ID NO: 1574210 - RNA, 19 nt, Homo sapiens
  misc_RNA (1)...(19): siRNA sense strand
ggagacacccaggacaaug

SEQ ID NO: 1574211 - RNA, 19 nt, Homo sapiens
  misc_RNA (1)...(19): siRNA sense strand
ggaccgugucauugaguuu

SEQ ID NO: 1574212 - RNA, 19 nt, Homo sapiens
  misc_RNA (1)...(19): siRNA sense strand
gauggaccgugucauugag

SEQ ID NO: 1574213 - RNA, 19 nt, Homo sapiens
  misc_RNA (1)...(19): siRNA sense strand
ccaaggacacuauugacau

SEQ ID NO: 1574214 - RNA, 19 nt, Homo sapiens
  misc_RNA (1)...(19): siRNA sense strand
cagcuguccuugacugaag

SEQ ID NO: 1574215 - RNA, 19 nt, Homo sapiens
  misc_RNA (1)...(19): siRNA sense strand
cccaggagcugcaaaagaa

SEQ ID NO: 1574216 - RNA, 19 nt, Homo sapiens
  misc_RNA (1)...(19): siRNA sense strand
ucaagcagcggcucaucaa

SEQ ID NO: 1574217 - RNA, 19 nt, Homo sapiens
  misc_RNA (1)...(19): siRNA sense strand
uuaccaaggacacuauuga

SEQ ID NO: 1574218 - RNA, 19 nt, Homo sapiens
  misc_RNA (1)...(19): siRNA sense strand
uaaacgaugaggaugaugu

SEQ ID NO: 1574219 - RNA, 19 nt, Homo sapiens
  misc_RNA (1)...(19): siRNA sense strand
gggcgaggauggagaaaau

SEQ ID NO: 1574220 - RNA, 19 nt, Homo sapiens
  misc_RNA (1)...(19): siRNA sense strand
gcucagagaccuggagaag

SEQ ID NO: 1574221 - RNA, 19 nt, Homo sapiens
  misc_RNA (1)...(19): siRNA sense strand
aggaaaaggugcugccuaa

SEQ ID NO: 1574222 - RNA, 19 nt, Homo sapiens
  misc_RNA (1)...(19): siRNA sense strand
caggagagaaacuaacaug

SEQ ID NO: 1574223 - RNA, 19 nt, Homo sapiens
  misc_RNA (1)...(19): siRNA sense strand
gcugaaacacauaaacaag

SEQ ID NO: 1574224 - RNA, 19 nt, Homo sapiens
  misc_RNA (1)...(19): siRNA sense strand
gcacuuccugggcaucgaa

SEQ ID NO: 1574225 - RNA, 19 nt, Homo sapiens
  misc_RNA (1)...(19): siRNA sense strand
gcaagugcuucacacagaa

SEQ ID NO: 1574226 - RNA, 19 nt, Homo sapiens
  misc_RNA (1)...(19): siRNA sense strand
ggaaugcccucagccaguu

SEQ ID NO: 1574227 - RNA, 19 nt, Homo sapiens
  misc_RNA (1)...(19): siRNA sense strand
gcuauagccugucggaaga

SEQ ID NO: 1574228 - RNA, 19 nt, Homo sapiens
  misc_RNA (1)...(19): siRNA sense strand
gcgcagcacuucaucuuca

SEQ ID NO: 1574229 - RNA, 19 nt, Homo sapiens
  misc_RNA (1)...(19): siRNA sense strand
ggcaagugcuucacacaga

SEQ ID NO: 1574230 - RNA, 19 nt, Homo sapiens
  misc_RNA (1)...(19): siRNA sense strand
uuagggacaucgucaacua

SEQ ID NO: 1574231 - RNA, 19 nt, Homo sapiens
  misc_RNA (1)...(19): siRNA sense strand
ccacaagccugccauuagg

SEQ ID NO: 1574232 - RNA, 19 nt, Homo sapiens
  misc_RNA (1)...(19): siRNA sense strand
guggagaaaugccggaaug

SEQ ID NO: 1574233 - RNA, 19 nt, Homo sapiens
  misc_RNA (1)...(19): siRNA sense strand
gcaacgcuacggaacauga

SEQ ID NO: 1574234 - RNA, 19 nt, Homo sapiens
  misc_RNA (1)...(19): siRNA sense strand
ggaagaggaugaggaugag

SEQ ID NO: 1574235 - RNA, 19 nt, Homo sapiens
  misc_RNA (1)...(19): siRNA sense strand
ggaaaccccuuaaagaaca

SEQ ID NO: 1574236 - RNA, 19 nt, Homo sapiens
  misc_RNA (1)...(19): siRNA sense strand
gggagggccugcuguugau

SEQ ID NO: 1574237 - RNA, 19 nt, Homo sapiens
  misc_RNA (1)...(19): siRNA sense strand
gcaagaccacggccgagaa

SEQ ID NO: 1574238 - RNA, 19 nt, Homo sapiens
  misc_RNA (1)...(19): siRNA sense strand
ggacaucgucaacuaccuu

SEQ ID NO: 1574239 - RNA, 19 nt, Homo sapiens
  misc_RNA (1)...(19): siRNA sense strand
gaaagccgaggaagaggau

SEQ ID NO: 1574240 - RNA, 19 nt, Homo sapiens
  misc_RNA (1)...(19): siRNA sense strand
ccuccuaccugcagaugga

SEQ ID NO: 1574241 - RNA, 19 nt, Homo sapiens
  misc_RNA (1)...(19): siRNA sense strand
gcaucguggugucaaguca

SEQ ID NO: 1574242 - RNA, 19 nt, Homo sapiens
  misc_RNA (1)...(19): siRNA sense strand
ccaguguggccgagauuaa

SEQ ID NO: 1574243 - RNA, 19 nt, Homo sapiens
  misc_RNA (1)...(19): siRNA sense strand
gcccacaagccugccauua

SEQ ID NO: 1574244 - RNA, 19 nt, Homo sapiens
  misc_RNA (1)...(19): siRNA sense strand
gccuuggaauucgcuguua

SEQ ID NO: 1574245 - RNA, 19 nt, Homo sapiens
  misc_RNA (1)...(19): siRNA sense strand
ccaagugcccggaaguguu

SEQ ID NO: 1574246 - RNA, 19 nt, Homo sapiens
  misc_RNA (1)...(19): siRNA sense strand
caaaauaggccucaaagag

SEQ ID NO: 1574247 - RNA, 19 nt, Homo sapiens
  misc_RNA (1)...(19): siRNA sense strand
gcccucagccaguucauug

SEQ ID NO: 1574248 - RNA, 19 nt, Homo sapiens
  misc_RNA (1)...(19): siRNA sense strand
gacaucgucaacuaccuua

SEQ ID NO: 1574249 - RNA, 19 nt, Homo sapiens
  misc_RNA (1)...(19): siRNA sense strand
gcugaaagccgaggaagag

SEQ ID NO: 1574250 - RNA, 19 nt, Homo sapiens
  misc_RNA (1)...(19): siRNA sense strand
caagugcccggaaguguuc

SEQ ID NO: 1574251 - RNA, 19 nt, Homo sapiens
  misc_RNA (1)...(19): siRNA sense strand
aggaagaggaugaggauga

SEQ ID NO: 1574252 - RNA, 19 nt, Homo sapiens
  misc_RNA (1)...(19): siRNA sense strand
gggaccaguuccugcugaa

SEQ ID NO: 1574253 - RNA, 19 nt, Homo sapiens
  misc_RNA (1)...(19): siRNA sense strand
ggccgacagccucaaguuu

SEQ ID NO: 1574254 - RNA, 19 nt, Homo sapiens
  misc_RNA (1)...(19): siRNA sense strand
gccgacagccucaaguuuc

SEQ ID NO: 1574255 - RNA, 19 nt, Homo sapiens
  misc_RNA (1)...(19): siRNA sense strand
gggcgcagcacuucaucuu

SEQ ID NO: 1574256 - RNA, 19 nt, Homo sapiens
  misc_RNA (1)...(19): siRNA sense strand
cccacuggaugaagacuug

SEQ ID NO: 1574257 - RNA, 19 nt, Homo sapiens
  misc_RNA (1)...(19): siRNA sense strand
ggaguucccacuggaugaa

SEQ ID NO: 1574258 - RNA, 19 nt, Homo sapiens
  misc_RNA (1)...(19): siRNA sense strand
caaccucaaccgccacaug

SEQ ID NO: 1574259 - RNA, 19 nt, Homo sapiens
  misc_RNA (1)...(19): siRNA sense strand
ggaugaggaugaggaugag

SEQ ID NO: 1574260 - RNA, 19 nt, Homo sapiens
  misc_RNA (1)...(19): siRNA sense strand
cgaggaagaggaugaggau

SEQ ID NO: 1574261 - RNA, 19 nt, Homo sapiens
  misc_RNA (1)...(19): siRNA sense strand
uggagcacgugguggagaa

SEQ ID NO: 1574262 - RNA, 19 nt, Homo sapiens
  misc_RNA (1)...(19): siRNA sense strand
caacgcuacggaacaugaa

SEQ ID NO: 1574263 - RNA, 19 nt, Homo sapiens
  misc_RNA (1)...(19): siRNA sense strand
ccaguucauugagcccaaa

SEQ ID NO: 1574264 - RNA, 19 nt, Homo sapiens
  misc_RNA (1)...(19): siRNA sense strand
ccgcaacgcuacggaacau

SEQ ID NO: 1574265 - RNA, 19 nt, Homo sapiens
  misc_RNA (1)...(19): siRNA sense strand
ccuuaaagaacaucaagug

SEQ ID NO: 1574266 - RNA, 19 nt, Homo sapiens
  misc_RNA (1)...(19): siRNA sense strand
aggaugaggaugaggauga

SEQ ID NO: 1574267 - RNA, 19 nt, Homo sapiens
  misc_RNA (1)...(19): siRNA sense strand
guggaaaccccuuaaagaa

SEQ ID NO: 1574268 - RNA, 19 nt, Homo sapiens
  misc_RNA (1)...(19): siRNA sense strand
gguggaaaccccuuaaaga

SEQ ID NO: 1574269 - RNA, 19 nt, Homo sapiens
  misc_RNA (1)...(19): siRNA sense strand
ggugaaggccugcuauagc

SEQ ID NO: 1574270 - RNA, 19 nt, Homo sapiens
  misc_RNA (1)...(19): siRNA sense strand
guggugaaggccugcuaua

SEQ ID NO: 1574271 - RNA, 19 nt, Homo sapiens
  misc_RNA (1)...(19): siRNA sense strand
caucgucaacuaccuuaca

SEQ ID NO: 1574272 - RNA, 19 nt, Homo sapiens
  misc_RNA (1)...(19): siRNA sense strand
aggaugaggacgugucuga

SEQ ID NO: 1574273 - RNA, 19 nt, Homo sapiens
  misc_RNA (1)...(19): siRNA sense strand
augaagacuuggagcugaa

SEQ ID NO: 1574274 - RNA, 19 nt, Homo sapiens
  misc_RNA (1)...(19): siRNA sense strand
aaccucaaccgccacauga

SEQ ID NO: 1574275 - RNA, 19 nt, Homo sapiens
  misc_RNA (1)...(19): siRNA sense strand
ggagcugaaagccgaggaa

SEQ ID NO: 1574276 - RNA, 19 nt, Homo sapiens
  misc_RNA (1)...(19): siRNA sense strand
ccaagaauaucuccuuuga

SEQ ID NO: 1574277 - RNA, 19 nt, Homo sapiens
  misc_RNA (1)...(19): siRNA sense strand
ggacagaacaucuuucaga

SEQ ID NO: 1574278 - RNA, 19 nt, Homo sapiens
  misc_RNA (1)...(19): siRNA sense strand
gcaaguauccgcugcacua

SEQ ID NO: 1574279 - RNA, 19 nt, Homo sapiens
  misc_RNA (1)...(19): siRNA sense strand
gacagaacaucuuucagaa

SEQ ID NO: 1574280 - RNA, 19 nt, Homo sapiens
  misc_RNA (1)...(19): siRNA sense strand
ccacucagcuugacaccaa

SEQ ID NO: 1574281 - RNA, 19 nt, Homo sapiens
  misc_RNA (1)...(19): siRNA sense strand
cagaacaucuuucagaaca

SEQ ID NO: 1574282 - RNA, 19 nt, Homo sapiens
  misc_RNA (1)...(19): siRNA sense strand
gaacaucuuucagaacauc

SEQ ID NO: 1574283 - RNA, 19 nt, Homo sapiens
  misc_RNA (1)...(19): siRNA sense strand
guaugaagcuaagguguau

SEQ ID NO: 1574284 - RNA, 19 nt, Homo sapiens
  misc_RNA (1)...(19): siRNA sense strand
agacggagauggugaaugg

SEQ ID NO: 1574285 - RNA, 19 nt, Homo sapiens
  misc_RNA (1)...(19): siRNA sense strand
gagcugggcaaccgugaua

SEQ ID NO: 1574286 - RNA, 19 nt, Homo sapiens
  misc_RNA (1)...(19): siRNA sense strand
ggucaaaggcuguaagaca

SEQ ID NO: 1574287 - RNA, 19 nt, Homo sapiens
  misc_RNA (1)...(19): siRNA sense strand
gguaugaagcuaaggugua

SEQ ID NO: 1574288 - RNA, 19 nt, Homo sapiens
  misc_RNA (1)...(19): siRNA sense strand
ccauggaacugaccaccaa

SEQ ID NO: 1574289 - RNA, 19 nt, Homo sapiens
  misc_RNA (1)...(19): siRNA sense strand
uccaagaucugcccuagug

SEQ ID NO: 1574290 - RNA, 19 nt, Homo sapiens
  misc_RNA (1)...(19): siRNA sense strand
ugccaucacugcagaagaa

SEQ ID NO: 1574291 - RNA, 19 nt, Homo sapiens
  misc_RNA (1)...(19): siRNA sense strand
gaauggguaugaagcuaag

SEQ ID NO: 1574292 - RNA, 19 nt, Homo sapiens
  misc_RNA (1)...(19): siRNA sense strand
caccaagaauaucuccuuu

SEQ ID NO: 1574293 - RNA, 19 nt, Homo sapiens
  misc_RNA (1)...(19): siRNA sense strand
gaaccgcagcuuugucuuc

SEQ ID NO: 1574294 - RNA, 19 nt, Homo sapiens
  misc_RNA (1)...(19): siRNA sense strand
gauggugaauggguaugaa

SEQ ID NO: 1574295 - RNA, 19 nt, Homo sapiens
  misc_RNA (1)...(19): siRNA sense strand
ccaccaagacacagaaguu

SEQ ID NO: 1574296 - RNA, 19 nt, Homo sapiens
  misc_RNA (1)...(19): siRNA sense strand
gugaauggguaugaagcua

SEQ ID NO: 1574297 - RNA, 19 nt, Homo sapiens
  misc_RNA (1)...(19): siRNA sense strand
cgagggaaccgcagcuuug

SEQ ID NO: 1574298 - RNA, 19 nt, Homo sapiens
  misc_RNA (1)...(19): siRNA sense strand
ccacacuccugggcuuuga

SEQ ID NO: 1574299 - RNA, 19 nt, Homo sapiens
  misc_RNA (1)...(19): siRNA sense strand
acgacgaccugcugcaauu

SEQ ID NO: 1574300 - RNA, 19 nt, Homo sapiens
  misc_RNA (1)...(19): siRNA sense strand
gccagaaccugaggguaga

SEQ ID NO: 1574301 - RNA, 19 nt, Homo sapiens
  misc_RNA (1)...(19): siRNA sense strand
gggaggcgcuaaccaacag

SEQ ID NO: 1574302 - RNA, 19 nt, Homo sapiens
  misc_RNA (1)...(19): siRNA sense strand
ggacuucuacguggagaug

SEQ ID NO: 1574303 - RNA, 19 nt, Homo sapiens
  misc_RNA (1)...(19): siRNA sense strand
ccaagacacagaaguucaa

SEQ ID NO: 1574304 - RNA, 19 nt, Homo sapiens
  misc_RNA (1)...(19): siRNA sense strand
ugaauggguaugaagcuaa

SEQ ID NO: 1574305 - RNA, 19 nt, Homo sapiens
  misc_RNA (1)...(19): siRNA sense strand
gcacacggacagaacaucu

SEQ ID NO: 1574306 - RNA, 19 nt, Homo sapiens
  misc_RNA (1)...(19): siRNA sense strand
gcgagggaaccgcagcuuu

SEQ ID NO: 1574307 - RNA, 19 nt, Homo sapiens
  misc_RNA (1)...(19): siRNA sense strand
ggaacugaccaccaagaca

SEQ ID NO: 1574308 - RNA, 19 nt, Homo sapiens
  misc_RNA (1)...(19): siRNA sense strand
acacggacagaacaucuuu

SEQ ID NO: 1574309 - RNA, 19 nt, Homo sapiens
  misc_RNA (1)...(19): siRNA sense strand
caucuaacguggagcucau

SEQ ID NO: 1574310 - RNA, 19 nt, Homo sapiens
  misc_RNA (1)...(19): siRNA sense strand
caagcgccguggucaugga

SEQ ID NO: 1574311 - RNA, 19 nt, Homo sapiens
  misc_RNA (1)...(19): siRNA sense strand
ccucauggccgucagcaau

SEQ ID NO: 1574312 - RNA, 19 nt, Homo sapiens
  misc_RNA (1)...(19): siRNA sense strand
ggagauggugaauggguau

SEQ ID NO: 1574313 - RNA, 19 nt, Homo sapiens
  misc_RNA (1)...(19): siRNA sense strand
ggacaucgagcagcuggau

SEQ ID NO: 1574314 - RNA, 19 nt, Homo sapiens
  misc_RNA (1)...(19): siRNA sense strand
ucacaagggcaaggucaaa

SEQ ID NO: 1574315 - RNA, 19 nt, Homo sapiens
  misc_RNA (1)...(19): siRNA sense strand
ggagaugaaaugggaguuc

SEQ ID NO: 1574316 - RNA, 19 nt, Homo sapiens
  misc_RNA (1)...(19): siRNA sense strand
ccucaacggcugcgacgaa

SEQ ID NO: 1574317 - RNA, 19 nt, Homo sapiens
  misc_RNA (1)...(19): siRNA sense strand
cuagugacaccuacaaagu

SEQ ID NO: 1574318 - RNA, 19 nt, Homo sapiens
  misc_RNA (1)...(19): siRNA sense strand
gggaaccgcagcuuugucu

SEQ ID NO: 1574319 - RNA, 19 nt, Homo sapiens
  misc_RNA (1)...(19): siRNA sense strand
gcuucccaguuaagauuga

SEQ ID NO: 1574320 - RNA, 19 nt, Homo sapiens
  misc_RNA (1)...(19): siRNA sense strand
agacaccuuugcaguccuu

SEQ ID NO: 1574321 - RNA, 19 nt, Homo sapiens
  misc_RNA (1)...(19): siRNA sense strand
gccgggugguguacacaga

SEQ ID NO: 1574322 - RNA, 19 nt, Homo sapiens
  misc_RNA (1)...(19): siRNA sense strand
gagggaaccgcagcuuugu

SEQ ID NO: 1574323 - RNA, 19 nt, Homo sapiens
  misc_RNA (1)...(19): siRNA sense strand
uggcuucccaguuaagauu

SEQ ID NO: 1574324 - RNA, 19 nt, Homo sapiens
  misc_RNA (1)...(19): siRNA sense strand
caucacugcagaagaauac

SEQ ID NO: 1574325 - RNA, 19 nt, Homo sapiens
  misc_RNA (1)...(19): siRNA sense strand
acaccaagaauaucuccuu

SEQ ID NO: 1574326 - RNA, 19 nt, Homo sapiens
  misc_RNA (1)...(19): siRNA sense strand
cacaagcgccguggucaug

SEQ ID NO: 1574327 - RNA, 19 nt, Homo sapiens
  misc_RNA (1)...(19): siRNA sense strand
caaaaugggacccugauca

SEQ ID NO: 1574328 - RNA, 19 nt, Homo sapiens
  misc_RNA (1)...(19): siRNA sense strand
aaccgcagcuuugucuuca

SEQ ID NO: 1574329 - RNA, 19 nt, Homo sapiens
  misc_RNA (1)...(19): siRNA sense strand
gcaaggucaaaggcuguaa

SEQ ID NO: 1574330 - RNA, 19 nt, Homo sapiens
  misc_RNA (1)...(19): siRNA sense strand
gcgccguggucauggagau

SEQ ID NO: 1574331 - RNA, 19 nt, Homo sapiens
  misc_RNA (1)...(19): siRNA sense strand
gcuguaagacaccuuugca

SEQ ID NO: 1574332 - RNA, 19 nt, Homo sapiens
  misc_RNA (1)...(19): siRNA sense strand
gagagaaacauccgaauua

SEQ ID NO: 1574333 - RNA, 19 nt, Homo sapiens
  misc_RNA (1)...(19): siRNA sense strand
ccaagaagaugaaaggauu

SEQ ID NO: 1574334 - RNA, 19 nt, Homo sapiens
  misc_RNA (1)...(19): siRNA sense strand
ggagcuggauaaucagaua

SEQ ID NO: 1574335 - RNA, 19 nt, Homo sapiens
  misc_RNA (1)...(19): siRNA sense strand
gaaaggauuguucuuguug

SEQ ID NO: 1574336 - RNA, 19 nt, Homo sapiens
  misc_RNA (1)...(19): siRNA sense strand
gaucccaccucaccauuga

SEQ ID NO: 1574337 - RNA, 19 nt, Homo sapiens
  misc_RNA (1)...(19): siRNA sense strand
agaaacauccgaauuauug

SEQ ID NO: 1574338 - RNA, 19 nt, Homo sapiens
  misc_RNA (1)...(19): siRNA sense strand
ccagauuuguguaccauuu

SEQ ID NO: 1574339 - RNA, 19 nt, Homo sapiens
  misc_RNA (1)...(19): siRNA sense strand
ggagagaaacauccgaauu

SEQ ID NO: 1574340 - RNA, 19 nt, Homo sapiens
  misc_RNA (1)...(19): siRNA sense strand
gaagaugaaaggauuguuc

SEQ ID NO: 1574341 - RNA, 19 nt, Homo sapiens
  misc_RNA (1)...(19): siRNA sense strand
acagagaccugcuacacuu

SEQ ID NO: 1574342 - RNA, 19 nt, Homo sapiens
  misc_RNA (1)...(19): siRNA sense strand
ugaaaggauuguucuuguu

SEQ ID NO: 1574343 - RNA, 19 nt, Homo sapiens
  misc_RNA (1)...(19): siRNA sense strand
gagaaacauccgaauuauu

SEQ ID NO: 1574344 - RNA, 19 nt, Homo sapiens
  misc_RNA (1)...(19): siRNA sense strand
aaguggagcuggauaauca

SEQ ID NO: 1574345 - RNA, 19 nt, Homo sapiens
  misc_RNA (1)...(19): siRNA sense strand
gaagacagugcuacagaga

SEQ ID NO: 1574346 - RNA, 19 nt, Homo sapiens
  misc_RNA (1)...(19): siRNA sense strand
gaauuauuguuccucugaa

SEQ ID NO: 1574347 - RNA, 19 nt, Homo sapiens
  misc_RNA (1)...(19): siRNA sense strand
gaugaaaggauuguucuug

SEQ ID NO: 1574348 - RNA, 19 nt, Homo sapiens
  misc_RNA (1)...(19): siRNA sense strand
agagaaacauccgaauuau

SEQ ID NO: 1574349 - RNA, 19 nt, Homo sapiens
  misc_RNA (1)...(19): siRNA sense strand
uauuaaggcuguucaugug

SEQ ID NO: 1574350 - RNA, 19 nt, Homo sapiens
  misc_RNA (1)...(19): siRNA sense strand
gaaccagauuuguguacca

SEQ ID NO: 1574351 - RNA, 19 nt, Homo sapiens
  misc_RNA (1)...(19): siRNA sense strand
ccauuugucugaccucugu

SEQ ID NO: 1574352 - RNA, 19 nt, Homo sapiens
  misc_RNA (1)...(19): siRNA sense strand
cgaauuauuguuccucuga

SEQ ID NO: 1574353 - RNA, 19 nt, Homo sapiens
  misc_RNA (1)...(19): siRNA sense strand
gaaagcccaagaagaugaa

SEQ ID NO: 1574354 - RNA, 19 nt, Homo sapiens
  misc_RNA (1)...(19): siRNA sense strand
caauaucugugaugaagac

SEQ ID NO: 1574355 - RNA, 19 nt, Homo sapiens
  misc_RNA (1)...(19): siRNA sense strand
cugcuacacuuaugacaga

SEQ ID NO: 1574356 - RNA, 19 nt, Homo sapiens
  misc_RNA (1)...(19): siRNA sense strand
ugugaaagcccaagaagau

SEQ ID NO: 1574357 - RNA, 19 nt, Homo sapiens
  misc_RNA (1)...(19): siRNA sense strand
ugaaagcccaagaagauga

SEQ ID NO: 1574358 - RNA, 19 nt, Homo sapiens
  misc_RNA (1)...(19): siRNA sense strand
gaacaacagggagaauauc

SEQ ID NO: 1574359 - RNA, 19 nt, Homo sapiens
  misc_RNA (1)...(19): siRNA sense strand
aaaggauuguucuuguuga

SEQ ID NO: 1574360 - RNA, 19 nt, Homo sapiens
  misc_RNA (1)...(19): siRNA sense strand
gaagaaccauuugcuuuuc

SEQ ID NO: 1574361 - RNA, 19 nt, Homo sapiens
  misc_RNA (1)...(19): siRNA sense strand
cggauuacuuccaggauca

SEQ ID NO: 1574362 - RNA, 19 nt, Homo sapiens
  misc_RNA (1)...(19): siRNA sense strand
gagaccugcuacacuuaug

SEQ ID NO: 1574363 - RNA, 19 nt, Homo sapiens
  misc_RNA (1)...(19): siRNA sense strand
ccauugagaaccagauuug

SEQ ID NO: 1574364 - RNA, 19 nt, Homo sapiens
  misc_RNA (1)...(19): siRNA sense strand
ugaacaacagggagaauau

SEQ ID NO: 1574365 - RNA, 19 nt, Homo sapiens
  misc_RNA (1)...(19): siRNA sense strand
aaucagauaguuacugcua

SEQ ID NO: 1574366 - RNA, 19 nt, Homo sapiens
  misc_RNA (1)...(19): siRNA sense strand
gaaguggagcuggauaauc

SEQ ID NO: 1574367 - RNA, 19 nt, Homo sapiens
  misc_RNA (1)...(19): siRNA sense strand
cagaaguggagcuggauaa

SEQ ID NO: 1574368 - RNA, 19 nt, Homo sapiens
  misc_RNA (1)...(19): siRNA sense strand
gaaacauccgaauuauugu

SEQ ID NO: 1574369 - RNA, 19 nt, Homo sapiens
  misc_RNA (1)...(19): siRNA sense strand
ugacaacaaauguaagugu

SEQ ID NO: 1574370 - RNA, 19 nt, Homo sapiens
  misc_RNA (1)...(19): siRNA sense strand
ugccugcuauccugacuaa

SEQ ID NO: 1574371 - RNA, 19 nt, Homo sapiens
  misc_RNA (1)...(19): siRNA sense strand
gagcaauaucugugaugaa

SEQ ID NO: 1574372 - RNA, 19 nt, Homo sapiens
  misc_RNA (1)...(19): siRNA sense strand
agagcaauaucugugauga

SEQ ID NO: 1574373 - RNA, 19 nt, Homo sapiens
  misc_RNA (1)...(19): siRNA sense strand
cagagaccugcuacacuua

SEQ ID NO: 1574374 - RNA, 19 nt, Homo sapiens
  misc_RNA (1)...(19): siRNA sense strand
cuggauaaucagauaguua

SEQ ID NO: 1574375 - RNA, 19 nt, Homo sapiens
  misc_RNA (1)...(19): siRNA sense strand
caagaagaugaaaggauug

SEQ ID NO: 1574376 - RNA, 19 nt, Homo sapiens
  misc_RNA (1)...(19): siRNA sense strand
gcuggauaaucagauaguu

SEQ ID NO: 1574377 - RNA, 19 nt, Homo sapiens
  misc_RNA (1)...(19): siRNA sense strand
augaaaggauuguucuugu

SEQ ID NO: 1574378 - RNA, 19 nt, Homo sapiens
  misc_RNA (1)...(19): siRNA sense strand
gcaauaucugugaugaaga

SEQ ID NO: 1574379 - RNA, 19 nt, Homo sapiens
  misc_RNA (1)...(19): siRNA sense strand
gauaaucagauaguuacug

SEQ ID NO: 1574380 - RNA, 19 nt, Homo sapiens
  misc_RNA (1)...(19): siRNA sense strand
aaaaugugauccuacagaa

SEQ ID NO: 1574381 - RNA, 19 nt, Homo sapiens
  misc_RNA (1)...(19): siRNA sense strand
agcaauaucugugaugaag

SEQ ID NO: 1574382 - RNA, 19 nt, Homo sapiens
  misc_RNA (1)...(19): siRNA sense strand
uuauuaaggcuguucaugu

SEQ ID NO: 1574383 - RNA, 19 nt, Homo sapiens
  misc_RNA (1)...(19): siRNA sense strand
uguaagugugcccggauua

SEQ ID NO: 1574384 - RNA, 19 nt, Homo sapiens
  misc_RNA (1)...(19): siRNA sense strand
gagaaccagauuuguguac

SEQ ID NO: 1574385 - RNA, 19 nt, Homo sapiens
  misc_RNA (1)...(19): siRNA sense strand
cugaacaacagggagaaua

SEQ ID NO: 1574386 - RNA, 19 nt, Homo sapiens
  misc_RNA (1)...(19): siRNA sense strand
aaugugauccuacagaagu

SEQ ID NO: 1574387 - RNA, 19 nt, Homo sapiens
  misc_RNA (1)...(19): siRNA sense strand
ugagaaccagauuugugua

SEQ ID NO: 1574388 - RNA, 19 nt, Homo sapiens
  misc_RNA (1)...(19): siRNA sense strand
cagaaacaagugcuacaca

SEQ ID NO: 1574389 - RNA, 19 nt, Homo sapiens
  misc_RNA (1)...(19): siRNA sense strand
gacagaaacaagugcuaca

SEQ ID NO: 1574390 - RNA, 19 nt, Homo sapiens
  misc_RNA (1)...(19): siRNA sense strand
agauuuguguaccauuugu

SEQ ID NO: 1574391 - RNA, 19 nt, Homo sapiens
  misc_RNA (1)...(19): siRNA sense strand
acacuuaugacagaaacaa

SEQ ID NO: 1574392 - RNA, 19 nt, Homo sapiens
  misc_RNA (1)...(19): siRNA sense strand
cuacacuuaugacagaaac

SEQ ID NO: 1574393 - RNA, 19 nt, Homo sapiens
  misc_RNA (1)...(19): siRNA sense strand
ccaaagagauccugcagau

SEQ ID NO: 1574394 - RNA, 19 nt, Homo sapiens
  misc_RNA (1)...(19): siRNA sense strand
ggaguuguuugaggaauuu

SEQ ID NO: 1574395 - RNA, 19 nt, Homo sapiens
  misc_RNA (1)...(19): siRNA sense strand
gaccuagaccugaaguuua

SEQ ID NO: 1574396 - RNA, 19 nt, Homo sapiens
  misc_RNA (1)...(19): siRNA sense strand
ggaccuagaccugaaguuu

SEQ ID NO: 1574397 - RNA, 19 nt, Homo sapiens
  misc_RNA (1)...(19): siRNA sense strand
gggaguuguuugaggaauu

SEQ ID NO: 1574398 - RNA, 19 nt, Homo sapiens
  misc_RNA (1)...(19): siRNA sense strand
gggagaugcagccaguuua

SEQ ID NO: 1574399 - RNA, 19 nt, Homo sapiens
  misc_RNA (1)...(19): siRNA sense strand
ucauucagcuggaccuaga

SEQ ID NO: 1574400 - RNA, 19 nt, Homo sapiens
  misc_RNA (1)...(19): siRNA sense strand
accuagaccugaaguuuaa

SEQ ID NO: 1574401 - RNA, 19 nt, Homo sapiens
  misc_RNA (1)...(19): siRNA sense strand
uugaggaauuugacaguuu

SEQ ID NO: 1574402 - RNA, 19 nt, Homo sapiens
  misc_RNA (1)...(19): siRNA sense strand
caggacuucuucaccauga

SEQ ID NO: 1574403 - RNA, 19 nt, Homo sapiens
  misc_RNA (1)...(19): siRNA sense strand
uugcugugcugacggauaa

SEQ ID NO: 1574404 - RNA, 19 nt, Homo sapiens
  misc_RNA (1)...(19): siRNA sense strand
ugaggaauuugacaguuuc

SEQ ID NO: 1574405 - RNA, 19 nt, Homo sapiens
  misc_RNA (1)...(19): siRNA sense strand
gcgcgaaggccaagagcuu

SEQ ID NO: 1574406 - RNA, 19 nt, Homo sapiens
  misc_RNA (1)...(19): siRNA sense strand
gagggaccauggcuacagu

SEQ ID NO: 1574407 - RNA, 19 nt, Homo sapiens
  misc_RNA (1)...(19): siRNA sense strand
caucagaucaugcccaaag

SEQ ID NO: 1574408 - RNA, 19 nt, Homo sapiens
  misc_RNA (1)...(19): siRNA sense strand
gcagcuggccgacaaguac

SEQ ID NO: 1574409 - RNA, 19 nt, Homo sapiens
  misc_RNA (1)...(19): siRNA sense strand
gcacacauucuggcaguuc

SEQ ID NO: 1574410 - RNA, 19 nt, Homo sapiens
  misc_RNA (1)...(19): siRNA sense strand
ccaccaagaggcugaagga

SEQ ID NO: 1574411 - RNA, 19 nt, Homo sapiens
  misc_RNA (1)...(19): siRNA sense strand
ggacuaccaccugcugaug

SEQ ID NO: 1574412 - RNA, 19 nt, Homo sapiens
  misc_RNA (1)...(19): siRNA sense strand
cuacagugacuccaucuuc

SEQ ID NO: 1574413 - RNA, 19 nt, Homo sapiens
  misc_RNA (1)...(19): siRNA sense strand
gcugugcgcucccacuacu

SEQ ID NO: 1574414 - RNA, 19 nt, Homo sapiens
  misc_RNA (1)...(19): siRNA sense strand
ggagaugcagccaguuuac

SEQ ID NO: 1574415 - RNA, 19 nt, Homo sapiens
  misc_RNA (1)...(19): siRNA sense strand
caagugcaaggucaucuuc

SEQ ID NO: 1574416 - RNA, 19 nt, Homo sapiens
  misc_RNA (1)...(19): siRNA sense strand
cagaucaugcccaaagaga

SEQ ID NO: 1574417 - RNA, 19 nt, Homo sapiens
  misc_RNA (1)...(19): siRNA sense strand
uggcuacagugacgucuuc

SEQ ID NO: 1574418 - RNA, 19 nt, Homo sapiens
  misc_RNA (1)...(19): siRNA sense strand
gacuaccaccugcugauga

SEQ ID NO: 1574419 - RNA, 19 nt, Homo sapiens
  misc_RNA (1)...(19): siRNA sense strand
ucaccaaggcggagcacaa

SEQ ID NO: 1574420 - RNA, 19 nt, Homo sapiens
  misc_RNA (1)...(19): siRNA sense strand
agaccaacauccgggaguu

SEQ ID NO: 1574421 - RNA, 19 nt, Homo sapiens
  misc_RNA (1)...(19): siRNA sense strand
ggacuucuucaccaugauc

SEQ ID NO: 1574422 - RNA, 19 nt, Homo sapiens
  misc_RNA (1)...(19): siRNA sense strand
cgggagaugcagccaguuu

SEQ ID NO: 1574423 - RNA, 19 nt, Homo sapiens
  misc_RNA (1)...(19): siRNA sense strand
gcugacggauaagcucuuc

SEQ ID NO: 1574424 - RNA, 19 nt, Homo sapiens
  misc_RNA (1)...(19): siRNA sense strand
uacagugacuccaucuucu

SEQ ID NO: 1574425 - RNA, 19 nt, Homo sapiens
  misc_RNA (1)...(19): siRNA sense strand
cgucugcgccuucuacuac

SEQ ID NO: 1574426 - RNA, 19 nt, Homo sapiens
  misc_RNA (1)...(19): siRNA sense strand
ggaaccuacuacagugacu

SEQ ID NO: 1574427 - RNA, 19 nt, Homo sapiens
  misc_RNA (1)...(19): siRNA sense strand
gaaguuuaagaccaacauc

SEQ ID NO: 1574428 - RNA, 19 nt, Homo sapiens
  misc_RNA (1)...(19): siRNA sense strand
gaucauucagcuggaccua

SEQ ID NO: 1574429 - RNA, 19 nt, Homo sapiens
  misc_RNA (1)...(19): siRNA sense strand
caguuuacaggcacacauu

SEQ ID NO: 1574430 - RNA, 19 nt, Homo sapiens
  misc_RNA (1)...(19): siRNA sense strand
gccaagaucucaaggcuuu

SEQ ID NO: 1574431 - RNA, 19 nt, Homo sapiens
  misc_RNA (1)...(19): siRNA sense strand
cuaauaggcuuguucuuug

SEQ ID NO: 1574432 - RNA, 19 nt, Homo sapiens
  misc_RNA (1)...(19): siRNA sense strand
gagaguaguugcaccauca

SEQ ID NO: 1574433 - RNA, 19 nt, Homo sapiens
  misc_RNA (1)...(19): siRNA sense strand
agaggagacuuacugaaua

SEQ ID NO: 1574434 - RNA, 19 nt, Homo sapiens
  misc_RNA (1)...(19): siRNA sense strand
guaguugcaccaucaauua

SEQ ID NO: 1574435 - RNA, 19 nt, Homo sapiens
  misc_RNA (1)...(19): siRNA sense strand
gaggagacuuacugaauau

SEQ ID NO: 1574436 - RNA, 19 nt, Homo sapiens
  misc_RNA (1)...(19): siRNA sense strand
caauaugucuugugaugau

SEQ ID NO: 1574437 - RNA, 19 nt, Homo sapiens
  misc_RNA (1)...(19): siRNA sense strand
gagaggagacuuacugaau

SEQ ID NO: 1574438 - RNA, 19 nt, Homo sapiens
  misc_RNA (1)...(19): siRNA sense strand
aauuauagcugcucgaugu

SEQ ID NO: 1574439 - RNA, 19 nt, Homo sapiens
  misc_RNA (1)...(19): siRNA sense strand
cagaauacaauaugucuug

SEQ ID NO: 1574440 - RNA, 19 nt, Homo sapiens
  misc_RNA (1)...(19): siRNA sense strand
gccuggaacugguuaauag

SEQ ID NO: 1574441 - RNA, 19 nt, Homo sapiens
  misc_RNA (1)...(19): siRNA sense strand
ggagacuuacugaauauau

SEQ ID NO: 1574442 - RNA, 19 nt, Homo sapiens
  misc_RNA (1)...(19): siRNA sense strand
cgaguuguaucccugauuc

SEQ ID NO: 1574443 - RNA, 19 nt, Homo sapiens
  misc_RNA (1)...(19): siRNA sense strand
ucuaauaggcuuguucuuu

SEQ ID NO: 1574444 - RNA, 19 nt, Homo sapiens
  misc_RNA (1)...(19): siRNA sense strand
guuaauagacccugagaca

SEQ ID NO: 1574445 - RNA, 19 nt, Homo sapiens
  misc_RNA (1)...(19): siRNA sense strand
uaauagacccugagacaca

SEQ ID NO: 1574446 - RNA, 19 nt, Homo sapiens
  misc_RNA (1)...(19): siRNA sense strand
ggaauacacaagagaguag

SEQ ID NO: 1574447 - RNA, 19 nt, Homo sapiens
  misc_RNA (1)...(19): siRNA sense strand
aaaccuaggccucauguuc

SEQ ID NO: 1574448 - RNA, 19 nt, Homo sapiens
  misc_RNA (1)...(19): siRNA sense strand
ucacaucauuauggaauca

SEQ ID NO: 1574449 - RNA, 19 nt, Homo sapiens
  misc_RNA (1)...(19): siRNA sense strand
gaugauacaggaaaacuaa

SEQ ID NO: 1574450 - RNA, 19 nt, Homo sapiens
  misc_RNA (1)...(19): siRNA sense strand
cuuguucuuugcuggaaua

SEQ ID NO: 1574451 - RNA, 19 nt, Homo sapiens
  misc_RNA (1)...(19): siRNA sense strand
guugcaccaucaauuauag

SEQ ID NO: 1574452 - RNA, 19 nt, Homo sapiens
  misc_RNA (1)...(19): siRNA sense strand
cgaacgguauuagcagaau

SEQ ID NO: 1574453 - RNA, 19 nt, Homo sapiens
  misc_RNA (1)...(19): siRNA sense strand
cauuagcuguaucacucua

SEQ ID NO: 1574454 - RNA, 19 nt, Homo sapiens
  misc_RNA (1)...(19): siRNA sense strand
guucuuugcuggaauacac

SEQ ID NO: 1574455 - RNA, 19 nt, Homo sapiens
  misc_RNA (1)...(19): siRNA sense strand
gcuacuggacgcuggagaa

SEQ ID NO: 1574456 - RNA, 19 nt, Homo sapiens
  misc_RNA (1)...(19): siRNA sense strand
aauagacccugagacacaa

SEQ ID NO: 1574457 - RNA, 19 nt, Homo sapiens
  misc_RNA (1)...(19): siRNA sense strand
gcagaauacaauaugucuu

SEQ ID NO: 1574458 - RNA, 19 nt, Homo sapiens
  misc_RNA (1)...(19): siRNA sense strand
uaauaggcuuguucuuugc

SEQ ID NO: 1574459 - RNA, 19 nt, Homo sapiens
  misc_RNA (1)...(19): siRNA sense strand
agugguaucugucuguaca

SEQ ID NO: 1574460 - RNA, 19 nt, Homo sapiens
  misc_RNA (1)...(19): siRNA sense strand
cugcggugguuuccgguaa

SEQ ID NO: 1574461 - RNA, 19 nt, Homo sapiens
  misc_RNA (1)...(19): siRNA sense strand
guccuucuucacaucauua

SEQ ID NO: 1574462 - RNA, 19 nt, Homo sapiens
  misc_RNA (1)...(19): siRNA sense strand
uccgguaacugccaagauc

SEQ ID NO: 1574463 - RNA, 19 nt, Homo sapiens
  misc_RNA (1)...(19): siRNA sense strand
uggaauacacaagagagua

SEQ ID NO: 1574464 - RNA, 19 nt, Homo sapiens
  misc_RNA (1)...(19): siRNA sense strand
uaacugccaagaucucaag

SEQ ID NO: 1574465 - RNA, 19 nt, Homo sapiens
  misc_RNA (1)...(19): siRNA sense strand
acuggacgcuggagaaugc

SEQ ID NO: 1574466 - RNA, 19 nt, Homo sapiens
  misc_RNA (1)...(19): siRNA sense strand
uagcuguaucacucuaaua

SEQ ID NO: 1574467 - RNA, 19 nt, Homo sapiens
  misc_RNA (1)...(19): siRNA sense strand
auagugguaucugucugua

SEQ ID NO: 1574468 - RNA, 19 nt, Homo sapiens
  misc_RNA (1)...(19): siRNA sense strand
gcaaauauaucagaccuaa

SEQ ID NO: 1574469 - RNA, 19 nt, Homo sapiens
  misc_RNA (1)...(19): siRNA sense strand
guacagaaguucaucgaaa

SEQ ID NO: 1574470 - RNA, 19 nt, Homo sapiens
  misc_RNA (1)...(19): siRNA sense strand
ggaagaaguuagccugauu

SEQ ID NO: 1574471 - RNA, 19 nt, Homo sapiens
  misc_RNA (1)...(19): siRNA sense strand
gaaguuagccugauuucuu

SEQ ID NO: 1574472 - RNA, 19 nt, Homo sapiens
  misc_RNA (1)...(19): siRNA sense strand
gaaugaaggugaucacucu

SEQ ID NO: 1574473 - RNA, 19 nt, Homo sapiens
  misc_RNA (1)...(19): siRNA sense strand
agacccaucugcaaauaua

SEQ ID NO: 1574474 - RNA, 19 nt, Homo sapiens
  misc_RNA (1)...(19): siRNA sense strand
ggaggaauguguacagaag

SEQ ID NO: 1574475 - RNA, 19 nt, Homo sapiens
  misc_RNA (1)...(19): siRNA sense strand
ggaugaagcggaagaaguu

SEQ ID NO: 1574476 - RNA, 19 nt, Homo sapiens
  misc_RNA (1)...(19): siRNA sense strand
gaagaaguuagccugauuu

SEQ ID NO: 1574477 - RNA, 19 nt, Homo sapiens
  misc_RNA (1)...(19): siRNA sense strand
agaaaugucuuggaaugaa

SEQ ID NO: 1574478 - RNA, 19 nt, Homo sapiens
  misc_RNA (1)...(19): siRNA sense strand
accaguagaugcucaagua

SEQ ID NO: 1574479 - RNA, 19 nt, Homo sapiens
  misc_RNA (1)...(19): siRNA sense strand
gaaaugucuuggaaugaag

SEQ ID NO: 1574480 - RNA, 19 nt, Homo sapiens
  misc_RNA (1)...(19): siRNA sense strand
gaacaguggaggaaugugu

SEQ ID NO: 1574481 - RNA, 19 nt, Homo sapiens
  misc_RNA (1)...(19): siRNA sense strand
gcagcggugugaugaucua

SEQ ID NO: 1574482 - RNA, 19 nt, Homo sapiens
  misc_RNA (1)...(19): siRNA sense strand
gaucaagcauggaaaauuc

SEQ ID NO: 1574483 - RNA, 19 nt, Homo sapiens
  misc_RNA (1)...(19): siRNA sense strand
aguagaugcucaaguauau

SEQ ID NO: 1574484 - RNA, 19 nt, Homo sapiens
  misc_RNA (1)...(19): siRNA sense strand
gugaugaucuaagaaaugu

SEQ ID NO: 1574485 - RNA, 19 nt, Homo sapiens
  misc_RNA (1)...(19): siRNA sense strand
gauaaacaaaguacagaug

SEQ ID NO: 1574486 - RNA, 19 nt, Homo sapiens
  misc_RNA (1)...(19): siRNA sense strand
gcggugugaugaucuaaga

SEQ ID NO: 1574487 - RNA, 19 nt, Homo sapiens
  misc_RNA (1)...(19): siRNA sense strand
agaaguucaucgaaauuga

SEQ ID NO: 1574488 - RNA, 19 nt, Homo sapiens
  misc_RNA (1)...(19): siRNA sense strand
ggaaaauucuaggaaauga

SEQ ID NO: 1574489 - RNA, 19 nt, Homo sapiens
  misc_RNA (1)...(19): siRNA sense strand
caucgaaauugaucaagca

SEQ ID NO: 1574490 - RNA, 19 nt, Homo sapiens
  misc_RNA (1)...(19): siRNA sense strand
uacagaaguucaucgaaau

SEQ ID NO: 1574491 - RNA, 19 nt, Homo sapiens
  misc_RNA (1)...(19): siRNA sense strand
caggaacaguggaggaaug

SEQ ID NO: 1574492 - RNA, 19 nt, Homo sapiens
  misc_RNA (1)...(19): siRNA sense strand
caguagaugcucaaguaua

SEQ ID NO: 1574493 - RNA, 19 nt, Homo sapiens
  misc_RNA (1)...(19): siRNA sense strand
gaaguucaucgaaauugau

SEQ ID NO: 1574494 - RNA, 19 nt, Homo sapiens
  misc_RNA (1)...(19): siRNA sense strand
ggugugaugaucuaagaaa

SEQ ID NO: 1574495 - RNA, 19 nt, Homo sapiens
  misc_RNA (1)...(19): siRNA sense strand
ucuaggaaaugaagagaca

SEQ ID NO: 1574496 - RNA, 19 nt, Homo sapiens
  misc_RNA (1)...(19): siRNA sense strand
agccugauuucuugugaua

SEQ ID NO: 1574497 - RNA, 19 nt, Homo sapiens
  misc_RNA (1)...(19): siRNA sense strand
aaguuagccugauuucuug

SEQ ID NO: 1574498 - RNA, 19 nt, Homo sapiens
  misc_RNA (1)...(19): siRNA sense strand
gaugaucuaagaaauguag

SEQ ID NO: 1574499 - RNA, 19 nt, Homo sapiens
  misc_RNA (1)...(19): siRNA sense strand
gaugaagcggaagaaguua

SEQ ID NO: 1574500 - RNA, 19 nt, Homo sapiens
  misc_RNA (1)...(19): siRNA sense strand
aggaauguguacagaaguu

SEQ ID NO: 1574501 - RNA, 19 nt, Homo sapiens
  misc_RNA (1)...(19): siRNA sense strand
gguggaaaauacaguguuu

SEQ ID NO: 1574502 - RNA, 19 nt, Homo sapiens
  misc_RNA (1)...(19): siRNA sense strand
ccugauuucuugugauaca

SEQ ID NO: 1574503 - RNA, 19 nt, Homo sapiens
  misc_RNA (1)...(19): siRNA sense strand
gaauguguacagaaguuca

SEQ ID NO: 1574504 - RNA, 19 nt, Homo sapiens
  misc_RNA (1)...(19): siRNA sense strand
aauacaguguuuccaagga

SEQ ID NO: 1574505 - RNA, 19 nt, Homo sapiens
  misc_RNA (1)...(19): siRNA sense strand
cagaaguucaucgaaauug

SEQ ID NO: 1574506 - RNA, 19 nt, Homo sapiens
  misc_RNA (1)...(19): siRNA sense strand
guggaggaauguguacaga

SEQ ID NO: 1574507 - RNA, 19 nt, Homo sapiens
  misc_RNA (1)...(19): siRNA sense strand
cauggaaaauucuaggaaa

SEQ ID NO: 1574508 - RNA, 19 nt, Homo sapiens
  misc_RNA (1)...(19): siRNA sense strand
ugaaggugaucacucuuuu

SEQ ID NO: 1574509 - RNA, 19 nt, Homo sapiens
  misc_RNA (1)...(19): siRNA sense strand
gaaauugaucaagcaugga

SEQ ID NO: 1574510 - RNA, 19 nt, Homo sapiens
  misc_RNA (1)...(19): siRNA sense strand
gaacuccuucauuauaacu

SEQ ID NO: 1574511 - RNA, 19 nt, Homo sapiens
  misc_RNA (1)...(19): siRNA sense strand
gauuucuugugauacaugu

SEQ ID NO: 1574512 - RNA, 19 nt, Homo sapiens
  misc_RNA (1)...(19): siRNA sense strand
gaaauguaggaccaguaga

SEQ ID NO: 1574513 - RNA, 19 nt, Homo sapiens
  misc_RNA (1)...(19): siRNA sense strand
uaggaaaugaagagacaaa

SEQ ID NO: 1574514 - RNA, 19 nt, Homo sapiens
  misc_RNA (1)...(19): siRNA sense strand
acagaaguucaucgaaauu

SEQ ID NO: 1574515 - RNA, 19 nt, Homo sapiens
  misc_RNA (1)...(19): siRNA sense strand
ccaaggaugaagcggaaga

SEQ ID NO: 1574516 - RNA, 19 nt, Homo sapiens
  misc_RNA (1)...(19): siRNA sense strand
gcagaugugguggaaaaua

SEQ ID NO: 1574517 - RNA, 19 nt, Homo sapiens
  misc_RNA (1)...(19): siRNA sense strand
aaauguaggaccaguagau

SEQ ID NO: 1574518 - RNA, 19 nt, Homo sapiens
  misc_RNA (1)...(19): siRNA sense strand
ccagauaaacaaaguacag

SEQ ID NO: 1574519 - RNA, 19 nt, Homo sapiens
  misc_RNA (1)...(19): siRNA sense strand
gugugaugaucuaagaaau

SEQ ID NO: 1574520 - RNA, 19 nt, Homo sapiens
  misc_RNA (1)...(19): siRNA sense strand
aaauugaucaagcauggaa

SEQ ID NO: 1574521 - RNA, 19 nt, Homo sapiens
  misc_RNA (1)...(19): siRNA sense strand
cagauaaacaaaguacaga

SEQ ID NO: 1574522 - RNA, 19 nt, Homo sapiens
  misc_RNA (1)...(19): siRNA sense strand
cggaagaaguuagccugau

SEQ ID NO: 1574523 - RNA, 19 nt, Homo sapiens
  misc_RNA (1)...(19): siRNA sense strand
ucauccagauaaacaaagu

SEQ ID NO: 1574524 - RNA, 19 nt, Homo sapiens
  misc_RNA (1)...(19): siRNA sense strand
agaaauguaggaccaguag

SEQ ID NO: 1574525 - RNA, 19 nt, Homo sapiens
  misc_RNA (1)...(19): siRNA sense strand
auacaguguuuccaaggau

SEQ ID NO: 1574526 - RNA, 19 nt, Homo sapiens
  misc_RNA (1)...(19): siRNA sense strand
gaccugcagcggugugaug

SEQ ID NO: 1574527 - RNA, 19 nt, Homo sapiens
  misc_RNA (1)...(19): siRNA sense strand
guucaucgaaauugaucaa

SEQ ID NO: 1574528 - RNA, 19 nt, Homo sapiens
  misc_RNA (1)...(19): siRNA sense strand
uuagccugauuucuuguga

SEQ ID NO: 1574529 - RNA, 19 nt, Homo sapiens
  misc_RNA (1)...(19): siRNA sense strand
cgguugagcagaugccaaa

SEQ ID NO: 1574530 - RNA, 19 nt, Homo sapiens
  misc_RNA (1)...(19): siRNA sense strand
ggaauguguacagaaguuc

SEQ ID NO: 1574531 - RNA, 19 nt, Homo sapiens
  misc_RNA (1)...(19): siRNA sense strand
ggaaguugcugaucaguug

SEQ ID NO: 1574532 - RNA, 19 nt, Homo sapiens
  misc_RNA (1)...(19): siRNA sense strand
ccauagaucuccuugcuaa

SEQ ID NO: 1574533 - RNA, 19 nt, Homo sapiens
  misc_RNA (1)...(19): siRNA sense strand
uaaaguugcuuacagauuc

SEQ ID NO: 1574534 - RNA, 19 nt, Homo sapiens
  misc_RNA (1)...(19): siRNA sense strand
ugaaauaccugaugaagag

SEQ ID NO: 1574535 - RNA, 19 nt, Homo sapiens
  misc_RNA (1)...(19): siRNA sense strand
gcacaggaguggcccagaa

SEQ ID NO: 1574536 - RNA, 19 nt, Homo sapiens
  misc_RNA (1)...(19): siRNA sense strand
uaagggaggucuucaggaa

SEQ ID NO: 1574537 - RNA, 19 nt, Homo sapiens
  misc_RNA (1)...(19): siRNA sense strand
gaugugaaauaccugauga

SEQ ID NO: 1574538 - RNA, 19 nt, Homo sapiens
  misc_RNA (1)...(19): siRNA sense strand
ccaguaaucuagaagaaga

SEQ ID NO: 1574539 - RNA, 19 nt, Homo sapiens
  misc_RNA (1)...(19): siRNA sense strand
ggaauggcuuucuuuagga

SEQ ID NO: 1574540 - RNA, 19 nt, Homo sapiens
  misc_RNA (1)...(19): siRNA sense strand
gagaguauccuucuggaau

SEQ ID NO: 1574541 - RNA, 19 nt, Homo sapiens
  misc_RNA (1)...(19): siRNA sense strand
gaagaagagaugaggaaga

SEQ ID NO: 1574542 - RNA, 19 nt, Homo sapiens
  misc_RNA (1)...(19): siRNA sense strand
gcuuacagauucucguuug

SEQ ID NO: 1574543 - RNA, 19 nt, Homo sapiens
  misc_RNA (1)...(19): siRNA sense strand
caaaugagaagggagagua

SEQ ID NO: 1574544 - RNA, 19 nt, Homo sapiens
  misc_RNA (1)...(19): siRNA sense strand
gagaauagccagguuaucu

SEQ ID NO: 1574545 - RNA, 19 nt, Homo sapiens
  misc_RNA (1)...(19): siRNA sense strand
ucagaagcaugaagaggaa

SEQ ID NO: 1574546 - RNA, 19 nt, Homo sapiens
  misc_RNA (1)...(19): siRNA sense strand
auacuuggcaguucaauuu

SEQ ID NO: 1574547 - RNA, 19 nt, Homo sapiens
  misc_RNA (1)...(19): siRNA sense strand
ugacaggaauggcuuucuu

SEQ ID NO: 1574548 - RNA, 19 nt, Homo sapiens
  misc_RNA (1)...(19): siRNA sense strand
gacauguacucccaggauu

SEQ ID NO: 1574549 - RNA, 19 nt, Homo sapiens
  misc_RNA (1)...(19): siRNA sense strand
ggccaguaaucuagaagaa

SEQ ID NO: 1574550 - RNA, 19 nt, Homo sapiens
  misc_RNA (1)...(19): siRNA sense strand
aagaagagaugaggaagau

SEQ ID NO: 1574551 - RNA, 19 nt, Homo sapiens
  misc_RNA (1)...(19): siRNA sense strand
gaauggcuuucuuuaggau

SEQ ID NO: 1574552 - RNA, 19 nt, Homo sapiens
  misc_RNA (1)...(19): siRNA sense strand
caggagugguucucuguga

SEQ ID NO: 1574553 - RNA, 19 nt, Homo sapiens
  misc_RNA (1)...(19): siRNA sense strand
ugaauuucguaguuccaua

SEQ ID NO: 1574554 - RNA, 19 nt, Homo sapiens
  misc_RNA (1)...(19): siRNA sense strand
cagaagaggaacaugaauu

SEQ ID NO: 1574555 - RNA, 19 nt, Homo sapiens
  misc_RNA (1)...(19): siRNA sense strand
ggacauguacucccaggau

SEQ ID NO: 1574556 - RNA, 19 nt, Homo sapiens
  misc_RNA (1)...(19): siRNA sense strand
ugaggaagauccgagaaau

SEQ ID NO: 1574557 - RNA, 19 nt, Homo sapiens
  misc_RNA (1)...(19): siRNA sense strand
gcaugaagaggaagggauu

SEQ ID NO: 1574558 - RNA, 19 nt, Homo sapiens
  misc_RNA (1)...(19): siRNA sense strand
cagguuaucugugaagugu

SEQ ID NO: 1574559 - RNA, 19 nt, Homo sapiens
  misc_RNA (1)...(19): siRNA sense strand
uuucguaguuccauagauu

SEQ ID NO: 1574560 - RNA, 19 nt, Homo sapiens
  misc_RNA (1)...(19): siRNA sense strand
acaguuauauugccaugga

SEQ ID NO: 1574561 - RNA, 19 nt, Homo sapiens
  misc_RNA (1)...(19): siRNA sense strand
gaagaggaagggauugaca

SEQ ID NO: 1574562 - RNA, 19 nt, Homo sapiens
  misc_RNA (1)...(19): siRNA sense strand
gaaugaggauguggacucu

SEQ ID NO: 1574563 - RNA, 19 nt, Homo sapiens
  misc_RNA (1)...(19): siRNA sense strand
cugcagcacuuguggagaa

SEQ ID NO: 1574564 - RNA, 19 nt, Homo sapiens
  misc_RNA (1)...(19): siRNA sense strand
cagcugggccuuacauuca

SEQ ID NO: 1574565 - RNA, 19 nt, Homo sapiens
  misc_RNA (1)...(19): siRNA sense strand
gaauagccagguuaucugu

SEQ ID NO: 1574566 - RNA, 19 nt, Homo sapiens
  misc_RNA (1)...(19): siRNA sense strand
gacaggaauggcuuucuuu

SEQ ID NO: 1574567 - RNA, 19 nt, Homo sapiens
  misc_RNA (1)...(19): siRNA sense strand
acaggaauggcuuucuuua

SEQ ID NO: 1574568 - RNA, 19 nt, Homo sapiens
  misc_RNA (1)...(19): siRNA sense strand
cuucugcggugcaauguug

SEQ ID NO: 1574569 - RNA, 19 nt, Homo sapiens
  misc_RNA (1)...(19): siRNA sense strand
gaagcagaaugaggaugug

SEQ ID NO: 1574570 - RNA, 19 nt, Homo sapiens
  misc_RNA (1)...(19): siRNA sense strand
gauuuuggcuauaugguaa

SEQ ID NO: 1574571 - RNA, 19 nt, Homo sapiens
  misc_RNA (1)...(19): siRNA sense strand
cuucuggaaucaauacuug

SEQ ID NO: 1574572 - RNA, 19 nt, Homo sapiens
  misc_RNA (1)...(19): siRNA sense strand
aggaauggcuuucuuuagg

SEQ ID NO: 1574573 - RNA, 19 nt, Homo sapiens
  misc_RNA (1)...(19): siRNA sense strand
gaggacagcauugaugaug

SEQ ID NO: 1574574 - RNA, 19 nt, Homo sapiens
  misc_RNA (1)...(19): siRNA sense strand
gugcaauguugaccuuuua

SEQ ID NO: 1574575 - RNA, 19 nt, Homo sapiens
  misc_RNA (1)...(19): siRNA sense strand
gaagugugggccaguaauc

SEQ ID NO: 1574576 - RNA, 19 nt, Homo sapiens
  misc_RNA (1)...(19): siRNA sense strand
gugaaauaccugaugaaga

SEQ ID NO: 1574577 - RNA, 19 nt, Homo sapiens
  misc_RNA (1)...(19): siRNA sense strand
cagagcugcuuaugacauc

SEQ ID NO: 1574578 - RNA, 19 nt, Homo sapiens
  misc_RNA (1)...(19): siRNA sense strand
gaauuucguaguuccauag

SEQ ID NO: 1574579 - RNA, 19 nt, Homo sapiens
  misc_RNA (1)...(19): siRNA sense strand
agaagaggaacaugaauuc

SEQ ID NO: 1574580 - RNA, 19 nt, Homo sapiens
  misc_RNA (1)...(19): siRNA sense strand
gacuacaguuucagaagca

SEQ ID NO: 1574581 - RNA, 19 nt, Homo sapiens
  misc_RNA (1)...(19): siRNA sense strand
gaguauccuucuggaauca

SEQ ID NO: 1574582 - RNA, 19 nt, Homo sapiens
  misc_RNA (1)...(19): siRNA sense strand
uagaagaagagaugaggaa

SEQ ID NO: 1574583 - RNA, 19 nt, Homo sapiens
  misc_RNA (1)...(19): siRNA sense strand
gcggugcaauguugaccuu

SEQ ID NO: 1574584 - RNA, 19 nt, Homo sapiens
  misc_RNA (1)...(19): siRNA sense strand
gccagaagaggaacaugaa

SEQ ID NO: 1574585 - RNA, 19 nt, Homo sapiens
  misc_RNA (1)...(19): siRNA sense strand
cagcacuuguggagaauag

SEQ ID NO: 1574586 - RNA, 19 nt, Homo sapiens
  misc_RNA (1)...(19): siRNA sense strand
acucaggacuacaguuuca

SEQ ID NO: 1574587 - RNA, 19 nt, Homo sapiens
  misc_RNA (1)...(19): siRNA sense strand
gaaucaauacuuggcaguu

SEQ ID NO: 1574588 - RNA, 19 nt, Homo sapiens
  misc_RNA (1)...(19): siRNA sense strand
auagccagguuaucuguga

SEQ ID NO: 1574589 - RNA, 19 nt, Homo sapiens
  misc_RNA (1)...(19): siRNA sense strand
guacucccaggauuccaua

SEQ ID NO: 1574590 - RNA, 19 nt, Homo sapiens
  misc_RNA (1)...(19): siRNA sense strand
guaguuccauagauuacca

SEQ ID NO: 1574591 - RNA, 19 nt, Homo sapiens
  misc_RNA (1)...(19): siRNA sense strand
guggagaauagccagguua

SEQ ID NO: 1574592 - RNA, 19 nt, Homo sapiens
  misc_RNA (1)...(19): siRNA sense strand
cacagaauuuccagguguu

SEQ ID NO: 1574593 - RNA, 19 nt, Homo sapiens
  misc_RNA (1)...(19): siRNA sense strand
ccauagauuaccaauauca

SEQ ID NO: 1574594 - RNA, 19 nt, Homo sapiens
  misc_RNA (1)...(19): siRNA sense strand
ggagaguauccuucuggaa

SEQ ID NO: 1574595 - RNA, 19 nt, Homo sapiens
  misc_RNA (1)...(19): siRNA sense strand
ugagcauccuggcgauuau

SEQ ID NO: 1574596 - RNA, 19 nt, Homo sapiens
  misc_RNA (1)...(19): siRNA sense strand
gaggaagauccgagaaauc

SEQ ID NO: 1574597 - RNA, 19 nt, Homo sapiens
  misc_RNA (1)...(19): siRNA sense strand
uugcugaucaguuggauuu

SEQ ID NO: 1574598 - RNA, 19 nt, Homo sapiens
  misc_RNA (1)...(19): siRNA sense strand
aaucaauacuuggcaguuc

SEQ ID NO: 1574599 - RNA, 19 nt, Homo sapiens
  misc_RNA (1)...(19): siRNA sense strand
ugccauggacacagaauuu

SEQ ID NO: 1574600 - RNA, 19 nt, Homo sapiens
  misc_RNA (1)...(19): siRNA sense strand
gugguucucugugacaaug

SEQ ID NO: 1574601 - RNA, 19 nt, Homo sapiens
  misc_RNA (1)...(19): siRNA sense strand
agaguauccuucuggaauc

SEQ ID NO: 1574602 - RNA, 19 nt, Homo sapiens
  misc_RNA (1)...(19): siRNA sense strand
caacaacaugcagcaguga

SEQ ID NO: 1574603 - RNA, 19 nt, Homo sapiens
  misc_RNA (1)...(19): siRNA sense strand
gaagaggaacaugaauucu

SEQ ID NO: 1574604 - RNA, 19 nt, Homo sapiens
  misc_RNA (1)...(19): siRNA sense strand
gauugacacacugcacuuu

SEQ ID NO: 1574605 - RNA, 19 nt, Homo sapiens
  misc_RNA (1)...(19): siRNA sense strand
ccaggcaggcucagacuca

SEQ ID NO: 1574606 - RNA, 19 nt, Homo sapiens
  misc_RNA (1)...(19): siRNA sense strand
gcuaugauuuuggcuauau

SEQ ID NO: 1574607 - RNA, 19 nt, Homo sapiens
  misc_RNA (1)...(19): siRNA sense strand
ggauugacacacugcacuu

SEQ ID NO: 1574608 - RNA, 19 nt, Homo sapiens
  misc_RNA (1)...(19): siRNA sense strand
uuggcuauaugguaaaguu

SEQ ID NO: 1574609 - RNA, 19 nt, Homo sapiens
  misc_RNA (1)...(19): siRNA sense strand
ugugaagugugggccagua

SEQ ID NO: 1574610 - RNA, 19 nt, Homo sapiens
  misc_RNA (1)...(19): siRNA sense strand
gaugaggaagauccgagaa

SEQ ID NO: 1574611 - RNA, 19 nt, Homo sapiens
  misc_RNA (1)...(19): siRNA sense strand
uggcuuucauuucauagug

SEQ ID NO: 1574612 - RNA, 19 nt, Homo sapiens
  misc_RNA (1)...(19): siRNA sense strand
uaugacaucaggagugguu

SEQ ID NO: 1574613 - RNA, 19 nt, Homo sapiens
  misc_RNA (1)...(19): siRNA sense strand
ggugcaauguugaccuuuu

SEQ ID NO: 1574614 - RNA, 19 nt, Homo sapiens
  misc_RNA (1)...(19): siRNA sense strand
agaagcagaaugaggaugu

SEQ ID NO: 1574615 - RNA, 19 nt, Homo sapiens
  misc_RNA (1)...(19): siRNA sense strand
ggagugguucucugugaca

SEQ ID NO: 1574616 - RNA, 19 nt, Homo sapiens
  misc_RNA (1)...(19): siRNA sense strand
guauccuucuggaaucaau

SEQ ID NO: 1574617 - RNA, 19 nt, Homo sapiens
  misc_RNA (1)...(19): siRNA sense strand
caggaauggcuuucuuuag

SEQ ID NO: 1574618 - RNA, 19 nt, Homo sapiens
  misc_RNA (1)...(19): siRNA sense strand
aggaagggauugacacacu

SEQ ID NO: 1574619 - RNA, 19 nt, Homo sapiens
  misc_RNA (1)...(19): siRNA sense strand
ccagcugggccuuacauuc

SEQ ID NO: 1574620 - RNA, 19 nt, Homo sapiens
  misc_RNA (1)...(19): siRNA sense strand
gugaagugugggccaguaa

SEQ ID NO: 1574621 - RNA, 19 nt, Homo sapiens
  misc_RNA (1)...(19): siRNA sense strand
gcugaucaguuggauuugc

SEQ ID NO: 1574622 - RNA, 19 nt, Homo sapiens
  misc_RNA (1)...(19): siRNA sense strand
gagugguucucugugacaa

SEQ ID NO: 1574623 - RNA, 19 nt, Homo sapiens
  misc_RNA (1)...(19): siRNA sense strand
gugggccaguaaucuagaa

SEQ ID NO: 1574624 - RNA, 19 nt, Homo sapiens
  misc_RNA (1)...(19): siRNA sense strand
gaguggcccagaagcagaa

SEQ ID NO: 1574625 - RNA, 19 nt, Homo sapiens
  misc_RNA (1)...(19): siRNA sense strand
acucacugcugacaggaau

SEQ ID NO: 1574626 - RNA, 19 nt, Homo sapiens
  misc_RNA (1)...(19): siRNA sense strand
cagcuucugcggugcaaug

SEQ ID NO: 1574627 - RNA, 19 nt, Homo sapiens
  misc_RNA (1)...(19): siRNA sense strand
auuggugaauuucguaguu

SEQ ID NO: 1574628 - RNA, 19 nt, Homo sapiens
  misc_RNA (1)...(19): siRNA sense strand
gcuauaugguaaaguugcu

SEQ ID NO: 1574629 - RNA, 19 nt, Homo sapiens
  misc_RNA (1)...(19): siRNA sense strand
gcagcacuuguggagaaua

SEQ ID NO: 1574630 - RNA, 19 nt, Homo sapiens
  misc_RNA (1)...(19): siRNA sense strand
aaaguugcuuacagauucu

SEQ ID NO: 1574631 - RNA, 19 nt, Homo sapiens
  misc_RNA (1)...(19): siRNA sense strand
agacagacuugaaggauua

SEQ ID NO: 1574632 - RNA, 19 nt, Homo sapiens
  misc_RNA (1)...(19): siRNA sense strand
ggacaaggcuuugaguaug

SEQ ID NO: 1574633 - RNA, 19 nt, Homo sapiens
  misc_RNA (1)...(19): siRNA sense strand
ggaucaagcugcccuccuu

SEQ ID NO: 1574634 - RNA, 19 nt, Homo sapiens
  misc_RNA (1)...(19): siRNA sense strand
gagaccagcagacaguuua

SEQ ID NO: 1574635 - RNA, 19 nt, Homo sapiens
  misc_RNA (1)...(19): siRNA sense strand
gacaaggcuuugaguaugu

SEQ ID NO: 1574636 - RNA, 19 nt, Homo sapiens
  misc_RNA (1)...(19): siRNA sense strand
ggauuaugcucuucccaau

SEQ ID NO: 1574637 - RNA, 19 nt, Homo sapiens
  misc_RNA (1)...(19): siRNA sense strand
gagccuguaccaagaauuu

SEQ ID NO: 1574638 - RNA, 19 nt, Homo sapiens
  misc_RNA (1)...(19): siRNA sense strand
gaccagaagcuuuacaugu

SEQ ID NO: 1574639 - RNA, 19 nt, Homo sapiens
  misc_RNA (1)...(19): siRNA sense strand
gaagacagacuugaaggau

SEQ ID NO: 1574640 - RNA, 19 nt, Homo sapiens
  misc_RNA (1)...(19): siRNA sense strand
gcagagaccagcagacagu

SEQ ID NO: 1574641 - RNA, 19 nt, Homo sapiens
  misc_RNA (1)...(19): siRNA sense strand
gccaaguccucagguguuu

SEQ ID NO: 1574642 - RNA, 19 nt, Homo sapiens
  misc_RNA (1)...(19): siRNA sense strand
caacccugccucagcauuu

SEQ ID NO: 1574643 - RNA, 19 nt, Homo sapiens
  misc_RNA (1)...(19): siRNA sense strand
aaaggugacugucgcaucu

SEQ ID NO: 1574644 - RNA, 19 nt, Homo sapiens
  misc_RNA (1)...(19): siRNA sense strand
ccacagaggccuucuugag

SEQ ID NO: 1574645 - RNA, 19 nt, Homo sapiens
  misc_RNA (1)...(19): siRNA sense strand
aagacagacuugaaggauu

SEQ ID NO: 1574646 - RNA, 19 nt, Homo sapiens
  misc_RNA (1)...(19): siRNA sense strand
cagagaagacagacuugaa

SEQ ID NO: 1574647 - RNA, 19 nt, Homo sapiens
  misc_RNA (1)...(19): siRNA sense strand
acacuaagucucaacauca

SEQ ID NO: 1574648 - RNA, 19 nt, Homo sapiens
  misc_RNA (1)...(19): siRNA sense strand
gcaguuuccucagacaaag

SEQ ID NO: 1574649 - RNA, 19 nt, Homo sapiens
  misc_RNA (1)...(19): siRNA sense strand
agaagagucuccccaguaa

SEQ ID NO: 1574650 - RNA, 19 nt, Homo sapiens
  misc_RNA (1)...(19): siRNA sense strand
ggacgagaccuuuucuaaa

SEQ ID NO: 1574651 - RNA, 19 nt, Homo sapiens
  misc_RNA (1)...(19): siRNA sense strand
ggacguagaaguggacaag

SEQ ID NO: 1574652 - RNA, 19 nt, Homo sapiens
  misc_RNA (1)...(19): siRNA sense strand
gaaggacaaggcuuugagu

SEQ ID NO: 1574653 - RNA, 19 nt, Homo sapiens
  misc_RNA (1)...(19): siRNA sense strand
accagaagcuuuacauguc

SEQ ID NO: 1574654 - RNA, 19 nt, Homo sapiens
  misc_RNA (1)...(19): siRNA sense strand
ggaccagaagcuuuacaug

SEQ ID NO: 1574655 - RNA, 19 nt, Homo sapiens
  misc_RNA (1)...(19): siRNA sense strand
cguggacucucugguugua

SEQ ID NO: 1574656 - RNA, 19 nt, Homo sapiens
  misc_RNA (1)...(19): siRNA sense strand
gaggggcuguucacacuaa

SEQ ID NO: 1574657 - RNA, 19 nt, Homo sapiens
  misc_RNA (1)...(19): siRNA sense strand
ggaaggacaaggcuuugag

SEQ ID NO: 1574658 - RNA, 19 nt, Homo sapiens
  misc_RNA (1)...(19): siRNA sense strand
uugaggaccagaagcuuua

SEQ ID NO: 1574659 - RNA, 19 nt, Homo sapiens
  misc_RNA (1)...(19): siRNA sense strand
guagaaguggacaagauug

SEQ ID NO: 1574660 - RNA, 19 nt, Homo sapiens
  misc_RNA (1)...(19): siRNA sense strand
ggacucaagcucccaucug

SEQ ID NO: 1574661 - RNA, 19 nt, Homo sapiens
  misc_RNA (1)...(19): siRNA sense strand
gcaguuggaagaagagucu

SEQ ID NO: 1574662 - RNA, 19 nt, Homo sapiens
  misc_RNA (1)...(19): siRNA sense strand
uguaauggacguagaagug

SEQ ID NO: 1574663 - RNA, 19 nt, Homo sapiens
  misc_RNA (1)...(19): siRNA sense strand
cacacuaagucucaacauc

SEQ ID NO: 1574664 - RNA, 19 nt, Homo sapiens
  misc_RNA (1)...(19): siRNA sense strand
aagcugcccuccuucaagu

SEQ ID NO: 1574665 - RNA, 19 nt, Homo sapiens
  misc_RNA (1)...(19): siRNA sense strand
cuuugaguaugucaucuuu

SEQ ID NO: 1574666 - RNA, 19 nt, Homo sapiens
  misc_RNA (1)...(19): siRNA sense strand
ggcaguuuccucagacaaa

SEQ ID NO: 1574667 - RNA, 19 nt, Homo sapiens
  misc_RNA (1)...(19): siRNA sense strand
cguagaaguggacaagauu

SEQ ID NO: 1574668 - RNA, 19 nt, Homo sapiens
  misc_RNA (1)...(19): siRNA sense strand
caugauggacgagaccuuu

SEQ ID NO: 1574669 - RNA, 19 nt, Homo sapiens
  misc_RNA (1)...(19): siRNA sense strand
uagaaguggacaagauuga

SEQ ID NO: 1574670 - RNA, 19 nt, Homo sapiens
  misc_RNA (1)...(19): siRNA sense strand
cuugaaggauuaugcucuu

SEQ ID NO: 1574671 - RNA, 19 nt, Homo sapiens
  misc_RNA (1)...(19): siRNA sense strand
ccagguggcagcaagacuu

SEQ ID NO: 1574672 - RNA, 19 nt, Homo sapiens
  misc_RNA (1)...(19): siRNA sense strand
caccacagaggccuucuug

SEQ ID NO: 1574673 - RNA, 19 nt, Homo sapiens
  misc_RNA (1)...(19): siRNA sense strand
gauuaugcucuucccaaug

SEQ ID NO: 1574674 - RNA, 19 nt, Homo sapiens
  misc_RNA (1)...(19): siRNA sense strand
cagcagagaccagcagaca

SEQ ID NO: 1574675 - RNA, 19 nt, Homo sapiens
  misc_RNA (1)...(19): siRNA sense strand
cagacuccauguucucaag

SEQ ID NO: 1574676 - RNA, 19 nt, Homo sapiens
  misc_RNA (1)...(19): siRNA sense strand
gagaggggcuguucacacu

SEQ ID NO: 1574677 - RNA, 19 nt, Homo sapiens
  misc_RNA (1)...(19): siRNA sense strand
cagcugguguucggacaug

SEQ ID NO: 1574678 - RNA, 19 nt, Homo sapiens
  misc_RNA (1)...(19): siRNA sense strand
ccagagaagacagacuuga

SEQ ID NO: 1574679 - RNA, 19 nt, Homo sapiens
  misc_RNA (1)...(19): siRNA sense strand
uggacucucugguuguaau

SEQ ID NO: 1574680 - RNA, 19 nt, Homo sapiens
  misc_RNA (1)...(19): siRNA sense strand
caagauugaggaccagaag

SEQ ID NO: 1574681 - RNA, 19 nt, Homo sapiens
  misc_RNA (1)...(19): siRNA sense strand
acguagaaguggacaagau

SEQ ID NO: 1574682 - RNA, 19 nt, Homo sapiens
  misc_RNA (1)...(19): siRNA sense strand
caagcugcccuccuucaag

SEQ ID NO: 1574683 - RNA, 19 nt, Homo sapiens
  misc_RNA (1)...(19): siRNA sense strand
ccacagacuccauguucuc

SEQ ID NO: 1574684 - RNA, 19 nt, Homo sapiens
  misc_RNA (1)...(19): siRNA sense strand
agaagaagucggucugucu

SEQ ID NO: 1574685 - RNA, 19 nt, Homo sapiens
  misc_RNA (1)...(19): siRNA sense strand
gacuccauguucucaagau

SEQ ID NO: 1574686 - RNA, 19 nt, Homo sapiens
  misc_RNA (1)...(19): siRNA sense strand
gcugagccuguaccaagaa

SEQ ID NO: 1574687 - RNA, 19 nt, Homo sapiens
  misc_RNA (1)...(19): siRNA sense strand
aggacaaggcuuugaguau

SEQ ID NO: 1574688 - RNA, 19 nt, Homo sapiens
  misc_RNA (1)...(19): siRNA sense strand
cggacaugcugagccugua

SEQ ID NO: 1574689 - RNA, 19 nt, Homo sapiens
  misc_RNA (1)...(19): siRNA sense strand
aaggacaaggcuuugagua

SEQ ID NO: 1574690 - RNA, 19 nt, Homo sapiens
  misc_RNA (1)...(19): siRNA sense strand
aggagaagaugcuggauua

SEQ ID NO: 1574691 - RNA, 19 nt, Homo sapiens
  misc_RNA (1)...(19): siRNA sense strand
gcccaaaccucaagcagaa

SEQ ID NO: 1574692 - RNA, 19 nt, Homo sapiens
  misc_RNA (1)...(19): siRNA sense strand
gaagaaagagaaaccagaa

SEQ ID NO: 1574693 - RNA, 19 nt, Homo sapiens
  misc_RNA (1)...(19): siRNA sense strand
gcaagaaacaggagaagau

SEQ ID NO: 1574694 - RNA, 19 nt, Homo sapiens
  misc_RNA (1)...(19): siRNA sense strand
gaauggcaguggagugugu

SEQ ID NO: 1574695 - RNA, 19 nt, Homo sapiens
  misc_RNA (1)...(19): siRNA sense strand
caagcagaaucuaagaaga

SEQ ID NO: 1574696 - RNA, 19 nt, Homo sapiens
  misc_RNA (1)...(19): siRNA sense strand
ggagcugagugcaagcaaa

SEQ ID NO: 1574697 - RNA, 19 nt, Homo sapiens
  misc_RNA (1)...(19): siRNA sense strand
gcaacuggaagaagcaauu

SEQ ID NO: 1574698 - RNA, 19 nt, Homo sapiens
  misc_RNA (1)...(19): siRNA sense strand
gaagcgagcccugcacaau

SEQ ID NO: 1574699 - RNA, 19 nt, Homo sapiens
  misc_RNA (1)...(19): siRNA sense strand
gggagaaugugaccugaac

SEQ ID NO: 1574700 - RNA, 19 nt, Homo sapiens
  misc_RNA (1)...(19): siRNA sense strand
gcagcagcgucgaaaauuu

SEQ ID NO: 1574701 - RNA, 19 nt, Homo sapiens
  misc_RNA (1)...(19): siRNA sense strand
cagaaucuaagaagaagaa

SEQ ID NO: 1574702 - RNA, 19 nt, Homo sapiens
  misc_RNA (1)...(19): siRNA sense strand
gagaauggcaguggagugu

SEQ ID NO: 1574703 - RNA, 19 nt, Homo sapiens
  misc_RNA (1)...(19): siRNA sense strand
ggacuggagcugagugcaa

SEQ ID NO: 1574704 - RNA, 19 nt, Homo sapiens
  misc_RNA (1)...(19): siRNA sense strand
aagcagaaucuaagaagaa

SEQ ID NO: 1574705 - RNA, 19 nt, Homo sapiens
  misc_RNA (1)...(19): siRNA sense strand
caacuggaagaagcaauuu

SEQ ID NO: 1574706 - RNA, 19 nt, Homo sapiens
  misc_RNA (1)...(19): siRNA sense strand
ggagaagaugcuggauuaa

SEQ ID NO: 1574707 - RNA, 19 nt, Homo sapiens
  misc_RNA (1)...(19): siRNA sense strand
gauguaagauccccugcaa

SEQ ID NO: 1574708 - RNA, 19 nt, Homo sapiens
  misc_RNA (1)...(19): siRNA sense strand
caagaaacaggagaagaug

SEQ ID NO: 1574709 - RNA, 19 nt, Homo sapiens
  misc_RNA (1)...(19): siRNA sense strand
gcaagcaaaccaugaagac

SEQ ID NO: 1574710 - RNA, 19 nt, Homo sapiens
  misc_RNA (1)...(19): siRNA sense strand
ggagugcaaauaccaguuc

SEQ ID NO: 1574711 - RNA, 19 nt, Homo sapiens
  misc_RNA (1)...(19): siRNA sense strand
ugaagacccagagauguaa

SEQ ID NO: 1574712 - RNA, 19 nt, Homo sapiens
  misc_RNA (1)...(19): siRNA sense strand
ccaugaagacccagagaug

SEQ ID NO: 1574713 - RNA, 19 nt, Homo sapiens
  misc_RNA (1)...(19): siRNA sense strand
gaagcagggaagaaagaga

SEQ ID NO: 1574714 - RNA, 19 nt, Homo sapiens
  misc_RNA (1)...(19): siRNA sense strand
caggagaagaugcuggauu

SEQ ID NO: 1574715 - RNA, 19 nt, Homo sapiens
  misc_RNA (1)...(19): siRNA sense strand
augaagacccagagaugua

SEQ ID NO: 1574716 - RNA, 19 nt, Homo sapiens
  misc_RNA (1)...(19): siRNA sense strand
aagcagggaagaaagagaa

SEQ ID NO: 1574717 - RNA, 19 nt, Homo sapiens
  misc_RNA (1)...(19): siRNA sense strand
ucaagcagaaucuaagaag

SEQ ID NO: 1574718 - RNA, 19 nt, Homo sapiens
  misc_RNA (1)...(19): siRNA sense strand
gaccaagcccaaaccucaa

SEQ ID NO: 1574719 - RNA, 19 nt, Homo sapiens
  misc_RNA (1)...(19): siRNA sense strand
gagcugagugcaagcaaac

SEQ ID NO: 1574720 - RNA, 19 nt, Homo sapiens
  misc_RNA (1)...(19): siRNA sense strand
ccgaaugccagaagacugu

SEQ ID NO: 1574721 - RNA, 19 nt, Homo sapiens
  misc_RNA (1)...(19): siRNA sense strand
auuugcagcugccuucuug

SEQ ID NO: 1574722 - RNA, 19 nt, Homo sapiens
  misc_RNA (1)...(19): siRNA sense strand
caaacugaccaagcccaaa

SEQ ID NO: 1574723 - RNA, 19 nt, Homo sapiens
  misc_RNA (1)...(19): siRNA sense strand
caagcccuguggcaaacug

SEQ ID NO: 1574724 - RNA, 19 nt, Homo sapiens
  misc_RNA (1)...(19): siRNA sense strand
gccagaagacugucaccau

SEQ ID NO: 1574725 - RNA, 19 nt, Homo sapiens
  misc_RNA (1)...(19): siRNA sense strand
gagugcaagcaaaccauga

SEQ ID NO: 1574726 - RNA, 19 nt, Homo sapiens
  misc_RNA (1)...(19): siRNA sense strand
agaagacugucaccaucuc

SEQ ID NO: 1574727 - RNA, 19 nt, Homo sapiens
  misc_RNA (1)...(19): siRNA sense strand
caugaagacccagagaugu

SEQ ID NO: 1574728 - RNA, 19 nt, Homo sapiens
  misc_RNA (1)...(19): siRNA sense strand
ccaaaccucaagcagaauc

SEQ ID NO: 1574729 - RNA, 19 nt, Homo sapiens
  misc_RNA (1)...(19): siRNA sense strand
aagaaugucuaacugcuua

SEQ ID NO: 1574730 - RNA, 19 nt, Homo sapiens
  misc_RNA (1)...(19): siRNA sense strand
aaacuggaauuccuacaaa

SEQ ID NO: 1574731 - RNA, 19 nt, Homo sapiens
  misc_RNA (1)...(19): siRNA sense strand
ggaaagggaagaauucaga

SEQ ID NO: 1574732 - RNA, 19 nt, Homo sapiens
  misc_RNA (1)...(19): siRNA sense strand
gaaggaaagggaagaauuc

SEQ ID NO: 1574733 - RNA, 19 nt, Homo sapiens
  misc_RNA (1)...(19): siRNA sense strand
uggaauaccugaaggaaag

SEQ ID NO: 1574734 - RNA, 19 nt, Homo sapiens
  misc_RNA (1)...(19): siRNA sense strand
uacagaagcuuccaacaag

SEQ ID NO: 1574735 - RNA, 19 nt, Homo sapiens
  misc_RNA (1)...(19): siRNA sense strand
ccaaagagagguguucuga

SEQ ID NO: 1574736 - RNA, 19 nt, Homo sapiens
  misc_RNA (1)...(19): siRNA sense strand
gaaagggaagaauucagaa

SEQ ID NO: 1574737 - RNA, 19 nt, Homo sapiens
  misc_RNA (1)...(19): siRNA sense strand
cuacagaagcuuccaacaa

SEQ ID NO: 1574738 - RNA, 19 nt, Homo sapiens
  misc_RNA (1)...(19): siRNA sense strand
cuauaaugauccagccuuu

SEQ ID NO: 1574739 - RNA, 19 nt, Homo sapiens
  misc_RNA (1)...(19): siRNA sense strand
ugaaggaaagggaagaauu

SEQ ID NO: 1574740 - RNA, 19 nt, Homo sapiens
  misc_RNA (1)...(19): siRNA sense strand
uggaauuccuacaaagaaa

SEQ ID NO: 1574741 - RNA, 19 nt, Homo sapiens
  misc_RNA (1)...(19): siRNA sense strand
guaaaaugccggaaagaaa

SEQ ID NO: 1574742 - RNA, 19 nt, Homo sapiens
  misc_RNA (1)...(19): siRNA sense strand
uaccaaauguugcaagaac

SEQ ID NO: 1574743 - RNA, 19 nt, Homo sapiens
  misc_RNA (1)...(19): siRNA sense strand
uaaaaugccggaaagaaaa

SEQ ID NO: 1574744 - RNA, 19 nt, Homo sapiens
  misc_RNA (1)...(19): siRNA sense strand
caaagagagguguucugaa

SEQ ID NO: 1574745 - RNA, 19 nt, Homo sapiens
  misc_RNA (1)...(19): siRNA sense strand
ggaguucuuaugguaguaa

SEQ ID NO: 1574746 - RNA, 19 nt, Homo sapiens
  misc_RNA (1)...(19): siRNA sense strand
gucuaacugcuuacuauaa

SEQ ID NO: 1574747 - RNA, 19 nt, Homo sapiens
  misc_RNA (1)...(19): siRNA sense strand
cuaacugcuuacuauaaug

SEQ ID NO: 1574748 - RNA, 19 nt, Homo sapiens
  misc_RNA (1)...(19): siRNA sense strand
aaagggaagaauucagaaa

SEQ ID NO: 1574749 - RNA, 19 nt, Homo sapiens
  misc_RNA (1)...(19): siRNA sense strand
gaguucuuaugguaguaaa

SEQ ID NO: 1574750 - RNA, 19 nt, Homo sapiens
  misc_RNA (1)...(19): siRNA sense strand
uugaaagaaugucuaacug

SEQ ID NO: 1574751 - RNA, 19 nt, Homo sapiens
  misc_RNA (1)...(19): siRNA sense strand
gaccagcaucucagacaug

SEQ ID NO: 1574752 - RNA, 19 nt, Homo sapiens
  misc_RNA (1)...(19): siRNA sense strand
auaaugauccagccuuuua

SEQ ID NO: 1574753 - RNA, 19 nt, Homo sapiens
  misc_RNA (1)...(19): siRNA sense strand
guaguaaaaugccggaaag

SEQ ID NO: 1574754 - RNA, 19 nt, Homo sapiens
  misc_RNA (1)...(19): siRNA sense strand
gauccagccuuuuaugaag

SEQ ID NO: 1574755 - RNA, 19 nt, Homo sapiens
  misc_RNA (1)...(19): siRNA sense strand
ugucuaacugcuuacuaua

SEQ ID NO: 1574756 - RNA, 19 nt, Homo sapiens
  misc_RNA (1)...(19): siRNA sense strand
caaagaaaaggcuacagaa

SEQ ID NO: 1574757 - RNA, 19 nt, Homo sapiens
  misc_RNA (1)...(19): siRNA sense strand
cucuggaguucuuauggua

SEQ ID NO: 1574758 - RNA, 19 nt, Homo sapiens
  misc_RNA (1)...(19): siRNA sense strand
aaagaaugucuaacugcuu

SEQ ID NO: 1574759 - RNA, 19 nt, Homo sapiens
  misc_RNA (1)...(19): siRNA sense strand
cuggaauuccuacaaagaa

SEQ ID NO: 1574760 - RNA, 19 nt, Homo sapiens
  misc_RNA (1)...(19): siRNA sense strand
ggaauuccuacaaagaaaa

SEQ ID NO: 1574761 - RNA, 19 nt, Homo sapiens
  misc_RNA (1)...(19): siRNA sense strand
uuuaccaaauguugcaaga

SEQ ID NO: 1574762 - RNA, 19 nt, Homo sapiens
  misc_RNA (1)...(19): siRNA sense strand
gaaaugaccuggaagaagu

SEQ ID NO: 1574763 - RNA, 19 nt, Homo sapiens
  misc_RNA (1)...(19): siRNA sense strand
ggaagaaguccgccaguuc

SEQ ID NO: 1574764 - RNA, 19 nt, Homo sapiens
  misc_RNA (1)...(19): siRNA sense strand
gggccgaccugaacgcaaa

SEQ ID NO: 1574765 - RNA, 19 nt, Homo sapiens
  misc_RNA (1)...(19): siRNA sense strand
gccaagggcuccugaagca

SEQ ID NO: 1574766 - RNA, 19 nt, Homo sapiens
  misc_RNA (1)...(19): siRNA sense strand
ccuaugaccugugugauga

SEQ ID NO: 1574767 - RNA, 19 nt, Homo sapiens
  misc_RNA (1)...(19): siRNA sense strand
caccagugcugcauugaug

SEQ ID NO: 1574768 - RNA, 19 nt, Homo sapiens
  misc_RNA (1)...(19): siRNA sense strand
gaacgcaaagucccugaug

SEQ ID NO: 1574769 - RNA, 19 nt, Homo sapiens
  misc_RNA (1)...(19): siRNA sense strand
gagccagccugagcgcuaa

SEQ ID NO: 1574770 - RNA, 19 nt, Homo sapiens
  misc_RNA (1)...(19): siRNA sense strand
acgggaacaugcccuauga

SEQ ID NO: 1574771 - RNA, 19 nt, Homo sapiens
  misc_RNA (1)...(19): siRNA sense strand
gcugaagcaugcccagaag

SEQ ID NO: 1574772 - RNA, 19 nt, Homo sapiens
  misc_RNA (1)...(19): siRNA sense strand
ccucuucccucccaguguu

SEQ ID NO: 1574773 - RNA, 19 nt, Homo sapiens
  misc_RNA (1)...(19): siRNA sense strand
gugcugcauugaugauuuc

SEQ ID NO: 1574774 - RNA, 19 nt, Homo sapiens
  misc_RNA (1)...(19): siRNA sense strand
cgaaaugaccuggaagaag

SEQ ID NO: 1574775 - RNA, 19 nt, Homo sapiens
  misc_RNA (1)...(19): siRNA sense strand
caacaccgacgggaacaug

SEQ ID NO: 1574776 - RNA, 19 nt, Homo sapiens
  misc_RNA (1)...(19): siRNA sense strand
uggaagaaguccgccaguu

SEQ ID NO: 1574777 - RNA, 19 nt, Homo sapiens
  misc_RNA (1)...(19): siRNA sense strand
gcacacaggagcggcugaa

SEQ ID NO: 1574778 - RNA, 19 nt, Homo sapiens
  misc_RNA (1)...(19): siRNA sense strand
gcccugacuuggccaacga

SEQ ID NO: 1574779 - RNA, 19 nt, Homo sapiens
  misc_RNA (1)...(19): siRNA sense strand
caacgaugaccgccagaca

SEQ ID NO: 1574780 - RNA, 19 nt, Homo sapiens
  misc_RNA (1)...(19): siRNA sense strand
gccgcacaauggccgagua

SEQ ID NO: 1574781 - RNA, 19 nt, Homo sapiens
  misc_RNA (1)...(19): siRNA sense strand
cacccuggcugaccugaag

SEQ ID NO: 1574782 - RNA, 19 nt, Homo sapiens
  misc_RNA (1)...(19): siRNA sense strand
agugcugcauugaugauuu

SEQ ID NO: 1574783 - RNA, 19 nt, Homo sapiens
  misc_RNA (1)...(19): siRNA sense strand
ccaaucuccuggcggucaa

SEQ ID NO: 1574784 - RNA, 19 nt, Homo sapiens
  misc_RNA (1)...(19): siRNA sense strand
cccagcaggugaagaugug

SEQ ID NO: 1574785 - RNA, 19 nt, Homo sapiens
  misc_RNA (1)...(19): siRNA sense strand
gacgggaacaugcccuaug

SEQ ID NO: 1574786 - RNA, 19 nt, Homo sapiens
  misc_RNA (1)...(19): siRNA sense strand
ggcugaagcaugcccagaa

SEQ ID NO: 1574787 - RNA, 19 nt, Homo sapiens
  misc_RNA (1)...(19): siRNA sense strand
ccugagcgcuaaggaccaa

SEQ ID NO: 1574788 - RNA, 19 nt, Homo sapiens
  misc_RNA (1)...(19): siRNA sense strand
ugaccugugugaugaugag

SEQ ID NO: 1574789 - RNA, 19 nt, Homo sapiens
  misc_RNA (1)...(19): siRNA sense strand
cacaggagcggcugaagca

SEQ ID NO: 1574790 - RNA, 19 nt, Homo sapiens
  misc_RNA (1)...(19): siRNA sense strand
gcgcccagcaggugaagau

SEQ ID NO: 1574791 - RNA, 19 nt, Homo sapiens
  misc_RNA (1)...(19): siRNA sense strand
gaaagagacugugaaucua

SEQ ID NO: 1574792 - RNA, 19 nt, Homo sapiens
  misc_RNA (1)...(19): siRNA sense strand
ggagagagccgccaguuug

SEQ ID NO: 1574793 - RNA, 19 nt, Homo sapiens
  misc_RNA (1)...(19): siRNA sense strand
guaggugacucgguaauaa

SEQ ID NO: 1574794 - RNA, 19 nt, Homo sapiens
  misc_RNA (1)...(19): siRNA sense strand
gcagagaggucagcagaug

SEQ ID NO: 1574795 - RNA, 19 nt, Homo sapiens
  misc_RNA (1)...(19): siRNA sense strand
ugaauugccuccuagauau

SEQ ID NO: 1574796 - RNA, 19 nt, Homo sapiens
  misc_RNA (1)...(19): siRNA sense strand
ggacagacacgucagcaaa

SEQ ID NO: 1574797 - RNA, 19 nt, Homo sapiens
  misc_RNA (1)...(19): siRNA sense strand
ggacagauccagauuaugg

SEQ ID NO: 1574798 - RNA, 19 nt, Homo sapiens
  misc_RNA (1)...(19): siRNA sense strand
ugaaagagacugugaaucu

SEQ ID NO: 1574799 - RNA, 19 nt, Homo sapiens
  misc_RNA (1)...(19): siRNA sense strand
gacagacacuggcgacuca

SEQ ID NO: 1574800 - RNA, 19 nt, Homo sapiens
  misc_RNA (1)...(19): siRNA sense strand
ggacgaauucaucuucuga

SEQ ID NO: 1574801 - RNA, 19 nt, Homo sapiens
  misc_RNA (1)...(19): siRNA sense strand
aagagacugugaaucuaua

SEQ ID NO: 1574802 - RNA, 19 nt, Homo sapiens
  misc_RNA (1)...(19): siRNA sense strand
gagggacagauccagauua

SEQ ID NO: 1574803 - RNA, 19 nt, Homo sapiens
  misc_RNA (1)...(19): siRNA sense strand
cgaccgagccuucaucugu

SEQ ID NO: 1574804 - RNA, 19 nt, Homo sapiens
  misc_RNA (1)...(19): siRNA sense strand
gcuacauucuugccucuau

SEQ ID NO: 1574805 - RNA, 19 nt, Homo sapiens
  misc_RNA (1)...(19): siRNA sense strand
acagucugcuuccgaauga

SEQ ID NO: 1574806 - RNA, 19 nt, Homo sapiens
  misc_RNA (1)...(19): siRNA sense strand
gaagagaaacacgcugaau

SEQ ID NO: 1574807 - RNA, 19 nt, Homo sapiens
  misc_RNA (1)...(19): siRNA sense strand
gcugaaugcuggccaggau

SEQ ID NO: 1574808 - RNA, 19 nt, Homo sapiens
  misc_RNA (1)...(19): siRNA sense strand
ccaccuuacuuuccugaau

SEQ ID NO: 1574809 - RNA, 19 nt, Homo sapiens
  misc_RNA (1)...(19): siRNA sense strand
cugaauugccuccuagaua

SEQ ID NO: 1574810 - RNA, 19 nt, Homo sapiens
  misc_RNA (1)...(19): siRNA sense strand
cuccacaucuuccaucuga

SEQ ID NO: 1574811 - RNA, 19 nt, Homo sapiens
  misc_RNA (1)...(19): siRNA sense strand
gagagaagagggacagauc

SEQ ID NO: 1574812 - RNA, 19 nt, Homo sapiens
  misc_RNA (1)...(19): siRNA sense strand
ugauugugcuugugggauu

SEQ ID NO: 1574813 - RNA, 19 nt, Homo sapiens
  misc_RNA (1)...(19): siRNA sense strand
guccugcucuccaucuuug

SEQ ID NO: 1574814 - RNA, 19 nt, Homo sapiens
  misc_RNA (1)...(19): siRNA sense strand
agggacagauccagauuau

SEQ ID NO: 1574815 - RNA, 19 nt, Homo sapiens
  misc_RNA (1)...(19): siRNA sense strand
gagacugugaaucuauaua

SEQ ID NO: 1574816 - RNA, 19 nt, Homo sapiens
  misc_RNA (1)...(19): siRNA sense strand
gcccagugccuuaucuuug

SEQ ID NO: 1574817 - RNA, 19 nt, Homo sapiens
  misc_RNA (1)...(19): siRNA sense strand
aaagagacugugaaucuau

SEQ ID NO: 1574818 - RNA, 19 nt, Homo sapiens
  misc_RNA (1)...(19): siRNA sense strand
gggugcagccucugaaaga

SEQ ID NO: 1574819 - RNA, 19 nt, Homo sapiens
  misc_RNA (1)...(19): siRNA sense strand
gcugagaguccuggaacua

SEQ ID NO: 1574820 - RNA, 19 nt, Homo sapiens
  misc_RNA (1)...(19): siRNA sense strand
uuccaggcaugccaauaua

SEQ ID NO: 1574821 - RNA, 19 nt, Homo sapiens
  misc_RNA (1)...(19): siRNA sense strand
ccuccuagauaugaagaaa

SEQ ID NO: 1574822 - RNA, 19 nt, Homo sapiens
  misc_RNA (1)...(19): siRNA sense strand
ccacaucuuccaucugaau

SEQ ID NO: 1574823 - RNA, 19 nt, Homo sapiens
  misc_RNA (1)...(19): siRNA sense strand
gaauugccuccuagauaug

SEQ ID NO: 1574824 - RNA, 19 nt, Homo sapiens
  misc_RNA (1)...(19): siRNA sense strand
guuccaggcaugccaauau

SEQ ID NO: 1574825 - RNA, 19 nt, Homo sapiens
  misc_RNA (1)...(19): siRNA sense strand
caccuuacuuuccugaauc

SEQ ID NO: 1574826 - RNA, 19 nt, Homo sapiens
  misc_RNA (1)...(19): siRNA sense strand
ggguuucuguucuugacaa

SEQ ID NO: 1574827 - RNA, 19 nt, Homo sapiens
  misc_RNA (1)...(19): siRNA sense strand
ccaucugaauugccuccua

SEQ ID NO: 1574828 - RNA, 19 nt, Homo sapiens
  misc_RNA (1)...(19): siRNA sense strand
gggacgaauucaucuucug

SEQ ID NO: 1574829 - RNA, 19 nt, Homo sapiens
  misc_RNA (1)...(19): siRNA sense strand
aagagaaacacgcugaaug

SEQ ID NO: 1574830 - RNA, 19 nt, Homo sapiens
  misc_RNA (1)...(19): siRNA sense strand
ucacacacuccacaucuuc

SEQ ID NO: 1574831 - RNA, 19 nt, Homo sapiens
  misc_RNA (1)...(19): siRNA sense strand
gauugugcuugugggauug

SEQ ID NO: 1574832 - RNA, 19 nt, Homo sapiens
  misc_RNA (1)...(19): siRNA sense strand
cccagugccuuaucuuugg

SEQ ID NO: 1574833 - RNA, 19 nt, Homo sapiens
  misc_RNA (1)...(19): siRNA sense strand
gagaagagggacagaucca

SEQ ID NO: 1574834 - RNA, 19 nt, Homo sapiens
  misc_RNA (1)...(19): siRNA sense strand
caguuugcccagugccuua

SEQ ID NO: 1574835 - RNA, 19 nt, Homo sapiens
  misc_RNA (1)...(19): siRNA sense strand
ugccuuaucuuuggguuuc

SEQ ID NO: 1574836 - RNA, 19 nt, Homo sapiens
  misc_RNA (1)...(19): siRNA sense strand
ugagaguccuggaacuaac

SEQ ID NO: 1574837 - RNA, 19 nt, Homo sapiens
  misc_RNA (1)...(19): siRNA sense strand
agagaaacacgcugaaugc

SEQ ID NO: 1574838 - RNA, 19 nt, Homo sapiens
  misc_RNA (1)...(19): siRNA sense strand
cuucgugguugcccauguu

SEQ ID NO: 1574839 - RNA, 19 nt, Homo sapiens
  misc_RNA (1)...(19): siRNA sense strand
agacacgucagcaaacuca

SEQ ID NO: 1574840 - RNA, 19 nt, Homo sapiens
  misc_RNA (1)...(19): siRNA sense strand
gagaguccuggaacuaaca

SEQ ID NO: 1574841 - RNA, 19 nt, Homo sapiens
  misc_RNA (1)...(19): siRNA sense strand
acaagcggcaugcucauca

SEQ ID NO: 1574842 - RNA, 19 nt, Homo sapiens
  misc_RNA (1)...(19): siRNA sense strand
cuacauucuugccucuauc

SEQ ID NO: 1574843 - RNA, 19 nt, Homo sapiens
  misc_RNA (1)...(19): siRNA sense strand
uguaggugacucgguaaua

SEQ ID NO: 1574844 - RNA, 19 nt, Homo sapiens
  misc_RNA (1)...(19): siRNA sense strand
aggugacucgguaauaaua

SEQ ID NO: 1574845 - RNA, 19 nt, Homo sapiens
  misc_RNA (1)...(19): siRNA sense strand
ugcugcagcuacauucuug

SEQ ID NO: 1574846 - RNA, 19 nt, Homo sapiens
  misc_RNA (1)...(19): siRNA sense strand
gccuucaucuguggagaga

SEQ ID NO: 1574847 - RNA, 19 nt, Homo sapiens
  misc_RNA (1)...(19): siRNA sense strand
gaguccugcucuccaucuu

SEQ ID NO: 1574848 - RNA, 19 nt, Homo sapiens
  misc_RNA (1)...(19): siRNA sense strand
guaaaucaaugguggauga

SEQ ID NO: 1574849 - RNA, 19 nt, Homo sapiens
  misc_RNA (1)...(19): siRNA sense strand
caacuugugucguccagua

SEQ ID NO: 1574850 - RNA, 19 nt, Homo sapiens
  misc_RNA (1)...(19): siRNA sense strand
caagaucaguguuguacaa

SEQ ID NO: 1574851 - RNA, 19 nt, Homo sapiens
  misc_RNA (1)...(19): siRNA sense strand
gaagauuucuaccgcaaag

SEQ ID NO: 1574852 - RNA, 19 nt, Homo sapiens
  misc_RNA (1)...(19): siRNA sense strand
gaagcaagaucaguguugu

SEQ ID NO: 1574853 - RNA, 19 nt, Homo sapiens
  misc_RNA (1)...(19): siRNA sense strand
gcaaaucugcccuuacugu

SEQ ID NO: 1574854 - RNA, 19 nt, Homo sapiens
  misc_RNA (1)...(19): siRNA sense strand
gaucaaauugucagaguga

SEQ ID NO: 1574855 - RNA, 19 nt, Homo sapiens
  misc_RNA (1)...(19): siRNA sense strand
gagaucaaauugucagagu

SEQ ID NO: 1574856 - RNA, 19 nt, Homo sapiens
  misc_RNA (1)...(19): siRNA sense strand
gagagguuaugucuucaga

SEQ ID NO: 1574857 - RNA, 19 nt, Homo sapiens
  misc_RNA (1)...(19): siRNA sense strand
ucaggcaaaugaacuauuc

SEQ ID NO: 1574858 - RNA, 19 nt, Homo sapiens
  misc_RNA (1)...(19): siRNA sense strand
gcaguuugccuccaugaga

SEQ ID NO: 1574859 - RNA, 19 nt, Homo sapiens
  misc_RNA (1)...(19): siRNA sense strand
ucacugggacuuucauuga

SEQ ID NO: 1574860 - RNA, 19 nt, Homo sapiens
  misc_RNA (1)...(19): siRNA sense strand
gagaucgucaggcaaauga

SEQ ID NO: 1574861 - RNA, 19 nt, Homo sapiens
  misc_RNA (1)...(19): siRNA sense strand
aaugagagaucaaauuguc

SEQ ID NO: 1574862 - RNA, 19 nt, Homo sapiens
  misc_RNA (1)...(19): siRNA sense strand
caggauaucaagccaauga

SEQ ID NO: 1574863 - RNA, 19 nt, Homo sapiens
  misc_RNA (1)...(19): siRNA sense strand
gaauggggcuguccuuuca

SEQ ID NO: 1574864 - RNA, 19 nt, Homo sapiens
  misc_RNA (1)...(19): siRNA sense strand
uuuauagccugguuaauca

SEQ ID NO: 1574865 - RNA, 19 nt, Homo sapiens
  misc_RNA (1)...(19): siRNA sense strand
gccaaugagagaucaaauu

SEQ ID NO: 1574866 - RNA, 19 nt, Homo sapiens
  misc_RNA (1)...(19): siRNA sense strand
caaauugucagagugaaga

SEQ ID NO: 1574867 - RNA, 19 nt, Homo sapiens
  misc_RNA (1)...(19): siRNA sense strand
ggagaagcaagaucagugu

SEQ ID NO: 1574868 - RNA, 19 nt, Homo sapiens
  misc_RNA (1)...(19): siRNA sense strand
uaaaguggaucuggaacca

SEQ ID NO: 1574869 - RNA, 19 nt, Homo sapiens
  misc_RNA (1)...(19): siRNA sense strand
caacagucuuuucaggaua

SEQ ID NO: 1574870 - RNA, 19 nt, Homo sapiens
  misc_RNA (1)...(19): siRNA sense strand
ggauaucaagccaaugaga

SEQ ID NO: 1574871 - RNA, 19 nt, Homo sapiens
  misc_RNA (1)...(19): siRNA sense strand
caagguuucauccugguuu

SEQ ID NO: 1574872 - RNA, 19 nt, Homo sapiens
  misc_RNA (1)...(19): siRNA sense strand
agaaagagagguuaugucu

SEQ ID NO: 1574873 - RNA, 19 nt, Homo sapiens
  misc_RNA (1)...(19): siRNA sense strand
aagguuucauccugguuua

SEQ ID NO: 1574874 - RNA, 19 nt, Homo sapiens
  misc_RNA (1)...(19): siRNA sense strand
gguuucauccugguuuaua

SEQ ID NO: 1574875 - RNA, 19 nt, Homo sapiens
  misc_RNA (1)...(19): siRNA sense strand
guuuauagccugguuaauc

SEQ ID NO: 1574876 - RNA, 19 nt, Homo sapiens
  misc_RNA (1)...(19): siRNA sense strand
aaauaaaguggaucuggaa

SEQ ID NO: 1574877 - RNA, 19 nt, Homo sapiens
  misc_RNA (1)...(19): siRNA sense strand
agagugaagagauaugaaa

SEQ ID NO: 1574878 - RNA, 19 nt, Homo sapiens
  misc_RNA (1)...(19): siRNA sense strand
auucaucccugccggagaa

SEQ ID NO: 1574879 - RNA, 19 nt, Homo sapiens
  misc_RNA (1)...(19): siRNA sense strand
aauacaagguagugguguu

SEQ ID NO: 1574880 - RNA, 19 nt, Homo sapiens
  misc_RNA (1)...(19): siRNA sense strand
gaaauaugaccccaccauu

SEQ ID NO: 1574881 - RNA, 19 nt, Homo sapiens
  misc_RNA (1)...(19): siRNA sense strand
ccagaaagagagguuaugu

SEQ ID NO: 1574882 - RNA, 19 nt, Homo sapiens
  misc_RNA (1)...(19): siRNA sense strand
gagaagcaagaucaguguu

SEQ ID NO: 1574883 - RNA, 19 nt, Homo sapiens
  misc_RNA (1)...(19): siRNA sense strand
auacaagguagugguguua

SEQ ID NO: 1574884 - RNA, 19 nt, Homo sapiens
  misc_RNA (1)...(19): siRNA sense strand
ucaagccaaugagagauca

SEQ ID NO: 1574885 - RNA, 19 nt, Homo sapiens
  misc_RNA (1)...(19): siRNA sense strand
gagcaguuugccuccauga

SEQ ID NO: 1574886 - RNA, 19 nt, Homo sapiens
  misc_RNA (1)...(19): siRNA sense strand
ccgcaaagagaucgaagug

SEQ ID NO: 1574887 - RNA, 19 nt, Homo sapiens
  misc_RNA (1)...(19): siRNA sense strand
agaagcaagaucaguguug

SEQ ID NO: 1574888 - RNA, 19 nt, Homo sapiens
  misc_RNA (1)...(19): siRNA sense strand
aaucaaugguggaugaacu

SEQ ID NO: 1574889 - RNA, 19 nt, Homo sapiens
  misc_RNA (1)...(19): siRNA sense strand
ucagagugaagagauauga

SEQ ID NO: 1574890 - RNA, 19 nt, Homo sapiens
  misc_RNA (1)...(19): siRNA sense strand
aguaggaaauaaaguggau

SEQ ID NO: 1574891 - RNA, 19 nt, Homo sapiens
  misc_RNA (1)...(19): siRNA sense strand
guuucauccugguuuauag

SEQ ID NO: 1574892 - RNA, 19 nt, Homo sapiens
  misc_RNA (1)...(19): siRNA sense strand
ucauggagacaucggcaaa

SEQ ID NO: 1574893 - RNA, 19 nt, Homo sapiens
  misc_RNA (1)...(19): siRNA sense strand
acugggacuuucauugaga

SEQ ID NO: 1574894 - RNA, 19 nt, Homo sapiens
  misc_RNA (1)...(19): siRNA sense strand
ccuccgugcuggaaauucu

SEQ ID NO: 1574895 - RNA, 19 nt, Homo sapiens
  misc_RNA (1)...(19): siRNA sense strand
gcaagaucaguguuguaca

SEQ ID NO: 1574896 - RNA, 19 nt, Homo sapiens
  misc_RNA (1)...(19): siRNA sense strand
gagggaauacaagguagug

SEQ ID NO: 1574897 - RNA, 19 nt, Homo sapiens
  misc_RNA (1)...(19): siRNA sense strand
gcagggagguuuacucauu

SEQ ID NO: 1574898 - RNA, 19 nt, Homo sapiens
  misc_RNA (1)...(19): siRNA sense strand
gcagaggauugaccaagaa

SEQ ID NO: 1574899 - RNA, 19 nt, Homo sapiens
  misc_RNA (1)...(19): siRNA sense strand
gauacacgcuccugacuuc

SEQ ID NO: 1574900 - RNA, 19 nt, Homo sapiens
  misc_RNA (1)...(19): siRNA sense strand
cgacggcccucaacuguga

SEQ ID NO: 1574901 - RNA, 19 nt, Homo sapiens
  misc_RNA (1)...(19): siRNA sense strand
ccacugagggcaucuauga

SEQ ID NO: 1574902 - RNA, 19 nt, Homo sapiens
  misc_RNA (1)...(19): siRNA sense strand
gaggauugaccaagaauug

SEQ ID NO: 1574903 - RNA, 19 nt, Homo sapiens
  misc_RNA (1)...(19): siRNA sense strand
cagccgaucuucuguguuc

SEQ ID NO: 1574904 - RNA, 19 nt, Homo sapiens
  misc_RNA (1)...(19): siRNA sense strand
cagggagguuuacucauuu

SEQ ID NO: 1574905 - RNA, 19 nt, Homo sapiens
  misc_RNA (1)...(19): siRNA sense strand
gccaggcucugaccacuga

SEQ ID NO: 1574906 - RNA, 19 nt, Homo sapiens
  misc_RNA (1)...(19): siRNA sense strand
aaaaggagcugccugaguu

SEQ ID NO: 1574907 - RNA, 19 nt, Homo sapiens
  misc_RNA (1)...(19): siRNA sense strand
ccacaaggaggaauaugaa

SEQ ID NO: 1574908 - RNA, 19 nt, Homo sapiens
  misc_RNA (1)...(19): siRNA sense strand
gaugcucucugcccugaau

SEQ ID NO: 1574909 - RNA, 19 nt, Homo sapiens
  misc_RNA (1)...(19): siRNA sense strand
gcaaagucaucugcuaacu

SEQ ID NO: 1574910 - RNA, 19 nt, Homo sapiens
  misc_RNA (1)...(19): siRNA sense strand
ggcgcgugcugaagaaauu

SEQ ID NO: 1574911 - RNA, 19 nt, Homo sapiens
  misc_RNA (1)...(19): siRNA sense strand
ggauugaccaagaauugaa

SEQ ID NO: 1574912 - RNA, 19 nt, Homo sapiens
  misc_RNA (1)...(19): siRNA sense strand
gggagaccauacucaggaa

SEQ ID NO: 1574913 - RNA, 19 nt, Homo sapiens
  misc_RNA (1)...(19): siRNA sense strand
ggagaugccgugggacuug

SEQ ID NO: 1574914 - RNA, 19 nt, Homo sapiens
  misc_RNA (1)...(19): siRNA sense strand
gcagagggacuuucacacu

SEQ ID NO: 1574915 - RNA, 19 nt, Homo sapiens
  misc_RNA (1)...(19): siRNA sense strand
gccacaaggaggaauauga

SEQ ID NO: 1574916 - RNA, 19 nt, Homo sapiens
  misc_RNA (1)...(19): siRNA sense strand
gcgcagggagguuuacuca

SEQ ID NO: 1574917 - RNA, 19 nt, Homo sapiens
  misc_RNA (1)...(19): siRNA sense strand
aaucuuaacuuggugucaa

SEQ ID NO: 1574918 - RNA, 19 nt, Homo sapiens
  misc_RNA (1)...(19): siRNA sense strand
ugacuucccagcgagaaua

SEQ ID NO: 1574919 - RNA, 19 nt, Homo sapiens
  misc_RNA (1)...(19): siRNA sense strand
gaugcagagccucguguuu

SEQ ID NO: 1574920 - RNA, 19 nt, Homo sapiens
  misc_RNA (1)...(19): siRNA sense strand
gucaucugcuaacuggaua

SEQ ID NO: 1574921 - RNA, 19 nt, Homo sapiens
  misc_RNA (1)...(19): siRNA sense strand
ccacugccuuggcucaaca

SEQ ID NO: 1574922 - RNA, 19 nt, Homo sapiens
  misc_RNA (1)...(19): siRNA sense strand
ggauucccguguguucuug

SEQ ID NO: 1574923 - RNA, 19 nt, Homo sapiens
  misc_RNA (1)...(19): siRNA sense strand
ggcagccgaucuucugugu

SEQ ID NO: 1574924 - RNA, 19 nt, Homo sapiens
  misc_RNA (1)...(19): siRNA sense strand
cagcagcggcagcaccuaa

SEQ ID NO: 1574925 - RNA, 19 nt, Homo sapiens
  misc_RNA (1)...(19): siRNA sense strand
gagaccauacucaggaaga

SEQ ID NO: 1574926 - RNA, 19 nt, Homo sapiens
  misc_RNA (1)...(19): siRNA sense strand
ggauacacgcuccugacuu

SEQ ID NO: 1574927 - RNA, 19 nt, Homo sapiens
  misc_RNA (1)...(19): siRNA sense strand
caaagucaucugcuaacug

SEQ ID NO: 1574928 - RNA, 19 nt, Homo sapiens
  misc_RNA (1)...(19): siRNA sense strand
gcagcaccaaggccacuuu

SEQ ID NO: 1574929 - RNA, 19 nt, Homo sapiens
  misc_RNA (1)...(19): siRNA sense strand
ugcagaggauugaccaaga

SEQ ID NO: 1574930 - RNA, 19 nt, Homo sapiens
  misc_RNA (1)...(19): siRNA sense strand
gauugaccaagaauugaaa

SEQ ID NO: 1574931 - RNA, 19 nt, Homo sapiens
  misc_RNA (1)...(19): siRNA sense strand
gacgacggcccucaacugu

SEQ ID NO: 1574932 - RNA, 19 nt, Homo sapiens
  misc_RNA (1)...(19): siRNA sense strand
gagaccguuuccucccauu

SEQ ID NO: 1574933 - RNA, 19 nt, Homo sapiens
  misc_RNA (1)...(19): siRNA sense strand
ggcagcaccguuuggcuuu

SEQ ID NO: 1574934 - RNA, 19 nt, Homo sapiens
  misc_RNA (1)...(19): siRNA sense strand
uggacacccugcugaggaa

SEQ ID NO: 1574935 - RNA, 19 nt, Homo sapiens
  misc_RNA (1)...(19): siRNA sense strand
cccauucugucuggaguuu

SEQ ID NO: 1574936 - RNA, 19 nt, Homo sapiens
  misc_RNA (1)...(19): siRNA sense strand
ucugcuaacuggauauugg

SEQ ID NO: 1574937 - RNA, 19 nt, Homo sapiens
  misc_RNA (1)...(19): siRNA sense strand
ggugcuugcugcagaggau

SEQ ID NO: 1574938 - RNA, 19 nt, Homo sapiens
  misc_RNA (1)...(19): siRNA sense strand
gcagcaccguuuggcuuuc

SEQ ID NO: 1574939 - RNA, 19 nt, Homo sapiens
  misc_RNA (1)...(19): siRNA sense strand
gaccggaagccaguugcua

SEQ ID NO: 1574940 - RNA, 19 nt, Homo sapiens
  misc_RNA (1)...(19): siRNA sense strand
gguggcagccgaucuucug

SEQ ID NO: 1574941 - RNA, 19 nt, Homo sapiens
  misc_RNA (1)...(19): siRNA sense strand
ugacgacggcccucaacug

SEQ ID NO: 1574942 - RNA, 19 nt, Homo sapiens
  misc_RNA (1)...(19): siRNA sense strand
ggaugcagagccucguguu

SEQ ID NO: 1574943 - RNA, 19 nt, Homo sapiens
  misc_RNA (1)...(19): siRNA sense strand
uuaccgacuuccucugcuu

SEQ ID NO: 1574944 - RNA, 19 nt, Homo sapiens
  misc_RNA (1)...(19): siRNA sense strand
cgagcccucuggacaagca

SEQ ID NO: 1574945 - RNA, 19 nt, Homo sapiens
  misc_RNA (1)...(19): siRNA sense strand
gaauaucuccgccuuuugg

SEQ ID NO: 1574946 - RNA, 19 nt, Homo sapiens
  misc_RNA (1)...(19): siRNA sense strand
ucagccacaaggaggaaua

SEQ ID NO: 1574947 - RNA, 19 nt, Homo sapiens
  misc_RNA (1)...(19): siRNA sense strand
cacaaggaggaauaugaaa

SEQ ID NO: 1574948 - RNA, 19 nt, Homo sapiens
  misc_RNA (1)...(19): siRNA sense strand
gaucaaggauucaggguua

SEQ ID NO: 1574949 - RNA, 19 nt, Homo sapiens
  misc_RNA (1)...(19): siRNA sense strand
gaaagaggcaaaccacuua

SEQ ID NO: 1574950 - RNA, 19 nt, Homo sapiens
  misc_RNA (1)...(19): siRNA sense strand
cagaggaucuugaagcuua

SEQ ID NO: 1574951 - RNA, 19 nt, Homo sapiens
  misc_RNA (1)...(19): siRNA sense strand
gcaaauguguucuuauugg

SEQ ID NO: 1574952 - RNA, 19 nt, Homo sapiens
  misc_RNA (1)...(19): siRNA sense strand
gaaauggugaugaagcuua

SEQ ID NO: 1574953 - RNA, 19 nt, Homo sapiens
  misc_RNA (1)...(19): siRNA sense strand
uaacuucccucauccaaau

SEQ ID NO: 1574954 - RNA, 19 nt, Homo sapiens
  misc_RNA (1)...(19): siRNA sense strand
gcauuaaguggcccaauua

SEQ ID NO: 1574955 - RNA, 19 nt, Homo sapiens
  misc_RNA (1)...(19): siRNA sense strand
gugaugaagcuuauuguua

SEQ ID NO: 1574956 - RNA, 19 nt, Homo sapiens
  misc_RNA (1)...(19): siRNA sense strand
gcacuggcauuggaagaaa

SEQ ID NO: 1574957 - RNA, 19 nt, Homo sapiens
  misc_RNA (1)...(19): siRNA sense strand
agaaacagaugcucccauu

SEQ ID NO: 1574958 - RNA, 19 nt, Homo sapiens
  misc_RNA (1)...(19): siRNA sense strand
gcacuggauuugagagguu

SEQ ID NO: 1574959 - RNA, 19 nt, Homo sapiens
  misc_RNA (1)...(19): siRNA sense strand
ugagauggcugaagucaca

SEQ ID NO: 1574960 - RNA, 19 nt, Homo sapiens
  misc_RNA (1)...(19): siRNA sense strand
gcaagaccaaccugacaua

SEQ ID NO: 1574961 - RNA, 19 nt, Homo sapiens
  misc_RNA (1)...(19): siRNA sense strand
ucacagcacuggcauugga

SEQ ID NO: 1574962 - RNA, 19 nt, Homo sapiens
  misc_RNA (1)...(19): siRNA sense strand
caugauugcuuggcuaauu

SEQ ID NO: 1574963 - RNA, 19 nt, Homo sapiens
  misc_RNA (1)...(19): siRNA sense strand
ggugaccacuccaacacua

SEQ ID NO: 1574964 - RNA, 19 nt, Homo sapiens
  misc_RNA (1)...(19): siRNA sense strand
gcugaagucacaaagauuu

SEQ ID NO: 1574965 - RNA, 19 nt, Homo sapiens
  misc_RNA (1)...(19): siRNA sense strand
ggauucaggguuaagauuu

SEQ ID NO: 1574966 - RNA, 19 nt, Homo sapiens
  misc_RNA (1)...(19): siRNA sense strand
agaccaaccugacauagug

SEQ ID NO: 1574967 - RNA, 19 nt, Homo sapiens
  misc_RNA (1)...(19): siRNA sense strand
ggguuaagauuucacuaug

SEQ ID NO: 1574968 - RNA, 19 nt, Homo sapiens
  misc_RNA (1)...(19): siRNA sense strand
gugaacaaauugauaugga

SEQ ID NO: 1574969 - RNA, 19 nt, Homo sapiens
  misc_RNA (1)...(19): siRNA sense strand
gucauuggcuucagcaaga

SEQ ID NO: 1574970 - RNA, 19 nt, Homo sapiens
  misc_RNA (1)...(19): siRNA sense strand
agaaaaggaugccaauuaa

SEQ ID NO: 1574971 - RNA, 19 nt, Homo sapiens
  misc_RNA (1)...(19): siRNA sense strand
ugacauagugaacaaauug

SEQ ID NO: 1574972 - RNA, 19 nt, Homo sapiens
  misc_RNA (1)...(19): siRNA sense strand
aaacagaugcucccauuca

SEQ ID NO: 1574973 - RNA, 19 nt, Homo sapiens
  misc_RNA (1)...(19): siRNA sense strand
gagagguuauggagaaaca

SEQ ID NO: 1574974 - RNA, 19 nt, Homo sapiens
  misc_RNA (1)...(19): siRNA sense strand
caauuaaccauuaccgaaa

SEQ ID NO: 1574975 - RNA, 19 nt, Homo sapiens
  misc_RNA (1)...(19): siRNA sense strand
gauucaggguuaagauuuc

SEQ ID NO: 1574976 - RNA, 19 nt, Homo sapiens
  misc_RNA (1)...(19): siRNA sense strand
gguuaagauuucacuaugu

SEQ ID NO: 1574977 - RNA, 19 nt, Homo sapiens
  misc_RNA (1)...(19): siRNA sense strand
uaccaugguucccagaauu

SEQ ID NO: 1574978 - RNA, 19 nt, Homo sapiens
  misc_RNA (1)...(19): siRNA sense strand
cugcucagcuguugaaauc

SEQ ID NO: 1574979 - RNA, 19 nt, Homo sapiens
  misc_RNA (1)...(19): siRNA sense strand
caucuguuauccugaaaug

SEQ ID NO: 1574980 - RNA, 19 nt, Homo sapiens
  misc_RNA (1)...(19): siRNA sense strand
uuugagagguuauggagaa

SEQ ID NO: 1574981 - RNA, 19 nt, Homo sapiens
  misc_RNA (1)...(19): siRNA sense strand
aagugaauaucgaguugua

SEQ ID NO: 1574982 - RNA, 19 nt, Homo sapiens
  misc_RNA (1)...(19): siRNA sense strand
uaacaacagaggaucuuga

SEQ ID NO: 1574983 - RNA, 19 nt, Homo sapiens
  misc_RNA (1)...(19): siRNA sense strand
uggauugucuaauuacaga

SEQ ID NO: 1574984 - RNA, 19 nt, Homo sapiens
  misc_RNA (1)...(19): siRNA sense strand
gcuaauugccaucuguuau

SEQ ID NO: 1574985 - RNA, 19 nt, Homo sapiens
  misc_RNA (1)...(19): siRNA sense strand
guuaccaacugagagaauu

SEQ ID NO: 1574986 - RNA, 19 nt, Homo sapiens
  misc_RNA (1)...(19): siRNA sense strand
guggcccaauuaaccauua

SEQ ID NO: 1574987 - RNA, 19 nt, Homo sapiens
  misc_RNA (1)...(19): siRNA sense strand
aagaaaaggaugccaauua

SEQ ID NO: 1574988 - RNA, 19 nt, Homo sapiens
  misc_RNA (1)...(19): siRNA sense strand
uggcugaagucacaaagau

SEQ ID NO: 1574989 - RNA, 19 nt, Homo sapiens
  misc_RNA (1)...(19): siRNA sense strand
gcugcugcuucauggauuu

SEQ ID NO: 1574990 - RNA, 19 nt, Homo sapiens
  misc_RNA (1)...(19): siRNA sense strand
gcucagcuguugaaaucca

SEQ ID NO: 1574991 - RNA, 19 nt, Homo sapiens
  misc_RNA (1)...(19): siRNA sense strand
ggguauagcaaauguguuc

SEQ ID NO: 1574992 - RNA, 19 nt, Homo sapiens
  misc_RNA (1)...(19): siRNA sense strand
agaaagaggcaaaccacuu

SEQ ID NO: 1574993 - RNA, 19 nt, Homo sapiens
  misc_RNA (1)...(19): siRNA sense strand
cuauguugcugcuggagaa

SEQ ID NO: 1574994 - RNA, 19 nt, Homo sapiens
  misc_RNA (1)...(19): siRNA sense strand
aaauggugaugaagcuuau

SEQ ID NO: 1574995 - RNA, 19 nt, Homo sapiens
  misc_RNA (1)...(19): siRNA sense strand
ccaauuaacaacagaggau

SEQ ID NO: 1574996 - RNA, 19 nt, Homo sapiens
  misc_RNA (1)...(19): siRNA sense strand
agcauuaaguggcccaauu

SEQ ID NO: 1574997 - RNA, 19 nt, Homo sapiens
  misc_RNA (1)...(19): siRNA sense strand
ccaacugagagaauuuaaa

SEQ ID NO: 1574998 - RNA, 19 nt, Homo sapiens
  misc_RNA (1)...(19): siRNA sense strand
cuguugaaauccaguuauu

SEQ ID NO: 1574999 - RNA, 19 nt, Homo sapiens
  misc_RNA (1)...(19): siRNA sense strand
gaaacagaugcucccauuc

SEQ ID NO: 1575000 - RNA, 19 nt, Homo sapiens
  misc_RNA (1)...(19): siRNA sense strand
ggugaugaagcuuauuguu

SEQ ID NO: 1575001 - RNA, 19 nt, Homo sapiens
  misc_RNA (1)...(19): siRNA sense strand
gaugccaauuaacaacaga

SEQ ID NO: 1575002 - RNA, 19 nt, Homo sapiens
  misc_RNA (1)...(19): siRNA sense strand
aaaggaugccaauuaacaa

SEQ ID NO: 1575003 - RNA, 19 nt, Homo sapiens
  misc_RNA (1)...(19): siRNA sense strand
gagguuauggagaaacaga

SEQ ID NO: 1575004 - RNA, 19 nt, Homo sapiens
  misc_RNA (1)...(19): siRNA sense strand
ccaugguucccagaauuua

SEQ ID NO: 1575005 - RNA, 19 nt, Homo sapiens
  misc_RNA (1)...(19): siRNA sense strand
ggcuaauugccaucuguua

SEQ ID NO: 1575006 - RNA, 19 nt, Homo sapiens
  misc_RNA (1)...(19): siRNA sense strand
gacauagugaacaaauuga

SEQ ID NO: 1575007 - RNA, 19 nt, Homo sapiens
  misc_RNA (1)...(19): siRNA sense strand
aaccugacauagugaacaa

SEQ ID NO: 1575008 - RNA, 19 nt, Homo sapiens
  misc_RNA (1)...(19): siRNA sense strand
ggaugccaauuaacaacag

SEQ ID NO: 1575009 - RNA, 19 nt, Homo sapiens
  misc_RNA (1)...(19): siRNA sense strand
ggucccuggucuacugcua

SEQ ID NO: 1575010 - RNA, 19 nt, Homo sapiens
  misc_RNA (1)...(19): siRNA sense strand
uaccaacugagagaauuua

SEQ ID NO: 1575011 - RNA, 19 nt, Homo sapiens
  misc_RNA (1)...(19): siRNA sense strand
aaaagugaauaucgaguug

SEQ ID NO: 1575012 - RNA, 19 nt, Homo sapiens
  misc_RNA (1)...(19): siRNA sense strand
cacuggauuugagagguua

SEQ ID NO: 1575013 - RNA, 19 nt, Homo sapiens
  misc_RNA (1)...(19): siRNA sense strand
cugacauagugaacaaauu

SEQ ID NO: 1575014 - RNA, 19 nt, Homo sapiens
  misc_RNA (1)...(19): siRNA sense strand
ggaucuugaagcuuauauu

SEQ ID NO: 1575015 - RNA, 19 nt, Homo sapiens
  misc_RNA (1)...(19): siRNA sense strand
ugccaucuguuauccugaa

SEQ ID NO: 1575016 - RNA, 19 nt, Homo sapiens
  misc_RNA (1)...(19): siRNA sense strand
cuaauugccaucuguuauc

SEQ ID NO: 1575017 - RNA, 19 nt, Homo sapiens
  misc_RNA (1)...(19): siRNA sense strand
ggcaugauugcuuggcuaa

SEQ ID NO: 1575018 - RNA, 19 nt, Homo sapiens
  misc_RNA (1)...(19): siRNA sense strand
cagcaagaccaaccugaca

SEQ ID NO: 1575019 - RNA, 19 nt, Homo sapiens
  misc_RNA (1)...(19): siRNA sense strand
augauugcuuggcuaauug

SEQ ID NO: 1575020 - RNA, 19 nt, Homo sapiens
  misc_RNA (1)...(19): siRNA sense strand
guauagcaaauguguucuu

SEQ ID NO: 1575021 - RNA, 19 nt, Homo sapiens
  misc_RNA (1)...(19): siRNA sense strand
ccauccaccugcucaaacu

SEQ ID NO: 1575022 - RNA, 19 nt, Homo sapiens
  misc_RNA (1)...(19): siRNA sense strand
ugucagaagccagucauug

SEQ ID NO: 1575023 - RNA, 19 nt, Homo sapiens
  misc_RNA (1)...(19): siRNA sense strand
ucagcugccugccucucaa

SEQ ID NO: 1575024 - RNA, 19 nt, Homo sapiens
  misc_RNA (1)...(19): siRNA sense strand
gaggaucuugaagcuuaua

SEQ ID NO: 1575025 - RNA, 19 nt, Homo sapiens
  misc_RNA (1)...(19): siRNA sense strand
caaggauucaggguuaaga

SEQ ID NO: 1575026 - RNA, 19 nt, Homo sapiens
  misc_RNA (1)...(19): siRNA sense strand
ggauuugagagguuaugga

SEQ ID NO: 1575027 - RNA, 19 nt, Homo sapiens
  misc_RNA (1)...(19): siRNA sense strand
acgcauucauggagguuga

SEQ ID NO: 1575028 - RNA, 19 nt, Homo sapiens
  misc_RNA (1)...(19): siRNA sense strand
gccugccucucaaacauca

SEQ ID NO: 1575029 - RNA, 19 nt, Homo sapiens
  misc_RNA (1)...(19): siRNA sense strand
uuuaggguauagcaaaugu

SEQ ID NO: 1575030 - RNA, 19 nt, Homo sapiens
  misc_RNA (1)...(19): siRNA sense strand
gccaucuguuauccugaaa

SEQ ID NO: 1575031 - RNA, 19 nt, Homo sapiens
  misc_RNA (1)...(19): siRNA sense strand
gaccaaccugacauaguga

SEQ ID NO: 1575032 - RNA, 19 nt, Homo sapiens
  misc_RNA (1)...(19): siRNA sense strand
ucuggucccuggucuacug

SEQ ID NO: 1575033 - RNA, 19 nt, Homo sapiens
  misc_RNA (1)...(19): siRNA sense strand
cgaguuguagcacuggauu

SEQ ID NO: 1575034 - RNA, 19 nt, Homo sapiens
  misc_RNA (1)...(19): siRNA sense strand
auccugaaauggugaugaa

SEQ ID NO: 1575035 - RNA, 19 nt, Homo sapiens
  misc_RNA (1)...(19): siRNA sense strand
uuaccaacugagagaauuu

SEQ ID NO: 1575036 - RNA, 19 nt, Homo sapiens
  misc_RNA (1)...(19): siRNA sense strand
gucagaagccagucauugg

SEQ ID NO: 1575037 - RNA, 19 nt, Homo sapiens
  misc_RNA (1)...(19): siRNA sense strand
gaccacuccaacacuacua

SEQ ID NO: 1575038 - RNA, 19 nt, Homo sapiens
  misc_RNA (1)...(19): siRNA sense strand
gaagaaaaggaugccaauu

SEQ ID NO: 1575039 - RNA, 19 nt, Homo sapiens
  misc_RNA (1)...(19): siRNA sense strand
ggagaguccucagcacuuu

SEQ ID NO: 1575040 - RNA, 19 nt, Homo sapiens
  misc_RNA (1)...(19): siRNA sense strand
uuacagaccugccgugugu

SEQ ID NO: 1575041 - RNA, 19 nt, Homo sapiens
  misc_RNA (1)...(19): siRNA sense strand
gaacaacgcccugcacaag

SEQ ID NO: 1575042 - RNA, 19 nt, Homo sapiens
  misc_RNA (1)...(19): siRNA sense strand
gcugaaggcccacgucgua

SEQ ID NO: 1575043 - RNA, 19 nt, Homo sapiens
  misc_RNA (1)...(19): siRNA sense strand
ugacguguccuucgugaaa

SEQ ID NO: 1575044 - RNA, 19 nt, Homo sapiens
  misc_RNA (1)...(19): siRNA sense strand
uggaugggcuggagaacaa

SEQ ID NO: 1575045 - RNA, 19 nt, Homo sapiens
  misc_RNA (1)...(19): siRNA sense strand
gaggaaacgcugucacugu

SEQ ID NO: 1575046 - RNA, 19 nt, Homo sapiens
  misc_RNA (1)...(19): siRNA sense strand
acaacgcccugcacaagga

SEQ ID NO: 1575047 - RNA, 19 nt, Homo sapiens
  misc_RNA (1)...(19): siRNA sense strand
gagagcacauccgcaaguc

SEQ ID NO: 1575048 - RNA, 19 nt, Homo sapiens
  misc_RNA (1)...(19): siRNA sense strand
uccgagaggugcccuucuu

SEQ ID NO: 1575049 - RNA, 19 nt, Homo sapiens
  misc_RNA (1)...(19): siRNA sense strand
ccagguccuucuuguggau

SEQ ID NO: 1575050 - RNA, 19 nt, Homo sapiens
  misc_RNA (1)...(19): siRNA sense strand
guccucagcacuuuguuga

SEQ ID NO: 1575051 - RNA, 19 nt, Homo sapiens
  misc_RNA (1)...(19): siRNA sense strand
cgagagcacauccgcaagu

SEQ ID NO: 1575052 - RNA, 19 nt, Homo sapiens
  misc_RNA (1)...(19): siRNA sense strand
ugaaggcccacgucguaga

SEQ ID NO: 1575053 - RNA, 19 nt, Homo sapiens
  misc_RNA (1)...(19): siRNA sense strand
gagaguccucagcacuuug

SEQ ID NO: 1575054 - RNA, 19 nt, Homo sapiens
  misc_RNA (1)...(19): siRNA sense strand
gaaaacagcuccaucuuca

SEQ ID NO: 1575055 - RNA, 19 nt, Homo sapiens
  misc_RNA (1)...(19): siRNA sense strand
gcaggucgcucacaauuac

SEQ ID NO: 1575056 - RNA, 19 nt, Homo sapiens
  misc_RNA (1)...(19): siRNA sense strand
caaaggauccauuggguuu

SEQ ID NO: 1575057 - RNA, 19 nt, Homo sapiens
  misc_RNA (1)...(19): siRNA sense strand
gaagaucacagccaccaaa

SEQ ID NO: 1575058 - RNA, 19 nt, Homo sapiens
  misc_RNA (1)...(19): siRNA sense strand
gcucaaccaucacagaaga

SEQ ID NO: 1575059 - RNA, 19 nt, Homo sapiens
  misc_RNA (1)...(19): siRNA sense strand
cagaaggcaugaaggguaa

SEQ ID NO: 1575060 - RNA, 19 nt, Homo sapiens
  misc_RNA (1)...(19): siRNA sense strand
gaacggggcucccuggaaa

SEQ ID NO: 1575061 - RNA, 19 nt, Homo sapiens
  misc_RNA (1)...(19): siRNA sense strand
gaucggaagccucaaagaa

SEQ ID NO: 1575062 - RNA, 19 nt, Homo sapiens
  misc_RNA (1)...(19): siRNA sense strand
gggcaaagucggagacaaa

SEQ ID NO: 1575063 - RNA, 19 nt, Homo sapiens
  misc_RNA (1)...(19): siRNA sense strand
cagucgggcuucaucuuua

SEQ ID NO: 1575064 - RNA, 19 nt, Homo sapiens
  misc_RNA (1)...(19): siRNA sense strand
gaaccaugccuuccucuuc

SEQ ID NO: 1575065 - RNA, 19 nt, Homo sapiens
  misc_RNA (1)...(19): siRNA sense strand
acagcuccaucuucauuua

SEQ ID NO: 1575066 - RNA, 19 nt, Homo sapiens
  misc_RNA (1)...(19): siRNA sense strand
aaacagcuccaucuucauu

SEQ ID NO: 1575067 - RNA, 19 nt, Homo sapiens
  misc_RNA (1)...(19): siRNA sense strand
ccagggcucucaccaggaa

SEQ ID NO: 1575068 - RNA, 19 nt, Homo sapiens
  misc_RNA (1)...(19): siRNA sense strand
ggagacaaaggauccauug

SEQ ID NO: 1575069 - RNA, 19 nt, Homo sapiens
  misc_RNA (1)...(19): siRNA sense strand
ggacugaggccaagauaac

SEQ ID NO: 1575070 - RNA, 19 nt, Homo sapiens
  misc_RNA (1)...(19): siRNA sense strand
gccagggucugauggagaa

SEQ ID NO: 1575071 - RNA, 19 nt, Homo sapiens
  misc_RNA (1)...(19): siRNA sense strand
caacagcugcccaucauca

SEQ ID NO: 1575072 - RNA, 19 nt, Homo sapiens
  misc_RNA (1)...(19): siRNA sense strand
gggacuggcugguuaugau

SEQ ID NO: 1575073 - RNA, 19 nt, Homo sapiens
  misc_RNA (1)...(19): siRNA sense strand
ggauuuaugggauucauug

SEQ ID NO: 1575074 - RNA, 19 nt, Homo sapiens
  misc_RNA (1)...(19): siRNA sense strand
gaaaggugauaagggugaa

SEQ ID NO: 1575075 - RNA, 19 nt, Homo sapiens
  misc_RNA (1)...(19): siRNA sense strand
uggagaacauggcgagaaa

SEQ ID NO: 1575076 - RNA, 19 nt, Homo sapiens
  misc_RNA (1)...(19): siRNA sense strand
ugacgcaggucgcucacaa

SEQ ID NO: 1575077 - RNA, 19 nt, Homo sapiens
  misc_RNA (1)...(19): siRNA sense strand
ggccuggaauggacagauu

SEQ ID NO: 1575078 - RNA, 19 nt, Homo sapiens
  misc_RNA (1)...(19): siRNA sense strand
caaagucggagacaaagga

SEQ ID NO: 1575079 - RNA, 19 nt, Homo sapiens
  misc_RNA (1)...(19): siRNA sense strand
gaggagagaucuuuaaaac

SEQ ID NO: 1575080 - RNA, 19 nt, Homo sapiens
  misc_RNA (1)...(19): siRNA sense strand
uaaccagccaugccaguaa

SEQ ID NO: 1575081 - RNA, 19 nt, Homo sapiens
  misc_RNA (1)...(19): siRNA sense strand
gggaggagagaucuuuaaa

SEQ ID NO: 1575082 - RNA, 19 nt, Homo sapiens
  misc_RNA (1)...(19): siRNA sense strand
ggccagagaguuacagcua

SEQ ID NO: 1575083 - RNA, 19 nt, Homo sapiens
  misc_RNA (1)...(19): siRNA sense strand
ccucauuggugacuuagga

SEQ ID NO: 1575084 - RNA, 19 nt, Homo sapiens
  misc_RNA (1)...(19): siRNA sense strand
gugcaaggccuccguggaa

SEQ ID NO: 1575085 - RNA, 19 nt, Homo sapiens
  misc_RNA (1)...(19): siRNA sense strand
ccagagaguuacagcuauc

SEQ ID NO: 1575086 - RNA, 19 nt, Homo sapiens
  misc_RNA (1)...(19): siRNA sense strand
ggagagaucuuuaaaaccu

SEQ ID NO: 1575087 - RNA, 19 nt, Homo sapiens
  misc_RNA (1)...(19): siRNA sense strand
caccagcacucccagaaca

SEQ ID NO: 1575088 - RNA, 19 nt, Homo sapiens
  misc_RNA (1)...(19): siRNA sense strand
cggccucauuggugacuua

SEQ ID NO: 1575089 - RNA, 19 nt, Homo sapiens
  misc_RNA (1)...(19): siRNA sense strand
gccagagaguuacagcuau

SEQ ID NO: 1575090 - RNA, 19 nt, Homo sapiens
  misc_RNA (1)...(19): siRNA sense strand
gcagggauuuaugggauuc

SEQ ID NO: 1575091 - RNA, 19 nt, Homo sapiens
  misc_RNA (1)...(19): siRNA sense strand
guuggcggcucuaccagaa

SEQ ID NO: 1575092 - RNA, 19 nt, Homo sapiens
  misc_RNA (1)...(19): siRNA sense strand
caucuucauuuacaaaguc

SEQ ID NO: 1575093 - RNA, 19 nt, Homo sapiens
  misc_RNA (1)...(19): siRNA sense strand
ggagagcagggauuuaugg

SEQ ID NO: 1575094 - RNA, 19 nt, Homo sapiens
  misc_RNA (1)...(19): siRNA sense strand
ccagucgggcuucaucuuu

SEQ ID NO: 1575095 - RNA, 19 nt, Homo sapiens
  misc_RNA (1)...(19): siRNA sense strand
gaggugacccagcacauca

SEQ ID NO: 1575096 - RNA, 19 nt, Homo sapiens
  misc_RNA (1)...(19): siRNA sense strand
guggacaggcugacacgua

SEQ ID NO: 1575097 - RNA, 19 nt, Homo sapiens
  misc_RNA (1)...(19): siRNA sense strand
gaagcaguaccgccuggaa

SEQ ID NO: 1575098 - RNA, 19 nt, Homo sapiens
  misc_RNA (1)...(19): siRNA sense strand
ucucuucuccuggaucuua

SEQ ID NO: 1575099 - RNA, 19 nt, Homo sapiens
  misc_RNA (1)...(19): siRNA sense strand
ccaaaagccucccuaccaa

SEQ ID NO: 1575100 - RNA, 19 nt, Homo sapiens
  misc_RNA (1)...(19): siRNA sense strand
cacaaacccucaccagcau

SEQ ID NO: 1575101 - RNA, 19 nt, Homo sapiens
  misc_RNA (1)...(19): siRNA sense strand
ccaucgaggucuccugcaa

SEQ ID NO: 1575102 - RNA, 19 nt, Homo sapiens
  misc_RNA (1)...(19): siRNA sense strand
ccuacuggguggauccaaa

SEQ ID NO: 1575103 - RNA, 19 nt, Homo sapiens
  misc_RNA (1)...(19): siRNA sense strand
ccagggaggagagaucuuu

SEQ ID NO: 1575104 - RNA, 19 nt, Homo sapiens
  misc_RNA (1)...(19): siRNA sense strand
cagaagaugguggauggua

SEQ ID NO: 1575105 - RNA, 19 nt, Homo sapiens
  misc_RNA (1)...(19): siRNA sense strand
cgaggucuccugcaacuuc

SEQ ID NO: 1575106 - RNA, 19 nt, Homo sapiens
  misc_RNA (1)...(19): siRNA sense strand
guacccaccugaggaagca

SEQ ID NO: 1575107 - RNA, 19 nt, Homo sapiens
  misc_RNA (1)...(19): siRNA sense strand
ggugcucucugccaguuca

SEQ ID NO: 1575108 - RNA, 19 nt, Homo sapiens
  misc_RNA (1)...(19): siRNA sense strand
cgcaugcaguccaguuuga

SEQ ID NO: 1575109 - RNA, 19 nt, Homo sapiens
  misc_RNA (1)...(19): siRNA sense strand
cccaacagcugcccaucau

SEQ ID NO: 1575110 - RNA, 19 nt, Homo sapiens
  misc_RNA (1)...(19): siRNA sense strand
aaccucauccagagcauua

SEQ ID NO: 1575111 - RNA, 19 nt, Homo sapiens
  misc_RNA (1)...(19): siRNA sense strand
uggagacauuggcuucaaa

SEQ ID NO: 1575112 - RNA, 19 nt, Homo sapiens
  misc_RNA (1)...(19): siRNA sense strand
ggacuggcugguuaugaug

SEQ ID NO: 1575113 - RNA, 19 nt, Homo sapiens
  misc_RNA (1)...(19): siRNA sense strand
ccaggaaucgugggagaaa

SEQ ID NO: 1575114 - RNA, 19 nt, Homo sapiens
  misc_RNA (1)...(19): siRNA sense strand
uucaguaucuacccuguga

SEQ ID NO: 1575115 - RNA, 19 nt, Homo sapiens
  misc_RNA (1)...(19): siRNA sense strand
ucggaagccucaaagaaag

SEQ ID NO: 1575116 - RNA, 19 nt, Homo sapiens
  misc_RNA (1)...(19): siRNA sense strand
agaagcccauccagaggaa

SEQ ID NO: 1575117 - RNA, 19 nt, Homo sapiens
  misc_RNA (1)...(19): siRNA sense strand
gaggucuccugcaacuuca

SEQ ID NO: 1575118 - RNA, 19 nt, Homo sapiens
  misc_RNA (1)...(19): siRNA sense strand
caagggugagaguggguua

SEQ ID NO: 1575119 - RNA, 19 nt, Homo sapiens
  misc_RNA (1)...(19): siRNA sense strand
uggaaauccuggagaacug

SEQ ID NO: 1575120 - RNA, 19 nt, Homo sapiens
  misc_RNA (1)...(19): siRNA sense strand
gcucucugccaguucagua

SEQ ID NO: 1575121 - RNA, 19 nt, Homo sapiens
  misc_RNA (1)...(19): siRNA sense strand
gcaguaccgccuggaaguu

SEQ ID NO: 1575122 - RNA, 19 nt, Homo sapiens
  misc_RNA (1)...(19): siRNA sense strand
ggacugaaaggugauaagg

SEQ ID NO: 1575123 - RNA, 19 nt, Homo sapiens
  misc_RNA (1)...(19): siRNA sense strand
caaacccucaccagcauau

SEQ ID NO: 1575124 - RNA, 19 nt, Homo sapiens
  misc_RNA (1)...(19): siRNA sense strand
gaucacagccaccaaaauc

SEQ ID NO: 1575125 - RNA, 19 nt, Homo sapiens
  misc_RNA (1)...(19): siRNA sense strand
gaauuuccugcaccugcua

SEQ ID NO: 1575126 - RNA, 19 nt, Homo sapiens
  misc_RNA (1)...(19): siRNA sense strand
gagaacauggcgagaaagg

SEQ ID NO: 1575127 - RNA, 19 nt, Homo sapiens
  misc_RNA (1)...(19): siRNA sense strand
gaagaugaacccgcaugca

SEQ ID NO: 1575128 - RNA, 19 nt, Homo sapiens
  misc_RNA (1)...(19): siRNA sense strand
ggagcacucaggccagaga

SEQ ID NO: 1575129 - RNA, 19 nt, Homo sapiens
  misc_RNA (1)...(19): siRNA sense strand
gggcaugaagggacugaug

SEQ ID NO: 1575130 - RNA, 19 nt, Homo sapiens
  misc_RNA (1)...(19): siRNA sense strand
cagaagcaagugccaccua

SEQ ID NO: 1575131 - RNA, 19 nt, Homo sapiens
  misc_RNA (1)...(19): siRNA sense strand
gcuccaucuucauuuacaa

SEQ ID NO: 1575132 - RNA, 19 nt, Homo sapiens
  misc_RNA (1)...(19): siRNA sense strand
gccaguaacgcacuugauc

SEQ ID NO: 1575133 - RNA, 19 nt, Homo sapiens
  misc_RNA (1)...(19): siRNA sense strand
ccucaucagggaagcagua

SEQ ID NO: 1575134 - RNA, 19 nt, Homo sapiens
  misc_RNA (1)...(19): siRNA sense strand
cagggaggagagaucuuua

SEQ ID NO: 1575135 - RNA, 19 nt, Homo sapiens
  misc_RNA (1)...(19): siRNA sense strand
ggcaggaucuacgccuuuc

SEQ ID NO: 1575136 - RNA, 19 nt, Homo sapiens
  misc_RNA (1)...(19): siRNA sense strand
agucagcccuacccacuca

SEQ ID NO: 1575137 - RNA, 19 nt, Homo sapiens
  misc_RNA (1)...(19): siRNA sense strand
ggaaggcagccagggaugu

SEQ ID NO: 1575138 - RNA, 19 nt, Homo sapiens
  misc_RNA (1)...(19): siRNA sense strand
ggaccagggaggagagauc

SEQ ID NO: 1575139 - RNA, 19 nt, Homo sapiens
  misc_RNA (1)...(19): siRNA sense strand
cagagggaccaaagggaaa

SEQ ID NO: 1575140 - RNA, 19 nt, Homo sapiens
  misc_RNA (1)...(19): siRNA sense strand
aaggacagcugggugagau

SEQ ID NO: 1575141 - RNA, 19 nt, Homo sapiens
  misc_RNA (1)...(19): siRNA sense strand
uggcgacaauggcccagaa

SEQ ID NO: 1575142 - RNA, 19 nt, Homo sapiens
  misc_RNA (1)...(19): siRNA sense strand
cuccuggacuggauggaaa

SEQ ID NO: 1575143 - RNA, 19 nt, Homo sapiens
  misc_RNA (1)...(19): siRNA sense strand
uaccugggcuaccuggaau

SEQ ID NO: 1575144 - RNA, 19 nt, Homo sapiens
  misc_RNA (1)...(19): siRNA sense strand
gaaggcagccagggauguc

SEQ ID NO: 1575145 - RNA, 19 nt, Homo sapiens
  misc_RNA (1)...(19): siRNA sense strand
caccuggcuugaugggaaa

SEQ ID NO: 1575146 - RNA, 19 nt, Homo sapiens
  misc_RNA (1)...(19): siRNA sense strand
ggagacauuggcuucaaag

SEQ ID NO: 1575147 - RNA, 19 nt, Homo sapiens
  misc_RNA (1)...(19): siRNA sense strand
ggaguguuggguccgauug

SEQ ID NO: 1575148 - RNA, 19 nt, Homo sapiens
  misc_RNA (1)...(19): siRNA sense strand
gcaaggccuccguggaaag

SEQ ID NO: 1575149 - RNA, 19 nt, Homo sapiens
  misc_RNA (1)...(19): siRNA sense strand
ucagccggguccagaugaa

SEQ ID NO: 1575150 - RNA, 19 nt, Homo sapiens
  misc_RNA (1)...(19): siRNA sense strand
ccuccaaggucgaguuugc

SEQ ID NO: 1575151 - RNA, 19 nt, Homo sapiens
  misc_RNA (1)...(19): siRNA sense strand
cgcaggucgcucacaauua

SEQ ID NO: 1575152 - RNA, 19 nt, Homo sapiens
  misc_RNA (1)...(19): siRNA sense strand
ggacugugagcagaagaug

SEQ ID NO: 1575153 - RNA, 19 nt, Homo sapiens
  misc_RNA (1)...(19): siRNA sense strand
ggaggagagaucuuuaaaa

SEQ ID NO: 1575154 - RNA, 19 nt, Homo sapiens
  misc_RNA (1)...(19): siRNA sense strand
gaucaugaccaccuacuau

SEQ ID NO: 1575155 - RNA, 19 nt, Homo sapiens
  misc_RNA (1)...(19): siRNA sense strand
ggcagacccugaagacuca

SEQ ID NO: 1575156 - RNA, 19 nt, Homo sapiens
  misc_RNA (1)...(19): siRNA sense strand
guacuucugccucuggauu

SEQ ID NO: 1575157 - RNA, 19 nt, Homo sapiens
  misc_RNA (1)...(19): siRNA sense strand
ccuaugggcugauccugau

SEQ ID NO: 1575158 - RNA, 19 nt, Homo sapiens
  misc_RNA (1)...(19): siRNA sense strand
ucgcugcccuggucaagug

SEQ ID NO: 1575159 - RNA, 19 nt, Homo sapiens
  misc_RNA (1)...(19): siRNA sense strand
cagcaccucgagccggaua

SEQ ID NO: 1575160 - RNA, 19 nt, Homo sapiens
  misc_RNA (1)...(19): siRNA sense strand
gcaagaaacucacacagaa

SEQ ID NO: 1575161 - RNA, 19 nt, Homo sapiens
  misc_RNA (1)...(19): siRNA sense strand
agacagaaauggaguauug

SEQ ID NO: 1575162 - RNA, 19 nt, Homo sapiens
  misc_RNA (1)...(19): siRNA sense strand
ccagggaucucacaaugua

SEQ ID NO: 1575163 - RNA, 19 nt, Homo sapiens
  misc_RNA (1)...(19): siRNA sense strand
aaagaaagcugcagagauc

SEQ ID NO: 1575164 - RNA, 19 nt, Homo sapiens
  misc_RNA (1)...(19): siRNA sense strand
gaauaaagaaggagagaaa

SEQ ID NO: 1575165 - RNA, 19 nt, Homo sapiens
  misc_RNA (1)...(19): siRNA sense strand
ggccaaaggucaagcauau

SEQ ID NO: 1575166 - RNA, 19 nt, Homo sapiens
  misc_RNA (1)...(19): siRNA sense strand
cgacacagaugagaaccua

SEQ ID NO: 1575167 - RNA, 19 nt, Homo sapiens
  misc_RNA (1)...(19): siRNA sense strand
ccaaaggucaagcauauuu

SEQ ID NO: 1575168 - RNA, 19 nt, Homo sapiens
  misc_RNA (1)...(19): siRNA sense strand
cagacuggaucucuucuaa

SEQ ID NO: 1575169 - RNA, 19 nt, Homo sapiens
  misc_RNA (1)...(19): siRNA sense strand
agaaagaccucagagauag

SEQ ID NO: 1575170 - RNA, 19 nt, Homo sapiens
  misc_RNA (1)...(19): siRNA sense strand
ccaggaagcugugccaaug

SEQ ID NO: 1575171 - RNA, 19 nt, Homo sapiens
  misc_RNA (1)...(19): siRNA sense strand
caagaaagaccucagagau

SEQ ID NO: 1575172 - RNA, 19 nt, Homo sapiens
  misc_RNA (1)...(19): siRNA sense strand
caguggaguugccauuaua

SEQ ID NO: 1575173 - RNA, 19 nt, Homo sapiens
  misc_RNA (1)...(19): siRNA sense strand
aagaaagaccucagagaua

SEQ ID NO: 1575174 - RNA, 19 nt, Homo sapiens
  misc_RNA (1)...(19): siRNA sense strand
gacaagaugcugccaauuc

SEQ ID NO: 1575175 - RNA, 19 nt, Homo sapiens
  misc_RNA (1)...(19): siRNA sense strand
gagaagagacagaaaugga

SEQ ID NO: 1575176 - RNA, 19 nt, Homo sapiens
  misc_RNA (1)...(19): siRNA sense strand
ggacaacauucauucaaaa

SEQ ID NO: 1575177 - RNA, 19 nt, Homo sapiens
  misc_RNA (1)...(19): siRNA sense strand
ggaguugccauuauaguau

SEQ ID NO: 1575178 - RNA, 19 nt, Homo sapiens
  misc_RNA (1)...(19): siRNA sense strand
gaugagaaccuagagaaga

SEQ ID NO: 1575179 - RNA, 19 nt, Homo sapiens
  misc_RNA (1)...(19): siRNA sense strand
cugcagagaucacuguuau

SEQ ID NO: 1575180 - RNA, 19 nt, Homo sapiens
  misc_RNA (1)...(19): siRNA sense strand
gaagucccauguccuuauc

SEQ ID NO: 1575181 - RNA, 19 nt, Homo sapiens
  misc_RNA (1)...(19): siRNA sense strand
ccagaagguuggacaagau

SEQ ID NO: 1575182 - RNA, 19 nt, Homo sapiens
  misc_RNA (1)...(19): siRNA sense strand
acaagaugcugccaauuca

SEQ ID NO: 1575183 - RNA, 19 nt, Homo sapiens
  misc_RNA (1)...(19): siRNA sense strand
gaguugccauuauaguauu

SEQ ID NO: 1575184 - RNA, 19 nt, Homo sapiens
  misc_RNA (1)...(19): siRNA sense strand
caagaaacucacacagaaa

SEQ ID NO: 1575185 - RNA, 19 nt, Homo sapiens
  misc_RNA (1)...(19): siRNA sense strand
caacaagaaagaccucaga

SEQ ID NO: 1575186 - RNA, 19 nt, Homo sapiens
  misc_RNA (1)...(19): siRNA sense strand
caaagaaagcugcagagau

SEQ ID NO: 1575187 - RNA, 19 nt, Homo sapiens
  misc_RNA (1)...(19): siRNA sense strand
ugagaagcaucagagaauu

SEQ ID NO: 1575188 - RNA, 19 nt, Homo sapiens
  misc_RNA (1)...(19): siRNA sense strand
gagaagcaucagagaauug

SEQ ID NO: 1575189 - RNA, 19 nt, Homo sapiens
  misc_RNA (1)...(19): siRNA sense strand
uaccagggaucucacaaug

SEQ ID NO: 1575190 - RNA, 19 nt, Homo sapiens
  misc_RNA (1)...(19): siRNA sense strand
ucaguggaguugccauuau

SEQ ID NO: 1575191 - RNA, 19 nt, Homo sapiens
  misc_RNA (1)...(19): siRNA sense strand
ggagagaaaacuacaagua

SEQ ID NO: 1575192 - RNA, 19 nt, Homo sapiens
  misc_RNA (1)...(19): siRNA sense strand
gaagaaccugagaaucauu

SEQ ID NO: 1575193 - RNA, 19 nt, Homo sapiens
  misc_RNA (1)...(19): siRNA sense strand
ugaagaaccugagaaucau

SEQ ID NO: 1575194 - RNA, 19 nt, Homo sapiens
  misc_RNA (1)...(19): siRNA sense strand
gugagaagcaucagagaau

SEQ ID NO: 1575195 - RNA, 19 nt, Homo sapiens
  misc_RNA (1)...(19): siRNA sense strand
gacuggaucucuucuaaaa

SEQ ID NO: 1575196 - RNA, 19 nt, Homo sapiens
  misc_RNA (1)...(19): siRNA sense strand
ggucuucagccuaaucauu

SEQ ID NO: 1575197 - RNA, 19 nt, Homo sapiens
  misc_RNA (1)...(19): siRNA sense strand
caucagagaauugcaaaug

SEQ ID NO: 1575198 - RNA, 19 nt, Homo sapiens
  misc_RNA (1)...(19): siRNA sense strand
aggacaacauucauucaaa

SEQ ID NO: 1575199 - RNA, 19 nt, Homo sapiens
  misc_RNA (1)...(19): siRNA sense strand
cagaugagaaccuagagaa

SEQ ID NO: 1575200 - RNA, 19 nt, Homo sapiens
  misc_RNA (1)...(19): siRNA sense strand
uugaagaaccugagaauca

SEQ ID NO: 1575201 - RNA, 19 nt, Homo sapiens
  misc_RNA (1)...(19): siRNA sense strand
ccuaaucauugcauccuau

SEQ ID NO: 1575202 - RNA, 19 nt, Homo sapiens
  misc_RNA (1)...(19): siRNA sense strand
ccuaugaugccaacaagaa

SEQ ID NO: 1575203 - RNA, 19 nt, Homo sapiens
  misc_RNA (1)...(19): siRNA sense strand
cuauaacuccugggaauaa

SEQ ID NO: 1575204 - RNA, 19 nt, Homo sapiens
  misc_RNA (1)...(19): siRNA sense strand
agucaaccuuguauauuug

SEQ ID NO: 1575205 - RNA, 19 nt, Homo sapiens
  misc_RNA (1)...(19): siRNA sense strand
gcucugacagcaaaguaaa

SEQ ID NO: 1575206 - RNA, 19 nt, Homo sapiens
  misc_RNA (1)...(19): siRNA sense strand
uauaacuccugggaauaaa

SEQ ID NO: 1575207 - RNA, 19 nt, Homo sapiens
  misc_RNA (1)...(19): siRNA sense strand
ggaauaaagaaggagagaa

SEQ ID NO: 1575208 - RNA, 19 nt, Homo sapiens
  misc_RNA (1)...(19): siRNA sense strand
caaguaccgacacagauga

SEQ ID NO: 1575209 - RNA, 19 nt, Homo sapiens
  misc_RNA (1)...(19): siRNA sense strand
gaacagcugccugggaucu

SEQ ID NO: 1575210 - RNA, 19 nt, Homo sapiens
  misc_RNA (1)...(19): siRNA sense strand
cuacaaguaccgacacaga

SEQ ID NO: 1575211 - RNA, 19 nt, Homo sapiens
  misc_RNA (1)...(19): siRNA sense strand
ggacaagaugcugccaauu

SEQ ID NO: 1575212 - RNA, 19 nt, Homo sapiens
  misc_RNA (1)...(19): siRNA sense strand
ccaaagaaagcugcagaga

SEQ ID NO: 1575213 - RNA, 19 nt, Homo sapiens
  misc_RNA (1)...(19): siRNA sense strand
uaacuccugggaauaaaga

SEQ ID NO: 1575214 - RNA, 19 nt, Homo sapiens
  misc_RNA (1)...(19): siRNA sense strand
aauccaagccugacucuca

SEQ ID NO: 1575215 - RNA, 19 nt, Homo sapiens
  misc_RNA (1)...(19): siRNA sense strand
uggaguugccauuauagua

SEQ ID NO: 1575216 - RNA, 19 nt, Homo sapiens
  misc_RNA (1)...(19): siRNA sense strand
uagagaagagacagaaaug

SEQ ID NO: 1575217 - RNA, 19 nt, Homo sapiens
  misc_RNA (1)...(19): siRNA sense strand
gaucucacaauguaaaguc

SEQ ID NO: 1575218 - RNA, 19 nt, Homo sapiens
  misc_RNA (1)...(19): siRNA sense strand
caucaaacccaaagaaagc

SEQ ID NO: 1575219 - RNA, 19 nt, Homo sapiens
  misc_RNA (1)...(19): siRNA sense strand
guaccgacacagaugagaa

SEQ ID NO: 1575220 - RNA, 19 nt, Homo sapiens
  misc_RNA (1)...(19): siRNA sense strand
uccucaagcugucaccuaa

SEQ ID NO: 1575221 - RNA, 19 nt, Homo sapiens
  misc_RNA (1)...(19): siRNA sense strand
gcagagaucacuguuaucc

SEQ ID NO: 1575222 - RNA, 19 nt, Homo sapiens
  misc_RNA (1)...(19): siRNA sense strand
gcugcagagaucacuguua

SEQ ID NO: 1575223 - RNA, 19 nt, Homo sapiens
  misc_RNA (1)...(19): siRNA sense strand
cccagaagguuggacaaga

SEQ ID NO: 1575224 - RNA, 19 nt, Homo sapiens
  misc_RNA (1)...(19): siRNA sense strand
ugaagucccauguccuuau

SEQ ID NO: 1575225 - RNA, 19 nt, Homo sapiens
  misc_RNA (1)...(19): siRNA sense strand
caaaaggacaacauucauu

SEQ ID NO: 1575226 - RNA, 19 nt, Homo sapiens
  misc_RNA (1)...(19): siRNA sense strand
uggacaagaugcugccaau

SEQ ID NO: 1575227 - RNA, 19 nt, Homo sapiens
  misc_RNA (1)...(19): siRNA sense strand
acacagaugagaaccuaga

SEQ ID NO: 1575228 - RNA, 19 nt, Homo sapiens
  misc_RNA (1)...(19): siRNA sense strand
ccuuggcucugacagcaaa

SEQ ID NO: 1575229 - RNA, 19 nt, Homo sapiens
  misc_RNA (1)...(19): siRNA sense strand
acaagaaagaccucagaga

SEQ ID NO: 1575230 - RNA, 19 nt, Homo sapiens
  misc_RNA (1)...(19): siRNA sense strand
ggaguauuguggucaaaau

SEQ ID NO: 1575231 - RNA, 19 nt, Homo sapiens
  misc_RNA (1)...(19): siRNA sense strand
cuagagaagagacagaaau

SEQ ID NO: 1575232 - RNA, 19 nt, Homo sapiens
  misc_RNA (1)...(19): siRNA sense strand
gggcuucaucagagacuuu

SEQ ID NO: 1575233 - RNA, 19 nt, Homo sapiens
  misc_RNA (1)...(19): siRNA sense strand
gccuaaucauugcauccua

SEQ ID NO: 1575234 - RNA, 19 nt, Homo sapiens
  misc_RNA (1)...(19): siRNA sense strand
acaaguaccgacacagaug

SEQ ID NO: 1575235 - RNA, 19 nt, Homo sapiens
  misc_RNA (1)...(19): siRNA sense strand
gcucaguggaguugccauu

SEQ ID NO: 1575236 - RNA, 19 nt, Homo sapiens
  misc_RNA (1)...(19): siRNA sense strand
gaaacucacacagaaacca

SEQ ID NO: 1575237 - RNA, 19 nt, Homo sapiens
  misc_RNA (1)...(19): siRNA sense strand
gucuucagccuaaucauug

SEQ ID NO: 1575238 - RNA, 19 nt, Homo sapiens
  misc_RNA (1)...(19): siRNA sense strand
ccaauucaucaaacccaaa

SEQ ID NO: 1575239 - RNA, 19 nt, Homo sapiens
  misc_RNA (1)...(19): siRNA sense strand
caaaugcaagaaacucaca

SEQ ID NO: 1575240 - RNA, 19 nt, Homo sapiens
  misc_RNA (1)...(19): siRNA sense strand
caaaagacgugagaagcau

SEQ ID NO: 1575241 - RNA, 19 nt, Homo sapiens
  misc_RNA (1)...(19): siRNA sense strand
ucccauguccuuaucaaug

SEQ ID NO: 1575242 - RNA, 19 nt, Homo sapiens
  misc_RNA (1)...(19): siRNA sense strand
ugauugcugucacccuguu

SEQ ID NO: 1575243 - RNA, 19 nt, Homo sapiens
  misc_RNA (1)...(19): siRNA sense strand
ugcaagaaacucacacaga

SEQ ID NO: 1575244 - RNA, 19 nt, Homo sapiens
  misc_RNA (1)...(19): siRNA sense strand
gggaauaaagaaggagaga

SEQ ID NO: 1575245 - RNA, 19 nt, Homo sapiens
  misc_RNA (1)...(19): siRNA sense strand
cucaagcugucaccuaauc

SEQ ID NO: 1575246 - RNA, 19 nt, Homo sapiens
  misc_RNA (1)...(19): siRNA sense strand
gaccucagagauagcaguu

SEQ ID NO: 1575247 - RNA, 19 nt, Homo sapiens
  misc_RNA (1)...(19): siRNA sense strand
gccagugguuguggagaug

SEQ ID NO: 1575248 - RNA, 19 nt, Homo sapiens
  misc_RNA (1)...(19): siRNA sense strand
ccuuguauauuuggagaga

SEQ ID NO: 1575249 - RNA, 19 nt, Homo sapiens
  misc_RNA (1)...(19): siRNA sense strand
guaaaagucaaccuuguau

SEQ ID NO: 1575250 - RNA, 19 nt, Homo sapiens
  misc_RNA (1)...(19): siRNA sense strand
gaaggccaaaggucaagca

SEQ ID NO: 1575251 - RNA, 19 nt, Homo sapiens
  misc_RNA (1)...(19): siRNA sense strand
aaacucacacagaaaccaa

SEQ ID NO: 1575252 - RNA, 19 nt, Homo sapiens
  misc_RNA (1)...(19): siRNA sense strand
ucuauaacuccugggaaua

SEQ ID NO: 1575253 - RNA, 19 nt, Homo sapiens
  misc_RNA (1)...(19): siRNA sense strand
agagaaggccaaaggucaa

SEQ ID NO: 1575254 - RNA, 19 nt, Homo sapiens
  misc_RNA (1)...(19): siRNA sense strand
aaaggacaacauucauuca

SEQ ID NO: 1575255 - RNA, 19 nt, Homo sapiens
  misc_RNA (1)...(19): siRNA sense strand
agacuggaucucuucuaaa

SEQ ID NO: 1575256 - RNA, 19 nt, Homo sapiens
  misc_RNA (1)...(19): siRNA sense strand
caaaaccggacuauagcua

SEQ ID NO: 1575257 - RNA, 19 nt, Homo sapiens
  misc_RNA (1)...(19): siRNA sense strand
ugcagugccuuggcucuga

SEQ ID NO: 1575258 - RNA, 19 nt, Homo sapiens
  misc_RNA (1)...(19): siRNA sense strand
cgugagaagcaucagagaa

SEQ ID NO: 1575259 - RNA, 19 nt, Homo sapiens
  misc_RNA (1)...(19): siRNA sense strand
ccagagagcuugcaucaca

SEQ ID NO: 1575260 - RNA, 19 nt, Homo sapiens
  misc_RNA (1)...(19): siRNA sense strand
ggaaauggcuaaagaaucc

SEQ ID NO: 1575261 - RNA, 19 nt, Homo sapiens
  misc_RNA (1)...(19): siRNA sense strand
gaugggaggugaucuuaga

SEQ ID NO: 1575262 - RNA, 19 nt, Homo sapiens
  misc_RNA (1)...(19): siRNA sense strand
ucaagaagcuguuggagau

SEQ ID NO: 1575263 - RNA, 19 nt, Homo sapiens
  misc_RNA (1)...(19): siRNA sense strand
ggagagaauuugacaaguc

SEQ ID NO: 1575264 - RNA, 19 nt, Homo sapiens
  misc_RNA (1)...(19): siRNA sense strand
ggaauguggugagcacuuu

SEQ ID NO: 1575265 - RNA, 19 nt, Homo sapiens
  misc_RNA (1)...(19): siRNA sense strand
uuacguggcuaucgucuuu

SEQ ID NO: 1575266 - RNA, 19 nt, Homo sapiens
  misc_RNA (1)...(19): siRNA sense strand
gcggauuucuggaauauuc

SEQ ID NO: 1575267 - RNA, 19 nt, Homo sapiens
  misc_RNA (1)...(19): siRNA sense strand
gaccugaucccguaugaaa

SEQ ID NO: 1575268 - RNA, 19 nt, Homo sapiens
  misc_RNA (1)...(19): siRNA sense strand
ccaaaugggucgcauggau

SEQ ID NO: 1575269 - RNA, 19 nt, Homo sapiens
  misc_RNA (1)...(19): siRNA sense strand
gacagacgaugauugacuu

SEQ ID NO: 1575270 - RNA, 19 nt, Homo sapiens
  misc_RNA (1)...(19): siRNA sense strand
caacagcuccuaccuugga

SEQ ID NO: 1575271 - RNA, 19 nt, Homo sapiens
  misc_RNA (1)...(19): siRNA sense strand
gauguucuuucccuucuug

SEQ ID NO: 1575272 - RNA, 19 nt, Homo sapiens
  misc_RNA (1)...(19): siRNA sense strand
ggaagccgaucugaguuga

SEQ ID NO: 1575273 - RNA, 19 nt, Homo sapiens
  misc_RNA (1)...(19): siRNA sense strand
caaggaagccgaucugagu

SEQ ID NO: 1575274 - RNA, 19 nt, Homo sapiens
  misc_RNA (1)...(19): siRNA sense strand
uaaaguggguuggauguca

SEQ ID NO: 1575275 - RNA, 19 nt, Homo sapiens
  misc_RNA (1)...(19): siRNA sense strand
gaugcggauuucuggaaua

SEQ ID NO: 1575276 - RNA, 19 nt, Homo sapiens
  misc_RNA (1)...(19): siRNA sense strand
cgucuuauuugaagucauu

SEQ ID NO: 1575277 - RNA, 19 nt, Homo sapiens
  misc_RNA (1)...(19): siRNA sense strand
ggugagcacuuugaggaaa

SEQ ID NO: 1575278 - RNA, 19 nt, Homo sapiens
  misc_RNA (1)...(19): siRNA sense strand
ucagacagacgaugauuga

SEQ ID NO: 1575279 - RNA, 19 nt, Homo sapiens
  misc_RNA (1)...(19): siRNA sense strand
uaccugaucuacccaaaug

SEQ ID NO: 1575280 - RNA, 19 nt, Homo sapiens
  misc_RNA (1)...(19): siRNA sense strand
ucgcuucccuugccugaaa

SEQ ID NO: 1575281 - RNA, 19 nt, Homo sapiens
  misc_RNA (1)...(19): siRNA sense strand
gaggaaauggcuaaagaau

SEQ ID NO: 1575282 - RNA, 19 nt, Homo sapiens
  misc_RNA (1)...(19): siRNA sense strand
caaaugggucgcauggauu

SEQ ID NO: 1575283 - RNA, 19 nt, Homo sapiens
  misc_RNA (1)...(19): siRNA sense strand
gaucugaguugagggguua

SEQ ID NO: 1575284 - RNA, 19 nt, Homo sapiens
  misc_RNA (1)...(19): siRNA sense strand
gaaacuguuccacacuuug

SEQ ID NO: 1575285 - RNA, 19 nt, Homo sapiens
  misc_RNA (1)...(19): siRNA sense strand
uugaggaaauggcuaaaga

SEQ ID NO: 1575286 - RNA, 19 nt, Homo sapiens
  misc_RNA (1)...(19): siRNA sense strand
acaacaagaugcggauuuc

SEQ ID NO: 1575287 - RNA, 19 nt, Homo sapiens
  misc_RNA (1)...(19): siRNA sense strand
cuucagucccuucguguua

SEQ ID NO: 1575288 - RNA, 19 nt, Homo sapiens
  misc_RNA (1)...(19): siRNA sense strand
auucagaaaucgugguuug

SEQ ID NO: 1575289 - RNA, 19 nt, Homo sapiens
  misc_RNA (1)...(19): siRNA sense strand
gcauuuacaaaggaguuua

SEQ ID NO: 1575290 - RNA, 19 nt, Homo sapiens
  misc_RNA (1)...(19): siRNA sense strand
ggugauguacuucuucuuc

SEQ ID NO: 1575291 - RNA, 19 nt, Homo sapiens
  misc_RNA (1)...(19): siRNA sense strand
ugaagucauugccggaugu

SEQ ID NO: 1575292 - RNA, 19 nt, Homo sapiens
  misc_RNA (1)...(19): siRNA sense strand
ugauugacuuccugcagaa

SEQ ID NO: 1575293 - RNA, 19 nt, Homo sapiens
  misc_RNA (1)...(19): siRNA sense strand
gagaauuugacaagucgaa

SEQ ID NO: 1575294 - RNA, 19 nt, Homo sapiens
  misc_RNA (1)...(19): siRNA sense strand
guacguucacaccuucuuu

SEQ ID NO: 1575295 - RNA, 19 nt, Homo sapiens
  misc_RNA (1)...(19): siRNA sense strand
aaacuguuccacacuuuga

SEQ ID NO: 1575296 - RNA, 19 nt, Homo sapiens
  misc_RNA (1)...(19): siRNA sense strand
gaagaaaauucagaaaucg

SEQ ID NO: 1575297 - RNA, 19 nt, Homo sapiens
  misc_RNA (1)...(19): siRNA sense strand
uggguuggaugucaaggaa

SEQ ID NO: 1575298 - RNA, 19 nt, Homo sapiens
  misc_RNA (1)...(19): siRNA sense strand
aaaguggguuggaugucaa

SEQ ID NO: 1575299 - RNA, 19 nt, Homo sapiens
  misc_RNA (1)...(19): siRNA sense strand
ggucgcauggauugauuaa

SEQ ID NO: 1575300 - RNA, 19 nt, Homo sapiens
  misc_RNA (1)...(19): siRNA sense strand
uguggaagaagcauaauau

SEQ ID NO: 1575301 - RNA, 19 nt, Homo sapiens
  misc_RNA (1)...(19): siRNA sense strand
gugagcacuuugaggaaau

SEQ ID NO: 1575302 - RNA, 19 nt, Homo sapiens
  misc_RNA (1)...(19): siRNA sense strand
ucgcauggauugauuaacg

SEQ ID NO: 1575303 - RNA, 19 nt, Homo sapiens
  misc_RNA (1)...(19): siRNA sense strand
ggacggggacaaagcauuu

SEQ ID NO: 1575304 - RNA, 19 nt, Homo sapiens
  misc_RNA (1)...(19): siRNA sense strand
acuacgacauccacuucua

SEQ ID NO: 1575305 - RNA, 19 nt, Homo sapiens
  misc_RNA (1)...(19): siRNA sense strand
cgagagcugcgaacaguca

SEQ ID NO: 1575306 - RNA, 19 nt, Homo sapiens
  misc_RNA (1)...(19): siRNA sense strand
gccacgugcucacauucuu

SEQ ID NO: 1575307 - RNA, 19 nt, Homo sapiens
  misc_RNA (1)...(19): siRNA sense strand
uagaccugaucccguauga

SEQ ID NO: 1575308 - RNA, 19 nt, Homo sapiens
  misc_RNA (1)...(19): siRNA sense strand
uuacaaaggaguuuacaac

SEQ ID NO: 1575309 - RNA, 19 nt, Homo sapiens
  misc_RNA (1)...(19): siRNA sense strand
ugacuacgacauccacuuc

SEQ ID NO: 1575310 - RNA, 19 nt, Homo sapiens
  misc_RNA (1)...(19): siRNA sense strand
ggacuuugugacugucuug

SEQ ID NO: 1575311 - RNA, 19 nt, Homo sapiens
  misc_RNA (1)...(19): siRNA sense strand
ggagucagggcuacacuac

SEQ ID NO: 1575312 - RNA, 19 nt, Homo sapiens
  misc_RNA (1)...(19): siRNA sense strand
gaacagucagacagacgau

SEQ ID NO: 1575313 - RNA, 19 nt, Homo sapiens
  misc_RNA (1)...(19): siRNA sense strand
ugaggaaauggcuaaagaa

SEQ ID NO: 1575314 - RNA, 19 nt, Homo sapiens
  misc_RNA (1)...(19): siRNA sense strand
guggcuaucgucuuugaaa

SEQ ID NO: 1575315 - RNA, 19 nt, Homo sapiens
  misc_RNA (1)...(19): siRNA sense strand
cauaaaguggguuggaugu

SEQ ID NO: 1575316 - RNA, 19 nt, Homo sapiens
  misc_RNA (1)...(19): siRNA sense strand
gcugugcugcagacaauga

SEQ ID NO: 1575317 - RNA, 19 nt, Homo sapiens
  misc_RNA (1)...(19): siRNA sense strand
ucagaaaucgugguuugga

SEQ ID NO: 1575318 - RNA, 19 nt, Homo sapiens
  misc_RNA (1)...(19): siRNA sense strand
ucauggugauguacuucuu

SEQ ID NO: 1575319 - RNA, 19 nt, Homo sapiens
  misc_RNA (1)...(19): siRNA sense strand
aggcugugcugcagacaau

SEQ ID NO: 1575320 - RNA, 19 nt, Homo sapiens
  misc_RNA (1)...(19): siRNA sense strand
gugauguucuuucccuucu

SEQ ID NO: 1575321 - RNA, 19 nt, Homo sapiens
  misc_RNA (1)...(19): siRNA sense strand
guuccacacuuugacuguu

SEQ ID NO: 1575322 - RNA, 19 nt, Homo sapiens
  misc_RNA (1)...(19): siRNA sense strand
cacauaaaguggguuggau

SEQ ID NO: 1575323 - RNA, 19 nt, Homo sapiens
  misc_RNA (1)...(19): siRNA sense strand
aaaugggucgcauggauug

SEQ ID NO: 1575324 - RNA, 19 nt, Homo sapiens
  misc_RNA (1)...(19): siRNA sense strand
guuuacaacuggagaaaau

SEQ ID NO: 1575325 - RNA, 19 nt, Homo sapiens
  misc_RNA (1)...(19): siRNA sense strand
gaauguggugagcacuuug

SEQ ID NO: 1575326 - RNA, 19 nt, Homo sapiens
  misc_RNA (1)...(19): siRNA sense strand
caacaacaagaugcggauu

SEQ ID NO: 1575327 - RNA, 19 nt, Homo sapiens
  misc_RNA (1)...(19): siRNA sense strand
uggaugggaggugaucuua

SEQ ID NO: 1575328 - RNA, 19 nt, Homo sapiens
  misc_RNA (1)...(19): siRNA sense strand
acagucagacagacgauga

SEQ ID NO: 1575329 - RNA, 19 nt, Homo sapiens
  misc_RNA (1)...(19): siRNA sense strand
gagugaggauccccgguuu

SEQ ID NO: 1575330 - RNA, 19 nt, Homo sapiens
  misc_RNA (1)...(19): siRNA sense strand
ucacauaaaguggguugga

SEQ ID NO: 1575331 - RNA, 19 nt, Homo sapiens
  misc_RNA (1)...(19): siRNA sense strand
aaucgugguuuggagagaa

SEQ ID NO: 1575332 - RNA, 19 nt, Homo sapiens
  misc_RNA (1)...(19): siRNA sense strand
gcagaaccacacggaagga

SEQ ID NO: 1575333 - RNA, 19 nt, Homo sapiens
  misc_RNA (1)...(19): siRNA sense strand
ugaaaagccacacaaagaa

SEQ ID NO: 1575334 - RNA, 19 nt, Homo sapiens
  misc_RNA (1)...(19): siRNA sense strand
guuaccugaucuacccaaa

SEQ ID NO: 1575335 - RNA, 19 nt, Homo sapiens
  misc_RNA (1)...(19): siRNA sense strand
aacaacaagaugcggauuu

SEQ ID NO: 1575336 - RNA, 19 nt, Homo sapiens
  misc_RNA (1)...(19): siRNA sense strand
cuucaucccuguuccucau

SEQ ID NO: 1575337 - RNA, 19 nt, Homo sapiens
  misc_RNA (1)...(19): siRNA sense strand
ccacgugcucacauucuug

SEQ ID NO: 1575338 - RNA, 19 nt, Homo sapiens
  misc_RNA (1)...(19): siRNA sense strand
gaaggccacgugcucacau

SEQ ID NO: 1575339 - RNA, 19 nt, Homo sapiens
  misc_RNA (1)...(19): siRNA sense strand
uggacugcauggaagagaa

SEQ ID NO: 1575340 - RNA, 19 nt, Homo sapiens
  misc_RNA (1)...(19): siRNA sense strand
ggacugcauggaagagaag

SEQ ID NO: 1575341 - RNA, 19 nt, Homo sapiens
  misc_RNA (1)...(19): siRNA sense strand
gaaaagccacacaaagaag

SEQ ID NO: 1575342 - RNA, 19 nt, Homo sapiens
  misc_RNA (1)...(19): siRNA sense strand
gcauggaagagaagaacca

SEQ ID NO: 1575343 - RNA, 19 nt, Homo sapiens
  misc_RNA (1)...(19): siRNA sense strand
ggcuguggaagaagcauaa

SEQ ID NO: 1575344 - RNA, 19 nt, Homo sapiens
  misc_RNA (1)...(19): siRNA sense strand
caaugaggagguacguuca

SEQ ID NO: 1575345 - RNA, 19 nt, Homo sapiens
  misc_RNA (1)...(19): siRNA sense strand
ggaaauauaguggucauua

SEQ ID NO: 1575346 - RNA, 19 nt, Homo sapiens
  misc_RNA (1)...(19): siRNA sense strand
uaaaggagaugcaggagaa

SEQ ID NO: 1575347 - RNA, 19 nt, Homo sapiens
  misc_RNA (1)...(19): siRNA sense strand
caucaaagcccuaggauau

SEQ ID NO: 1575348 - RNA, 19 nt, Homo sapiens
  misc_RNA (1)...(19): siRNA sense strand
ggauccagcugcaaauuug

SEQ ID NO: 1575349 - RNA, 19 nt, Homo sapiens
  misc_RNA (1)...(19): siRNA sense strand
auacagcguuuccuauaua

SEQ ID NO: 1575350 - RNA, 19 nt, Homo sapiens
  misc_RNA (1)...(19): siRNA sense strand
gaagucagagccauagaaa

SEQ ID NO: 1575351 - RNA, 19 nt, Homo sapiens
  misc_RNA (1)...(19): siRNA sense strand
gaagggauccagcugcaaa

SEQ ID NO: 1575352 - RNA, 19 nt, Homo sapiens
  misc_RNA (1)...(19): siRNA sense strand
ucaaagcccuaggauauug

SEQ ID NO: 1575353 - RNA, 19 nt, Homo sapiens
  misc_RNA (1)...(19): siRNA sense strand
uauacuggcucucagauug

SEQ ID NO: 1575354 - RNA, 19 nt, Homo sapiens
  misc_RNA (1)...(19): siRNA sense strand
gagucuagcuuuaccagau

SEQ ID NO: 1575355 - RNA, 19 nt, Homo sapiens
  misc_RNA (1)...(19): siRNA sense strand
ggaauuccaguaacgauga

SEQ ID NO: 1575356 - RNA, 19 nt, Homo sapiens
  misc_RNA (1)...(19): siRNA sense strand
caugaugauuaucucguua

SEQ ID NO: 1575357 - RNA, 19 nt, Homo sapiens
  misc_RNA (1)...(19): siRNA sense strand
gaaaguuauuggccagcuu

SEQ ID NO: 1575358 - RNA, 19 nt, Homo sapiens
  misc_RNA (1)...(19): siRNA sense strand
ggaagucagagccauagaa

SEQ ID NO: 1575359 - RNA, 19 nt, Homo sapiens
  misc_RNA (1)...(19): siRNA sense strand
caaauuugagucuagcuuu

SEQ ID NO: 1575360 - RNA, 19 nt, Homo sapiens
  misc_RNA (1)...(19): siRNA sense strand
gcucucagauuggaaguca

SEQ ID NO: 1575361 - RNA, 19 nt, Homo sapiens
  misc_RNA (1)...(19): siRNA sense strand
gaugaugacggaagugaug

SEQ ID NO: 1575362 - RNA, 19 nt, Homo sapiens
  misc_RNA (1)...(19): siRNA sense strand
ugagagcaguccaccauca

SEQ ID NO: 1575363 - RNA, 19 nt, Homo sapiens
  misc_RNA (1)...(19): siRNA sense strand
uguccaauguguaaacuug

SEQ ID NO: 1575364 - RNA, 19 nt, Homo sapiens
  misc_RNA (1)...(19): siRNA sense strand
gggauccagcugcaaauuu

SEQ ID NO: 1575365 - RNA, 19 nt, Homo sapiens
  misc_RNA (1)...(19): siRNA sense strand
gaugagagcaguccaccau

SEQ ID NO: 1575366 - RNA, 19 nt, Homo sapiens
  misc_RNA (1)...(19): siRNA sense strand
aaagggaauugauguugau

SEQ ID NO: 1575367 - RNA, 19 nt, Homo sapiens
  misc_RNA (1)...(19): siRNA sense strand
ccaugaugauuaucucguu

SEQ ID NO: 1575368 - RNA, 19 nt, Homo sapiens
  misc_RNA (1)...(19): siRNA sense strand
gaggagcgcuacgggaaca

SEQ ID NO: 1575369 - RNA, 19 nt, Homo sapiens
  misc_RNA (1)...(19): siRNA sense strand
ggccagcuucuacuucaua

SEQ ID NO: 1575370 - RNA, 19 nt, Homo sapiens
  misc_RNA (1)...(19): siRNA sense strand
acagugugaucccagcuuu

SEQ ID NO: 1575371 - RNA, 19 nt, Homo sapiens
  misc_RNA (1)...(19): siRNA sense strand
gcaaauuugagucuagcuu

SEQ ID NO: 1575372 - RNA, 19 nt, Homo sapiens
  misc_RNA (1)...(19): siRNA sense strand
gaaaagggaauugauguug

SEQ ID NO: 1575373 - RNA, 19 nt, Homo sapiens
  misc_RNA (1)...(19): siRNA sense strand
uuagaauucugccaugcaa

SEQ ID NO: 1575374 - RNA, 19 nt, Homo sapiens
  misc_RNA (1)...(19): siRNA sense strand
gcuucuacuucauacugua

SEQ ID NO: 1575375 - RNA, 19 nt, Homo sapiens
  misc_RNA (1)...(19): siRNA sense strand
gcugcaaauuugagucuag

SEQ ID NO: 1575376 - RNA, 19 nt, Homo sapiens
  misc_RNA (1)...(19): siRNA sense strand
gggaacaggaaauauagug

SEQ ID NO: 1575377 - RNA, 19 nt, Homo sapiens
  misc_RNA (1)...(19): siRNA sense strand
gggaauugauguugaugcu

SEQ ID NO: 1575378 - RNA, 19 nt, Homo sapiens
  misc_RNA (1)...(19): siRNA sense strand
gaucaccgaacauguccaa

SEQ ID NO: 1575379 - RNA, 19 nt, Homo sapiens
  misc_RNA (1)...(19): siRNA sense strand
ucaccgaacauguccaaug

SEQ ID NO: 1575380 - RNA, 19 nt, Homo sapiens
  misc_RNA (1)...(19): siRNA sense strand
gaugccugcuccagaaucu

SEQ ID NO: 1575381 - RNA, 19 nt, Homo sapiens
  misc_RNA (1)...(19): siRNA sense strand
gcgggaacaggaaauauag

SEQ ID NO: 1575382 - RNA, 19 nt, Homo sapiens
  misc_RNA (1)...(19): siRNA sense strand
aaaagggaauugauguuga

SEQ ID NO: 1575383 - RNA, 19 nt, Homo sapiens
  misc_RNA (1)...(19): siRNA sense strand
ccaaaaggaagagaaauuu

SEQ ID NO: 1575384 - RNA, 19 nt, Homo sapiens
  misc_RNA (1)...(19): siRNA sense strand
uguguaaacuugaugucau

SEQ ID NO: 1575385 - RNA, 19 nt, Homo sapiens
  misc_RNA (1)...(19): siRNA sense strand
cgcgggaacaggaaauaua

SEQ ID NO: 1575386 - RNA, 19 nt, Homo sapiens
  misc_RNA (1)...(19): siRNA sense strand
gauuagcuauccaaaagga

SEQ ID NO: 1575387 - RNA, 19 nt, Homo sapiens
  misc_RNA (1)...(19): siRNA sense strand
cuauauacagcguuuccua

SEQ ID NO: 1575388 - RNA, 19 nt, Homo sapiens
  misc_RNA (1)...(19): siRNA sense strand
gucagucugugguguuugu

SEQ ID NO: 1575389 - RNA, 19 nt, Homo sapiens
  misc_RNA (1)...(19): siRNA sense strand
caggaaauauaguggucau

SEQ ID NO: 1575390 - RNA, 19 nt, Homo sapiens
  misc_RNA (1)...(19): siRNA sense strand
caguaacgaugaccauagg

SEQ ID NO: 1575391 - RNA, 19 nt, Homo sapiens
  misc_RNA (1)...(19): siRNA sense strand
ccaguaacgaugaccauag

SEQ ID NO: 1575392 - RNA, 19 nt, Homo sapiens
  misc_RNA (1)...(19): siRNA sense strand
ggagaaaagggaauugaug

SEQ ID NO: 1575393 - RNA, 19 nt, Homo sapiens
  misc_RNA (1)...(19): siRNA sense strand
uauauacagcguuuccuau

SEQ ID NO: 1575394 - RNA, 19 nt, Homo sapiens
  misc_RNA (1)...(19): siRNA sense strand
ggagaugcaggagaaaaua

SEQ ID NO: 1575395 - RNA, 19 nt, Homo sapiens
  misc_RNA (1)...(19): siRNA sense strand
ucaucaaagcccuaggaua

SEQ ID NO: 1575396 - RNA, 19 nt, Homo sapiens
  misc_RNA (1)...(19): siRNA sense strand
ugugcaguguguauugaaa

SEQ ID NO: 1575397 - RNA, 19 nt, Homo sapiens
  misc_RNA (1)...(19): siRNA sense strand
gauccagcugcaaauuuga

SEQ ID NO: 1575398 - RNA, 19 nt, Homo sapiens
  misc_RNA (1)...(19): siRNA sense strand
ucaccuugcccaugucuca

SEQ ID NO: 1575399 - RNA, 19 nt, Homo sapiens
  misc_RNA (1)...(19): siRNA sense strand
gagaaaagggaauugaugu

SEQ ID NO: 1575400 - RNA, 19 nt, Homo sapiens
  misc_RNA (1)...(19): siRNA sense strand
guuauuggccagcuucuac

SEQ ID NO: 1575401 - RNA, 19 nt, Homo sapiens
  misc_RNA (1)...(19): siRNA sense strand
uagcuuuaccagaugauga

SEQ ID NO: 1575402 - RNA, 19 nt, Homo sapiens
  misc_RNA (1)...(19): siRNA sense strand
cagcuucuacuucauacug

SEQ ID NO: 1575403 - RNA, 19 nt, Homo sapiens
  misc_RNA (1)...(19): siRNA sense strand
cagcguuuccuauauacug

SEQ ID NO: 1575404 - RNA, 19 nt, Homo sapiens
  misc_RNA (1)...(19): siRNA sense strand
aaauacggcauugcuagaa

SEQ ID NO: 1575405 - RNA, 19 nt, Homo sapiens
  misc_RNA (1)...(19): siRNA sense strand
cagaugaugacggaaguga

SEQ ID NO: 1575406 - RNA, 19 nt, Homo sapiens
  misc_RNA (1)...(19): siRNA sense strand
ucagagccauagaaaagaa

SEQ ID NO: 1575407 - RNA, 19 nt, Homo sapiens
  misc_RNA (1)...(19): siRNA sense strand
ucaccaugaugauuaucuc

SEQ ID NO: 1575408 - RNA, 19 nt, Homo sapiens
  misc_RNA (1)...(19): siRNA sense strand
agugugaucccagcuuuaa

SEQ ID NO: 1575409 - RNA, 19 nt, Homo sapiens
  misc_RNA (1)...(19): siRNA sense strand
gggagagccuggggaugua

SEQ ID NO: 1575410 - RNA, 19 nt, Homo sapiens
  misc_RNA (1)...(19): siRNA sense strand
ccgucguccucuacaauga

SEQ ID NO: 1575411 - RNA, 19 nt, Homo sapiens
  misc_RNA (1)...(19): siRNA sense strand
gugguucucggccguggua

SEQ ID NO: 1575412 - RNA, 19 nt, Homo sapiens
  misc_RNA (1)...(19): siRNA sense strand
gaauuccaguaacgaugac

SEQ ID NO: 1575413 - RNA, 19 nt, Homo sapiens
  misc_RNA (1)...(19): siRNA sense strand
ugcauugacccauggcuuu

SEQ ID NO: 1575414 - RNA, 19 nt, Homo sapiens
  misc_RNA (1)...(19): siRNA sense strand
ccaagcggauucaucuuug

SEQ ID NO: 1575415 - RNA, 19 nt, Homo sapiens
  misc_RNA (1)...(19): siRNA sense strand
guggaggacucaagguaaa

SEQ ID NO: 1575416 - RNA, 19 nt, Homo sapiens
  misc_RNA (1)...(19): siRNA sense strand
gcagaucagcuuccuguuc

SEQ ID NO: 1575417 - RNA, 19 nt, Homo sapiens
  misc_RNA (1)...(19): siRNA sense strand
caagcggauucaucuuuga

SEQ ID NO: 1575418 - RNA, 19 nt, Homo sapiens
  misc_RNA (1)...(19): siRNA sense strand
gccaagcggauucaucuuu

SEQ ID NO: 1575419 - RNA, 19 nt, Homo sapiens
  misc_RNA (1)...(19): siRNA sense strand
ccagcagccucucguccua

SEQ ID NO: 1575420 - RNA, 19 nt, Homo sapiens
  misc_RNA (1)...(19): siRNA sense strand
ggcaguggaagcugucuga

SEQ ID NO: 1575421 - RNA, 19 nt, Homo sapiens
  misc_RNA (1)...(19): siRNA sense strand
gacacaccacgcagccuuu

SEQ ID NO: 1575422 - RNA, 19 nt, Homo sapiens
  misc_RNA (1)...(19): siRNA sense strand
ccgcauggccagagcaauc

SEQ ID NO: 1575423 - RNA, 19 nt, Homo sapiens
  misc_RNA (1)...(19): siRNA sense strand
uguggaggacucaagguaa

SEQ ID NO: 1575424 - RNA, 19 nt, Homo sapiens
  misc_RNA (1)...(19): siRNA sense strand
gugccaagcggauucaucu

SEQ ID NO: 1575425 - RNA, 19 nt, Homo sapiens
  misc_RNA (1)...(19): siRNA sense strand
gcggagaggagauacuuua

SEQ ID NO: 1575426 - RNA, 19 nt, Homo sapiens
  misc_RNA (1)...(19): siRNA sense strand
caguaaauuuggaucagua

SEQ ID NO: 1575427 - RNA, 19 nt, Homo sapiens
  misc_RNA (1)...(19): siRNA sense strand
gagaggagauacuuuaagc

SEQ ID NO: 1575428 - RNA, 19 nt, Homo sapiens
  misc_RNA (1)...(19): siRNA sense strand
ggucggagguggagaacug

SEQ ID NO: 1575429 - RNA, 19 nt, Homo sapiens
  misc_RNA (1)...(19): siRNA sense strand
gaaagggucuagccaugcu

SEQ ID NO: 1575430 - RNA, 19 nt, Homo sapiens
  misc_RNA (1)...(19): siRNA sense strand
gcucuucgccaucuucaug

SEQ ID NO: 1575431 - RNA, 19 nt, Homo sapiens
  misc_RNA (1)...(19): siRNA sense strand
cccagcgucugucuaauga

SEQ ID NO: 1575432 - RNA, 19 nt, Homo sapiens
  misc_RNA (1)...(19): siRNA sense strand
ggacaccugguacugaaga

SEQ ID NO: 1575433 - RNA, 19 nt, Homo sapiens
  misc_RNA (1)...(19): siRNA sense strand
ccaggugacaguaaauuug

SEQ ID NO: 1575434 - RNA, 19 nt, Homo sapiens
  misc_RNA (1)...(19): siRNA sense strand
uggcgcacaugcuguacua

SEQ ID NO: 1575435 - RNA, 19 nt, Homo sapiens
  misc_RNA (1)...(19): siRNA sense strand
gggaguaucgcaagaugug

SEQ ID NO: 1575436 - RNA, 19 nt, Homo sapiens
  misc_RNA (1)...(19): siRNA sense strand
cagcugcuccgccuccuaa

SEQ ID NO: 1575437 - RNA, 19 nt, Homo sapiens
  misc_RNA (1)...(19): siRNA sense strand
ggacuucugcacccuguuc

SEQ ID NO: 1575438 - RNA, 19 nt, Homo sapiens
  misc_RNA (1)...(19): siRNA sense strand
cggcagagaaggcggcuuu

SEQ ID NO: 1575439 - RNA, 19 nt, Homo sapiens
  misc_RNA (1)...(19): siRNA sense strand
ggagaggagauacuuuaag

SEQ ID NO: 1575440 - RNA, 19 nt, Homo sapiens
  misc_RNA (1)...(19): siRNA sense strand
cagagaaggcggcuuugga

SEQ ID NO: 1575441 - RNA, 19 nt, Homo sapiens
  misc_RNA (1)...(19): siRNA sense strand
gcugcuccgccuccuaaua

SEQ ID NO: 1575442 - RNA, 19 nt, Homo sapiens
  misc_RNA (1)...(19): siRNA sense strand
guaccgcgagcgcuucauu

SEQ ID NO: 1575443 - RNA, 19 nt, Homo sapiens
  misc_RNA (1)...(19): siRNA sense strand
gacccucgaucagccauca

SEQ ID NO: 1575444 - RNA, 19 nt, Homo sapiens
  misc_RNA (1)...(19): siRNA sense strand
caagccacgcccagcagua

SEQ ID NO: 1575445 - RNA, 19 nt, Homo sapiens
  misc_RNA (1)...(19): siRNA sense strand
gacaguaaauuuggaucag

SEQ ID NO: 1575446 - RNA, 19 nt, Homo sapiens
  misc_RNA (1)...(19): siRNA sense strand
gagguccaggugacaguaa

SEQ ID NO: 1575447 - RNA, 19 nt, Homo sapiens
  misc_RNA (1)...(19): siRNA sense strand
gcaguacguccaacaacuc

SEQ ID NO: 1575448 - RNA, 19 nt, Homo sapiens
  misc_RNA (1)...(19): siRNA sense strand
ggcugcaggccuuauauga

SEQ ID NO: 1575449 - RNA, 19 nt, Homo sapiens
  misc_RNA (1)...(19): siRNA sense strand
cggagaggagauacuuuaa

SEQ ID NO: 1575450 - RNA, 19 nt, Homo sapiens
  misc_RNA (1)...(19): siRNA sense strand
ucugcacccuguuccacua

SEQ ID NO: 1575451 - RNA, 19 nt, Homo sapiens
  misc_RNA (1)...(19): siRNA sense strand
gcgcacaugcuguacuauc

SEQ ID NO: 1575452 - RNA, 19 nt, Homo sapiens
  misc_RNA (1)...(19): siRNA sense strand
gcguggcgaucuucgucaa

SEQ ID NO: 1575453 - RNA, 19 nt, Homo sapiens
  misc_RNA (1)...(19): siRNA sense strand
ugacaguaaauuuggauca

SEQ ID NO: 1575454 - RNA, 19 nt, Homo sapiens
  misc_RNA (1)...(19): siRNA sense strand
cguuggagcuggcgcacau

SEQ ID NO: 1575455 - RNA, 19 nt, Homo sapiens
  misc_RNA (1)...(19): siRNA sense strand
guccgaguauggccacugu

SEQ ID NO: 1575456 - RNA, 19 nt, Homo sapiens
  misc_RNA (1)...(19): siRNA sense strand
aaauuuggaucaguauguc

SEQ ID NO: 1575457 - RNA, 19 nt, Homo sapiens
  misc_RNA (1)...(19): siRNA sense strand
ccgaguauggccacuguug

SEQ ID NO: 1575458 - RNA, 19 nt, Homo sapiens
  misc_RNA (1)...(19): siRNA sense strand
gguccaggguccgaguaug

SEQ ID NO: 1575459 - RNA, 19 nt, Homo sapiens
  misc_RNA (1)...(19): siRNA sense strand
ggggacaccugguacugaa

SEQ ID NO: 1575460 - RNA, 19 nt, Homo sapiens
  misc_RNA (1)...(19): siRNA sense strand
gcagagaaggcggcuuugg

SEQ ID NO: 1575461 - RNA, 19 nt, Homo sapiens
  misc_RNA (1)...(19): siRNA sense strand
ggugcuaaccgaccucaag

SEQ ID NO: 1575462 - RNA, 19 nt, Homo sapiens
  misc_RNA (1)...(19): siRNA sense strand
guaaauuuggaucaguaug

SEQ ID NO: 1575463 - RNA, 19 nt, Homo sapiens
  misc_RNA (1)...(19): siRNA sense strand
acaguaaauuuggaucagu

SEQ ID NO: 1575464 - RNA, 19 nt, Homo sapiens
  misc_RNA (1)...(19): siRNA sense strand
gagcagugcagcaguugua

SEQ ID NO: 1575465 - RNA, 19 nt, Homo sapiens
  misc_RNA (1)...(19): siRNA sense strand
caacccaggccucuucauu

SEQ ID NO: 1575466 - RNA, 19 nt, Homo sapiens
  misc_RNA (1)...(19): siRNA sense strand
aaagcaacccuaccucaaa

SEQ ID NO: 1575467 - RNA, 19 nt, Homo sapiens
  misc_RNA (1)...(19): siRNA sense strand
gaaagacuggccaucagau

SEQ ID NO: 1575468 - RNA, 19 nt, Homo sapiens
  misc_RNA (1)...(19): siRNA sense strand
gccaucagcuccggcaaga

SEQ ID NO: 1575469 - RNA, 19 nt, Homo sapiens
  misc_RNA (1)...(19): siRNA sense strand
cggaaacgcugcggcaugu

SEQ ID NO: 1575470 - RNA, 19 nt, Homo sapiens
  misc_RNA (1)...(19): siRNA sense strand
gcaguuguaggaaucgaaa

SEQ ID NO: 1575471 - RNA, 19 nt, Homo sapiens
  misc_RNA (1)...(19): siRNA sense strand
gugcagcaguuguaggaau

SEQ ID NO: 1575472 - RNA, 19 nt, Homo sapiens
  misc_RNA (1)...(19): siRNA sense strand
aacccaggccucuucauua

SEQ ID NO: 1575473 - RNA, 19 nt, Homo sapiens
  misc_RNA (1)...(19): siRNA sense strand
acccaggccucuucauuau

SEQ ID NO: 1575474 - RNA, 19 nt, Homo sapiens
  misc_RNA (1)...(19): siRNA sense strand
cgaaagacuggccaucaga

SEQ ID NO: 1575475 - RNA, 19 nt, Homo sapiens
  misc_RNA (1)...(19): siRNA sense strand
cggagagucugcugacaag

SEQ ID NO: 1575476 - RNA, 19 nt, Homo sapiens
  misc_RNA (1)...(19): siRNA sense strand
aagcaacccuaccucaaag

SEQ ID NO: 1575477 - RNA, 19 nt, Homo sapiens
  misc_RNA (1)...(19): siRNA sense strand
agacuggccaucagauuug

SEQ ID NO: 1575478 - RNA, 19 nt, Homo sapiens
  misc_RNA (1)...(19): siRNA sense strand
gcggagagucugcugacaa

SEQ ID NO: 1575479 - RNA, 19 nt, Homo sapiens
  misc_RNA (1)...(19): siRNA sense strand
caucaacccaggccucuuc

SEQ ID NO: 1575480 - RNA, 19 nt, Homo sapiens
  misc_RNA (1)...(19): siRNA sense strand
caucagcuccggcaagaag

SEQ ID NO: 1575481 - RNA, 19 nt, Homo sapiens
  misc_RNA (1)...(19): siRNA sense strand
ccgcugcucuggagaaggu

SEQ ID NO: 1575482 - RNA, 19 nt, Homo sapiens
  misc_RNA (1)...(19): siRNA sense strand
aagacuggccaucagauuu

SEQ ID NO: 1575483 - RNA, 19 nt, Homo sapiens
  misc_RNA (1)...(19): siRNA sense strand
ggccauggcgguggacaaa

SEQ ID NO: 1575484 - RNA, 19 nt, Homo sapiens
  misc_RNA (1)...(19): siRNA sense strand
aaagacuggccaucagauu

SEQ ID NO: 1575485 - RNA, 19 nt, Homo sapiens
  misc_RNA (1)...(19): siRNA sense strand
gugcuggccugccugacau

SEQ ID NO: 1575486 - RNA, 19 nt, Homo sapiens
  misc_RNA (1)...(19): siRNA sense strand
gcaagaagaagcggaaacg

SEQ ID NO: 1575487 - RNA, 19 nt, Homo sapiens
  misc_RNA (1)...(19): siRNA sense strand
ucgaaagacuggccaucag

SEQ ID NO: 1575488 - RNA, 19 nt, Homo sapiens
  misc_RNA (1)...(19): siRNA sense strand
gcaacccuaccucaaagca

SEQ ID NO: 1575489 - RNA, 19 nt, Homo sapiens
  misc_RNA (1)...(19): siRNA sense strand
ugauguagauugucgauua

SEQ ID NO: 1575490 - RNA, 19 nt, Homo sapiens
  misc_RNA (1)...(19): siRNA sense strand
ugaagucugucaucgauua

SEQ ID NO: 1575491 - RNA, 19 nt, Homo sapiens
  misc_RNA (1)...(19): siRNA sense strand
acaaagagaugaagaaaca

SEQ ID NO: 1575492 - RNA, 19 nt, Homo sapiens
  misc_RNA (1)...(19): siRNA sense strand
gauggaaucugccuguguu

SEQ ID NO: 1575493 - RNA, 19 nt, Homo sapiens
  misc_RNA (1)...(19): siRNA sense strand
uagaagauccugaugguaa

SEQ ID NO: 1575494 - RNA, 19 nt, Homo sapiens
  misc_RNA (1)...(19): siRNA sense strand
gguaaaguguuauacaaag

SEQ ID NO: 1575495 - RNA, 19 nt, Homo sapiens
  misc_RNA (1)...(19): siRNA sense strand
gagaagacccaccuuuguu

SEQ ID NO: 1575496 - RNA, 19 nt, Homo sapiens
  misc_RNA (1)...(19): siRNA sense strand
gaagaaacaguaugauagu

SEQ ID NO: 1575497 - RNA, 19 nt, Homo sapiens
  misc_RNA (1)...(19): siRNA sense strand
gagcagaggaucuaaauac

SEQ ID NO: 1575498 - RNA, 19 nt, Homo sapiens
  misc_RNA (1)...(19): siRNA sense strand
ggagaagacccaccuuugu

SEQ ID NO: 1575499 - RNA, 19 nt, Homo sapiens
  misc_RNA (1)...(19): siRNA sense strand
auacaagaguggccuauug

SEQ ID NO: 1575500 - RNA, 19 nt, Homo sapiens
  misc_RNA (1)...(19): siRNA sense strand
ucacgaagcucugaagucu

SEQ ID NO: 1575501 - RNA, 19 nt, Homo sapiens
  misc_RNA (1)...(19): siRNA sense strand
cagaggaucuaaauacaag

SEQ ID NO: 1575502 - RNA, 19 nt, Homo sapiens
  misc_RNA (1)...(19): siRNA sense strand
ucacuaugauguagauugu

SEQ ID NO: 1575503 - RNA, 19 nt, Homo sapiens
  misc_RNA (1)...(19): siRNA sense strand
ucagacucauuuccguuua

SEQ ID NO: 1575504 - RNA, 19 nt, Homo sapiens
  misc_RNA (1)...(19): siRNA sense strand
gcagaggaucuaaauacaa

SEQ ID NO: 1575505 - RNA, 19 nt, Homo sapiens
  misc_RNA (1)...(19): siRNA sense strand
agaagauccugaugguaaa

SEQ ID NO: 1575506 - RNA, 19 nt, Homo sapiens
  misc_RNA (1)...(19): siRNA sense strand
ggaaucugccuguguuuca

SEQ ID NO: 1575507 - RNA, 19 nt, Homo sapiens
  misc_RNA (1)...(19): siRNA sense strand
ugaagaaacaguaugauag

SEQ ID NO: 1575508 - RNA, 19 nt, Homo sapiens
  misc_RNA (1)...(19): siRNA sense strand
uagcauagggcagguauuu

SEQ ID NO: 1575509 - RNA, 19 nt, Homo sapiens
  misc_RNA (1)...(19): siRNA sense strand
gauguagauugucgauuag

SEQ ID NO: 1575510 - RNA, 19 nt, Homo sapiens
  misc_RNA (1)...(19): siRNA sense strand
cagacucauuuccguuuaa

SEQ ID NO: 1575511 - RNA, 19 nt, Homo sapiens
  misc_RNA (1)...(19): siRNA sense strand
ucgauuaucagacucauuu

SEQ ID NO: 1575512 - RNA, 19 nt, Homo sapiens
  misc_RNA (1)...(19): siRNA sense strand
gaaucugccuguguuucaa

SEQ ID NO: 1575513 - RNA, 19 nt, Homo sapiens
  misc_RNA (1)...(19): siRNA sense strand
gauuacugguggucacuau

SEQ ID NO: 1575514 - RNA, 19 nt, Homo sapiens
  misc_RNA (1)...(19): siRNA sense strand
gaagacccaccuuuguuuc

SEQ ID NO: 1575515 - RNA, 19 nt, Homo sapiens
  misc_RNA (1)...(19): siRNA sense strand
agaagacccaccuuuguuu

SEQ ID NO: 1575516 - RNA, 19 nt, Homo sapiens
  misc_RNA (1)...(19): siRNA sense strand
ucagugcucuuacccagau

SEQ ID NO: 1575517 - RNA, 19 nt, Homo sapiens
  misc_RNA (1)...(19): siRNA sense strand
ccucugagaucaccuucga

SEQ ID NO: 1575518 - RNA, 19 nt, Homo sapiens
  misc_RNA (1)...(19): siRNA sense strand
gggcagguauuucuuuuga

SEQ ID NO: 1575519 - RNA, 19 nt, Homo sapiens
  misc_RNA (1)...(19): siRNA sense strand
ucauuuccguuuaagagaa

SEQ ID NO: 1575520 - RNA, 19 nt, Homo sapiens
  misc_RNA (1)...(19): siRNA sense strand
acgaagcucugaagucugu

SEQ ID NO: 1575521 - RNA, 19 nt, Homo sapiens
  misc_RNA (1)...(19): siRNA sense strand
gcauagggcagguauuucu

SEQ ID NO: 1575522 - RNA, 19 nt, Homo sapiens
  misc_RNA (1)...(19): siRNA sense strand
gauugucgauuagaagauc

SEQ ID NO: 1575523 - RNA, 19 nt, Homo sapiens
  misc_RNA (1)...(19): siRNA sense strand
gaugguaaaguguuauaca

SEQ ID NO: 1575524 - RNA, 19 nt, Homo sapiens
  misc_RNA (1)...(19): siRNA sense strand
gacccaccuuuguuuccua

SEQ ID NO: 1575525 - RNA, 19 nt, Homo sapiens
  misc_RNA (1)...(19): siRNA sense strand
uguagauugucgauuagaa

SEQ ID NO: 1575526 - RNA, 19 nt, Homo sapiens
  misc_RNA (1)...(19): siRNA sense strand
ugucaucgauuaucagacu

SEQ ID NO: 1575527 - RNA, 19 nt, Homo sapiens
  misc_RNA (1)...(19): siRNA sense strand
ucugaagucugucaucgau

SEQ ID NO: 1575528 - RNA, 19 nt, Homo sapiens
  misc_RNA (1)...(19): siRNA sense strand
gcucuuacccagauggaau

SEQ ID NO: 1575529 - RNA, 19 nt, Homo sapiens
  misc_RNA (1)...(19): siRNA sense strand
caccuuuguuuccuaguga

SEQ ID NO: 1575530 - RNA, 19 nt, Homo sapiens
  misc_RNA (1)...(19): siRNA sense strand
ugagaucaccuucgagcuu

SEQ ID NO: 1575531 - RNA, 19 nt, Homo sapiens
  misc_RNA (1)...(19): siRNA sense strand
ccaccuuuguuuccuagug

SEQ ID NO: 1575532 - RNA, 19 nt, Homo sapiens
  misc_RNA (1)...(19): siRNA sense strand
gaaccgagucagugcucuu

SEQ ID NO: 1575533 - RNA, 19 nt, Homo sapiens
  misc_RNA (1)...(19): siRNA sense strand
gagaugaagaaacaguaug

SEQ ID NO: 1575534 - RNA, 19 nt, Homo sapiens
  misc_RNA (1)...(19): siRNA sense strand
ccaagugcacccuggaguu

SEQ ID NO: 1575535 - RNA, 19 nt, Homo sapiens
  misc_RNA (1)...(19): siRNA sense strand
ccuucgagcuuccugacaa

SEQ ID NO: 1575536 - RNA, 19 nt, Homo sapiens
  misc_RNA (1)...(19): siRNA sense strand
gauaaaagaaccaccacaa

SEQ ID NO: 1575537 - RNA, 19 nt, Homo sapiens
  misc_RNA (1)...(19): siRNA sense strand
agaugaagaaacaguauga

SEQ ID NO: 1575538 - RNA, 19 nt, Homo sapiens
  misc_RNA (1)...(19): siRNA sense strand
gguggucacuaugauguag

SEQ ID NO: 1575539 - RNA, 19 nt, Homo sapiens
  misc_RNA (1)...(19): siRNA sense strand
caagugcacccuggaguuc

SEQ ID NO: 1575540 - RNA, 19 nt, Homo sapiens
  misc_RNA (1)...(19): siRNA sense strand
uuacugguggucacuauga

SEQ ID NO: 1575541 - RNA, 19 nt, Homo sapiens
  misc_RNA (1)...(19): siRNA sense strand
gaagucugucaucgauuau

SEQ ID NO: 1575542 - RNA, 19 nt, Homo sapiens
  misc_RNA (1)...(19): siRNA sense strand
uggagaagacccaccuuug

SEQ ID NO: 1575543 - RNA, 19 nt, Homo sapiens
  misc_RNA (1)...(19): siRNA sense strand
cgagcagaggaucuaaaua

SEQ ID NO: 1575544 - RNA, 19 nt, Homo sapiens
  misc_RNA (1)...(19): siRNA sense strand
guagauugucgauuagaag

SEQ ID NO: 1575545 - RNA, 19 nt, Homo sapiens
  misc_RNA (1)...(19): siRNA sense strand
agucugucaucgauuauca

SEQ ID NO: 1575546 - RNA, 19 nt, Homo sapiens
  misc_RNA (1)...(19): siRNA sense strand
uagauugucgauuagaaga

SEQ ID NO: 1575547 - RNA, 19 nt, Homo sapiens
  misc_RNA (1)...(19): siRNA sense strand
aaagagaugaagaaacagu

SEQ ID NO: 1575548 - RNA, 19 nt, Homo sapiens
  misc_RNA (1)...(19): siRNA sense strand
auuagaagauccugauggu

SEQ ID NO: 1575549 - RNA, 19 nt, Homo sapiens
  misc_RNA (1)...(19): siRNA sense strand
guaggagaagcccucauuc

SEQ ID NO: 1575550 - RNA, 19 nt, Homo sapiens
  misc_RNA (1)...(19): siRNA sense strand
aguaggagaagcccucauu

SEQ ID NO: 1575551 - RNA, 19 nt, Homo sapiens
  misc_RNA (1)...(19): siRNA sense strand
ccgagcagaggaucuaaau

SEQ ID NO: 1575552 - RNA, 19 nt, Homo sapiens
  misc_RNA (1)...(19): siRNA sense strand
gaagcucugaagucuguca

SEQ ID NO: 1575553 - RNA, 19 nt, Homo sapiens
  misc_RNA (1)...(19): siRNA sense strand
aagagaugaagaaacagua

SEQ ID NO: 1575554 - RNA, 19 nt, Homo sapiens
  misc_RNA (1)...(19): siRNA sense strand
agcagaggaucuaaauaca

SEQ ID NO: 1575555 - RNA, 19 nt, Homo sapiens
  misc_RNA (1)...(19): siRNA sense strand
uccugaugguaaaguguua

SEQ ID NO: 1575556 - RNA, 19 nt, Homo sapiens
  misc_RNA (1)...(19): siRNA sense strand
ucaauucacgaagcucuga

SEQ ID NO: 1575557 - RNA, 19 nt, Homo sapiens
  misc_RNA (1)...(19): siRNA sense strand
gauagaaacuggagaaaga

SEQ ID NO: 1575558 - RNA, 19 nt, Homo sapiens
  misc_RNA (1)...(19): siRNA sense strand
gcugagagcuaaauuaauu

SEQ ID NO: 1575559 - RNA, 19 nt, Homo sapiens
  misc_RNA (1)...(19): siRNA sense strand
gaacaaagaugcgcagaug

SEQ ID NO: 1575560 - RNA, 19 nt, Homo sapiens
  misc_RNA (1)...(19): siRNA sense strand
gagaacgccucaaagaguu

SEQ ID NO: 1575561 - RNA, 19 nt, Homo sapiens
  misc_RNA (1)...(19): siRNA sense strand
gagcagcgauuaaccaaaa

SEQ ID NO: 1575562 - RNA, 19 nt, Homo sapiens
  misc_RNA (1)...(19): siRNA sense strand
uuagcaagaugaacaaaga

SEQ ID NO: 1575563 - RNA, 19 nt, Homo sapiens
  misc_RNA (1)...(19): siRNA sense strand
aaagagaacgccucaaaga

SEQ ID NO: 1575564 - RNA, 19 nt, Homo sapiens
  misc_RNA (1)...(19): siRNA sense strand
agaaagagaacgccucaaa

SEQ ID NO: 1575565 - RNA, 19 nt, Homo sapiens
  misc_RNA (1)...(19): siRNA sense strand
ccugguaccugacagugua

SEQ ID NO: 1575566 - RNA, 19 nt, Homo sapiens
  misc_RNA (1)...(19): siRNA sense strand
gaaagagaacgccucaaag

SEQ ID NO: 1575567 - RNA, 19 nt, Homo sapiens
  misc_RNA (1)...(19): siRNA sense strand
cagaugagagcagcgauua

SEQ ID NO: 1575568 - RNA, 19 nt, Homo sapiens
  misc_RNA (1)...(19): siRNA sense strand
gagcuccuacaaagaauaa

SEQ ID NO: 1575569 - RNA, 19 nt, Homo sapiens
  misc_RNA (1)...(19): siRNA sense strand
uggcugaaaucacuccaaa

SEQ ID NO: 1575570 - RNA, 19 nt, Homo sapiens
  misc_RNA (1)...(19): siRNA sense strand
gaaggcacacuguaaagag

SEQ ID NO: 1575571 - RNA, 19 nt, Homo sapiens
  misc_RNA (1)...(19): siRNA sense strand
gcagaugagagcagcgauu

SEQ ID NO: 1575572 - RNA, 19 nt, Homo sapiens
  misc_RNA (1)...(19): siRNA sense strand
gagagcagcgauuaaccaa

SEQ ID NO: 1575573 - RNA, 19 nt, Homo sapiens
  misc_RNA (1)...(19): siRNA sense strand
aagaguugcugagagcuaa

SEQ ID NO: 1575574 - RNA, 19 nt, Homo sapiens
  misc_RNA (1)...(19): siRNA sense strand
guugaaggcacacuguaaa

SEQ ID NO: 1575575 - RNA, 19 nt, Homo sapiens
  misc_RNA (1)...(19): siRNA sense strand
gcuggaaggaucaguugaa

SEQ ID NO: 1575576 - RNA, 19 nt, Homo sapiens
  misc_RNA (1)...(19): siRNA sense strand
ggagcuccuacaaagaaua

SEQ ID NO: 1575577 - RNA, 19 nt, Homo sapiens
  misc_RNA (1)...(19): siRNA sense strand
agagaacgccucaaagagu

SEQ ID NO: 1575578 - RNA, 19 nt, Homo sapiens
  misc_RNA (1)...(19): siRNA sense strand
gacuagaacacguuacugu

SEQ ID NO: 1575579 - RNA, 19 nt, Homo sapiens
  misc_RNA (1)...(19): siRNA sense strand
ggcacacuguaaagaggua

SEQ ID NO: 1575580 - RNA, 19 nt, Homo sapiens
  misc_RNA (1)...(19): siRNA sense strand
uugcugagagcuaaauuaa

SEQ ID NO: 1575581 - RNA, 19 nt, Homo sapiens
  misc_RNA (1)...(19): siRNA sense strand
guugcugagagcuaaauua

SEQ ID NO: 1575582 - RNA, 19 nt, Homo sapiens
  misc_RNA (1)...(19): siRNA sense strand
caaagaugcgcagaugaga

SEQ ID NO: 1575583 - RNA, 19 nt, Homo sapiens
  misc_RNA (1)...(19): siRNA sense strand
gaugagagcagcgauuaac

SEQ ID NO: 1575584 - RNA, 19 nt, Homo sapiens
  misc_RNA (1)...(19): siRNA sense strand
guugauagaaacuggagaa

SEQ ID NO: 1575585 - RNA, 19 nt, Homo sapiens
  misc_RNA (1)...(19): siRNA sense strand
aaaggacuagaacacguua

SEQ ID NO: 1575586 - RNA, 19 nt, Homo sapiens
  misc_RNA (1)...(19): siRNA sense strand
guaccugacaguguaaaga

SEQ ID NO: 1575587 - RNA, 19 nt, Homo sapiens
  misc_RNA (1)...(19): siRNA sense strand
ugaaggcacacuguaaaga

SEQ ID NO: 1575588 - RNA, 19 nt, Homo sapiens
  misc_RNA (1)...(19): siRNA sense strand
gcuccuacaaagaauaaga

SEQ ID NO: 1575589 - RNA, 19 nt, Homo sapiens
  misc_RNA (1)...(19): siRNA sense strand
gaaacuggagaaagagaac

SEQ ID NO: 1575590 - RNA, 19 nt, Homo sapiens
  misc_RNA (1)...(19): siRNA sense strand
aaagaguugcugagagcua

SEQ ID NO: 1575591 - RNA, 19 nt, Homo sapiens
  misc_RNA (1)...(19): siRNA sense strand
gcucagcaugccagccuuu

SEQ ID NO: 1575592 - RNA, 19 nt, Homo sapiens
  misc_RNA (1)...(19): siRNA sense strand
acaaagaugcgcagaugag

SEQ ID NO: 1575593 - RNA, 19 nt, Homo sapiens
  misc_RNA (1)...(19): siRNA sense strand
uaccugacaguguaaagaa

SEQ ID NO: 1575594 - RNA, 19 nt, Homo sapiens
  misc_RNA (1)...(19): siRNA sense strand
ucagcaugccagccuuuaa

SEQ ID NO: 1575595 - RNA, 19 nt, Homo sapiens
  misc_RNA (1)...(19): siRNA sense strand
gcgauuaaccaaaaguuga

SEQ ID NO: 1575596 - RNA, 19 nt, Homo sapiens
  misc_RNA (1)...(19): siRNA sense strand
gugguuagcaagaugaaca

SEQ ID NO: 1575597 - RNA, 19 nt, Homo sapiens
  misc_RNA (1)...(19): siRNA sense strand
ugacuugguggcugaaauc

SEQ ID NO: 1575598 - RNA, 19 nt, Homo sapiens
  misc_RNA (1)...(19): siRNA sense strand
acacguuacuguugaugac

SEQ ID NO: 1575599 - RNA, 19 nt, Homo sapiens
  misc_RNA (1)...(19): siRNA sense strand
ggacuagaacacguuacug

SEQ ID NO: 1575600 - RNA, 19 nt, Homo sapiens
  misc_RNA (1)...(19): siRNA sense strand
cuugguggcugaaaucacu

SEQ ID NO: 1575601 - RNA, 19 nt, Homo sapiens
  misc_RNA (1)...(19): siRNA sense strand
gcaagaggcucaagaagaa

SEQ ID NO: 1575602 - RNA, 19 nt, Homo sapiens
  misc_RNA (1)...(19): siRNA sense strand
gaagaaauaugagaccaaa

SEQ ID NO: 1575603 - RNA, 19 nt, Homo sapiens
  misc_RNA (1)...(19): siRNA sense strand
gcaagaagaagaagaacaa

SEQ ID NO: 1575604 - RNA, 19 nt, Homo sapiens
  misc_RNA (1)...(19): siRNA sense strand
cuaagaaccucaagaagau

SEQ ID NO: 1575605 - RNA, 19 nt, Homo sapiens
  misc_RNA (1)...(19): siRNA sense strand
gagaaguuauucaaugaga

SEQ ID NO: 1575606 - RNA, 19 nt, Homo sapiens
  misc_RNA (1)...(19): siRNA sense strand
gcuaagaaccucaagaaga

SEQ ID NO: 1575607 - RNA, 19 nt, Homo sapiens
  misc_RNA (1)...(19): siRNA sense strand
agaagacccugaacccaua

SEQ ID NO: 1575608 - RNA, 19 nt, Homo sapiens
  misc_RNA (1)...(19): siRNA sense strand
caacgaguccuucagcuuu

SEQ ID NO: 1575609 - RNA, 19 nt, Homo sapiens
  misc_RNA (1)...(19): siRNA sense strand
ugacaucauuggagaggua

SEQ ID NO: 1575610 - RNA, 19 nt, Homo sapiens
  misc_RNA (1)...(19): siRNA sense strand
agacaaccgugaagaagaa

SEQ ID NO: 1575611 - RNA, 19 nt, Homo sapiens
  misc_RNA (1)...(19): siRNA sense strand
gauaaacaagauucccuua

SEQ ID NO: 1575612 - RNA, 19 nt, Homo sapiens
  misc_RNA (1)...(19): siRNA sense strand
ucaccgugcuggacuauga

SEQ ID NO: 1575613 - RNA, 19 nt, Homo sapiens
  misc_RNA (1)...(19): siRNA sense strand
aagaaaugcugcugcaaga

SEQ ID NO: 1575614 - RNA, 19 nt, Homo sapiens
  misc_RNA (1)...(19): siRNA sense strand
aaggagaaguuauucaaug

SEQ ID NO: 1575615 - RNA, 19 nt, Homo sapiens
  misc_RNA (1)...(19): siRNA sense strand
gcaccucccugcgcuaugu

SEQ ID NO: 1575616 - RNA, 19 nt, Homo sapiens
  misc_RNA (1)...(19): siRNA sense strand
gaaaugcugcugcaagaag

SEQ ID NO: 1575617 - RNA, 19 nt, Homo sapiens
  misc_RNA (1)...(19): siRNA sense strand
gggcaagaacgaagccaua

SEQ ID NO: 1575618 - RNA, 19 nt, Homo sapiens
  misc_RNA (1)...(19): siRNA sense strand
gagguaaaggugccuauga

SEQ ID NO: 1575619 - RNA, 19 nt, Homo sapiens
  misc_RNA (1)...(19): siRNA sense strand
agaagaagaagaacaagaa

SEQ ID NO: 1575620 - RNA, 19 nt, Homo sapiens
  misc_RNA (1)...(19): siRNA sense strand
gaaggagaaguuauucaau

SEQ ID NO: 1575621 - RNA, 19 nt, Homo sapiens
  misc_RNA (1)...(19): siRNA sense strand
ggcaagaggcucaagaaga

SEQ ID NO: 1575622 - RNA, 19 nt, Homo sapiens
  misc_RNA (1)...(19): siRNA sense strand
aggagaaguuauucaauga

SEQ ID NO: 1575623 - RNA, 19 nt, Homo sapiens
  misc_RNA (1)...(19): siRNA sense strand
gaagacaaccgugaagaag

SEQ ID NO: 1575624 - RNA, 19 nt, Homo sapiens
  misc_RNA (1)...(19): siRNA sense strand
guaaaggugccuaugaaca

SEQ ID NO: 1575625 - RNA, 19 nt, Homo sapiens
  misc_RNA (1)...(19): siRNA sense strand
ggcaaaggcaugaagaaug

SEQ ID NO: 1575626 - RNA, 19 nt, Homo sapiens
  misc_RNA (1)...(19): siRNA sense strand
ggagaaagagccagagaac

SEQ ID NO: 1575627 - RNA, 19 nt, Homo sapiens
  misc_RNA (1)...(19): siRNA sense strand
gagaagggcaaaggcauga

SEQ ID NO: 1575628 - RNA, 19 nt, Homo sapiens
  misc_RNA (1)...(19): siRNA sense strand
gaagaagacaaccgugaag

SEQ ID NO: 1575629 - RNA, 19 nt, Homo sapiens
  misc_RNA (1)...(19): siRNA sense strand
caaaguccaucggaagaca

SEQ ID NO: 1575630 - RNA, 19 nt, Homo sapiens
  misc_RNA (1)...(19): siRNA sense strand
aaacaagauucccuuacca

SEQ ID NO: 1575631 - RNA, 19 nt, Homo sapiens
  misc_RNA (1)...(19): siRNA sense strand
gaaccaggagccuauugug

SEQ ID NO: 1575632 - RNA, 19 nt, Homo sapiens
  misc_RNA (1)...(19): siRNA sense strand
agaagaagaacaagaagga

SEQ ID NO: 1575633 - RNA, 19 nt, Homo sapiens
  misc_RNA (1)...(19): siRNA sense strand
cugacaagaagaagaaaua

SEQ ID NO: 1575634 - RNA, 19 nt, Homo sapiens
  misc_RNA (1)...(19): siRNA sense strand
gaucgccauugcugugguu

SEQ ID NO: 1575635 - RNA, 19 nt, Homo sapiens
  misc_RNA (1)...(19): siRNA sense strand
ucgagcagauucagaaagu

SEQ ID NO: 1575636 - RNA, 19 nt, Homo sapiens
  misc_RNA (1)...(19): siRNA sense strand
uaaacaagauucccuuacc

SEQ ID NO: 1575637 - RNA, 19 nt, Homo sapiens
  misc_RNA (1)...(19): siRNA sense strand
gacaagaagaagaaauaug

SEQ ID NO: 1575638 - RNA, 19 nt, Homo sapiens
  misc_RNA (1)...(19): siRNA sense strand
gaagaagaagaacaagaag

SEQ ID NO: 1575639 - RNA, 19 nt, Homo sapiens
  misc_RNA (1)...(19): siRNA sense strand
gaaauaugagaccaaaguc

SEQ ID NO: 1575640 - RNA, 19 nt, Homo sapiens
  misc_RNA (1)...(19): siRNA sense strand
agaaauaugagaccaaagu

SEQ ID NO: 1575641 - RNA, 19 nt, Homo sapiens
  misc_RNA (1)...(19): siRNA sense strand
cagagaaccugggcaaacu

SEQ ID NO: 1575642 - RNA, 19 nt, Homo sapiens
  misc_RNA (1)...(19): siRNA sense strand
ugaagaagaagacccugaa

SEQ ID NO: 1575643 - RNA, 19 nt, Homo sapiens
  misc_RNA (1)...(19): siRNA sense strand
agguaaaggugccuaugaa

SEQ ID NO: 1575644 - RNA, 19 nt, Homo sapiens
  misc_RNA (1)...(19): siRNA sense strand
gaccgcuucuccaaacaug

SEQ ID NO: 1575645 - RNA, 19 nt, Homo sapiens
  misc_RNA (1)...(19): siRNA sense strand
gcugcaagaagaagaagaa

SEQ ID NO: 1575646 - RNA, 19 nt, Homo sapiens
  misc_RNA (1)...(19): siRNA sense strand
aaaugcugcugcaagaaga

SEQ ID NO: 1575647 - RNA, 19 nt, Homo sapiens
  misc_RNA (1)...(19): siRNA sense strand
ggaaccaggagccuauugu

SEQ ID NO: 1575648 - RNA, 19 nt, Homo sapiens
  misc_RNA (1)...(19): siRNA sense strand
gggcaaaacucuggugaug

SEQ ID NO: 1575649 - RNA, 19 nt, Homo sapiens
  misc_RNA (1)...(19): siRNA sense strand
uugccaaacugaaggagaa

SEQ ID NO: 1575650 - RNA, 19 nt, Homo sapiens
  misc_RNA (1)...(19): siRNA sense strand
ccucagacccuuaugucaa

SEQ ID NO: 1575651 - RNA, 19 nt, Homo sapiens
  misc_RNA (1)...(19): siRNA sense strand
ugaagaaugccaugaacau

SEQ ID NO: 1575652 - RNA, 19 nt, Homo sapiens
  misc_RNA (1)...(19): siRNA sense strand
agaagacaaccgugaagaa

SEQ ID NO: 1575653 - RNA, 19 nt, Homo sapiens
  misc_RNA (1)...(19): siRNA sense strand
gggcaaaggcaugaagaau

SEQ ID NO: 1575654 - RNA, 19 nt, Homo sapiens
  misc_RNA (1)...(19): siRNA sense strand
gcaccucagacccuuaugu

SEQ ID NO: 1575655 - RNA, 19 nt, Homo sapiens
  misc_RNA (1)...(19): siRNA sense strand
agaagaacaagaaggagaa

SEQ ID NO: 1575656 - RNA, 19 nt, Homo sapiens
  misc_RNA (1)...(19): siRNA sense strand
gaggagaaagagccagaga

SEQ ID NO: 1575657 - RNA, 19 nt, Homo sapiens
  misc_RNA (1)...(19): siRNA sense strand
gaagggcaaaggcaugaag

SEQ ID NO: 1575658 - RNA, 19 nt, Homo sapiens
  misc_RNA (1)...(19): siRNA sense strand
agaagaagacaaccgugaa

SEQ ID NO: 1575659 - RNA, 19 nt, Homo sapiens
  misc_RNA (1)...(19): siRNA sense strand
ucaagaagaagaagacaac

SEQ ID NO: 1575660 - RNA, 19 nt, Homo sapiens
  misc_RNA (1)...(19): siRNA sense strand
gagucaggaggacauguuu

SEQ ID NO: 1575661 - RNA, 19 nt, Homo sapiens
  misc_RNA (1)...(19): siRNA sense strand
cggagaagcugggcgacau

SEQ ID NO: 1575662 - RNA, 19 nt, Homo sapiens
  misc_RNA (1)...(19): siRNA sense strand
uuaccacccugggcacuga

SEQ ID NO: 1575663 - RNA, 19 nt, Homo sapiens
  misc_RNA (1)...(19): siRNA sense strand
augacaagcugggcaagaa

SEQ ID NO: 1575664 - RNA, 19 nt, Homo sapiens
  misc_RNA (1)...(19): siRNA sense strand
agauccaccugaugcagaa

SEQ ID NO: 1575665 - RNA, 19 nt, Homo sapiens
  misc_RNA (1)...(19): siRNA sense strand
ggccaucuaugacuuugac

SEQ ID NO: 1575666 - RNA, 19 nt, Homo sapiens
  misc_RNA (1)...(19): siRNA sense strand
gcugggcuccugcuucuca

SEQ ID NO: 1575667 - RNA, 19 nt, Homo sapiens
  misc_RNA (1)...(19): siRNA sense strand
agaaagagccagagaaccu

SEQ ID NO: 1575668 - RNA, 19 nt, Homo sapiens
  misc_RNA (1)...(19): siRNA sense strand
ucagaaaguccagguagug

SEQ ID NO: 1575669 - RNA, 19 nt, Homo sapiens
  misc_RNA (1)...(19): siRNA sense strand
aggcuaagaaccucaagaa

SEQ ID NO: 1575670 - RNA, 19 nt, Homo sapiens
  misc_RNA (1)...(19): siRNA sense strand
ugacgacgacgcagagaca

SEQ ID NO: 1575671 - RNA, 19 nt, Homo sapiens
  misc_RNA (1)...(19): siRNA sense strand
gaagaagaagacccugaac

SEQ ID NO: 1575672 - RNA, 19 nt, Homo sapiens
  misc_RNA (1)...(19): siRNA sense strand
aaaggugccuaugaacaca

SEQ ID NO: 1575673 - RNA, 19 nt, Homo sapiens
  misc_RNA (1)...(19): siRNA sense strand
uaaaggugccuaugaacac

SEQ ID NO: 1575674 - RNA, 19 nt, Homo sapiens
  misc_RNA (1)...(19): siRNA sense strand
gcaagaaaugcugcugcaa

SEQ ID NO: 1575675 - RNA, 19 nt, Homo sapiens
  misc_RNA (1)...(19): siRNA sense strand
ggagaaguuauucaaugag

SEQ ID NO: 1575676 - RNA, 19 nt, Homo sapiens
  misc_RNA (1)...(19): siRNA sense strand
gcaagaacgaagccauagg

SEQ ID NO: 1575677 - RNA, 19 nt, Homo sapiens
  misc_RNA (1)...(19): siRNA sense strand
ucaacgaguccuucagcuu

SEQ ID NO: 1575678 - RNA, 19 nt, Homo sapiens
  misc_RNA (1)...(19): siRNA sense strand
ggaguggagagaccugcaa

SEQ ID NO: 1575679 - RNA, 19 nt, Homo sapiens
  misc_RNA (1)...(19): siRNA sense strand
caagaaggagaagggcaaa

SEQ ID NO: 1575680 - RNA, 19 nt, Homo sapiens
  misc_RNA (1)...(19): siRNA sense strand
aagaagaagaagaacaaga

SEQ ID NO: 1575681 - RNA, 19 nt, Homo sapiens
  misc_RNA (1)...(19): siRNA sense strand
agaggaaccaggagccuau

SEQ ID NO: 1575682 - RNA, 19 nt, Homo sapiens
  misc_RNA (1)...(19): siRNA sense strand
gaagccauaggcaagaucu

SEQ ID NO: 1575683 - RNA, 19 nt, Homo sapiens
  misc_RNA (1)...(19): siRNA sense strand
aacgaguccuucagcuuug

SEQ ID NO: 1575684 - RNA, 19 nt, Homo sapiens
  misc_RNA (1)...(19): siRNA sense strand
gggcacugaucgccauugc

SEQ ID NO: 1575685 - RNA, 19 nt, Homo sapiens
  misc_RNA (1)...(19): siRNA sense strand
cagagacaggccugacuga

SEQ ID NO: 1575686 - RNA, 19 nt, Homo sapiens
  misc_RNA (1)...(19): siRNA sense strand
gaucuucgugggcagcaau

SEQ ID NO: 1575687 - RNA, 19 nt, Homo sapiens
  misc_RNA (1)...(19): siRNA sense strand
gaagaacaagaaggagaag

SEQ ID NO: 1575688 - RNA, 19 nt, Homo sapiens
  misc_RNA (1)...(19): siRNA sense strand
aagacaaccgugaagaaga

SEQ ID NO: 1575689 - RNA, 19 nt, Homo sapiens
  misc_RNA (1)...(19): siRNA sense strand
gcacuccugggcaagaaca

SEQ ID NO: 1575690 - RNA, 19 nt, Homo sapiens
  misc_RNA (1)...(19): siRNA sense strand
gaacaacccucccaccauu

SEQ ID NO: 1575691 - RNA, 19 nt, Homo sapiens
  misc_RNA (1)...(19): siRNA sense strand
uaacagugcuggagacaug

SEQ ID NO: 1575692 - RNA, 19 nt, Homo sapiens
  misc_RNA (1)...(19): siRNA sense strand
acaaagugcuugcucugua

SEQ ID NO: 1575693 - RNA, 19 nt, Homo sapiens
  misc_RNA (1)...(19): siRNA sense strand
caaagcugcugaaaugguu

SEQ ID NO: 1575694 - RNA, 19 nt, Homo sapiens
  misc_RNA (1)...(19): siRNA sense strand
ggagaucugugacaucauc

SEQ ID NO: 1575695 - RNA, 19 nt, Homo sapiens
  misc_RNA (1)...(19): siRNA sense strand
gacaagugcugguuccuau

SEQ ID NO: 1575696 - RNA, 19 nt, Homo sapiens
  misc_RNA (1)...(19): siRNA sense strand
agaauuauaucucccaaga

SEQ ID NO: 1575697 - RNA, 19 nt, Homo sapiens
  misc_RNA (1)...(19): siRNA sense strand
gagcucaucucccgagugu

SEQ ID NO: 1575698 - RNA, 19 nt, Homo sapiens
  misc_RNA (1)...(19): siRNA sense strand
acagauggcucccugcaaa

SEQ ID NO: 1575699 - RNA, 19 nt, Homo sapiens
  misc_RNA (1)...(19): siRNA sense strand
caagugaagaguuugauaa

SEQ ID NO: 1575700 - RNA, 19 nt, Homo sapiens
  misc_RNA (1)...(19): siRNA sense strand
caaagugcuugcucuguau

SEQ ID NO: 1575701 - RNA, 19 nt, Homo sapiens
  misc_RNA (1)...(19): siRNA sense strand
agucaugucugagauguua

SEQ ID NO: 1575702 - RNA, 19 nt, Homo sapiens
  misc_RNA (1)...(19): siRNA sense strand
gagcagcgccagacgguaa

SEQ ID NO: 1575703 - RNA, 19 nt, Homo sapiens
  misc_RNA (1)...(19): siRNA sense strand
agccaaagcugcugaaaug

SEQ ID NO: 1575704 - RNA, 19 nt, Homo sapiens
  misc_RNA (1)...(19): siRNA sense strand
uaagcgaaguuacugaaga

SEQ ID NO: 1575705 - RNA, 19 nt, Homo sapiens
  misc_RNA (1)...(19): siRNA sense strand
ggaggagggugucacaagu

SEQ ID NO: 1575706 - RNA, 19 nt, Homo sapiens
  misc_RNA (1)...(19): siRNA sense strand
ugacggcuuugacauguuu

SEQ ID NO: 1575707 - RNA, 19 nt, Homo sapiens
  misc_RNA (1)...(19): siRNA sense strand
gauuggacguugaauaugg

SEQ ID NO: 1575708 - RNA, 19 nt, Homo sapiens
  misc_RNA (1)...(19): siRNA sense strand
gccagacgguaaccuauga

SEQ ID NO: 1575709 - RNA, 19 nt, Homo sapiens
  misc_RNA (1)...(19): siRNA sense strand
acgaugaccucaacaaugu

SEQ ID NO: 1575710 - RNA, 19 nt, Homo sapiens
  misc_RNA (1)...(19): siRNA sense strand
ucaguucacuccagcaaug

SEQ ID NO: 1575711 - RNA, 19 nt, Homo sapiens
  misc_RNA (1)...(19): siRNA sense strand
gaggauuggacguugaaua

SEQ ID NO: 1575712 - RNA, 19 nt, Homo sapiens
  misc_RNA (1)...(19): siRNA sense strand
gacaggaggauucaucuga

SEQ ID NO: 1575713 - RNA, 19 nt, Homo sapiens
  misc_RNA (1)...(19): siRNA sense strand
gagauuucaucgacagugu

SEQ ID NO: 1575714 - RNA, 19 nt, Homo sapiens
  misc_RNA (1)...(19): siRNA sense strand
caucacagccaauucagaa

SEQ ID NO: 1575715 - RNA, 19 nt, Homo sapiens
  misc_RNA (1)...(19): siRNA sense strand
ggacgucguucgaggaaac

SEQ ID NO: 1575716 - RNA, 19 nt, Homo sapiens
  misc_RNA (1)...(19): siRNA sense strand
ggaguacuaagcgaaguua

SEQ ID NO: 1575717 - RNA, 19 nt, Homo sapiens
  misc_RNA (1)...(19): siRNA sense strand
agacaugugugaagaacug

SEQ ID NO: 1575718 - RNA, 19 nt, Homo sapiens
  misc_RNA (1)...(19): siRNA sense strand
ggacaagugcugguuccua

SEQ ID NO: 1575719 - RNA, 19 nt, Homo sapiens
  misc_RNA (1)...(19): siRNA sense strand
acacaaaagucaugucuga

SEQ ID NO: 1575720 - RNA, 19 nt, Homo sapiens
  misc_RNA (1)...(19): siRNA sense strand
gccaaaggaugccauucga

SEQ ID NO: 1575721 - RNA, 19 nt, Homo sapiens
  misc_RNA (1)...(19): siRNA sense strand
ggacuugcuucugcacuag

SEQ ID NO: 1575722 - RNA, 19 nt, Homo sapiens
  misc_RNA (1)...(19): siRNA sense strand
caucugaucuggaguugcu

SEQ ID NO: 1575723 - RNA, 19 nt, Homo sapiens
  misc_RNA (1)...(19): siRNA sense strand
cgaaguuacugaagacaac

SEQ ID NO: 1575724 - RNA, 19 nt, Homo sapiens
  misc_RNA (1)...(19): siRNA sense strand
caacgaugaccucaacaau

SEQ ID NO: 1575725 - RNA, 19 nt, Homo sapiens
  misc_RNA (1)...(19): siRNA sense strand
ggagacaugugugaagaac

SEQ ID NO: 1575726 - RNA, 19 nt, Homo sapiens
  misc_RNA (1)...(19): siRNA sense strand
ggaggaagggccaaaggau

SEQ ID NO: 1575727 - RNA, 19 nt, Homo sapiens
  misc_RNA (1)...(19): siRNA sense strand
ugccagcaauggaguacua

SEQ ID NO: 1575728 - RNA, 19 nt, Homo sapiens
  misc_RNA (1)...(19): siRNA sense strand
gagccaaagcugcugaaau

SEQ ID NO: 1575729 - RNA, 19 nt, Homo sapiens
  misc_RNA (1)...(19): siRNA sense strand
gaacuacagagaggugaug

SEQ ID NO: 1575730 - RNA, 19 nt, Homo sapiens
  misc_RNA (1)...(19): siRNA sense strand
gaauuauaucucccaagaa

SEQ ID NO: 1575731 - RNA, 19 nt, Homo sapiens
  misc_RNA (1)...(19): siRNA sense strand
aauuauaucucccaagaac

SEQ ID NO: 1575732 - RNA, 19 nt, Homo sapiens
  misc_RNA (1)...(19): siRNA sense strand
caagugcugguuccuauuc

SEQ ID NO: 1575733 - RNA, 19 nt, Homo sapiens
  misc_RNA (1)...(19): siRNA sense strand
gacgguaaccuaugaggau

SEQ ID NO: 1575734 - RNA, 19 nt, Homo sapiens
  misc_RNA (1)...(19): siRNA sense strand
guacuaagcgaaguuacug

SEQ ID NO: 1575735 - RNA, 19 nt, Homo sapiens
  misc_RNA (1)...(19): siRNA sense strand
ggaaguaagagccaaagcu

SEQ ID NO: 1575736 - RNA, 19 nt, Homo sapiens
  misc_RNA (1)...(19): siRNA sense strand
ggacguugaauauggagau

SEQ ID NO: 1575737 - RNA, 19 nt, Homo sapiens
  misc_RNA (1)...(19): siRNA sense strand
gaaugccagcaauggagua

SEQ ID NO: 1575738 - RNA, 19 nt, Homo sapiens
  misc_RNA (1)...(19): siRNA sense strand
cagagugucccgugaagug

SEQ ID NO: 1575739 - RNA, 19 nt, Homo sapiens
  misc_RNA (1)...(19): siRNA sense strand
acaagugaagaguuugaua

SEQ ID NO: 1575740 - RNA, 19 nt, Homo sapiens
  misc_RNA (1)...(19): siRNA sense strand
ugaauauggagaucuguga

SEQ ID NO: 1575741 - RNA, 19 nt, Homo sapiens
  misc_RNA (1)...(19): siRNA sense strand
aaagucaugucugagaugu

SEQ ID NO: 1575742 - RNA, 19 nt, Homo sapiens
  misc_RNA (1)...(19): siRNA sense strand
gaucugugacaucaucaau

SEQ ID NO: 1575743 - RNA, 19 nt, Homo sapiens
  misc_RNA (1)...(19): siRNA sense strand
ggaaccggaacuacagaga

SEQ ID NO: 1575744 - RNA, 19 nt, Homo sapiens
  misc_RNA (1)...(19): siRNA sense strand
ccugaagggugaugaucug

SEQ ID NO: 1575745 - RNA, 19 nt, Homo sapiens
  misc_RNA (1)...(19): siRNA sense strand
caggaggauucaucugauc

SEQ ID NO: 1575746 - RNA, 19 nt, Homo sapiens
  misc_RNA (1)...(19): siRNA sense strand
acaggaggauucaucugau

SEQ ID NO: 1575747 - RNA, 19 nt, Homo sapiens
  misc_RNA (1)...(19): siRNA sense strand
aggauuggacguugaauau

SEQ ID NO: 1575748 - RNA, 19 nt, Homo sapiens
  misc_RNA (1)...(19): siRNA sense strand
uuauaucucccaagaacaa

SEQ ID NO: 1575749 - RNA, 19 nt, Homo sapiens
  misc_RNA (1)...(19): siRNA sense strand
gcuugcaggcuuagacuug

SEQ ID NO: 1575750 - RNA, 19 nt, Homo sapiens
  misc_RNA (1)...(19): siRNA sense strand
guucacuccagcaauguaa

SEQ ID NO: 1575751 - RNA, 19 nt, Homo sapiens
  misc_RNA (1)...(19): siRNA sense strand
ccaaagcugcugaaauggu

SEQ ID NO: 1575752 - RNA, 19 nt, Homo sapiens
  misc_RNA (1)...(19): siRNA sense strand
gaggagggugucacaagug

SEQ ID NO: 1575753 - RNA, 19 nt, Homo sapiens
  misc_RNA (1)...(19): siRNA sense strand
cgugacggcuuugacaugu

SEQ ID NO: 1575754 - RNA, 19 nt, Homo sapiens
  misc_RNA (1)...(19): siRNA sense strand
gccgauccguucagaaugc

SEQ ID NO: 1575755 - RNA, 19 nt, Homo sapiens
  misc_RNA (1)...(19): siRNA sense strand
aggacuugcuucugcacua

SEQ ID NO: 1575756 - RNA, 19 nt, Homo sapiens
  misc_RNA (1)...(19): siRNA sense strand
gcgaaguuacugaagacaa

SEQ ID NO: 1575757 - RNA, 19 nt, Homo sapiens
  misc_RNA (1)...(19): siRNA sense strand
ucacagcagaggacaagug

SEQ ID NO: 1575758 - RNA, 19 nt, Homo sapiens
  misc_RNA (1)...(19): siRNA sense strand
caaaagucaugucugagau

SEQ ID NO: 1575759 - RNA, 19 nt, Homo sapiens
  misc_RNA (1)...(19): siRNA sense strand
cgacaguguucuggucaag

SEQ ID NO: 1575760 - RNA, 19 nt, Homo sapiens
  misc_RNA (1)...(19): siRNA sense strand
augagagguucgagaggua

SEQ ID NO: 1575761 - RNA, 19 nt, Homo sapiens
  misc_RNA (1)...(19): siRNA sense strand
ggacaggaggauucaucug

SEQ ID NO: 1575762 - RNA, 19 nt, Homo sapiens
  misc_RNA (1)...(19): siRNA sense strand
ggauuggacguugaauaug

SEQ ID NO: 1575763 - RNA, 19 nt, Homo sapiens
  misc_RNA (1)...(19): siRNA sense strand
cuggagacaugugugaaga

SEQ ID NO: 1575764 - RNA, 19 nt, Homo sapiens
  misc_RNA (1)...(19): siRNA sense strand
guucagaaugccagcaaug

SEQ ID NO: 1575765 - RNA, 19 nt, Homo sapiens
  misc_RNA (1)...(19): siRNA sense strand
ucaacgaugaccucaacaa

SEQ ID NO: 1575766 - RNA, 19 nt, Homo sapiens
  misc_RNA (1)...(19): siRNA sense strand
ucacagccaauucagaaca

SEQ ID NO: 1575767 - RNA, 19 nt, Homo sapiens
  misc_RNA (1)...(19): siRNA sense strand
auggagaucugugacauca

SEQ ID NO: 1575768 - RNA, 19 nt, Homo sapiens
  misc_RNA (1)...(19): siRNA sense strand
aaagugaggauuggacguu

SEQ ID NO: 1575769 - RNA, 19 nt, Homo sapiens
  misc_RNA (1)...(19): siRNA sense strand
gacaaagugcuugcucugu

SEQ ID NO: 1575770 - RNA, 19 nt, Homo sapiens
  misc_RNA (1)...(19): siRNA sense strand
ucucccgaguguccaauga

SEQ ID NO: 1575771 - RNA, 19 nt, Homo sapiens
  misc_RNA (1)...(19): siRNA sense strand
gugacggcuuugacauguu

SEQ ID NO: 1575772 - RNA, 19 nt, Homo sapiens
  misc_RNA (1)...(19): siRNA sense strand
ucagaaugccagcaaugga

SEQ ID NO: 1575773 - RNA, 19 nt, Homo sapiens
  misc_RNA (1)...(19): siRNA sense strand
caacccucccaccauugua

SEQ ID NO: 1575774 - RNA, 19 nt, Homo sapiens
  misc_RNA (1)...(19): siRNA sense strand
gauuucaucgacaguguuc

SEQ ID NO: 1575775 - RNA, 19 nt, Homo sapiens
  misc_RNA (1)...(19): siRNA sense strand
uacugaagacaacuuacua

SEQ ID NO: 1575776 - RNA, 19 nt, Homo sapiens
  misc_RNA (1)...(19): siRNA sense strand
cggccgauccguucagaau

SEQ ID NO: 1575777 - RNA, 19 nt, Homo sapiens
  misc_RNA (1)...(19): siRNA sense strand
ggaggauucaucugaucug

SEQ ID NO: 1575778 - RNA, 19 nt, Homo sapiens
  misc_RNA (1)...(19): siRNA sense strand
gccauucgagcccugaaga

SEQ ID NO: 1575779 - RNA, 19 nt, Homo sapiens
  misc_RNA (1)...(19): siRNA sense strand
ggagagaguuugaggugua

SEQ ID NO: 1575780 - RNA, 19 nt, Homo sapiens
  misc_RNA (1)...(19): siRNA sense strand
uggagaaacugccacauga

SEQ ID NO: 1575781 - RNA, 19 nt, Homo sapiens
  misc_RNA (1)...(19): siRNA sense strand
gcagauggcaagaagauug

SEQ ID NO: 1575782 - RNA, 19 nt, Homo sapiens
  misc_RNA (1)...(19): siRNA sense strand
gagaaacugccacaugaaa

SEQ ID NO: 1575783 - RNA, 19 nt, Homo sapiens
  misc_RNA (1)...(19): siRNA sense strand
gagagugaauuaugacaca

SEQ ID NO: 1575784 - RNA, 19 nt, Homo sapiens
  misc_RNA (1)...(19): siRNA sense strand
gaauacacauggucuacag

SEQ ID NO: 1575785 - RNA, 19 nt, Homo sapiens
  misc_RNA (1)...(19): siRNA sense strand
gcuaugccuucaucgagua

SEQ ID NO: 1575786 - RNA, 19 nt, Homo sapiens
  misc_RNA (1)...(19): siRNA sense strand
gcacuccgcuuacaaacac

SEQ ID NO: 1575787 - RNA, 19 nt, Homo sapiens
  misc_RNA (1)...(19): siRNA sense strand
gaaaagacgggaaaagauu

SEQ ID NO: 1575788 - RNA, 19 nt, Homo sapiens
  misc_RNA (1)...(19): siRNA sense strand
guacggaccuaucaaaaga

SEQ ID NO: 1575789 - RNA, 19 nt, Homo sapiens
  misc_RNA (1)...(19): siRNA sense strand
agacagagcuuaaaaugug

SEQ ID NO: 1575790 - RNA, 19 nt, Homo sapiens
  misc_RNA (1)...(19): siRNA sense strand
uggcgagagugaauuauga

SEQ ID NO: 1575791 - RNA, 19 nt, Homo sapiens
  misc_RNA (1)...(19): siRNA sense strand
gaaguggagacagagcuua

SEQ ID NO: 1575792 - RNA, 19 nt, Homo sapiens
  misc_RNA (1)...(19): siRNA sense strand
gagacaugcacuccgcuua

SEQ ID NO: 1575793 - RNA, 19 nt, Homo sapiens
  misc_RNA (1)...(19): siRNA sense strand
ggagaaacugccacaugaa

SEQ ID NO: 1575794 - RNA, 19 nt, Homo sapiens
  misc_RNA (1)...(19): siRNA sense strand
ggagaauggguauuugaug

SEQ ID NO: 1575795 - RNA, 19 nt, Homo sapiens
  misc_RNA (1)...(19): siRNA sense strand
ugaauuaugacacaacaga

SEQ ID NO: 1575796 - RNA, 19 nt, Homo sapiens
  misc_RNA (1)...(19): siRNA sense strand
gccguacauucgagaguuu

SEQ ID NO: 1575797 - RNA, 19 nt, Homo sapiens
  misc_RNA (1)...(19): siRNA sense strand
caacgacagccgagacaug

SEQ ID NO: 1575798 - RNA, 19 nt, Homo sapiens
  misc_RNA (1)...(19): siRNA sense strand
acacgcagauggcaagaag

SEQ ID NO: 1575799 - RNA, 19 nt, Homo sapiens
  misc_RNA (1)...(19): siRNA sense strand
acaguaagcggucaggaaa

SEQ ID NO: 1575800 - RNA, 19 nt, Homo sapiens
  misc_RNA (1)...(19): siRNA sense strand
gaauuaugacacaacagaa

SEQ ID NO: 1575801 - RNA, 19 nt, Homo sapiens
  misc_RNA (1)...(19): siRNA sense strand
aauccaagcuccggagaga

SEQ ID NO: 1575802 - RNA, 19 nt, Homo sapiens
  misc_RNA (1)...(19): siRNA sense strand
uacacauggucuacaguaa

SEQ ID NO: 1575803 - RNA, 19 nt, Homo sapiens
  misc_RNA (1)...(19): siRNA sense strand
gacaugcacuccgcuuaca

SEQ ID NO: 1575804 - RNA, 19 nt, Homo sapiens
  misc_RNA (1)...(19): siRNA sense strand
acaccacaaucaaccuuau

SEQ ID NO: 1575805 - RNA, 19 nt, Homo sapiens
  misc_RNA (1)...(19): siRNA sense strand
agcaagaaguggagacaga

SEQ ID NO: 1575806 - RNA, 19 nt, Homo sapiens
  misc_RNA (1)...(19): siRNA sense strand
gguguacggaccuaucaaa

SEQ ID NO: 1575807 - RNA, 19 nt, Homo sapiens
  misc_RNA (1)...(19): siRNA sense strand
ggaaaagacgggaaaagau

SEQ ID NO: 1575808 - RNA, 19 nt, Homo sapiens
  misc_RNA (1)...(19): siRNA sense strand
ggagacagagcuuaaaaug

SEQ ID NO: 1575809 - RNA, 19 nt, Homo sapiens
  misc_RNA (1)...(19): siRNA sense strand
gugggacccucacaaugau

SEQ ID NO: 1575810 - RNA, 19 nt, Homo sapiens
  misc_RNA (1)...(19): siRNA sense strand
cuaccuggcuccggagaau

SEQ ID NO: 1575811 - RNA, 19 nt, Homo sapiens
  misc_RNA (1)...(19): siRNA sense strand
ucacaaugaucccaaugcu

SEQ ID NO: 1575812 - RNA, 19 nt, Homo sapiens
  misc_RNA (1)...(19): siRNA sense strand
auacacauggucuacagua

SEQ ID NO: 1575813 - RNA, 19 nt, Homo sapiens
  misc_RNA (1)...(19): siRNA sense strand
cccgugacccuauuccaua

SEQ ID NO: 1575814 - RNA, 19 nt, Homo sapiens
  misc_RNA (1)...(19): siRNA sense strand
caaccuuauuguggcauug

SEQ ID NO: 1575815 - RNA, 19 nt, Homo sapiens
  misc_RNA (1)...(19): siRNA sense strand
gggaugccuucaagacucu

SEQ ID NO: 1575816 - RNA, 19 nt, Homo sapiens
  misc_RNA (1)...(19): siRNA sense strand
gcauugcgccguacauucg

SEQ ID NO: 1575817 - RNA, 19 nt, Homo sapiens
  misc_RNA (1)...(19): siRNA sense strand
gagagaguuugagguguac

SEQ ID NO: 1575818 - RNA, 19 nt, Homo sapiens
  misc_RNA (1)...(19): siRNA sense strand
cagauggcaagaagauuga

SEQ ID NO: 1575819 - RNA, 19 nt, Homo sapiens
  misc_RNA (1)...(19): siRNA sense strand
aaagaauacacauggucua

SEQ ID NO: 1575820 - RNA, 19 nt, Homo sapiens
  misc_RNA (1)...(19): siRNA sense strand
caugcacuccgcuuacaaa

SEQ ID NO: 1575821 - RNA, 19 nt, Homo sapiens
  misc_RNA (1)...(19): siRNA sense strand
ucaaccuuauuguggcauu

SEQ ID NO: 1575822 - RNA, 19 nt, Homo sapiens
  misc_RNA (1)...(19): siRNA sense strand
ugacaccucccgcuacgau

SEQ ID NO: 1575823 - RNA, 19 nt, Homo sapiens
  misc_RNA (1)...(19): siRNA sense strand
gagcggcgacagcaagaag

SEQ ID NO: 1575824 - RNA, 19 nt, Homo sapiens
  misc_RNA (1)...(19): siRNA sense strand
cgaacacgagcgagacaug

SEQ ID NO: 1575825 - RNA, 19 nt, Homo sapiens
  misc_RNA (1)...(19): siRNA sense strand
aaacaccacaaucaaccuu

SEQ ID NO: 1575826 - RNA, 19 nt, Homo sapiens
  misc_RNA (1)...(19): siRNA sense strand
uacaguaagcggucaggaa

SEQ ID NO: 1575827 - RNA, 19 nt, Homo sapiens
  misc_RNA (1)...(19): siRNA sense strand
cgccguacauucgagaguu

SEQ ID NO: 1575828 - RNA, 19 nt, Homo sapiens
  misc_RNA (1)...(19): siRNA sense strand
cacauggucuacaguaagc

SEQ ID NO: 1575829 - RNA, 19 nt, Homo sapiens
  misc_RNA (1)...(19): siRNA sense strand
cgacagccgagacauguac

SEQ ID NO: 1575830 - RNA, 19 nt, Homo sapiens
  misc_RNA (1)...(19): siRNA sense strand
ccucggugguaccagaaga

SEQ ID NO: 1575831 - RNA, 19 nt, Homo sapiens
  misc_RNA (1)...(19): siRNA sense strand
gcacacagauguuuccaaa

SEQ ID NO: 1575832 - RNA, 19 nt, Homo sapiens
  misc_RNA (1)...(19): siRNA sense strand
gaauaguugugucauguua

SEQ ID NO: 1575833 - RNA, 19 nt, Homo sapiens
  misc_RNA (1)...(19): siRNA sense strand
agaauaagcugaacaguug

SEQ ID NO: 1575834 - RNA, 19 nt, Homo sapiens
  misc_RNA (1)...(19): siRNA sense strand
ucucauagguugucuuaua

SEQ ID NO: 1575835 - RNA, 19 nt, Homo sapiens
  misc_RNA (1)...(19): siRNA sense strand
gaaacaacaugauggacaa

SEQ ID NO: 1575836 - RNA, 19 nt, Homo sapiens
  misc_RNA (1)...(19): siRNA sense strand
gcaaugauauccacuugug

SEQ ID NO: 1575837 - RNA, 19 nt, Homo sapiens
  misc_RNA (1)...(19): siRNA sense strand
ccaauacggucauuagauu

SEQ ID NO: 1575838 - RNA, 19 nt, Homo sapiens
  misc_RNA (1)...(19): siRNA sense strand
gaacaagacauacuucaau

SEQ ID NO: 1575839 - RNA, 19 nt, Homo sapiens
  misc_RNA (1)...(19): siRNA sense strand
acaccaagguacaauguua

SEQ ID NO: 1575840 - RNA, 19 nt, Homo sapiens
  misc_RNA (1)...(19): siRNA sense strand
ggucuaauauguacucgaa

SEQ ID NO: 1575841 - RNA, 19 nt, Homo sapiens
  misc_RNA (1)...(19): siRNA sense strand
gaagaaacauacuguccau

SEQ ID NO: 1575842 - RNA, 19 nt, Homo sapiens
  misc_RNA (1)...(19): siRNA sense strand
ucaagcuucuggucuaaua

SEQ ID NO: 1575843 - RNA, 19 nt, Homo sapiens
  misc_RNA (1)...(19): siRNA sense strand
ggaauaagaauaagcugaa

SEQ ID NO: 1575844 - RNA, 19 nt, Homo sapiens
  misc_RNA (1)...(19): siRNA sense strand
gaaagcagcuccccaacuu

SEQ ID NO: 1575845 - RNA, 19 nt, Homo sapiens
  misc_RNA (1)...(19): siRNA sense strand
ccacaggaaugaagagaga

SEQ ID NO: 1575846 - RNA, 19 nt, Homo sapiens
  misc_RNA (1)...(19): siRNA sense strand
cagaauuccucaucaaaug

SEQ ID NO: 1575847 - RNA, 19 nt, Homo sapiens
  misc_RNA (1)...(19): siRNA sense strand
gaccagacaucuuugaagu

SEQ ID NO: 1575848 - RNA, 19 nt, Homo sapiens
  misc_RNA (1)...(19): siRNA sense strand
auacagcagugccuauaua

SEQ ID NO: 1575849 - RNA, 19 nt, Homo sapiens
  misc_RNA (1)...(19): siRNA sense strand
uaccuuagcucuugcuuau

SEQ ID NO: 1575850 - RNA, 19 nt, Homo sapiens
  misc_RNA (1)...(19): siRNA sense strand
ggguggagaccaaauaaua

SEQ ID NO: 1575851 - RNA, 19 nt, Homo sapiens
  misc_RNA (1)...(19): siRNA sense strand
agaaguaccugccauccaa

SEQ ID NO: 1575852 - RNA, 19 nt, Homo sapiens
  misc_RNA (1)...(19): siRNA sense strand
cuucucagcugcaaauauu

SEQ ID NO: 1575853 - RNA, 19 nt, Homo sapiens
  misc_RNA (1)...(19): siRNA sense strand
ggaugaugauuaugaaaca

SEQ ID NO: 1575854 - RNA, 19 nt, Homo sapiens
  misc_RNA (1)...(19): siRNA sense strand
caacauacuuugauuaccu

SEQ ID NO: 1575855 - RNA, 19 nt, Homo sapiens
  misc_RNA (1)...(19): siRNA sense strand
gauugggucaucuugauua

SEQ ID NO: 1575856 - RNA, 19 nt, Homo sapiens
  misc_RNA (1)...(19): siRNA sense strand
cugcaaauauuauggagaa

SEQ ID NO: 1575857 - RNA, 19 nt, Homo sapiens
  misc_RNA (1)...(19): siRNA sense strand
ugaggagucucuuucaguu

SEQ ID NO: 1575858 - RNA, 19 nt, Homo sapiens
  misc_RNA (1)...(19): siRNA sense strand
ggaauauucacuuuaccua

SEQ ID NO: 1575859 - RNA, 19 nt, Homo sapiens
  misc_RNA (1)...(19): siRNA sense strand
gaggcgauguguaaguuga

SEQ ID NO: 1575860 - RNA, 19 nt, Homo sapiens
  misc_RNA (1)...(19): siRNA sense strand
aagcacaaccugcaacaua

SEQ ID NO: 1575861 - RNA, 19 nt, Homo sapiens
  misc_RNA (1)...(19): siRNA sense strand
caaccacaaucuguuauuc

SEQ ID NO: 1575862 - RNA, 19 nt, Homo sapiens
  misc_RNA (1)...(19): siRNA sense strand
gguacaauguuaaaggaau

SEQ ID NO: 1575863 - RNA, 19 nt, Homo sapiens
  misc_RNA (1)...(19): siRNA sense strand
aaccuggccuugaucauaa

SEQ ID NO: 1575864 - RNA, 19 nt, Homo sapiens
  misc_RNA (1)...(19): siRNA sense strand
gucaagagauuuuccauuu

SEQ ID NO: 1575865 - RNA, 19 nt, Homo sapiens
  misc_RNA (1)...(19): siRNA sense strand
uaagggaggcuuucauuuc

SEQ ID NO: 1575866 - RNA, 19 nt, Homo sapiens
  misc_RNA (1)...(19): siRNA sense strand
cagcaaugauauccacuug

SEQ ID NO: 1575867 - RNA, 19 nt, Homo sapiens
  misc_RNA (1)...(19): siRNA sense strand
acacagaauuccucaucaa

SEQ ID NO: 1575868 - RNA, 19 nt, Homo sapiens
  misc_RNA (1)...(19): siRNA sense strand
ggagaaacaacaugaugga

SEQ ID NO: 1575869 - RNA, 19 nt, Homo sapiens
  misc_RNA (1)...(19): siRNA sense strand
gaaguaacaccaagguaca

SEQ ID NO: 1575870 - RNA, 19 nt, Homo sapiens
  misc_RNA (1)...(19): siRNA sense strand
uagauuagauugucaacag

SEQ ID NO: 1575871 - RNA, 19 nt, Homo sapiens
  misc_RNA (1)...(19): siRNA sense strand
gacaagaugagagacaaua

SEQ ID NO: 1575872 - RNA, 19 nt, Homo sapiens
  misc_RNA (1)...(19): siRNA sense strand
gccaugauauuuaccuuag

SEQ ID NO: 1575873 - RNA, 19 nt, Homo sapiens
  misc_RNA (1)...(19): siRNA sense strand
uaaugugccuaauuucaug

SEQ ID NO: 1575874 - RNA, 19 nt, Homo sapiens
  misc_RNA (1)...(19): siRNA sense strand
aaacugcagauacuucaua

SEQ ID NO: 1575875 - RNA, 19 nt, Homo sapiens
  misc_RNA (1)...(19): siRNA sense strand
ggccauccuuacuuuauga

SEQ ID NO: 1575876 - RNA, 19 nt, Homo sapiens
  misc_RNA (1)...(19): siRNA sense strand
caagcccagucgcauuuaa

SEQ ID NO: 1575877 - RNA, 19 nt, Homo sapiens
  misc_RNA (1)...(19): siRNA sense strand
uguguaaguugaauccuuu

SEQ ID NO: 1575878 - RNA, 19 nt, Homo sapiens
  misc_RNA (1)...(19): siRNA sense strand
uuauggagcugugaucauu

SEQ ID NO: 1575879 - RNA, 19 nt, Homo sapiens
  misc_RNA (1)...(19): siRNA sense strand
ccuauauagugacugauuu

SEQ ID NO: 1575880 - RNA, 19 nt, Homo sapiens
  misc_RNA (1)...(19): siRNA sense strand
caagagcauuuuagaguaa

SEQ ID NO: 1575881 - RNA, 19 nt, Homo sapiens
  misc_RNA (1)...(19): siRNA sense strand
ggucucgggaugaugauua

SEQ ID NO: 1575882 - RNA, 19 nt, Homo sapiens
  misc_RNA (1)...(19): siRNA sense strand
gauauccacuugugucaac

SEQ ID NO: 1575883 - RNA, 19 nt, Homo sapiens
  misc_RNA (1)...(19): siRNA sense strand
aaggagaugagaaauguua

SEQ ID NO: 1575884 - RNA, 19 nt, Homo sapiens
  misc_RNA (1)...(19): siRNA sense strand
aaaccuggccuugaucaua

SEQ ID NO: 1575885 - RNA, 19 nt, Homo sapiens
  misc_RNA (1)...(19): siRNA sense strand
gaacaguugaccugcuuug

SEQ ID NO: 1575886 - RNA, 19 nt, Homo sapiens
  misc_RNA (1)...(19): siRNA sense strand
gcugcaaauagcuaaauua

SEQ ID NO: 1575887 - RNA, 19 nt, Homo sapiens
  misc_RNA (1)...(19): siRNA sense strand
cagaagugguuugagguuu

SEQ ID NO: 1575888 - RNA, 19 nt, Homo sapiens
  misc_RNA (1)...(19): siRNA sense strand
gaugagagacaauaaguac

SEQ ID NO: 1575889 - RNA, 19 nt, Homo sapiens
  misc_RNA (1)...(19): siRNA sense strand
gcaauguguuucaaucacu

SEQ ID NO: 1575890 - RNA, 19 nt, Homo sapiens
  misc_RNA (1)...(19): siRNA sense strand
ccaccucacagcaaugaua

SEQ ID NO: 1575891 - RNA, 19 nt, Homo sapiens
  misc_RNA (1)...(19): siRNA sense strand
cgugugcuuugaucaauuu

SEQ ID NO: 1575892 - RNA, 19 nt, Homo sapiens
  misc_RNA (1)...(19): siRNA sense strand
caucugcccuuggccauga

SEQ ID NO: 1575893 - RNA, 19 nt, Homo sapiens
  misc_RNA (1)...(19): siRNA sense strand
gaggguggagaccaaauaa

SEQ ID NO: 1575894 - RNA, 19 nt, Homo sapiens
  misc_RNA (1)...(19): siRNA sense strand
gcaaccacaaucuguuauu

SEQ ID NO: 1575895 - RNA, 19 nt, Homo sapiens
  misc_RNA (1)...(19): siRNA sense strand
caauagccauguccacgau

SEQ ID NO: 1575896 - RNA, 19 nt, Homo sapiens
  misc_RNA (1)...(19): siRNA sense strand
gugaggcgauguguaaguu

SEQ ID NO: 1575897 - RNA, 19 nt, Homo sapiens
  misc_RNA (1)...(19): siRNA sense strand
gugccuauauagugacuga

SEQ ID NO: 1575898 - RNA, 19 nt, Homo sapiens
  misc_RNA (1)...(19): siRNA sense strand
cagcagugccuauauagug

SEQ ID NO: 1575899 - RNA, 19 nt, Homo sapiens
  misc_RNA (1)...(19): siRNA sense strand
ucuuggugcugcaguauuu

SEQ ID NO: 1575900 - RNA, 19 nt, Homo sapiens
  misc_RNA (1)...(19): siRNA sense strand
gaccugcuuugaagaaaca

SEQ ID NO: 1575901 - RNA, 19 nt, Homo sapiens
  misc_RNA (1)...(19): siRNA sense strand
ccaacauccugauugugaa

SEQ ID NO: 1575902 - RNA, 19 nt, Homo sapiens
  misc_RNA (1)...(19): siRNA sense strand
cgacugauugucacuuaaa

SEQ ID NO: 1575903 - RNA, 19 nt, Homo sapiens
  misc_RNA (1)...(19): siRNA sense strand
aaguacagguccagugaaa

SEQ ID NO: 1575904 - RNA, 19 nt, Homo sapiens
  misc_RNA (1)...(19): siRNA sense strand
uuccugaucuaccaaguaa

SEQ ID NO: 1575905 - RNA, 19 nt, Homo sapiens
  misc_RNA (1)...(19): siRNA sense strand
ugacuuguggcgucuuaua

SEQ ID NO: 1575906 - RNA, 19 nt, Homo sapiens
  misc_RNA (1)...(19): siRNA sense strand
aagaauaagcugaacaguu

SEQ ID NO: 1575907 - RNA, 19 nt, Homo sapiens
  misc_RNA (1)...(19): siRNA sense strand
cauccuuacuuuaugauag

SEQ ID NO: 1575908 - RNA, 19 nt, Homo sapiens
  misc_RNA (1)...(19): siRNA sense strand
gggccauccuuacuuuaug

SEQ ID NO: 1575909 - RNA, 19 nt, Homo sapiens
  misc_RNA (1)...(19): siRNA sense strand
agacaucuuugaagugcuu

SEQ ID NO: 1575910 - RNA, 19 nt, Homo sapiens
  misc_RNA (1)...(19): siRNA sense strand
agacaaauacgugugcuuu

SEQ ID NO: 1575911 - RNA, 19 nt, Homo sapiens
  misc_RNA (1)...(19): siRNA sense strand
uuaccaacauccugauugu

SEQ ID NO: 1575912 - RNA, 19 nt, Homo sapiens
  misc_RNA (1)...(19): siRNA sense strand
aacaagacauacuucaaug

SEQ ID NO: 1575913 - RNA, 19 nt, Homo sapiens
  misc_RNA (1)...(19): siRNA sense strand
uguauaaacugugugacuu

SEQ ID NO: 1575914 - RNA, 19 nt, Homo sapiens
  misc_RNA (1)...(19): siRNA sense strand
gcaagcccagucgcauuua

SEQ ID NO: 1575915 - RNA, 19 nt, Homo sapiens
  misc_RNA (1)...(19): siRNA sense strand
ggaaucaucagaucauugc

SEQ ID NO: 1575916 - RNA, 19 nt, Homo sapiens
  misc_RNA (1)...(19): siRNA sense strand
gcccuuggccaugauauuu

SEQ ID NO: 1575917 - RNA, 19 nt, Homo sapiens
  misc_RNA (1)...(19): siRNA sense strand
ucagaaucauuuggagaaa

SEQ ID NO: 1575918 - RNA, 19 nt, Homo sapiens
  misc_RNA (1)...(19): siRNA sense strand
gacuuuccgcuuacaauuu

SEQ ID NO: 1575919 - RNA, 19 nt, Homo sapiens
  misc_RNA (1)...(19): siRNA sense strand
cccgacugauugucacuua

SEQ ID NO: 1575920 - RNA, 19 nt, Homo sapiens
  misc_RNA (1)...(19): siRNA sense strand
agaagugguuugagguuuc

SEQ ID NO: 1575921 - RNA, 19 nt, Homo sapiens
  misc_RNA (1)...(19): siRNA sense strand
agagagacuugcaguucuu

SEQ ID NO: 1575922 - RNA, 19 nt, Homo sapiens
  misc_RNA (1)...(19): siRNA sense strand
ccagagagacuugcaguuc

SEQ ID NO: 1575923 - RNA, 19 nt, Homo sapiens
  misc_RNA (1)...(19): siRNA sense strand
caguugaccugcuuugaag

SEQ ID NO: 1575924 - RNA, 19 nt, Homo sapiens
  misc_RNA (1)...(19): siRNA sense strand
caacaugauggacaagaug

SEQ ID NO: 1575925 - RNA, 19 nt, Homo sapiens
  misc_RNA (1)...(19): siRNA sense strand
uuauaccacucuccucuug

SEQ ID NO: 1575926 - RNA, 19 nt, Homo sapiens
  misc_RNA (1)...(19): siRNA sense strand
ccaaauaauagacaugcuu

SEQ ID NO: 1575927 - RNA, 19 nt, Homo sapiens
  misc_RNA (1)...(19): siRNA sense strand
gaucauucuuggugucucu

SEQ ID NO: 1575928 - RNA, 19 nt, Homo sapiens
  misc_RNA (1)...(19): siRNA sense strand
gaagugguuugagguuucu

SEQ ID NO: 1575929 - RNA, 19 nt, Homo sapiens
  misc_RNA (1)...(19): siRNA sense strand
guuaaugugccuaauuuca

SEQ ID NO: 1575930 - RNA, 19 nt, Homo sapiens
  misc_RNA (1)...(19): siRNA sense strand
ucuaauauguacucgaaag

SEQ ID NO: 1575931 - RNA, 19 nt, Homo sapiens
  misc_RNA (1)...(19): siRNA sense strand
gaaggaagguguuggcaau

SEQ ID NO: 1575932 - RNA, 19 nt, Homo sapiens
  misc_RNA (1)...(19): siRNA sense strand
caucagcucucacugguuu

SEQ ID NO: 1575933 - RNA, 19 nt, Homo sapiens
  misc_RNA (1)...(19): siRNA sense strand
ggaagguguuggcaauauc

SEQ ID NO: 1575934 - RNA, 19 nt, Homo sapiens
  misc_RNA (1)...(19): siRNA sense strand
cagcagagccaucaacuca

SEQ ID NO: 1575935 - RNA, 19 nt, Homo sapiens
  misc_RNA (1)...(19): siRNA sense strand
gaggagggcagacaacguu

SEQ ID NO: 1575936 - RNA, 19 nt, Homo sapiens
  misc_RNA (1)...(19): siRNA sense strand
ggcaauauccuugaagaga

SEQ ID NO: 1575937 - RNA, 19 nt, Homo sapiens
  misc_RNA (1)...(19): siRNA sense strand
auacacagacuccaugaaa

SEQ ID NO: 1575938 - RNA, 19 nt, Homo sapiens
  misc_RNA (1)...(19): siRNA sense strand
cagacuccaugaaagcauu

SEQ ID NO: 1575939 - RNA, 19 nt, Homo sapiens
  misc_RNA (1)...(19): siRNA sense strand
uaaaagaacucagaacaac

SEQ ID NO: 1575940 - RNA, 19 nt, Homo sapiens
  misc_RNA (1)...(19): siRNA sense strand
caauauccuugaagagacu

SEQ ID NO: 1575941 - RNA, 19 nt, Homo sapiens
  misc_RNA (1)...(19): siRNA sense strand
aggaagguguuggcaauau

SEQ ID NO: 1575942 - RNA, 19 nt, Homo sapiens
  misc_RNA (1)...(19): siRNA sense strand
ccuacagucuccauacaca

SEQ ID NO: 1575943 - RNA, 19 nt, Homo sapiens
  misc_RNA (1)...(19): siRNA sense strand
ggacuuugggagaccuaaa

SEQ ID NO: 1575944 - RNA, 19 nt, Homo sapiens
  misc_RNA (1)...(19): siRNA sense strand
ugaaagcauuggccaucag

SEQ ID NO: 1575945 - RNA, 19 nt, Homo sapiens
  misc_RNA (1)...(19): siRNA sense strand
uacacagacuccaugaaag

SEQ ID NO: 1575946 - RNA, 19 nt, Homo sapiens
  misc_RNA (1)...(19): siRNA sense strand
gaggagaggagggcagaca

SEQ ID NO: 1575947 - RNA, 19 nt, Homo sapiens
  misc_RNA (1)...(19): siRNA sense strand
cacacacucccuccuauca

SEQ ID NO: 1575948 - RNA, 19 nt, Homo sapiens
  misc_RNA (1)...(19): siRNA sense strand
aaagagaaggaagguguug

SEQ ID NO: 1575949 - RNA, 19 nt, Homo sapiens
  misc_RNA (1)...(19): siRNA sense strand
gaggacaaguuccgaaaua

SEQ ID NO: 1575950 - RNA, 19 nt, Homo sapiens
  misc_RNA (1)...(19): siRNA sense strand
gaaggaguaugcugcguuu

SEQ ID NO: 1575951 - RNA, 19 nt, Homo sapiens
  misc_RNA (1)...(19): siRNA sense strand
gggcagagauggagaguuc

SEQ ID NO: 1575952 - RNA, 19 nt, Homo sapiens
  misc_RNA (1)...(19): siRNA sense strand
gcucuuugaucuugaauau

SEQ ID NO: 1575953 - RNA, 19 nt, Homo sapiens
  misc_RNA (1)...(19): siRNA sense strand
gcaaaaggcuggauaucaa

SEQ ID NO: 1575954 - RNA, 19 nt, Homo sapiens
  misc_RNA (1)...(19): siRNA sense strand
gacaaguuccgaaauaauu

SEQ ID NO: 1575955 - RNA, 19 nt, Homo sapiens
  misc_RNA (1)...(19): siRNA sense strand
gagaagagcagcaccaaag

SEQ ID NO: 1575956 - RNA, 19 nt, Homo sapiens
  misc_RNA (1)...(19): siRNA sense strand
gcagcaguaucgccaggua

SEQ ID NO: 1575957 - RNA, 19 nt, Homo sapiens
  misc_RNA (1)...(19): siRNA sense strand
ucaacaaguucaauaguuc

SEQ ID NO: 1575958 - RNA, 19 nt, Homo sapiens
  misc_RNA (1)...(19): siRNA sense strand
gaagagcagcaccaaagaa

SEQ ID NO: 1575959 - RNA, 19 nt, Homo sapiens
  misc_RNA (1)...(19): siRNA sense strand
gauggagaguucaaaggaa

SEQ ID NO: 1575960 - RNA, 19 nt, Homo sapiens
  misc_RNA (1)...(19): siRNA sense strand
uugaggaacugaagaaaga

SEQ ID NO: 1575961 - RNA, 19 nt, Homo sapiens
  misc_RNA (1)...(19): siRNA sense strand
ggacaaguuccgaaauaau

SEQ ID NO: 1575962 - RNA, 19 nt, Homo sapiens
  misc_RNA (1)...(19): siRNA sense strand
caaagaagaagguccuguu

SEQ ID NO: 1575963 - RNA, 19 nt, Homo sapiens
  misc_RNA (1)...(19): siRNA sense strand
ggaguaugcugcguuugug

SEQ ID NO: 1575964 - RNA, 19 nt, Homo sapiens
  misc_RNA (1)...(19): siRNA sense strand
ggagcuggaugccgaaguc

SEQ ID NO: 1575965 - RNA, 19 nt, Homo sapiens
  misc_RNA (1)...(19): siRNA sense strand
uugaugagcugaauguugu

SEQ ID NO: 1575966 - RNA, 19 nt, Homo sapiens
  misc_RNA (1)...(19): siRNA sense strand
gcacagagccccucgugaa

SEQ ID NO: 1575967 - RNA, 19 nt, Homo sapiens
  misc_RNA (1)...(19): siRNA sense strand
agaagaagguccuguuugc

SEQ ID NO: 1575968 - RNA, 19 nt, Homo sapiens
  misc_RNA (1)...(19): siRNA sense strand
aggcaaaacuccaauauga

SEQ ID NO: 1575969 - RNA, 19 nt, Homo sapiens
  misc_RNA (1)...(19): siRNA sense strand
caaggcaggcugagguaaa

SEQ ID NO: 1575970 - RNA, 19 nt, Homo sapiens
  misc_RNA (1)...(19): siRNA sense strand
aaagaagaagguccuguuu

SEQ ID NO: 1575971 - RNA, 19 nt, Homo sapiens
  misc_RNA (1)...(19): siRNA sense strand
gaucaacaaguucaauagu

SEQ ID NO: 1575972 - RNA, 19 nt, Homo sapiens
  misc_RNA (1)...(19): siRNA sense strand
agacugacaugcagaucau

SEQ ID NO: 1575973 - RNA, 19 nt, Homo sapiens
  misc_RNA (1)...(19): siRNA sense strand
aggacaaguuccgaaauaa

SEQ ID NO: 1575974 - RNA, 19 nt, Homo sapiens
  misc_RNA (1)...(19): siRNA sense strand
gcagagauggagaguucaa

SEQ ID NO: 1575975 - RNA, 19 nt, Homo sapiens
  misc_RNA (1)...(19): siRNA sense strand
gcugcgcucuuugaucuug

SEQ ID NO: 1575976 - RNA, 19 nt, Homo sapiens
  misc_RNA (1)...(19): siRNA sense strand
aagagcagcaccaaagaaa

SEQ ID NO: 1575977 - RNA, 19 nt, Homo sapiens
  misc_RNA (1)...(19): siRNA sense strand
gagacugacaugcagauca

SEQ ID NO: 1575978 - RNA, 19 nt, Homo sapiens
  misc_RNA (1)...(19): siRNA sense strand
ccgaaguccuggagguguu

SEQ ID NO: 1575979 - RNA, 19 nt, Homo sapiens
  misc_RNA (1)...(19): siRNA sense strand
ggaccugcuuuccuuuggu

SEQ ID NO: 1575980 - RNA, 19 nt, Homo sapiens
  misc_RNA (1)...(19): siRNA sense strand
gcaaggcaggcugagguaa

SEQ ID NO: 1575981 - RNA, 19 nt, Homo sapiens
  misc_RNA (1)...(19): siRNA sense strand
agagugcacuggcaaaauu

SEQ ID NO: 1575982 - RNA, 19 nt, Homo sapiens
  misc_RNA (1)...(19): siRNA sense strand
gaagaagguccuguuugca

SEQ ID NO: 1575983 - RNA, 19 nt, Homo sapiens
  misc_RNA (1)...(19): siRNA sense strand
gaauauuauguccaucaga

SEQ ID NO: 1575984 - RNA, 19 nt, Homo sapiens
  misc_RNA (1)...(19): siRNA sense strand
ugguacggcugaucaacaa

SEQ ID NO: 1575985 - RNA, 19 nt, Homo sapiens
  misc_RNA (1)...(19): siRNA sense strand
gagcugacccaggagaugu

SEQ ID NO: 1575986 - RNA, 19 nt, Homo sapiens
  misc_RNA (1)...(19): siRNA sense strand
ccaauaugaggacaaguuc

SEQ ID NO: 1575987 - RNA, 19 nt, Homo sapiens
  misc_RNA (1)...(19): siRNA sense strand
agaaggugcugcagacacu

SEQ ID NO: 1575988 - RNA, 19 nt, Homo sapiens
  misc_RNA (1)...(19): siRNA sense strand
ccauugaggaacugaagaa

SEQ ID NO: 1575989 - RNA, 19 nt, Homo sapiens
  misc_RNA (1)...(19): siRNA sense strand
cuacacaucucaggaucuc

SEQ ID NO: 1575990 - RNA, 19 nt, Homo sapiens
  misc_RNA (1)...(19): siRNA sense strand
ggcuggauaucaacaccaa

SEQ ID NO: 1575991 - RNA, 19 nt, Homo sapiens
  misc_RNA (1)...(19): siRNA sense strand
agacuuugaugagcugaau

SEQ ID NO: 1575992 - RNA, 19 nt, Homo sapiens
  misc_RNA (1)...(19): siRNA sense strand
uugcugcgcucuuugaucu

SEQ ID NO: 1575993 - RNA, 19 nt, Homo sapiens
  misc_RNA (1)...(19): siRNA sense strand
ggaaagagaggcaaaacuc

SEQ ID NO: 1575994 - RNA, 19 nt, Homo sapiens
  misc_RNA (1)...(19): siRNA sense strand
aagaagaagguccuguuug

SEQ ID NO: 1575995 - RNA, 19 nt, Homo sapiens
  misc_RNA (1)...(19): siRNA sense strand
ggcaaggcaggcugaggua

SEQ ID NO: 1575996 - RNA, 19 nt, Homo sapiens
  misc_RNA (1)...(19): siRNA sense strand
gcugaaggagcugagauga

SEQ ID NO: 1575997 - RNA, 19 nt, Homo sapiens
  misc_RNA (1)...(19): siRNA sense strand
cugaucaacaaguucaaua

SEQ ID NO: 1575998 - RNA, 19 nt, Homo sapiens
  misc_RNA (1)...(19): siRNA sense strand
caacaccaacaccuacaca

SEQ ID NO: 1575999 - RNA, 19 nt, Homo sapiens
  misc_RNA (1)...(19): siRNA sense strand
caccaacaccuacacaucu

SEQ ID NO: 1576000 - RNA, 19 nt, Homo sapiens
  misc_RNA (1)...(19): siRNA sense strand
acacaucucaggaucucaa

SEQ ID NO: 1576001 - RNA, 19 nt, Homo sapiens
  misc_RNA (1)...(19): siRNA sense strand
uccaauaugaggacaaguu

SEQ ID NO: 1576002 - RNA, 19 nt, Homo sapiens
  misc_RNA (1)...(19): siRNA sense strand
agaagagcagcaccaaaga

SEQ ID NO: 1576003 - RNA, 19 nt, Homo sapiens
  misc_RNA (1)...(19): siRNA sense strand
gagauggagaguucaaagg

SEQ ID NO: 1576004 - RNA, 19 nt, Homo sapiens
  misc_RNA (1)...(19): siRNA sense strand
cccagagccugccuucauc

SEQ ID NO: 1576005 - RNA, 19 nt, Homo sapiens
  misc_RNA (1)...(19): siRNA sense strand
guacggcugaucaacaagu

SEQ ID NO: 1576006 - RNA, 19 nt, Homo sapiens
  misc_RNA (1)...(19): siRNA sense strand
ccagguggaggccaucgaa

SEQ ID NO: 1576007 - RNA, 19 nt, Homo sapiens
  misc_RNA (1)...(19): siRNA sense strand
ugaauauuauguccaucag

SEQ ID NO: 1576008 - RNA, 19 nt, Homo sapiens
  misc_RNA (1)...(19): siRNA sense strand
ucaagagugcacuggcaaa

SEQ ID NO: 1576009 - RNA, 19 nt, Homo sapiens
  misc_RNA (1)...(19): siRNA sense strand
caggagauguccccagaga

SEQ ID NO: 1576010 - RNA, 19 nt, Homo sapiens
  misc_RNA (1)...(19): siRNA sense strand
agauggagaguucaaagga

SEQ ID NO: 1576011 - RNA, 19 nt, Homo sapiens
  misc_RNA (1)...(19): siRNA sense strand
gccgcucacugcaaagaag

SEQ ID NO: 1576012 - RNA, 19 nt, Homo sapiens
  misc_RNA (1)...(19): siRNA sense strand
ggacgcagccacccagaua

SEQ ID NO: 1576013 - RNA, 19 nt, Homo sapiens
  misc_RNA (1)...(19): siRNA sense strand
ucacagcuuuguucccuua

SEQ ID NO: 1576014 - RNA, 19 nt, Homo sapiens
  misc_RNA (1)...(19): siRNA sense strand
ggacucaucuacuuguuca

SEQ ID NO: 1576015 - RNA, 19 nt, Homo sapiens
  misc_RNA (1)...(19): siRNA sense strand
caaagcaacuaaugacuac

SEQ ID NO: 1576016 - RNA, 19 nt, Homo sapiens
  misc_RNA (1)...(19): siRNA sense strand
gaacaucacagccgacauc

SEQ ID NO: 1576017 - RNA, 19 nt, Homo sapiens
  misc_RNA (1)...(19): siRNA sense strand
uggaagacuuucuggauaa

SEQ ID NO: 1576018 - RNA, 19 nt, Homo sapiens
  misc_RNA (1)...(19): siRNA sense strand
cuacagggaaggugauuua

SEQ ID NO: 1576019 - RNA, 19 nt, Homo sapiens
  misc_RNA (1)...(19): siRNA sense strand
cagggaaggugauuuacuu

SEQ ID NO: 1576020 - RNA, 19 nt, Homo sapiens
  misc_RNA (1)...(19): siRNA sense strand
caaaaggacucaucuacuu

SEQ ID NO: 1576021 - RNA, 19 nt, Homo sapiens
  misc_RNA (1)...(19): siRNA sense strand
ggaagccacugagauacaa

SEQ ID NO: 1576022 - RNA, 19 nt, Homo sapiens
  misc_RNA (1)...(19): siRNA sense strand
gaccaucuuucucaucaga

SEQ ID NO: 1576023 - RNA, 19 nt, Homo sapiens
  misc_RNA (1)...(19): siRNA sense strand
cuggaagacuuucuggaua

SEQ ID NO: 1576024 - RNA, 19 nt, Homo sapiens
  misc_RNA (1)...(19): siRNA sense strand
caucacagccgacaucaau

SEQ ID NO: 1576025 - RNA, 19 nt, Homo sapiens
  misc_RNA (1)...(19): siRNA sense strand
ucaaagcaacuaaugacua

SEQ ID NO: 1576026 - RNA, 19 nt, Homo sapiens
  misc_RNA (1)...(19): siRNA sense strand
gcgaugacauugcguggau

SEQ ID NO: 1576027 - RNA, 19 nt, Homo sapiens
  misc_RNA (1)...(19): siRNA sense strand
ugauuuacuucacagcuuu

SEQ ID NO: 1576028 - RNA, 19 nt, Homo sapiens
  misc_RNA (1)...(19): siRNA sense strand
gguugugggugucguuuau

SEQ ID NO: 1576029 - RNA, 19 nt, Homo sapiens
  misc_RNA (1)...(19): siRNA sense strand
gaguagggcugggcugugu

SEQ ID NO: 1576030 - RNA, 19 nt, Homo sapiens
  misc_RNA (1)...(19): siRNA sense strand
guccaucgcugucuucucu

SEQ ID NO: 1576031 - RNA, 19 nt, Homo sapiens
  misc_RNA (1)...(19): siRNA sense strand
caacagaacaggguuugug

SEQ ID NO: 1576032 - RNA, 19 nt, Homo sapiens
  misc_RNA (1)...(19): siRNA sense strand
gaacuacuggcuggagauu

SEQ ID NO: 1576033 - RNA, 19 nt, Homo sapiens
  misc_RNA (1)...(19): siRNA sense strand
ucacagccgacaucaauga

SEQ ID NO: 1576034 - RNA, 19 nt, Homo sapiens
  misc_RNA (1)...(19): siRNA sense strand
gggugucguuuauguuuau

SEQ ID NO: 1576035 - RNA, 19 nt, Homo sapiens
  misc_RNA (1)...(19): siRNA sense strand
ggaaugacugccagaagga

SEQ ID NO: 1576036 - RNA, 19 nt, Homo sapiens
  misc_RNA (1)...(19): siRNA sense strand
uggcgugggugcuguggua

SEQ ID NO: 1576037 - RNA, 19 nt, Homo sapiens
  misc_RNA (1)...(19): siRNA sense strand
ugaaacgguucugcgauga

SEQ ID NO: 1576038 - RNA, 19 nt, Homo sapiens
  misc_RNA (1)...(19): siRNA sense strand
ucuggaagccacugagaua

SEQ ID NO: 1576039 - RNA, 19 nt, Homo sapiens
  misc_RNA (1)...(19): siRNA sense strand
ggaagacuuucuggauaag

SEQ ID NO: 1576040 - RNA, 19 nt, Homo sapiens
  misc_RNA (1)...(19): siRNA sense strand
ugaccaucuuuguggcuua

SEQ ID NO: 1576041 - RNA, 19 nt, Homo sapiens
  misc_RNA (1)...(19): siRNA sense strand
gggcagucguguacaugug

SEQ ID NO: 1576042 - RNA, 19 nt, Homo sapiens
  misc_RNA (1)...(19): siRNA sense strand
ggacaacaaggcccaguac

SEQ ID NO: 1576043 - RNA, 19 nt, Homo sapiens
  misc_RNA (1)...(19): siRNA sense strand
gggaugagaggcccaagug

SEQ ID NO: 1576044 - RNA, 19 nt, Homo sapiens
  misc_RNA (1)...(19): siRNA sense strand
caccggaccucaacagaac

SEQ ID NO: 1576045 - RNA, 19 nt, Homo sapiens
  misc_RNA (1)...(19): siRNA sense strand
ugggugucguuuauguuua

SEQ ID NO: 1576046 - RNA, 19 nt, Homo sapiens
  misc_RNA (1)...(19): siRNA sense strand
gugggugucguuuauguuu

SEQ ID NO: 1576047 - RNA, 19 nt, Homo sapiens
  misc_RNA (1)...(19): siRNA sense strand
acacaucgcuuuugcaagu

SEQ ID NO: 1576048 - RNA, 19 nt, Homo sapiens
  misc_RNA (1)...(19): siRNA sense strand
ccaccggaccucaacagaa

SEQ ID NO: 1576049 - RNA, 19 nt, Homo sapiens
  misc_RNA (1)...(19): siRNA sense strand
gaugacauugcguggauga

SEQ ID NO: 1576050 - RNA, 19 nt, Homo sapiens
  misc_RNA (1)...(19): siRNA sense strand
cggcagacacugaacauca

SEQ ID NO: 1576051 - RNA, 19 nt, Homo sapiens
  misc_RNA (1)...(19): siRNA sense strand
ugagauacaaggccuggaa

SEQ ID NO: 1576052 - RNA, 19 nt, Homo sapiens
  misc_RNA (1)...(19): siRNA sense strand
acaacucgcccaggaauga

SEQ ID NO: 1576053 - RNA, 19 nt, Homo sapiens
  misc_RNA (1)...(19): siRNA sense strand
gguggcugcucaucugcuu

SEQ ID NO: 1576054 - RNA, 19 nt, Homo sapiens
  misc_RNA (1)...(19): siRNA sense strand
gaaacauccucagccucau

SEQ ID NO: 1576055 - RNA, 19 nt, Homo sapiens
  misc_RNA (1)...(19): siRNA sense strand
gggacaacaaggcccagua

SEQ ID NO: 1576056 - RNA, 19 nt, Homo sapiens
  misc_RNA (1)...(19): siRNA sense strand
cugaccaucuuucucauca

SEQ ID NO: 1576057 - RNA, 19 nt, Homo sapiens
  misc_RNA (1)...(19): siRNA sense strand
gcagcgccgugagcuacuu

SEQ ID NO: 1576058 - RNA, 19 nt, Homo sapiens
  misc_RNA (1)...(19): siRNA sense strand
gagcacugccuggacagaa

SEQ ID NO: 1576059 - RNA, 19 nt, Homo sapiens
  misc_RNA (1)...(19): siRNA sense strand
acauuuggcgguucccaua

SEQ ID NO: 1576060 - RNA, 19 nt, Homo sapiens
  misc_RNA (1)...(19): siRNA sense strand
gaagacuuucuggauaaga

SEQ ID NO: 1576061 - RNA, 19 nt, Homo sapiens
  misc_RNA (1)...(19): siRNA sense strand
aaacgguucugcgaugaca

SEQ ID NO: 1576062 - RNA, 19 nt, Homo sapiens
  misc_RNA (1)...(19): siRNA sense strand
ugugguaccuccucaacuc

SEQ ID NO: 1576063 - RNA, 19 nt, Homo sapiens
  misc_RNA (1)...(19): siRNA sense strand
cccugaaccugcucauguu

SEQ ID NO: 1576064 - RNA, 19 nt, Homo sapiens
  misc_RNA (1)...(19): siRNA sense strand
cuacccagccguccucaug

SEQ ID NO: 1576065 - RNA, 19 nt, Homo sapiens
  misc_RNA (1)...(19): siRNA sense strand
ggacacaucgcuuuugcaa

SEQ ID NO: 1576066 - RNA, 19 nt, Homo sapiens
  misc_RNA (1)...(19): siRNA sense strand
uuacuucacagcuuuguuc

SEQ ID NO: 1576067 - RNA, 19 nt, Homo sapiens
  misc_RNA (1)...(19): siRNA sense strand
gguucaaagcaacuaauga

SEQ ID NO: 1576068 - RNA, 19 nt, Homo sapiens
  misc_RNA (1)...(19): siRNA sense strand
cuuuguggcuuacaucauc

SEQ ID NO: 1576069 - RNA, 19 nt, Homo sapiens
  misc_RNA (1)...(19): siRNA sense strand
ccugugugcugcuguccuu

SEQ ID NO: 1576070 - RNA, 19 nt, Homo sapiens
  misc_RNA (1)...(19): siRNA sense strand
guccugaccaucuuucuca

SEQ ID NO: 1576071 - RNA, 19 nt, Homo sapiens
  misc_RNA (1)...(19): siRNA sense strand
guucaaagcaacuaaugac

SEQ ID NO: 1576072 - RNA, 19 nt, Homo sapiens
  misc_RNA (1)...(19): siRNA sense strand
ccacccagauauucuucuc

SEQ ID NO: 1576073 - RNA, 19 nt, Homo sapiens
  misc_RNA (1)...(19): siRNA sense strand
caacaaaaggacucaucua

SEQ ID NO: 1576074 - RNA, 19 nt, Homo sapiens
  misc_RNA (1)...(19): siRNA sense strand
ucaucgcgcuggucuucga

SEQ ID NO: 1576075 - RNA, 19 nt, Homo sapiens
  misc_RNA (1)...(19): siRNA sense strand
ugucguuuauguuuaugga

SEQ ID NO: 1576076 - RNA, 19 nt, Homo sapiens
  misc_RNA (1)...(19): siRNA sense strand
ggagauuuucgacaauuuu

SEQ ID NO: 1576077 - RNA, 19 nt, Homo sapiens
  misc_RNA (1)...(19): siRNA sense strand
ggaacuacuggcuggagau

SEQ ID NO: 1576078 - RNA, 19 nt, Homo sapiens
  misc_RNA (1)...(19): siRNA sense strand
ccaucgcugucuucucugu

SEQ ID NO: 1576079 - RNA, 19 nt, Homo sapiens
  misc_RNA (1)...(19): siRNA sense strand
ggucaucgcccuggucaac

SEQ ID NO: 1576080 - RNA, 19 nt, Homo sapiens
  misc_RNA (1)...(19): siRNA sense strand
aaaggacucaucuacuugu

SEQ ID NO: 1576081 - RNA, 19 nt, Homo sapiens
  misc_RNA (1)...(19): siRNA sense strand
gguaccuccucaacuccuu

SEQ ID NO: 1576082 - RNA, 19 nt, Homo sapiens
  misc_RNA (1)...(19): siRNA sense strand
ucgggaugcuguucaccuu

SEQ ID NO: 1576083 - RNA, 19 nt, Homo sapiens
  misc_RNA (1)...(19): siRNA sense strand
uuacaucauccuccuguuc

SEQ ID NO: 1576084 - RNA, 19 nt, Homo sapiens
  misc_RNA (1)...(19): siRNA sense strand
ggcagacacugaacaucac

SEQ ID NO: 1576085 - RNA, 19 nt, Homo sapiens
  misc_RNA (1)...(19): siRNA sense strand
acuacuggcuggagauuuu

SEQ ID NO: 1576086 - RNA, 19 nt, Homo sapiens
  misc_RNA (1)...(19): siRNA sense strand
ccuggaagacuuucuggau

SEQ ID NO: 1576087 - RNA, 19 nt, Homo sapiens
  misc_RNA (1)...(19): siRNA sense strand
acgcuguccuuccugauca

SEQ ID NO: 1576088 - RNA, 19 nt, Homo sapiens
  misc_RNA (1)...(19): siRNA sense strand
agcacugccuggacagaaa

SEQ ID NO: 1576089 - RNA, 19 nt, Homo sapiens
  misc_RNA (1)...(19): siRNA sense strand
uuacaacucgcccaggaau

SEQ ID NO: 1576090 - RNA, 19 nt, Homo sapiens
  misc_RNA (1)...(19): siRNA sense strand
guguacaugugugucauca

SEQ ID NO: 1576091 - RNA, 19 nt, Homo sapiens
  misc_RNA (1)...(19): siRNA sense strand
gggaggaacucaccuguuu

SEQ ID NO: 1576092 - RNA, 19 nt, Homo sapiens
  misc_RNA (1)...(19): siRNA sense strand
gaacucaccuguuucaucu

SEQ ID NO: 1576093 - RNA, 19 nt, Homo sapiens
  misc_RNA (1)...(19): siRNA sense strand
ugaaggagaugcuaagaaa

SEQ ID NO: 1576094 - RNA, 19 nt, Homo sapiens
  misc_RNA (1)...(19): siRNA sense strand
gagagaaacuccaggaaau

SEQ ID NO: 1576095 - RNA, 19 nt, Homo sapiens
  misc_RNA (1)...(19): siRNA sense strand
cagcagaucugauggagaa

SEQ ID NO: 1576096 - RNA, 19 nt, Homo sapiens
  misc_RNA (1)...(19): siRNA sense strand
uaacacaccuuuaucuugu

SEQ ID NO: 1576097 - RNA, 19 nt, Homo sapiens
  misc_RNA (1)...(19): siRNA sense strand
ccaaggcgcucuccgauga

SEQ ID NO: 1576098 - RNA, 19 nt, Homo sapiens
  misc_RNA (1)...(19): siRNA sense strand
ucagagagccuguguguaa

SEQ ID NO: 1576099 - RNA, 19 nt, Homo sapiens
  misc_RNA (1)...(19): siRNA sense strand
ggaaagauuugaccagucu

SEQ ID NO: 1576100 - RNA, 19 nt, Homo sapiens
  misc_RNA (1)...(19): siRNA sense strand
gaagagaaagagaacauga

SEQ ID NO: 1576101 - RNA, 19 nt, Homo sapiens
  misc_RNA (1)...(19): siRNA sense strand
aaaggaagcucaggcugua

SEQ ID NO: 1576102 - RNA, 19 nt, Homo sapiens
  misc_RNA (1)...(19): siRNA sense strand
cgacaacccggaaagauuu

SEQ ID NO: 1576103 - RNA, 19 nt, Homo sapiens
  misc_RNA (1)...(19): siRNA sense strand
gaggaacaaugagaucaaa

SEQ ID NO: 1576104 - RNA, 19 nt, Homo sapiens
  misc_RNA (1)...(19): siRNA sense strand
ggaccuguucucacuaaua

SEQ ID NO: 1576105 - RNA, 19 nt, Homo sapiens
  misc_RNA (1)...(19): siRNA sense strand
cagcaaaucagaagccuaa

SEQ ID NO: 1576106 - RNA, 19 nt, Homo sapiens
  misc_RNA (1)...(19): siRNA sense strand
ugaggaagcugaggaacaa

SEQ ID NO: 1576107 - RNA, 19 nt, Homo sapiens
  misc_RNA (1)...(19): siRNA sense strand
gaccuguucucacuaauag

SEQ ID NO: 1576108 - RNA, 19 nt, Homo sapiens
  misc_RNA (1)...(19): siRNA sense strand
ggaaugaaggagaugcuaa

SEQ ID NO: 1576109 - RNA, 19 nt, Homo sapiens
  misc_RNA (1)...(19): siRNA sense strand
gaacaggaagagaaagaga

SEQ ID NO: 1576110 - RNA, 19 nt, Homo sapiens
  misc_RNA (1)...(19): siRNA sense strand
gaaaggagcgagccacucu

SEQ ID NO: 1576111 - RNA, 19 nt, Homo sapiens
  misc_RNA (1)...(19): siRNA sense strand
cggaggaucugaagagugu

SEQ ID NO: 1576112 - RNA, 19 nt, Homo sapiens
  misc_RNA (1)...(19): siRNA sense strand
ggacauauagcauucuaca

SEQ ID NO: 1576113 - RNA, 19 nt, Homo sapiens
  misc_RNA (1)...(19): siRNA sense strand
ugaagagugugaaauaugg

SEQ ID NO: 1576114 - RNA, 19 nt, Homo sapiens
  misc_RNA (1)...(19): siRNA sense strand
aaacugacccagcaaauca

SEQ ID NO: 1576115 - RNA, 19 nt, Homo sapiens
  misc_RNA (1)...(19): siRNA sense strand
agaaagagaacaugaggaa

SEQ ID NO: 1576116 - RNA, 19 nt, Homo sapiens
  misc_RNA (1)...(19): siRNA sense strand
gacagcagcuacccgacaa

SEQ ID NO: 1576117 - RNA, 19 nt, Homo sapiens
  misc_RNA (1)...(19): siRNA sense strand
gagccacucuugcuucagu

SEQ ID NO: 1576118 - RNA, 19 nt, Homo sapiens
  misc_RNA (1)...(19): siRNA sense strand
uuucgaaucucuugaggaa

SEQ ID NO: 1576119 - RNA, 19 nt, Homo sapiens
  misc_RNA (1)...(19): siRNA sense strand
gagccauggugcaaacaga

SEQ ID NO: 1576120 - RNA, 19 nt, Homo sapiens
  misc_RNA (1)...(19): siRNA sense strand
gaacaaugagaucaaacug

SEQ ID NO: 1576121 - RNA, 19 nt, Homo sapiens
  misc_RNA (1)...(19): siRNA sense strand
ggaacucaccuguuucauc

SEQ ID NO: 1576122 - RNA, 19 nt, Homo sapiens
  misc_RNA (1)...(19): siRNA sense strand
ggagcugggaggaacauaa

SEQ ID NO: 1576123 - RNA, 19 nt, Homo sapiens
  misc_RNA (1)...(19): siRNA sense strand
ggaagcugaggaacaauga

SEQ ID NO: 1576124 - RNA, 19 nt, Homo sapiens
  misc_RNA (1)...(19): siRNA sense strand
ggaacauaacacaccuuua

SEQ ID NO: 1576125 - RNA, 19 nt, Homo sapiens
  misc_RNA (1)...(19): siRNA sense strand
cgacugugcuggguacuca

SEQ ID NO: 1576126 - RNA, 19 nt, Homo sapiens
  misc_RNA (1)...(19): siRNA sense strand
ucgaaucucuugaggaagu

SEQ ID NO: 1576127 - RNA, 19 nt, Homo sapiens
  misc_RNA (1)...(19): siRNA sense strand
gaaacugugccaggaagaa

SEQ ID NO: 1576128 - RNA, 19 nt, Homo sapiens
  misc_RNA (1)...(19): siRNA sense strand
gaggaacucaccuguuuca

SEQ ID NO: 1576129 - RNA, 19 nt, Homo sapiens
  misc_RNA (1)...(19): siRNA sense strand
gcaacuccagcuacuagaa

SEQ ID NO: 1576130 - RNA, 19 nt, Homo sapiens
  misc_RNA (1)...(19): siRNA sense strand
caaaucagaagccuaagca

SEQ ID NO: 1576131 - RNA, 19 nt, Homo sapiens
  misc_RNA (1)...(19): siRNA sense strand
gcgagccacucuugcuuca

SEQ ID NO: 1576132 - RNA, 19 nt, Homo sapiens
  misc_RNA (1)...(19): siRNA sense strand
aaucagaagccuaagcaaa

SEQ ID NO: 1576133 - RNA, 19 nt, Homo sapiens
  misc_RNA (1)...(19): siRNA sense strand
uaaugccuaucucguguug

SEQ ID NO: 1576134 - RNA, 19 nt, Homo sapiens
  misc_RNA (1)...(19): siRNA sense strand
ucacgggaaugaaggagau

SEQ ID NO: 1576135 - RNA, 19 nt, Homo sapiens
  misc_RNA (1)...(19): siRNA sense strand
gagaggagcccuggaaagg

SEQ ID NO: 1576136 - RNA, 19 nt, Homo sapiens
  misc_RNA (1)...(19): siRNA sense strand
gcaaaaugaucgcacagau

SEQ ID NO: 1576137 - RNA, 19 nt, Homo sapiens
  misc_RNA (1)...(19): siRNA sense strand
agagagaaacuccaggaaa

SEQ ID NO: 1576138 - RNA, 19 nt, Homo sapiens
  misc_RNA (1)...(19): siRNA sense strand
gaaaggucagcacgucaga

SEQ ID NO: 1576139 - RNA, 19 nt, Homo sapiens
  misc_RNA (1)...(19): siRNA sense strand
gaaugaaggagaugcuaag

SEQ ID NO: 1576140 - RNA, 19 nt, Homo sapiens
  misc_RNA (1)...(19): siRNA sense strand
gcccgcauuuccagucaaa

SEQ ID NO: 1576141 - RNA, 19 nt, Homo sapiens
  misc_RNA (1)...(19): siRNA sense strand
ggaacaaugagaucaaacu

SEQ ID NO: 1576142 - RNA, 19 nt, Homo sapiens
  misc_RNA (1)...(19): siRNA sense strand
ggacccagccacagcuaau

SEQ ID NO: 1576143 - RNA, 19 nt, Homo sapiens
  misc_RNA (1)...(19): siRNA sense strand
ucugaagagugugaaauau

SEQ ID NO: 1576144 - RNA, 19 nt, Homo sapiens
  misc_RNA (1)...(19): siRNA sense strand
gaagcucaggcuguacuaa

SEQ ID NO: 1576145 - RNA, 19 nt, Homo sapiens
  misc_RNA (1)...(19): siRNA sense strand
ccagagccauggugcaaac

SEQ ID NO: 1576146 - RNA, 19 nt, Homo sapiens
  misc_RNA (1)...(19): siRNA sense strand
acacagacccucucaccau

SEQ ID NO: 1576147 - RNA, 19 nt, Homo sapiens
  misc_RNA (1)...(19): siRNA sense strand
ggucucgucaccuuugaaa

SEQ ID NO: 1576148 - RNA, 19 nt, Homo sapiens
  misc_RNA (1)...(19): siRNA sense strand
ccgacaacccggaaagauu

SEQ ID NO: 1576149 - RNA, 19 nt, Homo sapiens
  misc_RNA (1)...(19): siRNA sense strand
ggaagagaaagagaacaug

SEQ ID NO: 1576150 - RNA, 19 nt, Homo sapiens
  misc_RNA (1)...(19): siRNA sense strand
guguaagguuggugucuuc

SEQ ID NO: 1576151 - RNA, 19 nt, Homo sapiens
  misc_RNA (1)...(19): siRNA sense strand
ugagaaggagagagugaaa

SEQ ID NO: 1576152 - RNA, 19 nt, Homo sapiens
  misc_RNA (1)...(19): siRNA sense strand
gaucugaagagugugaaau

SEQ ID NO: 1576153 - RNA, 19 nt, Homo sapiens
  misc_RNA (1)...(19): siRNA sense strand
gaggaucugaagaguguga

SEQ ID NO: 1576154 - RNA, 19 nt, Homo sapiens
  misc_RNA (1)...(19): siRNA sense strand
aaauucagcacggagauaa

SEQ ID NO: 1576155 - RNA, 19 nt, Homo sapiens
  misc_RNA (1)...(19): siRNA sense strand
gagcgagccacucuugcuu

SEQ ID NO: 1576156 - RNA, 19 nt, Homo sapiens
  misc_RNA (1)...(19): siRNA sense strand
caaacugacccagcaaauc

SEQ ID NO: 1576157 - RNA, 19 nt, Homo sapiens
  misc_RNA (1)...(19): siRNA sense strand
uagaacaggaagagaaaga

SEQ ID NO: 1576158 - RNA, 19 nt, Homo sapiens
  misc_RNA (1)...(19): siRNA sense strand
agccacagcuaaugccuau

SEQ ID NO: 1576159 - RNA, 19 nt, Homo sapiens
  misc_RNA (1)...(19): siRNA sense strand
ucaucugcuuagacuauuu

SEQ ID NO: 1576160 - RNA, 19 nt, Homo sapiens
  misc_RNA (1)...(19): siRNA sense strand
ccacagcuaaugccuaucu

SEQ ID NO: 1576161 - RNA, 19 nt, Homo sapiens
  misc_RNA (1)...(19): siRNA sense strand
ggaagcucaggcuguacua

SEQ ID NO: 1576162 - RNA, 19 nt, Homo sapiens
  misc_RNA (1)...(19): siRNA sense strand
cgucagagagccugugugu

SEQ ID NO: 1576163 - RNA, 19 nt, Homo sapiens
  misc_RNA (1)...(19): siRNA sense strand
gcucggcuuucgaaucucu

SEQ ID NO: 1576164 - RNA, 19 nt, Homo sapiens
  misc_RNA (1)...(19): siRNA sense strand
aaagacuuguaaacagguu

SEQ ID NO: 1576165 - RNA, 19 nt, Homo sapiens
  misc_RNA (1)...(19): siRNA sense strand
aaaaugaucgcacagauug

SEQ ID NO: 1576166 - RNA, 19 nt, Homo sapiens
  misc_RNA (1)...(19): siRNA sense strand
cagaauacaugaaaaugca

SEQ ID NO: 1576167 - RNA, 19 nt, Homo sapiens
  misc_RNA (1)...(19): siRNA sense strand
caugagaaggagagaguga

SEQ ID NO: 1576168 - RNA, 19 nt, Homo sapiens
  misc_RNA (1)...(19): siRNA sense strand
acauauagcauucuacaac

SEQ ID NO: 1576169 - RNA, 19 nt, Homo sapiens
  misc_RNA (1)...(19): siRNA sense strand
gugucuuccuggacuauga

SEQ ID NO: 1576170 - RNA, 19 nt, Homo sapiens
  misc_RNA (1)...(19): siRNA sense strand
gcuggguacucagaucuuc

SEQ ID NO: 1576171 - RNA, 19 nt, Homo sapiens
  misc_RNA (1)...(19): siRNA sense strand
cugaggagcaucacagaga

SEQ ID NO: 1576172 - RNA, 19 nt, Homo sapiens
  misc_RNA (1)...(19): siRNA sense strand
gaucaaacugacccagcaa

SEQ ID NO: 1576173 - RNA, 19 nt, Homo sapiens
  misc_RNA (1)...(19): siRNA sense strand
ggaagaggagcagcugcaa

SEQ ID NO: 1576174 - RNA, 19 nt, Homo sapiens
  misc_RNA (1)...(19): siRNA sense strand
aggaagaaacaaagacuug

SEQ ID NO: 1576175 - RNA, 19 nt, Homo sapiens
  misc_RNA (1)...(19): siRNA sense strand
aaacugugccaggaagaaa

SEQ ID NO: 1576176 - RNA, 19 nt, Homo sapiens
  misc_RNA (1)...(19): siRNA sense strand
cuggacauauagcauucua

SEQ ID NO: 1576177 - RNA, 19 nt, Homo sapiens
  misc_RNA (1)...(19): siRNA sense strand
ggacuaugaaucuggacau

SEQ ID NO: 1576178 - RNA, 19 nt, Homo sapiens
  misc_RNA (1)...(19): siRNA sense strand
ucaccuguuucaucugcuu

SEQ ID NO: 1576179 - RNA, 19 nt, Homo sapiens
  misc_RNA (1)...(19): siRNA sense strand
caaaaugaucgcacagauu

SEQ ID NO: 1576180 - RNA, 19 nt, Homo sapiens
  misc_RNA (1)...(19): siRNA sense strand
aaggagagagugaaacugu

SEQ ID NO: 1576181 - RNA, 19 nt, Homo sapiens
  misc_RNA (1)...(19): siRNA sense strand
aaucuggacauauagcauu

SEQ ID NO: 1576182 - RNA, 19 nt, Homo sapiens
  misc_RNA (1)...(19): siRNA sense strand
ggaggaacucaccuguuuc

SEQ ID NO: 1576183 - RNA, 19 nt, Homo sapiens
  misc_RNA (1)...(19): siRNA sense strand
ucaaacugacccagcaaau

SEQ ID NO: 1576184 - RNA, 19 nt, Homo sapiens
  misc_RNA (1)...(19): siRNA sense strand
gagagccuguguguaaggu

SEQ ID NO: 1576185 - RNA, 19 nt, Homo sapiens
  misc_RNA (1)...(19): siRNA sense strand
ggggaccuguucucacuaa

SEQ ID NO: 1576186 - RNA, 19 nt, Homo sapiens
  misc_RNA (1)...(19): siRNA sense strand
gggaaugaaggagaugcua

SEQ ID NO: 1576187 - RNA, 19 nt, Homo sapiens
  misc_RNA (1)...(19): siRNA sense strand
gcaaaucagaagccuaagc

SEQ ID NO: 1576188 - RNA, 19 nt, Homo sapiens
  misc_RNA (1)...(19): siRNA sense strand
cugaagagugugaaauaug

SEQ ID NO: 1576189 - RNA, 19 nt, Homo sapiens
  misc_RNA (1)...(19): siRNA sense strand
cucaccaucugcucacuga

SEQ ID NO: 1576190 - RNA, 19 nt, Homo sapiens
  misc_RNA (1)...(19): siRNA sense strand
cagagagccuguguguaag

SEQ ID NO: 1576191 - RNA, 19 nt, Homo sapiens
  misc_RNA (1)...(19): siRNA sense strand
gaaacgaacgagaaacuga

SEQ ID NO: 1576192 - RNA, 19 nt, Homo sapiens
  misc_RNA (1)...(19): siRNA sense strand
gaucgccuccugaaacgaa

SEQ ID NO: 1576193 - RNA, 19 nt, Homo sapiens
  misc_RNA (1)...(19): siRNA sense strand
cgaauccacaggugaaaga

SEQ ID NO: 1576194 - RNA, 19 nt, Homo sapiens
  misc_RNA (1)...(19): siRNA sense strand
ugacgaauccacaggugaa

SEQ ID NO: 1576195 - RNA, 19 nt, Homo sapiens
  misc_RNA (1)...(19): siRNA sense strand
gaacgagaaacugacgaau

SEQ ID NO: 1576196 - RNA, 19 nt, Homo sapiens
  misc_RNA (1)...(19): siRNA sense strand
cgaacgagaaacugacgaa

SEQ ID NO: 1576197 - RNA, 19 nt, Homo sapiens
  misc_RNA (1)...(19): siRNA sense strand
acgagaaacugacgaaucc

SEQ ID NO: 1576198 - RNA, 19 nt, Homo sapiens
  misc_RNA (1)...(19): siRNA sense strand
gggaucgccuccugaaacg

SEQ ID NO: 1576199 - RNA, 19 nt, Homo sapiens
  misc_RNA (1)...(19): siRNA sense strand
auccacaggugaaagagaa

SEQ ID NO: 1576200 - RNA, 19 nt, Homo sapiens
  misc_RNA (1)...(19): siRNA sense strand
guacacaagcacgcucuuc

SEQ ID NO: 1576201 - RNA, 19 nt, Homo sapiens
  misc_RNA (1)...(19): siRNA sense strand
gaacgaaaguauuacauug

SEQ ID NO: 1576202 - RNA, 19 nt, Homo sapiens
  misc_RNA (1)...(19): siRNA sense strand
gcauuucucuucagcauua

SEQ ID NO: 1576203 - RNA, 19 nt, Homo sapiens
  misc_RNA (1)...(19): siRNA sense strand
gaacuaccuuagcaauuua

SEQ ID NO: 1576204 - RNA, 19 nt, Homo sapiens
  misc_RNA (1)...(19): siRNA sense strand
ccaaagaaaugaucacuga

SEQ ID NO: 1576205 - RNA, 19 nt, Homo sapiens
  misc_RNA (1)...(19): siRNA sense strand
cagcaaaucuacacacuaa

SEQ ID NO: 1576206 - RNA, 19 nt, Homo sapiens
  misc_RNA (1)...(19): siRNA sense strand
caagggugcuguugguuua

SEQ ID NO: 1576207 - RNA, 19 nt, Homo sapiens
  misc_RNA (1)...(19): siRNA sense strand
gaaagcaaauggauaucaa

SEQ ID NO: 1576208 - RNA, 19 nt, Homo sapiens
  misc_RNA (1)...(19): siRNA sense strand
gcauagauauucuucauca

SEQ ID NO: 1576209 - RNA, 19 nt, Homo sapiens
  misc_RNA (1)...(19): siRNA sense strand
gagaugggcuuaccaggaa

SEQ ID NO: 1576210 - RNA, 19 nt, Homo sapiens
  misc_RNA (1)...(19): siRNA sense strand
gaacaaggcauagauauuc

SEQ ID NO: 1576211 - RNA, 19 nt, Homo sapiens
  misc_RNA (1)...(19): siRNA sense strand
caacaaagauaccggaaca

SEQ ID NO: 1576212 - RNA, 19 nt, Homo sapiens
  misc_RNA (1)...(19): siRNA sense strand
gagaggaucugaagguaau

SEQ ID NO: 1576213 - RNA, 19 nt, Homo sapiens
  misc_RNA (1)...(19): siRNA sense strand
ugaacuaccuuagcaauuu

SEQ ID NO: 1576214 - RNA, 19 nt, Homo sapiens
  misc_RNA (1)...(19): siRNA sense strand
gaacaaugcauuucucuuc

SEQ ID NO: 1576215 - RNA, 19 nt, Homo sapiens
  misc_RNA (1)...(19): siRNA sense strand
gaagauacucagacaaauu

SEQ ID NO: 1576216 - RNA, 19 nt, Homo sapiens
  misc_RNA (1)...(19): siRNA sense strand
gcaaagauuuacuuaacug

SEQ ID NO: 1576217 - RNA, 19 nt, Homo sapiens
  misc_RNA (1)...(19): siRNA sense strand
gaugggaccugauggagaa

SEQ ID NO: 1576218 - RNA, 19 nt, Homo sapiens
  misc_RNA (1)...(19): siRNA sense strand
caaaggaacucagggagaa

SEQ ID NO: 1576219 - RNA, 19 nt, Homo sapiens
  misc_RNA (1)...(19): siRNA sense strand
gggcagccguuuacaauau

SEQ ID NO: 1576220 - RNA, 19 nt, Homo sapiens
  misc_RNA (1)...(19): siRNA sense strand
gaacuuccuucauuuacug

SEQ ID NO: 1576221 - RNA, 19 nt, Homo sapiens
  misc_RNA (1)...(19): siRNA sense strand
caagaaagcaaauggauau

SEQ ID NO: 1576222 - RNA, 19 nt, Homo sapiens
  misc_RNA (1)...(19): siRNA sense strand
ggaauaguaugucaguuag

SEQ ID NO: 1576223 - RNA, 19 nt, Homo sapiens
  misc_RNA (1)...(19): siRNA sense strand
gagagaggaucugaaggua

SEQ ID NO: 1576224 - RNA, 19 nt, Homo sapiens
  misc_RNA (1)...(19): siRNA sense strand
ucaaggccuuucuggauua

SEQ ID NO: 1576225 - RNA, 19 nt, Homo sapiens
  misc_RNA (1)...(19): siRNA sense strand
gcuaugaaacugagcuuua

SEQ ID NO: 1576226 - RNA, 19 nt, Homo sapiens
  misc_RNA (1)...(19): siRNA sense strand
gcaaaagcauuccaaauau

SEQ ID NO: 1576227 - RNA, 19 nt, Homo sapiens
  misc_RNA (1)...(19): siRNA sense strand
gaggauacauuuacugaag

SEQ ID NO: 1576228 - RNA, 19 nt, Homo sapiens
  misc_RNA (1)...(19): siRNA sense strand
guucagaccuuugauucua

SEQ ID NO: 1576229 - RNA, 19 nt, Homo sapiens
  misc_RNA (1)...(19): siRNA sense strand
ggauaucaaugcugcuauu

SEQ ID NO: 1576230 - RNA, 19 nt, Homo sapiens
  misc_RNA (1)...(19): siRNA sense strand
gauaucaagaucucaguua

SEQ ID NO: 1576231 - RNA, 19 nt, Homo sapiens
  misc_RNA (1)...(19): siRNA sense strand
gaaaauagcuaugaaacug

SEQ ID NO: 1576232 - RNA, 19 nt, Homo sapiens
  misc_RNA (1)...(19): siRNA sense strand
gggcuuaccaggaauuaua

SEQ ID NO: 1576233 - RNA, 19 nt, Homo sapiens
  misc_RNA (1)...(19): siRNA sense strand
gaaacugagcuuuaugauu

SEQ ID NO: 1576234 - RNA, 19 nt, Homo sapiens
  misc_RNA (1)...(19): siRNA sense strand
uaacuggucugucacuguu

SEQ ID NO: 1576235 - RNA, 19 nt, Homo sapiens
  misc_RNA (1)...(19): siRNA sense strand
caagauggcagcuggcaua

SEQ ID NO: 1576236 - RNA, 19 nt, Homo sapiens
  misc_RNA (1)...(19): siRNA sense strand
gcagauggcauuucaggaa

SEQ ID NO: 1576237 - RNA, 19 nt, Homo sapiens
  misc_RNA (1)...(19): siRNA sense strand
gggauuaccuggucaugug

SEQ ID NO: 1576238 - RNA, 19 nt, Homo sapiens
  misc_RNA (1)...(19): siRNA sense strand
ggaaagaaggugaauuuua

SEQ ID NO: 1576239 - RNA, 19 nt, Homo sapiens
  misc_RNA (1)...(19): siRNA sense strand
acaaggaauuccaggauuu

SEQ ID NO: 1576240 - RNA, 19 nt, Homo sapiens
  misc_RNA (1)...(19): siRNA sense strand
ucagaugacugcaagauuc

SEQ ID NO: 1576241 - RNA, 19 nt, Homo sapiens
  misc_RNA (1)...(19): siRNA sense strand
gauaucagguccuaaaggu

SEQ ID NO: 1576242 - RNA, 19 nt, Homo sapiens
  misc_RNA (1)...(19): siRNA sense strand
ggaacaagguauacaaggu

SEQ ID NO: 1576243 - RNA, 19 nt, Homo sapiens
  misc_RNA (1)...(19): siRNA sense strand
ggagaucaaggaaauauug

SEQ ID NO: 1576244 - RNA, 19 nt, Homo sapiens
  misc_RNA (1)...(19): siRNA sense strand
uagaguaacuggucuguca

SEQ ID NO: 1576245 - RNA, 19 nt, Homo sapiens
  misc_RNA (1)...(19): siRNA sense strand
gaacaaggaauuccaggau

SEQ ID NO: 1576246 - RNA, 19 nt, Homo sapiens
  misc_RNA (1)...(19): siRNA sense strand
ccaggaaccuaaucaacuu

SEQ ID NO: 1576247 - RNA, 19 nt, Homo sapiens
  misc_RNA (1)...(19): siRNA sense strand
ggacaaagaggaucaagag

SEQ ID NO: 1576248 - RNA, 19 nt, Homo sapiens
  misc_RNA (1)...(19): siRNA sense strand
gcagccguuuacaauauua

SEQ ID NO: 1576249 - RNA, 19 nt, Homo sapiens
  misc_RNA (1)...(19): siRNA sense strand
gaucaaggccuuucuggau

SEQ ID NO: 1576250 - RNA, 19 nt, Homo sapiens
  misc_RNA (1)...(19): siRNA sense strand
caagaacaaggcauagaua

SEQ ID NO: 1576251 - RNA, 19 nt, Homo sapiens
  misc_RNA (1)...(19): siRNA sense strand
caacuacaguguucaugau

SEQ ID NO: 1576252 - RNA, 19 nt, Homo sapiens
  misc_RNA (1)...(19): siRNA sense strand
ugaccacagugaagagaua

SEQ ID NO: 1576253 - RNA, 19 nt, Homo sapiens
  misc_RNA (1)...(19): siRNA sense strand
uggcagagaagguauaaua

SEQ ID NO: 1576254 - RNA, 19 nt, Homo sapiens
  misc_RNA (1)...(19): siRNA sense strand
ggaagauacucagacaaau

SEQ ID NO: 1576255 - RNA, 19 nt, Homo sapiens
  misc_RNA (1)...(19): siRNA sense strand
gcaaauggauaucaaugcu

SEQ ID NO: 1576256 - RNA, 19 nt, Homo sapiens
  misc_RNA (1)...(19): siRNA sense strand
uggcuuaccuggagaaguu

SEQ ID NO: 1576257 - RNA, 19 nt, Homo sapiens
  misc_RNA (1)...(19): siRNA sense strand
acauggaaauccugguuua

SEQ ID NO: 1576258 - RNA, 19 nt, Homo sapiens
  misc_RNA (1)...(19): siRNA sense strand
cuaacgaacucauggaaau

SEQ ID NO: 1576259 - RNA, 19 nt, Homo sapiens
  misc_RNA (1)...(19): siRNA sense strand
gacaauaucacacaacaug

SEQ ID NO: 1576260 - RNA, 19 nt, Homo sapiens
  misc_RNA (1)...(19): siRNA sense strand
aaaccaaagugucucaaug

SEQ ID NO: 1576261 - RNA, 19 nt, Homo sapiens
  misc_RNA (1)...(19): siRNA sense strand
gauggcagcuggcauaagg

SEQ ID NO: 1576262 - RNA, 19 nt, Homo sapiens
  misc_RNA (1)...(19): siRNA sense strand
uaucaaugcugcuauucaa

SEQ ID NO: 1576263 - RNA, 19 nt, Homo sapiens
  misc_RNA (1)...(19): siRNA sense strand
uggaaacccuggagaaaga

SEQ ID NO: 1576264 - RNA, 19 nt, Homo sapiens
  misc_RNA (1)...(19): siRNA sense strand
ggagaagaaggaccaauug

SEQ ID NO: 1576265 - RNA, 19 nt, Homo sapiens
  misc_RNA (1)...(19): siRNA sense strand
aaaaggagaucaaggaaaa

SEQ ID NO: 1576266 - RNA, 19 nt, Homo sapiens
  misc_RNA (1)...(19): siRNA sense strand
gggauggaauggccagauu

SEQ ID NO: 1576267 - RNA, 19 nt, Homo sapiens
  misc_RNA (1)...(19): siRNA sense strand
gaaguucagaccuuugauu

SEQ ID NO: 1576268 - RNA, 19 nt, Homo sapiens
  misc_RNA (1)...(19): siRNA sense strand
ccaagaaagcaaauggaua

SEQ ID NO: 1576269 - RNA, 19 nt, Homo sapiens
  misc_RNA (1)...(19): siRNA sense strand
auggagagcuaccagaaua

SEQ ID NO: 1576270 - RNA, 19 nt, Homo sapiens
  misc_RNA (1)...(19): siRNA sense strand
gaaguugggaugacuggaa

SEQ ID NO: 1576271 - RNA, 19 nt, Homo sapiens
  misc_RNA (1)...(19): siRNA sense strand
aagaaggucuccagggaaa

SEQ ID NO: 1576272 - RNA, 19 nt, Homo sapiens
  misc_RNA (1)...(19): siRNA sense strand
ccaaagugucucaauguuu

SEQ ID NO: 1576273 - RNA, 19 nt, Homo sapiens
  misc_RNA (1)...(19): siRNA sense strand
gccaggaccuaaaggagaa

SEQ ID NO: 1576274 - RNA, 19 nt, Homo sapiens
  misc_RNA (1)...(19): siRNA sense strand
gggagagucuggucugcaa

SEQ ID NO: 1576275 - RNA, 19 nt, Homo sapiens
  misc_RNA (1)...(19): siRNA sense strand
ugauaagggucucaaagga

SEQ ID NO: 1576276 - RNA, 19 nt, Homo sapiens
  misc_RNA (1)...(19): siRNA sense strand
aaggaaagaaggugaauuu

SEQ ID NO: 1576277 - RNA, 19 nt, Homo sapiens
  misc_RNA (1)...(19): siRNA sense strand
ggcaaaagcauuccaaaua

SEQ ID NO: 1576278 - RNA, 19 nt, Homo sapiens
  misc_RNA (1)...(19): siRNA sense strand
gaacaccagauaucaagau

SEQ ID NO: 1576279 - RNA, 19 nt, Homo sapiens
  misc_RNA (1)...(19): siRNA sense strand
ugacagguuuccaaggauu

SEQ ID NO: 1576280 - RNA, 19 nt, Homo sapiens
  misc_RNA (1)...(19): siRNA sense strand
auacaaugcuugaaaugga

SEQ ID NO: 1576281 - RNA, 19 nt, Homo sapiens
  misc_RNA (1)...(19): siRNA sense strand
gaaggaauaguaugucagu

SEQ ID NO: 1576282 - RNA, 19 nt, Homo sapiens
  misc_RNA (1)...(19): siRNA sense strand
ggagagagaggaucugaag

SEQ ID NO: 1576283 - RNA, 19 nt, Homo sapiens
  misc_RNA (1)...(19): siRNA sense strand
gaucaaggaaauauuggaa

SEQ ID NO: 1576284 - RNA, 19 nt, Homo sapiens
  misc_RNA (1)...(19): siRNA sense strand
gggagaagaaggaccaauu

SEQ ID NO: 1576285 - RNA, 19 nt, Homo sapiens
  misc_RNA (1)...(19): siRNA sense strand
caucuauucuuccacaaau

SEQ ID NO: 1576286 - RNA, 19 nt, Homo sapiens
  misc_RNA (1)...(19): siRNA sense strand
acaacaugaugauagagua

SEQ ID NO: 1576287 - RNA, 19 nt, Homo sapiens
  misc_RNA (1)...(19): siRNA sense strand
caacaugaugauagaguaa

SEQ ID NO: 1576288 - RNA, 19 nt, Homo sapiens
  misc_RNA (1)...(19): siRNA sense strand
ggcccaggauugccuauug

SEQ ID NO: 1576289 - RNA, 19 nt, Homo sapiens
  misc_RNA (1)...(19): siRNA sense strand
aauaugguguucaagguuu

SEQ ID NO: 1576290 - RNA, 19 nt, Homo sapiens
  misc_RNA (1)...(19): siRNA sense strand
caaaaggcauacaaggaua

SEQ ID NO: 1576291 - RNA, 19 nt, Homo sapiens
  misc_RNA (1)...(19): siRNA sense strand
gaggugcugugggacauuu

SEQ ID NO: 1576292 - RNA, 19 nt, Homo sapiens
  misc_RNA (1)...(19): siRNA sense strand
aggaauaguaugucaguua

SEQ ID NO: 1576293 - RNA, 19 nt, Homo sapiens
  misc_RNA (1)...(19): siRNA sense strand
cauaaggcaacauuucuuu

SEQ ID NO: 1576294 - RNA, 19 nt, Homo sapiens
  misc_RNA (1)...(19): siRNA sense strand
gaauaugguguucaagguu

SEQ ID NO: 1576295 - RNA, 19 nt, Homo sapiens
  misc_RNA (1)...(19): siRNA sense strand
ucucauaccaacaaagaua

SEQ ID NO: 1576296 - RNA, 19 nt, Homo sapiens
  misc_RNA (1)...(19): siRNA sense strand
agaaggcuaucacagcaaa

SEQ ID NO: 1576297 - RNA, 19 nt, Homo sapiens
  misc_RNA (1)...(19): siRNA sense strand
auaauaggcccaacaggua

SEQ ID NO: 1576298 - RNA, 19 nt, Homo sapiens
  misc_RNA (1)...(19): siRNA sense strand
gaaagggcagccuggagaa

SEQ ID NO: 1576299 - RNA, 19 nt, Homo sapiens
  misc_RNA (1)...(19): siRNA sense strand
gaaguaggagaucaaggaa

SEQ ID NO: 1576300 - RNA, 19 nt, Homo sapiens
  misc_RNA (1)...(19): siRNA sense strand
aggauuugcugguaauauu

SEQ ID NO: 1576301 - RNA, 19 nt, Homo sapiens
  misc_RNA (1)...(19): siRNA sense strand
gcaaacagauuaccagaaa

SEQ ID NO: 1576302 - RNA, 19 nt, Homo sapiens
  misc_RNA (1)...(19): siRNA sense strand
gaaaguacauggcacuaaa

SEQ ID NO: 1576303 - RNA, 19 nt, Homo sapiens
  misc_RNA (1)...(19): siRNA sense strand
ggaagacuuugaucaguua

SEQ ID NO: 1576304 - RNA, 19 nt, Homo sapiens
  misc_RNA (1)...(19): siRNA sense strand
ggaacuaaauccugacuuu

SEQ ID NO: 1576305 - RNA, 19 nt, Homo sapiens
  misc_RNA (1)...(19): siRNA sense strand
guacagaacuuauggaaag

SEQ ID NO: 1576306 - RNA, 19 nt, Homo sapiens
  misc_RNA (1)...(19): siRNA sense strand
ccaaagaccuuccauagau

SEQ ID NO: 1576307 - RNA, 19 nt, Homo sapiens
  misc_RNA (1)...(19): siRNA sense strand
gauaagcccuucauugaga

SEQ ID NO: 1576308 - RNA, 19 nt, Homo sapiens
  misc_RNA (1)...(19): siRNA sense strand
gaagauauuucagcaauca

SEQ ID NO: 1576309 - RNA, 19 nt, Homo sapiens
  misc_RNA (1)...(19): siRNA sense strand
caacugcucuucccaucua

SEQ ID NO: 1576310 - RNA, 19 nt, Homo sapiens
  misc_RNA (1)...(19): siRNA sense strand
gaaggaagauucuguucau

SEQ ID NO: 1576311 - RNA, 19 nt, Homo sapiens
  misc_RNA (1)...(19): siRNA sense strand
guacauuucuuaacacaga

SEQ ID NO: 1576312 - RNA, 19 nt, Homo sapiens
  misc_RNA (1)...(19): siRNA sense strand
ggaaggauuaugucaaaua

SEQ ID NO: 1576313 - RNA, 19 nt, Homo sapiens
  misc_RNA (1)...(19): siRNA sense strand
gaaauacauugcagugaug

SEQ ID NO: 1576314 - RNA, 19 nt, Homo sapiens
  misc_RNA (1)...(19): siRNA sense strand
ggaagcaauuggcaaacua

SEQ ID NO: 1576315 - RNA, 19 nt, Homo sapiens
  misc_RNA (1)...(19): siRNA sense strand
ccaaucaccugcaaauuau

SEQ ID NO: 1576316 - RNA, 19 nt, Homo sapiens
  misc_RNA (1)...(19): siRNA sense strand
gcacuaaauucuaucacaa

SEQ ID NO: 1576317 - RNA, 19 nt, Homo sapiens
  misc_RNA (1)...(19): siRNA sense strand
gaaggaacacccuguauau

SEQ ID NO: 1576318 - RNA, 19 nt, Homo sapiens
  misc_RNA (1)...(19): siRNA sense strand
gggaucauguacuaucuua

SEQ ID NO: 1576319 - RNA, 19 nt, Homo sapiens
  misc_RNA (1)...(19): siRNA sense strand
ccacacacauccacugaaa

SEQ ID NO: 1576320 - RNA, 19 nt, Homo sapiens
  misc_RNA (1)...(19): siRNA sense strand
guugacacauucacuauaa

SEQ ID NO: 1576321 - RNA, 19 nt, Homo sapiens
  misc_RNA (1)...(19): siRNA sense strand
gaaggauuaugucaaauag

SEQ ID NO: 1576322 - RNA, 19 nt, Homo sapiens
  misc_RNA (1)...(19): siRNA sense strand
ccagaaaggucaaagaauc

SEQ ID NO: 1576323 - RNA, 19 nt, Homo sapiens
  misc_RNA (1)...(19): siRNA sense strand
gcaagcagaugcaagaaag

SEQ ID NO: 1576324 - RNA, 19 nt, Homo sapiens
  misc_RNA (1)...(19): siRNA sense strand
gaucagggaaugcaauuaa

SEQ ID NO: 1576325 - RNA, 19 nt, Homo sapiens
  misc_RNA (1)...(19): siRNA sense strand
gaucaguuauuccuacuau

SEQ ID NO: 1576326 - RNA, 19 nt, Homo sapiens
  misc_RNA (1)...(19): siRNA sense strand
gcuuucaacuucuaacuuu

SEQ ID NO: 1576327 - RNA, 19 nt, Homo sapiens
  misc_RNA (1)...(19): siRNA sense strand
gaaggaagcaauuggcaaa

SEQ ID NO: 1576328 - RNA, 19 nt, Homo sapiens
  misc_RNA (1)...(19): siRNA sense strand
gggaagauauuucagcaau

SEQ ID NO: 1576329 - RNA, 19 nt, Homo sapiens
  misc_RNA (1)...(19): siRNA sense strand
ccaguuagguuuacaucaa

SEQ ID NO: 1576330 - RNA, 19 nt, Homo sapiens
  misc_RNA (1)...(19): siRNA sense strand
ugucagagguccaauaaau

SEQ ID NO: 1576331 - RNA, 19 nt, Homo sapiens
  misc_RNA (1)...(19): siRNA sense strand
gcuagcggcugaaguauuc

SEQ ID NO: 1576332 - RNA, 19 nt, Homo sapiens
  misc_RNA (1)...(19): siRNA sense strand
gaaauacagcagccacuuu

SEQ ID NO: 1576333 - RNA, 19 nt, Homo sapiens
  misc_RNA (1)...(19): siRNA sense strand
acagagggaucauguacua

SEQ ID NO: 1576334 - RNA, 19 nt, Homo sapiens
  misc_RNA (1)...(19): siRNA sense strand
ugaaguaguugacacauuc

SEQ ID NO: 1576335 - RNA, 19 nt, Homo sapiens
  misc_RNA (1)...(19): siRNA sense strand
ggauggaguacauuucuua

SEQ ID NO: 1576336 - RNA, 19 nt, Homo sapiens
  misc_RNA (1)...(19): siRNA sense strand
gggaagacuuugaucaguu

SEQ ID NO: 1576337 - RNA, 19 nt, Homo sapiens
  misc_RNA (1)...(19): siRNA sense strand
ggaagauucuguucauugg

SEQ ID NO: 1576338 - RNA, 19 nt, Homo sapiens
  misc_RNA (1)...(19): siRNA sense strand
ucauuugccugucuucuaa

SEQ ID NO: 1576339 - RNA, 19 nt, Homo sapiens
  misc_RNA (1)...(19): siRNA sense strand
gaaaacacaccaugucaua

SEQ ID NO: 1576340 - RNA, 19 nt, Homo sapiens
  misc_RNA (1)...(19): siRNA sense strand
gguguucaguggcuuaauu

SEQ ID NO: 1576341 - RNA, 19 nt, Homo sapiens
  misc_RNA (1)...(19): siRNA sense strand
caauauuuguuguggauga

SEQ ID NO: 1576342 - RNA, 19 nt, Homo sapiens
  misc_RNA (1)...(19): siRNA sense strand
aaacagugcuuccuucucu

SEQ ID NO: 1576343 - RNA, 19 nt, Homo sapiens
  misc_RNA (1)...(19): siRNA sense strand
caggaugugugcaaauaaa

SEQ ID NO: 1576344 - RNA, 19 nt, Homo sapiens
  misc_RNA (1)...(19): siRNA sense strand
gguagugaaaucaaaguua

SEQ ID NO: 1576345 - RNA, 19 nt, Homo sapiens
  misc_RNA (1)...(19): siRNA sense strand
aaacauggcuaugaaguag

SEQ ID NO: 1576346 - RNA, 19 nt, Homo sapiens
  misc_RNA (1)...(19): siRNA sense strand
aagcagaucuucacacauc

SEQ ID NO: 1576347 - RNA, 19 nt, Homo sapiens
  misc_RNA (1)...(19): siRNA sense strand
ucagagacuuuauagauca

SEQ ID NO: 1576348 - RNA, 19 nt, Homo sapiens
  misc_RNA (1)...(19): siRNA sense strand
caaagaccuuccauagaug

SEQ ID NO: 1576349 - RNA, 19 nt, Homo sapiens
  misc_RNA (1)...(19): siRNA sense strand
aaggaaggauuaugucaaa

SEQ ID NO: 1576350 - RNA, 19 nt, Homo sapiens
  misc_RNA (1)...(19): siRNA sense strand
uaagaaagcagaaggaaca

SEQ ID NO: 1576351 - RNA, 19 nt, Homo sapiens
  misc_RNA (1)...(19): siRNA sense strand
uccaaucaccugcaaauua

SEQ ID NO: 1576352 - RNA, 19 nt, Homo sapiens
  misc_RNA (1)...(19): siRNA sense strand
ggaaugaacagaaucucaa

SEQ ID NO: 1576353 - RNA, 19 nt, Homo sapiens
  misc_RNA (1)...(19): siRNA sense strand
gaaaggaaggauuauguca

SEQ ID NO: 1576354 - RNA, 19 nt, Homo sapiens
  misc_RNA (1)...(19): siRNA sense strand
ggaagucaugcgccaguua

SEQ ID NO: 1576355 - RNA, 19 nt, Homo sapiens
  misc_RNA (1)...(19): siRNA sense strand
caauaaaucagguuuguuc

SEQ ID NO: 1576356 - RNA, 19 nt, Homo sapiens
  misc_RNA (1)...(19): siRNA sense strand
acaaggcacuguaacaaau

SEQ ID NO: 1576357 - RNA, 19 nt, Homo sapiens
  misc_RNA (1)...(19): siRNA sense strand
aauaugguguccuaacuaa

SEQ ID NO: 1576358 - RNA, 19 nt, Homo sapiens
  misc_RNA (1)...(19): siRNA sense strand
gaccaaagaccuuccauag

SEQ ID NO: 1576359 - RNA, 19 nt, Homo sapiens
  misc_RNA (1)...(19): siRNA sense strand
gugaacagcugaaugaaac

SEQ ID NO: 1576360 - RNA, 19 nt, Homo sapiens
  misc_RNA (1)...(19): siRNA sense strand
ggacaaacagugcuuccuu

SEQ ID NO: 1576361 - RNA, 19 nt, Homo sapiens
  misc_RNA (1)...(19): siRNA sense strand
cguacaaacucaccaucua

SEQ ID NO: 1576362 - RNA, 19 nt, Homo sapiens
  misc_RNA (1)...(19): siRNA sense strand
ccucugggcuuaggaauga

SEQ ID NO: 1576363 - RNA, 19 nt, Homo sapiens
  misc_RNA (1)...(19): siRNA sense strand
cagcuacccucugggcuua

SEQ ID NO: 1576364 - RNA, 19 nt, Homo sapiens
  misc_RNA (1)...(19): siRNA sense strand
ggaccaaagaccuuccaua

SEQ ID NO: 1576365 - RNA, 19 nt, Homo sapiens
  misc_RNA (1)...(19): siRNA sense strand
gaacuaaaucagugucugu

SEQ ID NO: 1576366 - RNA, 19 nt, Homo sapiens
  misc_RNA (1)...(19): siRNA sense strand
gcagaaggaacacccugua

SEQ ID NO: 1576367 - RNA, 19 nt, Homo sapiens
  misc_RNA (1)...(19): siRNA sense strand
caacaaggcacuguaacaa

SEQ ID NO: 1576368 - RNA, 19 nt, Homo sapiens
  misc_RNA (1)...(19): siRNA sense strand
guacauggcacuaaauucu

SEQ ID NO: 1576369 - RNA, 19 nt, Homo sapiens
  misc_RNA (1)...(19): siRNA sense strand
ucaagcagaucuucacaca

SEQ ID NO: 1576370 - RNA, 19 nt, Homo sapiens
  misc_RNA (1)...(19): siRNA sense strand
agaaauacauugcagugau

SEQ ID NO: 1576371 - RNA, 19 nt, Homo sapiens
  misc_RNA (1)...(19): siRNA sense strand
gccauuugaugcaauagaa

SEQ ID NO: 1576372 - RNA, 19 nt, Homo sapiens
  misc_RNA (1)...(19): siRNA sense strand
ugaaucaucacuuuccaua

SEQ ID NO: 1576373 - RNA, 19 nt, Homo sapiens
  misc_RNA (1)...(19): siRNA sense strand
uggauaagcccuucauuga

SEQ ID NO: 1576374 - RNA, 19 nt, Homo sapiens
  misc_RNA (1)...(19): siRNA sense strand
cagaagauaagaacauuga

SEQ ID NO: 1576375 - RNA, 19 nt, Homo sapiens
  misc_RNA (1)...(19): siRNA sense strand
cuacaggccuccuuucuac

SEQ ID NO: 1576376 - RNA, 19 nt, Homo sapiens
  misc_RNA (1)...(19): siRNA sense strand
ggaacacccuguauaucca

SEQ ID NO: 1576377 - RNA, 19 nt, Homo sapiens
  misc_RNA (1)...(19): siRNA sense strand
guacacgagcauuuaaauu

SEQ ID NO: 1576378 - RNA, 19 nt, Homo sapiens
  misc_RNA (1)...(19): siRNA sense strand
ugucaucgcugaagaaagg

SEQ ID NO: 1576379 - RNA, 19 nt, Homo sapiens
  misc_RNA (1)...(19): siRNA sense strand
ggaagauauuucagcaauc

SEQ ID NO: 1576380 - RNA, 19 nt, Homo sapiens
  misc_RNA (1)...(19): siRNA sense strand
guacaaacucaccaucuau

SEQ ID NO: 1576381 - RNA, 19 nt, Homo sapiens
  misc_RNA (1)...(19): siRNA sense strand
caacaggcuuuugacauua

SEQ ID NO: 1576382 - RNA, 19 nt, Homo sapiens
  misc_RNA (1)...(19): siRNA sense strand
agaaggaacacccuguaua

SEQ ID NO: 1576383 - RNA, 19 nt, Homo sapiens
  misc_RNA (1)...(19): siRNA sense strand
ccagguacacgagcauuua

SEQ ID NO: 1576384 - RNA, 19 nt, Homo sapiens
  misc_RNA (1)...(19): siRNA sense strand
cagaacuuauggaaagaaa

SEQ ID NO: 1576385 - RNA, 19 nt, Homo sapiens
  misc_RNA (1)...(19): siRNA sense strand
uggaguacauuucuuaaca

SEQ ID NO: 1576386 - RNA, 19 nt, Homo sapiens
  misc_RNA (1)...(19): siRNA sense strand
ggaaggaagauucuguuca

SEQ ID NO: 1576387 - RNA, 19 nt, Homo sapiens
  misc_RNA (1)...(19): siRNA sense strand
guuagaagauucccagaac

SEQ ID NO: 1576388 - RNA, 19 nt, Homo sapiens
  misc_RNA (1)...(19): siRNA sense strand
gcaggaugugugcaaauaa

SEQ ID NO: 1576389 - RNA, 19 nt, Homo sapiens
  misc_RNA (1)...(19): siRNA sense strand
gguuacagccuauuucuuc

SEQ ID NO: 1576390 - RNA, 19 nt, Homo sapiens
  misc_RNA (1)...(19): siRNA sense strand
cuugggaucugcucauuug

SEQ ID NO: 1576391 - RNA, 19 nt, Homo sapiens
  misc_RNA (1)...(19): siRNA sense strand
ugacuacauugaagccauu

SEQ ID NO: 1576392 - RNA, 19 nt, Homo sapiens
  misc_RNA (1)...(19): siRNA sense strand
gauugugguuugcugauuc

SEQ ID NO: 1576393 - RNA, 19 nt, Homo sapiens
  misc_RNA (1)...(19): siRNA sense strand
gaacuaaauccugacuuuc

SEQ ID NO: 1576394 - RNA, 19 nt, Homo sapiens
  misc_RNA (1)...(19): siRNA sense strand
cacagaagauaagaacauu

SEQ ID NO: 1576395 - RNA, 19 nt, Homo sapiens
  misc_RNA (1)...(19): siRNA sense strand
gaucuaucugugauucuua

SEQ ID NO: 1576396 - RNA, 19 nt, Homo sapiens
  misc_RNA (1)...(19): siRNA sense strand
gcagaugcaagaaaggauu

SEQ ID NO: 1576397 - RNA, 19 nt, Homo sapiens
  misc_RNA (1)...(19): siRNA sense strand
ccacaagugccauuugaug

SEQ ID NO: 1576398 - RNA, 19 nt, Homo sapiens
  misc_RNA (1)...(19): siRNA sense strand
ggauugugguuugcugauu

SEQ ID NO: 1576399 - RNA, 19 nt, Homo sapiens
  misc_RNA (1)...(19): siRNA sense strand
gcuuaggaaugaacagaau

SEQ ID NO: 1576400 - RNA, 19 nt, Homo sapiens
  misc_RNA (1)...(19): siRNA sense strand
caacagagggaucauguac

SEQ ID NO: 1576401 - RNA, 19 nt, Homo sapiens
  misc_RNA (1)...(19): siRNA sense strand
ccagaagacuuguuuaaua

SEQ ID NO: 1576402 - RNA, 19 nt, Homo sapiens
  misc_RNA (1)...(19): siRNA sense strand
gaaagaugcuggugaugaa

SEQ ID NO: 1576403 - RNA, 19 nt, Homo sapiens
  misc_RNA (1)...(19): siRNA sense strand
gaacugggcaaacuauuaa

SEQ ID NO: 1576404 - RNA, 19 nt, Homo sapiens
  misc_RNA (1)...(19): siRNA sense strand
cgaaauaacugcuggaaag

SEQ ID NO: 1576405 - RNA, 19 nt, Homo sapiens
  misc_RNA (1)...(19): siRNA sense strand
ggaacugggcaaacuauua

SEQ ID NO: 1576406 - RNA, 19 nt, Homo sapiens
  misc_RNA (1)...(19): siRNA sense strand
gaaguuucauccagacaaa

SEQ ID NO: 1576407 - RNA, 19 nt, Homo sapiens
  misc_RNA (1)...(19): siRNA sense strand
ggaggaagauuaugugacu

SEQ ID NO: 1576408 - RNA, 19 nt, Homo sapiens
  misc_RNA (1)...(19): siRNA sense strand
ggaaaugcuuaugcuguuu

SEQ ID NO: 1576409 - RNA, 19 nt, Homo sapiens
  misc_RNA (1)...(19): siRNA sense strand
aaacagauaugcaguaugc

SEQ ID NO: 1576410 - RNA, 19 nt, Homo sapiens
  misc_RNA (1)...(19): siRNA sense strand
guaccuaacacacacauaa

SEQ ID NO: 1576411 - RNA, 19 nt, Homo sapiens
  misc_RNA (1)...(19): siRNA sense strand
caacaucagcaucgacaua

SEQ ID NO: 1576412 - RNA, 19 nt, Homo sapiens
  misc_RNA (1)...(19): siRNA sense strand
gauccucgugucauuauua

SEQ ID NO: 1576413 - RNA, 19 nt, Homo sapiens
  misc_RNA (1)...(19): siRNA sense strand
cgacauaguggacaugaaa

SEQ ID NO: 1576414 - RNA, 19 nt, Homo sapiens
  misc_RNA (1)...(19): siRNA sense strand
acacacacauaaacaaaug

SEQ ID NO: 1576415 - RNA, 19 nt, Homo sapiens
  misc_RNA (1)...(19): siRNA sense strand
aauaacugcuggaaagaaa

SEQ ID NO: 1576416 - RNA, 19 nt, Homo sapiens
  misc_RNA (1)...(19): siRNA sense strand
gccaguugauggucucuaa

SEQ ID NO: 1576417 - RNA, 19 nt, Homo sapiens
  misc_RNA (1)...(19): siRNA sense strand
ccaaaacaauggcagauuu

SEQ ID NO: 1576418 - RNA, 19 nt, Homo sapiens
  misc_RNA (1)...(19): siRNA sense strand
gaaauaacugcuggaaaga

SEQ ID NO: 1576419 - RNA, 19 nt, Homo sapiens
  misc_RNA (1)...(19): siRNA sense strand
gcccauaauuguauugauc

SEQ ID NO: 1576420 - RNA, 19 nt, Homo sapiens
  misc_RNA (1)...(19): siRNA sense strand
cagcugaugcccauaauug

SEQ ID NO: 1576421 - RNA, 19 nt, Homo sapiens
  misc_RNA (1)...(19): siRNA sense strand
cggcuuaccagucuuuaua

SEQ ID NO: 1576422 - RNA, 19 nt, Homo sapiens
  misc_RNA (1)...(19): siRNA sense strand
cgaaagaugcuggugauga

SEQ ID NO: 1576423 - RNA, 19 nt, Homo sapiens
  misc_RNA (1)...(19): siRNA sense strand
gaugaucgacuccgaagga

SEQ ID NO: 1576424 - RNA, 19 nt, Homo sapiens
  misc_RNA (1)...(19): siRNA sense strand
ugauauaacuccagaagac

SEQ ID NO: 1576425 - RNA, 19 nt, Homo sapiens
  misc_RNA (1)...(19): siRNA sense strand
caaauggaagagcugguua

SEQ ID NO: 1576426 - RNA, 19 nt, Homo sapiens
  misc_RNA (1)...(19): siRNA sense strand
gcuuaccagucuuuauaaa

SEQ ID NO: 1576427 - RNA, 19 nt, Homo sapiens
  misc_RNA (1)...(19): siRNA sense strand
gcugaugcccauaauugua

SEQ ID NO: 1576428 - RNA, 19 nt, Homo sapiens
  misc_RNA (1)...(19): siRNA sense strand
cagguaguguacauucuuu

SEQ ID NO: 1576429 - RNA, 19 nt, Homo sapiens
  misc_RNA (1)...(19): siRNA sense strand
ugaaagagaagaggaaaga

SEQ ID NO: 1576430 - RNA, 19 nt, Homo sapiens
  misc_RNA (1)...(19): siRNA sense strand
uggaaaugcuuaugcuguu

SEQ ID NO: 1576431 - RNA, 19 nt, Homo sapiens
  misc_RNA (1)...(19): siRNA sense strand
acuuggguguuguuuauua

SEQ ID NO: 1576432 - RNA, 19 nt, Homo sapiens
  misc_RNA (1)...(19): siRNA sense strand
ggauauuggaacauugaua

SEQ ID NO: 1576433 - RNA, 19 nt, Homo sapiens
  misc_RNA (1)...(19): siRNA sense strand
ccauagagguugugaagcu

SEQ ID NO: 1576434 - RNA, 19 nt, Homo sapiens
  misc_RNA (1)...(19): siRNA sense strand
uggaagagcugguuauagc

SEQ ID NO: 1576435 - RNA, 19 nt, Homo sapiens
  misc_RNA (1)...(19): siRNA sense strand
uaauccuccuuauuccuua

SEQ ID NO: 1576436 - RNA, 19 nt, Homo sapiens
  misc_RNA (1)...(19): siRNA sense strand
ucucuaauccuccuuauuc

SEQ ID NO: 1576437 - RNA, 19 nt, Homo sapiens
  misc_RNA (1)...(19): siRNA sense strand
gcaaaaguauaccgugaug

SEQ ID NO: 1576438 - RNA, 19 nt, Homo sapiens
  misc_RNA (1)...(19): siRNA sense strand
caaugaagaacaagcaugu

SEQ ID NO: 1576439 - RNA, 19 nt, Homo sapiens
  misc_RNA (1)...(19): siRNA sense strand
gguuauagccaacaacauc

SEQ ID NO: 1576440 - RNA, 19 nt, Homo sapiens
  misc_RNA (1)...(19): siRNA sense strand
uaugaaguacuuggaguua

SEQ ID NO: 1576441 - RNA, 19 nt, Homo sapiens
  misc_RNA (1)...(19): siRNA sense strand
caaaacaauggcagauuua

SEQ ID NO: 1576442 - RNA, 19 nt, Homo sapiens
  misc_RNA (1)...(19): siRNA sense strand
ggaaagaaagacaacaaaa

SEQ ID NO: 1576443 - RNA, 19 nt, Homo sapiens
  misc_RNA (1)...(19): siRNA sense strand
gaggaagauuaugugacua

SEQ ID NO: 1576444 - RNA, 19 nt, Homo sapiens
  misc_RNA (1)...(19): siRNA sense strand
uaguggacaugaaagagaa

SEQ ID NO: 1576445 - RNA, 19 nt, Homo sapiens
  misc_RNA (1)...(19): siRNA sense strand
gcaccuggagcaacagaug

SEQ ID NO: 1576446 - RNA, 19 nt, Homo sapiens
  misc_RNA (1)...(19): siRNA sense strand
gaaagaggagauggagguu

SEQ ID NO: 1576447 - RNA, 19 nt, Homo sapiens
  misc_RNA (1)...(19): siRNA sense strand
gaagaggaaagaggagaug

SEQ ID NO: 1576448 - RNA, 19 nt, Homo sapiens
  misc_RNA (1)...(19): siRNA sense strand
gcagauuuaauuuccauag

SEQ ID NO: 1576449 - RNA, 19 nt, Homo sapiens
  misc_RNA (1)...(19): siRNA sense strand
ccaugcaccuggagcaaca

SEQ ID NO: 1576450 - RNA, 19 nt, Homo sapiens
  misc_RNA (1)...(19): siRNA sense strand
guacuuggaguuacgaaag

SEQ ID NO: 1576451 - RNA, 19 nt, Homo sapiens
  misc_RNA (1)...(19): siRNA sense strand
cagaaaagcgaaaacagua

SEQ ID NO: 1576452 - RNA, 19 nt, Homo sapiens
  misc_RNA (1)...(19): siRNA sense strand
gagcggcuuaccagucuuu

SEQ ID NO: 1576453 - RNA, 19 nt, Homo sapiens
  misc_RNA (1)...(19): siRNA sense strand
uagagcggcuuaccagucu

SEQ ID NO: 1576454 - RNA, 19 nt, Homo sapiens
  misc_RNA (1)...(19): siRNA sense strand
gguguuguuuauuauguca

SEQ ID NO: 1576455 - RNA, 19 nt, Homo sapiens
  misc_RNA (1)...(19): siRNA sense strand
uacgaaagaugcuggugau

SEQ ID NO: 1576456 - RNA, 19 nt, Homo sapiens
  misc_RNA (1)...(19): siRNA sense strand
gauuggaaaugcuuaugcu

SEQ ID NO: 1576457 - RNA, 19 nt, Homo sapiens
  misc_RNA (1)...(19): siRNA sense strand
gcaguaugcagcaaaagua

SEQ ID NO: 1576458 - RNA, 19 nt, Homo sapiens
  misc_RNA (1)...(19): siRNA sense strand
uaacugcuggaaagaaaga

SEQ ID NO: 1576459 - RNA, 19 nt, Homo sapiens
  misc_RNA (1)...(19): siRNA sense strand
uauugauccucgugucauu

SEQ ID NO: 1576460 - RNA, 19 nt, Homo sapiens
  misc_RNA (1)...(19): siRNA sense strand
aagaggagauggagguuuu

SEQ ID NO: 1576461 - RNA, 19 nt, Homo sapiens
  misc_RNA (1)...(19): siRNA sense strand
agaguguggaggaagauua

SEQ ID NO: 1576462 - RNA, 19 nt, Homo sapiens
  misc_RNA (1)...(19): siRNA sense strand
acaagcauguaaccaccaa

SEQ ID NO: 1576463 - RNA, 19 nt, Homo sapiens
  misc_RNA (1)...(19): siRNA sense strand
gaugguggaccuguaccua

SEQ ID NO: 1576464 - RNA, 19 nt, Homo sapiens
  misc_RNA (1)...(19): siRNA sense strand
gaguguggaggaagauuau

SEQ ID NO: 1576465 - RNA, 19 nt, Homo sapiens
  misc_RNA (1)...(19): siRNA sense strand
acagaaaacuuggguguug

SEQ ID NO: 1576466 - RNA, 19 nt, Homo sapiens
  misc_RNA (1)...(19): siRNA sense strand
ggucucuaauccuccuuau

SEQ ID NO: 1576467 - RNA, 19 nt, Homo sapiens
  misc_RNA (1)...(19): siRNA sense strand
ggauuuccuucagguagug

SEQ ID NO: 1576468 - RNA, 19 nt, Homo sapiens
  misc_RNA (1)...(19): siRNA sense strand
gaagaacaagcauguaacc

SEQ ID NO: 1576469 - RNA, 19 nt, Homo sapiens
  misc_RNA (1)...(19): siRNA sense strand
aggaagauuaugugacuaa

SEQ ID NO: 1576470 - RNA, 19 nt, Homo sapiens
  misc_RNA (1)...(19): siRNA sense strand
ccaacaacaucagcaucga

SEQ ID NO: 1576471 - RNA, 19 nt, Homo sapiens
  misc_RNA (1)...(19): siRNA sense strand
cacgggcaaugaagaacaa

SEQ ID NO: 1576472 - RNA, 19 nt, Homo sapiens
  misc_RNA (1)...(19): siRNA sense strand
ggaauguuauuacaaaagg

SEQ ID NO: 1576473 - RNA, 19 nt, Homo sapiens
  misc_RNA (1)...(19): siRNA sense strand
gcugauauaacuccagaag

SEQ ID NO: 1576474 - RNA, 19 nt, Homo sapiens
  misc_RNA (1)...(19): siRNA sense strand
uugugaagcugauauaacu

SEQ ID NO: 1576475 - RNA, 19 nt, Homo sapiens
  misc_RNA (1)...(19): siRNA sense strand
uaauuuccauagagguugu

SEQ ID NO: 1576476 - RNA, 19 nt, Homo sapiens
  misc_RNA (1)...(19): siRNA sense strand
augaagaacaagcauguaa

SEQ ID NO: 1576477 - RNA, 19 nt, Homo sapiens
  misc_RNA (1)...(19): siRNA sense strand
gaaaagcgaaaacaguaug

SEQ ID NO: 1576478 - RNA, 19 nt, Homo sapiens
  misc_RNA (1)...(19): siRNA sense strand
gaauuagagcggcuuacca

SEQ ID NO: 1576479 - RNA, 19 nt, Homo sapiens
  misc_RNA (1)...(19): siRNA sense strand
uggaaagaaagacaacaaa

SEQ ID NO: 1576480 - RNA, 19 nt, Homo sapiens
  misc_RNA (1)...(19): siRNA sense strand
gaaaugcuuaugcuguuuu

SEQ ID NO: 1576481 - RNA, 19 nt, Homo sapiens
  misc_RNA (1)...(19): siRNA sense strand
ugaaguacuuggaguuacg

SEQ ID NO: 1576482 - RNA, 19 nt, Homo sapiens
  misc_RNA (1)...(19): siRNA sense strand
cuaacacacacauaaacaa

SEQ ID NO: 1576483 - RNA, 19 nt, Homo sapiens
  misc_RNA (1)...(19): siRNA sense strand
ucaaauggaagagcugguu

SEQ ID NO: 1576484 - RNA, 19 nt, Homo sapiens
  misc_RNA (1)...(19): siRNA sense strand
caauggcagauuuaauuuc

SEQ ID NO: 1576485 - RNA, 19 nt, Homo sapiens
  misc_RNA (1)...(19): siRNA sense strand
aaagaauuagagcggcuua

SEQ ID NO: 1576486 - RNA, 19 nt, Homo sapiens
  misc_RNA (1)...(19): siRNA sense strand
cuaauccuccuuauuccuu

SEQ ID NO: 1576487 - RNA, 19 nt, Homo sapiens
  misc_RNA (1)...(19): siRNA sense strand
gcaucgacauaguggacau

SEQ ID NO: 1576488 - RNA, 19 nt, Homo sapiens
  misc_RNA (1)...(19): siRNA sense strand
caucagcaucgacauagug

SEQ ID NO: 1576489 - RNA, 19 nt, Homo sapiens
  misc_RNA (1)...(19): siRNA sense strand
cuccagaagacuuguuuaa

SEQ ID NO: 1576490 - RNA, 19 nt, Homo sapiens
  misc_RNA (1)...(19): siRNA sense strand
aauggaagagcugguuaua

SEQ ID NO: 1576491 - RNA, 19 nt, Homo sapiens
  misc_RNA (1)...(19): siRNA sense strand
uaccuaacacacacauaaa

SEQ ID NO: 1576492 - RNA, 19 nt, Homo sapiens
  misc_RNA (1)...(19): siRNA sense strand
aaaagaguguggaggaaga

SEQ ID NO: 1576493 - RNA, 19 nt, Homo sapiens
  misc_RNA (1)...(19): siRNA sense strand
ugucaacaaggacuucaaa

SEQ ID NO: 1576494 - RNA, 19 nt, Homo sapiens
  misc_RNA (1)...(19): siRNA sense strand
uacuuggaguuacgaaaga

SEQ ID NO: 1576495 - RNA, 19 nt, Homo sapiens
  misc_RNA (1)...(19): siRNA sense strand
ggcuuaccagucuuuauaa

SEQ ID NO: 1576496 - RNA, 19 nt, Homo sapiens
  misc_RNA (1)...(19): siRNA sense strand
aaauaacugcuggaaagaa

SEQ ID NO: 1576497 - RNA, 19 nt, Homo sapiens
  misc_RNA (1)...(19): siRNA sense strand
gaccuguaccuaacacaca

SEQ ID NO: 1576498 - RNA, 19 nt, Homo sapiens
  misc_RNA (1)...(19): siRNA sense strand
caacuguaaagaauuagag

SEQ ID NO: 1576499 - RNA, 19 nt, Homo sapiens
  misc_RNA (1)...(19): siRNA sense strand
uggguguuguuuauuaugu

SEQ ID NO: 1576500 - RNA, 19 nt, Homo sapiens
  misc_RNA (1)...(19): siRNA sense strand
ucagguaguguacauucuu

SEQ ID NO: 1576501 - RNA, 19 nt, Homo sapiens
  misc_RNA (1)...(19): siRNA sense strand
gcucagagaugggguuuca

SEQ ID NO: 1576502 - RNA, 19 nt, Homo sapiens
  misc_RNA (1)...(19): siRNA sense strand
ggagaugacuugauuguga

SEQ ID NO: 1576503 - RNA, 19 nt, Homo sapiens
  misc_RNA (1)...(19): siRNA sense strand
gaaaucaagugucagaguu

SEQ ID NO: 1576504 - RNA, 19 nt, Homo sapiens
  misc_RNA (1)...(19): siRNA sense strand
aaacaacuuugcugcauua

SEQ ID NO: 1576505 - RNA, 19 nt, Homo sapiens
  misc_RNA (1)...(19): siRNA sense strand
gaacuugccuugauguaca

SEQ ID NO: 1576506 - RNA, 19 nt, Homo sapiens
  misc_RNA (1)...(19): siRNA sense strand
gaagaaaacugugacauuu

SEQ ID NO: 1576507 - RNA, 19 nt, Homo sapiens
  misc_RNA (1)...(19): siRNA sense strand
gaaacaacuuugcugcauu

SEQ ID NO: 1576508 - RNA, 19 nt, Homo sapiens
  misc_RNA (1)...(19): siRNA sense strand
caacaaagccaccauaaca

SEQ ID NO: 1576509 - RNA, 19 nt, Homo sapiens
  misc_RNA (1)...(19): siRNA sense strand
uagaagaugugaacaaaug

SEQ ID NO: 1576510 - RNA, 19 nt, Homo sapiens
  misc_RNA (1)...(19): siRNA sense strand
acacggagaugacuugauu

SEQ ID NO: 1576511 - RNA, 19 nt, Homo sapiens
  misc_RNA (1)...(19): siRNA sense strand
gaacguggcauggagauaa

SEQ ID NO: 1576512 - RNA, 19 nt, Homo sapiens
  misc_RNA (1)...(19): siRNA sense strand
gaaaugagucggucuggaa

SEQ ID NO: 1576513 - RNA, 19 nt, Homo sapiens
  misc_RNA (1)...(19): siRNA sense strand
ccaaggaacuagaagaugu

SEQ ID NO: 1576514 - RNA, 19 nt, Homo sapiens
  misc_RNA (1)...(19): siRNA sense strand
caaagccucuccagcugua

SEQ ID NO: 1576515 - RNA, 19 nt, Homo sapiens
  misc_RNA (1)...(19): siRNA sense strand
caacuuugcugcauuaacu

SEQ ID NO: 1576516 - RNA, 19 nt, Homo sapiens
  misc_RNA (1)...(19): siRNA sense strand
gcagucaaguggaagaaga

SEQ ID NO: 1576517 - RNA, 19 nt, Homo sapiens
  misc_RNA (1)...(19): siRNA sense strand
agacuaugguugaaacuaa

SEQ ID NO: 1576518 - RNA, 19 nt, Homo sapiens
  misc_RNA (1)...(19): siRNA sense strand
gacaagcucuggaguucuu

SEQ ID NO: 1576519 - RNA, 19 nt, Homo sapiens
  misc_RNA (1)...(19): siRNA sense strand
uagaaggcauuccuggaua

SEQ ID NO: 1576520 - RNA, 19 nt, Homo sapiens
  misc_RNA (1)...(19): siRNA sense strand
ucaggaacgggauuuauua

SEQ ID NO: 1576521 - RNA, 19 nt, Homo sapiens
  misc_RNA (1)...(19): siRNA sense strand
gagauggccuccaacaagu

SEQ ID NO: 1576522 - RNA, 19 nt, Homo sapiens
  misc_RNA (1)...(19): siRNA sense strand
caacagauaugucaaaaca

SEQ ID NO: 1576523 - RNA, 19 nt, Homo sapiens
  misc_RNA (1)...(19): siRNA sense strand
ucaguggagucaagaaauu

SEQ ID NO: 1576524 - RNA, 19 nt, Homo sapiens
  misc_RNA (1)...(19): siRNA sense strand
gaaauuccuucuccaacuc

SEQ ID NO: 1576525 - RNA, 19 nt, Homo sapiens
  misc_RNA (1)...(19): siRNA sense strand
ggaguucuucuucuugaua

SEQ ID NO: 1576526 - RNA, 19 nt, Homo sapiens
  misc_RNA (1)...(19): siRNA sense strand
ggaggacaaucgugaaugg

SEQ ID NO: 1576527 - RNA, 19 nt, Homo sapiens
  misc_RNA (1)...(19): siRNA sense strand
uaagcaacaugaaguggaa

SEQ ID NO: 1576528 - RNA, 19 nt, Homo sapiens
  misc_RNA (1)...(19): siRNA sense strand
caaugauuccucagucuua

SEQ ID NO: 1576529 - RNA, 19 nt, Homo sapiens
  misc_RNA (1)...(19): siRNA sense strand
gaguucuucuucuugauaa

SEQ ID NO: 1576530 - RNA, 19 nt, Homo sapiens
  misc_RNA (1)...(19): siRNA sense strand
ucaaguaucccaagguuug

SEQ ID NO: 1576531 - RNA, 19 nt, Homo sapiens
  misc_RNA (1)...(19): siRNA sense strand
gcccuugacuguuaucaug

SEQ ID NO: 1576532 - RNA, 19 nt, Homo sapiens
  misc_RNA (1)...(19): siRNA sense strand
aaucaagugucagaguuua

SEQ ID NO: 1576533 - RNA, 19 nt, Homo sapiens
  misc_RNA (1)...(19): siRNA sense strand
gaugaucguucuccugaca

SEQ ID NO: 1576534 - RNA, 19 nt, Homo sapiens
  misc_RNA (1)...(19): siRNA sense strand
agaggaagauggugaguca

SEQ ID NO: 1576535 - RNA, 19 nt, Homo sapiens
  misc_RNA (1)...(19): siRNA sense strand
ggacggaccggauaaugga

SEQ ID NO: 1576536 - RNA, 19 nt, Homo sapiens
  misc_RNA (1)...(19): siRNA sense strand
gaucugagcaacccaacaa

SEQ ID NO: 1576537 - RNA, 19 nt, Homo sapiens
  misc_RNA (1)...(19): siRNA sense strand
ucagugagauggccuccaa

SEQ ID NO: 1576538 - RNA, 19 nt, Homo sapiens
  misc_RNA (1)...(19): siRNA sense strand
augcacagcucuagucuga

SEQ ID NO: 1576539 - RNA, 19 nt, Homo sapiens
  misc_RNA (1)...(19): siRNA sense strand
ucacccaucucucugaaau

SEQ ID NO: 1576540 - RNA, 19 nt, Homo sapiens
  misc_RNA (1)...(19): siRNA sense strand
gauccgacagcgauuauga

SEQ ID NO: 1576541 - RNA, 19 nt, Homo sapiens
  misc_RNA (1)...(19): siRNA sense strand
gcugugggcuuuaaauugc

SEQ ID NO: 1576542 - RNA, 19 nt, Homo sapiens
  misc_RNA (1)...(19): siRNA sense strand
gaucaguggagucaagaaa

SEQ ID NO: 1576543 - RNA, 19 nt, Homo sapiens
  misc_RNA (1)...(19): siRNA sense strand
cgaaacaacuuugcugcau

SEQ ID NO: 1576544 - RNA, 19 nt, Homo sapiens
  misc_RNA (1)...(19): siRNA sense strand
caauauccaugcugcagau

SEQ ID NO: 1576545 - RNA, 19 nt, Homo sapiens
  misc_RNA (1)...(19): siRNA sense strand
gaacuguacgaaacaacuu

SEQ ID NO: 1576546 - RNA, 19 nt, Homo sapiens
  misc_RNA (1)...(19): siRNA sense strand
aauacaaacucugaacuug

SEQ ID NO: 1576547 - RNA, 19 nt, Homo sapiens
  misc_RNA (1)...(19): siRNA sense strand
acuagaagaugugaacaaa

SEQ ID NO: 1576548 - RNA, 19 nt, Homo sapiens
  misc_RNA (1)...(19): siRNA sense strand
ggaaaucaagugucagagu

SEQ ID NO: 1576549 - RNA, 19 nt, Homo sapiens
  misc_RNA (1)...(19): siRNA sense strand
gugacaagcucuggaguuc

SEQ ID NO: 1576550 - RNA, 19 nt, Homo sapiens
  misc_RNA (1)...(19): siRNA sense strand
caaauggggucuucauguu

SEQ ID NO: 1576551 - RNA, 19 nt, Homo sapiens
  misc_RNA (1)...(19): siRNA sense strand
ucauuuggcugugggcuuu

SEQ ID NO: 1576552 - RNA, 19 nt, Homo sapiens
  misc_RNA (1)...(19): siRNA sense strand
gauaauuauuccgauagga

SEQ ID NO: 1576553 - RNA, 19 nt, Homo sapiens
  misc_RNA (1)...(19): siRNA sense strand
ggaagaaaacugugacauu

SEQ ID NO: 1576554 - RNA, 19 nt, Homo sapiens
  misc_RNA (1)...(19): siRNA sense strand
ucccggaacuccuccauug

SEQ ID NO: 1576555 - RNA, 19 nt, Homo sapiens
  misc_RNA (1)...(19): siRNA sense strand
caauacaaacucugaacuu

SEQ ID NO: 1576556 - RNA, 19 nt, Homo sapiens
  misc_RNA (1)...(19): siRNA sense strand
uuacagauuuggagauucu

SEQ ID NO: 1576557 - RNA, 19 nt, Homo sapiens
  misc_RNA (1)...(19): siRNA sense strand
cuacucaugugcuauuauc

SEQ ID NO: 1576558 - RNA, 19 nt, Homo sapiens
  misc_RNA (1)...(19): siRNA sense strand
caacaugaaguggaaauuc

SEQ ID NO: 1576559 - RNA, 19 nt, Homo sapiens
  misc_RNA (1)...(19): siRNA sense strand
ucaagugucagaguuuaua

SEQ ID NO: 1576560 - RNA, 19 nt, Homo sapiens
  misc_RNA (1)...(19): siRNA sense strand
gcucacccaucucucugaa

SEQ ID NO: 1576561 - RNA, 19 nt, Homo sapiens
  misc_RNA (1)...(19): siRNA sense strand
auuaugaccucucuccaaa

SEQ ID NO: 1576562 - RNA, 19 nt, Homo sapiens
  misc_RNA (1)...(19): siRNA sense strand
guuuacagauuuggagauu

SEQ ID NO: 1576563 - RNA, 19 nt, Homo sapiens
  misc_RNA (1)...(19): siRNA sense strand
cagaggaggccuaccagaa

SEQ ID NO: 1576564 - RNA, 19 nt, Homo sapiens
  misc_RNA (1)...(19): siRNA sense strand
ggacaguggcagucaagug

SEQ ID NO: 1576565 - RNA, 19 nt, Homo sapiens
  misc_RNA (1)...(19): siRNA sense strand
cugagaaauuccaguuuga

SEQ ID NO: 1576566 - RNA, 19 nt, Homo sapiens
  misc_RNA (1)...(19): siRNA sense strand
gggucaaacugagaaauuc

SEQ ID NO: 1576567 - RNA, 19 nt, Homo sapiens
  misc_RNA (1)...(19): siRNA sense strand
uggcugauuugaagacuau

SEQ ID NO: 1576568 - RNA, 19 nt, Homo sapiens
  misc_RNA (1)...(19): siRNA sense strand
ccagucuacucaugugcua

SEQ ID NO: 1576569 - RNA, 19 nt, Homo sapiens
  misc_RNA (1)...(19): siRNA sense strand
aaagaucacccaugugcaa

SEQ ID NO: 1576570 - RNA, 19 nt, Homo sapiens
  misc_RNA (1)...(19): siRNA sense strand
gauaauggaggaguucuuc

SEQ ID NO: 1576571 - RNA, 19 nt, Homo sapiens
  misc_RNA (1)...(19): siRNA sense strand
caucguacuugcaacagau

SEQ ID NO: 1576572 - RNA, 19 nt, Homo sapiens
  misc_RNA (1)...(19): siRNA sense strand
gauuaugaccucucuccaa

SEQ ID NO: 1576573 - RNA, 19 nt, Homo sapiens
  misc_RNA (1)...(19): siRNA sense strand
aaacugaacaagaagaugu

SEQ ID NO: 1576574 - RNA, 19 nt, Homo sapiens
  misc_RNA (1)...(19): siRNA sense strand
agaggaggccuaccagaaa

SEQ ID NO: 1576575 - RNA, 19 nt, Homo sapiens
  misc_RNA (1)...(19): siRNA sense strand
agaaggcauuccuggauau

SEQ ID NO: 1576576 - RNA, 19 nt, Homo sapiens
  misc_RNA (1)...(19): siRNA sense strand
caucaacaaagccaccaua

SEQ ID NO: 1576577 - RNA, 19 nt, Homo sapiens
  misc_RNA (1)...(19): siRNA sense strand
gaggaggccuaccagaaac

SEQ ID NO: 1576578 - RNA, 19 nt, Homo sapiens
  misc_RNA (1)...(19): siRNA sense strand
uaugaccucucuccaaagu

SEQ ID NO: 1576579 - RNA, 19 nt, Homo sapiens
  misc_RNA (1)...(19): siRNA sense strand
uauccaugcugcagauguu

SEQ ID NO: 1576580 - RNA, 19 nt, Homo sapiens
  misc_RNA (1)...(19): siRNA sense strand
ucagaucaguggagucaag

SEQ ID NO: 1576581 - RNA, 19 nt, Homo sapiens
  misc_RNA (1)...(19): siRNA sense strand
ccaaccauccaucaacaaa

SEQ ID NO: 1576582 - RNA, 19 nt, Homo sapiens
  misc_RNA (1)...(19): siRNA sense strand
ugaagccugugucauagau

SEQ ID NO: 1576583 - RNA, 19 nt, Homo sapiens
  misc_RNA (1)...(19): siRNA sense strand
gguugaaacuaagaaagug

SEQ ID NO: 1576584 - RNA, 19 nt, Homo sapiens
  misc_RNA (1)...(19): siRNA sense strand
ugaagacuaugguugaaac

SEQ ID NO: 1576585 - RNA, 19 nt, Homo sapiens
  misc_RNA (1)...(19): siRNA sense strand
acucugaacuugccuugau

SEQ ID NO: 1576586 - RNA, 19 nt, Homo sapiens
  misc_RNA (1)...(19): siRNA sense strand
ggaacuagaagaugugaac

SEQ ID NO: 1576587 - RNA, 19 nt, Homo sapiens
  misc_RNA (1)...(19): siRNA sense strand
ugaccucucuccaaagucu

SEQ ID NO: 1576588 - RNA, 19 nt, Homo sapiens
  misc_RNA (1)...(19): siRNA sense strand
gauggccuccaacaaguuu

SEQ ID NO: 1576589 - RNA, 19 nt, Homo sapiens
  misc_RNA (1)...(19): siRNA sense strand
uaacagaggaggccuacca

SEQ ID NO: 1576590 - RNA, 19 nt, Homo sapiens
  misc_RNA (1)...(19): siRNA sense strand
ugagauggccuccaacaag

SEQ ID NO: 1576591 - RNA, 19 nt, Homo sapiens
  misc_RNA (1)...(19): siRNA sense strand
gccuugauguacaaugauu

SEQ ID NO: 1576592 - RNA, 19 nt, Homo sapiens
  misc_RNA (1)...(19): siRNA sense strand
caggaacgggauuuauuaa

SEQ ID NO: 1576593 - RNA, 19 nt, Homo sapiens
  misc_RNA (1)...(19): siRNA sense strand
gagucggucuggaaaucaa

SEQ ID NO: 1576594 - RNA, 19 nt, Homo sapiens
  misc_RNA (1)...(19): siRNA sense strand
acccaucucucugaaauga

SEQ ID NO: 1576595 - RNA, 19 nt, Homo sapiens
  misc_RNA (1)...(19): siRNA sense strand
gcaaccaaccauccaucaa

SEQ ID NO: 1576596 - RNA, 19 nt, Homo sapiens
  misc_RNA (1)...(19): siRNA sense strand
caggugggcuucauagacu

SEQ ID NO: 1576597 - RNA, 19 nt, Homo sapiens
  misc_RNA (1)...(19): siRNA sense strand
ggcuaauucuccaagcaaa

SEQ ID NO: 1576598 - RNA, 19 nt, Homo sapiens
  misc_RNA (1)...(19): siRNA sense strand
acaaagccaccauaacaga

SEQ ID NO: 1576599 - RNA, 19 nt, Homo sapiens
  misc_RNA (1)...(19): siRNA sense strand
caagaucgagcaccuagca

SEQ ID NO: 1576600 - RNA, 19 nt, Homo sapiens
  misc_RNA (1)...(19): siRNA sense strand
ccaguggacggaccggaua

SEQ ID NO: 1576601 - RNA, 19 nt, Homo sapiens
  misc_RNA (1)...(19): siRNA sense strand
gaagauggugagucagaca

SEQ ID NO: 1576602 - RNA, 19 nt, Homo sapiens
  misc_RNA (1)...(19): siRNA sense strand
gaaagcagggccucugauu

SEQ ID NO: 1576603 - RNA, 19 nt, Homo sapiens
  misc_RNA (1)...(19): siRNA sense strand
ggagcugccuacuacauca

SEQ ID NO: 1576604 - RNA, 19 nt, Homo sapiens
  misc_RNA (1)...(19): siRNA sense strand
gaagaaggucaagaagaaa

SEQ ID NO: 1576605 - RNA, 19 nt, Homo sapiens
  misc_RNA (1)...(19): siRNA sense strand
ccaaccugcucaccuucua

SEQ ID NO: 1576606 - RNA, 19 nt, Homo sapiens
  misc_RNA (1)...(19): siRNA sense strand
caugcuagcuccaauucca

SEQ ID NO: 1576607 - RNA, 19 nt, Homo sapiens
  misc_RNA (1)...(19): siRNA sense strand
caagaaaacccuccaguca

SEQ ID NO: 1576608 - RNA, 19 nt, Homo sapiens
  misc_RNA (1)...(19): siRNA sense strand
gaauccacaccacagcauu

SEQ ID NO: 1576609 - RNA, 19 nt, Homo sapiens
  misc_RNA (1)...(19): siRNA sense strand
cagcauuccagccuugaaa

SEQ ID NO: 1576610 - RNA, 19 nt, Homo sapiens
  misc_RNA (1)...(19): siRNA sense strand
ggaaagcagggccucugau

SEQ ID NO: 1576611 - RNA, 19 nt, Homo sapiens
  misc_RNA (1)...(19): siRNA sense strand
agaaaacccuccagucauc

SEQ ID NO: 1576612 - RNA, 19 nt, Homo sapiens
  misc_RNA (1)...(19): siRNA sense strand
cguaacgcguguccuccaa

SEQ ID NO: 1576613 - RNA, 19 nt, Homo sapiens
  misc_RNA (1)...(19): siRNA sense strand
ccagcaugcuagcuccaau

SEQ ID NO: 1576614 - RNA, 19 nt, Homo sapiens
  misc_RNA (1)...(19): siRNA sense strand
cagcaugcuagcuccaauu

SEQ ID NO: 1576615 - RNA, 19 nt, Homo sapiens
  misc_RNA (1)...(19): siRNA sense strand
gcuccaauuccaccucuca

SEQ ID NO: 1576616 - RNA, 19 nt, Homo sapiens
  misc_RNA (1)...(19): siRNA sense strand
aaagcagggccucugauuc

SEQ ID NO: 1576617 - RNA, 19 nt, Homo sapiens
  misc_RNA (1)...(19): siRNA sense strand
uguaauggcuuucggauug

SEQ ID NO: 1576618 - RNA, 19 nt, Homo sapiens
  misc_RNA (1)...(19): siRNA sense strand
ggaccucuaugaagcuauu

SEQ ID NO: 1576619 - RNA, 19 nt, Homo sapiens
  misc_RNA (1)...(19): siRNA sense strand
auccagagcucuucauuaa

SEQ ID NO: 1576620 - RNA, 19 nt, Homo sapiens
  misc_RNA (1)...(19): siRNA sense strand
ccagagcucuucauuaaac

SEQ ID NO: 1576621 - RNA, 19 nt, Homo sapiens
  misc_RNA (1)...(19): siRNA sense strand
gcgcacaacaaccuuauuu

SEQ ID NO: 1576622 - RNA, 19 nt, Homo sapiens
  misc_RNA (1)...(19): siRNA sense strand
caccugagccuccaacauu

SEQ ID NO: 1576623 - RNA, 19 nt, Homo sapiens
  misc_RNA (1)...(19): siRNA sense strand
aaaccuaacaaaccuguaa

SEQ ID NO: 1576624 - RNA, 19 nt, Homo sapiens
  misc_RNA (1)...(19): siRNA sense strand
gcacaacaaccuuauuucg

SEQ ID NO: 1576625 - RNA, 19 nt, Homo sapiens
  misc_RNA (1)...(19): siRNA sense strand
acaaaccuguaauggcuuu

SEQ ID NO: 1576626 - RNA, 19 nt, Homo sapiens
  misc_RNA (1)...(19): siRNA sense strand
gaauccagagcucuucauu

SEQ ID NO: 1576627 - RNA, 19 nt, Homo sapiens
  misc_RNA (1)...(19): siRNA sense strand
ugguaacucuuucacuuug

SEQ ID NO: 1576628 - RNA, 19 nt, Homo sapiens
  misc_RNA (1)...(19): siRNA sense strand
uggcauauauugguuaucu

SEQ ID NO: 1576629 - RNA, 19 nt, Homo sapiens
  misc_RNA (1)...(19): siRNA sense strand
ucacuuugcguggcauaua

SEQ ID NO: 1576630 - RNA, 19 nt, Homo sapiens
  misc_RNA (1)...(19): siRNA sense strand
aauccagagcucuucauua

SEQ ID NO: 1576631 - RNA, 19 nt, Homo sapiens
  misc_RNA (1)...(19): siRNA sense strand
gcauauauugguuaucuac

SEQ ID NO: 1576632 - RNA, 19 nt, Homo sapiens
  misc_RNA (1)...(19): siRNA sense strand
ggcauauauugguuaucua

SEQ ID NO: 1576633 - RNA, 19 nt, Homo sapiens
  misc_RNA (1)...(19): siRNA sense strand
gagcucuucauuaaaccua

SEQ ID NO: 1576634 - RNA, 19 nt, Homo sapiens
  misc_RNA (1)...(19): siRNA sense strand
cuacaugcaauacaagaga

SEQ ID NO: 1576635 - RNA, 19 nt, Homo sapiens
  misc_RNA (1)...(19): siRNA sense strand
cauuaaaccuaacaaaccu

SEQ ID NO: 1576636 - RNA, 19 nt, Homo sapiens
  misc_RNA (1)...(19): siRNA sense strand
cacuuugcguggcauauau

SEQ ID NO: 1576637 - RNA, 19 nt, Homo sapiens
  misc_RNA (1)...(19): siRNA sense strand
auugguaacucuuucacuu

SEQ ID NO: 1576638 - RNA, 19 nt, Homo sapiens
  misc_RNA (1)...(19): siRNA sense strand
uacaugcaauacaagagaa

SEQ ID NO: 1576639 - RNA, 19 nt, Homo sapiens
  misc_RNA (1)...(19): siRNA sense strand
guaauggcuuucggauugg

SEQ ID NO: 1576640 - RNA, 19 nt, Homo sapiens
  misc_RNA (1)...(19): siRNA sense strand
gcaccugagccuccaacau

SEQ ID NO: 1576641 - RNA, 19 nt, Homo sapiens
  misc_RNA (1)...(19): siRNA sense strand
aaaaggaaccacccaaaga

SEQ ID NO: 1576642 - RNA, 19 nt, Homo sapiens
  misc_RNA (1)...(19): siRNA sense strand
ggugcgcacaacaaccuua

SEQ ID NO: 1576643 - RNA, 19 nt, Homo sapiens
  misc_RNA (1)...(19): siRNA sense strand
cguggcauauauugguuau

SEQ ID NO: 1576644 - RNA, 19 nt, Homo sapiens
  misc_RNA (1)...(19): siRNA sense strand
uugguuaucuacaugcaau

SEQ ID NO: 1576645 - RNA, 19 nt, Homo sapiens
  misc_RNA (1)...(19): siRNA sense strand
caugcaauacaagagaaua

SEQ ID NO: 1576646 - RNA, 19 nt, Homo sapiens
  misc_RNA (1)...(19): siRNA sense strand
gaggggcacaguuauauga

SEQ ID NO: 1576647 - RNA, 19 nt, Homo sapiens
  misc_RNA (1)...(19): siRNA sense strand
gaacagcugugagguuuaa

SEQ ID NO: 1576648 - RNA, 19 nt, Homo sapiens
  misc_RNA (1)...(19): siRNA sense strand
cagaacagcugugagguuu

SEQ ID NO: 1576649 - RNA, 19 nt, Homo sapiens
  misc_RNA (1)...(19): siRNA sense strand
gcauacgacuuaucuagga

SEQ ID NO: 1576650 - RNA, 19 nt, Homo sapiens
  misc_RNA (1)...(19): siRNA sense strand
uaccuaagccuguauuaua

SEQ ID NO: 1576651 - RNA, 19 nt, Homo sapiens
  misc_RNA (1)...(19): siRNA sense strand
gaacaugucaacagaggaa

SEQ ID NO: 1576652 - RNA, 19 nt, Homo sapiens
  misc_RNA (1)...(19): siRNA sense strand
acagagggccuggguguua

SEQ ID NO: 1576653 - RNA, 19 nt, Homo sapiens
  misc_RNA (1)...(19): siRNA sense strand
uggcuuggcauacgacuua

SEQ ID NO: 1576654 - RNA, 19 nt, Homo sapiens
  misc_RNA (1)...(19): siRNA sense strand
gaaaagaacccuaaaagcu

SEQ ID NO: 1576655 - RNA, 19 nt, Homo sapiens
  misc_RNA (1)...(19): siRNA sense strand
cgaauuugauugggaacaa

SEQ ID NO: 1576656 - RNA, 19 nt, Homo sapiens
  misc_RNA (1)...(19): siRNA sense strand
accuaagccuguauuauaa

SEQ ID NO: 1576657 - RNA, 19 nt, Homo sapiens
  misc_RNA (1)...(19): siRNA sense strand
ucuaggaucccaaccagua

SEQ ID NO: 1576658 - RNA, 19 nt, Homo sapiens
  misc_RNA (1)...(19): siRNA sense strand
gggcucagguuccaugucu

SEQ ID NO: 1576659 - RNA, 19 nt, Homo sapiens
  misc_RNA (1)...(19): siRNA sense strand
gauuuaagaacuacccaaa

SEQ ID NO: 1576660 - RNA, 19 nt, Homo sapiens
  misc_RNA (1)...(19): siRNA sense strand
gguuuaagccaauacagaa

SEQ ID NO: 1576661 - RNA, 19 nt, Homo sapiens
  misc_RNA (1)...(19): siRNA sense strand
agaagaagccaccgccaaa

SEQ ID NO: 1576662 - RNA, 19 nt, Homo sapiens
  misc_RNA (1)...(19): siRNA sense strand
gcggauaacuacccuuuug

SEQ ID NO: 1576663 - RNA, 19 nt, Homo sapiens
  misc_RNA (1)...(19): siRNA sense strand
gcauacaacccagagaaga

SEQ ID NO: 1576664 - RNA, 19 nt, Homo sapiens
  misc_RNA (1)...(19): siRNA sense strand
caaaggacacuuacuaucc

SEQ ID NO: 1576665 - RNA, 19 nt, Homo sapiens
  misc_RNA (1)...(19): siRNA sense strand
cagguuccaugucuacaga

SEQ ID NO: 1576666 - RNA, 19 nt, Homo sapiens
  misc_RNA (1)...(19): siRNA sense strand
cauacaacccagagaagaa

SEQ ID NO: 1576667 - RNA, 19 nt, Homo sapiens
  misc_RNA (1)...(19): siRNA sense strand
ccaaaggacacuuacuauc

SEQ ID NO: 1576668 - RNA, 19 nt, Homo sapiens
  misc_RNA (1)...(19): siRNA sense strand
uaacuacccuuuuggaaca

SEQ ID NO: 1576669 - RNA, 19 nt, Homo sapiens
  misc_RNA (1)...(19): siRNA sense strand
uuuaagaacuacccaaagg

SEQ ID NO: 1576670 - RNA, 19 nt, Homo sapiens
  misc_RNA (1)...(19): siRNA sense strand
gguuccaugucuacagaaa

SEQ ID NO: 1576671 - RNA, 19 nt, Homo sapiens
  misc_RNA (1)...(19): siRNA sense strand
gaauuugauugggaacaag

SEQ ID NO: 1576672 - RNA, 19 nt, Homo sapiens
  misc_RNA (1)...(19): siRNA sense strand
ccagaacagcugugagguu

SEQ ID NO: 1576673 - RNA, 19 nt, Homo sapiens
  misc_RNA (1)...(19): siRNA sense strand
caaccaguauaaaaggaua

SEQ ID NO: 1576674 - RNA, 19 nt, Homo sapiens
  misc_RNA (1)...(19): siRNA sense strand
cagagggccuggguguuau

SEQ ID NO: 1576675 - RNA, 19 nt, Homo sapiens
  misc_RNA (1)...(19): siRNA sense strand
gugcauacaacccagagaa

SEQ ID NO: 1576676 - RNA, 19 nt, Homo sapiens
  misc_RNA (1)...(19): siRNA sense strand
ugucaacagaggaaacuuu

SEQ ID NO: 1576677 - RNA, 19 nt, Homo sapiens
  misc_RNA (1)...(19): siRNA sense strand
uuuggaacaugucaacaga

SEQ ID NO: 1576678 - RNA, 19 nt, Homo sapiens
  misc_RNA (1)...(19): siRNA sense strand
gaaccguguggccuaccua

SEQ ID NO: 1576679 - RNA, 19 nt, Homo sapiens
  misc_RNA (1)...(19): siRNA sense strand
acccaaaggacacuuacua

SEQ ID NO: 1576680 - RNA, 19 nt, Homo sapiens
  misc_RNA (1)...(19): siRNA sense strand
uaggaucccaaccaguaua

SEQ ID NO: 1576681 - RNA, 19 nt, Homo sapiens
  misc_RNA (1)...(19): siRNA sense strand
gugccucgauuuaagaacu

SEQ ID NO: 1576682 - RNA, 19 nt, Homo sapiens
  misc_RNA (1)...(19): siRNA sense strand
uuaagccaauacagaagga

SEQ ID NO: 1576683 - RNA, 19 nt, Homo sapiens
  misc_RNA (1)...(19): siRNA sense strand
cagacgcugcggauaacua

SEQ ID NO: 1576684 - RNA, 19 nt, Homo sapiens
  misc_RNA (1)...(19): siRNA sense strand
ccaauacagaaggaaauga

SEQ ID NO: 1576685 - RNA, 19 nt, Homo sapiens
  misc_RNA (1)...(19): siRNA sense strand
cauacgacuuaucuaggau

SEQ ID NO: 1576686 - RNA, 19 nt, Homo sapiens
  misc_RNA (1)...(19): siRNA sense strand
gaucccaaccaguauaaaa

SEQ ID NO: 1576687 - RNA, 19 nt, Homo sapiens
  misc_RNA (1)...(19): siRNA sense strand
gaagaagccaccgccaaaa

SEQ ID NO: 1576688 - RNA, 19 nt, Homo sapiens
  misc_RNA (1)...(19): siRNA sense strand
cccaaaggacacuuacuau

SEQ ID NO: 1576689 - RNA, 19 nt, Homo sapiens
  misc_RNA (1)...(19): siRNA sense strand
ggagccagaacagcuguga

SEQ ID NO: 1576690 - RNA, 19 nt, Homo sapiens
  misc_RNA (1)...(19): siRNA sense strand
uggcauacgacuuaucuag

SEQ ID NO: 1576691 - RNA, 19 nt, Homo sapiens
  misc_RNA (1)...(19): siRNA sense strand
agacugggcucagguucca

SEQ ID NO: 1576692 - RNA, 19 nt, Homo sapiens
  misc_RNA (1)...(19): siRNA sense strand
ugugagguuuaagccaaua

SEQ ID NO: 1576693 - RNA, 19 nt, Homo sapiens
  misc_RNA (1)...(19): siRNA sense strand
gcucagguuccaugucuac

SEQ ID NO: 1576694 - RNA, 19 nt, Homo sapiens
  misc_RNA (1)...(19): siRNA sense strand
cuaccuaagccuguauuau

SEQ ID NO: 1576695 - RNA, 19 nt, Homo sapiens
  misc_RNA (1)...(19): siRNA sense strand
gaaaggagccaaagaauuu

SEQ ID NO: 1576696 - RNA, 19 nt, Homo sapiens
  misc_RNA (1)...(19): siRNA sense strand
gaacuaagccgcaaagaaa

SEQ ID NO: 1576697 - RNA, 19 nt, Homo sapiens
  misc_RNA (1)...(19): siRNA sense strand
aaggaaggcuuuaugaaua

SEQ ID NO: 1576698 - RNA, 19 nt, Homo sapiens
  misc_RNA (1)...(19): siRNA sense strand
ugaaggaaguggcaucaua

SEQ ID NO: 1576699 - RNA, 19 nt, Homo sapiens
  misc_RNA (1)...(19): siRNA sense strand
caagauguguuacuuauuc

SEQ ID NO: 1576700 - RNA, 19 nt, Homo sapiens
  misc_RNA (1)...(19): siRNA sense strand
gaacaaaggcgguuaaacu

SEQ ID NO: 1576701 - RNA, 19 nt, Homo sapiens
  misc_RNA (1)...(19): siRNA sense strand
ugaaacagcugcagcgauu

SEQ ID NO: 1576702 - RNA, 19 nt, Homo sapiens
  misc_RNA (1)...(19): siRNA sense strand
caaaggcgguuaaacuuga

SEQ ID NO: 1576703 - RNA, 19 nt, Homo sapiens
  misc_RNA (1)...(19): siRNA sense strand
uaugaaagcuggagauguu

SEQ ID NO: 1576704 - RNA, 19 nt, Homo sapiens
  misc_RNA (1)...(19): siRNA sense strand
caaacagaaugccuuauug

SEQ ID NO: 1576705 - RNA, 19 nt, Homo sapiens
  misc_RNA (1)...(19): siRNA sense strand
gaaguuauagcacuggaua

SEQ ID NO: 1576706 - RNA, 19 nt, Homo sapiens
  misc_RNA (1)...(19): siRNA sense strand
cagagugaauacacauuua

SEQ ID NO: 1576707 - RNA, 19 nt, Homo sapiens
  misc_RNA (1)...(19): siRNA sense strand
ggacccagaaagaauauua

SEQ ID NO: 1576708 - RNA, 19 nt, Homo sapiens
  misc_RNA (1)...(19): siRNA sense strand
gcagaaaggaaguuugaaa

SEQ ID NO: 1576709 - RNA, 19 nt, Homo sapiens
  misc_RNA (1)...(19): siRNA sense strand
acagaaugccuuauuguua

SEQ ID NO: 1576710 - RNA, 19 nt, Homo sapiens
  misc_RNA (1)...(19): siRNA sense strand
uggauuaccugaacugaaa

SEQ ID NO: 1576711 - RNA, 19 nt, Homo sapiens
  misc_RNA (1)...(19): siRNA sense strand
uaagaaaggagccaaagaa

SEQ ID NO: 1576712 - RNA, 19 nt, Homo sapiens
  misc_RNA (1)...(19): siRNA sense strand
aauaaggacucuauagguu

SEQ ID NO: 1576713 - RNA, 19 nt, Homo sapiens
  misc_RNA (1)...(19): siRNA sense strand
cagaaugccuuauuguuag

SEQ ID NO: 1576714 - RNA, 19 nt, Homo sapiens
  misc_RNA (1)...(19): siRNA sense strand
gaaggaaguggcaucauau

SEQ ID NO: 1576715 - RNA, 19 nt, Homo sapiens
  misc_RNA (1)...(19): siRNA sense strand
gcucucaugugaacaguug

SEQ ID NO: 1576716 - RNA, 19 nt, Homo sapiens
  misc_RNA (1)...(19): siRNA sense strand
cagagggugugcugguuua

SEQ ID NO: 1576717 - RNA, 19 nt, Homo sapiens
  misc_RNA (1)...(19): siRNA sense strand
ucacauccuccaucauuua

SEQ ID NO: 1576718 - RNA, 19 nt, Homo sapiens
  misc_RNA (1)...(19): siRNA sense strand
gaccaaacauggccuguac

SEQ ID NO: 1576719 - RNA, 19 nt, Homo sapiens
  misc_RNA (1)...(19): siRNA sense strand
ggcaucauaucagccauua

SEQ ID NO: 1576720 - RNA, 19 nt, Homo sapiens
  misc_RNA (1)...(19): siRNA sense strand
cagaagagaagacauguug

SEQ ID NO: 1576721 - RNA, 19 nt, Homo sapiens
  misc_RNA (1)...(19): siRNA sense strand
uaaggaaggcuuuaugaau

SEQ ID NO: 1576722 - RNA, 19 nt, Homo sapiens
  misc_RNA (1)...(19): siRNA sense strand
agaagcaguuuaauggauu

SEQ ID NO: 1576723 - RNA, 19 nt, Homo sapiens
  misc_RNA (1)...(19): siRNA sense strand
gaugcacccuguaguggaa

SEQ ID NO: 1576724 - RNA, 19 nt, Homo sapiens
  misc_RNA (1)...(19): siRNA sense strand
ucaaacagaaugccuuauu

SEQ ID NO: 1576725 - RNA, 19 nt, Homo sapiens
  misc_RNA (1)...(19): siRNA sense strand
cagaagcaguuuaauggau

SEQ ID NO: 1576726 - RNA, 19 nt, Homo sapiens
  misc_RNA (1)...(19): siRNA sense strand
ugacauggacucucuuaga

SEQ ID NO: 1576727 - RNA, 19 nt, Homo sapiens
  misc_RNA (1)...(19): siRNA sense strand
gaaaggcaugggcauaaga

SEQ ID NO: 1576728 - RNA, 19 nt, Homo sapiens
  misc_RNA (1)...(19): siRNA sense strand
uggauuaaguguuccuauu

SEQ ID NO: 1576729 - RNA, 19 nt, Homo sapiens
  misc_RNA (1)...(19): siRNA sense strand
uaucucagcccuucauuug

SEQ ID NO: 1576730 - RNA, 19 nt, Homo sapiens
  misc_RNA (1)...(19): siRNA sense strand
ugacagaaccaguauaucu

SEQ ID NO: 1576731 - RNA, 19 nt, Homo sapiens
  misc_RNA (1)...(19): siRNA sense strand
ggcaugggcauaagaauga

SEQ ID NO: 1576732 - RNA, 19 nt, Homo sapiens
  misc_RNA (1)...(19): siRNA sense strand
gaaagcuggagauguuauu

SEQ ID NO: 1576733 - RNA, 19 nt, Homo sapiens
  misc_RNA (1)...(19): siRNA sense strand
ggauuaaguguuccuauuc

SEQ ID NO: 1576734 - RNA, 19 nt, Homo sapiens
  misc_RNA (1)...(19): siRNA sense strand
gauuaaguguuccuauucu

SEQ ID NO: 1576735 - RNA, 19 nt, Homo sapiens
  misc_RNA (1)...(19): siRNA sense strand
gauugugacugcuuuaggu

SEQ ID NO: 1576736 - RNA, 19 nt, Homo sapiens
  misc_RNA (1)...(19): siRNA sense strand
aagaggagcccaugucuau

SEQ ID NO: 1576737 - RNA, 19 nt, Homo sapiens
  misc_RNA (1)...(19): siRNA sense strand
ggagauguuauuucuguau

SEQ ID NO: 1576738 - RNA, 19 nt, Homo sapiens
  misc_RNA (1)...(19): siRNA sense strand
agaaaggagccaaagaauu

SEQ ID NO: 1576739 - RNA, 19 nt, Homo sapiens
  misc_RNA (1)...(19): siRNA sense strand
caucauaucagccauuaca

SEQ ID NO: 1576740 - RNA, 19 nt, Homo sapiens
  misc_RNA (1)...(19): siRNA sense strand
ggaggacacagaaggagaa

SEQ ID NO: 1576741 - RNA, 19 nt, Homo sapiens
  misc_RNA (1)...(19): siRNA sense strand
gugucagcaucacaauuua

SEQ ID NO: 1576742 - RNA, 19 nt, Homo sapiens
  misc_RNA (1)...(19): siRNA sense strand
gcuaauaaggacucuauag

SEQ ID NO: 1576743 - RNA, 19 nt, Homo sapiens
  misc_RNA (1)...(19): siRNA sense strand
guaagaaaggagccaaaga

SEQ ID NO: 1576744 - RNA, 19 nt, Homo sapiens
  misc_RNA (1)...(19): siRNA sense strand
acauuuagccucaguacaa

SEQ ID NO: 1576745 - RNA, 19 nt, Homo sapiens
  misc_RNA (1)...(19): siRNA sense strand
ggagauugugacugcuuua

SEQ ID NO: 1576746 - RNA, 19 nt, Homo sapiens
  misc_RNA (1)...(19): siRNA sense strand
guacuuggucugugaagga

SEQ ID NO: 1576747 - RNA, 19 nt, Homo sapiens
  misc_RNA (1)...(19): siRNA sense strand
ggaaugggacagagaccaa

SEQ ID NO: 1576748 - RNA, 19 nt, Homo sapiens
  misc_RNA (1)...(19): siRNA sense strand
gcaucacaauuuaugaaag

SEQ ID NO: 1576749 - RNA, 19 nt, Homo sapiens
  misc_RNA (1)...(19): siRNA sense strand
guuauuggacccagaaaga

SEQ ID NO: 1576750 - RNA, 19 nt, Homo sapiens
  misc_RNA (1)...(19): siRNA sense strand
cauccuccaucauuuacaa

SEQ ID NO: 1576751 - RNA, 19 nt, Homo sapiens
  misc_RNA (1)...(19): siRNA sense strand
aagaaugacagaaccagua

SEQ ID NO: 1576752 - RNA, 19 nt, Homo sapiens
  misc_RNA (1)...(19): siRNA sense strand
acacugacauggacucucu

SEQ ID NO: 1576753 - RNA, 19 nt, Homo sapiens
  misc_RNA (1)...(19): siRNA sense strand
guuuauagcacgugcacua

SEQ ID NO: 1576754 - RNA, 19 nt, Homo sapiens
  misc_RNA (1)...(19): siRNA sense strand
aaucaaacagaaugccuua

SEQ ID NO: 1576755 - RNA, 19 nt, Homo sapiens
  misc_RNA (1)...(19): siRNA sense strand
ucagagugaauacacauuu

SEQ ID NO: 1576756 - RNA, 19 nt, Homo sapiens
  misc_RNA (1)...(19): siRNA sense strand
aaauuugccaucugccuua

SEQ ID NO: 1576757 - RNA, 19 nt, Homo sapiens
  misc_RNA (1)...(19): siRNA sense strand
ugaacuaagccgcaaagaa

SEQ ID NO: 1576758 - RNA, 19 nt, Homo sapiens
  misc_RNA (1)...(19): siRNA sense strand
cuggagauguuauuucugu

SEQ ID NO: 1576759 - RNA, 19 nt, Homo sapiens
  misc_RNA (1)...(19): siRNA sense strand
ugucacauccuccaucauu

SEQ ID NO: 1576760 - RNA, 19 nt, Homo sapiens
  misc_RNA (1)...(19): siRNA sense strand
gaaugacagaaccaguaua

SEQ ID NO: 1576761 - RNA, 19 nt, Homo sapiens
  misc_RNA (1)...(19): siRNA sense strand
ggaaguggcaucauaucag

SEQ ID NO: 1576762 - RNA, 19 nt, Homo sapiens
  misc_RNA (1)...(19): siRNA sense strand
aaacagaaugccuuauugu

SEQ ID NO: 1576763 - RNA, 19 nt, Homo sapiens
  misc_RNA (1)...(19): siRNA sense strand
uccaucggcugugccauua

SEQ ID NO: 1576764 - RNA, 19 nt, Homo sapiens
  misc_RNA (1)...(19): siRNA sense strand
gcagauuggaggagaagga

SEQ ID NO: 1576765 - RNA, 19 nt, Homo sapiens
  misc_RNA (1)...(19): siRNA sense strand
cagaauccuuugaccgaau

SEQ ID NO: 1576766 - RNA, 19 nt, Homo sapiens
  misc_RNA (1)...(19): siRNA sense strand
ugaauuccaucagggcauu

SEQ ID NO: 1576767 - RNA, 19 nt, Homo sapiens
  misc_RNA (1)...(19): siRNA sense strand
aagcagaaaggaaguuuga

SEQ ID NO: 1576768 - RNA, 19 nt, Homo sapiens
  misc_RNA (1)...(19): siRNA sense strand
uguugcgucuggcuaauaa

SEQ ID NO: 1576769 - RNA, 19 nt, Homo sapiens
  misc_RNA (1)...(19): siRNA sense strand
gucacauccuccaucauuu

SEQ ID NO: 1576770 - RNA, 19 nt, Homo sapiens
  misc_RNA (1)...(19): siRNA sense strand
caucacaauuuaugaaagc

SEQ ID NO: 1576771 - RNA, 19 nt, Homo sapiens
  misc_RNA (1)...(19): siRNA sense strand
acaacagugugaagccauu

SEQ ID NO: 1576772 - RNA, 19 nt, Homo sapiens
  misc_RNA (1)...(19): siRNA sense strand
uaauaaggacucuauaggu

SEQ ID NO: 1576773 - RNA, 19 nt, Homo sapiens
  misc_RNA (1)...(19): siRNA sense strand
aaacagcugcagcgauuug

SEQ ID NO: 1576774 - RNA, 19 nt, Homo sapiens
  misc_RNA (1)...(19): siRNA sense strand
gagggugugcugguuuaua

SEQ ID NO: 1576775 - RNA, 19 nt, Homo sapiens
  misc_RNA (1)...(19): siRNA sense strand
ccaaacauggccuguacuu

SEQ ID NO: 1576776 - RNA, 19 nt, Homo sapiens
  misc_RNA (1)...(19): siRNA sense strand
agaauccuuugaccgaauu

SEQ ID NO: 1576777 - RNA, 19 nt, Homo sapiens
  misc_RNA (1)...(19): siRNA sense strand
gaagcagaaaggaaguuug

SEQ ID NO: 1576778 - RNA, 19 nt, Homo sapiens
  misc_RNA (1)...(19): siRNA sense strand
cagcaucacaauuuaugaa

SEQ ID NO: 1576779 - RNA, 19 nt, Homo sapiens
  misc_RNA (1)...(19): siRNA sense strand
gacccagaaagaauauuaa

SEQ ID NO: 1576780 - RNA, 19 nt, Homo sapiens
  misc_RNA (1)...(19): siRNA sense strand
uaaggacucuauagguuuu

SEQ ID NO: 1576781 - RNA, 19 nt, Homo sapiens
  misc_RNA (1)...(19): siRNA sense strand
caugugaacaguugaaaca

SEQ ID NO: 1576782 - RNA, 19 nt, Homo sapiens
  misc_RNA (1)...(19): siRNA sense strand
aaugggauuucugaacuaa

SEQ ID NO: 1576783 - RNA, 19 nt, Homo sapiens
  misc_RNA (1)...(19): siRNA sense strand
uaagaggagcccaugucua

SEQ ID NO: 1576784 - RNA, 19 nt, Homo sapiens
  misc_RNA (1)...(19): siRNA sense strand
cagcacuaaugcaugauca

SEQ ID NO: 1576785 - RNA, 19 nt, Homo sapiens
  misc_RNA (1)...(19): siRNA sense strand
uaaacaagaagcagaaagg

SEQ ID NO: 1576786 - RNA, 19 nt, Homo sapiens
  misc_RNA (1)...(19): siRNA sense strand
gauuggaggagaaggaaug

SEQ ID NO: 1576787 - RNA, 19 nt, Homo sapiens
  misc_RNA (1)...(19): siRNA sense strand
uuaaagcaccugucacauc

SEQ ID NO: 1576788 - RNA, 19 nt, Homo sapiens
  misc_RNA (1)...(19): siRNA sense strand
acaaaggcgguuaaacuug

SEQ ID NO: 1576789 - RNA, 19 nt, Homo sapiens
  misc_RNA (1)...(19): siRNA sense strand
uuugccaucugccuuagua

SEQ ID NO: 1576790 - RNA, 19 nt, Homo sapiens
  misc_RNA (1)...(19): siRNA sense strand
gcugggcucucaugugaac

SEQ ID NO: 1576791 - RNA, 19 nt, Homo sapiens
  misc_RNA (1)...(19): siRNA sense strand
gcacgugcacuauaacacu

SEQ ID NO: 1576792 - RNA, 19 nt, Homo sapiens
  misc_RNA (1)...(19): siRNA sense strand
ugaccgaauucuucuggau

SEQ ID NO: 1576793 - RNA, 19 nt, Homo sapiens
  misc_RNA (1)...(19): siRNA sense strand
gaucagggagaaguuauag

SEQ ID NO: 1576794 - RNA, 19 nt, Homo sapiens
  misc_RNA (1)...(19): siRNA sense strand
gaagauucuagacuugugu

SEQ ID NO: 1576795 - RNA, 19 nt, Homo sapiens
  misc_RNA (1)...(19): siRNA sense strand
gguaagaaguuuccuguua

SEQ ID NO: 1576796 - RNA, 19 nt, Homo sapiens
  misc_RNA (1)...(19): siRNA sense strand
uaaggaaggugaaauauga

SEQ ID NO: 1576797 - RNA, 19 nt, Homo sapiens
  misc_RNA (1)...(19): siRNA sense strand
ccaaagaugucuacaaaga

SEQ ID NO: 1576798 - RNA, 19 nt, Homo sapiens
  misc_RNA (1)...(19): siRNA sense strand
caaauuggauugagacuau

SEQ ID NO: 1576799 - RNA, 19 nt, Homo sapiens
  misc_RNA (1)...(19): siRNA sense strand
uaacuuagauggucuggaa

SEQ ID NO: 1576800 - RNA, 19 nt, Homo sapiens
  misc_RNA (1)...(19): siRNA sense strand
caaagaacauuuccaagau

SEQ ID NO: 1576801 - RNA, 19 nt, Homo sapiens
  misc_RNA (1)...(19): siRNA sense strand
ccaagagacugcuggcaua

SEQ ID NO: 1576802 - RNA, 19 nt, Homo sapiens
  misc_RNA (1)...(19): siRNA sense strand
ggauggaacuacauucuug

SEQ ID NO: 1576803 - RNA, 19 nt, Homo sapiens
  misc_RNA (1)...(19): siRNA sense strand
caaaggaacagauacagua

SEQ ID NO: 1576804 - RNA, 19 nt, Homo sapiens
  misc_RNA (1)...(19): siRNA sense strand
guuacuggcuuacaaauug

SEQ ID NO: 1576805 - RNA, 19 nt, Homo sapiens
  misc_RNA (1)...(19): siRNA sense strand
gcagaacacaguaccauaa

SEQ ID NO: 1576806 - RNA, 19 nt, Homo sapiens
  misc_RNA (1)...(19): siRNA sense strand
caagguuacucacuauaaa

SEQ ID NO: 1576807 - RNA, 19 nt, Homo sapiens
  misc_RNA (1)...(19): siRNA sense strand
caagcaaaguuuauuccua

SEQ ID NO: 1576808 - RNA, 19 nt, Homo sapiens
  misc_RNA (1)...(19): siRNA sense strand
acaaguugcugccaccuua

SEQ ID NO: 1576809 - RNA, 19 nt, Homo sapiens
  misc_RNA (1)...(19): siRNA sense strand
gugaagaucuaagacauuu

SEQ ID NO: 1576810 - RNA, 19 nt, Homo sapiens
  misc_RNA (1)...(19): siRNA sense strand
gaaauaugaggaaacagua

SEQ ID NO: 1576811 - RNA, 19 nt, Homo sapiens
  misc_RNA (1)...(19): siRNA sense strand
gaaacccucuugacacugu

SEQ ID NO: 1576812 - RNA, 19 nt, Homo sapiens
  misc_RNA (1)...(19): siRNA sense strand
guaaaguaguaaccaaaga

SEQ ID NO: 1576813 - RNA, 19 nt, Homo sapiens
  misc_RNA (1)...(19): siRNA sense strand
gggauggaguagauauuaa

SEQ ID NO: 1576814 - RNA, 19 nt, Homo sapiens
  misc_RNA (1)...(19): siRNA sense strand
gcaggacuugcucuaauua

SEQ ID NO: 1576815 - RNA, 19 nt, Homo sapiens
  misc_RNA (1)...(19): siRNA sense strand
gaacauauuguaacacagu

SEQ ID NO: 1576816 - RNA, 19 nt, Homo sapiens
  misc_RNA (1)...(19): siRNA sense strand
cgauagcuaugacauuuau

SEQ ID NO: 1576817 - RNA, 19 nt, Homo sapiens
  misc_RNA (1)...(19): siRNA sense strand
uagauggucuggaauacaa

SEQ ID NO: 1576818 - RNA, 19 nt, Homo sapiens
  misc_RNA (1)...(19): siRNA sense strand
agccaaagaugucuacaaa

SEQ ID NO: 1576819 - RNA, 19 nt, Homo sapiens
  misc_RNA (1)...(19): siRNA sense strand
acacaggcaccacuaauaa

SEQ ID NO: 1576820 - RNA, 19 nt, Homo sapiens
  misc_RNA (1)...(19): siRNA sense strand
ucacuugguuaacuucaaa

SEQ ID NO: 1576821 - RNA, 19 nt, Homo sapiens
  misc_RNA (1)...(19): siRNA sense strand
caacacaagcaaaguuuau

SEQ ID NO: 1576822 - RNA, 19 nt, Homo sapiens
  misc_RNA (1)...(19): siRNA sense strand
ccuacaagguuacucacua

SEQ ID NO: 1576823 - RNA, 19 nt, Homo sapiens
  misc_RNA (1)...(19): siRNA sense strand
gaaaagggauggaacuaca

SEQ ID NO: 1576824 - RNA, 19 nt, Homo sapiens
  misc_RNA (1)...(19): siRNA sense strand
acaaagaacauuuccaaga

SEQ ID NO: 1576825 - RNA, 19 nt, Homo sapiens
  misc_RNA (1)...(19): siRNA sense strand
ggugaaauaugaggaaaca

SEQ ID NO: 1576826 - RNA, 19 nt, Homo sapiens
  misc_RNA (1)...(19): siRNA sense strand
ggguugcaguacauucuua

SEQ ID NO: 1576827 - RNA, 19 nt, Homo sapiens
  misc_RNA (1)...(19): siRNA sense strand
gauugagacuauucuuguu

SEQ ID NO: 1576828 - RNA, 19 nt, Homo sapiens
  misc_RNA (1)...(19): siRNA sense strand
cuacaagguuacucacuau

SEQ ID NO: 1576829 - RNA, 19 nt, Homo sapiens
  misc_RNA (1)...(19): siRNA sense strand
gacagaaaacuccaaauua

SEQ ID NO: 1576830 - RNA, 19 nt, Homo sapiens
  misc_RNA (1)...(19): siRNA sense strand
aaagaacauuuccaagaug

SEQ ID NO: 1576831 - RNA, 19 nt, Homo sapiens
  misc_RNA (1)...(19): siRNA sense strand
gaaggugaaauaugaggaa

SEQ ID NO: 1576832 - RNA, 19 nt, Homo sapiens
  misc_RNA (1)...(19): siRNA sense strand
caaagaugucuacaaagaa

SEQ ID NO: 1576833 - RNA, 19 nt, Homo sapiens
  misc_RNA (1)...(19): siRNA sense strand
ggauugagacuauucuugu

SEQ ID NO: 1576834 - RNA, 19 nt, Homo sapiens
  misc_RNA (1)...(19): siRNA sense strand
gaacauuuccaagaugaug

SEQ ID NO: 1576835 - RNA, 19 nt, Homo sapiens
  misc_RNA (1)...(19): siRNA sense strand
aagaacauuuccaagauga

SEQ ID NO: 1576836 - RNA, 19 nt, Homo sapiens
  misc_RNA (1)...(19): siRNA sense strand
caccuuaucuuagaguuau

SEQ ID NO: 1576837 - RNA, 19 nt, Homo sapiens
  misc_RNA (1)...(19): siRNA sense strand
cuacaaagaacauuuccaa

SEQ ID NO: 1576838 - RNA, 19 nt, Homo sapiens
  misc_RNA (1)...(19): siRNA sense strand
gcugccaccuuaucuuaga

SEQ ID NO: 1576839 - RNA, 19 nt, Homo sapiens
  misc_RNA (1)...(19): siRNA sense strand
gaguguuacuggcuuacaa

SEQ ID NO: 1576840 - RNA, 19 nt, Homo sapiens
  misc_RNA (1)...(19): siRNA sense strand
gaacucaaaggguuacaag

SEQ ID NO: 1576841 - RNA, 19 nt, Homo sapiens
  misc_RNA (1)...(19): siRNA sense strand
gcgauagcuaugacauuua

SEQ ID NO: 1576842 - RNA, 19 nt, Homo sapiens
  misc_RNA (1)...(19): siRNA sense strand
gaacacaguaccauaacag

SEQ ID NO: 1576843 - RNA, 19 nt, Homo sapiens
  misc_RNA (1)...(19): siRNA sense strand
aaagaugucuacaaagaac

SEQ ID NO: 1576844 - RNA, 19 nt, Homo sapiens
  misc_RNA (1)...(19): siRNA sense strand
cucaaaggguuacaaguug

SEQ ID NO: 1576845 - RNA, 19 nt, Homo sapiens
  misc_RNA (1)...(19): siRNA sense strand
gggcaucuuccaauagaaa

SEQ ID NO: 1576846 - RNA, 19 nt, Homo sapiens
  misc_RNA (1)...(19): siRNA sense strand
uugguuaacuucaaaggaa

SEQ ID NO: 1576847 - RNA, 19 nt, Homo sapiens
  misc_RNA (1)...(19): siRNA sense strand
caaucacaguggccacaaa

SEQ ID NO: 1576848 - RNA, 19 nt, Homo sapiens
  misc_RNA (1)...(19): siRNA sense strand
guucaguccugguauccaa

SEQ ID NO: 1576849 - RNA, 19 nt, Homo sapiens
  misc_RNA (1)...(19): siRNA sense strand
gaggaaauguucucuucac

SEQ ID NO: 1576850 - RNA, 19 nt, Homo sapiens
  misc_RNA (1)...(19): siRNA sense strand
ccaacacaagcaaaguuua

SEQ ID NO: 1576851 - RNA, 19 nt, Homo sapiens
  misc_RNA (1)...(19): siRNA sense strand
gaaaauauggggugaagau

SEQ ID NO: 1576852 - RNA, 19 nt, Homo sapiens
  misc_RNA (1)...(19): siRNA sense strand
guuccaggcuauucuguuc

SEQ ID NO: 1576853 - RNA, 19 nt, Homo sapiens
  misc_RNA (1)...(19): siRNA sense strand
ggaauacaaguuacaugau

SEQ ID NO: 1576854 - RNA, 19 nt, Homo sapiens
  misc_RNA (1)...(19): siRNA sense strand
ccugagggcuuugucauuc

SEQ ID NO: 1576855 - RNA, 19 nt, Homo sapiens
  misc_RNA (1)...(19): siRNA sense strand
acaagguuacucacuauaa

SEQ ID NO: 1576856 - RNA, 19 nt, Homo sapiens
  misc_RNA (1)...(19): siRNA sense strand
ucacaguggccacaaauuc

SEQ ID NO: 1576857 - RNA, 19 nt, Homo sapiens
  misc_RNA (1)...(19): siRNA sense strand
caucagugccuguaucugu

SEQ ID NO: 1576858 - RNA, 19 nt, Homo sapiens
  misc_RNA (1)...(19): siRNA sense strand
gggugaagaucuaagacau

SEQ ID NO: 1576859 - RNA, 19 nt, Homo sapiens
  misc_RNA (1)...(19): siRNA sense strand
agcgauagcuaugacauuu

SEQ ID NO: 1576860 - RNA, 19 nt, Homo sapiens
  misc_RNA (1)...(19): siRNA sense strand
caaauuaaggaaggugaaa

SEQ ID NO: 1576861 - RNA, 19 nt, Homo sapiens
  misc_RNA (1)...(19): siRNA sense strand
ggauggaguagauauuaau

SEQ ID NO: 1576862 - RNA, 19 nt, Homo sapiens
  misc_RNA (1)...(19): siRNA sense strand
caucugcucacuugguuaa

SEQ ID NO: 1576863 - RNA, 19 nt, Homo sapiens
  misc_RNA (1)...(19): siRNA sense strand
agagacugcuggcauagga

SEQ ID NO: 1576864 - RNA, 19 nt, Homo sapiens
  misc_RNA (1)...(19): siRNA sense strand
ugaaauaugaggaaacagu

SEQ ID NO: 1576865 - RNA, 19 nt, Homo sapiens
  misc_RNA (1)...(19): siRNA sense strand
aggacuugcucuaauuaaa

SEQ ID NO: 1576866 - RNA, 19 nt, Homo sapiens
  misc_RNA (1)...(19): siRNA sense strand
uggaauacaaguuacauga

SEQ ID NO: 1576867 - RNA, 19 nt, Homo sapiens
  misc_RNA (1)...(19): siRNA sense strand
ggugaagaucuaagacauu

SEQ ID NO: 1576868 - RNA, 19 nt, Homo sapiens
  misc_RNA (1)...(19): siRNA sense strand
acucaaaggguuacaaguu

SEQ ID NO: 1576869 - RNA, 19 nt, Homo sapiens
  misc_RNA (1)...(19): siRNA sense strand
agaaguuuccuguuacuga

SEQ ID NO: 1576870 - RNA, 19 nt, Homo sapiens
  misc_RNA (1)...(19): siRNA sense strand
uaagaaguuuccuguuacu

SEQ ID NO: 1576871 - RNA, 19 nt, Homo sapiens
  misc_RNA (1)...(19): siRNA sense strand
uacacaggcaccacuaaua

SEQ ID NO: 1576872 - RNA, 19 nt, Homo sapiens
  misc_RNA (1)...(19): siRNA sense strand
guacacaggcaccacuaau

SEQ ID NO: 1576873 - RNA, 19 nt, Homo sapiens
  misc_RNA (1)...(19): siRNA sense strand
gcaucuuccaauagaaaua

SEQ ID NO: 1576874 - RNA, 19 nt, Homo sapiens
  misc_RNA (1)...(19): siRNA sense strand
ccaccuuaucuuagaguua

SEQ ID NO: 1576875 - RNA, 19 nt, Homo sapiens
  misc_RNA (1)...(19): siRNA sense strand
ggacuugcucuaauuaaaa

SEQ ID NO: 1576876 - RNA, 19 nt, Homo sapiens
  misc_RNA (1)...(19): siRNA sense strand
gaaaauccaggaagccaaa

SEQ ID NO: 1576877 - RNA, 19 nt, Homo sapiens
  misc_RNA (1)...(19): siRNA sense strand
gcagaagccgaguucaaca

SEQ ID NO: 1576878 - RNA, 19 nt, Homo sapiens
  misc_RNA (1)...(19): siRNA sense strand
uaacacaguuuucaucagu

SEQ ID NO: 1576879 - RNA, 19 nt, Homo sapiens
  misc_RNA (1)...(19): siRNA sense strand
aguaguaaccaaagagaaa

SEQ ID NO: 1576880 - RNA, 19 nt, Homo sapiens
  misc_RNA (1)...(19): siRNA sense strand
aaacuucugguaacuuaga

SEQ ID NO: 1576881 - RNA, 19 nt, Homo sapiens
  misc_RNA (1)...(19): siRNA sense strand
gauggaacuacauucuuga

SEQ ID NO: 1576882 - RNA, 19 nt, Homo sapiens
  misc_RNA (1)...(19): siRNA sense strand
ccaggaagccaaagauguc

SEQ ID NO: 1576883 - RNA, 19 nt, Homo sapiens
  misc_RNA (1)...(19): siRNA sense strand
caauauccacccaacacaa

SEQ ID NO: 1576884 - RNA, 19 nt, Homo sapiens
  misc_RNA (1)...(19): siRNA sense strand
uggaaacccucuugacacu

SEQ ID NO: 1576885 - RNA, 19 nt, Homo sapiens
  misc_RNA (1)...(19): siRNA sense strand
gguaaaguaguaaccaaag

SEQ ID NO: 1576886 - RNA, 19 nt, Homo sapiens
  misc_RNA (1)...(19): siRNA sense strand
gggauggaacuacauucuu

SEQ ID NO: 1576887 - RNA, 19 nt, Homo sapiens
  misc_RNA (1)...(19): siRNA sense strand
uuaaggaaggugaaauaug

SEQ ID NO: 1576888 - RNA, 19 nt, Homo sapiens
  misc_RNA (1)...(19): siRNA sense strand
ggucuggaauacaaguuac

SEQ ID NO: 1576889 - RNA, 19 nt, Homo sapiens
  misc_RNA (1)...(19): siRNA sense strand
aagguaaaguaguaaccaa

SEQ ID NO: 1576890 - RNA, 19 nt, Homo sapiens
  misc_RNA (1)...(19): siRNA sense strand
uugcugccaccuuaucuua

SEQ ID NO: 1576891 - RNA, 19 nt, Homo sapiens
  misc_RNA (1)...(19): siRNA sense strand
gagaaaauauggggugaag

SEQ ID NO: 1576892 - RNA, 19 nt, Homo sapiens
  misc_RNA (1)...(19): siRNA sense strand
uaacuucaaaggaacagau

SEQ ID NO: 1576893 - RNA, 19 nt, Homo sapiens
  misc_RNA (1)...(19): siRNA sense strand
cuuacaaauuggauugaga

SEQ ID NO: 1576894 - RNA, 19 nt, Homo sapiens
  misc_RNA (1)...(19): siRNA sense strand
aaagggauggaacuacauu

SEQ ID NO: 1576895 - RNA, 19 nt, Homo sapiens
  misc_RNA (1)...(19): siRNA sense strand
gguaagaaguuuccuguua

SEQ ID NO: 1576896 - RNA, 19 nt, Homo sapiens
  misc_RNA (1)...(19): siRNA sense strand
uaaggaaggugaaauauga

SEQ ID NO: 1576897 - RNA, 19 nt, Homo sapiens
  misc_RNA (1)...(19): siRNA sense strand
ccaaagaugucuacaaaga

SEQ ID NO: 1576898 - RNA, 19 nt, Homo sapiens
  misc_RNA (1)...(19): siRNA sense strand
caaauuggauugagacuau

SEQ ID NO: 1576899 - RNA, 19 nt, Homo sapiens
  misc_RNA (1)...(19): siRNA sense strand
uaacuuagauggucuggaa

SEQ ID NO: 1576900 - RNA, 19 nt, Homo sapiens
  misc_RNA (1)...(19): siRNA sense strand
caaagaacauuuccaagau

SEQ ID NO: 1576901 - RNA, 19 nt, Homo sapiens
  misc_RNA (1)...(19): siRNA sense strand
ccaagagacugcuggcaua

SEQ ID NO: 1576902 - RNA, 19 nt, Homo sapiens
  misc_RNA (1)...(19): siRNA sense strand
ggauggaacuacauucuug

SEQ ID NO: 1576903 - RNA, 19 nt, Homo sapiens
  misc_RNA (1)...(19): siRNA sense strand
caaaggaacagauacagua

SEQ ID NO: 1576904 - RNA, 19 nt, Homo sapiens
  misc_RNA (1)...(19): siRNA sense strand
guuacuggcuuacaaauug

SEQ ID NO: 1576905 - RNA, 19 nt, Homo sapiens
  misc_RNA (1)...(19): siRNA sense strand
gcagaacacaguaccauaa

SEQ ID NO: 1576906 - RNA, 19 nt, Homo sapiens
  misc_RNA (1)...(19): siRNA sense strand
caagguuacucacuauaaa

SEQ ID NO: 1576907 - RNA, 19 nt, Homo sapiens
  misc_RNA (1)...(19): siRNA sense strand
caagcaaaguuuauuccua

SEQ ID NO: 1576908 - RNA, 19 nt, Homo sapiens
  misc_RNA (1)...(19): siRNA sense strand
acaaguugcugccaccuua

SEQ ID NO: 1576909 - RNA, 19 nt, Homo sapiens
  misc_RNA (1)...(19): siRNA sense strand
gugaagaucuaagacauuu

SEQ ID NO: 1576910 - RNA, 19 nt, Homo sapiens
  misc_RNA (1)...(19): siRNA sense strand
gaaauaugaggaaacagua

SEQ ID NO: 1576911 - RNA, 19 nt, Homo sapiens
  misc_RNA (1)...(19): siRNA sense strand
gaaacccucuugacacugu

SEQ ID NO: 1576912 - RNA, 19 nt, Homo sapiens
  misc_RNA (1)...(19): siRNA sense strand
guaaaguaguaaccaaaga

SEQ ID NO: 1576913 - RNA, 19 nt, Homo sapiens
  misc_RNA (1)...(19): siRNA sense strand
gggauggaguagauauuaa

SEQ ID NO: 1576914 - RNA, 19 nt, Homo sapiens
  misc_RNA (1)...(19): siRNA sense strand
gcaggacuugcucuaauua

SEQ ID NO: 1576915 - RNA, 19 nt, Homo sapiens
  misc_RNA (1)...(19): siRNA sense strand
gaacauauuguaacacagu

SEQ ID NO: 1576916 - RNA, 19 nt, Homo sapiens
  misc_RNA (1)...(19): siRNA sense strand
cgauagcuaugacauuuau

SEQ ID NO: 1576917 - RNA, 19 nt, Homo sapiens
  misc_RNA (1)...(19): siRNA sense strand
uagauggucuggaauacaa

SEQ ID NO: 1576918 - RNA, 19 nt, Homo sapiens
  misc_RNA (1)...(19): siRNA sense strand
agccaaagaugucuacaaa

SEQ ID NO: 1576919 - RNA, 19 nt, Homo sapiens
  misc_RNA (1)...(19): siRNA sense strand
acacaggcaccacuaauaa

SEQ ID NO: 1576920 - RNA, 19 nt, Homo sapiens
  misc_RNA (1)...(19): siRNA sense strand
ucacuugguuaacuucaaa

SEQ ID NO: 1576921 - RNA, 19 nt, Homo sapiens
  misc_RNA (1)...(19): siRNA sense strand
caacacaagcaaaguuuau

SEQ ID NO: 1576922 - RNA, 19 nt, Homo sapiens
  misc_RNA (1)...(19): siRNA sense strand
ccuacaagguuacucacua

SEQ ID NO: 1576923 - RNA, 19 nt, Homo sapiens
  misc_RNA (1)...(19): siRNA sense strand
gaaaagggauggaacuaca

SEQ ID NO: 1576924 - RNA, 19 nt, Homo sapiens
  misc_RNA (1)...(19): siRNA sense strand
acaaagaacauuuccaaga

SEQ ID NO: 1576925 - RNA, 19 nt, Homo sapiens
  misc_RNA (1)...(19): siRNA sense strand
ggugaaauaugaggaaaca

SEQ ID NO: 1576926 - RNA, 19 nt, Homo sapiens
  misc_RNA (1)...(19): siRNA sense strand
ggguugcaguacauucuua

SEQ ID NO: 1576927 - RNA, 19 nt, Homo sapiens
  misc_RNA (1)...(19): siRNA sense strand
gauugagacuauucuuguu

SEQ ID NO: 1576928 - RNA, 19 nt, Homo sapiens
  misc_RNA (1)...(19): siRNA sense strand
cuacaagguuacucacuau

SEQ ID NO: 1576929 - RNA, 19 nt, Homo sapiens
  misc_RNA (1)...(19): siRNA sense strand
gacagaaaacuccaaauua

SEQ ID NO: 1576930 - RNA, 19 nt, Homo sapiens
  misc_RNA (1)...(19): siRNA sense strand
aaagaacauuuccaagaug

SEQ ID NO: 1576931 - RNA, 19 nt, Homo sapiens
  misc_RNA (1)...(19): siRNA sense strand
gaaggugaaauaugaggaa

SEQ ID NO: 1576932 - RNA, 19 nt, Homo sapiens
  misc_RNA (1)...(19): siRNA sense strand
caaagaugucuacaaagaa

SEQ ID NO: 1576933 - RNA, 19 nt, Homo sapiens
  misc_RNA (1)...(19): siRNA sense strand
ggauugagacuauucuugu

SEQ ID NO: 1576934 - RNA, 19 nt, Homo sapiens
  misc_RNA (1)...(19): siRNA sense strand
gaacauuuccaagaugaug

SEQ ID NO: 1576935 - RNA, 19 nt, Homo sapiens
  misc_RNA (1)...(19): siRNA sense strand
aagaacauuuccaagauga

SEQ ID NO: 1576936 - RNA, 19 nt, Homo sapiens
  misc_RNA (1)...(19): siRNA sense strand
caccuuaucuuagaguuau

SEQ ID NO: 1576937 - RNA, 19 nt, Homo sapiens
  misc_RNA (1)...(19): siRNA sense strand
cuacaaagaacauuuccaa

SEQ ID NO: 1576938 - RNA, 19 nt, Homo sapiens
  misc_RNA (1)...(19): siRNA sense strand
gcugccaccuuaucuuaga

SEQ ID NO: 1576939 - RNA, 19 nt, Homo sapiens
  misc_RNA (1)...(19): siRNA sense strand
gaguguuacuggcuuacaa

SEQ ID NO: 1576940 - RNA, 19 nt, Homo sapiens
  misc_RNA (1)...(19): siRNA sense strand
gaacucaaaggguuacaag

SEQ ID NO: 1576941 - RNA, 19 nt, Homo sapiens
  misc_RNA (1)...(19): siRNA sense strand
gcgauagcuaugacauuua

SEQ ID NO: 1576942 - RNA, 19 nt, Homo sapiens
  misc_RNA (1)...(19): siRNA sense strand
gaacacaguaccauaacag

SEQ ID NO: 1576943 - RNA, 19 nt, Homo sapiens
  misc_RNA (1)...(19): siRNA sense strand
aaagaugucuacaaagaac

SEQ ID NO: 1576944 - RNA, 19 nt, Homo sapiens
  misc_RNA (1)...(19): siRNA sense strand
cucaaaggguuacaaguug

SEQ ID NO: 1576945 - RNA, 19 nt, Homo sapiens
  misc_RNA (1)...(19): siRNA sense strand
gggcaucuuccaauagaaa

SEQ ID NO: 1576946 - RNA, 19 nt, Homo sapiens
  misc_RNA (1)...(19): siRNA sense strand
uugguuaacuucaaaggaa

SEQ ID NO: 1576947 - RNA, 19 nt, Homo sapiens
  misc_RNA (1)...(19): siRNA sense strand
caaucacaguggccacaaa

SEQ ID NO: 1576948 - RNA, 19 nt, Homo sapiens
  misc_RNA (1)...(19): siRNA sense strand
guucaguccugguauccaa

SEQ ID NO: 1576949 - RNA, 19 nt, Homo sapiens
  misc_RNA (1)...(19): siRNA sense strand
gaggaaauguucucuucac

SEQ ID NO: 1576950 - RNA, 19 nt, Homo sapiens
  misc_RNA (1)...(19): siRNA sense strand
ccaacacaagcaaaguuua

SEQ ID NO: 1576951 - RNA, 19 nt, Homo sapiens
  misc_RNA (1)...(19): siRNA sense strand
gaaaauauggggugaagau

SEQ ID NO: 1576952 - RNA, 19 nt, Homo sapiens
  misc_RNA (1)...(19): siRNA sense strand
guuccaggcuauucuguuc

SEQ ID NO: 1576953 - RNA, 19 nt, Homo sapiens
  misc_RNA (1)...(19): siRNA sense strand
ggaauacaaguuacaugau

SEQ ID NO: 1576954 - RNA, 19 nt, Homo sapiens
  misc_RNA (1)...(19): siRNA sense strand
ccugagggcuuugucauuc

SEQ ID NO: 1576955 - RNA, 19 nt, Homo sapiens
  misc_RNA (1)...(19): siRNA sense strand
acaagguuacucacuauaa

SEQ ID NO: 1576956 - RNA, 19 nt, Homo sapiens
  misc_RNA (1)...(19): siRNA sense strand
ucacaguggccacaaauuc

SEQ ID NO: 1576957 - RNA, 19 nt, Homo sapiens
  misc_RNA (1)...(19): siRNA sense strand
caucagugccuguaucugu

SEQ ID NO: 1576958 - RNA, 19 nt, Homo sapiens
  misc_RNA (1)...(19): siRNA sense strand
gggugaagaucuaagacau

SEQ ID NO: 1576959 - RNA, 19 nt, Homo sapiens
  misc_RNA (1)...(19): siRNA sense strand
agcgauagcuaugacauuu

SEQ ID NO: 1576960 - RNA, 19 nt, Homo sapiens
  misc_RNA (1)...(19): siRNA sense strand
caaauuaaggaaggugaaa

SEQ ID NO: 1576961 - RNA, 19 nt, Homo sapiens
  misc_RNA (1)...(19): siRNA sense strand
ggauggaguagauauuaau

SEQ ID NO: 1576962 - RNA, 19 nt, Homo sapiens
  misc_RNA (1)...(19): siRNA sense strand
caucugcucacuugguuaa

SEQ ID NO: 1576963 - RNA, 19 nt, Homo sapiens
  misc_RNA (1)...(19): siRNA sense strand
agagacugcuggcauagga

SEQ ID NO: 1576964 - RNA, 19 nt, Homo sapiens
  misc_RNA (1)...(19): siRNA sense strand
ugaaauaugaggaaacagu

SEQ ID NO: 1576965 - RNA, 19 nt, Homo sapiens
  misc_RNA (1)...(19): siRNA sense strand
aggacuugcucuaauuaaa

SEQ ID NO: 1576966 - RNA, 19 nt, Homo sapiens
  misc_RNA (1)...(19): siRNA sense strand
uggaauacaaguuacauga

SEQ ID NO: 1576967 - RNA, 19 nt, Homo sapiens
  misc_RNA (1)...(19): siRNA sense strand
ggugaagaucuaagacauu

SEQ ID NO: 1576968 - RNA, 19 nt, Homo sapiens
  misc_RNA (1)...(19): siRNA sense strand
acucaaaggguuacaaguu

SEQ ID NO: 1576969 - RNA, 19 nt, Homo sapiens
  misc_RNA (1)...(19): siRNA sense strand
agaaguuuccuguuacuga

SEQ ID NO: 1576970 - RNA, 19 nt, Homo sapiens
  misc_RNA (1)...(19): siRNA sense strand
uaagaaguuuccuguuacu

SEQ ID NO: 1576971 - RNA, 19 nt, Homo sapiens
  misc_RNA (1)...(19): siRNA sense strand
uacacaggcaccacuaaua

SEQ ID NO: 1576972 - RNA, 19 nt, Homo sapiens
  misc_RNA (1)...(19): siRNA sense strand
guacacaggcaccacuaau

SEQ ID NO: 1576973 - RNA, 19 nt, Homo sapiens
  misc_RNA (1)...(19): siRNA sense strand
gcaucuuccaauagaaaua

SEQ ID NO: 1576974 - RNA, 19 nt, Homo sapiens
  misc_RNA (1)...(19): siRNA sense strand
ccaccuuaucuuagaguua

SEQ ID NO: 1576975 - RNA, 19 nt, Homo sapiens
  misc_RNA (1)...(19): siRNA sense strand
ggacuugcucuaauuaaaa

SEQ ID NO: 1576976 - RNA, 19 nt, Homo sapiens
  misc_RNA (1)...(19): siRNA sense strand
gaaaauccaggaagccaaa

SEQ ID NO: 1576977 - RNA, 19 nt, Homo sapiens
  misc_RNA (1)...(19): siRNA sense strand
gcagaagccgaguucaaca

SEQ ID NO: 1576978 - RNA, 19 nt, Homo sapiens
  misc_RNA (1)...(19): siRNA sense strand
uaacacaguuuucaucagu

SEQ ID NO: 1576979 - RNA, 19 nt, Homo sapiens
  misc_RNA (1)...(19): siRNA sense strand
aguaguaaccaaagagaaa

SEQ ID NO: 1576980 - RNA, 19 nt, Homo sapiens
  misc_RNA (1)...(19): siRNA sense strand
aaacuucugguaacuuaga

SEQ ID NO: 1576981 - RNA, 19 nt, Homo sapiens
  misc_RNA (1)...(19): siRNA sense strand
gauggaacuacauucuuga

SEQ ID NO: 1576982 - RNA, 19 nt, Homo sapiens
  misc_RNA (1)...(19): siRNA sense strand
ccaggaagccaaagauguc

SEQ ID NO: 1576983 - RNA, 19 nt, Homo sapiens
  misc_RNA (1)...(19): siRNA sense strand
caauauccacccaacacaa

SEQ ID NO: 1576984 - RNA, 19 nt, Homo sapiens
  misc_RNA (1)...(19): siRNA sense strand
uggaaacccucuugacacu

SEQ ID NO: 1576985 - RNA, 19 nt, Homo sapiens
  misc_RNA (1)...(19): siRNA sense strand
gguaaaguaguaaccaaag

SEQ ID NO: 1576986 - RNA, 19 nt, Homo sapiens
  misc_RNA (1)...(19): siRNA sense strand
gggauggaacuacauucuu

SEQ ID NO: 1576987 - RNA, 19 nt, Homo sapiens
  misc_RNA (1)...(19): siRNA sense strand
uuaaggaaggugaaauaug

SEQ ID NO: 1576988 - RNA, 19 nt, Homo sapiens
  misc_RNA (1)...(19): siRNA sense strand
ggucuggaauacaaguuac

SEQ ID NO: 1576989 - RNA, 19 nt, Homo sapiens
  misc_RNA (1)...(19): siRNA sense strand
aagguaaaguaguaaccaa

SEQ ID NO: 1576990 - RNA, 19 nt, Homo sapiens
  misc_RNA (1)...(19): siRNA sense strand
uugcugccaccuuaucuua

SEQ ID NO: 1576991 - RNA, 19 nt, Homo sapiens
  misc_RNA (1)...(19): siRNA sense strand
gagaaaauauggggugaag

SEQ ID NO: 1576992 - RNA, 19 nt, Homo sapiens
  misc_RNA (1)...(19): siRNA sense strand
uaacuucaaaggaacagau

SEQ ID NO: 1576993 - RNA, 19 nt, Homo sapiens
  misc_RNA (1)...(19): siRNA sense strand
cuuacaaauuggauugaga

SEQ ID NO: 1576994 - RNA, 19 nt, Homo sapiens
  misc_RNA (1)...(19): siRNA sense strand
aaagggauggaacuacauu

SEQ ID NO: 1576995 - RNA, 19 nt, Homo sapiens
  misc_RNA (1)...(19): siRNA sense strand
ggucaacucuguccuguuu

SEQ ID NO: 1576996 - RNA, 19 nt, Homo sapiens
  misc_RNA (1)...(19): siRNA sense strand
guugaaagcuugcaaauca

SEQ ID NO: 1576997 - RNA, 19 nt, Homo sapiens
  misc_RNA (1)...(19): siRNA sense strand
gcagauggauggacugaga

SEQ ID NO: 1576998 - RNA, 19 nt, Homo sapiens
  misc_RNA (1)...(19): siRNA sense strand
ggacugagacgcagagugu

SEQ ID NO: 1576999 - RNA, 19 nt, Homo sapiens
  misc_RNA (1)...(19): siRNA sense strand
ggaucuacuucaucaccua

SEQ ID NO: 1577000 - RNA, 19 nt, Homo sapiens
  misc_RNA (1)...(19): siRNA sense strand
gcucagcccuuccuaacca

SEQ ID NO: 1577001 - RNA, 19 nt, Homo sapiens
  misc_RNA (1)...(19): siRNA sense strand
gaugagcccugcggcaaug

SEQ ID NO: 1577002 - RNA, 19 nt, Homo sapiens
  misc_RNA (1)...(19): siRNA sense strand
gcauagcuguggucaacuc

SEQ ID NO: 1577003 - RNA, 19 nt, Homo sapiens
  misc_RNA (1)...(19): siRNA sense strand
ccuacugucuggcuccuuu

SEQ ID NO: 1577004 - RNA, 19 nt, Homo sapiens
  misc_RNA (1)...(19): siRNA sense strand
ggaggccaguuugagauug

SEQ ID NO: 1577005 - RNA, 19 nt, Homo sapiens
  misc_RNA (1)...(19): siRNA sense strand
gaggccagguugaaagcuu

SEQ ID NO: 1577006 - RNA, 19 nt, Homo sapiens
  misc_RNA (1)...(19): siRNA sense strand
ccagcuacaugcacaucuu

SEQ ID NO: 1577007 - RNA, 19 nt, Homo sapiens
  misc_RNA (1)...(19): siRNA sense strand
uagcuguggucaacucugu

SEQ ID NO: 1577008 - RNA, 19 nt, Homo sapiens
  misc_RNA (1)...(19): siRNA sense strand
cuacaugcacaucuuccua

SEQ ID NO: 1577009 - RNA, 19 nt, Homo sapiens
  misc_RNA (1)...(19): siRNA sense strand
ccuuagacgugaucaaguc

SEQ ID NO: 1577010 - RNA, 19 nt, Homo sapiens
  misc_RNA (1)...(19): siRNA sense strand
caucaaaguccggcuacaa

SEQ ID NO: 1577011 - RNA, 19 nt, Homo sapiens
  misc_RNA (1)...(19): siRNA sense strand
gaggccaguuugagauugg

SEQ ID NO: 1577012 - RNA, 19 nt, Homo sapiens
  misc_RNA (1)...(19): siRNA sense strand
ucaacucuguccuguuugg

SEQ ID NO: 1577013 - RNA, 19 nt, Homo sapiens
  misc_RNA (1)...(19): siRNA sense strand
gaucuacuucaucaccuau

SEQ ID NO: 1577014 - RNA, 19 nt, Homo sapiens
  misc_RNA (1)...(19): siRNA sense strand
gauuggaggccagguugaa

SEQ ID NO: 1577015 - RNA, 19 nt, Homo sapiens
  misc_RNA (1)...(19): siRNA sense strand
ggaugagcccugcggcaau

SEQ ID NO: 1577016 - RNA, 19 nt, Homo sapiens
  misc_RNA (1)...(19): siRNA sense strand
gacacccguuugacacugu

SEQ ID NO: 1577017 - RNA, 19 nt, Homo sapiens
  misc_RNA (1)...(19): siRNA sense strand
ugugcagccucccugugua

SEQ ID NO: 1577018 - RNA, 19 nt, Homo sapiens
  misc_RNA (1)...(19): siRNA sense strand
ucaagucccggaugcagau

SEQ ID NO: 1577019 - RNA, 19 nt, Homo sapiens
  misc_RNA (1)...(19): siRNA sense strand
ggagaagccuuuccaguga

SEQ ID NO: 1577020 - RNA, 19 nt, Homo sapiens
  misc_RNA (1)...(19): siRNA sense strand
ggaaugggcuucugguguu

SEQ ID NO: 1577021 - RNA, 19 nt, Homo sapiens
  misc_RNA (1)...(19): siRNA sense strand
gaucagcagucuccucaaa

SEQ ID NO: 1577022 - RNA, 19 nt, Homo sapiens
  misc_RNA (1)...(19): siRNA sense strand
cgagaaauauggcaucauc

SEQ ID NO: 1577023 - RNA, 19 nt, Homo sapiens
  misc_RNA (1)...(19): siRNA sense strand
gaacacauggugauaguca

SEQ ID NO: 1577024 - RNA, 19 nt, Homo sapiens
  misc_RNA (1)...(19): siRNA sense strand
ccacgaggcugcagacucu

SEQ ID NO: 1577025 - RNA, 19 nt, Homo sapiens
  misc_RNA (1)...(19): siRNA sense strand
gaaccuggucuccuacuug

SEQ ID NO: 1577026 - RNA, 19 nt, Homo sapiens
  misc_RNA (1)...(19): siRNA sense strand
gcaaucaccggaccacaga

SEQ ID NO: 1577027 - RNA, 19 nt, Homo sapiens
  misc_RNA (1)...(19): siRNA sense strand
gggcuaagguggccauguc

SEQ ID NO: 1577028 - RNA, 19 nt, Homo sapiens
  misc_RNA (1)...(19): siRNA sense strand
ucagcagucuccucaaaga

SEQ ID NO: 1577029 - RNA, 19 nt, Homo sapiens
  misc_RNA (1)...(19): siRNA sense strand
cgcaaccucuucauuggua

SEQ ID NO: 1577030 - RNA, 19 nt, Homo sapiens
  misc_RNA (1)...(19): siRNA sense strand
gaagaacacauggugauag

SEQ ID NO: 1577031 - RNA, 19 nt, Homo sapiens
  misc_RNA (1)...(19): siRNA sense strand
gcagugggcagcagucaga

SEQ ID NO: 1577032 - RNA, 19 nt, Homo sapiens
  misc_RNA (1)...(19): siRNA sense strand
gcuagaagaagaacacaug

SEQ ID NO: 1577033 - RNA, 19 nt, Homo sapiens
  misc_RNA (1)...(19): siRNA sense strand
agaguacgcucagacacua

SEQ ID NO: 1577034 - RNA, 19 nt, Homo sapiens
  misc_RNA (1)...(19): siRNA sense strand
ggaaccuggucuccuacuu

SEQ ID NO: 1577035 - RNA, 19 nt, Homo sapiens
  misc_RNA (1)...(19): siRNA sense strand
gaaugggcuucugguguug

SEQ ID NO: 1577036 - RNA, 19 nt, Homo sapiens
  misc_RNA (1)...(19): siRNA sense strand
gcaaccucuucauugguaa

SEQ ID NO: 1577037 - RNA, 19 nt, Homo sapiens
  misc_RNA (1)...(19): siRNA sense strand
ucgaggagguggucaucaa

SEQ ID NO: 1577038 - RNA, 19 nt, Homo sapiens
  misc_RNA (1)...(19): siRNA sense strand
ggacauugggcaagcuaga

SEQ ID NO: 1577039 - RNA, 19 nt, Homo sapiens
  misc_RNA (1)...(19): siRNA sense strand
agaggcggcuucucaggaa

SEQ ID NO: 1577040 - RNA, 19 nt, Homo sapiens
  misc_RNA (1)...(19): siRNA sense strand
gaucacgucaaaggagaua

SEQ ID NO: 1577041 - RNA, 19 nt, Homo sapiens
  misc_RNA (1)...(19): siRNA sense strand
gcagauggagaccgugguu

SEQ ID NO: 1577042 - RNA, 19 nt, Homo sapiens
  misc_RNA (1)...(19): siRNA sense strand
cggcuaugcgguccucuua

SEQ ID NO: 1577043 - RNA, 19 nt, Homo sapiens
  misc_RNA (1)...(19): siRNA sense strand
aagaacacauggugauagu

SEQ ID NO: 1577044 - RNA, 19 nt, Homo sapiens
  misc_RNA (1)...(19): siRNA sense strand
ccuaugccuuccucaaguu

SEQ ID NO: 1577045 - RNA, 19 nt, Homo sapiens
  misc_RNA (1)...(19): siRNA sense strand
ggugauagucaucgucaga

SEQ ID NO: 1577046 - RNA, 19 nt, Homo sapiens
  misc_RNA (1)...(19): siRNA sense strand
aaccuggucuccuacuuga

SEQ ID NO: 1577047 - RNA, 19 nt, Homo sapiens
  misc_RNA (1)...(19): siRNA sense strand
gcaacucccucagcaacag

SEQ ID NO: 1577048 - RNA, 19 nt, Homo sapiens
  misc_RNA (1)...(19): siRNA sense strand
ugggcaagcuagaagaaga

SEQ ID NO: 1577049 - RNA, 19 nt, Homo sapiens
  misc_RNA (1)...(19): siRNA sense strand
ccgagaguuugaccgcuuu

SEQ ID NO: 1577050 - RNA, 19 nt, Homo sapiens
  misc_RNA (1)...(19): siRNA sense strand
agaagaacacauggugaua

SEQ ID NO: 1577051 - RNA, 19 nt, Homo sapiens
  misc_RNA (1)...(19): siRNA sense strand
gggaagaaggcaagagaca

SEQ ID NO: 1577052 - RNA, 19 nt, Homo sapiens
  misc_RNA (1)...(19): siRNA sense strand
gcauucggaccauugauca

SEQ ID NO: 1577053 - RNA, 19 nt, Homo sapiens
  misc_RNA (1)...(19): siRNA sense strand
gaggagguggucaucaaga

SEQ ID NO: 1577054 - RNA, 19 nt, Homo sapiens
  misc_RNA (1)...(19): siRNA sense strand
gccuaugccuuccucaagu

SEQ ID NO: 1577055 - RNA, 19 nt, Homo sapiens
  misc_RNA (1)...(19): siRNA sense strand
ugauagucaucgucagaga

SEQ ID NO: 1577056 - RNA, 19 nt, Homo sapiens
  misc_RNA (1)...(19): siRNA sense strand
gggcaagcuagaagaagaa

SEQ ID NO: 1577057 - RNA, 19 nt, Homo sapiens
  misc_RNA (1)...(19): siRNA sense strand
cggaaacggagaagccuuu

SEQ ID NO: 1577058 - RNA, 19 nt, Homo sapiens
  misc_RNA (1)...(19): siRNA sense strand
cacuacagcuggguuggaa

SEQ ID NO: 1577059 - RNA, 19 nt, Homo sapiens
  misc_RNA (1)...(19): siRNA sense strand
ggagcauucggaccauuga

SEQ ID NO: 1577060 - RNA, 19 nt, Homo sapiens
  misc_RNA (1)...(19): siRNA sense strand
agucagcacuaaggacauu

SEQ ID NO: 1577061 - RNA, 19 nt, Homo sapiens
  misc_RNA (1)...(19): siRNA sense strand
ucuccuacuugaaacagaa

SEQ ID NO: 1577062 - RNA, 19 nt, Homo sapiens
  misc_RNA (1)...(19): siRNA sense strand
ccuggucuccuacuugaaa

SEQ ID NO: 1577063 - RNA, 19 nt, Homo sapiens
  misc_RNA (1)...(19): siRNA sense strand
gccacucccugugcauuau

SEQ ID NO: 1577064 - RNA, 19 nt, Homo sapiens
  misc_RNA (1)...(19): siRNA sense strand
gcaggcuccgcguggauuu

SEQ ID NO: 1577065 - RNA, 19 nt, Homo sapiens
  misc_RNA (1)...(19): siRNA sense strand
agaaauauggcaucaucga

SEQ ID NO: 1577066 - RNA, 19 nt, Homo sapiens
  misc_RNA (1)...(19): siRNA sense strand
gaggucacacgacgcauca

SEQ ID NO: 1577067 - RNA, 19 nt, Homo sapiens
  misc_RNA (1)...(19): siRNA sense strand
ccucaaagaccacacuucu

SEQ ID NO: 1577068 - RNA, 19 nt, Homo sapiens
  misc_RNA (1)...(19): siRNA sense strand
gagaggcggaaacggagaa

SEQ ID NO: 1577069 - RNA, 19 nt, Homo sapiens
  misc_RNA (1)...(19): siRNA sense strand
gggagcauucggaccauug

SEQ ID NO: 1577070 - RNA, 19 nt, Homo sapiens
  misc_RNA (1)...(19): siRNA sense strand
ccagugaagggaccaagga

SEQ ID NO: 1577071 - RNA, 19 nt, Homo sapiens
  misc_RNA (1)...(19): siRNA sense strand
cugcagaggcggcuucuca

SEQ ID NO: 1577072 - RNA, 19 nt, Homo sapiens
  misc_RNA (1)...(19): siRNA sense strand
cgccacucccugugcauua

SEQ ID NO: 1577073 - RNA, 19 nt, Homo sapiens
  misc_RNA (1)...(19): siRNA sense strand
gacauugggcaagcuagaa

SEQ ID NO: 1577074 - RNA, 19 nt, Homo sapiens
  misc_RNA (1)...(19): siRNA sense strand
guaccuccagucagcacua

SEQ ID NO: 1577075 - RNA, 19 nt, Homo sapiens
  misc_RNA (1)...(19): siRNA sense strand
gcagcaacucccucagcaa

SEQ ID NO: 1577076 - RNA, 19 nt, Homo sapiens
  misc_RNA (1)...(19): siRNA sense strand
aagaagaacacauggugau

SEQ ID NO: 1577077 - RNA, 19 nt, Homo sapiens
  misc_RNA (1)...(19): siRNA sense strand
ccacgucuaugcauauccu

SEQ ID NO: 1577078 - RNA, 19 nt, Homo sapiens
  misc_RNA (1)...(19): siRNA sense strand
cuacagcuggguuggaaug

SEQ ID NO: 1577079 - RNA, 19 nt, Homo sapiens
  misc_RNA (1)...(19): siRNA sense strand
agauggagaccgugguuug

SEQ ID NO: 1577080 - RNA, 19 nt, Homo sapiens
  misc_RNA (1)...(19): siRNA sense strand
uaugaggaacggaguagga

SEQ ID NO: 1577081 - RNA, 19 nt, Homo sapiens
  misc_RNA (1)...(19): siRNA sense strand
acgcgcaaccucuucauug

SEQ ID NO: 1577082 - RNA, 19 nt, Homo sapiens
  misc_RNA (1)...(19): siRNA sense strand
ccaaggaguccagcagcaa

SEQ ID NO: 1577083 - RNA, 19 nt, Homo sapiens
  misc_RNA (1)...(19): siRNA sense strand
uugccuauauucaguacga

SEQ ID NO: 1577084 - RNA, 19 nt, Homo sapiens
  misc_RNA (1)...(19): siRNA sense strand
ucacacgacgcaucaagca

SEQ ID NO: 1577085 - RNA, 19 nt, Homo sapiens
  misc_RNA (1)...(19): siRNA sense strand
ccauaugaggaacggagua

SEQ ID NO: 1577086 - RNA, 19 nt, Homo sapiens
  misc_RNA (1)...(19): siRNA sense strand
aaacggagaagccuuucca

SEQ ID NO: 1577087 - RNA, 19 nt, Homo sapiens
  misc_RNA (1)...(19): siRNA sense strand
gagagacgcugucggcauu

SEQ ID NO: 1577088 - RNA, 19 nt, Homo sapiens
  misc_RNA (1)...(19): siRNA sense strand
cagagaauccuaaugauaa

SEQ ID NO: 1577089 - RNA, 19 nt, Homo sapiens
  misc_RNA (1)...(19): siRNA sense strand
cauuacagcugcagucauu

SEQ ID NO: 1577090 - RNA, 19 nt, Homo sapiens
  misc_RNA (1)...(19): siRNA sense strand
cuacagagaauccuaauga

SEQ ID NO: 1577091 - RNA, 19 nt, Homo sapiens
  misc_RNA (1)...(19): siRNA sense strand
gaggaugagccacugcuua

SEQ ID NO: 1577092 - RNA, 19 nt, Homo sapiens
  misc_RNA (1)...(19): siRNA sense strand
caccaucacuuacagcuau

SEQ ID NO: 1577093 - RNA, 19 nt, Homo sapiens
  misc_RNA (1)...(19): siRNA sense strand
caaccugcguucucugcua

SEQ ID NO: 1577094 - RNA, 19 nt, Homo sapiens
  misc_RNA (1)...(19): siRNA sense strand
uagaagacuuuccuacaga

SEQ ID NO: 1577095 - RNA, 19 nt, Homo sapiens
  misc_RNA (1)...(19): siRNA sense strand
gcaacgucaccaucacuua

SEQ ID NO: 1577096 - RNA, 19 nt, Homo sapiens
  misc_RNA (1)...(19): siRNA sense strand
gagaagugcguguaugaga

SEQ ID NO: 1577097 - RNA, 19 nt, Homo sapiens
  misc_RNA (1)...(19): siRNA sense strand
acagagaauccuaaugaua

SEQ ID NO: 1577098 - RNA, 19 nt, Homo sapiens
  misc_RNA (1)...(19): siRNA sense strand
ccugagagcucccgacuac

SEQ ID NO: 1577099 - RNA, 19 nt, Homo sapiens
  misc_RNA (1)...(19): siRNA sense strand
gauggaggcugagauugug

SEQ ID NO: 1577100 - RNA, 19 nt, Homo sapiens
  misc_RNA (1)...(19): siRNA sense strand
ggacuugggcuuuggagau

SEQ ID NO: 1577101 - RNA, 19 nt, Homo sapiens
  misc_RNA (1)...(19): siRNA sense strand
ggacugcuccuauguucug

SEQ ID NO: 1577102 - RNA, 19 nt, Homo sapiens
  misc_RNA (1)...(19): siRNA sense strand
ggauggaggcugagauugu

SEQ ID NO: 1577103 - RNA, 19 nt, Homo sapiens
  misc_RNA (1)...(19): siRNA sense strand
ggacgagaagugcguguau

SEQ ID NO: 1577104 - RNA, 19 nt, Homo sapiens
  misc_RNA (1)...(19): siRNA sense strand
cuagagccaucacuauugu

SEQ ID NO: 1577105 - RNA, 19 nt, Homo sapiens
  misc_RNA (1)...(19): siRNA sense strand
gaaccaccgcuguguaucu

SEQ ID NO: 1577106 - RNA, 19 nt, Homo sapiens
  misc_RNA (1)...(19): siRNA sense strand
gagugggacugcuccuaug

SEQ ID NO: 1577107 - RNA, 19 nt, Homo sapiens
  misc_RNA (1)...(19): siRNA sense strand
gccaggcuguuguguccua

SEQ ID NO: 1577108 - RNA, 19 nt, Homo sapiens
  misc_RNA (1)...(19): siRNA sense strand
ugaugugccugcaggaaga

SEQ ID NO: 1577109 - RNA, 19 nt, Homo sapiens
  misc_RNA (1)...(19): siRNA sense strand
cgauggcucugaugaagca

SEQ ID NO: 1577110 - RNA, 19 nt, Homo sapiens
  misc_RNA (1)...(19): siRNA sense strand
gacgagaagugcguguaug

SEQ ID NO: 1577111 - RNA, 19 nt, Homo sapiens
  misc_RNA (1)...(19): siRNA sense strand
gaucuuacgccaggauaug

SEQ ID NO: 1577112 - RNA, 19 nt, Homo sapiens
  misc_RNA (1)...(19): siRNA sense strand
gaauccuaaugauaacuca

SEQ ID NO: 1577113 - RNA, 19 nt, Homo sapiens
  misc_RNA (1)...(19): siRNA sense strand
gacuugggcuuuggagaug

SEQ ID NO: 1577114 - RNA, 19 nt, Homo sapiens
  misc_RNA (1)...(19): siRNA sense strand
ugauggagcagaugagaga

SEQ ID NO: 1577115 - RNA, 19 nt, Homo sapiens
  misc_RNA (1)...(19): siRNA sense strand
uagcugaggcagaggauga

SEQ ID NO: 1577116 - RNA, 19 nt, Homo sapiens
  misc_RNA (1)...(19): siRNA sense strand
ccuagagccaucacuauug

SEQ ID NO: 1577117 - RNA, 19 nt, Homo sapiens
  misc_RNA (1)...(19): siRNA sense strand
agacuuuccuacagagaau

SEQ ID NO: 1577118 - RNA, 19 nt, Homo sapiens
  misc_RNA (1)...(19): siRNA sense strand
ggcgauggcucugaugaag

SEQ ID NO: 1577119 - RNA, 19 nt, Homo sapiens
  misc_RNA (1)...(19): siRNA sense strand
gaagacuuuccuacagaga

SEQ ID NO: 1577120 - RNA, 19 nt, Homo sapiens
  misc_RNA (1)...(19): siRNA sense strand
ccaggaguacagcaucuuu

SEQ ID NO: 1577121 - RNA, 19 nt, Homo sapiens
  misc_RNA (1)...(19): siRNA sense strand
cuucuccucuccuggauau

SEQ ID NO: 1577122 - RNA, 19 nt, Homo sapiens
  misc_RNA (1)...(19): siRNA sense strand
ggaagaugaggacgaugug

SEQ ID NO: 1577123 - RNA, 19 nt, Homo sapiens
  misc_RNA (1)...(19): siRNA sense strand
gcaauggucguggcuucaa

SEQ ID NO: 1577124 - RNA, 19 nt, Homo sapiens
  misc_RNA (1)...(19): siRNA sense strand
auacacaccuagccucagu

SEQ ID NO: 1577125 - RNA, 19 nt, Homo sapiens
  misc_RNA (1)...(19): siRNA sense strand
caauggucguggcuucaau

SEQ ID NO: 1577126 - RNA, 19 nt, Homo sapiens
  misc_RNA (1)...(19): siRNA sense strand
caacgucaccaucacuuac

SEQ ID NO: 1577127 - RNA, 19 nt, Homo sapiens
  misc_RNA (1)...(19): siRNA sense strand
caacugcaccuggcucauc

SEQ ID NO: 1577128 - RNA, 19 nt, Homo sapiens
  misc_RNA (1)...(19): siRNA sense strand
ugagagcucccgacuacug

SEQ ID NO: 1577129 - RNA, 19 nt, Homo sapiens
  misc_RNA (1)...(19): siRNA sense strand
ucaaugccaccuaccaugu

SEQ ID NO: 1577130 - RNA, 19 nt, Homo sapiens
  misc_RNA (1)...(19): siRNA sense strand
gcagugggugggcaagaug

SEQ ID NO: 1577131 - RNA, 19 nt, Homo sapiens
  misc_RNA (1)...(19): siRNA sense strand
uacagagaauccuaaugau

SEQ ID NO: 1577132 - RNA, 19 nt, Homo sapiens
  misc_RNA (1)...(19): siRNA sense strand
caucccaccuguagaagac

SEQ ID NO: 1577133 - RNA, 19 nt, Homo sapiens
  misc_RNA (1)...(19): siRNA sense strand
gacuuucugugcugaugga

SEQ ID NO: 1577134 - RNA, 19 nt, Homo sapiens
  misc_RNA (1)...(19): siRNA sense strand
ugggacugcuccuauguuc

SEQ ID NO: 1577135 - RNA, 19 nt, Homo sapiens
  misc_RNA (1)...(19): siRNA sense strand
ugaggacgaugugcuacug

SEQ ID NO: 1577136 - RNA, 19 nt, Homo sapiens
  misc_RNA (1)...(19): siRNA sense strand
ugagugggacugcuccuau

SEQ ID NO: 1577137 - RNA, 19 nt, Homo sapiens
  misc_RNA (1)...(19): siRNA sense strand
uuccaaaucaugcuuguga

SEQ ID NO: 1577138 - RNA, 19 nt, Homo sapiens
  misc_RNA (1)...(19): siRNA sense strand
ggcagugggugggcaagau

SEQ ID NO: 1577139 - RNA, 19 nt, Homo sapiens
  misc_RNA (1)...(19): siRNA sense strand
ggacuucuauggggucuuc

SEQ ID NO: 1577140 - RNA, 19 nt, Homo sapiens
  misc_RNA (1)...(19): siRNA sense strand
cuucacagcccuggacuug

SEQ ID NO: 1577141 - RNA, 19 nt, Homo sapiens
  misc_RNA (1)...(19): siRNA sense strand
agagaauccuaaugauaac

SEQ ID NO: 1577142 - RNA, 19 nt, Homo sapiens
  misc_RNA (1)...(19): siRNA sense strand
acgagaagugcguguauga

SEQ ID NO: 1577143 - RNA, 19 nt, Homo sapiens
  misc_RNA (1)...(19): siRNA sense strand
ccuggaagaugaggacgau

SEQ ID NO: 1577144 - RNA, 19 nt, Homo sapiens
  misc_RNA (1)...(19): siRNA sense strand
ggccagaucccaggucaca

SEQ ID NO: 1577145 - RNA, 19 nt, Homo sapiens
  misc_RNA (1)...(19): siRNA sense strand
caccuuggaggacuucuau

SEQ ID NO: 1577146 - RNA, 19 nt, Homo sapiens
  misc_RNA (1)...(19): siRNA sense strand
gcugcaacuaccagacuuu

SEQ ID NO: 1577147 - RNA, 19 nt, Homo sapiens
  misc_RNA (1)...(19): siRNA sense strand
ccggauggaggcugagauu

SEQ ID NO: 1577148 - RNA, 19 nt, Homo sapiens
  misc_RNA (1)...(19): siRNA sense strand
gaagauugcugcacuaaau

SEQ ID NO: 1577149 - RNA, 19 nt, Homo sapiens
  misc_RNA (1)...(19): siRNA sense strand
gagcagaucuguguggaua

SEQ ID NO: 1577150 - RNA, 19 nt, Homo sapiens
  misc_RNA (1)...(19): siRNA sense strand
gaacaaagccaagagagaa

SEQ ID NO: 1577151 - RNA, 19 nt, Homo sapiens
  misc_RNA (1)...(19): siRNA sense strand
gagaacaucugcaacacaa

SEQ ID NO: 1577152 - RNA, 19 nt, Homo sapiens
  misc_RNA (1)...(19): siRNA sense strand
caugauggcuacuacauau

SEQ ID NO: 1577153 - RNA, 19 nt, Homo sapiens
  misc_RNA (1)...(19): siRNA sense strand
caaacgaguucuacauguc

SEQ ID NO: 1577154 - RNA, 19 nt, Homo sapiens
  misc_RNA (1)...(19): siRNA sense strand
caccacaagugcagugaaa

SEQ ID NO: 1577155 - RNA, 19 nt, Homo sapiens
  misc_RNA (1)...(19): siRNA sense strand
caacauauggucaacuugu

SEQ ID NO: 1577156 - RNA, 19 nt, Homo sapiens
  misc_RNA (1)...(19): siRNA sense strand
gcagaucuguguggauauc

SEQ ID NO: 1577157 - RNA, 19 nt, Homo sapiens
  misc_RNA (1)...(19): siRNA sense strand
ccuaucaccuguucauugu

SEQ ID NO: 1577158 - RNA, 19 nt, Homo sapiens
  misc_RNA (1)...(19): siRNA sense strand
gcucugcccuggagaacau

SEQ ID NO: 1577159 - RNA, 19 nt, Homo sapiens
  misc_RNA (1)...(19): siRNA sense strand
uacaacauauggucaacuu

SEQ ID NO: 1577160 - RNA, 19 nt, Homo sapiens
  misc_RNA (1)...(19): siRNA sense strand
ucauugcccugcugaucua

SEQ ID NO: 1577161 - RNA, 19 nt, Homo sapiens
  misc_RNA (1)...(19): siRNA sense strand
ggaaacugcagccgaggaa

SEQ ID NO: 1577162 - RNA, 19 nt, Homo sapiens
  misc_RNA (1)...(19): siRNA sense strand
uugcugcacuaaauucuaa

SEQ ID NO: 1577163 - RNA, 19 nt, Homo sapiens
  misc_RNA (1)...(19): siRNA sense strand
acaaacgaguucuacaugu

SEQ ID NO: 1577164 - RNA, 19 nt, Homo sapiens
  misc_RNA (1)...(19): siRNA sense strand
gaacaucugcaacacaaac

SEQ ID NO: 1577165 - RNA, 19 nt, Homo sapiens
  misc_RNA (1)...(19): siRNA sense strand
ggaagauugcugcacuaaa

SEQ ID NO: 1577166 - RNA, 19 nt, Homo sapiens
  misc_RNA (1)...(19): siRNA sense strand
ccacaagugcagugaaaga

SEQ ID NO: 1577167 - RNA, 19 nt, Homo sapiens
  misc_RNA (1)...(19): siRNA sense strand
ugauggcuacuacauauaa

SEQ ID NO: 1577168 - RNA, 19 nt, Homo sapiens
  misc_RNA (1)...(19): siRNA sense strand
uaugucaucuauggaauug

SEQ ID NO: 1577169 - RNA, 19 nt, Homo sapiens
  misc_RNA (1)...(19): siRNA sense strand
guguggauauccgacaaua

SEQ ID NO: 1577170 - RNA, 19 nt, Homo sapiens
  misc_RNA (1)...(19): siRNA sense strand
caagugcagugaaagaacu

SEQ ID NO: 1577171 - RNA, 19 nt, Homo sapiens
  misc_RNA (1)...(19): siRNA sense strand
uguaugggaucauucuguu

SEQ ID NO: 1577172 - RNA, 19 nt, Homo sapiens
  misc_RNA (1)...(19): siRNA sense strand
gcaacacaaacgaguucua

SEQ ID NO: 1577173 - RNA, 19 nt, Homo sapiens
  misc_RNA (1)...(19): siRNA sense strand
ggaaaauacugaacaaagc

SEQ ID NO: 1577174 - RNA, 19 nt, Homo sapiens
  misc_RNA (1)...(19): siRNA sense strand
ggagaacaucugcaacaca

SEQ ID NO: 1577175 - RNA, 19 nt, Homo sapiens
  misc_RNA (1)...(19): siRNA sense strand
gggaagauugcugcacuaa

SEQ ID NO: 1577176 - RNA, 19 nt, Homo sapiens
  misc_RNA (1)...(19): siRNA sense strand
gcaccguggcgauucuuga

SEQ ID NO: 1577177 - RNA, 19 nt, Homo sapiens
  misc_RNA (1)...(19): siRNA sense strand
ugaacaaagccaagagaga

SEQ ID NO: 1577178 - RNA, 19 nt, Homo sapiens
  misc_RNA (1)...(19): siRNA sense strand
ucucagcggugcccguguu

SEQ ID NO: 1577179 - RNA, 19 nt, Homo sapiens
  misc_RNA (1)...(19): siRNA sense strand
uuaagagucgggaagauug

SEQ ID NO: 1577180 - RNA, 19 nt, Homo sapiens
  misc_RNA (1)...(19): siRNA sense strand
caacacaaacgaguucuac

SEQ ID NO: 1577181 - RNA, 19 nt, Homo sapiens
  misc_RNA (1)...(19): siRNA sense strand
ucaagucaccgcagaccaa

SEQ ID NO: 1577182 - RNA, 19 nt, Homo sapiens
  misc_RNA (1)...(19): siRNA sense strand
ugagcgaggugauacaacu

SEQ ID NO: 1577183 - RNA, 19 nt, Homo sapiens
  misc_RNA (1)...(19): siRNA sense strand
cagcggugcccguguuuau

SEQ ID NO: 1577184 - RNA, 19 nt, Homo sapiens
  misc_RNA (1)...(19): siRNA sense strand
ugcaguaugucaucuaugg

SEQ ID NO: 1577185 - RNA, 19 nt, Homo sapiens
  misc_RNA (1)...(19): siRNA sense strand
cgggaagauugcugcacua

SEQ ID NO: 1577186 - RNA, 19 nt, Homo sapiens
  misc_RNA (1)...(19): siRNA sense strand
guaugucaucuauggaauu

SEQ ID NO: 1577187 - RNA, 19 nt, Homo sapiens
  misc_RNA (1)...(19): siRNA sense strand
cacaaacgaguucuacaug

SEQ ID NO: 1577188 - RNA, 19 nt, Homo sapiens
  misc_RNA (1)...(19): siRNA sense strand
ggcuggguguguuugguuu

SEQ ID NO: 1577189 - RNA, 19 nt, Homo sapiens
  misc_RNA (1)...(19): siRNA sense strand
gcuuguggccgaugcauca

SEQ ID NO: 1577190 - RNA, 19 nt, Homo sapiens
  misc_RNA (1)...(19): siRNA sense strand
acacaaacgaguucuacau

SEQ ID NO: 1577191 - RNA, 19 nt, Homo sapiens
  misc_RNA (1)...(19): siRNA sense strand
cauguccuaucaccuguuc

SEQ ID NO: 1577192 - RNA, 19 nt, Homo sapiens
  misc_RNA (1)...(19): siRNA sense strand
ucuauggaauugcguccuu

SEQ ID NO: 1577193 - RNA, 19 nt, Homo sapiens
  misc_RNA (1)...(19): siRNA sense strand
caguaugucaucuauggaa

SEQ ID NO: 1577194 - RNA, 19 nt, Homo sapiens
  misc_RNA (1)...(19): siRNA sense strand
acaugauggcuacuacaua

SEQ ID NO: 1577195 - RNA, 19 nt, Homo sapiens
  misc_RNA (1)...(19): siRNA sense strand
gaaacugcagccgaggaaa

SEQ ID NO: 1577196 - RNA, 19 nt, Homo sapiens
  misc_RNA (1)...(19): siRNA sense strand
gcggugcccguguuuaugu

SEQ ID NO: 1577197 - RNA, 19 nt, Homo sapiens
  misc_RNA (1)...(19): siRNA sense strand
cuucuuguaugggaucauu

SEQ ID NO: 1577198 - RNA, 19 nt, Homo sapiens
  misc_RNA (1)...(19): siRNA sense strand
ggguguguuugguuucuca

SEQ ID NO: 1577199 - RNA, 19 nt, Homo sapiens
  misc_RNA (1)...(19): siRNA sense strand
augcaucaguggaauguuc

SEQ ID NO: 1577200 - RNA, 19 nt, Homo sapiens
  misc_RNA (1)...(19): siRNA sense strand
cuauggaauugcguccuuu

SEQ ID NO: 1577201 - RNA, 19 nt, Homo sapiens
  misc_RNA (1)...(19): siRNA sense strand
cgaggaaaauacugaacaa

SEQ ID NO: 1577202 - RNA, 19 nt, Homo sapiens
  misc_RNA (1)...(19): siRNA sense strand
gcgaggugauacaacugau

SEQ ID NO: 1577203 - RNA, 19 nt, Homo sapiens
  misc_RNA (1)...(19): siRNA sense strand
ucaguggaauguucguuuu

SEQ ID NO: 1577204 - RNA, 19 nt, Homo sapiens
  misc_RNA (1)...(19): siRNA sense strand
uggcgauucuugagcaaca

SEQ ID NO: 1577205 - RNA, 19 nt, Homo sapiens
  misc_RNA (1)...(19): siRNA sense strand
gaagccagccauggaaacu

SEQ ID NO: 1577206 - RNA, 19 nt, Homo sapiens
  misc_RNA (1)...(19): siRNA sense strand
uggcuacuacauauaacua

SEQ ID NO: 1577207 - RNA, 19 nt, Homo sapiens
  misc_RNA (1)...(19): siRNA sense strand
cacaagugcagugaaagaa

SEQ ID NO: 1577208 - RNA, 19 nt, Homo sapiens
  misc_RNA (1)...(19): siRNA sense strand
gauggcuacuacauauaac

SEQ ID NO: 1577209 - RNA, 19 nt, Homo sapiens
  misc_RNA (1)...(19): siRNA sense strand
gcccugcugaucuacauga

SEQ ID NO: 1577210 - RNA, 19 nt, Homo sapiens
  misc_RNA (1)...(19): siRNA sense strand
guguggagcagaucugugu

SEQ ID NO: 1577211 - RNA, 19 nt, Homo sapiens
  misc_RNA (1)...(19): siRNA sense strand
gaaaguggccauucaaauu

SEQ ID NO: 1577212 - RNA, 19 nt, Homo sapiens
  misc_RNA (1)...(19): siRNA sense strand
gaaggaacaucaacaugaa

SEQ ID NO: 1577213 - RNA, 19 nt, Homo sapiens
  misc_RNA (1)...(19): siRNA sense strand
gaaaucacauucacucaug

SEQ ID NO: 1577214 - RNA, 19 nt, Homo sapiens
  misc_RNA (1)...(19): siRNA sense strand
gaagaagguugcaguuguu

SEQ ID NO: 1577215 - RNA, 19 nt, Homo sapiens
  misc_RNA (1)...(19): siRNA sense strand
ggaagaagguugcaguugu

SEQ ID NO: 1577216 - RNA, 19 nt, Homo sapiens
  misc_RNA (1)...(19): siRNA sense strand
gaaggaaaguggccauuca

SEQ ID NO: 1577217 - RNA, 19 nt, Homo sapiens
  misc_RNA (1)...(19): siRNA sense strand
gagcaggcuucuucucaua

SEQ ID NO: 1577218 - RNA, 19 nt, Homo sapiens
  misc_RNA (1)...(19): siRNA sense strand
ggaauuauaugagaacuuc

SEQ ID NO: 1577219 - RNA, 19 nt, Homo sapiens
  misc_RNA (1)...(19): siRNA sense strand
gaagcacugugaauucaaa

SEQ ID NO: 1577220 - RNA, 19 nt, Homo sapiens
  misc_RNA (1)...(19): siRNA sense strand
gaagaaccguuaacaggau

SEQ ID NO: 1577221 - RNA, 19 nt, Homo sapiens
  misc_RNA (1)...(19): siRNA sense strand
gaguuucccuuaugaauau

SEQ ID NO: 1577222 - RNA, 19 nt, Homo sapiens
  misc_RNA (1)...(19): siRNA sense strand
ugacuuugaugggaaauua

SEQ ID NO: 1577223 - RNA, 19 nt, Homo sapiens
  misc_RNA (1)...(19): siRNA sense strand
gagaagcacugugaauuca

SEQ ID NO: 1577224 - RNA, 19 nt, Homo sapiens
  misc_RNA (1)...(19): siRNA sense strand
ggaguuucccuuaugaaua

SEQ ID NO: 1577225 - RNA, 19 nt, Homo sapiens
  misc_RNA (1)...(19): siRNA sense strand
gagauuggaguuucccuua

SEQ ID NO: 1577226 - RNA, 19 nt, Homo sapiens
  misc_RNA (1)...(19): siRNA sense strand
ggagagaaaccuuauuugu

SEQ ID NO: 1577227 - RNA, 19 nt, Homo sapiens
  misc_RNA (1)...(19): siRNA sense strand
gcucuaagcacuaugacua

SEQ ID NO: 1577228 - RNA, 19 nt, Homo sapiens
  misc_RNA (1)...(19): siRNA sense strand
ggacuacaauucccaaagg

SEQ ID NO: 1577229 - RNA, 19 nt, Homo sapiens
  misc_RNA (1)...(19): siRNA sense strand
gaagaugggugggaaggau

SEQ ID NO: 1577230 - RNA, 19 nt, Homo sapiens
  misc_RNA (1)...(19): siRNA sense strand
agagaaaccuuauuugucu

SEQ ID NO: 1577231 - RNA, 19 nt, Homo sapiens
  misc_RNA (1)...(19): siRNA sense strand
ggagaucaauggcucaaag

SEQ ID NO: 1577232 - RNA, 19 nt, Homo sapiens
  misc_RNA (1)...(19): siRNA sense strand
gaacaucaacaugaagaaa

SEQ ID NO: 1577233 - RNA, 19 nt, Homo sapiens
  misc_RNA (1)...(19): siRNA sense strand
ccacaagcccugacuuuga

SEQ ID NO: 1577234 - RNA, 19 nt, Homo sapiens
  misc_RNA (1)...(19): siRNA sense strand
gccaaggacauuuauuaua

SEQ ID NO: 1577235 - RNA, 19 nt, Homo sapiens
  misc_RNA (1)...(19): siRNA sense strand
ggagaagcacugugaauuc

SEQ ID NO: 1577236 - RNA, 19 nt, Homo sapiens
  misc_RNA (1)...(19): siRNA sense strand
agacugugcuaccaucuuu

SEQ ID NO: 1577237 - RNA, 19 nt, Homo sapiens
  misc_RNA (1)...(19): siRNA sense strand
cuucauaggucuugagguu

SEQ ID NO: 1577238 - RNA, 19 nt, Homo sapiens
  misc_RNA (1)...(19): siRNA sense strand
ggaggaaaucaaggaauua

SEQ ID NO: 1577239 - RNA, 19 nt, Homo sapiens
  misc_RNA (1)...(19): siRNA sense strand
gcuaccaucuuugcucuaa

SEQ ID NO: 1577240 - RNA, 19 nt, Homo sapiens
  misc_RNA (1)...(19): siRNA sense strand
ggaaaguggccauucaaau

SEQ ID NO: 1577241 - RNA, 19 nt, Homo sapiens
  misc_RNA (1)...(19): siRNA sense strand
ucacgggcauuguagcuuu

SEQ ID NO: 1577242 - RNA, 19 nt, Homo sapiens
  misc_RNA (1)...(19): siRNA sense strand
ugaaggaacaucaacauga

SEQ ID NO: 1577243 - RNA, 19 nt, Homo sapiens
  misc_RNA (1)...(19): siRNA sense strand
gauuggaguuucccuuaug

SEQ ID NO: 1577244 - RNA, 19 nt, Homo sapiens
  misc_RNA (1)...(19): siRNA sense strand
gggcggagcuauugauuuu

SEQ ID NO: 1577245 - RNA, 19 nt, Homo sapiens
  misc_RNA (1)...(19): siRNA sense strand
gagagaaaccuuauuuguc

SEQ ID NO: 1577246 - RNA, 19 nt, Homo sapiens
  misc_RNA (1)...(19): siRNA sense strand
ggaugcaguuguuggaaga

SEQ ID NO: 1577247 - RNA, 19 nt, Homo sapiens
  misc_RNA (1)...(19): siRNA sense strand
agauauugcuggugaauuc

SEQ ID NO: 1577248 - RNA, 19 nt, Homo sapiens
  misc_RNA (1)...(19): siRNA sense strand
gaugucaccugcuuucucu

SEQ ID NO: 1577249 - RNA, 19 nt, Homo sapiens
  misc_RNA (1)...(19): siRNA sense strand
ugggaaggauuucagcuuu

SEQ ID NO: 1577250 - RNA, 19 nt, Homo sapiens
  misc_RNA (1)...(19): siRNA sense strand
gcaguuguucugauggaua

SEQ ID NO: 1577251 - RNA, 19 nt, Homo sapiens
  misc_RNA (1)...(19): siRNA sense strand
gcacaaugguagcaagaac

SEQ ID NO: 1577252 - RNA, 19 nt, Homo sapiens
  misc_RNA (1)...(19): siRNA sense strand
guauuaaacccaucuaagu

SEQ ID NO: 1577253 - RNA, 19 nt, Homo sapiens
  misc_RNA (1)...(19): siRNA sense strand
aggaggaaaucaaggaauu

SEQ ID NO: 1577254 - RNA, 19 nt, Homo sapiens
  misc_RNA (1)...(19): siRNA sense strand
gcacugugaauucaaacaa

SEQ ID NO: 1577255 - RNA, 19 nt, Homo sapiens
  misc_RNA (1)...(19): siRNA sense strand
ggagcaggcuucuucucau

SEQ ID NO: 1577256 - RNA, 19 nt, Homo sapiens
  misc_RNA (1)...(19): siRNA sense strand
aaaguggccauucaaauug

SEQ ID NO: 1577257 - RNA, 19 nt, Homo sapiens
  misc_RNA (1)...(19): siRNA sense strand
gggaaggauuucagcuuuc

SEQ ID NO: 1577258 - RNA, 19 nt, Homo sapiens
  misc_RNA (1)...(19): siRNA sense strand
gaacauucaagaagaugau

SEQ ID NO: 1577259 - RNA, 19 nt, Homo sapiens
  misc_RNA (1)...(19): siRNA sense strand
ucagaacauucaagaagau

SEQ ID NO: 1577260 - RNA, 19 nt, Homo sapiens
  misc_RNA (1)...(19): siRNA sense strand
gguuagagauuggaguuuc

SEQ ID NO: 1577261 - RNA, 19 nt, Homo sapiens
  misc_RNA (1)...(19): siRNA sense strand
gcaggcuucuucucauauc

SEQ ID NO: 1577262 - RNA, 19 nt, Homo sapiens
  misc_RNA (1)...(19): siRNA sense strand
caucagguauucuggucaa

SEQ ID NO: 1577263 - RNA, 19 nt, Homo sapiens
  misc_RNA (1)...(19): siRNA sense strand
cugccaaggacauuuauua

SEQ ID NO: 1577264 - RNA, 19 nt, Homo sapiens
  misc_RNA (1)...(19): siRNA sense strand
cacaagcccugacuuugau

SEQ ID NO: 1577265 - RNA, 19 nt, Homo sapiens
  misc_RNA (1)...(19): siRNA sense strand
gaaaccacugggauucaaa

SEQ ID NO: 1577266 - RNA, 19 nt, Homo sapiens
  misc_RNA (1)...(19): siRNA sense strand
ucauaggucuugagguugu

SEQ ID NO: 1577267 - RNA, 19 nt, Homo sapiens
  misc_RNA (1)...(19): siRNA sense strand
uuaagaagaccaagaagau

SEQ ID NO: 1577268 - RNA, 19 nt, Homo sapiens
  misc_RNA (1)...(19): siRNA sense strand
aaacccaucuaaguuaaug

SEQ ID NO: 1577269 - RNA, 19 nt, Homo sapiens
  misc_RNA (1)...(19): siRNA sense strand
cugcagcucuucacagaau

SEQ ID NO: 1577270 - RNA, 19 nt, Homo sapiens
  misc_RNA (1)...(19): siRNA sense strand
gagcagaugaugccaugga

SEQ ID NO: 1577271 - RNA, 19 nt, Homo sapiens
  misc_RNA (1)...(19): siRNA sense strand
gaccacauccgagaucuug

SEQ ID NO: 1577272 - RNA, 19 nt, Homo sapiens
  misc_RNA (1)...(19): siRNA sense strand
gaggaaaucaaggaauuau

SEQ ID NO: 1577273 - RNA, 19 nt, Homo sapiens
  misc_RNA (1)...(19): siRNA sense strand
gaagccaggugggaagaag

SEQ ID NO: 1577274 - RNA, 19 nt, Homo sapiens
  misc_RNA (1)...(19): siRNA sense strand
aggccucacuggcuucaua

SEQ ID NO: 1577275 - RNA, 19 nt, Homo sapiens
  misc_RNA (1)...(19): siRNA sense strand
ugaauucaaagagcaguua

SEQ ID NO: 1577276 - RNA, 19 nt, Homo sapiens
  misc_RNA (1)...(19): siRNA sense strand
ggccacaagcccugacuuu

SEQ ID NO: 1577277 - RNA, 19 nt, Homo sapiens
  misc_RNA (1)...(19): siRNA sense strand
ugugagggaugcaguuguu

SEQ ID NO: 1577278 - RNA, 19 nt, Homo sapiens
  misc_RNA (1)...(19): siRNA sense strand
ggaaggauuucagcuuucg

SEQ ID NO: 1577279 - RNA, 19 nt, Homo sapiens
  misc_RNA (1)...(19): siRNA sense strand
ugacccagaagaaccguua

SEQ ID NO: 1577280 - RNA, 19 nt, Homo sapiens
  misc_RNA (1)...(19): siRNA sense strand
gaggagaagcacugugaau

SEQ ID NO: 1577281 - RNA, 19 nt, Homo sapiens
  misc_RNA (1)...(19): siRNA sense strand
uagaggagaagcacuguga

SEQ ID NO: 1577282 - RNA, 19 nt, Homo sapiens
  misc_RNA (1)...(19): siRNA sense strand
caacauggaagagguuugu

SEQ ID NO: 1577283 - RNA, 19 nt, Homo sapiens
  misc_RNA (1)...(19): siRNA sense strand
gaagguugcaguuguucug

SEQ ID NO: 1577284 - RNA, 19 nt, Homo sapiens
  misc_RNA (1)...(19): siRNA sense strand
ugucaccugcuuucucuua

SEQ ID NO: 1577285 - RNA, 19 nt, Homo sapiens
  misc_RNA (1)...(19): siRNA sense strand
guuuacaggugaaggaaca

SEQ ID NO: 1577286 - RNA, 19 nt, Homo sapiens
  misc_RNA (1)...(19): siRNA sense strand
gcuguucacgggcauugua

SEQ ID NO: 1577287 - RNA, 19 nt, Homo sapiens
  misc_RNA (1)...(19): siRNA sense strand
gggcaaguccuucauucug

SEQ ID NO: 1577288 - RNA, 19 nt, Homo sapiens
  misc_RNA (1)...(19): siRNA sense strand
gacuacaauucccaaagga

SEQ ID NO: 1577289 - RNA, 19 nt, Homo sapiens
  misc_RNA (1)...(19): siRNA sense strand
gguugcaguuguucugaug

SEQ ID NO: 1577290 - RNA, 19 nt, Homo sapiens
  misc_RNA (1)...(19): siRNA sense strand
gaacuucugcaagcacaau

SEQ ID NO: 1577291 - RNA, 19 nt, Homo sapiens
  misc_RNA (1)...(19): siRNA sense strand
ggaggaggaaaucaaggaa

SEQ ID NO: 1577292 - RNA, 19 nt, Homo sapiens
  misc_RNA (1)...(19): siRNA sense strand
uaacaacauggaagagguu

SEQ ID NO: 1577293 - RNA, 19 nt, Homo sapiens
  misc_RNA (1)...(19): siRNA sense strand
gggaagaagguugcaguug

SEQ ID NO: 1577294 - RNA, 19 nt, Homo sapiens
  misc_RNA (1)...(19): siRNA sense strand
gggagagaaaccuuauuug

SEQ ID NO: 1577295 - RNA, 19 nt, Homo sapiens
  misc_RNA (1)...(19): siRNA sense strand
ggaacaucaacaugaagaa

SEQ ID NO: 1577296 - RNA, 19 nt, Homo sapiens
  misc_RNA (1)...(19): siRNA sense strand
agaaaccacugggauucaa

SEQ ID NO: 1577297 - RNA, 19 nt, Homo sapiens
  misc_RNA (1)...(19): siRNA sense strand
cucagaacauucaagaaga

SEQ ID NO: 1577298 - RNA, 19 nt, Homo sapiens
  misc_RNA (1)...(19): siRNA sense strand
ccucugccaaggacauuua

SEQ ID NO: 1577299 - RNA, 19 nt, Homo sapiens
  misc_RNA (1)...(19): siRNA sense strand
gauuucagcuuucguuacc

SEQ ID NO: 1577300 - RNA, 19 nt, Homo sapiens
  misc_RNA (1)...(19): siRNA sense strand
gugaaagacugugcuacca

SEQ ID NO: 1577301 - RNA, 19 nt, Homo sapiens
  misc_RNA (1)...(19): siRNA sense strand
ucaaaucuggagugaaguu

SEQ ID NO: 1577302 - RNA, 19 nt, Homo sapiens
  misc_RNA (1)...(19): siRNA sense strand
aacuugcucuggaccauuu

SEQ ID NO: 1577303 - RNA, 19 nt, Homo sapiens
  misc_RNA (1)...(19): siRNA sense strand
cuacgauacuuauauucuc

SEQ ID NO: 1577304 - RNA, 19 nt, Homo sapiens
  misc_RNA (1)...(19): siRNA sense strand
ugcugaagccaacaacuua

SEQ ID NO: 1577305 - RNA, 19 nt, Homo sapiens
  misc_RNA (1)...(19): siRNA sense strand
uaagaagaccaagaagaug

SEQ ID NO: 1577306 - RNA, 19 nt, Homo sapiens
  misc_RNA (1)...(19): siRNA sense strand
uaucucagaacauucaaga

SEQ ID NO: 1577307 - RNA, 19 nt, Homo sapiens
  misc_RNA (1)...(19): siRNA sense strand
gcuacgauacuuauauucu

SEQ ID NO: 1577308 - RNA, 19 nt, Homo sapiens
  misc_RNA (1)...(19): siRNA sense strand
uaugguuggacuacuguua

SEQ ID NO: 1577309 - RNA, 19 nt, Homo sapiens
  misc_RNA (1)...(19): siRNA sense strand
caaaggacgguagcacuca

SEQ ID NO: 1577310 - RNA, 19 nt, Homo sapiens
  misc_RNA (1)...(19): siRNA sense strand
gguuguagcccaguuguuc

SEQ ID NO: 1577311 - RNA, 19 nt, Homo sapiens
  misc_RNA (1)...(19): siRNA sense strand
guagacagauuuaugaaug

SEQ ID NO: 1577312 - RNA, 19 nt, Homo sapiens
  misc_RNA (1)...(19): siRNA sense strand
gaugaaggcuuauaugagu

SEQ ID NO: 1577313 - RNA, 19 nt, Homo sapiens
  misc_RNA (1)...(19): siRNA sense strand
gcaaugacaucucccacaa

SEQ ID NO: 1577314 - RNA, 19 nt, Homo sapiens
  misc_RNA (1)...(19): siRNA sense strand
caaacaaaguccacaauca

SEQ ID NO: 1577315 - RNA, 19 nt, Homo sapiens
  misc_RNA (1)...(19): siRNA sense strand
cacaaacgcuccacagaaa

SEQ ID NO: 1577316 - RNA, 19 nt, Homo sapiens
  misc_RNA (1)...(19): siRNA sense strand
ccauguggcugcaggauau

SEQ ID NO: 1577317 - RNA, 19 nt, Homo sapiens
  misc_RNA (1)...(19): siRNA sense strand
guauagaguagacagauuu

SEQ ID NO: 1577318 - RNA, 19 nt, Homo sapiens
  misc_RNA (1)...(19): siRNA sense strand
aacaagggcuuucuucuca

SEQ ID NO: 1577319 - RNA, 19 nt, Homo sapiens
  misc_RNA (1)...(19): siRNA sense strand
ggaccaagaucagcacagu

SEQ ID NO: 1577320 - RNA, 19 nt, Homo sapiens
  misc_RNA (1)...(19): siRNA sense strand
cuucagauuuccaaaguga

SEQ ID NO: 1577321 - RNA, 19 nt, Homo sapiens
  misc_RNA (1)...(19): siRNA sense strand
caaaguccacaaucaggua

SEQ ID NO: 1577322 - RNA, 19 nt, Homo sapiens
  misc_RNA (1)...(19): siRNA sense strand
ucacaaacgcuccacagaa

SEQ ID NO: 1577323 - RNA, 19 nt, Homo sapiens
  misc_RNA (1)...(19): siRNA sense strand
ggcccaagccuaucugaaa

SEQ ID NO: 1577324 - RNA, 19 nt, Homo sapiens
  misc_RNA (1)...(19): siRNA sense strand
acagaaaggucagucguau

SEQ ID NO: 1577325 - RNA, 19 nt, Homo sapiens
  misc_RNA (1)...(19): siRNA sense strand
cccacaagcuucagauuuc

SEQ ID NO: 1577326 - RNA, 19 nt, Homo sapiens
  misc_RNA (1)...(19): siRNA sense strand
caagaucagcacagugaaa

SEQ ID NO: 1577327 - RNA, 19 nt, Homo sapiens
  misc_RNA (1)...(19): siRNA sense strand
ugacaucucccacaagcuu

SEQ ID NO: 1577328 - RNA, 19 nt, Homo sapiens
  misc_RNA (1)...(19): siRNA sense strand
aaacccauuucgagccuuu

SEQ ID NO: 1577329 - RNA, 19 nt, Homo sapiens
  misc_RNA (1)...(19): siRNA sense strand
cuccagcccucaaguggua

SEQ ID NO: 1577330 - RNA, 19 nt, Homo sapiens
  misc_RNA (1)...(19): siRNA sense strand
agaguagacagauuuauga

SEQ ID NO: 1577331 - RNA, 19 nt, Homo sapiens
  misc_RNA (1)...(19): siRNA sense strand
caacaagggcuuucuucuc

SEQ ID NO: 1577332 - RNA, 19 nt, Homo sapiens
  misc_RNA (1)...(19): siRNA sense strand
agaaaggucagucguauag

SEQ ID NO: 1577333 - RNA, 19 nt, Homo sapiens
  misc_RNA (1)...(19): siRNA sense strand
cguauagaguagacagauu

SEQ ID NO: 1577334 - RNA, 19 nt, Homo sapiens
  misc_RNA (1)...(19): siRNA sense strand
gcgcgcaggugaagcucuu

SEQ ID NO: 1577335 - RNA, 19 nt, Homo sapiens
  misc_RNA (1)...(19): siRNA sense strand
gcccaagccuaucugaaag

SEQ ID NO: 1577336 - RNA, 19 nt, Homo sapiens
  misc_RNA (1)...(19): siRNA sense strand
ggaugaaggcuuauaugag

SEQ ID NO: 1577337 - RNA, 19 nt, Homo sapiens
  misc_RNA (1)...(19): siRNA sense strand
gguguauguuggauuuguu

SEQ ID NO: 1577338 - RNA, 19 nt, Homo sapiens
  misc_RNA (1)...(19): siRNA sense strand
cagaaaggucagucguaua

SEQ ID NO: 1577339 - RNA, 19 nt, Homo sapiens
  misc_RNA (1)...(19): siRNA sense strand
aagccuaucugaaagucaa

SEQ ID NO: 1577340 - RNA, 19 nt, Homo sapiens
  misc_RNA (1)...(19): siRNA sense strand
uagaguagacagauuuaug

SEQ ID NO: 1577341 - RNA, 19 nt, Homo sapiens
  misc_RNA (1)...(19): siRNA sense strand
caagggcuuucuucucaag

SEQ ID NO: 1577342 - RNA, 19 nt, Homo sapiens
  misc_RNA (1)...(19): siRNA sense strand
guacaacaagggcuuucuu

SEQ ID NO: 1577343 - RNA, 19 nt, Homo sapiens
  misc_RNA (1)...(19): siRNA sense strand
ggucagucguauagaguag

SEQ ID NO: 1577344 - RNA, 19 nt, Homo sapiens
  misc_RNA (1)...(19): siRNA sense strand
aaaggucagucguauagag

SEQ ID NO: 1577345 - RNA, 19 nt, Homo sapiens
  misc_RNA (1)...(19): siRNA sense strand
ggcagaauguggagauguc

SEQ ID NO: 1577346 - RNA, 19 nt, Homo sapiens
  misc_RNA (1)...(19): siRNA sense strand
uuugguguauguuggauuu

SEQ ID NO: 1577347 - RNA, 19 nt, Homo sapiens
  misc_RNA (1)...(19): siRNA sense strand
gccaaaauccccaaacaaa

SEQ ID NO: 1577348 - RNA, 19 nt, Homo sapiens
  misc_RNA (1)...(19): siRNA sense strand
gaguagacagauuuaugaa

SEQ ID NO: 1577349 - RNA, 19 nt, Homo sapiens
  misc_RNA (1)...(19): siRNA sense strand
ccaaacaaaguccacaauc

SEQ ID NO: 1577350 - RNA, 19 nt, Homo sapiens
  misc_RNA (1)...(19): siRNA sense strand
gcagaaugcaggccuucga

SEQ ID NO: 1577351 - RNA, 19 nt, Homo sapiens
  misc_RNA (1)...(19): siRNA sense strand
aaacaaaguccacaaucag

SEQ ID NO: 1577352 - RNA, 19 nt, Homo sapiens
  misc_RNA (1)...(19): siRNA sense strand
gaucagcacagugaaaguc

SEQ ID NO: 1577353 - RNA, 19 nt, Homo sapiens
  misc_RNA (1)...(19): siRNA sense strand
aaaggaugaaggcuuauau

SEQ ID NO: 1577354 - RNA, 19 nt, Homo sapiens
  misc_RNA (1)...(19): siRNA sense strand
cacagaaaggucagucgua

SEQ ID NO: 1577355 - RNA, 19 nt, Homo sapiens
  misc_RNA (1)...(19): siRNA sense strand
ccacaaucagguauggaaa

SEQ ID NO: 1577356 - RNA, 19 nt, Homo sapiens
  misc_RNA (1)...(19): siRNA sense strand
gaaaggucagucguauaga

SEQ ID NO: 1577357 - RNA, 19 nt, Homo sapiens
  misc_RNA (1)...(19): siRNA sense strand
aggaugaaggcuuauauga

SEQ ID NO: 1577358 - RNA, 19 nt, Homo sapiens
  misc_RNA (1)...(19): siRNA sense strand
gaaaguccaaggcaaugac

SEQ ID NO: 1577359 - RNA, 19 nt, Homo sapiens
  misc_RNA (1)...(19): siRNA sense strand
ggugacugaugccaacuac

SEQ ID NO: 1577360 - RNA, 19 nt, Homo sapiens
  misc_RNA (1)...(19): siRNA sense strand
ucccacaagcuucagauuu

SEQ ID NO: 1577361 - RNA, 19 nt, Homo sapiens
  misc_RNA (1)...(19): siRNA sense strand
uagacagauuuaugaaugg

SEQ ID NO: 1577362 - RNA, 19 nt, Homo sapiens
  misc_RNA (1)...(19): siRNA sense strand
caaaauccccaaacaaagu

SEQ ID NO: 1577363 - RNA, 19 nt, Homo sapiens
  misc_RNA (1)...(19): siRNA sense strand
ccaagccuaucugaaaguc

SEQ ID NO: 1577364 - RNA, 19 nt, Homo sapiens
  misc_RNA (1)...(19): siRNA sense strand
cagaaugcaggccuucgaa

SEQ ID NO: 1577365 - RNA, 19 nt, Homo sapiens
  misc_RNA (1)...(19): siRNA sense strand
uaucugaaagucaaugcaa

SEQ ID NO: 1577366 - RNA, 19 nt, Homo sapiens
  misc_RNA (1)...(19): siRNA sense strand
accaagaucagcacaguga

SEQ ID NO: 1577367 - RNA, 19 nt, Homo sapiens
  misc_RNA (1)...(19): siRNA sense strand
acaagggcuuucuucucaa

SEQ ID NO: 1577368 - RNA, 19 nt, Homo sapiens
  misc_RNA (1)...(19): siRNA sense strand
caaacgcuccacagaaagg

SEQ ID NO: 1577369 - RNA, 19 nt, Homo sapiens
  misc_RNA (1)...(19): siRNA sense strand
aagcaaaauuuaccgaguu

SEQ ID NO: 1577370 - RNA, 19 nt, Homo sapiens
  misc_RNA (1)...(19): siRNA sense strand
ugaaaguccaaggcaauga

SEQ ID NO: 1577371 - RNA, 19 nt, Homo sapiens
  misc_RNA (1)...(19): siRNA sense strand
gaagcucuugcccgacaga

SEQ ID NO: 1577372 - RNA, 19 nt, Homo sapiens
  misc_RNA (1)...(19): siRNA sense strand
agacagauuuaugaauggu

SEQ ID NO: 1577373 - RNA, 19 nt, Homo sapiens
  misc_RNA (1)...(19): siRNA sense strand
ugaaggauaugcacaagag

SEQ ID NO: 1577374 - RNA, 19 nt, Homo sapiens
  misc_RNA (1)...(19): siRNA sense strand
cggaaucgcuacccuaaag

SEQ ID NO: 1577375 - RNA, 19 nt, Homo sapiens
  misc_RNA (1)...(19): siRNA sense strand
gugcaggcuuccauugaaa

SEQ ID NO: 1577376 - RNA, 19 nt, Homo sapiens
  misc_RNA (1)...(19): siRNA sense strand
gaggagaaccugggcuuug

SEQ ID NO: 1577377 - RNA, 19 nt, Homo sapiens
  misc_RNA (1)...(19): siRNA sense strand
caacuacagcuaccucauc

SEQ ID NO: 1577378 - RNA, 19 nt, Homo sapiens
  misc_RNA (1)...(19): siRNA sense strand
gcugugggcggaccuuuga

SEQ ID NO: 1577379 - RNA, 19 nt, Homo sapiens
  misc_RNA (1)...(19): siRNA sense strand
ugagcucacuggacacugu

SEQ ID NO: 1577380 - RNA, 19 nt, Homo sapiens
  misc_RNA (1)...(19): siRNA sense strand
cuacaacccguuccugaga

SEQ ID NO: 1577381 - RNA, 19 nt, Homo sapiens
  misc_RNA (1)...(19): siRNA sense strand
acagcuaccucaucaucga

SEQ ID NO: 1577382 - RNA, 19 nt, Homo sapiens
  misc_RNA (1)...(19): siRNA sense strand
ugugcaggcuuccauugaa

SEQ ID NO: 1577383 - RNA, 19 nt, Homo sapiens
  misc_RNA (1)...(19): siRNA sense strand
uacaacccguuccugagaa

SEQ ID NO: 1577384 - RNA, 19 nt, Homo sapiens
  misc_RNA (1)...(19): siRNA sense strand
gcugaaggauaugcacaag

SEQ ID NO: 1577385 - RNA, 19 nt, Homo sapiens
  misc_RNA (1)...(19): siRNA sense strand
cuacagcuaccucaucauc

SEQ ID NO: 1577386 - RNA, 19 nt, Homo sapiens
  misc_RNA (1)...(19): siRNA sense strand
gauaugcacaagagcaagu

SEQ ID NO: 1577387 - RNA, 19 nt, Homo sapiens
  misc_RNA (1)...(19): siRNA sense strand
ggcuacaccuggccacaca

SEQ ID NO: 1577388 - RNA, 19 nt, Homo sapiens
  misc_RNA (1)...(19): siRNA sense strand
aacuacagcuaccucauca

SEQ ID NO: 1577389 - RNA, 19 nt, Homo sapiens
  misc_RNA (1)...(19): siRNA sense strand
cacaaggccaucuggucua

SEQ ID NO: 1577390 - RNA, 19 nt, Homo sapiens
  misc_RNA (1)...(19): siRNA sense strand
ucaccuuggucgccauucu

SEQ ID NO: 1577391 - RNA, 19 nt, Homo sapiens
  misc_RNA (1)...(19): siRNA sense strand
ugaaggauaugcacaagag

SEQ ID NO: 1577392 - RNA, 19 nt, Homo sapiens
  misc_RNA (1)...(19): siRNA sense strand
cggaaucgcuacccuaaag

SEQ ID NO: 1577393 - RNA, 19 nt, Homo sapiens
  misc_RNA (1)...(19): siRNA sense strand
gugcaggcuuccauugaaa

SEQ ID NO: 1577394 - RNA, 19 nt, Homo sapiens
  misc_RNA (1)...(19): siRNA sense strand
gaggagaaccugggcuuug

SEQ ID NO: 1577395 - RNA, 19 nt, Homo sapiens
  misc_RNA (1)...(19): siRNA sense strand
caacuacagcuaccucauc

SEQ ID NO: 1577396 - RNA, 19 nt, Homo sapiens
  misc_RNA (1)...(19): siRNA sense strand
gcugugggcggaccuuuga

SEQ ID NO: 1577397 - RNA, 19 nt, Homo sapiens
  misc_RNA (1)...(19): siRNA sense strand
ugagcucacuggacacugu

SEQ ID NO: 1577398 - RNA, 19 nt, Homo sapiens
  misc_RNA (1)...(19): siRNA sense strand
cuacaacccguuccugaga

SEQ ID NO: 1577399 - RNA, 19 nt, Homo sapiens
  misc_RNA (1)...(19): siRNA sense strand
acagcuaccucaucaucga

SEQ ID NO: 1577400 - RNA, 19 nt, Homo sapiens
  misc_RNA (1)...(19): siRNA sense strand
ugugcaggcuuccauugaa

SEQ ID NO: 1577401 - RNA, 19 nt, Homo sapiens
  misc_RNA (1)...(19): siRNA sense strand
uacaacccguuccugagaa

SEQ ID NO: 1577402 - RNA, 19 nt, Homo sapiens
  misc_RNA (1)...(19): siRNA sense strand
gcugaaggauaugcacaag

SEQ ID NO: 1577403 - RNA, 19 nt, Homo sapiens
  misc_RNA (1)...(19): siRNA sense strand
cuacagcuaccucaucauc

SEQ ID NO: 1577404 - RNA, 19 nt, Homo sapiens
  misc_RNA (1)...(19): siRNA sense strand
gauaugcacaagagcaagu

SEQ ID NO: 1577405 - RNA, 19 nt, Homo sapiens
  misc_RNA (1)...(19): siRNA sense strand
ggcuacaccuggccacaca

SEQ ID NO: 1577406 - RNA, 19 nt, Homo sapiens
  misc_RNA (1)...(19): siRNA sense strand
aacuacagcuaccucauca

SEQ ID NO: 1577407 - RNA, 19 nt, Homo sapiens
  misc_RNA (1)...(19): siRNA sense strand
cacaaggccaucuggucua

SEQ ID NO: 1577408 - RNA, 19 nt, Homo sapiens
  misc_RNA (1)...(19): siRNA sense strand
ucaccuuggucgccauucu

SEQ ID NO: 1577409 - RNA, 19 nt, Homo sapiens
  misc_RNA (1)...(19): siRNA sense strand
gcacgaggcugucacaaca

SEQ ID NO: 1577410 - RNA, 19 nt, Homo sapiens
  misc_RNA (1)...(19): siRNA sense strand
gcacuacaaugcacucuac

SEQ ID NO: 1577411 - RNA, 19 nt, Homo sapiens
  misc_RNA (1)...(19): siRNA sense strand
guacuccuccuuugacuuc

SEQ ID NO: 1577412 - RNA, 19 nt, Homo sapiens
  misc_RNA (1)...(19): siRNA sense strand
gaugagcuggucagggaua

SEQ ID NO: 1577413 - RNA, 19 nt, Homo sapiens
  misc_RNA (1)...(19): siRNA sense strand
gaaggacccaggcaucauc

SEQ ID NO: 1577414 - RNA, 19 nt, Homo sapiens
  misc_RNA (1)...(19): siRNA sense strand
gcagauacuggagcaacua

SEQ ID NO: 1577415 - RNA, 19 nt, Homo sapiens
  misc_RNA (1)...(19): siRNA sense strand
gcucggagucggugaugaa

SEQ ID NO: 1577416 - RNA, 19 nt, Homo sapiens
  misc_RNA (1)...(19): siRNA sense strand
cggagucggugaugaaugg

SEQ ID NO: 1577417 - RNA, 19 nt, Homo sapiens
  misc_RNA (1)...(19): siRNA sense strand
caagcuguacuccuccuuu

SEQ ID NO: 1577418 - RNA, 19 nt, Homo sapiens
  misc_RNA (1)...(19): siRNA sense strand
uguggacccugagaaguuu

SEQ ID NO: 1577419 - RNA, 19 nt, Homo sapiens
  misc_RNA (1)...(19): siRNA sense strand
aagcuguacuccuccuuug

SEQ ID NO: 1577420 - RNA, 19 nt, Homo sapiens
  misc_RNA (1)...(19): siRNA sense strand
acccaggcaucaucaggua

SEQ ID NO: 1577421 - RNA, 19 nt, Homo sapiens
  misc_RNA (1)...(19): siRNA sense strand
gcacgugguacuccagcaa

SEQ ID NO: 1577422 - RNA, 19 nt, Homo sapiens
  misc_RNA (1)...(19): siRNA sense strand
cagguggaccgccuccuaa

SEQ ID NO: 1577423 - RNA, 19 nt, Homo sapiens
  misc_RNA (1)...(19): siRNA sense strand
gucccugccuggugcacua

SEQ ID NO: 1577424 - RNA, 19 nt, Homo sapiens
  misc_RNA (1)...(19): siRNA sense strand
uggccaagguucccugcaa

SEQ ID NO: 1577425 - RNA, 19 nt, Homo sapiens
  misc_RNA (1)...(19): siRNA sense strand
ggaaggacccaggcaucau

SEQ ID NO: 1577426 - RNA, 19 nt, Homo sapiens
  misc_RNA (1)...(19): siRNA sense strand
ggcaucaucagguacaugu

SEQ ID NO: 1577427 - RNA, 19 nt, Homo sapiens
  misc_RNA (1)...(19): siRNA sense strand
acguggaccuggagcagaa

SEQ ID NO: 1577428 - RNA, 19 nt, Homo sapiens
  misc_RNA (1)...(19): siRNA sense strand
gaaggccuggauaguggaa

SEQ ID NO: 1577429 - RNA, 19 nt, Homo sapiens
  misc_RNA (1)...(19): siRNA sense strand
ggcagucuguggugauggu

SEQ ID NO: 1577430 - RNA, 19 nt, Homo sapiens
  misc_RNA (1)...(19): siRNA sense strand
gcaugaaacugagugaaga

SEQ ID NO: 1577431 - RNA, 19 nt, Homo sapiens
  misc_RNA (1)...(19): siRNA sense strand
cuacacggguuucaucaaa

SEQ ID NO: 1577432 - RNA, 19 nt, Homo sapiens
  misc_RNA (1)...(19): siRNA sense strand
ccuggugcauucagauuua

SEQ ID NO: 1577433 - RNA, 19 nt, Homo sapiens
  misc_RNA (1)...(19): siRNA sense strand
ucaagaaguucaugguugu

SEQ ID NO: 1577434 - RNA, 19 nt, Homo sapiens
  misc_RNA (1)...(19): siRNA sense strand
caucaaagugcaucugaaa

SEQ ID NO: 1577435 - RNA, 19 nt, Homo sapiens
  misc_RNA (1)...(19): siRNA sense strand
gaagaucgacagcuacaac

SEQ ID NO: 1577436 - RNA, 19 nt, Homo sapiens
  misc_RNA (1)...(19): siRNA sense strand
ucaagcagcugcacaucag

SEQ ID NO: 1577437 - RNA, 19 nt, Homo sapiens
  misc_RNA (1)...(19): siRNA sense strand
ugcaggagaucaagcagaa

SEQ ID NO: 1577438 - RNA, 19 nt, Homo sapiens
  misc_RNA (1)...(19): siRNA sense strand
gcaccaccaccgucaguga

SEQ ID NO: 1577439 - RNA, 19 nt, Homo sapiens
  misc_RNA (1)...(19): siRNA sense strand
caaagugcaucugaaacuc

SEQ ID NO: 1577440 - RNA, 19 nt, Homo sapiens
  misc_RNA (1)...(19): siRNA sense strand
agcagaagaucgacagcua

SEQ ID NO: 1577441 - RNA, 19 nt, Homo sapiens
  misc_RNA (1)...(19): siRNA sense strand
acacaaggacggacaagug

SEQ ID NO: 1577442 - RNA, 19 nt, Homo sapiens
  misc_RNA (1)...(19): siRNA sense strand
gcucaagaaguucaugguu

SEQ ID NO: 1577443 - RNA, 19 nt, Homo sapiens
  misc_RNA (1)...(19): siRNA sense strand
ggugcauucagauuuauuu

SEQ ID NO: 1577444 - RNA, 19 nt, Homo sapiens
  misc_RNA (1)...(19): siRNA sense strand
acacggguuucaucaaagu

SEQ ID NO: 1577445 - RNA, 19 nt, Homo sapiens
  misc_RNA (1)...(19): siRNA sense strand
ucaucaaagugcaucugaa

SEQ ID NO: 1577446 - RNA, 19 nt, Homo sapiens
  misc_RNA (1)...(19): siRNA sense strand
uuaagcggauacacaagga

SEQ ID NO: 1577447 - RNA, 19 nt, Homo sapiens
  misc_RNA (1)...(19): siRNA sense strand
ucaaagugcaucugaaacu

SEQ ID NO: 1577448 - RNA, 19 nt, Homo sapiens
  misc_RNA (1)...(19): siRNA sense strand
caggagaucaagcagaaga

SEQ ID NO: 1577449 - RNA, 19 nt, Homo sapiens
  misc_RNA (1)...(19): siRNA sense strand
ggacaauccccagaaguuu

SEQ ID NO: 1577450 - RNA, 19 nt, Homo sapiens
  misc_RNA (1)...(19): siRNA sense strand
ggcaugaaacugagugaag

SEQ ID NO: 1577451 - RNA, 19 nt, Homo sapiens
  misc_RNA (1)...(19): siRNA sense strand
cuacaacacgcgagagaag

SEQ ID NO: 1577452 - RNA, 19 nt, Homo sapiens
  misc_RNA (1)...(19): siRNA sense strand
ccacacugcaggagaucaa

SEQ ID NO: 1577453 - RNA, 19 nt, Homo sapiens
  misc_RNA (1)...(19): siRNA sense strand
acaacacgcgagagaagaa

SEQ ID NO: 1577454 - RNA, 19 nt, Homo sapiens
  misc_RNA (1)...(19): siRNA sense strand
cagaagaucgacagcuaca

SEQ ID NO: 1577455 - RNA, 19 nt, Homo sapiens
  misc_RNA (1)...(19): siRNA sense strand
gcaugaaacugagugaaga

SEQ ID NO: 1577456 - RNA, 19 nt, Homo sapiens
  misc_RNA (1)...(19): siRNA sense strand
cuacacggguuucaucaaa

SEQ ID NO: 1577457 - RNA, 19 nt, Homo sapiens
  misc_RNA (1)...(19): siRNA sense strand
ucaagaaguucaugguugu

SEQ ID NO: 1577458 - RNA, 19 nt, Homo sapiens
  misc_RNA (1)...(19): siRNA sense strand
caucaaagugcaucugaaa

SEQ ID NO: 1577459 - RNA, 19 nt, Homo sapiens
  misc_RNA (1)...(19): siRNA sense strand
gaagaucgacagcuacaac

SEQ ID NO: 1577460 - RNA, 19 nt, Homo sapiens
  misc_RNA (1)...(19): siRNA sense strand
ucaagcagcugcacaucag

SEQ ID NO: 1577461 - RNA, 19 nt, Homo sapiens
  misc_RNA (1)...(19): siRNA sense strand
ugcaggagaucaagcagaa

SEQ ID NO: 1577462 - RNA, 19 nt, Homo sapiens
  misc_RNA (1)...(19): siRNA sense strand
gcaccaccaccgucaguga

SEQ ID NO: 1577463 - RNA, 19 nt, Homo sapiens
  misc_RNA (1)...(19): siRNA sense strand
caaagugcaucugaaacuc

SEQ ID NO: 1577464 - RNA, 19 nt, Homo sapiens
  misc_RNA (1)...(19): siRNA sense strand
agcagaagaucgacagcua

SEQ ID NO: 1577465 - RNA, 19 nt, Homo sapiens
  misc_RNA (1)...(19): siRNA sense strand
acacaaggacggacaagug

SEQ ID NO: 1577466 - RNA, 19 nt, Homo sapiens
  misc_RNA (1)...(19): siRNA sense strand
gcucaagaaguucaugguu

SEQ ID NO: 1577467 - RNA, 19 nt, Homo sapiens
  misc_RNA (1)...(19): siRNA sense strand
acacggguuucaucaaagu

SEQ ID NO: 1577468 - RNA, 19 nt, Homo sapiens
  misc_RNA (1)...(19): siRNA sense strand
ucaucaaagugcaucugaa

SEQ ID NO: 1577469 - RNA, 19 nt, Homo sapiens
  misc_RNA (1)...(19): siRNA sense strand
uuaagcggauacacaagga

SEQ ID NO: 1577470 - RNA, 19 nt, Homo sapiens
  misc_RNA (1)...(19): siRNA sense strand
ucaaagugcaucugaaacu

SEQ ID NO: 1577471 - RNA, 19 nt, Homo sapiens
  misc_RNA (1)...(19): siRNA sense strand
caggagaucaagcagaaga

SEQ ID NO: 1577472 - RNA, 19 nt, Homo sapiens
  misc_RNA (1)...(19): siRNA sense strand
ggacaauccccagaaguuu

SEQ ID NO: 1577473 - RNA, 19 nt, Homo sapiens
  misc_RNA (1)...(19): siRNA sense strand
cuacaacacgcgagagaag

SEQ ID NO: 1577474 - RNA, 19 nt, Homo sapiens
  misc_RNA (1)...(19): siRNA sense strand
ccacacugcaggagaucaa

SEQ ID NO: 1577475 - RNA, 19 nt, Homo sapiens
  misc_RNA (1)...(19): siRNA sense strand
ggcaugaaacugagugaag

SEQ ID NO: 1577476 - RNA, 19 nt, Homo sapiens
  misc_RNA (1)...(19): siRNA sense strand
acaacacgcgagagaagaa

SEQ ID NO: 1577477 - RNA, 19 nt, Homo sapiens
  misc_RNA (1)...(19): siRNA sense strand
cagaagaucgacagcuaca

SEQ ID NO: 1577478 - RNA, 19 nt, Homo sapiens
  misc_RNA (1)...(19): siRNA sense strand
gcaugaaacugagugaaga

SEQ ID NO: 1577479 - RNA, 19 nt, Homo sapiens
  misc_RNA (1)...(19): siRNA sense strand
cuacacggguuucaucaaa

SEQ ID NO: 1577480 - RNA, 19 nt, Homo sapiens
  misc_RNA (1)...(19): siRNA sense strand
ucaagaaguucaugguugu

SEQ ID NO: 1577481 - RNA, 19 nt, Homo sapiens
  misc_RNA (1)...(19): siRNA sense strand
caucaaagugcaucugaaa

SEQ ID NO: 1577482 - RNA, 19 nt, Homo sapiens
  misc_RNA (1)...(19): siRNA sense strand
gaagaucgacagcuacaac

SEQ ID NO: 1577483 - RNA, 19 nt, Homo sapiens
  misc_RNA (1)...(19): siRNA sense strand
ucaagcagcugcacaucag

SEQ ID NO: 1577484 - RNA, 19 nt, Homo sapiens
  misc_RNA (1)...(19): siRNA sense strand
ugcaggagaucaagcagaa

SEQ ID NO: 1577485 - RNA, 19 nt, Homo sapiens
  misc_RNA (1)...(19): siRNA sense strand
gcaccaccaccgucaguga

SEQ ID NO: 1577486 - RNA, 19 nt, Homo sapiens
  misc_RNA (1)...(19): siRNA sense strand
caaagugcaucugaaacuc

SEQ ID NO: 1577487 - RNA, 19 nt, Homo sapiens
  misc_RNA (1)...(19): siRNA sense strand
agcagaagaucgacagcua

SEQ ID NO: 1577488 - RNA, 19 nt, Homo sapiens
  misc_RNA (1)...(19): siRNA sense strand
acacaaggacggacaagug

SEQ ID NO: 1577489 - RNA, 19 nt, Homo sapiens
  misc_RNA (1)...(19): siRNA sense strand
gcucaagaaguucaugguu

SEQ ID NO: 1577490 - RNA, 19 nt, Homo sapiens
  misc_RNA (1)...(19): siRNA sense strand
acacggguuucaucaaagu

SEQ ID NO: 1577491 - RNA, 19 nt, Homo sapiens
  misc_RNA (1)...(19): siRNA sense strand
ucaucaaagugcaucugaa

SEQ ID NO: 1577492 - RNA, 19 nt, Homo sapiens
  misc_RNA (1)...(19): siRNA sense strand
uuaagcggauacacaagga

SEQ ID NO: 1577493 - RNA, 19 nt, Homo sapiens
  misc_RNA (1)...(19): siRNA sense strand
ucaaagugcaucugaaacu

SEQ ID NO: 1577494 - RNA, 19 nt, Homo sapiens
  misc_RNA (1)...(19): siRNA sense strand
caggagaucaagcagaaga

SEQ ID NO: 1577495 - RNA, 19 nt, Homo sapiens
  misc_RNA (1)...(19): siRNA sense strand
ggacaauccccagaaguuu

SEQ ID NO: 1577496 - RNA, 19 nt, Homo sapiens
  misc_RNA (1)...(19): siRNA sense strand
cuacaacacgcgagagaag

SEQ ID NO: 1577497 - RNA, 19 nt, Homo sapiens
  misc_RNA (1)...(19): siRNA sense strand
ccacacugcaggagaucaa

SEQ ID NO: 1577498 - RNA, 19 nt, Homo sapiens
  misc_RNA (1)...(19): siRNA sense strand
ggcaugaaacugagugaag

SEQ ID NO: 1577499 - RNA, 19 nt, Homo sapiens
  misc_RNA (1)...(19): siRNA sense strand
acaacacgcgagagaagaa

SEQ ID NO: 1577500 - RNA, 19 nt, Homo sapiens
  misc_RNA (1)...(19): siRNA sense strand
cagaagaucgacagcuaca

SEQ ID NO: 1577501 - RNA, 19 nt, Homo sapiens
  misc_RNA (1)...(19): siRNA sense strand
gcaugaaacugagugaaga

SEQ ID NO: 1577502 - RNA, 19 nt, Homo sapiens
  misc_RNA (1)...(19): siRNA sense strand
cuacacggguuucaucaaa

SEQ ID NO: 1577503 - RNA, 19 nt, Homo sapiens
  misc_RNA (1)...(19): siRNA sense strand
ucaagaaguucaugguugu

SEQ ID NO: 1577504 - RNA, 19 nt, Homo sapiens
  misc_RNA (1)...(19): siRNA sense strand
caucaaagugcaucugaaa

SEQ ID NO: 1577505 - RNA, 19 nt, Homo sapiens
  misc_RNA (1)...(19): siRNA sense strand
gaagaucgacagcuacaac

SEQ ID NO: 1577506 - RNA, 19 nt, Homo sapiens
  misc_RNA (1)...(19): siRNA sense strand
ucaagcagcugcacaucag

SEQ ID NO: 1577507 - RNA, 19 nt, Homo sapiens
  misc_RNA (1)...(19): siRNA sense strand
ugcaggagaucaagcagaa

SEQ ID NO: 1577508 - RNA, 19 nt, Homo sapiens
  misc_RNA (1)...(19): siRNA sense strand
gcaccaccaccgucaguga

SEQ ID NO: 1577509 - RNA, 19 nt, Homo sapiens
  misc_RNA (1)...(19): siRNA sense strand
caaagugcaucugaaacuc

SEQ ID NO: 1577510 - RNA, 19 nt, Homo sapiens
  misc_RNA (1)...(19): siRNA sense strand
agcagaagaucgacagcua

SEQ ID NO: 1577511 - RNA, 19 nt, Homo sapiens
  misc_RNA (1)...(19): siRNA sense strand
acacaaggacggacaagug

SEQ ID NO: 1577512 - RNA, 19 nt, Homo sapiens
  misc_RNA (1)...(19): siRNA sense strand
gcucaagaaguucaugguu

SEQ ID NO: 1577513 - RNA, 19 nt, Homo sapiens
  misc_RNA (1)...(19): siRNA sense strand
acacggguuucaucaaagu

SEQ ID NO: 1577514 - RNA, 19 nt, Homo sapiens
  misc_RNA (1)...(19): siRNA sense strand
ucaucaaagugcaucugaa

SEQ ID NO: 1577515 - RNA, 19 nt, Homo sapiens
  misc_RNA (1)...(19): siRNA sense strand
uuaagcggauacacaagga

SEQ ID NO: 1577516 - RNA, 19 nt, Homo sapiens
  misc_RNA (1)...(19): siRNA sense strand
ucaaagugcaucugaaacu

SEQ ID NO: 1577517 - RNA, 19 nt, Homo sapiens
  misc_RNA (1)...(19): siRNA sense strand
caggagaucaagcagaaga

SEQ ID NO: 1577518 - RNA, 19 nt, Homo sapiens
  misc_RNA (1)...(19): siRNA sense strand
ggacaauccccagaaguuu

SEQ ID NO: 1577519 - RNA, 19 nt, Homo sapiens
  misc_RNA (1)...(19): siRNA sense strand
cuacaacacgcgagagaag

SEQ ID NO: 1577520 - RNA, 19 nt, Homo sapiens
  misc_RNA (1)...(19): siRNA sense strand
ccacacugcaggagaucaa

SEQ ID NO: 1577521 - RNA, 19 nt, Homo sapiens
  misc_RNA (1)...(19): siRNA sense strand
ggcaugaaacugagugaag

SEQ ID NO: 1577522 - RNA, 19 nt, Homo sapiens
  misc_RNA (1)...(19): siRNA sense strand
acaacacgcgagagaagaa

SEQ ID NO: 1577523 - RNA, 19 nt, Homo sapiens
  misc_RNA (1)...(19): siRNA sense strand
cagaagaucgacagcuaca

SEQ ID NO: 1577524 - RNA, 19 nt, Homo sapiens
  misc_RNA (1)...(19): siRNA sense strand
gauaaucugugcuuuguug

SEQ ID NO: 1577525 - RNA, 19 nt, Homo sapiens
  misc_RNA (1)...(19): siRNA sense strand
gcuuauaccuuaaccagua

SEQ ID NO: 1577526 - RNA, 19 nt, Homo sapiens
  misc_RNA (1)...(19): siRNA sense strand
ggacauggaugaacugaag

SEQ ID NO: 1577527 - RNA, 19 nt, Homo sapiens
  misc_RNA (1)...(19): siRNA sense strand
gaagaaauccauugcuuau

SEQ ID NO: 1577528 - RNA, 19 nt, Homo sapiens
  misc_RNA (1)...(19): siRNA sense strand
gcaagcugcugacaugauu

SEQ ID NO: 1577529 - RNA, 19 nt, Homo sapiens
  misc_RNA (1)...(19): siRNA sense strand
gaaugacucuccagcuuug

SEQ ID NO: 1577530 - RNA, 19 nt, Homo sapiens
  misc_RNA (1)...(19): siRNA sense strand
gaauuaaggucaucauggu

SEQ ID NO: 1577531 - RNA, 19 nt, Homo sapiens
  misc_RNA (1)...(19): siRNA sense strand
gcaaugagaccguggaaga

SEQ ID NO: 1577532 - RNA, 19 nt, Homo sapiens
  misc_RNA (1)...(19): siRNA sense strand
guucaaagaucauggaauc

SEQ ID NO: 1577533 - RNA, 19 nt, Homo sapiens
  misc_RNA (1)...(19): siRNA sense strand
gaggaacauugccuucuuu

SEQ ID NO: 1577534 - RNA, 19 nt, Homo sapiens
  misc_RNA (1)...(19): siRNA sense strand
cauccaagcugcuacagaa

SEQ ID NO: 1577535 - RNA, 19 nt, Homo sapiens
  misc_RNA (1)...(19): siRNA sense strand
gagaacgaguccuagguuu

SEQ ID NO: 1577536 - RNA, 19 nt, Homo sapiens
  misc_RNA (1)...(19): siRNA sense strand
gaauuucccuaucgauaau

SEQ ID NO: 1577537 - RNA, 19 nt, Homo sapiens
  misc_RNA (1)...(19): siRNA sense strand
uggaugaacugaagaaaga

SEQ ID NO: 1577538 - RNA, 19 nt, Homo sapiens
  misc_RNA (1)...(19): siRNA sense strand
gaucauggaauccuucaaa

SEQ ID NO: 1577539 - RNA, 19 nt, Homo sapiens
  misc_RNA (1)...(19): siRNA sense strand
gaaguaccacacugagaua

SEQ ID NO: 1577540 - RNA, 19 nt, Homo sapiens
  misc_RNA (1)...(19): siRNA sense strand
gaaaaccuaccuauucuua

SEQ ID NO: 1577541 - RNA, 19 nt, Homo sapiens
  misc_RNA (1)...(19): siRNA sense strand
gcagugaucuaaaggacau

SEQ ID NO: 1577542 - RNA, 19 nt, Homo sapiens
  misc_RNA (1)...(19): siRNA sense strand
ugacaacuuugccucaauu

SEQ ID NO: 1577543 - RNA, 19 nt, Homo sapiens
  misc_RNA (1)...(19): siRNA sense strand
gcucagauguguccaagca

SEQ ID NO: 1577544 - RNA, 19 nt, Homo sapiens
  misc_RNA (1)...(19): siRNA sense strand
gaacuucaucguaaauaug

SEQ ID NO: 1577545 - RNA, 19 nt, Homo sapiens
  misc_RNA (1)...(19): siRNA sense strand
ggaaggucgucugaucuuu

SEQ ID NO: 1577546 - RNA, 19 nt, Homo sapiens
  misc_RNA (1)...(19): siRNA sense strand
gaagagacagcccagaaau

SEQ ID NO: 1577547 - RNA, 19 nt, Homo sapiens
  misc_RNA (1)...(19): siRNA sense strand
ugaagaaauccauugcuua

SEQ ID NO: 1577548 - RNA, 19 nt, Homo sapiens
  misc_RNA (1)...(19): siRNA sense strand
gaaggcaccgcacguggua

SEQ ID NO: 1577549 - RNA, 19 nt, Homo sapiens
  misc_RNA (1)...(19): siRNA sense strand
gauucgaaauggugagaaa

SEQ ID NO: 1577550 - RNA, 19 nt, Homo sapiens
  misc_RNA (1)...(19): siRNA sense strand
agaaauccauugcuuauac

SEQ ID NO: 1577551 - RNA, 19 nt, Homo sapiens
  misc_RNA (1)...(19): siRNA sense strand
ccucaucgguaucaucgua

SEQ ID NO: 1577552 - RNA, 19 nt, Homo sapiens
  misc_RNA (1)...(19): siRNA sense strand
gggaagaauugccacacuu

SEQ ID NO: 1577553 - RNA, 19 nt, Homo sapiens
  misc_RNA (1)...(19): siRNA sense strand
gaauugcaggucuuuguaa

SEQ ID NO: 1577554 - RNA, 19 nt, Homo sapiens
  misc_RNA (1)...(19): siRNA sense strand
ggaauggguguugcucuua

SEQ ID NO: 1577555 - RNA, 19 nt, Homo sapiens
  misc_RNA (1)...(19): siRNA sense strand
gaacggcuuccucccaauu

SEQ ID NO: 1577556 - RNA, 19 nt, Homo sapiens
  misc_RNA (1)...(19): siRNA sense strand
gugaaugacucuccagcuu

SEQ ID NO: 1577557 - RNA, 19 nt, Homo sapiens
  misc_RNA (1)...(19): siRNA sense strand
gaugaacaguuuccugaag

SEQ ID NO: 1577558 - RNA, 19 nt, Homo sapiens
  misc_RNA (1)...(19): siRNA sense strand
gggcaguguuucaggcuaa

SEQ ID NO: 1577559 - RNA, 19 nt, Homo sapiens
  misc_RNA (1)...(19): siRNA sense strand
gcuaucagccguuguaauc

SEQ ID NO: 1577560 - RNA, 19 nt, Homo sapiens
  misc_RNA (1)...(19): siRNA sense strand
ggaagaauugccacacuug

SEQ ID NO: 1577561 - RNA, 19 nt, Homo sapiens
  misc_RNA (1)...(19): siRNA sense strand
gaaggucgucugaucuuug

SEQ ID NO: 1577562 - RNA, 19 nt, Homo sapiens
  misc_RNA (1)...(19): siRNA sense strand
cagcagaagcucaucauug

SEQ ID NO: 1577563 - RNA, 19 nt, Homo sapiens
  misc_RNA (1)...(19): siRNA sense strand
ugaauuucccuaucgauaa

SEQ ID NO: 1577564 - RNA, 19 nt, Homo sapiens
  misc_RNA (1)...(19): siRNA sense strand
ccaaacgcauggcaaggaa

SEQ ID NO: 1577565 - RNA, 19 nt, Homo sapiens
  misc_RNA (1)...(19): siRNA sense strand
gcuugaggcugucaucuuc

SEQ ID NO: 1577566 - RNA, 19 nt, Homo sapiens
  misc_RNA (1)...(19): siRNA sense strand
caaagaucauggaauccuu

SEQ ID NO: 1577567 - RNA, 19 nt, Homo sapiens
  misc_RNA (1)...(19): siRNA sense strand
gaauggguguugcucuuag

SEQ ID NO: 1577568 - RNA, 19 nt, Homo sapiens
  misc_RNA (1)...(19): siRNA sense strand
gguuggacgugauaaguau

SEQ ID NO: 1577569 - RNA, 19 nt, Homo sapiens
  misc_RNA (1)...(19): siRNA sense strand
uaccaguugucuauucaua

SEQ ID NO: 1577570 - RNA, 19 nt, Homo sapiens
  misc_RNA (1)...(19): siRNA sense strand
gacuaggucuccagauuuc

SEQ ID NO: 1577571 - RNA, 19 nt, Homo sapiens
  misc_RNA (1)...(19): siRNA sense strand
cgaggaacauugccuucuu

SEQ ID NO: 1577572 - RNA, 19 nt, Homo sapiens
  misc_RNA (1)...(19): siRNA sense strand
ccaucucccuggcuuauga

SEQ ID NO: 1577573 - RNA, 19 nt, Homo sapiens
  misc_RNA (1)...(19): siRNA sense strand
guacacggcagugaucuaa

SEQ ID NO: 1577574 - RNA, 19 nt, Homo sapiens
  misc_RNA (1)...(19): siRNA sense strand
acacugacgaugugaauuu

SEQ ID NO: 1577575 - RNA, 19 nt, Homo sapiens
  misc_RNA (1)...(19): siRNA sense strand
ggagaacgaguccuagguu

SEQ ID NO: 1577576 - RNA, 19 nt, Homo sapiens
  misc_RNA (1)...(19): siRNA sense strand
aaaccuaccuauucuuaag

SEQ ID NO: 1577577 - RNA, 19 nt, Homo sapiens
  misc_RNA (1)...(19): siRNA sense strand
gcacugugaugggaagaau

SEQ ID NO: 1577578 - RNA, 19 nt, Homo sapiens
  misc_RNA (1)...(19): siRNA sense strand
gaacauugccuucuuuuca

SEQ ID NO: 1577579 - RNA, 19 nt, Homo sapiens
  misc_RNA (1)...(19): siRNA sense strand
gcuaaaaguucaaagauca

SEQ ID NO: 1577580 - RNA, 19 nt, Homo sapiens
  misc_RNA (1)...(19): siRNA sense strand
ugggaggcuucuuuacuua

SEQ ID NO: 1577581 - RNA, 19 nt, Homo sapiens
  misc_RNA (1)...(19): siRNA sense strand
caacuuugccucaauugug

SEQ ID NO: 1577582 - RNA, 19 nt, Homo sapiens
  misc_RNA (1)...(19): siRNA sense strand
ccaaugugccggaagguuu

SEQ ID NO: 1577583 - RNA, 19 nt, Homo sapiens
  misc_RNA (1)...(19): siRNA sense strand
uuggagcgauucuuuguuu

SEQ ID NO: 1577584 - RNA, 19 nt, Homo sapiens
  misc_RNA (1)...(19): siRNA sense strand
gagagugacaucaugaaga

SEQ ID NO: 1577585 - RNA, 19 nt, Homo sapiens
  misc_RNA (1)...(19): siRNA sense strand
ccaguaacauucccgagau

SEQ ID NO: 1577586 - RNA, 19 nt, Homo sapiens
  misc_RNA (1)...(19): siRNA sense strand
gaugacaacuuugccucaa

SEQ ID NO: 1577587 - RNA, 19 nt, Homo sapiens
  misc_RNA (1)...(19): siRNA sense strand
ugaaggagaugagagaaag

SEQ ID NO: 1577588 - RNA, 19 nt, Homo sapiens
  misc_RNA (1)...(19): siRNA sense strand
cuugauauuuggccucuuu

SEQ ID NO: 1577589 - RNA, 19 nt, Homo sapiens
  misc_RNA (1)...(19): siRNA sense strand
gaucaacgauguggaagac

SEQ ID NO: 1577590 - RNA, 19 nt, Homo sapiens
  misc_RNA (1)...(19): siRNA sense strand
auccauugcuuauaccuua

SEQ ID NO: 1577591 - RNA, 19 nt, Homo sapiens
  misc_RNA (1)...(19): siRNA sense strand
gaucuuugauaacuugaag

SEQ ID NO: 1577592 - RNA, 19 nt, Homo sapiens
  misc_RNA (1)...(19): siRNA sense strand
gugaauuucccuaucgaua

SEQ ID NO: 1577593 - RNA, 19 nt, Homo sapiens
  misc_RNA (1)...(19): siRNA sense strand
gagagaaagauacgccaaa

SEQ ID NO: 1577594 - RNA, 19 nt, Homo sapiens
  misc_RNA (1)...(19): siRNA sense strand
ucaaauccaugaagcugau

SEQ ID NO: 1577595 - RNA, 19 nt, Homo sapiens
  misc_RNA (1)...(19): siRNA sense strand
cuaaagcuauugccaaagg

SEQ ID NO: 1577596 - RNA, 19 nt, Homo sapiens
  misc_RNA (1)...(19): siRNA sense strand
gaugugaauuucccuaucg

SEQ ID NO: 1577597 - RNA, 19 nt, Homo sapiens
  misc_RNA (1)...(19): siRNA sense strand
gauauuuggccucuuugaa

SEQ ID NO: 1577598 - RNA, 19 nt, Homo sapiens
  misc_RNA (1)...(19): siRNA sense strand
gggcagcaguggaccuaug

SEQ ID NO: 1577599 - RNA, 19 nt, Homo sapiens
  misc_RNA (1)...(19): siRNA sense strand
gcauugacuugggcacuga

SEQ ID NO: 1577600 - RNA, 19 nt, Homo sapiens
  misc_RNA (1)...(19): siRNA sense strand
ggucgucugaucuuugaua

SEQ ID NO: 1577601 - RNA, 19 nt, Homo sapiens
  misc_RNA (1)...(19): siRNA sense strand
gagcgauucuuuguuucuu

SEQ ID NO: 1577602 - RNA, 19 nt, Homo sapiens
  misc_RNA (1)...(19): siRNA sense strand
agaggaaggucgucugauc

SEQ ID NO: 1577603 - RNA, 19 nt, Homo sapiens
  misc_RNA (1)...(19): siRNA sense strand
ugacaugauucuucuggau

SEQ ID NO: 1577604 - RNA, 19 nt, Homo sapiens
  misc_RNA (1)...(19): siRNA sense strand
agcagaagcucaucauugu

SEQ ID NO: 1577605 - RNA, 19 nt, Homo sapiens
  misc_RNA (1)...(19): siRNA sense strand
ccugaaggguuccaguuug

SEQ ID NO: 1577606 - RNA, 19 nt, Homo sapiens
  misc_RNA (1)...(19): siRNA sense strand
gaacgaguccuagguuucu

SEQ ID NO: 1577607 - RNA, 19 nt, Homo sapiens
  misc_RNA (1)...(19): siRNA sense strand
ccaguugucuauucauaag

SEQ ID NO: 1577608 - RNA, 19 nt, Homo sapiens
  misc_RNA (1)...(19): siRNA sense strand
agaaucauaucugcaaaug

SEQ ID NO: 1577609 - RNA, 19 nt, Homo sapiens
  misc_RNA (1)...(19): siRNA sense strand
guaccuggguguggugcua

SEQ ID NO: 1577610 - RNA, 19 nt, Homo sapiens
  misc_RNA (1)...(19): siRNA sense strand
guaaauauggaacagacuu

SEQ ID NO: 1577611 - RNA, 19 nt, Homo sapiens
  misc_RNA (1)...(19): siRNA sense strand
cugaaggguuccaguuuga

SEQ ID NO: 1577612 - RNA, 19 nt, Homo sapiens
  misc_RNA (1)...(19): siRNA sense strand
ugccaaggccugcguagua

SEQ ID NO: 1577613 - RNA, 19 nt, Homo sapiens
  misc_RNA (1)...(19): siRNA sense strand
uguaagaccaggaggaauu

SEQ ID NO: 1577614 - RNA, 19 nt, Homo sapiens
  misc_RNA (1)...(19): siRNA sense strand
ggaguucaccugccacaca

SEQ ID NO: 1577615 - RNA, 19 nt, Homo sapiens
  misc_RNA (1)...(19): siRNA sense strand
ggaccuaugagcagaggaa

SEQ ID NO: 1577616 - RNA, 19 nt, Homo sapiens
  misc_RNA (1)...(19): siRNA sense strand
ugaaugacucuccagcuuu

SEQ ID NO: 1577617 - RNA, 19 nt, Homo sapiens
  misc_RNA (1)...(19): siRNA sense strand
ucaagaagcuaaaaguuca

SEQ ID NO: 1577618 - RNA, 19 nt, Homo sapiens
  misc_RNA (1)...(19): siRNA sense strand
uugaagaaauccauugcuu

SEQ ID NO: 1577619 - RNA, 19 nt, Homo sapiens
  misc_RNA (1)...(19): siRNA sense strand
ucgauaaucugugcuuugu

SEQ ID NO: 1577620 - RNA, 19 nt, Homo sapiens
  misc_RNA (1)...(19): siRNA sense strand
ucaacuccaccaacaagua

SEQ ID NO: 1577621 - RNA, 19 nt, Homo sapiens
  misc_RNA (1)...(19): siRNA sense strand
uagaagcuguggagaccuu

SEQ ID NO: 1577622 - RNA, 19 nt, Homo sapiens
  misc_RNA (1)...(19): siRNA sense strand
gggaucugguggaaguaaa

SEQ ID NO: 1577623 - RNA, 19 nt, Homo sapiens
  misc_RNA (1)...(19): siRNA sense strand
ccgacuuggucaucuguaa

SEQ ID NO: 1577624 - RNA, 19 nt, Homo sapiens
  misc_RNA (1)...(19): siRNA sense strand
gagagugacuggauugaua

SEQ ID NO: 1577625 - RNA, 19 nt, Homo sapiens
  misc_RNA (1)...(19): siRNA sense strand
ggaaauccagcaaauaaua

SEQ ID NO: 1577626 - RNA, 19 nt, Homo sapiens
  misc_RNA (1)...(19): siRNA sense strand
caaguucucucuggaaaua

SEQ ID NO: 1577627 - RNA, 19 nt, Homo sapiens
  misc_RNA (1)...(19): siRNA sense strand
ggauuuagcugacuguuca

SEQ ID NO: 1577628 - RNA, 19 nt, Homo sapiens
  misc_RNA (1)...(19): siRNA sense strand
gagaaggaauuccaucaga

SEQ ID NO: 1577629 - RNA, 19 nt, Homo sapiens
  misc_RNA (1)...(19): siRNA sense strand
ggauauucuucaccgauua

SEQ ID NO: 1577630 - RNA, 19 nt, Homo sapiens
  misc_RNA (1)...(19): siRNA sense strand
gugcggaucuggaaauuau

SEQ ID NO: 1577631 - RNA, 19 nt, Homo sapiens
  misc_RNA (1)...(19): siRNA sense strand
ccuaauacaucccugguaa

SEQ ID NO: 1577632 - RNA, 19 nt, Homo sapiens
  misc_RNA (1)...(19): siRNA sense strand
gaucaucaguauugcauuc

SEQ ID NO: 1577633 - RNA, 19 nt, Homo sapiens
  misc_RNA (1)...(19): siRNA sense strand
caacagagccauugauagu

SEQ ID NO: 1577634 - RNA, 19 nt, Homo sapiens
  misc_RNA (1)...(19): siRNA sense strand
caucaguucuauucagauu

SEQ ID NO: 1577635 - RNA, 19 nt, Homo sapiens
  misc_RNA (1)...(19): siRNA sense strand
caaauucacccuuggaaau

SEQ ID NO: 1577636 - RNA, 19 nt, Homo sapiens
  misc_RNA (1)...(19): siRNA sense strand
gggauauucuucaccgauu

SEQ ID NO: 1577637 - RNA, 19 nt, Homo sapiens
  misc_RNA (1)...(19): siRNA sense strand
gauacaaccaucaguucua

SEQ ID NO: 1577638 - RNA, 19 nt, Homo sapiens
  misc_RNA (1)...(19): siRNA sense strand
cuucaccgauuacuucuuu

SEQ ID NO: 1577639 - RNA, 19 nt, Homo sapiens
  misc_RNA (1)...(19): siRNA sense strand
gaaauccagcaaauaauag

SEQ ID NO: 1577640 - RNA, 19 nt, Homo sapiens
  misc_RNA (1)...(19): siRNA sense strand
gcaaauucacccuuggaaa

SEQ ID NO: 1577641 - RNA, 19 nt, Homo sapiens
  misc_RNA (1)...(19): siRNA sense strand
guucaacugauccuuauuu

SEQ ID NO: 1577642 - RNA, 19 nt, Homo sapiens
  misc_RNA (1)...(19): siRNA sense strand
caucaguauugcauucaaa

SEQ ID NO: 1577643 - RNA, 19 nt, Homo sapiens
  misc_RNA (1)...(19): siRNA sense strand
ggaaagccacagagaaauc

SEQ ID NO: 1577644 - RNA, 19 nt, Homo sapiens
  misc_RNA (1)...(19): siRNA sense strand
cacaacagagccauugaua

SEQ ID NO: 1577645 - RNA, 19 nt, Homo sapiens
  misc_RNA (1)...(19): siRNA sense strand
gugaaauccugccguguca

SEQ ID NO: 1577646 - RNA, 19 nt, Homo sapiens
  misc_RNA (1)...(19): siRNA sense strand
cauguuccauuuccgugua

SEQ ID NO: 1577647 - RNA, 19 nt, Homo sapiens
  misc_RNA (1)...(19): siRNA sense strand
gauggaaagccacagagaa

SEQ ID NO: 1577648 - RNA, 19 nt, Homo sapiens
  misc_RNA (1)...(19): siRNA sense strand
guugcccucuauauacuua

SEQ ID NO: 1577649 - RNA, 19 nt, Homo sapiens
  misc_RNA (1)...(19): siRNA sense strand
ccaaaucucccuccaagca

SEQ ID NO: 1577650 - RNA, 19 nt, Homo sapiens
  misc_RNA (1)...(19): siRNA sense strand
gcgauggucagaagacaaa

SEQ ID NO: 1577651 - RNA, 19 nt, Homo sapiens
  misc_RNA (1)...(19): siRNA sense strand
ggagaugacacagggauau

SEQ ID NO: 1577652 - RNA, 19 nt, Homo sapiens
  misc_RNA (1)...(19): siRNA sense strand
aaauucacccuuggaaaua

SEQ ID NO: 1577653 - RNA, 19 nt, Homo sapiens
  misc_RNA (1)...(19): siRNA sense strand
gucaaguucucucuggaaa

SEQ ID NO: 1577654 - RNA, 19 nt, Homo sapiens
  misc_RNA (1)...(19): siRNA sense strand
gacaaaagcaaaucaguuu

SEQ ID NO: 1577655 - RNA, 19 nt, Homo sapiens
  misc_RNA (1)...(19): siRNA sense strand
gcggaucuggaaauuauaa

SEQ ID NO: 1577656 - RNA, 19 nt, Homo sapiens
  misc_RNA (1)...(19): siRNA sense strand
gaaccaaagggauggaaag

SEQ ID NO: 1577657 - RNA, 19 nt, Homo sapiens
  misc_RNA (1)...(19): siRNA sense strand
aaacacacacccaccaaug

SEQ ID NO: 1577658 - RNA, 19 nt, Homo sapiens
  misc_RNA (1)...(19): siRNA sense strand
acagggauaucagcacauu

SEQ ID NO: 1577659 - RNA, 19 nt, Homo sapiens
  misc_RNA (1)...(19): siRNA sense strand
cagaggcgauggucagaag

SEQ ID NO: 1577660 - RNA, 19 nt, Homo sapiens
  misc_RNA (1)...(19): siRNA sense strand
caaguccugugcaaagaca

SEQ ID NO: 1577661 - RNA, 19 nt, Homo sapiens
  misc_RNA (1)...(19): siRNA sense strand
aaacacaacagagccauug

SEQ ID NO: 1577662 - RNA, 19 nt, Homo sapiens
  misc_RNA (1)...(19): siRNA sense strand
auacaaccaucaguucuau

SEQ ID NO: 1577663 - RNA, 19 nt, Homo sapiens
  misc_RNA (1)...(19): siRNA sense strand
gcaaauaauagaucaucag

SEQ ID NO: 1577664 - RNA, 19 nt, Homo sapiens
  misc_RNA (1)...(19): siRNA sense strand
aaucugaggagaaggaauu

SEQ ID NO: 1577665 - RNA, 19 nt, Homo sapiens
  misc_RNA (1)...(19): siRNA sense strand
agaccgacgugucccaaau

SEQ ID NO: 1577666 - RNA, 19 nt, Homo sapiens
  misc_RNA (1)...(19): siRNA sense strand
ccaccaaugucaaguucuc

SEQ ID NO: 1577667 - RNA, 19 nt, Homo sapiens
  misc_RNA (1)...(19): siRNA sense strand
gaaagccacagagaaaucu

SEQ ID NO: 1577668 - RNA, 19 nt, Homo sapiens
  misc_RNA (1)...(19): siRNA sense strand
ggaaccaaagggauggaaa

SEQ ID NO: 1577669 - RNA, 19 nt, Homo sapiens
  misc_RNA (1)...(19): siRNA sense strand
ugacgauaguugcccucua

SEQ ID NO: 1577670 - RNA, 19 nt, Homo sapiens
  misc_RNA (1)...(19): siRNA sense strand
ggauggaaagccacagaga

SEQ ID NO: 1577671 - RNA, 19 nt, Homo sapiens
  misc_RNA (1)...(19): siRNA sense strand
acagagccauugauagucu

SEQ ID NO: 1577672 - RNA, 19 nt, Homo sapiens
  misc_RNA (1)...(19): siRNA sense strand
cugacagcauguuccauuu

SEQ ID NO: 1577673 - RNA, 19 nt, Homo sapiens
  misc_RNA (1)...(19): siRNA sense strand
gacaaucugaggagaagga

SEQ ID NO: 1577674 - RNA, 19 nt, Homo sapiens
  misc_RNA (1)...(19): siRNA sense strand
ccucagcaccuaauacauc

SEQ ID NO: 1577675 - RNA, 19 nt, Homo sapiens
  misc_RNA (1)...(19): siRNA sense strand
aaagacaaucugaggagaa

SEQ ID NO: 1577676 - RNA, 19 nt, Homo sapiens
  misc_RNA (1)...(19): siRNA sense strand
ggauaucagcacauuugga

SEQ ID NO: 1577677 - RNA, 19 nt, Homo sapiens
  misc_RNA (1)...(19): siRNA sense strand
ggagaaggaauuccaucag

SEQ ID NO: 1577678 - RNA, 19 nt, Homo sapiens
  misc_RNA (1)...(19): siRNA sense strand
auucacccuuggaaauaua

SEQ ID NO: 1577679 - RNA, 19 nt, Homo sapiens
  misc_RNA (1)...(19): siRNA sense strand
acaccggccuccuuacaag

SEQ ID NO: 1577680 - RNA, 19 nt, Homo sapiens
  misc_RNA (1)...(19): siRNA sense strand
caaaucucccuccaagcaa

SEQ ID NO: 1577681 - RNA, 19 nt, Homo sapiens
  misc_RNA (1)...(19): siRNA sense strand
acaaccaucaguucuauuc

SEQ ID NO: 1577682 - RNA, 19 nt, Homo sapiens
  misc_RNA (1)...(19): siRNA sense strand
aaaucucccuccaagcaau

SEQ ID NO: 1577683 - RNA, 19 nt, Homo sapiens
  misc_RNA (1)...(19): siRNA sense strand
uuagcugacuguucaacug

SEQ ID NO: 1577684 - RNA, 19 nt, Homo sapiens
  misc_RNA (1)...(19): siRNA sense strand
agggauaucagcacauuug

SEQ ID NO: 1577685 - RNA, 19 nt, Homo sapiens
  misc_RNA (1)...(19): siRNA sense strand
gugacuggauugauacaac

SEQ ID NO: 1577686 - RNA, 19 nt, Homo sapiens
  misc_RNA (1)...(19): siRNA sense strand
aaccacaccggccuccuua

SEQ ID NO: 1577687 - RNA, 19 nt, Homo sapiens
  misc_RNA (1)...(19): siRNA sense strand
ccacaccggccuccuuaca

SEQ ID NO: 1577688 - RNA, 19 nt, Homo sapiens
  misc_RNA (1)...(19): siRNA sense strand
uaaccacaccggccuccuu

SEQ ID NO: 1577689 - RNA, 19 nt, Homo sapiens
  misc_RNA (1)...(19): siRNA sense strand
ucugacagcauguuccauu

SEQ ID NO: 1577690 - RNA, 19 nt, Homo sapiens
  misc_RNA (1)...(19): siRNA sense strand
ugccgugucaggagacuua

SEQ ID NO: 1577691 - RNA, 19 nt, Homo sapiens
  misc_RNA (1)...(19): siRNA sense strand
caacugauccuuauuuugc

SEQ ID NO: 1577692 - RNA, 19 nt, Homo sapiens
  misc_RNA (1)...(19): siRNA sense strand
gacagcauguuccauuucc

SEQ ID NO: 1577693 - RNA, 19 nt, Homo sapiens
  misc_RNA (1)...(19): siRNA sense strand
auggaaagccacagagaaa

SEQ ID NO: 1577694 - RNA, 19 nt, Homo sapiens
  misc_RNA (1)...(19): siRNA sense strand
cagugcggaucuggaaauu

SEQ ID NO: 1577695 - RNA, 19 nt, Homo sapiens
  misc_RNA (1)...(19): siRNA sense strand
gggaaugaaagaagucucu

SEQ ID NO: 1577696 - RNA, 19 nt, Homo sapiens
  misc_RNA (1)...(19): siRNA sense strand
gcugacuguucaacugauc

SEQ ID NO: 1577697 - RNA, 19 nt, Homo sapiens
  misc_RNA (1)...(19): siRNA sense strand
uagcugacuguucaacuga

SEQ ID NO: 1577698 - RNA, 19 nt, Homo sapiens
  misc_RNA (1)...(19): siRNA sense strand
uaaacacaacagagccauu

SEQ ID NO: 1577699 - RNA, 19 nt, Homo sapiens
  misc_RNA (1)...(19): siRNA sense strand
cagcaaauaauagaucauc

SEQ ID NO: 1577700 - RNA, 19 nt, Homo sapiens
  misc_RNA (1)...(19): siRNA sense strand
ggagagugacuggauugau

SEQ ID NO: 1577701 - RNA, 19 nt, Homo sapiens
  misc_RNA (1)...(19): siRNA sense strand
aagacaaucugaggagaag

SEQ ID NO: 1577702 - RNA, 19 nt, Homo sapiens
  misc_RNA (1)...(19): siRNA sense strand
ugacagcauguuccauuuc

SEQ ID NO: 1577703 - RNA, 19 nt, Homo sapiens
  misc_RNA (1)...(19): siRNA sense strand
gauagucuuccagugcaaa

SEQ ID NO: 1577704 - RNA, 19 nt, Homo sapiens
  misc_RNA (1)...(19): siRNA sense strand
aguucucucuggaaauaaa

SEQ ID NO: 1577705 - RNA, 19 nt, Homo sapiens
  misc_RNA (1)...(19): siRNA sense strand
uaaacacacacccaccaau

SEQ ID NO: 1577706 - RNA, 19 nt, Homo sapiens
  misc_RNA (1)...(19): siRNA sense strand
ucaucaguauugcauucaa

SEQ ID NO: 1577707 - RNA, 19 nt, Homo sapiens
  misc_RNA (1)...(19): siRNA sense strand
accaucaguucuauucaga

SEQ ID NO: 1577708 - RNA, 19 nt, Homo sapiens
  misc_RNA (1)...(19): siRNA sense strand
cuguucaacugauccuuau

SEQ ID NO: 1577709 - RNA, 19 nt, Homo sapiens
  misc_RNA (1)...(19): siRNA sense strand
acuguucaacugauccuua

SEQ ID NO: 1577710 - RNA, 19 nt, Homo sapiens
  misc_RNA (1)...(19): siRNA sense strand
cuuacaaguaccugaaauu

SEQ ID NO: 1577711 - RNA, 19 nt, Homo sapiens
  misc_RNA (1)...(19): siRNA sense strand
gagaugacacagggauauc

SEQ ID NO: 1577712 - RNA, 19 nt, Homo sapiens
  misc_RNA (1)...(19): siRNA sense strand
aauucacccuuggaaauau

SEQ ID NO: 1577713 - RNA, 19 nt, Homo sapiens
  misc_RNA (1)...(19): siRNA sense strand
ccuuacaaguaccugaaau

SEQ ID NO: 1577714 - RNA, 19 nt, Homo sapiens
  misc_RNA (1)...(19): siRNA sense strand
gaucuuggcgcaccuggua

SEQ ID NO: 1577715 - RNA, 19 nt, Homo sapiens
  misc_RNA (1)...(19): siRNA sense strand
ggaagaaaauggaaaugug

SEQ ID NO: 1577716 - RNA, 19 nt, Homo sapiens
  misc_RNA (1)...(19): siRNA sense strand
gagaggcagugggaucuug

SEQ ID NO: 1577717 - RNA, 19 nt, Homo sapiens
  misc_RNA (1)...(19): siRNA sense strand
ggccugggcuucaucaucu

SEQ ID NO: 1577718 - RNA, 19 nt, Homo sapiens
  misc_RNA (1)...(19): siRNA sense strand
uggcgcaccugguagcuuu

SEQ ID NO: 1577719 - RNA, 19 nt, Homo sapiens
  misc_RNA (1)...(19): siRNA sense strand
ucaaaggugcggccuggua

SEQ ID NO: 1577720 - RNA, 19 nt, Homo sapiens
  misc_RNA (1)...(19): siRNA sense strand
cauguggacugguggucua

SEQ ID NO: 1577721 - RNA, 19 nt, Homo sapiens
  misc_RNA (1)...(19): siRNA sense strand
gcuuugggcuucaccaucu

SEQ ID NO: 1577722 - RNA, 19 nt, Homo sapiens
  misc_RNA (1)...(19): siRNA sense strand
gaagaaaauggaaauguga

SEQ ID NO: 1577723 - RNA, 19 nt, Homo sapiens
  misc_RNA (1)...(19): siRNA sense strand
gcucuaccaucugacaugu

SEQ ID NO: 1577724 - RNA, 19 nt, Homo sapiens
  misc_RNA (1)...(19): siRNA sense strand
ugugggcucugccuccuuu

SEQ ID NO: 1577725 - RNA, 19 nt, Homo sapiens
  misc_RNA (1)...(19): siRNA sense strand
cucaagcucuaccaucuga

SEQ ID NO: 1577726 - RNA, 19 nt, Homo sapiens
  misc_RNA (1)...(19): siRNA sense strand
gacccuagccauccucugu

SEQ ID NO: 1577727 - RNA, 19 nt, Homo sapiens
  misc_RNA (1)...(19): siRNA sense strand
gccucaagcucuaccaucu

SEQ ID NO: 1577728 - RNA, 19 nt, Homo sapiens
  misc_RNA (1)...(19): siRNA sense strand
uaccugauggcuacaguaa

SEQ ID NO: 1577729 - RNA, 19 nt, Homo sapiens
  misc_RNA (1)...(19): siRNA sense strand
gugaucaugcaccagauuu

SEQ ID NO: 1577730 - RNA, 19 nt, Homo sapiens
  misc_RNA (1)...(19): siRNA sense strand
aaggguggcucgccucaag

SEQ ID NO: 1577731 - RNA, 19 nt, Homo sapiens
  misc_RNA (1)...(19): siRNA sense strand
ccugauggcuacaguaacg

SEQ ID NO: 1577732 - RNA, 19 nt, Homo sapiens
  misc_RNA (1)...(19): siRNA sense strand
uggcucgccucaagcucua

SEQ ID NO: 1577733 - RNA, 19 nt, Homo sapiens
  misc_RNA (1)...(19): siRNA sense strand
guuccaggcccagaucaaa

SEQ ID NO: 1577734 - RNA, 19 nt, Homo sapiens
  misc_RNA (1)...(19): siRNA sense strand
gcugaagccauccuacucu

SEQ ID NO: 1577735 - RNA, 19 nt, Homo sapiens
  misc_RNA (1)...(19): siRNA sense strand
cugaagccauccuacucuu

SEQ ID NO: 1577736 - RNA, 19 nt, Homo sapiens
  misc_RNA (1)...(19): siRNA sense strand
ggccacaucuaccauaaga

SEQ ID NO: 1577737 - RNA, 19 nt, Homo sapiens
  misc_RNA (1)...(19): siRNA sense strand
ggcagcagguauauuguga

SEQ ID NO: 1577738 - RNA, 19 nt, Homo sapiens
  misc_RNA (1)...(19): siRNA sense strand
ccacaucuaccauaagaga

SEQ ID NO: 1577739 - RNA, 19 nt, Homo sapiens
  misc_RNA (1)...(19): siRNA sense strand
gugaaaagguuuaaucgaa

SEQ ID NO: 1577740 - RNA, 19 nt, Homo sapiens
  misc_RNA (1)...(19): siRNA sense strand
cagcagguauauugugaug

SEQ ID NO: 1577741 - RNA, 19 nt, Homo sapiens
  misc_RNA (1)...(19): siRNA sense strand
uaagccguguccagaguuu

SEQ ID NO: 1577742 - RNA, 19 nt, Homo sapiens
  misc_RNA (1)...(19): siRNA sense strand
cagcagcagcuaugugaaa

SEQ ID NO: 1577743 - RNA, 19 nt, Homo sapiens
  misc_RNA (1)...(19): siRNA sense strand
gcagcuaugugaaaagguu

SEQ ID NO: 1577744 - RNA, 19 nt, Homo sapiens
  misc_RNA (1)...(19): siRNA sense strand
cuuccgaguccacauguua

SEQ ID NO: 1577745 - RNA, 19 nt, Homo sapiens
  misc_RNA (1)...(19): siRNA sense strand
aauaagccguguccagagu

SEQ ID NO: 1577746 - RNA, 19 nt, Homo sapiens
  misc_RNA (1)...(19): siRNA sense strand
ugggccacaucuaccauaa

SEQ ID NO: 1577747 - RNA, 19 nt, Homo sapiens
  misc_RNA (1)...(19): siRNA sense strand
ggacuccuccagcugcaau

SEQ ID NO: 1577748 - RNA, 19 nt, Homo sapiens
  misc_RNA (1)...(19): siRNA sense strand
gagcagcagcagcuaugug

SEQ ID NO: 1577749 - RNA, 19 nt, Homo sapiens
  misc_RNA (1)...(19): siRNA sense strand
aaagggaagggcagauuca

SEQ ID NO: 1577750 - RNA, 19 nt, Homo sapiens
  misc_RNA (1)...(19): siRNA sense strand
ggaagggcagauucaaggu

SEQ ID NO: 1577751 - RNA, 19 nt, Homo sapiens
  misc_RNA (1)...(19): siRNA sense strand
uaagccguguccagaguuu

SEQ ID NO: 1577752 - RNA, 19 nt, Homo sapiens
  misc_RNA (1)...(19): siRNA sense strand
cuuccgaguccacauguua

SEQ ID NO: 1577753 - RNA, 19 nt, Homo sapiens
  misc_RNA (1)...(19): siRNA sense strand
aauaagccguguccagagu

SEQ ID NO: 1577754 - RNA, 19 nt, Homo sapiens
  misc_RNA (1)...(19): siRNA sense strand
ggacuccuccagcugcaau

SEQ ID NO: 1577755 - RNA, 19 nt, Homo sapiens
  misc_RNA (1)...(19): siRNA sense strand
gccaggagcuugcaaguuu

SEQ ID NO: 1577756 - RNA, 19 nt, Homo sapiens
  misc_RNA (1)...(19): siRNA sense strand
ggaaaguucuugucaauac

SEQ ID NO: 1577757 - RNA, 19 nt, Homo sapiens
  misc_RNA (1)...(19): siRNA sense strand
caacugcucugauugaaga

SEQ ID NO: 1577758 - RNA, 19 nt, Homo sapiens
  misc_RNA (1)...(19): siRNA sense strand
caauaaagaugccguacaa

SEQ ID NO: 1577759 - RNA, 19 nt, Homo sapiens
  misc_RNA (1)...(19): siRNA sense strand
gaugagcgcuuggauaaga

SEQ ID NO: 1577760 - RNA, 19 nt, Homo sapiens
  misc_RNA (1)...(19): siRNA sense strand
gaagaagauuggacucaga

SEQ ID NO: 1577761 - RNA, 19 nt, Homo sapiens
  misc_RNA (1)...(19): siRNA sense strand
gaaacaggaaucucucaua

SEQ ID NO: 1577762 - RNA, 19 nt, Homo sapiens
  misc_RNA (1)...(19): siRNA sense strand
gugguggacuucagaaaua

SEQ ID NO: 1577763 - RNA, 19 nt, Homo sapiens
  misc_RNA (1)...(19): siRNA sense strand
caaagaaccuaaagagaag

SEQ ID NO: 1577764 - RNA, 19 nt, Homo sapiens
  misc_RNA (1)...(19): siRNA sense strand
uaagagauaugcccggaaa

SEQ ID NO: 1577765 - RNA, 19 nt, Homo sapiens
  misc_RNA (1)...(19): siRNA sense strand
ucaaggaauuucacgagua

SEQ ID NO: 1577766 - RNA, 19 nt, Homo sapiens
  misc_RNA (1)...(19): siRNA sense strand
caacggacccuaccucuug

SEQ ID NO: 1577767 - RNA, 19 nt, Homo sapiens
  misc_RNA (1)...(19): siRNA sense strand
uaaagaugccguacaauga

SEQ ID NO: 1577768 - RNA, 19 nt, Homo sapiens
  misc_RNA (1)...(19): siRNA sense strand
aaaggaggauggucuugua

SEQ ID NO: 1577769 - RNA, 19 nt, Homo sapiens
  misc_RNA (1)...(19): siRNA sense strand
ucaauuggcuucaaggaau

SEQ ID NO: 1577770 - RNA, 19 nt, Homo sapiens
  misc_RNA (1)...(19): siRNA sense strand
acaaagaaccuaaagagaa

SEQ ID NO: 1577771 - RNA, 19 nt, Homo sapiens
  misc_RNA (1)...(19): siRNA sense strand
aaacaggaaucucucauag

SEQ ID NO: 1577772 - RNA, 19 nt, Homo sapiens
  misc_RNA (1)...(19): siRNA sense strand
ggacucagaugcugucaac

SEQ ID NO: 1577773 - RNA, 19 nt, Homo sapiens
  misc_RNA (1)...(19): siRNA sense strand
ggaggauggucuuguacuu

SEQ ID NO: 1577774 - RNA, 19 nt, Homo sapiens
  misc_RNA (1)...(19): siRNA sense strand
uagaugagcgcuuggauaa

SEQ ID NO: 1577775 - RNA, 19 nt, Homo sapiens
  misc_RNA (1)...(19): siRNA sense strand
acaggaaucucucauagug

SEQ ID NO: 1577776 - RNA, 19 nt, Homo sapiens
  misc_RNA (1)...(19): siRNA sense strand
gcuauaaucagaagaaugu

SEQ ID NO: 1577777 - RNA, 19 nt, Homo sapiens
  misc_RNA (1)...(19): siRNA sense strand
caugguaucuuccaaucaa

SEQ ID NO: 1577778 - RNA, 19 nt, Homo sapiens
  misc_RNA (1)...(19): siRNA sense strand
gagaaguuaucaccugugu

SEQ ID NO: 1577779 - RNA, 19 nt, Homo sapiens
  misc_RNA (1)...(19): siRNA sense strand
ggagaugggcacugagaaa

SEQ ID NO: 1577780 - RNA, 19 nt, Homo sapiens
  misc_RNA (1)...(19): siRNA sense strand
uaacaaagaaccuaaagag

SEQ ID NO: 1577781 - RNA, 19 nt, Homo sapiens
  misc_RNA (1)...(19): siRNA sense strand
caaugaagcugagaacaag

SEQ ID NO: 1577782 - RNA, 19 nt, Homo sapiens
  misc_RNA (1)...(19): siRNA sense strand
agaaagugauugaccgaaa

SEQ ID NO: 1577783 - RNA, 19 nt, Homo sapiens
  misc_RNA (1)...(19): siRNA sense strand
acgaguaccugaucacuga

SEQ ID NO: 1577784 - RNA, 19 nt, Homo sapiens
  misc_RNA (1)...(19): siRNA sense strand
gaaagugauugaccgaaaa

SEQ ID NO: 1577785 - RNA, 19 nt, Homo sapiens
  misc_RNA (1)...(19): siRNA sense strand
gaggguggaugacaugcuu

SEQ ID NO: 1577786 - RNA, 19 nt, Homo sapiens
  misc_RNA (1)...(19): siRNA sense strand
uaucugaugucucgaagug

SEQ ID NO: 1577787 - RNA, 19 nt, Homo sapiens
  misc_RNA (1)...(19): siRNA sense strand
gcuuagagguaucugaugu

SEQ ID NO: 1577788 - RNA, 19 nt, Homo sapiens
  misc_RNA (1)...(19): siRNA sense strand
gcacacuggagacuaguaa

SEQ ID NO: 1577789 - RNA, 19 nt, Homo sapiens
  misc_RNA (1)...(19): siRNA sense strand
gaaacaaguaacuaagaga

SEQ ID NO: 1577790 - RNA, 19 nt, Homo sapiens
  misc_RNA (1)...(19): siRNA sense strand
cacagacgcuauaaucaga

SEQ ID NO: 1577791 - RNA, 19 nt, Homo sapiens
  misc_RNA (1)...(19): siRNA sense strand
caaggaauuucacgaguac

SEQ ID NO: 1577792 - RNA, 19 nt, Homo sapiens
  misc_RNA (1)...(19): siRNA sense strand
ugggaggaaccaauuauua

SEQ ID NO: 1577793 - RNA, 19 nt, Homo sapiens
  misc_RNA (1)...(19): siRNA sense strand
uggaggaacuaagagauuu

SEQ ID NO: 1577794 - RNA, 19 nt, Homo sapiens
  misc_RNA (1)...(19): siRNA sense strand
ugaaacaaguaacuaagag

SEQ ID NO: 1577795 - RNA, 19 nt, Homo sapiens
  misc_RNA (1)...(19): siRNA sense strand
gcugagaacaagagaaguu

SEQ ID NO: 1577796 - RNA, 19 nt, Homo sapiens
  misc_RNA (1)...(19): siRNA sense strand
gaaugggcagcgcacauaa

SEQ ID NO: 1577797 - RNA, 19 nt, Homo sapiens
  misc_RNA (1)...(19): siRNA sense strand
cgaaugggcagcgcacaua

SEQ ID NO: 1577798 - RNA, 19 nt, Homo sapiens
  misc_RNA (1)...(19): siRNA sense strand
guacuucacaaacgccuaa

SEQ ID NO: 1577799 - RNA, 19 nt, Homo sapiens
  misc_RNA (1)...(19): siRNA sense strand
aggaaucucucauagugaa

SEQ ID NO: 1577800 - RNA, 19 nt, Homo sapiens
  misc_RNA (1)...(19): siRNA sense strand
ggaggaaccaauuauuaca

SEQ ID NO: 1577801 - RNA, 19 nt, Homo sapiens
  misc_RNA (1)...(19): siRNA sense strand
cuacagccacuccaauaaa

SEQ ID NO: 1577802 - RNA, 19 nt, Homo sapiens
  misc_RNA (1)...(19): siRNA sense strand
guauugaggcucugaaaca

SEQ ID NO: 1577803 - RNA, 19 nt, Homo sapiens
  misc_RNA (1)...(19): siRNA sense strand
uugaaucucugcucuggaa

SEQ ID NO: 1577804 - RNA, 19 nt, Homo sapiens
  misc_RNA (1)...(19): siRNA sense strand
ucucugcucuggaaaguuc

SEQ ID NO: 1577805 - RNA, 19 nt, Homo sapiens
  misc_RNA (1)...(19): siRNA sense strand
caagguuucugcccaagag

SEQ ID NO: 1577806 - RNA, 19 nt, Homo sapiens
  misc_RNA (1)...(19): siRNA sense strand
aaagaugccguacaaugaa

SEQ ID NO: 1577807 - RNA, 19 nt, Homo sapiens
  misc_RNA (1)...(19): siRNA sense strand
cauagaaagucagaguguu

SEQ ID NO: 1577808 - RNA, 19 nt, Homo sapiens
  misc_RNA (1)...(19): siRNA sense strand
caacaugguaucuuccaau

SEQ ID NO: 1577809 - RNA, 19 nt, Homo sapiens
  misc_RNA (1)...(19): siRNA sense strand
acaaugaagcugagaacaa

SEQ ID NO: 1577810 - RNA, 19 nt, Homo sapiens
  misc_RNA (1)...(19): siRNA sense strand
cuggaaaguucuugucaau

SEQ ID NO: 1577811 - RNA, 19 nt, Homo sapiens
  misc_RNA (1)...(19): siRNA sense strand
caucaucaccaacaagguu

SEQ ID NO: 1577812 - RNA, 19 nt, Homo sapiens
  misc_RNA (1)...(19): siRNA sense strand
gagaacaagagaaguuauc

SEQ ID NO: 1577813 - RNA, 19 nt, Homo sapiens
  misc_RNA (1)...(19): siRNA sense strand
ugaaccugcucuugaaauc

SEQ ID NO: 1577814 - RNA, 19 nt, Homo sapiens
  misc_RNA (1)...(19): siRNA sense strand
gauaagaggguggaugaca

SEQ ID NO: 1577815 - RNA, 19 nt, Homo sapiens
  misc_RNA (1)...(19): siRNA sense strand
gaaaaguggagcuugaaaa

SEQ ID NO: 1577816 - RNA, 19 nt, Homo sapiens
  misc_RNA (1)...(19): siRNA sense strand
ccagguggacccagaaaug

SEQ ID NO: 1577817 - RNA, 19 nt, Homo sapiens
  misc_RNA (1)...(19): siRNA sense strand
gaucaagagcugaaaugca

SEQ ID NO: 1577818 - RNA, 19 nt, Homo sapiens
  misc_RNA (1)...(19): siRNA sense strand
gaccauaacaaagaaccua

SEQ ID NO: 1577819 - RNA, 19 nt, Homo sapiens
  misc_RNA (1)...(19): siRNA sense strand
gcugucaacaccauagaaa

SEQ ID NO: 1577820 - RNA, 19 nt, Homo sapiens
  misc_RNA (1)...(19): siRNA sense strand
gccuacagccacuccaaua

SEQ ID NO: 1577821 - RNA, 19 nt, Homo sapiens
  misc_RNA (1)...(19): siRNA sense strand
uugaaaucgugcaaaguuu

SEQ ID NO: 1577822 - RNA, 19 nt, Homo sapiens
  misc_RNA (1)...(19): siRNA sense strand
gggaggaaccaauuauuac

SEQ ID NO: 1577823 - RNA, 19 nt, Homo sapiens
  misc_RNA (1)...(19): siRNA sense strand
gaagaaaagaagaagauug

SEQ ID NO: 1577824 - RNA, 19 nt, Homo sapiens
  misc_RNA (1)...(19): siRNA sense strand
auaaagaugccguacaaug

SEQ ID NO: 1577825 - RNA, 19 nt, Homo sapiens
  misc_RNA (1)...(19): siRNA sense strand
ucuugaaccugcucuugaa

SEQ ID NO: 1577826 - RNA, 19 nt, Homo sapiens
  misc_RNA (1)...(19): siRNA sense strand
acuaguaaccagcuucuaa

SEQ ID NO: 1577827 - RNA, 19 nt, Homo sapiens
  misc_RNA (1)...(19): siRNA sense strand
cuagaugagcgcuuggaua

SEQ ID NO: 1577828 - RNA, 19 nt, Homo sapiens
  misc_RNA (1)...(19): siRNA sense strand
gccuagacaucaucaccaa

SEQ ID NO: 1577829 - RNA, 19 nt, Homo sapiens
  misc_RNA (1)...(19): siRNA sense strand
ugaagaaacaggaaucucu

SEQ ID NO: 1577830 - RNA, 19 nt, Homo sapiens
  misc_RNA (1)...(19): siRNA sense strand
gagauaugcccggaaacaa

SEQ ID NO: 1577831 - RNA, 19 nt, Homo sapiens
  misc_RNA (1)...(19): siRNA sense strand
gcucugaaacaaguaacua

SEQ ID NO: 1577832 - RNA, 19 nt, Homo sapiens
  misc_RNA (1)...(19): siRNA sense strand
cuaguaaccagcuucuaaa

SEQ ID NO: 1577833 - RNA, 19 nt, Homo sapiens
  misc_RNA (1)...(19): siRNA sense strand
gaaucucucauagugaauu

SEQ ID NO: 1577834 - RNA, 19 nt, Homo sapiens
  misc_RNA (1)...(19): siRNA sense strand
auagaaagucagaguguuu

SEQ ID NO: 1577835 - RNA, 19 nt, Homo sapiens
  misc_RNA (1)...(19): siRNA sense strand
agauaugcccggaaacaaa

SEQ ID NO: 1577836 - RNA, 19 nt, Homo sapiens
  misc_RNA (1)...(19): siRNA sense strand
ucaacaccauagaaaguca

SEQ ID NO: 1577837 - RNA, 19 nt, Homo sapiens
  misc_RNA (1)...(19): siRNA sense strand
caaaauuccuauuguugug

SEQ ID NO: 1577838 - RNA, 19 nt, Homo sapiens
  misc_RNA (1)...(19): siRNA sense strand
cuugaaaucgugcaaaguu

SEQ ID NO: 1577839 - RNA, 19 nt, Homo sapiens
  misc_RNA (1)...(19): siRNA sense strand
uauugaggcucugaaacaa

SEQ ID NO: 1577840 - RNA, 19 nt, Homo sapiens
  misc_RNA (1)...(19): siRNA sense strand
cuaucaacaugguaucuuc

SEQ ID NO: 1577841 - RNA, 19 nt, Homo sapiens
  misc_RNA (1)...(19): siRNA sense strand
gcaacggacccuaccucuu

SEQ ID NO: 1577842 - RNA, 19 nt, Homo sapiens
  misc_RNA (1)...(19): siRNA sense strand
gaacuaagagauuuucaca

SEQ ID NO: 1577843 - RNA, 19 nt, Homo sapiens
  misc_RNA (1)...(19): siRNA sense strand
ccaaaucccacuugaacca

SEQ ID NO: 1577844 - RNA, 19 nt, Homo sapiens
  misc_RNA (1)...(19): siRNA sense strand
ugaccucugugaucgaauc

SEQ ID NO: 1577845 - RNA, 19 nt, Homo sapiens
  misc_RNA (1)...(19): siRNA sense strand
ggagacuaguaaccagcuu

SEQ ID NO: 1577846 - RNA, 19 nt, Homo sapiens
  misc_RNA (1)...(19): siRNA sense strand
acuaagagauuuucacaga

SEQ ID NO: 1577847 - RNA, 19 nt, Homo sapiens
  misc_RNA (1)...(19): siRNA sense strand
gaggaaccaauuauuacau

SEQ ID NO: 1577848 - RNA, 19 nt, Homo sapiens
  misc_RNA (1)...(19): siRNA sense strand
ccuacagccacuccaauaa

SEQ ID NO: 1577849 - RNA, 19 nt, Homo sapiens
  misc_RNA (1)...(19): siRNA sense strand
gaagugggaagagucuguu

SEQ ID NO: 1577850 - RNA, 19 nt, Homo sapiens
  misc_RNA (1)...(19): siRNA sense strand
ccaggacuaucaacauggu

SEQ ID NO: 1577851 - RNA, 19 nt, Homo sapiens
  misc_RNA (1)...(19): siRNA sense strand
uggauaagaggguggauga

SEQ ID NO: 1577852 - RNA, 19 nt, Homo sapiens
  misc_RNA (1)...(19): siRNA sense strand
ccaagcugcauccacauga

SEQ ID NO: 1577853 - RNA, 19 nt, Homo sapiens
  misc_RNA (1)...(19): siRNA sense strand
aggauggucuuguacuuca

SEQ ID NO: 1577854 - RNA, 19 nt, Homo sapiens
  misc_RNA (1)...(19): siRNA sense strand
gaaaguucuugucaauacc

SEQ ID NO: 1577855 - RNA, 19 nt, Homo sapiens
  misc_RNA (1)...(19): siRNA sense strand
ggacagaucucuugacuac

SEQ ID NO: 1577856 - RNA, 19 nt, Homo sapiens
  misc_RNA (1)...(19): siRNA sense strand
gaagaaacauggaaaugga

SEQ ID NO: 1577857 - RNA, 19 nt, Homo sapiens
  misc_RNA (1)...(19): siRNA sense strand
gagaaacccugugaaugua

SEQ ID NO: 1577858 - RNA, 19 nt, Homo sapiens
  misc_RNA (1)...(19): siRNA sense strand
gaaccuggccucaguagaa

SEQ ID NO: 1577859 - RNA, 19 nt, Homo sapiens
  misc_RNA (1)...(19): siRNA sense strand
agaaauuccucaugccuua

SEQ ID NO: 1577860 - RNA, 19 nt, Homo sapiens
  misc_RNA (1)...(19): siRNA sense strand
ggauagaucuugguucaga

SEQ ID NO: 1577861 - RNA, 19 nt, Homo sapiens
  misc_RNA (1)...(19): siRNA sense strand
ggaaaagccuccccuguuu

SEQ ID NO: 1577862 - RNA, 19 nt, Homo sapiens
  misc_RNA (1)...(19): siRNA sense strand
cagccuaacucaacaugua

SEQ ID NO: 1577863 - RNA, 19 nt, Homo sapiens
  misc_RNA (1)...(19): siRNA sense strand
ucaguagaauggcgacuua

SEQ ID NO: 1577864 - RNA, 19 nt, Homo sapiens
  misc_RNA (1)...(19): siRNA sense strand
ccucaugccuuaauaauca

SEQ ID NO: 1577865 - RNA, 19 nt, Homo sapiens
  misc_RNA (1)...(19): siRNA sense strand
ggacagaagcccuaugaau

SEQ ID NO: 1577866 - RNA, 19 nt, Homo sapiens
  misc_RNA (1)...(19): siRNA sense strand
gaaacccugugaauguaaa

SEQ ID NO: 1577867 - RNA, 19 nt, Homo sapiens
  misc_RNA (1)...(19): siRNA sense strand
gacagaagcccuaugaaug

SEQ ID NO: 1577868 - RNA, 19 nt, Homo sapiens
  misc_RNA (1)...(19): siRNA sense strand
gggaaagccuucuguacau

SEQ ID NO: 1577869 - RNA, 19 nt, Homo sapiens
  misc_RNA (1)...(19): siRNA sense strand
caggauagaucuugguuca

SEQ ID NO: 1577870 - RNA, 19 nt, Homo sapiens
  misc_RNA (1)...(19): siRNA sense strand
gggaaguguuucuuaauca

SEQ ID NO: 1577871 - RNA, 19 nt, Homo sapiens
  misc_RNA (1)...(19): siRNA sense strand
ccacggaggucauguuucu

SEQ ID NO: 1577872 - RNA, 19 nt, Homo sapiens
  misc_RNA (1)...(19): siRNA sense strand
gcagagaaacccugugaau

SEQ ID NO: 1577873 - RNA, 19 nt, Homo sapiens
  misc_RNA (1)...(19): siRNA sense strand
ggaaaagccuucagcucua

SEQ ID NO: 1577874 - RNA, 19 nt, Homo sapiens
  misc_RNA (1)...(19): siRNA sense strand
ggagaagcccuuugcaugu

SEQ ID NO: 1577875 - RNA, 19 nt, Homo sapiens
  misc_RNA (1)...(19): siRNA sense strand
cuaaacacguccaaacaga

SEQ ID NO: 1577876 - RNA, 19 nt, Homo sapiens
  misc_RNA (1)...(19): siRNA sense strand
gagaagcccuuugcaugug

SEQ ID NO: 1577877 - RNA, 19 nt, Homo sapiens
  misc_RNA (1)...(19): siRNA sense strand
gggaaggccuuuagguaca

SEQ ID NO: 1577878 - RNA, 19 nt, Homo sapiens
  misc_RNA (1)...(19): siRNA sense strand
cagaagcccuaugaaugua

SEQ ID NO: 1577879 - RNA, 19 nt, Homo sapiens
  misc_RNA (1)...(19): siRNA sense strand
ucucaggucuuucuaaaca

SEQ ID NO: 1577880 - RNA, 19 nt, Homo sapiens
  misc_RNA (1)...(19): siRNA sense strand
cgacguggcuguggacuuc

SEQ ID NO: 1577881 - RNA, 19 nt, Homo sapiens
  misc_RNA (1)...(19): siRNA sense strand
guggcuggcuggcugauaa

SEQ ID NO: 1577882 - RNA, 19 nt, Homo sapiens
  misc_RNA (1)...(19): siRNA sense strand
gcuggcugauaaauuguua

SEQ ID NO: 1577883 - RNA, 19 nt, Homo sapiens
  misc_RNA (1)...(19): siRNA sense strand
agagaaacccugugaaugu

SEQ ID NO: 1577884 - RNA, 19 nt, Homo sapiens
  misc_RNA (1)...(19): siRNA sense strand
gaaagccugcgguggguuu

SEQ ID NO: 1577885 - RNA, 19 nt, Homo sapiens
  misc_RNA (1)...(19): siRNA sense strand
cgccacaccuguugaaaug

SEQ ID NO: 1577886 - RNA, 19 nt, Homo sapiens
  misc_RNA (1)...(19): siRNA sense strand
gaacacacacgggcgagaa

SEQ ID NO: 1577887 - RNA, 19 nt, Homo sapiens
  misc_RNA (1)...(19): siRNA sense strand
ggaaagccuucuguacauc

SEQ ID NO: 1577888 - RNA, 19 nt, Homo sapiens
  misc_RNA (1)...(19): siRNA sense strand
gagaagaaacauggaaaug

SEQ ID NO: 1577889 - RNA, 19 nt, Homo sapiens
  misc_RNA (1)...(19): siRNA sense strand
aaacagacccuggacagaa

SEQ ID NO: 1577890 - RNA, 19 nt, Homo sapiens
  misc_RNA (1)...(19): siRNA sense strand
acaguugugugucuaauca

SEQ ID NO: 1577891 - RNA, 19 nt, Homo sapiens
  misc_RNA (1)...(19): siRNA sense strand
gaauucaugcugcagagaa

SEQ ID NO: 1577892 - RNA, 19 nt, Homo sapiens
  misc_RNA (1)...(19): siRNA sense strand
ggagaagaaacauggaaau

SEQ ID NO: 1577893 - RNA, 19 nt, Homo sapiens
  misc_RNA (1)...(19): siRNA sense strand
gcuguggccuuacuagaca

SEQ ID NO: 1577894 - RNA, 19 nt, Homo sapiens
  misc_RNA (1)...(19): siRNA sense strand
ccacguauguagggaaugu

SEQ ID NO: 1577895 - RNA, 19 nt, Homo sapiens
  misc_RNA (1)...(19): siRNA sense strand
ggaaguguuucuuaaucag

SEQ ID NO: 1577896 - RNA, 19 nt, Homo sapiens
  misc_RNA (1)...(19): siRNA sense strand
ggacuucacccaggaggaa

SEQ ID NO: 1577897 - RNA, 19 nt, Homo sapiens
  misc_RNA (1)...(19): siRNA sense strand
gugggaaggccuuuaggua

SEQ ID NO: 1577898 - RNA, 19 nt, Homo sapiens
  misc_RNA (1)...(19): siRNA sense strand
cuggcuggcugauaaauug

SEQ ID NO: 1577899 - RNA, 19 nt, Homo sapiens
  misc_RNA (1)...(19): siRNA sense strand
guggagaagcuuucaguga

SEQ ID NO: 1577900 - RNA, 19 nt, Homo sapiens
  misc_RNA (1)...(19): siRNA sense strand
acagaagcccuaugaaugu

SEQ ID NO: 1577901 - RNA, 19 nt, Homo sapiens
  misc_RNA (1)...(19): siRNA sense strand
acagaucucuugacuacag

SEQ ID NO: 1577902 - RNA, 19 nt, Homo sapiens
  misc_RNA (1)...(19): siRNA sense strand
gaaauuccucaugccuuaa

SEQ ID NO: 1577903 - RNA, 19 nt, Homo sapiens
  misc_RNA (1)...(19): siRNA sense strand
acucucaggucuuucuaaa

SEQ ID NO: 1577904 - RNA, 19 nt, Homo sapiens
  misc_RNA (1)...(19): siRNA sense strand
ucacaacggagaagaaaca

SEQ ID NO: 1577905 - RNA, 19 nt, Homo sapiens
  misc_RNA (1)...(19): siRNA sense strand
gguuuuaucuacugaauga

SEQ ID NO: 1577906 - RNA, 19 nt, Homo sapiens
  misc_RNA (1)...(19): siRNA sense strand
ccacaccuguugaaaugca

SEQ ID NO: 1577907 - RNA, 19 nt, Homo sapiens
  misc_RNA (1)...(19): siRNA sense strand
gagaugugaugcuggaaaa

SEQ ID NO: 1577908 - RNA, 19 nt, Homo sapiens
  misc_RNA (1)...(19): siRNA sense strand
ggaauaaaacccauacaug

SEQ ID NO: 1577909 - RNA, 19 nt, Homo sapiens
  misc_RNA (1)...(19): siRNA sense strand
guucagagcaucaaaugag

SEQ ID NO: 1577910 - RNA, 19 nt, Homo sapiens
  misc_RNA (1)...(19): siRNA sense strand
cagcucuacuccaaauguu

SEQ ID NO: 1577911 - RNA, 19 nt, Homo sapiens
  misc_RNA (1)...(19): siRNA sense strand
gaagcccuaugaauguaag

SEQ ID NO: 1577912 - RNA, 19 nt, Homo sapiens
  misc_RNA (1)...(19): siRNA sense strand
gagcaucaaaugagacaca

SEQ ID NO: 1577913 - RNA, 19 nt, Homo sapiens
  misc_RNA (1)...(19): siRNA sense strand
gccuucagcucuacuccaa

SEQ ID NO: 1577914 - RNA, 19 nt, Homo sapiens
  misc_RNA (1)...(19): siRNA sense strand
cuucagcucuacuccaaau

SEQ ID NO: 1577915 - RNA, 19 nt, Homo sapiens
  misc_RNA (1)...(19): siRNA sense strand
gggccuuacugagcaugua

SEQ ID NO: 1577916 - RNA, 19 nt, Homo sapiens
  misc_RNA (1)...(19): siRNA sense strand
acugugcgcuguggccuua

SEQ ID NO: 1577917 - RNA, 19 nt, Homo sapiens
  misc_RNA (1)...(19): siRNA sense strand
caggaggaauggacuuuac

SEQ ID NO: 1577918 - RNA, 19 nt, Homo sapiens
  misc_RNA (1)...(19): siRNA sense strand
gaaugugggaaggccuuua

SEQ ID NO: 1577919 - RNA, 19 nt, Homo sapiens
  misc_RNA (1)...(19): siRNA sense strand
ccugugaauuggaagaaug

SEQ ID NO: 1577920 - RNA, 19 nt, Homo sapiens
  misc_RNA (1)...(19): siRNA sense strand
cagagaaacccugugaaug

SEQ ID NO: 1577921 - RNA, 19 nt, Homo sapiens
  misc_RNA (1)...(19): siRNA sense strand
ggcaagaagccacaaugga

SEQ ID NO: 1577922 - RNA, 19 nt, Homo sapiens
  misc_RNA (1)...(19): siRNA sense strand
ccaggaggaauggacuuua

SEQ ID NO: 1577923 - RNA, 19 nt, Homo sapiens
  misc_RNA (1)...(19): siRNA sense strand
gaauuggaagaauguggaa

SEQ ID NO: 1577924 - RNA, 19 nt, Homo sapiens
  misc_RNA (1)...(19): siRNA sense strand
cgggaaagccuucuguaca

SEQ ID NO: 1577925 - RNA, 19 nt, Homo sapiens
  misc_RNA (1)...(19): siRNA sense strand
uuacuggacccaucucaga

SEQ ID NO: 1577926 - RNA, 19 nt, Homo sapiens
  misc_RNA (1)...(19): siRNA sense strand
gcacuucggcaggauagau

SEQ ID NO: 1577927 - RNA, 19 nt, Homo sapiens
  misc_RNA (1)...(19): siRNA sense strand
caaacagacccuggacaga

SEQ ID NO: 1577928 - RNA, 19 nt, Homo sapiens
  misc_RNA (1)...(19): siRNA sense strand
gcccacggaggucauguuu

SEQ ID NO: 1577929 - RNA, 19 nt, Homo sapiens
  misc_RNA (1)...(19): siRNA sense strand
acgagaaccuggccucagu

SEQ ID NO: 1577930 - RNA, 19 nt, Homo sapiens
  misc_RNA (1)...(19): siRNA sense strand
gaagucacaacggagaaga

SEQ ID NO: 1577931 - RNA, 19 nt, Homo sapiens
  misc_RNA (1)...(19): siRNA sense strand
gaaguguuucuuaaucagu

SEQ ID NO: 1577932 - RNA, 19 nt, Homo sapiens
  misc_RNA (1)...(19): siRNA sense strand
ggaggaauggacuuuacug

SEQ ID NO: 1577933 - RNA, 19 nt, Homo sapiens
  misc_RNA (1)...(19): siRNA sense strand
agacacagacggcaagaag

SEQ ID NO: 1577934 - RNA, 19 nt, Homo sapiens
  misc_RNA (1)...(19): siRNA sense strand
gcgccacaccuguugaaau

SEQ ID NO: 1577935 - RNA, 19 nt, Homo sapiens
  misc_RNA (1)...(19): siRNA sense strand
gcucuacuccaaauguugu

SEQ ID NO: 1577936 - RNA, 19 nt, Homo sapiens
  misc_RNA (1)...(19): siRNA sense strand
gcacgugcgggaagucaca

SEQ ID NO: 1577937 - RNA, 19 nt, Homo sapiens
  misc_RNA (1)...(19): siRNA sense strand
acuggacucucaggucuuu

SEQ ID NO: 1577938 - RNA, 19 nt, Homo sapiens
  misc_RNA (1)...(19): siRNA sense strand
guacacugccuaccuuacu

SEQ ID NO: 1577939 - RNA, 19 nt, Homo sapiens
  misc_RNA (1)...(19): siRNA sense strand
guagaauggcgacuuaaaa

SEQ ID NO: 1577940 - RNA, 19 nt, Homo sapiens
  misc_RNA (1)...(19): siRNA sense strand
aauucaugcugcagagaaa

SEQ ID NO: 1577941 - RNA, 19 nt, Homo sapiens
  misc_RNA (1)...(19): siRNA sense strand
uguaaggacugugggaaag

SEQ ID NO: 1577942 - RNA, 19 nt, Homo sapiens
  misc_RNA (1)...(19): siRNA sense strand
ccaggacgcggugaccuuu

SEQ ID NO: 1577943 - RNA, 19 nt, Homo sapiens
  misc_RNA (1)...(19): siRNA sense strand
gcuggcuggcugauaaauu

SEQ ID NO: 1577944 - RNA, 19 nt, Homo sapiens
  misc_RNA (1)...(19): siRNA sense strand
ggacucucaggucuuucua

SEQ ID NO: 1577945 - RNA, 19 nt, Homo sapiens
  misc_RNA (1)...(19): siRNA sense strand
agaaacccugugaauguaa

SEQ ID NO: 1577946 - RNA, 19 nt, Homo sapiens
  misc_RNA (1)...(19): siRNA sense strand
aggacgcggugaccuuuga

SEQ ID NO: 1577947 - RNA, 19 nt, Homo sapiens
  misc_RNA (1)...(19): siRNA sense strand
agaagaaacauggaaaugg

SEQ ID NO: 1577948 - RNA, 19 nt, Homo sapiens
  misc_RNA (1)...(19): siRNA sense strand
ggggaaguguuucuuaauc

SEQ ID NO: 1577949 - RNA, 19 nt, Homo sapiens
  misc_RNA (1)...(19): siRNA sense strand
cgggacagaucucuugacu

SEQ ID NO: 1577950 - RNA, 19 nt, Homo sapiens
  misc_RNA (1)...(19): siRNA sense strand
cgagaaccuggccucagua

SEQ ID NO: 1577951 - RNA, 19 nt, Homo sapiens
  misc_RNA (1)...(19): siRNA sense strand
gagagcaguuuuccguguu

SEQ ID NO: 1577952 - RNA, 19 nt, Homo sapiens
  misc_RNA (1)...(19): siRNA sense strand
gugggaaagcucuaacuca

SEQ ID NO: 1577953 - RNA, 19 nt, Homo sapiens
  misc_RNA (1)...(19): siRNA sense strand
guggggaaguguuucuuaa

SEQ ID NO: 1577954 - RNA, 19 nt, Homo sapiens
  misc_RNA (1)...(19): siRNA sense strand
gaaaagccuucagcucuac

SEQ ID NO: 1577955 - RNA, 19 nt, Homo sapiens
  misc_RNA (1)...(19): siRNA sense strand
gcaugaaacugagugaaga

SEQ ID NO: 1577956 - RNA, 19 nt, Homo sapiens
  misc_RNA (1)...(19): siRNA sense strand
cuacacggguuucaucaaa

SEQ ID NO: 1577957 - RNA, 19 nt, Homo sapiens
  misc_RNA (1)...(19): siRNA sense strand
ccuggugcauucagauuua

SEQ ID NO: 1577958 - RNA, 19 nt, Homo sapiens
  misc_RNA (1)...(19): siRNA sense strand
ucaagaaguucaugguugu

SEQ ID NO: 1577959 - RNA, 19 nt, Homo sapiens
  misc_RNA (1)...(19): siRNA sense strand
caucaaagugcaucugaaa

SEQ ID NO: 1577960 - RNA, 19 nt, Homo sapiens
  misc_RNA (1)...(19): siRNA sense strand
gaagaucgacagcuacaac

SEQ ID NO: 1577961 - RNA, 19 nt, Homo sapiens
  misc_RNA (1)...(19): siRNA sense strand
ucaagcagcugcacaucag

SEQ ID NO: 1577962 - RNA, 19 nt, Homo sapiens
  misc_RNA (1)...(19): siRNA sense strand
ugcaggagaucaagcagaa

SEQ ID NO: 1577963 - RNA, 19 nt, Homo sapiens
  misc_RNA (1)...(19): siRNA sense strand
gcaccaccaccgucaguga

SEQ ID NO: 1577964 - RNA, 19 nt, Homo sapiens
  misc_RNA (1)...(19): siRNA sense strand
caaagugcaucugaaacuc

SEQ ID NO: 1577965 - RNA, 19 nt, Homo sapiens
  misc_RNA (1)...(19): siRNA sense strand
agcagaagaucgacagcua

SEQ ID NO: 1577966 - RNA, 19 nt, Homo sapiens
  misc_RNA (1)...(19): siRNA sense strand
acacaaggacggacaagug

SEQ ID NO: 1577967 - RNA, 19 nt, Homo sapiens
  misc_RNA (1)...(19): siRNA sense strand
gcucaagaaguucaugguu

SEQ ID NO: 1577968 - RNA, 19 nt, Homo sapiens
  misc_RNA (1)...(19): siRNA sense strand
ggugcauucagauuuauuu

SEQ ID NO: 1577969 - RNA, 19 nt, Homo sapiens
  misc_RNA (1)...(19): siRNA sense strand
acacggguuucaucaaagu

SEQ ID NO: 1577970 - RNA, 19 nt, Homo sapiens
  misc_RNA (1)...(19): siRNA sense strand
ucaucaaagugcaucugaa

SEQ ID NO: 1577971 - RNA, 19 nt, Homo sapiens
  misc_RNA (1)...(19): siRNA sense strand
uuaagcggauacacaagga

SEQ ID NO: 1577972 - RNA, 19 nt, Homo sapiens
  misc_RNA (1)...(19): siRNA sense strand
ucaaagugcaucugaaacu

SEQ ID NO: 1577973 - RNA, 19 nt, Homo sapiens
  misc_RNA (1)...(19): siRNA sense strand
caggagaucaagcagaaga

SEQ ID NO: 1577974 - RNA, 19 nt, Homo sapiens
  misc_RNA (1)...(19): siRNA sense strand
ggacaauccccagaaguuu

SEQ ID NO: 1577975 - RNA, 19 nt, Homo sapiens
  misc_RNA (1)...(19): siRNA sense strand
ggcaugaaacugagugaag

SEQ ID NO: 1577976 - RNA, 19 nt, Homo sapiens
  misc_RNA (1)...(19): siRNA sense strand
cuacaacacgcgagagaag

SEQ ID NO: 1577977 - RNA, 19 nt, Homo sapiens
  misc_RNA (1)...(19): siRNA sense strand
ccacacugcaggagaucaa

SEQ ID NO: 1577978 - RNA, 19 nt, Homo sapiens
  misc_RNA (1)...(19): siRNA sense strand
acaacacgcgagagaagaa

SEQ ID NO: 1577979 - RNA, 19 nt, Homo sapiens
  misc_RNA (1)...(19): siRNA sense strand
cagaagaucgacagcuaca

SEQ ID NO: 1577980 - RNA, 19 nt, Homo sapiens
  misc_RNA (1)...(19): siRNA sense strand
gcaugaaacugagugaaga

SEQ ID NO: 1577981 - RNA, 19 nt, Homo sapiens
  misc_RNA (1)...(19): siRNA sense strand
cuacacggguuucaucaaa

SEQ ID NO: 1577982 - RNA, 19 nt, Homo sapiens
  misc_RNA (1)...(19): siRNA sense strand
ucaagaaguucaugguugu

SEQ ID NO: 1577983 - RNA, 19 nt, Homo sapiens
  misc_RNA (1)...(19): siRNA sense strand
caucaaagugcaucugaaa

SEQ ID NO: 1577984 - RNA, 19 nt, Homo sapiens
  misc_RNA (1)...(19): siRNA sense strand
gaagaucgacagcuacaac

SEQ ID NO: 1577985 - RNA, 19 nt, Homo sapiens
  misc_RNA (1)...(19): siRNA sense strand
ucaagcagcugcacaucag

SEQ ID NO: 1577986 - RNA, 19 nt, Homo sapiens
  misc_RNA (1)...(19): siRNA sense strand
ugcaggagaucaagcagaa

SEQ ID NO: 1577987 - RNA, 19 nt, Homo sapiens
  misc_RNA (1)...(19): siRNA sense strand
gcaccaccaccgucaguga

SEQ ID NO: 1577988 - RNA, 19 nt, Homo sapiens
  misc_RNA (1)...(19): siRNA sense strand
caaagugcaucugaaacuc

SEQ ID NO: 1577989 - RNA, 19 nt, Homo sapiens
  misc_RNA (1)...(19): siRNA sense strand
agcagaagaucgacagcua

SEQ ID NO: 1577990 - RNA, 19 nt, Homo sapiens
  misc_RNA (1)...(19): siRNA sense strand
acacaaggacggacaagug

SEQ ID NO: 1577991 - RNA, 19 nt, Homo sapiens
  misc_RNA (1)...(19): siRNA sense strand
gcucaagaaguucaugguu

SEQ ID NO: 1577992 - RNA, 19 nt, Homo sapiens
  misc_RNA (1)...(19): siRNA sense strand
acacggguuucaucaaagu

SEQ ID NO: 1577993 - RNA, 19 nt, Homo sapiens
  misc_RNA (1)...(19): siRNA sense strand
ucaucaaagugcaucugaa

SEQ ID NO: 1577994 - RNA, 19 nt, Homo sapiens
  misc_RNA (1)...(19): siRNA sense strand
uuaagcggauacacaagga

SEQ ID NO: 1577995 - RNA, 19 nt, Homo sapiens
  misc_RNA (1)...(19): siRNA sense strand
ucaaagugcaucugaaacu

SEQ ID NO: 1577996 - RNA, 19 nt, Homo sapiens
  misc_RNA (1)...(19): siRNA sense strand
caggagaucaagcagaaga

SEQ ID NO: 1577997 - RNA, 19 nt, Homo sapiens
  misc_RNA (1)...(19): siRNA sense strand
ggacaauccccagaaguuu

SEQ ID NO: 1577998 - RNA, 19 nt, Homo sapiens
  misc_RNA (1)...(19): siRNA sense strand
cuacaacacgcgagagaag

SEQ ID NO: 1577999 - RNA, 19 nt, Homo sapiens
  misc_RNA (1)...(19): siRNA sense strand
ccacacugcaggagaucaa

SEQ ID NO: 1578000 - RNA, 19 nt, Homo sapiens
  misc_RNA (1)...(19): siRNA sense strand
ggcaugaaacugagugaag

SEQ ID NO: 1578001 - RNA, 19 nt, Homo sapiens
  misc_RNA (1)...(19): siRNA sense strand
acaacacgcgagagaagaa

SEQ ID NO: 1578002 - RNA, 19 nt, Homo sapiens
  misc_RNA (1)...(19): siRNA sense strand
cagaagaucgacagcuaca

SEQ ID NO: 1578003 - RNA, 19 nt, Homo sapiens
  misc_RNA (1)...(19): siRNA sense strand
gcaugaaacugagugaaga

SEQ ID NO: 1578004 - RNA, 19 nt, Homo sapiens
  misc_RNA (1)...(19): siRNA sense strand
cuacacggguuucaucaaa

SEQ ID NO: 1578005 - RNA, 19 nt, Homo sapiens
  misc_RNA (1)...(19): siRNA sense strand
ucaagaaguucaugguugu

SEQ ID NO: 1578006 - RNA, 19 nt, Homo sapiens
  misc_RNA (1)...(19): siRNA sense strand
caucaaagugcaucugaaa

SEQ ID NO: 1578007 - RNA, 19 nt, Homo sapiens
  misc_RNA (1)...(19): siRNA sense strand
gaagaucgacagcuacaac

SEQ ID NO: 1578008 - RNA, 19 nt, Homo sapiens
  misc_RNA (1)...(19): siRNA sense strand
ucaagcagcugcacaucag

SEQ ID NO: 1578009 - RNA, 19 nt, Homo sapiens
  misc_RNA (1)...(19): siRNA sense strand
ugcaggagaucaagcagaa

SEQ ID NO: 1578010 - RNA, 19 nt, Homo sapiens
  misc_RNA (1)...(19): siRNA sense strand
gcaccaccaccgucaguga

SEQ ID NO: 1578011 - RNA, 19 nt, Homo sapiens
  misc_RNA (1)...(19): siRNA sense strand
caaagugcaucugaaacuc

SEQ ID NO: 1578012 - RNA, 19 nt, Homo sapiens
  misc_RNA (1)...(19): siRNA sense strand
agcagaagaucgacagcua

SEQ ID NO: 1578013 - RNA, 19 nt, Homo sapiens
  misc_RNA (1)...(19): siRNA sense strand
acacaaggacggacaagug

SEQ ID NO: 1578014 - RNA, 19 nt, Homo sapiens
  misc_RNA (1)...(19): siRNA sense strand
gcucaagaaguucaugguu

SEQ ID NO: 1578015 - RNA, 19 nt, Homo sapiens
  misc_RNA (1)...(19): siRNA sense strand
acacggguuucaucaaagu

SEQ ID NO: 1578016 - RNA, 19 nt, Homo sapiens
  misc_RNA (1)...(19): siRNA sense strand
ucaucaaagugcaucugaa

SEQ ID NO: 1578017 - RNA, 19 nt, Homo sapiens
  misc_RNA (1)...(19): siRNA sense strand
uuaagcggauacacaagga

SEQ ID NO: 1578018 - RNA, 19 nt, Homo sapiens
  misc_RNA (1)...(19): siRNA sense strand
ucaaagugcaucugaaacu

SEQ ID NO: 1578019 - RNA, 19 nt, Homo sapiens
  misc_RNA (1)...(19): siRNA sense strand
caggagaucaagcagaaga

SEQ ID NO: 1578020 - RNA, 19 nt, Homo sapiens
  misc_RNA (1)...(19): siRNA sense strand
ggacaauccccagaaguuu

SEQ ID NO: 1578021 - RNA, 19 nt, Homo sapiens
  misc_RNA (1)...(19): siRNA sense strand
cuacaacacgcgagagaag

SEQ ID NO: 1578022 - RNA, 19 nt, Homo sapiens
  misc_RNA (1)...(19): siRNA sense strand
ccacacugcaggagaucaa

SEQ ID NO: 1578023 - RNA, 19 nt, Homo sapiens
  misc_RNA (1)...(19): siRNA sense strand
ggcaugaaacugagugaag

SEQ ID NO: 1578024 - RNA, 19 nt, Homo sapiens
  misc_RNA (1)...(19): siRNA sense strand
acaacacgcgagagaagaa

SEQ ID NO: 1578025 - RNA, 19 nt, Homo sapiens
  misc_RNA (1)...(19): siRNA sense strand
cagaagaucgacagcuaca

SEQ ID NO: 1578026 - RNA, 19 nt, Homo sapiens
  misc_RNA (1)...(19): siRNA sense strand
gcaugaaacugagugaaga

SEQ ID NO: 1578027 - RNA, 19 nt, Homo sapiens
  misc_RNA (1)...(19): siRNA sense strand
cuacacggguuucaucaaa

SEQ ID NO: 1578028 - RNA, 19 nt, Homo sapiens
  misc_RNA (1)...(19): siRNA sense strand
ucaagaaguucaugguugu

SEQ ID NO: 1578029 - RNA, 19 nt, Homo sapiens
  misc_RNA (1)...(19): siRNA sense strand
caucaaagugcaucugaaa

SEQ ID NO: 1578030 - RNA, 19 nt, Homo sapiens
  misc_RNA (1)...(19): siRNA sense strand
gaagaucgacagcuacaac

SEQ ID NO: 1578031 - RNA, 19 nt, Homo sapiens
  misc_RNA (1)...(19): siRNA sense strand
ucaagcagcugcacaucag

SEQ ID NO: 1578032 - RNA, 19 nt, Homo sapiens
  misc_RNA (1)...(19): siRNA sense strand
ugcaggagaucaagcagaa

SEQ ID NO: 1578033 - RNA, 19 nt, Homo sapiens
  misc_RNA (1)...(19): siRNA sense strand
gcaccaccaccgucaguga

SEQ ID NO: 1578034 - RNA, 19 nt, Homo sapiens
  misc_RNA (1)...(19): siRNA sense strand
caaagugcaucugaaacuc

SEQ ID NO: 1578035 - RNA, 19 nt, Homo sapiens
  misc_RNA (1)...(19): siRNA sense strand
agcagaagaucgacagcua

SEQ ID NO: 1578036 - RNA, 19 nt, Homo sapiens
  misc_RNA (1)...(19): siRNA sense strand
acacaaggacggacaagug

SEQ ID NO: 1578037 - RNA, 19 nt, Homo sapiens
  misc_RNA (1)...(19): siRNA sense strand
gcucaagaaguucaugguu

SEQ ID NO: 1578038 - RNA, 19 nt, Homo sapiens
  misc_RNA (1)...(19): siRNA sense strand
acacggguuucaucaaagu

SEQ ID NO: 1578039 - RNA, 19 nt, Homo sapiens
  misc_RNA (1)...(19): siRNA sense strand
ucaucaaagugcaucugaa

SEQ ID NO: 1578040 - RNA, 19 nt, Homo sapiens
  misc_RNA (1)...(19): siRNA sense strand
uuaagcggauacacaagga

SEQ ID NO: 1578041 - RNA, 19 nt, Homo sapiens
  misc_RNA (1)...(19): siRNA sense strand
ucaaagugcaucugaaacu

SEQ ID NO: 1578042 - RNA, 19 nt, Homo sapiens
  misc_RNA (1)...(19): siRNA sense strand
caggagaucaagcagaaga

SEQ ID NO: 1578043 - RNA, 19 nt, Homo sapiens
  misc_RNA (1)...(19): siRNA sense strand
ggacaauccccagaaguuu

SEQ ID NO: 1578044 - RNA, 19 nt, Homo sapiens
  misc_RNA (1)...(19): siRNA sense strand
cuacaacacgcgagagaag

SEQ ID NO: 1578045 - RNA, 19 nt, Homo sapiens
  misc_RNA (1)...(19): siRNA sense strand
ccacacugcaggagaucaa

SEQ ID NO: 1578046 - RNA, 19 nt, Homo sapiens
  misc_RNA (1)...(19): siRNA sense strand
ggcaugaaacugagugaag

SEQ ID NO: 1578047 - RNA, 19 nt, Homo sapiens
  misc_RNA (1)...(19): siRNA sense strand
acaacacgcgagagaagaa

SEQ ID NO: 1578048 - RNA, 19 nt, Homo sapiens
  misc_RNA (1)...(19): siRNA sense strand
cagaagaucgacagcuaca

SEQ ID NO: 1578049 - RNA, 19 nt, Homo sapiens
  misc_RNA (1)...(19): siRNA sense strand
ggaaacagcaucaaacaua

SEQ ID NO: 1578050 - RNA, 19 nt, Homo sapiens
  misc_RNA (1)...(19): siRNA sense strand
gaaacagcaucaaacauaa

SEQ ID NO: 1578051 - RNA, 19 nt, Homo sapiens
  misc_RNA (1)...(19): siRNA sense strand
gagaaacccuauaaaugua

SEQ ID NO: 1578052 - RNA, 19 nt, Homo sapiens
  misc_RNA (1)...(19): siRNA sense strand
ggacacaucugaaucaaca

SEQ ID NO: 1578053 - RNA, 19 nt, Homo sapiens
  misc_RNA (1)...(19): siRNA sense strand
gagaauuccuuccauuaaa

SEQ ID NO: 1578054 - RNA, 19 nt, Homo sapiens
  misc_RNA (1)...(19): siRNA sense strand
aaucugaacucaaaccuua

SEQ ID NO: 1578055 - RNA, 19 nt, Homo sapiens
  misc_RNA (1)...(19): siRNA sense strand
caagagauauuuaggacaa

SEQ ID NO: 1578056 - RNA, 19 nt, Homo sapiens
  misc_RNA (1)...(19): siRNA sense strand
gaaaagcccuauaaaugua

SEQ ID NO: 1578057 - RNA, 19 nt, Homo sapiens
  misc_RNA (1)...(19): siRNA sense strand
gaacaucauagacuucaua

SEQ ID NO: 1578058 - RNA, 19 nt, Homo sapiens
  misc_RNA (1)...(19): siRNA sense strand
gcagagaauuccuuccauu

SEQ ID NO: 1578059 - RNA, 19 nt, Homo sapiens
  misc_RNA (1)...(19): siRNA sense strand
gagagaaacccuauaaaug

SEQ ID NO: 1578060 - RNA, 19 nt, Homo sapiens
  misc_RNA (1)...(19): siRNA sense strand
aaacagacccgaaaucaaa

SEQ ID NO: 1578061 - RNA, 19 nt, Homo sapiens
  misc_RNA (1)...(19): siRNA sense strand
uaagagagacucccuauga

SEQ ID NO: 1578062 - RNA, 19 nt, Homo sapiens
  misc_RNA (1)...(19): siRNA sense strand
gagagacucccuaugaaua

SEQ ID NO: 1578063 - RNA, 19 nt, Homo sapiens
  misc_RNA (1)...(19): siRNA sense strand
agagaaaccuuacgaaugu

SEQ ID NO: 1578064 - RNA, 19 nt, Homo sapiens
  misc_RNA (1)...(19): siRNA sense strand
gagagaagcccuauaagug

SEQ ID NO: 1578065 - RNA, 19 nt, Homo sapiens
  misc_RNA (1)...(19): siRNA sense strand
agagaagccuugaguguaa

SEQ ID NO: 1578066 - RNA, 19 nt, Homo sapiens
  misc_RNA (1)...(19): siRNA sense strand
gaggauacaucucauucaa

SEQ ID NO: 1578067 - RNA, 19 nt, Homo sapiens
  misc_RNA (1)...(19): siRNA sense strand
ggagagaaacccuauaaau

SEQ ID NO: 1578068 - RNA, 19 nt, Homo sapiens
  misc_RNA (1)...(19): siRNA sense strand
ggauacaucucauucaaca

SEQ ID NO: 1578069 - RNA, 19 nt, Homo sapiens
  misc_RNA (1)...(19): siRNA sense strand
caacaucugaggauucaua

SEQ ID NO: 1578070 - RNA, 19 nt, Homo sapiens
  misc_RNA (1)...(19): siRNA sense strand
gagagaaaccuuacgaaug

SEQ ID NO: 1578071 - RNA, 19 nt, Homo sapiens
  misc_RNA (1)...(19): siRNA sense strand
ucacaucccuuacugaaca

SEQ ID NO: 1578072 - RNA, 19 nt, Homo sapiens
  misc_RNA (1)...(19): siRNA sense strand
gaagaaugggugauagaaa

SEQ ID NO: 1578073 - RNA, 19 nt, Homo sapiens
  misc_RNA (1)...(19): siRNA sense strand
gagaaaagcccuauaaaug

SEQ ID NO: 1578074 - RNA, 19 nt, Homo sapiens
  misc_RNA (1)...(19): siRNA sense strand
gagagaagccuugagugua

SEQ ID NO: 1578075 - RNA, 19 nt, Homo sapiens
  misc_RNA (1)...(19): siRNA sense strand
ggagacagcuucugguacu

SEQ ID NO: 1578076 - RNA, 19 nt, Homo sapiens
  misc_RNA (1)...(19): siRNA sense strand
gagacucccuaugaauaua

SEQ ID NO: 1578077 - RNA, 19 nt, Homo sapiens
  misc_RNA (1)...(19): siRNA sense strand
ggcaaagccuucagucaga

SEQ ID NO: 1578078 - RNA, 19 nt, Homo sapiens
  misc_RNA (1)...(19): siRNA sense strand
cagagaauuccuuccauua

SEQ ID NO: 1578079 - RNA, 19 nt, Homo sapiens
  misc_RNA (1)...(19): siRNA sense strand
ggagagaagcccuauaagu

SEQ ID NO: 1578080 - RNA, 19 nt, Homo sapiens
  misc_RNA (1)...(19): siRNA sense strand
agccacaccucaucucuua

SEQ ID NO: 1578081 - RNA, 19 nt, Homo sapiens
  misc_RNA (1)...(19): siRNA sense strand
caaacauaauucagacuug

SEQ ID NO: 1578082 - RNA, 19 nt, Homo sapiens
  misc_RNA (1)...(19): siRNA sense strand
caggagagaagcccuauaa

SEQ ID NO: 1578083 - RNA, 19 nt, Homo sapiens
  misc_RNA (1)...(19): siRNA sense strand
agagaaacccuauaaaugu

SEQ ID NO: 1578084 - RNA, 19 nt, Homo sapiens
  misc_RNA (1)...(19): siRNA sense strand
cgucagcauucauccuuua

SEQ ID NO: 1578085 - RNA, 19 nt, Homo sapiens
  misc_RNA (1)...(19): siRNA sense strand
ucaaacccaugagaugaua

SEQ ID NO: 1578086 - RNA, 19 nt, Homo sapiens
  misc_RNA (1)...(19): siRNA sense strand
gggagaaauuaugugaaua

SEQ ID NO: 1578087 - RNA, 19 nt, Homo sapiens
  misc_RNA (1)...(19): siRNA sense strand
gugcacaccuuaaucaaca

SEQ ID NO: 1578088 - RNA, 19 nt, Homo sapiens
  misc_RNA (1)...(19): siRNA sense strand
caacauauucuucuuacug

SEQ ID NO: 1578089 - RNA, 19 nt, Homo sapiens
  misc_RNA (1)...(19): siRNA sense strand
ggagagaagccuugagugu

SEQ ID NO: 1578090 - RNA, 19 nt, Homo sapiens
  misc_RNA (1)...(19): siRNA sense strand
ggagagaaaccuuacgaau

SEQ ID NO: 1578091 - RNA, 19 nt, Homo sapiens
  misc_RNA (1)...(19): siRNA sense strand
acuguaaucugaacucaaa

SEQ ID NO: 1578092 - RNA, 19 nt, Homo sapiens
  misc_RNA (1)...(19): siRNA sense strand
uuacgaaugugguuucugu

SEQ ID NO: 1578093 - RNA, 19 nt, Homo sapiens
  misc_RNA (1)...(19): siRNA sense strand
gaaucaacaugaaagaacu

SEQ ID NO: 1578094 - RNA, 19 nt, Homo sapiens
  misc_RNA (1)...(19): siRNA sense strand
ggaagaaugggugauagaa

SEQ ID NO: 1578095 - RNA, 19 nt, Homo sapiens
  misc_RNA (1)...(19): siRNA sense strand
cgggagaaauuaugugaau

SEQ ID NO: 1578096 - RNA, 19 nt, Homo sapiens
  misc_RNA (1)...(19): siRNA sense strand
caggagagaaacccuauaa

SEQ ID NO: 1578097 - RNA, 19 nt, Homo sapiens
  misc_RNA (1)...(19): siRNA sense strand
ugauuaccauccagaguuu

SEQ ID NO: 1578098 - RNA, 19 nt, Homo sapiens
  misc_RNA (1)...(19): siRNA sense strand
ccacaagccagaauauuuc

SEQ ID NO: 1578099 - RNA, 19 nt, Homo sapiens
  misc_RNA (1)...(19): siRNA sense strand
gcagagaaacccagugagu

SEQ ID NO: 1578100 - RNA, 19 nt, Homo sapiens
  misc_RNA (1)...(19): siRNA sense strand
gaauauagugaguguggaa

SEQ ID NO: 1578101 - RNA, 19 nt, Homo sapiens
  misc_RNA (1)...(19): siRNA sense strand
uaggaggacucugggauuu

SEQ ID NO: 1578102 - RNA, 19 nt, Homo sapiens
  misc_RNA (1)...(19): siRNA sense strand
aagagagacucccuaugaa

SEQ ID NO: 1578103 - RNA, 19 nt, Homo sapiens
  misc_RNA (1)...(19): siRNA sense strand
cuauaagugugaugaaugu

SEQ ID NO: 1578104 - RNA, 19 nt, Homo sapiens
  misc_RNA (1)...(19): siRNA sense strand
aagaaugggugauagaaag

SEQ ID NO: 1578105 - RNA, 19 nt, Homo sapiens
  misc_RNA (1)...(19): siRNA sense strand
gagacgugaugcuggagaa

SEQ ID NO: 1578106 - RNA, 19 nt, Homo sapiens
  misc_RNA (1)...(19): siRNA sense strand
gcaucaaacauaauucaga

SEQ ID NO: 1578107 - RNA, 19 nt, Homo sapiens
  misc_RNA (1)...(19): siRNA sense strand
agagaauuccuuccauuaa

SEQ ID NO: 1578108 - RNA, 19 nt, Homo sapiens
  misc_RNA (1)...(19): siRNA sense strand
aggaaucacugacguuuca

SEQ ID NO: 1578109 - RNA, 19 nt, Homo sapiens
  misc_RNA (1)...(19): siRNA sense strand
gaggaagaaugggugauag

SEQ ID NO: 1578110 - RNA, 19 nt, Homo sapiens
  misc_RNA (1)...(19): siRNA sense strand
gcacugggguaucagcuuu

SEQ ID NO: 1578111 - RNA, 19 nt, Homo sapiens
  misc_RNA (1)...(19): siRNA sense strand
gcaguuggagcuagaggaa

SEQ ID NO: 1578112 - RNA, 19 nt, Homo sapiens
  misc_RNA (1)...(19): siRNA sense strand
gaggacacaucugaaucaa

SEQ ID NO: 1578113 - RNA, 19 nt, Homo sapiens
  misc_RNA (1)...(19): siRNA sense strand
caucacaucccuuacugaa

SEQ ID NO: 1578114 - RNA, 19 nt, Homo sapiens
  misc_RNA (1)...(19): siRNA sense strand
gaggauucauacuggagaa

SEQ ID NO: 1578115 - RNA, 19 nt, Homo sapiens
  misc_RNA (1)...(19): siRNA sense strand
ggaggaggaagaaaugaau

SEQ ID NO: 1578116 - RNA, 19 nt, Homo sapiens
  misc_RNA (1)...(19): siRNA sense strand
ccacaagagauauuuagga

SEQ ID NO: 1578117 - RNA, 19 nt, Homo sapiens
  misc_RNA (1)...(19): siRNA sense strand
caacaucagagaauucaca

SEQ ID NO: 1578118 - RNA, 19 nt, Homo sapiens
  misc_RNA (1)...(19): siRNA sense strand
gaaaacagacccgaaauca

SEQ ID NO: 1578119 - RNA, 19 nt, Homo sapiens
  misc_RNA (1)...(19): siRNA sense strand
cuacaggaaucuaguugca

SEQ ID NO: 1578120 - RNA, 19 nt, Homo sapiens
  misc_RNA (1)...(19): siRNA sense strand
ggagaaaagcccuauaaau

SEQ ID NO: 1578121 - RNA, 19 nt, Homo sapiens
  misc_RNA (1)...(19): siRNA sense strand
cgccacaguccuucauuua

SEQ ID NO: 1578122 - RNA, 19 nt, Homo sapiens
  misc_RNA (1)...(19): siRNA sense strand
gaacucauacaggagagaa

SEQ ID NO: 1578123 - RNA, 19 nt, Homo sapiens
  misc_RNA (1)...(19): siRNA sense strand
caaccacaagccagaauau

SEQ ID NO: 1578124 - RNA, 19 nt, Homo sapiens
  misc_RNA (1)...(19): siRNA sense strand
ccacaguccuucauuuagc

SEQ ID NO: 1578125 - RNA, 19 nt, Homo sapiens
  misc_RNA (1)...(19): siRNA sense strand
ggagcuagaggaagaaugg

SEQ ID NO: 1578126 - RNA, 19 nt, Homo sapiens
  misc_RNA (1)...(19): siRNA sense strand
gaaugauggcucacagaug

SEQ ID NO: 1578127 - RNA, 19 nt, Homo sapiens
  misc_RNA (1)...(19): siRNA sense strand
ccucagauguugcuuacag

SEQ ID NO: 1578128 - RNA, 19 nt, Homo sapiens
  misc_RNA (1)...(19): siRNA sense strand
gaggaagaaaugaaugaug

SEQ ID NO: 1578129 - RNA, 19 nt, Homo sapiens
  misc_RNA (1)...(19): siRNA sense strand
gagauauuuaggacaagua

SEQ ID NO: 1578130 - RNA, 19 nt, Homo sapiens
  misc_RNA (1)...(19): siRNA sense strand
gcauucauccuuuacucaa

SEQ ID NO: 1578131 - RNA, 19 nt, Homo sapiens
  misc_RNA (1)...(19): siRNA sense strand
gagaagccuugaguguaau

SEQ ID NO: 1578132 - RNA, 19 nt, Homo sapiens
  misc_RNA (1)...(19): siRNA sense strand
caggagacagcuucuggua

SEQ ID NO: 1578133 - RNA, 19 nt, Homo sapiens
  misc_RNA (1)...(19): siRNA sense strand
gaaaaucaaacccaugaga

SEQ ID NO: 1578134 - RNA, 19 nt, Homo sapiens
  misc_RNA (1)...(19): siRNA sense strand
ggagaaaacagacccgaaa

SEQ ID NO: 1578135 - RNA, 19 nt, Homo sapiens
  misc_RNA (1)...(19): siRNA sense strand
agagaagcccuauaagugu

SEQ ID NO: 1578136 - RNA, 19 nt, Homo sapiens
  misc_RNA (1)...(19): siRNA sense strand
gaaaaccacaagagauauu

SEQ ID NO: 1578137 - RNA, 19 nt, Homo sapiens
  misc_RNA (1)...(19): siRNA sense strand
ucgccacaguccuucauuu

SEQ ID NO: 1578138 - RNA, 19 nt, Homo sapiens
  misc_RNA (1)...(19): siRNA sense strand
ggagaacuacaggaaucua

SEQ ID NO: 1578139 - RNA, 19 nt, Homo sapiens
  misc_RNA (1)...(19): siRNA sense strand
caucugaaucaacaugaaa

SEQ ID NO: 1578140 - RNA, 19 nt, Homo sapiens
  misc_RNA (1)...(19): siRNA sense strand
aaucaaacccaugagauga

SEQ ID NO: 1578141 - RNA, 19 nt, Homo sapiens
  misc_RNA (1)...(19): siRNA sense strand
caucugaggauucauacug

SEQ ID NO: 1578142 - RNA, 19 nt, Homo sapiens
  misc_RNA (1)...(19): siRNA sense strand
cagcaucaaacauaauuca

SEQ ID NO: 1578143 - RNA, 19 nt, Homo sapiens
  misc_RNA (1)...(19): siRNA sense strand
aaacuguaaucugaacuca

SEQ ID NO: 1578144 - RNA, 19 nt, Homo sapiens
  misc_RNA (1)...(19): siRNA sense strand
ggaggacucugggauuuug

SEQ ID NO: 1578145 - RNA, 19 nt, Homo sapiens
  misc_RNA (1)...(19): siRNA sense strand
agagaaacccagugagugu

SEQ ID NO: 1578146 - RNA, 19 nt, Homo sapiens
  misc_RNA (1)...(19): siRNA sense strand
gagaaaccuuacgaaugug

SEQ ID NO: 1578147 - RNA, 19 nt, Homo sapiens
  misc_RNA (1)...(19): siRNA sense strand
agaggaagaaugggugaua

SEQ ID NO: 1578148 - RNA, 19 nt, Homo sapiens
  misc_RNA (1)...(19): siRNA sense strand
gagaauucacacaggagaa

SEQ ID NO: 1578149 - RNA, 19 nt, Homo sapiens
  misc_RNA (1)...(19): siRNA sense strand
ggaaacagcaucaaacaua

SEQ ID NO: 1578150 - RNA, 19 nt, Homo sapiens
  misc_RNA (1)...(19): siRNA sense strand
gaaacagcaucaaacauaa

SEQ ID NO: 1578151 - RNA, 19 nt, Homo sapiens
  misc_RNA (1)...(19): siRNA sense strand
gagaaacccuauaaaugua

SEQ ID NO: 1578152 - RNA, 19 nt, Homo sapiens
  misc_RNA (1)...(19): siRNA sense strand
ggacacaucugaaucaaca

SEQ ID NO: 1578153 - RNA, 19 nt, Homo sapiens
  misc_RNA (1)...(19): siRNA sense strand
gagaauuccuuccauuaaa

SEQ ID NO: 1578154 - RNA, 19 nt, Homo sapiens
  misc_RNA (1)...(19): siRNA sense strand
aaucugaacucaaaccuua

SEQ ID NO: 1578155 - RNA, 19 nt, Homo sapiens
  misc_RNA (1)...(19): siRNA sense strand
caagagauauuuaggacaa

SEQ ID NO: 1578156 - RNA, 19 nt, Homo sapiens
  misc_RNA (1)...(19): siRNA sense strand
gaaaagcccuauaaaugua

SEQ ID NO: 1578157 - RNA, 19 nt, Homo sapiens
  misc_RNA (1)...(19): siRNA sense strand
gaacaucauagacuucaua

SEQ ID NO: 1578158 - RNA, 19 nt, Homo sapiens
  misc_RNA (1)...(19): siRNA sense strand
gcagagaauuccuuccauu

SEQ ID NO: 1578159 - RNA, 19 nt, Homo sapiens
  misc_RNA (1)...(19): siRNA sense strand
gagagaaacccuauaaaug

SEQ ID NO: 1578160 - RNA, 19 nt, Homo sapiens
  misc_RNA (1)...(19): siRNA sense strand
aaacagacccgaaaucaaa

SEQ ID NO: 1578161 - RNA, 19 nt, Homo sapiens
  misc_RNA (1)...(19): siRNA sense strand
uaagagagacucccuauga

SEQ ID NO: 1578162 - RNA, 19 nt, Homo sapiens
  misc_RNA (1)...(19): siRNA sense strand
gagagacucccuaugaaua

SEQ ID NO: 1578163 - RNA, 19 nt, Homo sapiens
  misc_RNA (1)...(19): siRNA sense strand
agagaaaccuuacgaaugu

SEQ ID NO: 1578164 - RNA, 19 nt, Homo sapiens
  misc_RNA (1)...(19): siRNA sense strand
gagagaagcccuauaagug

SEQ ID NO: 1578165 - RNA, 19 nt, Homo sapiens
  misc_RNA (1)...(19): siRNA sense strand
agagaagccuugaguguaa

SEQ ID NO: 1578166 - RNA, 19 nt, Homo sapiens
  misc_RNA (1)...(19): siRNA sense strand
gaggauacaucucauucaa

SEQ ID NO: 1578167 - RNA, 19 nt, Homo sapiens
  misc_RNA (1)...(19): siRNA sense strand
ggagagaaacccuauaaau

SEQ ID NO: 1578168 - RNA, 19 nt, Homo sapiens
  misc_RNA (1)...(19): siRNA sense strand
ggauacaucucauucaaca

SEQ ID NO: 1578169 - RNA, 19 nt, Homo sapiens
  misc_RNA (1)...(19): siRNA sense strand
caacaucugaggauucaua

SEQ ID NO: 1578170 - RNA, 19 nt, Homo sapiens
  misc_RNA (1)...(19): siRNA sense strand
gagagaaaccuuacgaaug

SEQ ID NO: 1578171 - RNA, 19 nt, Homo sapiens
  misc_RNA (1)...(19): siRNA sense strand
ucacaucccuuacugaaca

SEQ ID NO: 1578172 - RNA, 19 nt, Homo sapiens
  misc_RNA (1)...(19): siRNA sense strand
gaagaaugggugauagaaa

SEQ ID NO: 1578173 - RNA, 19 nt, Homo sapiens
  misc_RNA (1)...(19): siRNA sense strand
gagaaaagcccuauaaaug

SEQ ID NO: 1578174 - RNA, 19 nt, Homo sapiens
  misc_RNA (1)...(19): siRNA sense strand
gagagaagccuugagugua

SEQ ID NO: 1578175 - RNA, 19 nt, Homo sapiens
  misc_RNA (1)...(19): siRNA sense strand
ggagacagcuucugguacu

SEQ ID NO: 1578176 - RNA, 19 nt, Homo sapiens
  misc_RNA (1)...(19): siRNA sense strand
gagacucccuaugaauaua

SEQ ID NO: 1578177 - RNA, 19 nt, Homo sapiens
  misc_RNA (1)...(19): siRNA sense strand
ggcaaagccuucagucaga

SEQ ID NO: 1578178 - RNA, 19 nt, Homo sapiens
  misc_RNA (1)...(19): siRNA sense strand
cagagaauuccuuccauua

SEQ ID NO: 1578179 - RNA, 19 nt, Homo sapiens
  misc_RNA (1)...(19): siRNA sense strand
ggagagaagcccuauaagu

SEQ ID NO: 1578180 - RNA, 19 nt, Homo sapiens
  misc_RNA (1)...(19): siRNA sense strand
agccacaccucaucucuua

SEQ ID NO: 1578181 - RNA, 19 nt, Homo sapiens
  misc_RNA (1)...(19): siRNA sense strand
caaacauaauucagacuug

SEQ ID NO: 1578182 - RNA, 19 nt, Homo sapiens
  misc_RNA (1)...(19): siRNA sense strand
caggagagaagcccuauaa

SEQ ID NO: 1578183 - RNA, 19 nt, Homo sapiens
  misc_RNA (1)...(19): siRNA sense strand
agagaaacccuauaaaugu

SEQ ID NO: 1578184 - RNA, 19 nt, Homo sapiens
  misc_RNA (1)...(19): siRNA sense strand
cgucagcauucauccuuua

SEQ ID NO: 1578185 - RNA, 19 nt, Homo sapiens
  misc_RNA (1)...(19): siRNA sense strand
ucaaacccaugagaugaua

SEQ ID NO: 1578186 - RNA, 19 nt, Homo sapiens
  misc_RNA (1)...(19): siRNA sense strand
gggagaaauuaugugaaua

SEQ ID NO: 1578187 - RNA, 19 nt, Homo sapiens
  misc_RNA (1)...(19): siRNA sense strand
gugcacaccuuaaucaaca

SEQ ID NO: 1578188 - RNA, 19 nt, Homo sapiens
  misc_RNA (1)...(19): siRNA sense strand
caacauauucuucuuacug

SEQ ID NO: 1578189 - RNA, 19 nt, Homo sapiens
  misc_RNA (1)...(19): siRNA sense strand
ggagagaagccuugagugu

SEQ ID NO: 1578190 - RNA, 19 nt, Homo sapiens
  misc_RNA (1)...(19): siRNA sense strand
ggagagaaaccuuacgaau

SEQ ID NO: 1578191 - RNA, 19 nt, Homo sapiens
  misc_RNA (1)...(19): siRNA sense strand
acuguaaucugaacucaaa

SEQ ID NO: 1578192 - RNA, 19 nt, Homo sapiens
  misc_RNA (1)...(19): siRNA sense strand
uuacgaaugugguuucugu

SEQ ID NO: 1578193 - RNA, 19 nt, Homo sapiens
  misc_RNA (1)...(19): siRNA sense strand
gaaucaacaugaaagaacu

SEQ ID NO: 1578194 - RNA, 19 nt, Homo sapiens
  misc_RNA (1)...(19): siRNA sense strand
ggaagaaugggugauagaa

SEQ ID NO: 1578195 - RNA, 19 nt, Homo sapiens
  misc_RNA (1)...(19): siRNA sense strand
cgggagaaauuaugugaau

SEQ ID NO: 1578196 - RNA, 19 nt, Homo sapiens
  misc_RNA (1)...(19): siRNA sense strand
caggagagaaacccuauaa

SEQ ID NO: 1578197 - RNA, 19 nt, Homo sapiens
  misc_RNA (1)...(19): siRNA sense strand
ugauuaccauccagaguuu

SEQ ID NO: 1578198 - RNA, 19 nt, Homo sapiens
  misc_RNA (1)...(19): siRNA sense strand
ccacaagccagaauauuuc

SEQ ID NO: 1578199 - RNA, 19 nt, Homo sapiens
  misc_RNA (1)...(19): siRNA sense strand
gcagagaaacccagugagu

SEQ ID NO: 1578200 - RNA, 19 nt, Homo sapiens
  misc_RNA (1)...(19): siRNA sense strand
gaauauagugaguguggaa

SEQ ID NO: 1578201 - RNA, 19 nt, Homo sapiens
  misc_RNA (1)...(19): siRNA sense strand
uaggaggacucugggauuu

SEQ ID NO: 1578202 - RNA, 19 nt, Homo sapiens
  misc_RNA (1)...(19): siRNA sense strand
aagagagacucccuaugaa

SEQ ID NO: 1578203 - RNA, 19 nt, Homo sapiens
  misc_RNA (1)...(19): siRNA sense strand
cuauaagugugaugaaugu

SEQ ID NO: 1578204 - RNA, 19 nt, Homo sapiens
  misc_RNA (1)...(19): siRNA sense strand
aagaaugggugauagaaag

SEQ ID NO: 1578205 - RNA, 19 nt, Homo sapiens
  misc_RNA (1)...(19): siRNA sense strand
gagacgugaugcuggagaa

SEQ ID NO: 1578206 - RNA, 19 nt, Homo sapiens
  misc_RNA (1)...(19): siRNA sense strand
gcaucaaacauaauucaga

SEQ ID NO: 1578207 - RNA, 19 nt, Homo sapiens
  misc_RNA (1)...(19): siRNA sense strand
agagaauuccuuccauuaa

SEQ ID NO: 1578208 - RNA, 19 nt, Homo sapiens
  misc_RNA (1)...(19): siRNA sense strand
aggaaucacugacguuuca

SEQ ID NO: 1578209 - RNA, 19 nt, Homo sapiens
  misc_RNA (1)...(19): siRNA sense strand
gaggaagaaugggugauag

SEQ ID NO: 1578210 - RNA, 19 nt, Homo sapiens
  misc_RNA (1)...(19): siRNA sense strand
gcacugggguaucagcuuu

SEQ ID NO: 1578211 - RNA, 19 nt, Homo sapiens
  misc_RNA (1)...(19): siRNA sense strand
gcaguuggagcuagaggaa

SEQ ID NO: 1578212 - RNA, 19 nt, Homo sapiens
  misc_RNA (1)...(19): siRNA sense strand
gaggacacaucugaaucaa

SEQ ID NO: 1578213 - RNA, 19 nt, Homo sapiens
  misc_RNA (1)...(19): siRNA sense strand
caucacaucccuuacugaa

SEQ ID NO: 1578214 - RNA, 19 nt, Homo sapiens
  misc_RNA (1)...(19): siRNA sense strand
gaggauucauacuggagaa

SEQ ID NO: 1578215 - RNA, 19 nt, Homo sapiens
  misc_RNA (1)...(19): siRNA sense strand
ggaggaggaagaaaugaau

SEQ ID NO: 1578216 - RNA, 19 nt, Homo sapiens
  misc_RNA (1)...(19): siRNA sense strand
ccacaagagauauuuagga

SEQ ID NO: 1578217 - RNA, 19 nt, Homo sapiens
  misc_RNA (1)...(19): siRNA sense strand
caacaucagagaauucaca

SEQ ID NO: 1578218 - RNA, 19 nt, Homo sapiens
  misc_RNA (1)...(19): siRNA sense strand
gaaaacagacccgaaauca

SEQ ID NO: 1578219 - RNA, 19 nt, Homo sapiens
  misc_RNA (1)...(19): siRNA sense strand
cuacaggaaucuaguugca

SEQ ID NO: 1578220 - RNA, 19 nt, Homo sapiens
  misc_RNA (1)...(19): siRNA sense strand
ggagaaaagcccuauaaau

SEQ ID NO: 1578221 - RNA, 19 nt, Homo sapiens
  misc_RNA (1)...(19): siRNA sense strand
cgccacaguccuucauuua

SEQ ID NO: 1578222 - RNA, 19 nt, Homo sapiens
  misc_RNA (1)...(19): siRNA sense strand
gaacucauacaggagagaa

SEQ ID NO: 1578223 - RNA, 19 nt, Homo sapiens
  misc_RNA (1)...(19): siRNA sense strand
caaccacaagccagaauau

SEQ ID NO: 1578224 - RNA, 19 nt, Homo sapiens
  misc_RNA (1)...(19): siRNA sense strand
ccacaguccuucauuuagc

SEQ ID NO: 1578225 - RNA, 19 nt, Homo sapiens
  misc_RNA (1)...(19): siRNA sense strand
ggagcuagaggaagaaugg

SEQ ID NO: 1578226 - RNA, 19 nt, Homo sapiens
  misc_RNA (1)...(19): siRNA sense strand
gaaugauggcucacagaug

SEQ ID NO: 1578227 - RNA, 19 nt, Homo sapiens
  misc_RNA (1)...(19): siRNA sense strand
ccucagauguugcuuacag

SEQ ID NO: 1578228 - RNA, 19 nt, Homo sapiens
  misc_RNA (1)...(19): siRNA sense strand
gaggaagaaaugaaugaug

SEQ ID NO: 1578229 - RNA, 19 nt, Homo sapiens
  misc_RNA (1)...(19): siRNA sense strand
gagauauuuaggacaagua

SEQ ID NO: 1578230 - RNA, 19 nt, Homo sapiens
  misc_RNA (1)...(19): siRNA sense strand
gcauucauccuuuacucaa

SEQ ID NO: 1578231 - RNA, 19 nt, Homo sapiens
  misc_RNA (1)...(19): siRNA sense strand
gagaagccuugaguguaau

SEQ ID NO: 1578232 - RNA, 19 nt, Homo sapiens
  misc_RNA (1)...(19): siRNA sense strand
caggagacagcuucuggua

SEQ ID NO: 1578233 - RNA, 19 nt, Homo sapiens
  misc_RNA (1)...(19): siRNA sense strand
gaaaaucaaacccaugaga

SEQ ID NO: 1578234 - RNA, 19 nt, Homo sapiens
  misc_RNA (1)...(19): siRNA sense strand
ggagaaaacagacccgaaa

SEQ ID NO: 1578235 - RNA, 19 nt, Homo sapiens
  misc_RNA (1)...(19): siRNA sense strand
agagaagcccuauaagugu

SEQ ID NO: 1578236 - RNA, 19 nt, Homo sapiens
  misc_RNA (1)...(19): siRNA sense strand
gaaaaccacaagagauauu

SEQ ID NO: 1578237 - RNA, 19 nt, Homo sapiens
  misc_RNA (1)...(19): siRNA sense strand
ucgccacaguccuucauuu

SEQ ID NO: 1578238 - RNA, 19 nt, Homo sapiens
  misc_RNA (1)...(19): siRNA sense strand
ggagaacuacaggaaucua

SEQ ID NO: 1578239 - RNA, 19 nt, Homo sapiens
  misc_RNA (1)...(19): siRNA sense strand
caucugaaucaacaugaaa

SEQ ID NO: 1578240 - RNA, 19 nt, Homo sapiens
  misc_RNA (1)...(19): siRNA sense strand
aaucaaacccaugagauga

SEQ ID NO: 1578241 - RNA, 19 nt, Homo sapiens
  misc_RNA (1)...(19): siRNA sense strand
caucugaggauucauacug

SEQ ID NO: 1578242 - RNA, 19 nt, Homo sapiens
  misc_RNA (1)...(19): siRNA sense strand
cagcaucaaacauaauuca

SEQ ID NO: 1578243 - RNA, 19 nt, Homo sapiens
  misc_RNA (1)...(19): siRNA sense strand
aaacuguaaucugaacuca

SEQ ID NO: 1578244 - RNA, 19 nt, Homo sapiens
  misc_RNA (1)...(19): siRNA sense strand
ggaggacucugggauuuug

SEQ ID NO: 1578245 - RNA, 19 nt, Homo sapiens
  misc_RNA (1)...(19): siRNA sense strand
agagaaacccagugagugu

SEQ ID NO: 1578246 - RNA, 19 nt, Homo sapiens
  misc_RNA (1)...(19): siRNA sense strand
gagaaaccuuacgaaugug

SEQ ID NO: 1578247 - RNA, 19 nt, Homo sapiens
  misc_RNA (1)...(19): siRNA sense strand
agaggaagaaugggugaua

SEQ ID NO: 1578248 - RNA, 19 nt, Homo sapiens
  misc_RNA (1)...(19): siRNA sense strand
gagaauucacacaggagaa

SEQ ID NO: 1578249 - RNA, 19 nt, Homo sapiens
  misc_RNA (1)...(19): siRNA sense strand
ugaggaagcgcuccaguua

SEQ ID NO: 1578250 - RNA, 19 nt, Homo sapiens
  misc_RNA (1)...(19): siRNA sense strand
guacuucuguugaggaguu

SEQ ID NO: 1578251 - RNA, 19 nt, Homo sapiens
  misc_RNA (1)...(19): siRNA sense strand
ggagaagggaaauuaaaga

SEQ ID NO: 1578252 - RNA, 19 nt, Homo sapiens
  misc_RNA (1)...(19): siRNA sense strand
cagcaagucaccaagauuu

SEQ ID NO: 1578253 - RNA, 19 nt, Homo sapiens
  misc_RNA (1)...(19): siRNA sense strand
ggaggacaaugaugaggau

SEQ ID NO: 1578254 - RNA, 19 nt, Homo sapiens
  misc_RNA (1)...(19): siRNA sense strand
ggaggacaaugaugaggau

SEQ ID NO: 1578255 - RNA, 19 nt, Homo sapiens
  misc_RNA (1)...(19): siRNA sense strand
gaauuaagcauccagacau

SEQ ID NO: 1578256 - RNA, 19 nt, Homo sapiens
  misc_RNA (1)...(19): siRNA sense strand
ucaaggacauucucagagu

SEQ ID NO: 1578257 - RNA, 19 nt, Homo sapiens
  misc_RNA (1)...(19): siRNA sense strand
acagaucccuaacccauug

SEQ ID NO: 1578258 - RNA, 19 nt, Homo sapiens
  misc_RNA (1)...(19): siRNA sense strand
ggaugaggaugacgaugau

SEQ ID NO: 1578259 - RNA, 19 nt, Homo sapiens
  misc_RNA (1)...(19): siRNA sense strand
agagggugcuuuacuguug

SEQ ID NO: 1578260 - RNA, 19 nt, Homo sapiens
  misc_RNA (1)...(19): siRNA sense strand
caaggacauucucagaguu

SEQ ID NO: 1578261 - RNA, 19 nt, Homo sapiens
  misc_RNA (1)...(19): siRNA sense strand
ggaauuaagcauccagaca

SEQ ID NO: 1578262 - RNA, 19 nt, Homo sapiens
  misc_RNA (1)...(19): siRNA sense strand
ggaugacaaugaugaggau

SEQ ID NO: 1578263 - RNA, 19 nt, Homo sapiens
  misc_RNA (1)...(19): siRNA sense strand
gcuuggagaagggaaauua

SEQ ID NO: 1578264 - RNA, 19 nt, Homo sapiens
  misc_RNA (1)...(19): siRNA sense strand
ggacaaugaugaggaugag

SEQ ID NO: 1578265 - RNA, 19 nt, Homo sapiens
  misc_RNA (1)...(19): siRNA sense strand
gggaggaggaggagucuga

SEQ ID NO: 1578266 - RNA, 19 nt, Homo sapiens
  misc_RNA (1)...(19): siRNA sense strand
guacagcaagucaccaaga

SEQ ID NO: 1578267 - RNA, 19 nt, Homo sapiens
  misc_RNA (1)...(19): siRNA sense strand
gcucaaggacauucucaga

SEQ ID NO: 1578268 - RNA, 19 nt, Homo sapiens
  misc_RNA (1)...(19): siRNA sense strand
uuaagcagagacacauuua

SEQ ID NO: 1578269 - RNA, 19 nt, Homo sapiens
  misc_RNA (1)...(19): siRNA sense strand
uggaauacaaguuucagua

SEQ ID NO: 1578270 - RNA, 19 nt, Homo sapiens
  misc_RNA (1)...(19): siRNA sense strand
ggacgacgacgaggaggaa

SEQ ID NO: 1578271 - RNA, 19 nt, Homo sapiens
  misc_RNA (1)...(19): siRNA sense strand
aauuaagcauccagacauu

SEQ ID NO: 1578272 - RNA, 19 nt, Homo sapiens
  misc_RNA (1)...(19): siRNA sense strand
ggacaaugaugaggaugac

SEQ ID NO: 1578273 - RNA, 19 nt, Homo sapiens
  misc_RNA (1)...(19): siRNA sense strand
uguaaagagugaguacuug

SEQ ID NO: 1578274 - RNA, 19 nt, Homo sapiens
  misc_RNA (1)...(19): siRNA sense strand
ugggucaacuggaauacaa

SEQ ID NO: 1578275 - RNA, 19 nt, Homo sapiens
  misc_RNA (1)...(19): siRNA sense strand
gaaauuaaagagggugcuu

SEQ ID NO: 1578276 - RNA, 19 nt, Homo sapiens
  misc_RNA (1)...(19): siRNA sense strand
gagaagggaaauuaaagag

SEQ ID NO: 1578277 - RNA, 19 nt, Homo sapiens
  misc_RNA (1)...(19): siRNA sense strand
ugaugaggaugacaaugau

SEQ ID NO: 1578278 - RNA, 19 nt, Homo sapiens
  misc_RNA (1)...(19): siRNA sense strand
acaaguuucaguaugcaua

SEQ ID NO: 1578279 - RNA, 19 nt, Homo sapiens
  misc_RNA (1)...(19): siRNA sense strand
ucucagaguuucagaagcu

SEQ ID NO: 1578280 - RNA, 19 nt, Homo sapiens
  misc_RNA (1)...(19): siRNA sense strand
ugaugaggaugacgaugau

SEQ ID NO: 1578281 - RNA, 19 nt, Homo sapiens
  misc_RNA (1)...(19): siRNA sense strand
gcgcuccaguuaccugcaa

SEQ ID NO: 1578282 - RNA, 19 nt, Homo sapiens
  misc_RNA (1)...(19): siRNA sense strand
ggcagacacagaucccuaa

SEQ ID NO: 1578283 - RNA, 19 nt, Homo sapiens
  misc_RNA (1)...(19): siRNA sense strand
aguauucacuaaccaagau

SEQ ID NO: 1578284 - RNA, 19 nt, Homo sapiens
  misc_RNA (1)...(19): siRNA sense strand
ggacauucucagaguuuca

SEQ ID NO: 1578285 - RNA, 19 nt, Homo sapiens
  misc_RNA (1)...(19): siRNA sense strand
uggaugaggaugaggauga

SEQ ID NO: 1578286 - RNA, 19 nt, Homo sapiens
  misc_RNA (1)...(19): siRNA sense strand
gcuuuacuguugcccugaa

SEQ ID NO: 1578287 - RNA, 19 nt, Homo sapiens
  misc_RNA (1)...(19): siRNA sense strand
uacagcaagucaccaagau

SEQ ID NO: 1578288 - RNA, 19 nt, Homo sapiens
  misc_RNA (1)...(19): siRNA sense strand
cagacauuguaaagaguga

SEQ ID NO: 1578289 - RNA, 19 nt, Homo sapiens
  misc_RNA (1)...(19): siRNA sense strand
uaagcauccagacauugua

SEQ ID NO: 1578290 - RNA, 19 nt, Homo sapiens
  misc_RNA (1)...(19): siRNA sense strand
gauuaagcagagacacauu

SEQ ID NO: 1578291 - RNA, 19 nt, Homo sapiens
  misc_RNA (1)...(19): siRNA sense strand
uuacuguugcccugaaauu

SEQ ID NO: 1578292 - RNA, 19 nt, Homo sapiens
  misc_RNA (1)...(19): siRNA sense strand
augaugaggaugacaauga

SEQ ID NO: 1578293 - RNA, 19 nt, Homo sapiens
  misc_RNA (1)...(19): siRNA sense strand
acaaugaugaggaugacaa

SEQ ID NO: 1578294 - RNA, 19 nt, Homo sapiens
  misc_RNA (1)...(19): siRNA sense strand
ccaaaccccugauaagaag

SEQ ID NO: 1578295 - RNA, 19 nt, Homo sapiens
  misc_RNA (1)...(19): siRNA sense strand
gcaggacauuaacgacacu

SEQ ID NO: 1578296 - RNA, 19 nt, Homo sapiens
  misc_RNA (1)...(19): siRNA sense strand
aagcauccagacauuguaa

SEQ ID NO: 1578297 - RNA, 19 nt, Homo sapiens
  misc_RNA (1)...(19): siRNA sense strand
gaugaggaggacaaugaug

SEQ ID NO: 1578298 - RNA, 19 nt, Homo sapiens
  misc_RNA (1)...(19): siRNA sense strand
aggaugaggaugacgauga

SEQ ID NO: 1578299 - RNA, 19 nt, Homo sapiens
  misc_RNA (1)...(19): siRNA sense strand
aaagggcaagucuggauga

SEQ ID NO: 1578300 - RNA, 19 nt, Homo sapiens
  misc_RNA (1)...(19): siRNA sense strand
aaggacauucucagaguuu

SEQ ID NO: 1578301 - RNA, 19 nt, Homo sapiens
  misc_RNA (1)...(19): siRNA sense strand
caagucuggaugaggauga

SEQ ID NO: 1578302 - RNA, 19 nt, Homo sapiens
  misc_RNA (1)...(19): siRNA sense strand
uuaagcauccagacauugu

SEQ ID NO: 1578303 - RNA, 19 nt, Homo sapiens
  misc_RNA (1)...(19): siRNA sense strand
cgacgaggcggaggacaau

SEQ ID NO: 1578304 - RNA, 19 nt, Homo sapiens
  misc_RNA (1)...(19): siRNA sense strand
augaugaggaggacaauga

SEQ ID NO: 1578305 - RNA, 19 nt, Homo sapiens
  misc_RNA (1)...(19): siRNA sense strand
caggacagcccguacuucu

SEQ ID NO: 1578306 - RNA, 19 nt, Homo sapiens
  misc_RNA (1)...(19): siRNA sense strand
gcauccagacauuguaaag

SEQ ID NO: 1578307 - RNA, 19 nt, Homo sapiens
  misc_RNA (1)...(19): siRNA sense strand
ucacuaaccaagauuaagc

SEQ ID NO: 1578308 - RNA, 19 nt, Homo sapiens
  misc_RNA (1)...(19): siRNA sense strand
cgacgacgaggaggaauag

SEQ ID NO: 1578309 - RNA, 19 nt, Homo sapiens
  misc_RNA (1)...(19): siRNA sense strand
aggcggaggacaaugauga

SEQ ID NO: 1578310 - RNA, 19 nt, Homo sapiens
  misc_RNA (1)...(19): siRNA sense strand
ggaugaggaugaggaugac

SEQ ID NO: 1578311 - RNA, 19 nt, Homo sapiens
  misc_RNA (1)...(19): siRNA sense strand
uaaagagugaguacuugca

SEQ ID NO: 1578312 - RNA, 19 nt, Homo sapiens
  misc_RNA (1)...(19): siRNA sense strand
ccaguuaccugcaaaagcu

SEQ ID NO: 1578313 - RNA, 19 nt, Homo sapiens
  misc_RNA (1)...(19): siRNA sense strand
gcaagaaugugaaauguua

SEQ ID NO: 1578314 - RNA, 19 nt, Homo sapiens
  misc_RNA (1)...(19): siRNA sense strand
caaagagcauguuagauua

SEQ ID NO: 1578315 - RNA, 19 nt, Homo sapiens
  misc_RNA (1)...(19): siRNA sense strand
cgacacaacuugauaauga

SEQ ID NO: 1578316 - RNA, 19 nt, Homo sapiens
  misc_RNA (1)...(19): siRNA sense strand
aaagagaacucacuaauga

SEQ ID NO: 1578317 - RNA, 19 nt, Homo sapiens
  misc_RNA (1)...(19): siRNA sense strand
gaacaaagaaucugagaaa

SEQ ID NO: 1578318 - RNA, 19 nt, Homo sapiens
  misc_RNA (1)...(19): siRNA sense strand
ggacaagaauuacagauga

SEQ ID NO: 1578319 - RNA, 19 nt, Homo sapiens
  misc_RNA (1)...(19): siRNA sense strand
cagcaaagauacccauuua

SEQ ID NO: 1578320 - RNA, 19 nt, Homo sapiens
  misc_RNA (1)...(19): siRNA sense strand
gaacaccacugcccuaaug

SEQ ID NO: 1578321 - RNA, 19 nt, Homo sapiens
  misc_RNA (1)...(19): siRNA sense strand
gcaaagacauccaaaguag

SEQ ID NO: 1578322 - RNA, 19 nt, Homo sapiens
  misc_RNA (1)...(19): siRNA sense strand
ggagagcugucaccuuaua

SEQ ID NO: 1578323 - RNA, 19 nt, Homo sapiens
  misc_RNA (1)...(19): siRNA sense strand
gaucaggcuuucccaaaua

SEQ ID NO: 1578324 - RNA, 19 nt, Homo sapiens
  misc_RNA (1)...(19): siRNA sense strand
aaagcaaacuccugauuua

SEQ ID NO: 1578325 - RNA, 19 nt, Homo sapiens
  misc_RNA (1)...(19): siRNA sense strand
gaaacuagacgauaaagaa

SEQ ID NO: 1578326 - RNA, 19 nt, Homo sapiens
  misc_RNA (1)...(19): siRNA sense strand
ggucugcgaugacaaauuu

SEQ ID NO: 1578327 - RNA, 19 nt, Homo sapiens
  misc_RNA (1)...(19): siRNA sense strand
gaacgagauuuacugacua

SEQ ID NO: 1578328 - RNA, 19 nt, Homo sapiens
  misc_RNA (1)...(19): siRNA sense strand
ggagaaagcccacagaaau

SEQ ID NO: 1578329 - RNA, 19 nt, Homo sapiens
  misc_RNA (1)...(19): siRNA sense strand
ccaaagagcauguuagauu

SEQ ID NO: 1578330 - RNA, 19 nt, Homo sapiens
  misc_RNA (1)...(19): siRNA sense strand
ugacccagcuuccuuuaua

SEQ ID NO: 1578331 - RNA, 19 nt, Homo sapiens
  misc_RNA (1)...(19): siRNA sense strand
gaaaacagcuccacagaug

SEQ ID NO: 1578332 - RNA, 19 nt, Homo sapiens
  misc_RNA (1)...(19): siRNA sense strand
gagaaagcccacagaaaua

SEQ ID NO: 1578333 - RNA, 19 nt, Homo sapiens
  misc_RNA (1)...(19): siRNA sense strand
gauaaacgcuugagaacca

SEQ ID NO: 1578334 - RNA, 19 nt, Homo sapiens
  misc_RNA (1)...(19): siRNA sense strand
aaaggaaacuagacgauaa

SEQ ID NO: 1578335 - RNA, 19 nt, Homo sapiens
  misc_RNA (1)...(19): siRNA sense strand
gcaacuacagcacgaauua

SEQ ID NO: 1578336 - RNA, 19 nt, Homo sapiens
  misc_RNA (1)...(19): siRNA sense strand
ccaaagaugucccuaacaa

SEQ ID NO: 1578337 - RNA, 19 nt, Homo sapiens
  misc_RNA (1)...(19): siRNA sense strand
gcucuuguguuuauuguaa

SEQ ID NO: 1578338 - RNA, 19 nt, Homo sapiens
  misc_RNA (1)...(19): siRNA sense strand
gggaaacacugaaauggaa

SEQ ID NO: 1578339 - RNA, 19 nt, Homo sapiens
  misc_RNA (1)...(19): siRNA sense strand
gcaaagauacccauuuaga

SEQ ID NO: 1578340 - RNA, 19 nt, Homo sapiens
  misc_RNA (1)...(19): siRNA sense strand
ucggagagcugucaccuua

SEQ ID NO: 1578341 - RNA, 19 nt, Homo sapiens
  misc_RNA (1)...(19): siRNA sense strand
ugaagcagauccagcauaa

SEQ ID NO: 1578342 - RNA, 19 nt, Homo sapiens
  misc_RNA (1)...(19): siRNA sense strand
gaauggauauguucagugu

SEQ ID NO: 1578343 - RNA, 19 nt, Homo sapiens
  misc_RNA (1)...(19): siRNA sense strand
gcaacaaauucaccucuga

SEQ ID NO: 1578344 - RNA, 19 nt, Homo sapiens
  misc_RNA (1)...(19): siRNA sense strand
caacgaugcuucagaaaca

SEQ ID NO: 1578345 - RNA, 19 nt, Homo sapiens
  misc_RNA (1)...(19): siRNA sense strand
gaacaagcaacaugcagua

SEQ ID NO: 1578346 - RNA, 19 nt, Homo sapiens
  misc_RNA (1)...(19): siRNA sense strand
gcaagagggugcagugaau

SEQ ID NO: 1578347 - RNA, 19 nt, Homo sapiens
  misc_RNA (1)...(19): siRNA sense strand
caaauucgaugguuguguu

SEQ ID NO: 1578348 - RNA, 19 nt, Homo sapiens
  misc_RNA (1)...(19): siRNA sense strand
gaauagcggugaagaccaa

SEQ ID NO: 1578349 - RNA, 19 nt, Homo sapiens
  misc_RNA (1)...(19): siRNA sense strand
caacaguguggauaaauua

SEQ ID NO: 1578350 - RNA, 19 nt, Homo sapiens
  misc_RNA (1)...(19): siRNA sense strand
gaacgacacaacuugauaa

SEQ ID NO: 1578351 - RNA, 19 nt, Homo sapiens
  misc_RNA (1)...(19): siRNA sense strand
gaaaagcacaugcauaaua

SEQ ID NO: 1578352 - RNA, 19 nt, Homo sapiens
  misc_RNA (1)...(19): siRNA sense strand
cagaagcuccucaguaaua

SEQ ID NO: 1578353 - RNA, 19 nt, Homo sapiens
  misc_RNA (1)...(19): siRNA sense strand
ggagauacccugcaacgaa

SEQ ID NO: 1578354 - RNA, 19 nt, Homo sapiens
  misc_RNA (1)...(19): siRNA sense strand
gagacuucaucgauuaaua

SEQ ID NO: 1578355 - RNA, 19 nt, Homo sapiens
  misc_RNA (1)...(19): siRNA sense strand
ccagaaugcucgucagaaa

SEQ ID NO: 1578356 - RNA, 19 nt, Homo sapiens
  misc_RNA (1)...(19): siRNA sense strand
ggugugaaguuugugauua

SEQ ID NO: 1578357 - RNA, 19 nt, Homo sapiens
  misc_RNA (1)...(19): siRNA sense strand
guaacuggcacuacaaaua

SEQ ID NO: 1578358 - RNA, 19 nt, Homo sapiens
  misc_RNA (1)...(19): siRNA sense strand
ccaaauaccucagcauuag

SEQ ID NO: 1578359 - RNA, 19 nt, Homo sapiens
  misc_RNA (1)...(19): siRNA sense strand
gcaguucccucacucaaau

SEQ ID NO: 1578360 - RNA, 19 nt, Homo sapiens
  misc_RNA (1)...(19): siRNA sense strand
ccauuuagaugccaaagaa

SEQ ID NO: 1578361 - RNA, 19 nt, Homo sapiens
  misc_RNA (1)...(19): siRNA sense strand
gaagaugcguacuccaaug

SEQ ID NO: 1578362 - RNA, 19 nt, Homo sapiens
  misc_RNA (1)...(19): siRNA sense strand
ccaaacagcacauuucaaa

SEQ ID NO: 1578363 - RNA, 19 nt, Homo sapiens
  misc_RNA (1)...(19): siRNA sense strand
ccaccaagcccuuuaauau

SEQ ID NO: 1578364 - RNA, 19 nt, Homo sapiens
  misc_RNA (1)...(19): siRNA sense strand
gaacucaccgauaguauug

SEQ ID NO: 1578365 - RNA, 19 nt, Homo sapiens
  misc_RNA (1)...(19): siRNA sense strand
gauguuagauuccaugagu

SEQ ID NO: 1578366 - RNA, 19 nt, Homo sapiens
  misc_RNA (1)...(19): siRNA sense strand
gacaagcuuuauccaauuu

SEQ ID NO: 1578367 - RNA, 19 nt, Homo sapiens
  misc_RNA (1)...(19): siRNA sense strand
caaaggagauacccugcaa

SEQ ID NO: 1578368 - RNA, 19 nt, Homo sapiens
  misc_RNA (1)...(19): siRNA sense strand
gaacuugaucguauaaaga

SEQ ID NO: 1578369 - RNA, 19 nt, Homo sapiens
  misc_RNA (1)...(19): siRNA sense strand
gcagagagcgaaacuaugu

SEQ ID NO: 1578370 - RNA, 19 nt, Homo sapiens
  misc_RNA (1)...(19): siRNA sense strand
gccaaaggcugaagugaau

SEQ ID NO: 1578371 - RNA, 19 nt, Homo sapiens
  misc_RNA (1)...(19): siRNA sense strand
gaguggagguugaagugua

SEQ ID NO: 1578372 - RNA, 19 nt, Homo sapiens
  misc_RNA (1)...(19): siRNA sense strand
gcagagcugucaccgaaga

SEQ ID NO: 1578373 - RNA, 19 nt, Homo sapiens
  misc_RNA (1)...(19): siRNA sense strand
gcaaagaccaagagaacaa

SEQ ID NO: 1578374 - RNA, 19 nt, Homo sapiens
  misc_RNA (1)...(19): siRNA sense strand
gggcaaaguuguaggugaa

SEQ ID NO: 1578375 - RNA, 19 nt, Homo sapiens
  misc_RNA (1)...(19): siRNA sense strand
gcagaaaccgacuaaagaa

SEQ ID NO: 1578376 - RNA, 19 nt, Homo sapiens
  misc_RNA (1)...(19): siRNA sense strand
cuacagaggacaauaaauu

SEQ ID NO: 1578377 - RNA, 19 nt, Homo sapiens
  misc_RNA (1)...(19): siRNA sense strand
ccucaaauguccuaaaugu

SEQ ID NO: 1578378 - RNA, 19 nt, Homo sapiens
  misc_RNA (1)...(19): siRNA sense strand
ccaacaguguggauaaauu

SEQ ID NO: 1578379 - RNA, 19 nt, Homo sapiens
  misc_RNA (1)...(19): siRNA sense strand
gaaagugccagaugauguu

SEQ ID NO: 1578380 - RNA, 19 nt, Homo sapiens
  misc_RNA (1)...(19): siRNA sense strand
ggaauuagaggccaccaaa

SEQ ID NO: 1578381 - RNA, 19 nt, Homo sapiens
  misc_RNA (1)...(19): siRNA sense strand
gaccaaagcuuuuacauca

SEQ ID NO: 1578382 - RNA, 19 nt, Homo sapiens
  misc_RNA (1)...(19): siRNA sense strand
gcuugaaacugccucauug

SEQ ID NO: 1578383 - RNA, 19 nt, Homo sapiens
  misc_RNA (1)...(19): siRNA sense strand
cagucuaccuccacaguua

SEQ ID NO: 1578384 - RNA, 19 nt, Homo sapiens
  misc_RNA (1)...(19): siRNA sense strand
ccaaacggaugcagcuaaa

SEQ ID NO: 1578385 - RNA, 19 nt, Homo sapiens
  misc_RNA (1)...(19): siRNA sense strand
ugacaagcuuuauccaauu

SEQ ID NO: 1578386 - RNA, 19 nt, Homo sapiens
  misc_RNA (1)...(19): siRNA sense strand
gcaagcaaauuauugaaac

SEQ ID NO: 1578387 - RNA, 19 nt, Homo sapiens
  misc_RNA (1)...(19): siRNA sense strand
gagauacccugcaacgaau

SEQ ID NO: 1578388 - RNA, 19 nt, Homo sapiens
  misc_RNA (1)...(19): siRNA sense strand
cagaugauguuuacugaug

SEQ ID NO: 1578389 - RNA, 19 nt, Homo sapiens
  misc_RNA (1)...(19): siRNA sense strand
aaacacaugucgauccuau

SEQ ID NO: 1578390 - RNA, 19 nt, Homo sapiens
  misc_RNA (1)...(19): siRNA sense strand
gaacgcaaaugagcaaucu

SEQ ID NO: 1578391 - RNA, 19 nt, Homo sapiens
  misc_RNA (1)...(19): siRNA sense strand
caaaccagcccugccauua

SEQ ID NO: 1578392 - RNA, 19 nt, Homo sapiens
  misc_RNA (1)...(19): siRNA sense strand
gaacagauccaggaaaugg

SEQ ID NO: 1578393 - RNA, 19 nt, Homo sapiens
  misc_RNA (1)...(19): siRNA sense strand
gcaacaagcacaacaauac

SEQ ID NO: 1578394 - RNA, 19 nt, Homo sapiens
  misc_RNA (1)...(19): siRNA sense strand
ccauauaaauguacagugu

SEQ ID NO: 1578395 - RNA, 19 nt, Homo sapiens
  misc_RNA (1)...(19): siRNA sense strand
ggaacgacacaacuugaua

SEQ ID NO: 1578396 - RNA, 19 nt, Homo sapiens
  misc_RNA (1)...(19): siRNA sense strand
gagaaagacuaucuaacca

SEQ ID NO: 1578397 - RNA, 19 nt, Homo sapiens
  misc_RNA (1)...(19): siRNA sense strand
gcggacaguucuugccaua

SEQ ID NO: 1578398 - RNA, 19 nt, Homo sapiens
  misc_RNA (1)...(19): siRNA sense strand
gcacuggaaugaaggaaag

SEQ ID NO: 1578399 - RNA, 19 nt, Homo sapiens
  misc_RNA (1)...(19): siRNA sense strand
cgaaaacacugacaaacua

SEQ ID NO: 1578400 - RNA, 19 nt, Homo sapiens
  misc_RNA (1)...(19): siRNA sense strand
gccaggcucugccacauuu

SEQ ID NO: 1578401 - RNA, 19 nt, Homo sapiens
  misc_RNA (1)...(19): siRNA sense strand
caacugguggcucacauua

SEQ ID NO: 1578402 - RNA, 19 nt, Homo sapiens
  misc_RNA (1)...(19): siRNA sense strand
caagagaacaacugugaaa

SEQ ID NO: 1578403 - RNA, 19 nt, Homo sapiens
  misc_RNA (1)...(19): siRNA sense strand
ccacggaggucugcgauga

SEQ ID NO: 1578404 - RNA, 19 nt, Homo sapiens
  misc_RNA (1)...(19): siRNA sense strand
cgacagagaaauaaagauu

SEQ ID NO: 1578405 - RNA, 19 nt, Homo sapiens
  misc_RNA (1)...(19): siRNA sense strand
cuacaacacucagcucaaa

SEQ ID NO: 1578406 - RNA, 19 nt, Homo sapiens
  misc_RNA (1)...(19): siRNA sense strand
acaagcaccugaacaaugu

SEQ ID NO: 1578407 - RNA, 19 nt, Homo sapiens
  misc_RNA (1)...(19): siRNA sense strand
caaagaaagugggcagaau

SEQ ID NO: 1578408 - RNA, 19 nt, Homo sapiens
  misc_RNA (1)...(19): siRNA sense strand
acagaaaguuguucagaug

SEQ ID NO: 1578409 - RNA, 19 nt, Homo sapiens
  misc_RNA (1)...(19): siRNA sense strand
acacuuacguuguuccauu

SEQ ID NO: 1578410 - RNA, 19 nt, Homo sapiens
  misc_RNA (1)...(19): siRNA sense strand
gaaagugaccagccgcaaa

SEQ ID NO: 1578411 - RNA, 19 nt, Homo sapiens
  misc_RNA (1)...(19): siRNA sense strand
ggcagaagguacagaagaa

SEQ ID NO: 1578412 - RNA, 19 nt, Homo sapiens
  misc_RNA (1)...(19): siRNA sense strand
agcagaagcuccucaguaa

SEQ ID NO: 1578413 - RNA, 19 nt, Homo sapiens
  misc_RNA (1)...(19): siRNA sense strand
ggacauggcugagaacauc

SEQ ID NO: 1578414 - RNA, 19 nt, Homo sapiens
  misc_RNA (1)...(19): siRNA sense strand
gaacaccuuaggcaaauug

SEQ ID NO: 1578415 - RNA, 19 nt, Homo sapiens
  misc_RNA (1)...(19): siRNA sense strand
gagaagccaccaagaaauc

SEQ ID NO: 1578416 - RNA, 19 nt, Homo sapiens
  misc_RNA (1)...(19): siRNA sense strand
gcugaacaccuuaggcaaa

SEQ ID NO: 1578417 - RNA, 19 nt, Homo sapiens
  misc_RNA (1)...(19): siRNA sense strand
ucaaagcccucuggagcaa

SEQ ID NO: 1578418 - RNA, 19 nt, Homo sapiens
  misc_RNA (1)...(19): siRNA sense strand
uaccaaagcaucauuguca

SEQ ID NO: 1578419 - RNA, 19 nt, Homo sapiens
  misc_RNA (1)...(19): siRNA sense strand
gaacacuugcccucgagaa

SEQ ID NO: 1578420 - RNA, 19 nt, Homo sapiens
  misc_RNA (1)...(19): siRNA sense strand
gaagccuacuuaugucucu

SEQ ID NO: 1578421 - RNA, 19 nt, Homo sapiens
  misc_RNA (1)...(19): siRNA sense strand
gcuggaggccuaugacuuc

SEQ ID NO: 1578422 - RNA, 19 nt, Homo sapiens
  misc_RNA (1)...(19): siRNA sense strand
ggugaagccuacuuauguc

SEQ ID NO: 1578423 - RNA, 19 nt, Homo sapiens
  misc_RNA (1)...(19): siRNA sense strand
ucgagaagccaccaagaaa

SEQ ID NO: 1578424 - RNA, 19 nt, Homo sapiens
  misc_RNA (1)...(19): siRNA sense strand
aggcggaacugcacuaucu

SEQ ID NO: 1578425 - RNA, 19 nt, Homo sapiens
  misc_RNA (1)...(19): siRNA sense strand
gcugcaagguguacuacca

SEQ ID NO: 1578426 - RNA, 19 nt, Homo sapiens
  misc_RNA (1)...(19): siRNA sense strand
ucaauaguccugcugaaca

SEQ ID NO: 1578427 - RNA, 19 nt, Homo sapiens
  misc_RNA (1)...(19): siRNA sense strand
cugaggacauggcugagaa

SEQ ID NO: 1578428 - RNA, 19 nt, Homo sapiens
  misc_RNA (1)...(19): siRNA sense strand
cgagaagccaccaagaaau

SEQ ID NO: 1578429 - RNA, 19 nt, Homo sapiens
  misc_RNA (1)...(19): siRNA sense strand
cuucgugugugcagacaaa

SEQ ID NO: 1578430 - RNA, 19 nt, Homo sapiens
  misc_RNA (1)...(19): siRNA sense strand
cggugaagccuacuuaugu

SEQ ID NO: 1578431 - RNA, 19 nt, Homo sapiens
  misc_RNA (1)...(19): siRNA sense strand
gcggugaagccuacuuaug

SEQ ID NO: 1578432 - RNA, 19 nt, Homo sapiens
  misc_RNA (1)...(19): siRNA sense strand
cuacagcuacuucgugugu

SEQ ID NO: 1578433 - RNA, 19 nt, Homo sapiens
  misc_RNA (1)...(19): siRNA sense strand
ccaccagccugccagacau

SEQ ID NO: 1578434 - RNA, 19 nt, Homo sapiens
  misc_RNA (1)...(19): siRNA sense strand
cugaacaccuuaggcaaau

SEQ ID NO: 1578435 - RNA, 19 nt, Homo sapiens
  misc_RNA (1)...(19): siRNA sense strand
ugccaggccuucaauaguc

SEQ ID NO: 1578436 - RNA, 19 nt, Homo sapiens
  misc_RNA (1)...(19): siRNA sense strand
gcacccagcacagcagaau

SEQ ID NO: 1578437 - RNA, 19 nt, Homo sapiens
  misc_RNA (1)...(19): siRNA sense strand
caauaguccugcugaacac

SEQ ID NO: 1578438 - RNA, 19 nt, Homo sapiens
  misc_RNA (1)...(19): siRNA sense strand
cagaggugcagcaggauga

SEQ ID NO: 1578439 - RNA, 19 nt, Homo sapiens
  misc_RNA (1)...(19): siRNA sense strand
cucaagagccacaucaaga

SEQ ID NO: 1578440 - RNA, 19 nt, Homo sapiens
  misc_RNA (1)...(19): siRNA sense strand
guacuaccacaagcucaaa

SEQ ID NO: 1578441 - RNA, 19 nt, Homo sapiens
  misc_RNA (1)...(19): siRNA sense strand
caagguguacuaccacaag

SEQ ID NO: 1578442 - RNA, 19 nt, Homo sapiens
  misc_RNA (1)...(19): siRNA sense strand
gccagacauugcaaagaca

SEQ ID NO: 1578443 - RNA, 19 nt, Homo sapiens
  misc_RNA (1)...(19): siRNA sense strand
ugggacaacugccuuucug

SEQ ID NO: 1578444 - RNA, 19 nt, Homo sapiens
  misc_RNA (1)...(19): siRNA sense strand
gcaagguguacuaccacaa

SEQ ID NO: 1578445 - RNA, 19 nt, Homo sapiens
  misc_RNA (1)...(19): siRNA sense strand
acccuggacuuccucaaga

SEQ ID NO: 1578446 - RNA, 19 nt, Homo sapiens
  misc_RNA (1)...(19): siRNA sense strand
ugaacaccuuaggcaaauu

SEQ ID NO: 1578447 - RNA, 19 nt, Homo sapiens
  misc_RNA (1)...(19): siRNA sense strand
ggcaagggauacagaacac

SEQ ID NO: 1578448 - RNA, 19 nt, Homo sapiens
  misc_RNA (1)...(19): siRNA sense strand
ccuccgcccugagugcuuu

SEQ ID NO: 1578449 - RNA, 19 nt, Homo sapiens
  misc_RNA (1)...(19): siRNA sense strand
ugccagacauugcaaagac

SEQ ID NO: 1578450 - RNA, 19 nt, Homo sapiens
  misc_RNA (1)...(19): siRNA sense strand
gcugccaggccuucaauag

SEQ ID NO: 1578451 - RNA, 19 nt, Homo sapiens
  misc_RNA (1)...(19): siRNA sense strand
ucaagagccacaucaagag

SEQ ID NO: 1578452 - RNA, 19 nt, Homo sapiens
  misc_RNA (1)...(19): siRNA sense strand
caucacaucccaggacauc

SEQ ID NO: 1578453 - RNA, 19 nt, Homo sapiens
  misc_RNA (1)...(19): siRNA sense strand
gggacaacugccuuucuga

SEQ ID NO: 1578454 - RNA, 19 nt, Homo sapiens
  misc_RNA (1)...(19): siRNA sense strand
uggcggugaagccuacuua

SEQ ID NO: 1578455 - RNA, 19 nt, Homo sapiens
  misc_RNA (1)...(19): siRNA sense strand
gcagcugccaggccuucaa

SEQ ID NO: 1578456 - RNA, 19 nt, Homo sapiens
  misc_RNA (1)...(19): siRNA sense strand
guaccaaagcaucauuguc

SEQ ID NO: 1578457 - RNA, 19 nt, Homo sapiens
  misc_RNA (1)...(19): siRNA sense strand
ccacccaacuuccuuauga

SEQ ID NO: 1578458 - RNA, 19 nt, Homo sapiens
  misc_RNA (1)...(19): siRNA sense strand
cggcacagaugagaacgua

SEQ ID NO: 1578459 - RNA, 19 nt, Homo sapiens
  misc_RNA (1)...(19): siRNA sense strand
gaagugagaagauuguuuu

SEQ ID NO: 1578460 - RNA, 19 nt, Homo sapiens
  misc_RNA (1)...(19): siRNA sense strand
caacugugguuuuggguuu

SEQ ID NO: 1578461 - RNA, 19 nt, Homo sapiens
  misc_RNA (1)...(19): siRNA sense strand
ccacggucaucgagucaga

SEQ ID NO: 1578462 - RNA, 19 nt, Homo sapiens
  misc_RNA (1)...(19): siRNA sense strand
ccaacuuccuuaugacgau

SEQ ID NO: 1578463 - RNA, 19 nt, Homo sapiens
  misc_RNA (1)...(19): siRNA sense strand
cgaagugagaagauuguuu

SEQ ID NO: 1578464 - RNA, 19 nt, Homo sapiens
  misc_RNA (1)...(19): siRNA sense strand
gcacgcucuuccucaacaa

SEQ ID NO: 1578465 - RNA, 19 nt, Homo sapiens
  misc_RNA (1)...(19): siRNA sense strand
aaauguggcgguuucguuu

SEQ ID NO: 1578466 - RNA, 19 nt, Homo sapiens
  misc_RNA (1)...(19): siRNA sense strand
gcacagaugagaacguacu

SEQ ID NO: 1578467 - RNA, 19 nt, Homo sapiens
  misc_RNA (1)...(19): siRNA sense strand
guuccuggcuccgaagaga

SEQ ID NO: 1578468 - RNA, 19 nt, Homo sapiens
  misc_RNA (1)...(19): siRNA sense strand
gguuaucgggugugugaaa

SEQ ID NO: 1578469 - RNA, 19 nt, Homo sapiens
  misc_RNA (1)...(19): siRNA sense strand
uuaugacgaugcuguuugu

SEQ ID NO: 1578470 - RNA, 19 nt, Homo sapiens
  misc_RNA (1)...(19): siRNA sense strand
ugaugagguuugcaacugu

SEQ ID NO: 1578471 - RNA, 19 nt, Homo sapiens
  misc_RNA (1)...(19): siRNA sense strand
ggucugaugagguuugcaa

SEQ ID NO: 1578472 - RNA, 19 nt, Homo sapiens
  misc_RNA (1)...(19): siRNA sense strand
cugaugagguuugcaacug

SEQ ID NO: 1578473 - RNA, 19 nt, Homo sapiens
  misc_RNA (1)...(19): siRNA sense strand
gagguuugcaacugugguu

SEQ ID NO: 1578474 - RNA, 19 nt, Homo sapiens
  misc_RNA (1)...(19): siRNA sense strand
ccgaagagaagccgaaagg

SEQ ID NO: 1578475 - RNA, 19 nt, Homo sapiens
  misc_RNA (1)...(19): siRNA sense strand
ccacgguuaucgggugugu

SEQ ID NO: 1578476 - RNA, 19 nt, Homo sapiens
  misc_RNA (1)...(19): siRNA sense strand
ggaggagcgggaagagcuu

SEQ ID NO: 1578477 - RNA, 19 nt, Homo sapiens
  misc_RNA (1)...(19): siRNA sense strand
ccacccaacuuccuuauga

SEQ ID NO: 1578478 - RNA, 19 nt, Homo sapiens
  misc_RNA (1)...(19): siRNA sense strand
cggcacagaugagaacgua

SEQ ID NO: 1578479 - RNA, 19 nt, Homo sapiens
  misc_RNA (1)...(19): siRNA sense strand
gaagugagaagauuguuuu

SEQ ID NO: 1578480 - RNA, 19 nt, Homo sapiens
  misc_RNA (1)...(19): siRNA sense strand
caacugugguuuuggguuu

SEQ ID NO: 1578481 - RNA, 19 nt, Homo sapiens
  misc_RNA (1)...(19): siRNA sense strand
ccacggucaucgagucaga

SEQ ID NO: 1578482 - RNA, 19 nt, Homo sapiens
  misc_RNA (1)...(19): siRNA sense strand
ccaacuuccuuaugacgau

SEQ ID NO: 1578483 - RNA, 19 nt, Homo sapiens
  misc_RNA (1)...(19): siRNA sense strand
cgaagugagaagauuguuu

SEQ ID NO: 1578484 - RNA, 19 nt, Homo sapiens
  misc_RNA (1)...(19): siRNA sense strand
gcacgcucuuccucaacaa

SEQ ID NO: 1578485 - RNA, 19 nt, Homo sapiens
  misc_RNA (1)...(19): siRNA sense strand
aaauguggcgguuucguuu

SEQ ID NO: 1578486 - RNA, 19 nt, Homo sapiens
  misc_RNA (1)...(19): siRNA sense strand
gcacagaugagaacguacu

SEQ ID NO: 1578487 - RNA, 19 nt, Homo sapiens
  misc_RNA (1)...(19): siRNA sense strand
guuccuggcuccgaagaga

SEQ ID NO: 1578488 - RNA, 19 nt, Homo sapiens
  misc_RNA (1)...(19): siRNA sense strand
gguuaucgggugugugaaa

SEQ ID NO: 1578489 - RNA, 19 nt, Homo sapiens
  misc_RNA (1)...(19): siRNA sense strand
uuaugacgaugcuguuugu

SEQ ID NO: 1578490 - RNA, 19 nt, Homo sapiens
  misc_RNA (1)...(19): siRNA sense strand
ugaugagguuugcaacugu

SEQ ID NO: 1578491 - RNA, 19 nt, Homo sapiens
  misc_RNA (1)...(19): siRNA sense strand
ggucugaugagguuugcaa

SEQ ID NO: 1578492 - RNA, 19 nt, Homo sapiens
  misc_RNA (1)...(19): siRNA sense strand
cugaugagguuugcaacug

SEQ ID NO: 1578493 - RNA, 19 nt, Homo sapiens
  misc_RNA (1)...(19): siRNA sense strand
gagguuugcaacugugguu

SEQ ID NO: 1578494 - RNA, 19 nt, Homo sapiens
  misc_RNA (1)...(19): siRNA sense strand
ccgaagagaagccgaaagg

SEQ ID NO: 1578495 - RNA, 19 nt, Homo sapiens
  misc_RNA (1)...(19): siRNA sense strand
ccacgguuaucgggugugu

SEQ ID NO: 1578496 - RNA, 19 nt, Homo sapiens
  misc_RNA (1)...(19): siRNA sense strand
ggaggagcgggaagagcuu

SEQ ID NO: 1578497 - RNA, 19 nt, Homo sapiens
  misc_RNA (1)...(19): siRNA sense strand
guagucgacugcccagaga

SEQ ID NO: 1578498 - RNA, 19 nt, Homo sapiens
  misc_RNA (1)...(19): siRNA sense strand
gcucuaaguccgucugcua

SEQ ID NO: 1578499 - RNA, 19 nt, Homo sapiens
  misc_RNA (1)...(19): siRNA sense strand
gugccugucugcucuaagu

SEQ ID NO: 1578500 - RNA, 19 nt, Homo sapiens
  misc_RNA (1)...(19): siRNA sense strand
cgcacggccuccuguguuu

SEQ ID NO: 1578501 - RNA, 19 nt, Homo sapiens
  misc_RNA (1)...(19): siRNA sense strand
gcugcgugcccgucuguaa

SEQ ID NO: 1578502 - RNA, 19 nt, Homo sapiens
  misc_RNA (1)...(19): siRNA sense strand
gcgccugcacugacucuug

SEQ ID NO: 1578503 - RNA, 19 nt, Homo sapiens
  misc_RNA (1)...(19): siRNA sense strand
gcaaagauauugagacuaa

SEQ ID NO: 1578504 - RNA, 19 nt, Homo sapiens
  misc_RNA (1)...(19): siRNA sense strand
gcacaaaucuaagcaaaga

SEQ ID NO: 1578505 - RNA, 19 nt, Homo sapiens
  misc_RNA (1)...(19): siRNA sense strand
agaaauaucuggcaucuug

SEQ ID NO: 1578506 - RNA, 19 nt, Homo sapiens
  misc_RNA (1)...(19): siRNA sense strand
uaucauaacuggcaacaaa

SEQ ID NO: 1578507 - RNA, 19 nt, Homo sapiens
  misc_RNA (1)...(19): siRNA sense strand
ggagucacauacaaugaua

SEQ ID NO: 1578508 - RNA, 19 nt, Homo sapiens
  misc_RNA (1)...(19): siRNA sense strand
gaaaggccgucacuacugu

SEQ ID NO: 1578509 - RNA, 19 nt, Homo sapiens
  misc_RNA (1)...(19): siRNA sense strand
ggacuacgaucuuuauuuu

SEQ ID NO: 1578510 - RNA, 19 nt, Homo sapiens
  misc_RNA (1)...(19): siRNA sense strand
ggaguuagcaugaggacua

SEQ ID NO: 1578511 - RNA, 19 nt, Homo sapiens
  misc_RNA (1)...(19): siRNA sense strand
ggacuaaaaucaaggcuaa

SEQ ID NO: 1578512 - RNA, 19 nt, Homo sapiens
  misc_RNA (1)...(19): siRNA sense strand
gagaagacuuacuauuauc

SEQ ID NO: 1578513 - RNA, 19 nt, Homo sapiens
  misc_RNA (1)...(19): siRNA sense strand
gcagaaggaguuagcauga

SEQ ID NO: 1578514 - RNA, 19 nt, Homo sapiens
  misc_RNA (1)...(19): siRNA sense strand
agacuaagauguuaaaugc

SEQ ID NO: 1578515 - RNA, 19 nt, Homo sapiens
  misc_RNA (1)...(19): siRNA sense strand
cagcacaaaucuaagcaaa

SEQ ID NO: 1578516 - RNA, 19 nt, Homo sapiens
  misc_RNA (1)...(19): siRNA sense strand
aggaauaugucaaaucuga

SEQ ID NO: 1578517 - RNA, 19 nt, Homo sapiens
  misc_RNA (1)...(19): siRNA sense strand
caaggcugcuucugaaaug

SEQ ID NO: 1578518 - RNA, 19 nt, Homo sapiens
  misc_RNA (1)...(19): siRNA sense strand
gaauaagccaggugucuau

SEQ ID NO: 1578519 - RNA, 19 nt, Homo sapiens
  misc_RNA (1)...(19): siRNA sense strand
guucaaaugugcaguuaca

SEQ ID NO: 1578520 - RNA, 19 nt, Homo sapiens
  misc_RNA (1)...(19): siRNA sense strand
aauguuaugugcuggauuu

SEQ ID NO: 1578521 - RNA, 19 nt, Homo sapiens
  misc_RNA (1)...(19): siRNA sense strand
gggaacacuuuauaugaau

SEQ ID NO: 1578522 - RNA, 19 nt, Homo sapiens
  misc_RNA (1)...(19): siRNA sense strand
ucaucaaacuucugccuaa

SEQ ID NO: 1578523 - RNA, 19 nt, Homo sapiens
  misc_RNA (1)...(19): siRNA sense strand
caaguuuccuccagcagaa

SEQ ID NO: 1578524 - RNA, 19 nt, Homo sapiens
  misc_RNA (1)...(19): siRNA sense strand
caagccagcacaaaucuaa

SEQ ID NO: 1578525 - RNA, 19 nt, Homo sapiens
  misc_RNA (1)...(19): siRNA sense strand
guuaugugcuggauuuaug

SEQ ID NO: 1578526 - RNA, 19 nt, Homo sapiens
  misc_RNA (1)...(19): siRNA sense strand
agauuggacugucaacuuu

SEQ ID NO: 1578527 - RNA, 19 nt, Homo sapiens
  misc_RNA (1)...(19): siRNA sense strand
caacauggcauccuggaau

SEQ ID NO: 1578528 - RNA, 19 nt, Homo sapiens
  misc_RNA (1)...(19): siRNA sense strand
gcaucuuguuggaauagua

SEQ ID NO: 1578529 - RNA, 19 nt, Homo sapiens
  misc_RNA (1)...(19): siRNA sense strand
gcggcaaucuugggaguaa

SEQ ID NO: 1578530 - RNA, 19 nt, Homo sapiens
  misc_RNA (1)...(19): siRNA sense strand
ucacugcuuugcuaagaaa

SEQ ID NO: 1578531 - RNA, 19 nt, Homo sapiens
  misc_RNA (1)...(19): siRNA sense strand
gcucacugcuuugcuaaga

SEQ ID NO: 1578532 - RNA, 19 nt, Homo sapiens
  misc_RNA (1)...(19): siRNA sense strand
auacucgagugacuucuua

SEQ ID NO: 1578533 - RNA, 19 nt, Homo sapiens
  misc_RNA (1)...(19): siRNA sense strand
aggagaagcugaugcaugu

SEQ ID NO: 1578534 - RNA, 19 nt, Homo sapiens
  misc_RNA (1)...(19): siRNA sense strand
ggaacacuuuauaugaaug

SEQ ID NO: 1578535 - RNA, 19 nt, Homo sapiens
  misc_RNA (1)...(19): siRNA sense strand
ugugacugauucaauguua

SEQ ID NO: 1578536 - RNA, 19 nt, Homo sapiens
  misc_RNA (1)...(19): siRNA sense strand
ggaaaggccgucacuacug

SEQ ID NO: 1578537 - RNA, 19 nt, Homo sapiens
  misc_RNA (1)...(19): siRNA sense strand
cugaaaugcuuaccaacaa

SEQ ID NO: 1578538 - RNA, 19 nt, Homo sapiens
  misc_RNA (1)...(19): siRNA sense strand
aaaugaagcucucagaaaa

SEQ ID NO: 1578539 - RNA, 19 nt, Homo sapiens
  misc_RNA (1)...(19): siRNA sense strand
caaagaucuuggccacuau

SEQ ID NO: 1578540 - RNA, 19 nt, Homo sapiens
  misc_RNA (1)...(19): siRNA sense strand
gagacuaagauguuaaaug

SEQ ID NO: 1578541 - RNA, 19 nt, Homo sapiens
  misc_RNA (1)...(19): siRNA sense strand
gcaaggcugcuucugaaau

SEQ ID NO: 1578542 - RNA, 19 nt, Homo sapiens
  misc_RNA (1)...(19): siRNA sense strand
aaucugaggucaucaaacu

SEQ ID NO: 1578543 - RNA, 19 nt, Homo sapiens
  misc_RNA (1)...(19): siRNA sense strand
gaguacauucguaagauuu

SEQ ID NO: 1578544 - RNA, 19 nt, Homo sapiens
  misc_RNA (1)...(19): siRNA sense strand
guagccaacaguaucauaa

SEQ ID NO: 1578545 - RNA, 19 nt, Homo sapiens
  misc_RNA (1)...(19): siRNA sense strand
ccauuggucuucuuguuca

SEQ ID NO: 1578546 - RNA, 19 nt, Homo sapiens
  misc_RNA (1)...(19): siRNA sense strand
cagaguacauucguaagau

SEQ ID NO: 1578547 - RNA, 19 nt, Homo sapiens
  misc_RNA (1)...(19): siRNA sense strand
ccacuagcuuacccugauu

SEQ ID NO: 1578548 - RNA, 19 nt, Homo sapiens
  misc_RNA (1)...(19): siRNA sense strand
ugucaaaucugaggucauc

SEQ ID NO: 1578549 - RNA, 19 nt, Homo sapiens
  misc_RNA (1)...(19): siRNA sense strand
ggauuuaugucaggagaag

SEQ ID NO: 1578550 - RNA, 19 nt, Homo sapiens
  misc_RNA (1)...(19): siRNA sense strand
gcaguuacagcugaaauuc

SEQ ID NO: 1578551 - RNA, 19 nt, Homo sapiens
  misc_RNA (1)...(19): siRNA sense strand
agaguacauucguaagauu

SEQ ID NO: 1578552 - RNA, 19 nt, Homo sapiens
  misc_RNA (1)...(19): siRNA sense strand
ggagacaaguagccaacag

SEQ ID NO: 1578553 - RNA, 19 nt, Homo sapiens
  misc_RNA (1)...(19): siRNA sense strand
aagcaaagauauugagacu

SEQ ID NO: 1578554 - RNA, 19 nt, Homo sapiens
  misc_RNA (1)...(19): siRNA sense strand
gagaagcugaugcauguca

SEQ ID NO: 1578555 - RNA, 19 nt, Homo sapiens
  misc_RNA (1)...(19): siRNA sense strand
ggggaacacuuuauaugaa

SEQ ID NO: 1578556 - RNA, 19 nt, Homo sapiens
  misc_RNA (1)...(19): siRNA sense strand
cagcagcagguggcuauua

SEQ ID NO: 1578557 - RNA, 19 nt, Homo sapiens
  misc_RNA (1)...(19): siRNA sense strand
guacaggcacggcauaucu

SEQ ID NO: 1578558 - RNA, 19 nt, Homo sapiens
  misc_RNA (1)...(19): siRNA sense strand
ucacaagccagcacaaauc

SEQ ID NO: 1578559 - RNA, 19 nt, Homo sapiens
  misc_RNA (1)...(19): siRNA sense strand
uacccugauuccagaaaua

SEQ ID NO: 1578560 - RNA, 19 nt, Homo sapiens
  misc_RNA (1)...(19): siRNA sense strand
ucaaacuucugccuaaugc

SEQ ID NO: 1578561 - RNA, 19 nt, Homo sapiens
  misc_RNA (1)...(19): siRNA sense strand
gauauugagacuaagaugu

SEQ ID NO: 1578562 - RNA, 19 nt, Homo sapiens
  misc_RNA (1)...(19): siRNA sense strand
agacaaguagccaacagua

SEQ ID NO: 1578563 - RNA, 19 nt, Homo sapiens
  misc_RNA (1)...(19): siRNA sense strand
caaaucugaggucaucaaa

SEQ ID NO: 1578564 - RNA, 19 nt, Homo sapiens
  misc_RNA (1)...(19): siRNA sense strand
guacauucguaagauuugu

SEQ ID NO: 1578565 - RNA, 19 nt, Homo sapiens
  misc_RNA (1)...(19): siRNA sense strand
caaguagccaacaguauca

SEQ ID NO: 1578566 - RNA, 19 nt, Homo sapiens
  misc_RNA (1)...(19): siRNA sense strand
cuucugaaaugcuuaccaa

SEQ ID NO: 1578567 - RNA, 19 nt, Homo sapiens
  misc_RNA (1)...(19): siRNA sense strand
caucaaacuucugccuaau

SEQ ID NO: 1578568 - RNA, 19 nt, Homo sapiens
  misc_RNA (1)...(19): siRNA sense strand
ucuuaucgcaauuggauua

SEQ ID NO: 1578569 - RNA, 19 nt, Homo sapiens
  misc_RNA (1)...(19): siRNA sense strand
uaucuggcaucuuguugga

SEQ ID NO: 1578570 - RNA, 19 nt, Homo sapiens
  misc_RNA (1)...(19): siRNA sense strand
ucauauuucuggagucaca

SEQ ID NO: 1578571 - RNA, 19 nt, Homo sapiens
  misc_RNA (1)...(19): siRNA sense strand
caguugagaagacuuacua

SEQ ID NO: 1578572 - RNA, 19 nt, Homo sapiens
  misc_RNA (1)...(19): siRNA sense strand
aaggcuaaauuacaucaga

SEQ ID NO: 1578573 - RNA, 19 nt, Homo sapiens
  misc_RNA (1)...(19): siRNA sense strand
uaaugccaaugguucaaau

SEQ ID NO: 1578574 - RNA, 19 nt, Homo sapiens
  misc_RNA (1)...(19): siRNA sense strand
ggugauggaugugguaaaa

SEQ ID NO: 1578575 - RNA, 19 nt, Homo sapiens
  misc_RNA (1)...(19): siRNA sense strand
gaacacuuuauaugaaugg

SEQ ID NO: 1578576 - RNA, 19 nt, Homo sapiens
  misc_RNA (1)...(19): siRNA sense strand
ggaguuguaguaaauaaac

SEQ ID NO: 1578577 - RNA, 19 nt, Homo sapiens
  misc_RNA (1)...(19): siRNA sense strand
gacaaguagccaacaguau

SEQ ID NO: 1578578 - RNA, 19 nt, Homo sapiens
  misc_RNA (1)...(19): siRNA sense strand
acaaguagccaacaguauc

SEQ ID NO: 1578579 - RNA, 19 nt, Homo sapiens
  misc_RNA (1)...(19): siRNA sense strand
caucuuguuggaauaguaa

SEQ ID NO: 1578580 - RNA, 19 nt, Homo sapiens
  misc_RNA (1)...(19): siRNA sense strand
gacuuacuauuaucaaggu

SEQ ID NO: 1578581 - RNA, 19 nt, Homo sapiens
  misc_RNA (1)...(19): siRNA sense strand
guugagaagacuuacuauu

SEQ ID NO: 1578582 - RNA, 19 nt, Homo sapiens
  misc_RNA (1)...(19): siRNA sense strand
uggacuacgaucuuuauuu

SEQ ID NO: 1578583 - RNA, 19 nt, Homo sapiens
  misc_RNA (1)...(19): siRNA sense strand
uaagccaggugucuauacu

SEQ ID NO: 1578584 - RNA, 19 nt, Homo sapiens
  misc_RNA (1)...(19): siRNA sense strand
acuauggacuacgaucuuu

SEQ ID NO: 1578585 - RNA, 19 nt, Homo sapiens
  misc_RNA (1)...(19): siRNA sense strand
aaauuugcaaugccucaua

SEQ ID NO: 1578586 - RNA, 19 nt, Homo sapiens
  misc_RNA (1)...(19): siRNA sense strand
uguggagccucucugauca

SEQ ID NO: 1578587 - RNA, 19 nt, Homo sapiens
  misc_RNA (1)...(19): siRNA sense strand
agaauaagccaggugucua

SEQ ID NO: 1578588 - RNA, 19 nt, Homo sapiens
  misc_RNA (1)...(19): siRNA sense strand
cuuuggaguuguaguaaau

SEQ ID NO: 1578589 - RNA, 19 nt, Homo sapiens
  misc_RNA (1)...(19): siRNA sense strand
ugguucaaaugugcaguua

SEQ ID NO: 1578590 - RNA, 19 nt, Homo sapiens
  misc_RNA (1)...(19): siRNA sense strand
ugacugauucaauguuaug

SEQ ID NO: 1578591 - RNA, 19 nt, Homo sapiens
  misc_RNA (1)...(19): siRNA sense strand
cacggcauaucuucccaaa

SEQ ID NO: 1578592 - RNA, 19 nt, Homo sapiens
  misc_RNA (1)...(19): siRNA sense strand
gaaaugcuuaccaacaacu

SEQ ID NO: 1578593 - RNA, 19 nt, Homo sapiens
  misc_RNA (1)...(19): siRNA sense strand
ucaaaucugaggucaucaa

SEQ ID NO: 1578594 - RNA, 19 nt, Homo sapiens
  misc_RNA (1)...(19): siRNA sense strand
uaucgcaauuggauuacau

SEQ ID NO: 1578595 - RNA, 19 nt, Homo sapiens
  misc_RNA (1)...(19): siRNA sense strand
gugacugauucaauguuau

SEQ ID NO: 1578596 - RNA, 19 nt, Homo sapiens
  misc_RNA (1)...(19): siRNA sense strand
aaaaugaagcucucagaaa

SEQ ID NO: 1578597 - RNA, 19 nt, Homo sapiens
  misc_RNA (1)...(19): siRNA sense strand
gcaguccugggcuucauga

SEQ ID NO: 1578598 - RNA, 19 nt, Homo sapiens
  misc_RNA (1)...(19): siRNA sense strand
cggaaaguccaaaacauua

SEQ ID NO: 1578599 - RNA, 19 nt, Homo sapiens
  misc_RNA (1)...(19): siRNA sense strand
aagauuggacugucaacuu

SEQ ID NO: 1578600 - RNA, 19 nt, Homo sapiens
  misc_RNA (1)...(19): siRNA sense strand
aauuugcaaugccucauau

SEQ ID NO: 1578601 - RNA, 19 nt, Homo sapiens
  misc_RNA (1)...(19): siRNA sense strand
ucuggcaucuuguuggaau

SEQ ID NO: 1578602 - RNA, 19 nt, Homo sapiens
  misc_RNA (1)...(19): siRNA sense strand
gaaauaucuggcaucuugu

SEQ ID NO: 1578603 - RNA, 19 nt, Homo sapiens
  misc_RNA (1)...(19): siRNA sense strand
cagaugagcuuucaaguug

SEQ ID NO: 1578604 - RNA, 19 nt, Homo sapiens
  misc_RNA (1)...(19): siRNA sense strand
gcaguugccuucacaagaa

SEQ ID NO: 1578605 - RNA, 19 nt, Homo sapiens
  misc_RNA (1)...(19): siRNA sense strand
uagcagcucugaauccuua

SEQ ID NO: 1578606 - RNA, 19 nt, Homo sapiens
  misc_RNA (1)...(19): siRNA sense strand
gacaaaggcucugaauuga

SEQ ID NO: 1578607 - RNA, 19 nt, Homo sapiens
  misc_RNA (1)...(19): siRNA sense strand
ugacaaaggcucugaauug

SEQ ID NO: 1578608 - RNA, 19 nt, Homo sapiens
  misc_RNA (1)...(19): siRNA sense strand
caaaggcucugaauugaag

SEQ ID NO: 1578609 - RNA, 19 nt, Homo sapiens
  misc_RNA (1)...(19): siRNA sense strand
ggaagacgauaauuacaag

SEQ ID NO: 1578610 - RNA, 19 nt, Homo sapiens
  misc_RNA (1)...(19): siRNA sense strand
gcaagcagugucaauauug

SEQ ID NO: 1578611 - RNA, 19 nt, Homo sapiens
  misc_RNA (1)...(19): siRNA sense strand
gaauaugcgggucagauaa

SEQ ID NO: 1578612 - RNA, 19 nt, Homo sapiens
  misc_RNA (1)...(19): siRNA sense strand
ucucaacucuguucaguau

SEQ ID NO: 1578613 - RNA, 19 nt, Homo sapiens
  misc_RNA (1)...(19): siRNA sense strand
ggcaagcagugucaauauu

SEQ ID NO: 1578614 - RNA, 19 nt, Homo sapiens
  misc_RNA (1)...(19): siRNA sense strand
gaauaaccuucaugcacuu

SEQ ID NO: 1578615 - RNA, 19 nt, Homo sapiens
  misc_RNA (1)...(19): siRNA sense strand
caccuugcauucccuauuu

SEQ ID NO: 1578616 - RNA, 19 nt, Homo sapiens
  misc_RNA (1)...(19): siRNA sense strand
gguauucgauguucuuaag

SEQ ID NO: 1578617 - RNA, 19 nt, Homo sapiens
  misc_RNA (1)...(19): siRNA sense strand
ucaacucuguucaguauau

SEQ ID NO: 1578618 - RNA, 19 nt, Homo sapiens
  misc_RNA (1)...(19): siRNA sense strand
gaaacuguaugagcugaau

SEQ ID NO: 1578619 - RNA, 19 nt, Homo sapiens
  misc_RNA (1)...(19): siRNA sense strand
caacucuguucaguauaua

SEQ ID NO: 1578620 - RNA, 19 nt, Homo sapiens
  misc_RNA (1)...(19): siRNA sense strand
gaagauaacuacaaaagac

SEQ ID NO: 1578621 - RNA, 19 nt, Homo sapiens
  misc_RNA (1)...(19): siRNA sense strand
acagcagucuugugaauau

SEQ ID NO: 1578622 - RNA, 19 nt, Homo sapiens
  misc_RNA (1)...(19): siRNA sense strand
gaugagcuuucaaguugug

SEQ ID NO: 1578623 - RNA, 19 nt, Homo sapiens
  misc_RNA (1)...(19): siRNA sense strand
uuacagcagucuugugaau

SEQ ID NO: 1578624 - RNA, 19 nt, Homo sapiens
  misc_RNA (1)...(19): siRNA sense strand
gcucugaauccuuaaguga

SEQ ID NO: 1578625 - RNA, 19 nt, Homo sapiens
  misc_RNA (1)...(19): siRNA sense strand
ccagaugagcuuucaaguu

SEQ ID NO: 1578626 - RNA, 19 nt, Homo sapiens
  misc_RNA (1)...(19): siRNA sense strand
ggucagauaacauuaaugg

SEQ ID NO: 1578627 - RNA, 19 nt, Homo sapiens
  misc_RNA (1)...(19): siRNA sense strand
guuccaguauuuaaagcua

SEQ ID NO: 1578628 - RNA, 19 nt, Homo sapiens
  misc_RNA (1)...(19): siRNA sense strand
auacaucgauucagcauac

SEQ ID NO: 1578629 - RNA, 19 nt, Homo sapiens
  misc_RNA (1)...(19): siRNA sense strand
aagcuuugaugcuguggua

SEQ ID NO: 1578630 - RNA, 19 nt, Homo sapiens
  misc_RNA (1)...(19): siRNA sense strand
cucagagacuauauaagua

SEQ ID NO: 1578631 - RNA, 19 nt, Homo sapiens
  misc_RNA (1)...(19): siRNA sense strand
agacucagagacuauauaa

SEQ ID NO: 1578632 - RNA, 19 nt, Homo sapiens
  misc_RNA (1)...(19): siRNA sense strand
aaacaugggcguuauuaag

SEQ ID NO: 1578633 - RNA, 19 nt, Homo sapiens
  misc_RNA (1)...(19): siRNA sense strand
ucuucaugcucaaacauua

SEQ ID NO: 1578634 - RNA, 19 nt, Homo sapiens
  misc_RNA (1)...(19): siRNA sense strand
agaauaugcgggucagaua

SEQ ID NO: 1578635 - RNA, 19 nt, Homo sapiens
  misc_RNA (1)...(19): siRNA sense strand
gguuacaccagaagaauau

SEQ ID NO: 1578636 - RNA, 19 nt, Homo sapiens
  misc_RNA (1)...(19): siRNA sense strand
gaguaaagaagauaacuac

SEQ ID NO: 1578637 - RNA, 19 nt, Homo sapiens
  misc_RNA (1)...(19): siRNA sense strand
uguaugagcugaauaaccu

SEQ ID NO: 1578638 - RNA, 19 nt, Homo sapiens
  misc_RNA (1)...(19): siRNA sense strand
aaauauaguucugcaccaa

SEQ ID NO: 1578639 - RNA, 19 nt, Homo sapiens
  misc_RNA (1)...(19): siRNA sense strand
aaagaugacaccuugcauu

SEQ ID NO: 1578640 - RNA, 19 nt, Homo sapiens
  misc_RNA (1)...(19): siRNA sense strand
uaaccuucaugcacuuaug

SEQ ID NO: 1578641 - RNA, 19 nt, Homo sapiens
  misc_RNA (1)...(19): siRNA sense strand
ggauguuccaguauuuaaa

SEQ ID NO: 1578642 - RNA, 19 nt, Homo sapiens
  misc_RNA (1)...(19): siRNA sense strand
gagacuauauaaguagcuu

SEQ ID NO: 1578643 - RNA, 19 nt, Homo sapiens
  misc_RNA (1)...(19): siRNA sense strand
acucagagacuauauaagu

SEQ ID NO: 1578644 - RNA, 19 nt, Homo sapiens
  misc_RNA (1)...(19): siRNA sense strand
aaacugcuaagaaacugua

SEQ ID NO: 1578645 - RNA, 19 nt, Homo sapiens
  misc_RNA (1)...(19): siRNA sense strand
gcagucuugugaauaugau

SEQ ID NO: 1578646 - RNA, 19 nt, Homo sapiens
  misc_RNA (1)...(19): siRNA sense strand
cccaucaacuggcagcauu

SEQ ID NO: 1578647 - RNA, 19 nt, Homo sapiens
  misc_RNA (1)...(19): siRNA sense strand
ucaaccagaugagcuuuca

SEQ ID NO: 1578648 - RNA, 19 nt, Homo sapiens
  misc_RNA (1)...(19): siRNA sense strand
guuuugagccacuauauua

SEQ ID NO: 1578649 - RNA, 19 nt, Homo sapiens
  misc_RNA (1)...(19): siRNA sense strand
uaagguuacaccagaagaa

SEQ ID NO: 1578650 - RNA, 19 nt, Homo sapiens
  misc_RNA (1)...(19): siRNA sense strand
caggcaagcagugucaaua

SEQ ID NO: 1578651 - RNA, 19 nt, Homo sapiens
  misc_RNA (1)...(19): siRNA sense strand
uaaaacaugggcguuauua

SEQ ID NO: 1578652 - RNA, 19 nt, Homo sapiens
  misc_RNA (1)...(19): siRNA sense strand
caaaugcaguugccuucac

SEQ ID NO: 1578653 - RNA, 19 nt, Homo sapiens
  misc_RNA (1)...(19): siRNA sense strand
ucaaguuguggauggaaua

SEQ ID NO: 1578654 - RNA, 19 nt, Homo sapiens
  misc_RNA (1)...(19): siRNA sense strand
gcgggucagauaacauuaa

SEQ ID NO: 1578655 - RNA, 19 nt, Homo sapiens
  misc_RNA (1)...(19): siRNA sense strand
uaucucaacucuguucagu

SEQ ID NO: 1578656 - RNA, 19 nt, Homo sapiens
  misc_RNA (1)...(19): siRNA sense strand
caagcagugucaauauugc

SEQ ID NO: 1578657 - RNA, 19 nt, Homo sapiens
  misc_RNA (1)...(19): siRNA sense strand
gcugugguauucgauguuc

SEQ ID NO: 1578658 - RNA, 19 nt, Homo sapiens
  misc_RNA (1)...(19): siRNA sense strand
caacuggcagcauucuaga

SEQ ID NO: 1578659 - RNA, 19 nt, Homo sapiens
  misc_RNA (1)...(19): siRNA sense strand
gaaaagacaaaacuaccuu

SEQ ID NO: 1578660 - RNA, 19 nt, Homo sapiens
  misc_RNA (1)...(19): siRNA sense strand
caaguuguggauggaauaa

SEQ ID NO: 1578661 - RNA, 19 nt, Homo sapiens
  misc_RNA (1)...(19): siRNA sense strand
gauguuccaguauuuaaag

SEQ ID NO: 1578662 - RNA, 19 nt, Homo sapiens
  misc_RNA (1)...(19): siRNA sense strand
cgggucagauaacauuaau

SEQ ID NO: 1578663 - RNA, 19 nt, Homo sapiens
  misc_RNA (1)...(19): siRNA sense strand
uggaagacgauaauuacaa

SEQ ID NO: 1578664 - RNA, 19 nt, Homo sapiens
  misc_RNA (1)...(19): siRNA sense strand
gaaaaugagcaaagaucaa

SEQ ID NO: 1578665 - RNA, 19 nt, Homo sapiens
  misc_RNA (1)...(19): siRNA sense strand
acaaaggcucugaauugaa

SEQ ID NO: 1578666 - RNA, 19 nt, Homo sapiens
  misc_RNA (1)...(19): siRNA sense strand
cgauucagcauacccauca

SEQ ID NO: 1578667 - RNA, 19 nt, Homo sapiens
  misc_RNA (1)...(19): siRNA sense strand
aaaugcaguugccuucaca

SEQ ID NO: 1578668 - RNA, 19 nt, Homo sapiens
  misc_RNA (1)...(19): siRNA sense strand
gcuuugaugcugugguauu

SEQ ID NO: 1578669 - RNA, 19 nt, Homo sapiens
  misc_RNA (1)...(19): siRNA sense strand
ucaacuggcagcauucuag

SEQ ID NO: 1578670 - RNA, 19 nt, Homo sapiens
  misc_RNA (1)...(19): siRNA sense strand
ucagagacuauauaaguag

SEQ ID NO: 1578671 - RNA, 19 nt, Homo sapiens
  misc_RNA (1)...(19): siRNA sense strand
ucugaauccuuaagugaca

SEQ ID NO: 1578672 - RNA, 19 nt, Homo sapiens
  misc_RNA (1)...(19): siRNA sense strand
acaaaagacucagagacua

SEQ ID NO: 1578673 - RNA, 19 nt, Homo sapiens
  misc_RNA (1)...(19): siRNA sense strand
cugcuaagaaacuguauga

SEQ ID NO: 1578674 - RNA, 19 nt, Homo sapiens
  misc_RNA (1)...(19): siRNA sense strand
gcaggcaagcagugucaau

SEQ ID NO: 1578675 - RNA, 19 nt, Homo sapiens
  misc_RNA (1)...(19): siRNA sense strand
aagaugacaccuugcauuc

SEQ ID NO: 1578676 - RNA, 19 nt, Homo sapiens
  misc_RNA (1)...(19): siRNA sense strand
auauaguucugcaccaaau

SEQ ID NO: 1578677 - RNA, 19 nt, Homo sapiens
  misc_RNA (1)...(19): siRNA sense strand
gcucugaauugaagaaaag

SEQ ID NO: 1578678 - RNA, 19 nt, Homo sapiens
  misc_RNA (1)...(19): siRNA sense strand
uaaagcuauucaaccagau

SEQ ID NO: 1578679 - RNA, 19 nt, Homo sapiens
  misc_RNA (1)...(19): siRNA sense strand
aaaaguagcagcucugaau

SEQ ID NO: 1578680 - RNA, 19 nt, Homo sapiens
  misc_RNA (1)...(19): siRNA sense strand
cuacagagugccccaauuu

SEQ ID NO: 1578681 - RNA, 19 nt, Homo sapiens
  misc_RNA (1)...(19): siRNA sense strand
gauucuucaugcucaaaca

SEQ ID NO: 1578682 - RNA, 19 nt, Homo sapiens
  misc_RNA (1)...(19): siRNA sense strand
gugacaaaggcucugaauu

SEQ ID NO: 1578683 - RNA, 19 nt, Homo sapiens
  misc_RNA (1)...(19): siRNA sense strand
gggcaggcaagcaguguca

SEQ ID NO: 1578684 - RNA, 19 nt, Homo sapiens
  misc_RNA (1)...(19): siRNA sense strand
uuguggaagacgauaauua

SEQ ID NO: 1578685 - RNA, 19 nt, Homo sapiens
  misc_RNA (1)...(19): siRNA sense strand
aaauaucucaacucuguuc

SEQ ID NO: 1578686 - RNA, 19 nt, Homo sapiens
  misc_RNA (1)...(19): siRNA sense strand
caaaagacucagagacuau

SEQ ID NO: 1578687 - RNA, 19 nt, Homo sapiens
  misc_RNA (1)...(19): siRNA sense strand
guuguuagagagauucuuc

SEQ ID NO: 1578688 - RNA, 19 nt, Homo sapiens
  misc_RNA (1)...(19): siRNA sense strand
gagauucuucaugcucaaa

SEQ ID NO: 1578689 - RNA, 19 nt, Homo sapiens
  misc_RNA (1)...(19): siRNA sense strand
acaugggcguuauuaaguc

SEQ ID NO: 1578690 - RNA, 19 nt, Homo sapiens
  misc_RNA (1)...(19): siRNA sense strand
cagcagucuugugaauaug

SEQ ID NO: 1578691 - RNA, 19 nt, Homo sapiens
  misc_RNA (1)...(19): siRNA sense strand
gaagaaaagcuuugaugcu

SEQ ID NO: 1578692 - RNA, 19 nt, Homo sapiens
  misc_RNA (1)...(19): siRNA sense strand
uauucgauguucuuaaggu

SEQ ID NO: 1578693 - RNA, 19 nt, Homo sapiens
  misc_RNA (1)...(19): siRNA sense strand
aagacucagagacuauaua

SEQ ID NO: 1578694 - RNA, 19 nt, Homo sapiens
  misc_RNA (1)...(19): siRNA sense strand
guuagagagauucuucaug

SEQ ID NO: 1578695 - RNA, 19 nt, Homo sapiens
  misc_RNA (1)...(19): siRNA sense strand
cagaugagcuuucaaguug

SEQ ID NO: 1578696 - RNA, 19 nt, Homo sapiens
  misc_RNA (1)...(19): siRNA sense strand
gcaguugccuucacaagaa

SEQ ID NO: 1578697 - RNA, 19 nt, Homo sapiens
  misc_RNA (1)...(19): siRNA sense strand
uagcagcucugaauccuua

SEQ ID NO: 1578698 - RNA, 19 nt, Homo sapiens
  misc_RNA (1)...(19): siRNA sense strand
gacaaaggcucugaauuga

SEQ ID NO: 1578699 - RNA, 19 nt, Homo sapiens
  misc_RNA (1)...(19): siRNA sense strand
ugacaaaggcucugaauug

SEQ ID NO: 1578700 - RNA, 19 nt, Homo sapiens
  misc_RNA (1)...(19): siRNA sense strand
caaaggcucugaauugaag

SEQ ID NO: 1578701 - RNA, 19 nt, Homo sapiens
  misc_RNA (1)...(19): siRNA sense strand
ggaagacgauaauuacaag

SEQ ID NO: 1578702 - RNA, 19 nt, Homo sapiens
  misc_RNA (1)...(19): siRNA sense strand
gcaagcagugucaauauug

SEQ ID NO: 1578703 - RNA, 19 nt, Homo sapiens
  misc_RNA (1)...(19): siRNA sense strand
gaauaugcgggucagauaa

SEQ ID NO: 1578704 - RNA, 19 nt, Homo sapiens
  misc_RNA (1)...(19): siRNA sense strand
ucucaacucuguucaguau

SEQ ID NO: 1578705 - RNA, 19 nt, Homo sapiens
  misc_RNA (1)...(19): siRNA sense strand
ggcaagcagugucaauauu

SEQ ID NO: 1578706 - RNA, 19 nt, Homo sapiens
  misc_RNA (1)...(19): siRNA sense strand
gaauaaccuucaugcacuu

SEQ ID NO: 1578707 - RNA, 19 nt, Homo sapiens
  misc_RNA (1)...(19): siRNA sense strand
caccuugcauucccuauuu

SEQ ID NO: 1578708 - RNA, 19 nt, Homo sapiens
  misc_RNA (1)...(19): siRNA sense strand
gguauucgauguucuuaag

SEQ ID NO: 1578709 - RNA, 19 nt, Homo sapiens
  misc_RNA (1)...(19): siRNA sense strand
ucaacucuguucaguauau

SEQ ID NO: 1578710 - RNA, 19 nt, Homo sapiens
  misc_RNA (1)...(19): siRNA sense strand
gaaacuguaugagcugaau

SEQ ID NO: 1578711 - RNA, 19 nt, Homo sapiens
  misc_RNA (1)...(19): siRNA sense strand
caacucuguucaguauaua

SEQ ID NO: 1578712 - RNA, 19 nt, Homo sapiens
  misc_RNA (1)...(19): siRNA sense strand
gaagauaacuacaaaagac

SEQ ID NO: 1578713 - RNA, 19 nt, Homo sapiens
  misc_RNA (1)...(19): siRNA sense strand
acagcagucuugugaauau

SEQ ID NO: 1578714 - RNA, 19 nt, Homo sapiens
  misc_RNA (1)...(19): siRNA sense strand
gaugagcuuucaaguugug

SEQ ID NO: 1578715 - RNA, 19 nt, Homo sapiens
  misc_RNA (1)...(19): siRNA sense strand
uuacagcagucuugugaau

SEQ ID NO: 1578716 - RNA, 19 nt, Homo sapiens
  misc_RNA (1)...(19): siRNA sense strand
gcucugaauccuuaaguga

SEQ ID NO: 1578717 - RNA, 19 nt, Homo sapiens
  misc_RNA (1)...(19): siRNA sense strand
ccagaugagcuuucaaguu

SEQ ID NO: 1578718 - RNA, 19 nt, Homo sapiens
  misc_RNA (1)...(19): siRNA sense strand
ggucagauaacauuaaugg

SEQ ID NO: 1578719 - RNA, 19 nt, Homo sapiens
  misc_RNA (1)...(19): siRNA sense strand
guuccaguauuuaaagcua

SEQ ID NO: 1578720 - RNA, 19 nt, Homo sapiens
  misc_RNA (1)...(19): siRNA sense strand
auacaucgauucagcauac

SEQ ID NO: 1578721 - RNA, 19 nt, Homo sapiens
  misc_RNA (1)...(19): siRNA sense strand
aagcuuugaugcuguggua

SEQ ID NO: 1578722 - RNA, 19 nt, Homo sapiens
  misc_RNA (1)...(19): siRNA sense strand
cucagagacuauauaagua

SEQ ID NO: 1578723 - RNA, 19 nt, Homo sapiens
  misc_RNA (1)...(19): siRNA sense strand
agacucagagacuauauaa

SEQ ID NO: 1578724 - RNA, 19 nt, Homo sapiens
  misc_RNA (1)...(19): siRNA sense strand
aaacaugggcguuauuaag

SEQ ID NO: 1578725 - RNA, 19 nt, Homo sapiens
  misc_RNA (1)...(19): siRNA sense strand
ucuucaugcucaaacauua

SEQ ID NO: 1578726 - RNA, 19 nt, Homo sapiens
  misc_RNA (1)...(19): siRNA sense strand
agaauaugcgggucagaua

SEQ ID NO: 1578727 - RNA, 19 nt, Homo sapiens
  misc_RNA (1)...(19): siRNA sense strand
gguuacaccagaagaauau

SEQ ID NO: 1578728 - RNA, 19 nt, Homo sapiens
  misc_RNA (1)...(19): siRNA sense strand
gaguaaagaagauaacuac

SEQ ID NO: 1578729 - RNA, 19 nt, Homo sapiens
  misc_RNA (1)...(19): siRNA sense strand
uguaugagcugaauaaccu

SEQ ID NO: 1578730 - RNA, 19 nt, Homo sapiens
  misc_RNA (1)...(19): siRNA sense strand
aaauauaguucugcaccaa

SEQ ID NO: 1578731 - RNA, 19 nt, Homo sapiens
  misc_RNA (1)...(19): siRNA sense strand
aaagaugacaccuugcauu

SEQ ID NO: 1578732 - RNA, 19 nt, Homo sapiens
  misc_RNA (1)...(19): siRNA sense strand
uaaccuucaugcacuuaug

SEQ ID NO: 1578733 - RNA, 19 nt, Homo sapiens
  misc_RNA (1)...(19): siRNA sense strand
ggauguuccaguauuuaaa

SEQ ID NO: 1578734 - RNA, 19 nt, Homo sapiens
  misc_RNA (1)...(19): siRNA sense strand
gagacuauauaaguagcuu

SEQ ID NO: 1578735 - RNA, 19 nt, Homo sapiens
  misc_RNA (1)...(19): siRNA sense strand
acucagagacuauauaagu

SEQ ID NO: 1578736 - RNA, 19 nt, Homo sapiens
  misc_RNA (1)...(19): siRNA sense strand
aaacugcuaagaaacugua

SEQ ID NO: 1578737 - RNA, 19 nt, Homo sapiens
  misc_RNA (1)...(19): siRNA sense strand
gcagucuugugaauaugau

SEQ ID NO: 1578738 - RNA, 19 nt, Homo sapiens
  misc_RNA (1)...(19): siRNA sense strand
cccaucaacuggcagcauu

SEQ ID NO: 1578739 - RNA, 19 nt, Homo sapiens
  misc_RNA (1)...(19): siRNA sense strand
ucaaccagaugagcuuuca

SEQ ID NO: 1578740 - RNA, 19 nt, Homo sapiens
  misc_RNA (1)...(19): siRNA sense strand
guuuugagccacuauauua

SEQ ID NO: 1578741 - RNA, 19 nt, Homo sapiens
  misc_RNA (1)...(19): siRNA sense strand
uaagguuacaccagaagaa

SEQ ID NO: 1578742 - RNA, 19 nt, Homo sapiens
  misc_RNA (1)...(19): siRNA sense strand
caggcaagcagugucaaua

SEQ ID NO: 1578743 - RNA, 19 nt, Homo sapiens
  misc_RNA (1)...(19): siRNA sense strand
uaaaacaugggcguuauua

SEQ ID NO: 1578744 - RNA, 19 nt, Homo sapiens
  misc_RNA (1)...(19): siRNA sense strand
caaaugcaguugccuucac

SEQ ID NO: 1578745 - RNA, 19 nt, Homo sapiens
  misc_RNA (1)...(19): siRNA sense strand
ucaaguuguggauggaaua

SEQ ID NO: 1578746 - RNA, 19 nt, Homo sapiens
  misc_RNA (1)...(19): siRNA sense strand
gcgggucagauaacauuaa

SEQ ID NO: 1578747 - RNA, 19 nt, Homo sapiens
  misc_RNA (1)...(19): siRNA sense strand
uaucucaacucuguucagu

SEQ ID NO: 1578748 - RNA, 19 nt, Homo sapiens
  misc_RNA (1)...(19): siRNA sense strand
caagcagugucaauauugc

SEQ ID NO: 1578749 - RNA, 19 nt, Homo sapiens
  misc_RNA (1)...(19): siRNA sense strand
gcugugguauucgauguuc

SEQ ID NO: 1578750 - RNA, 19 nt, Homo sapiens
  misc_RNA (1)...(19): siRNA sense strand
caacuggcagcauucuaga

SEQ ID NO: 1578751 - RNA, 19 nt, Homo sapiens
  misc_RNA (1)...(19): siRNA sense strand
gaaaagacaaaacuaccuu

SEQ ID NO: 1578752 - RNA, 19 nt, Homo sapiens
  misc_RNA (1)...(19): siRNA sense strand
caaguuguggauggaauaa

SEQ ID NO: 1578753 - RNA, 19 nt, Homo sapiens
  misc_RNA (1)...(19): siRNA sense strand
gauguuccaguauuuaaag

SEQ ID NO: 1578754 - RNA, 19 nt, Homo sapiens
  misc_RNA (1)...(19): siRNA sense strand
cgggucagauaacauuaau

SEQ ID NO: 1578755 - RNA, 19 nt, Homo sapiens
  misc_RNA (1)...(19): siRNA sense strand
uggaagacgauaauuacaa

SEQ ID NO: 1578756 - RNA, 19 nt, Homo sapiens
  misc_RNA (1)...(19): siRNA sense strand
gaaaaugagcaaagaucaa

SEQ ID NO: 1578757 - RNA, 19 nt, Homo sapiens
  misc_RNA (1)...(19): siRNA sense strand
acaaaggcucugaauugaa

SEQ ID NO: 1578758 - RNA, 19 nt, Homo sapiens
  misc_RNA (1)...(19): siRNA sense strand
cgauucagcauacccauca

SEQ ID NO: 1578759 - RNA, 19 nt, Homo sapiens
  misc_RNA (1)...(19): siRNA sense strand
aaaugcaguugccuucaca

SEQ ID NO: 1578760 - RNA, 19 nt, Homo sapiens
  misc_RNA (1)...(19): siRNA sense strand
gcuuugaugcugugguauu

SEQ ID NO: 1578761 - RNA, 19 nt, Homo sapiens
  misc_RNA (1)...(19): siRNA sense strand
ucaacuggcagcauucuag

SEQ ID NO: 1578762 - RNA, 19 nt, Homo sapiens
  misc_RNA (1)...(19): siRNA sense strand
ucagagacuauauaaguag

SEQ ID NO: 1578763 - RNA, 19 nt, Homo sapiens
  misc_RNA (1)...(19): siRNA sense strand
ucugaauccuuaagugaca

SEQ ID NO: 1578764 - RNA, 19 nt, Homo sapiens
  misc_RNA (1)...(19): siRNA sense strand
acaaaagacucagagacua

SEQ ID NO: 1578765 - RNA, 19 nt, Homo sapiens
  misc_RNA (1)...(19): siRNA sense strand
cugcuaagaaacuguauga

SEQ ID NO: 1578766 - RNA, 19 nt, Homo sapiens
  misc_RNA (1)...(19): siRNA sense strand
gcaggcaagcagugucaau

SEQ ID NO: 1578767 - RNA, 19 nt, Homo sapiens
  misc_RNA (1)...(19): siRNA sense strand
aagaugacaccuugcauuc

SEQ ID NO: 1578768 - RNA, 19 nt, Homo sapiens
  misc_RNA (1)...(19): siRNA sense strand
auauaguucugcaccaaau

SEQ ID NO: 1578769 - RNA, 19 nt, Homo sapiens
  misc_RNA (1)...(19): siRNA sense strand
gcucugaauugaagaaaag

SEQ ID NO: 1578770 - RNA, 19 nt, Homo sapiens
  misc_RNA (1)...(19): siRNA sense strand
uaaagcuauucaaccagau

SEQ ID NO: 1578771 - RNA, 19 nt, Homo sapiens
  misc_RNA (1)...(19): siRNA sense strand
aaaaguagcagcucugaau

SEQ ID NO: 1578772 - RNA, 19 nt, Homo sapiens
  misc_RNA (1)...(19): siRNA sense strand
cuacagagugccccaauuu

SEQ ID NO: 1578773 - RNA, 19 nt, Homo sapiens
  misc_RNA (1)...(19): siRNA sense strand
gauucuucaugcucaaaca

SEQ ID NO: 1578774 - RNA, 19 nt, Homo sapiens
  misc_RNA (1)...(19): siRNA sense strand
gugacaaaggcucugaauu

SEQ ID NO: 1578775 - RNA, 19 nt, Homo sapiens
  misc_RNA (1)...(19): siRNA sense strand
gggcaggcaagcaguguca

SEQ ID NO: 1578776 - RNA, 19 nt, Homo sapiens
  misc_RNA (1)...(19): siRNA sense strand
uuguggaagacgauaauua

SEQ ID NO: 1578777 - RNA, 19 nt, Homo sapiens
  misc_RNA (1)...(19): siRNA sense strand
aaauaucucaacucuguuc

SEQ ID NO: 1578778 - RNA, 19 nt, Homo sapiens
  misc_RNA (1)...(19): siRNA sense strand
caaaagacucagagacuau

SEQ ID NO: 1578779 - RNA, 19 nt, Homo sapiens
  misc_RNA (1)...(19): siRNA sense strand
guuguuagagagauucuuc

SEQ ID NO: 1578780 - RNA, 19 nt, Homo sapiens
  misc_RNA (1)...(19): siRNA sense strand
gagauucuucaugcucaaa

SEQ ID NO: 1578781 - RNA, 19 nt, Homo sapiens
  misc_RNA (1)...(19): siRNA sense strand
acaugggcguuauuaaguc

SEQ ID NO: 1578782 - RNA, 19 nt, Homo sapiens
  misc_RNA (1)...(19): siRNA sense strand
cagcagucuugugaauaug

SEQ ID NO: 1578783 - RNA, 19 nt, Homo sapiens
  misc_RNA (1)...(19): siRNA sense strand
gaagaaaagcuuugaugcu

SEQ ID NO: 1578784 - RNA, 19 nt, Homo sapiens
  misc_RNA (1)...(19): siRNA sense strand
uauucgauguucuuaaggu

SEQ ID NO: 1578785 - RNA, 19 nt, Homo sapiens
  misc_RNA (1)...(19): siRNA sense strand
aagacucagagacuauaua

SEQ ID NO: 1578786 - RNA, 19 nt, Homo sapiens
  misc_RNA (1)...(19): siRNA sense strand
guuagagagauucuucaug

SEQ ID NO: 1578787 - RNA, 19 nt, Homo sapiens
  misc_RNA (1)...(19): siRNA sense strand
ggaaagagauucaacaaca

SEQ ID NO: 1578788 - RNA, 19 nt, Homo sapiens
  misc_RNA (1)...(19): siRNA sense strand
gacaaagccuguacacaua

SEQ ID NO: 1578789 - RNA, 19 nt, Homo sapiens
  misc_RNA (1)...(19): siRNA sense strand
gagagaggcuucacuaaga

SEQ ID NO: 1578790 - RNA, 19 nt, Homo sapiens
  misc_RNA (1)...(19): siRNA sense strand
aaacaaggcuuuacagaga

SEQ ID NO: 1578791 - RNA, 19 nt, Homo sapiens
  misc_RNA (1)...(19): siRNA sense strand
gggaaaaucuucaacaaua

SEQ ID NO: 1578792 - RNA, 19 nt, Homo sapiens
  misc_RNA (1)...(19): siRNA sense strand
ggacaaagccuguacacau

SEQ ID NO: 1578793 - RNA, 19 nt, Homo sapiens
  misc_RNA (1)...(19): siRNA sense strand
caacaacaguucccaguuc

SEQ ID NO: 1578794 - RNA, 19 nt, Homo sapiens
  misc_RNA (1)...(19): siRNA sense strand
ggaaggaagagaugcguua

SEQ ID NO: 1578795 - RNA, 19 nt, Homo sapiens
  misc_RNA (1)...(19): siRNA sense strand
gaagaugagucaccagagu

SEQ ID NO: 1578796 - RNA, 19 nt, Homo sapiens
  misc_RNA (1)...(19): siRNA sense strand
ccaagacgcuccuggcuau

SEQ ID NO: 1578797 - RNA, 19 nt, Homo sapiens
  misc_RNA (1)...(19): siRNA sense strand
gaaaaggacuucaggaauc

SEQ ID NO: 1578798 - RNA, 19 nt, Homo sapiens
  misc_RNA (1)...(19): siRNA sense strand
agaaggcaauguagaaauu

SEQ ID NO: 1578799 - RNA, 19 nt, Homo sapiens
  misc_RNA (1)...(19): siRNA sense strand
caaccucacugcccaccua

SEQ ID NO: 1578800 - RNA, 19 nt, Homo sapiens
  misc_RNA (1)...(19): siRNA sense strand
cagaggaaguagaaauaaa

SEQ ID NO: 1578801 - RNA, 19 nt, Homo sapiens
  misc_RNA (1)...(19): siRNA sense strand
gaaagagauucaacaacag

SEQ ID NO: 1578802 - RNA, 19 nt, Homo sapiens
  misc_RNA (1)...(19): siRNA sense strand
gcgagaagccucacaagug

SEQ ID NO: 1578803 - RNA, 19 nt, Homo sapiens
  misc_RNA (1)...(19): siRNA sense strand
aacaauagcucccacuuca

SEQ ID NO: 1578804 - RNA, 19 nt, Homo sapiens
  misc_RNA (1)...(19): siRNA sense strand
aggaagagaugcguuauga

SEQ ID NO: 1578805 - RNA, 19 nt, Homo sapiens
  misc_RNA (1)...(19): siRNA sense strand
ggagaggcccuaucagugu

SEQ ID NO: 1578806 - RNA, 19 nt, Homo sapiens
  misc_RNA (1)...(19): siRNA sense strand
gaaagcaguacucucauca

SEQ ID NO: 1578807 - RNA, 19 nt, Homo sapiens
  misc_RNA (1)...(19): siRNA sense strand
ucaagaaggcaauguagaa

SEQ ID NO: 1578808 - RNA, 19 nt, Homo sapiens
  misc_RNA (1)...(19): siRNA sense strand
ggaaguagaaauaaacaag

SEQ ID NO: 1578809 - RNA, 19 nt, Homo sapiens
  misc_RNA (1)...(19): siRNA sense strand
gagaaaguccagaggaguu

SEQ ID NO: 1578810 - RNA, 19 nt, Homo sapiens
  misc_RNA (1)...(19): siRNA sense strand
caagaaggaagugauauug

SEQ ID NO: 1578811 - RNA, 19 nt, Homo sapiens
  misc_RNA (1)...(19): siRNA sense strand
caugaaagcaguacucuca

SEQ ID NO: 1578812 - RNA, 19 nt, Homo sapiens
  misc_RNA (1)...(19): siRNA sense strand
ccgaaguucuuaucuuguu

SEQ ID NO: 1578813 - RNA, 19 nt, Homo sapiens
  misc_RNA (1)...(19): siRNA sense strand
gcacaaagggcccucuaca

SEQ ID NO: 1578814 - RNA, 19 nt, Homo sapiens
  misc_RNA (1)...(19): siRNA sense strand
gccugagccuuguaucuuu

SEQ ID NO: 1578815 - RNA, 19 nt, Homo sapiens
  misc_RNA (1)...(19): siRNA sense strand
ccaagaaggaagugauauu

SEQ ID NO: 1578816 - RNA, 19 nt, Homo sapiens
  misc_RNA (1)...(19): siRNA sense strand
caucagacaguacacauga

SEQ ID NO: 1578817 - RNA, 19 nt, Homo sapiens
  misc_RNA (1)...(19): siRNA sense strand
ggagagcccauacaagugu

SEQ ID NO: 1578818 - RNA, 19 nt, Homo sapiens
  misc_RNA (1)...(19): siRNA sense strand
gaaaguccagaggaguuua

SEQ ID NO: 1578819 - RNA, 19 nt, Homo sapiens
  misc_RNA (1)...(19): siRNA sense strand
caagaaggcaauguagaaa

SEQ ID NO: 1578820 - RNA, 19 nt, Homo sapiens
  misc_RNA (1)...(19): siRNA sense strand
agagaggcuucacuaagaa

SEQ ID NO: 1578821 - RNA, 19 nt, Homo sapiens
  misc_RNA (1)...(19): siRNA sense strand
gaacagugucgcaccaagu

SEQ ID NO: 1578822 - RNA, 19 nt, Homo sapiens
  misc_RNA (1)...(19): siRNA sense strand
ugaaagcaguacucucauc

SEQ ID NO: 1578823 - RNA, 19 nt, Homo sapiens
  misc_RNA (1)...(19): siRNA sense strand
gcuccuggcuauucuuagu

SEQ ID NO: 1578824 - RNA, 19 nt, Homo sapiens
  misc_RNA (1)...(19): siRNA sense strand
agaaggaagugauauugag

SEQ ID NO: 1578825 - RNA, 19 nt, Homo sapiens
  misc_RNA (1)...(19): siRNA sense strand
ggccaagaaggaagugaua

SEQ ID NO: 1578826 - RNA, 19 nt, Homo sapiens
  misc_RNA (1)...(19): siRNA sense strand
caacaauagcucccacuuc

SEQ ID NO: 1578827 - RNA, 19 nt, Homo sapiens
  misc_RNA (1)...(19): siRNA sense strand
auacaagugugcagugugu

SEQ ID NO: 1578828 - RNA, 19 nt, Homo sapiens
  misc_RNA (1)...(19): siRNA sense strand
ggaaaaucuucaacaauag

SEQ ID NO: 1578829 - RNA, 19 nt, Homo sapiens
  misc_RNA (1)...(19): siRNA sense strand
acaguugaguuaccgcaaa

SEQ ID NO: 1578830 - RNA, 19 nt, Homo sapiens
  misc_RNA (1)...(19): siRNA sense strand
gcgggaagggcuuuaguga

SEQ ID NO: 1578831 - RNA, 19 nt, Homo sapiens
  misc_RNA (1)...(19): siRNA sense strand
caaagccuguacacauauc

SEQ ID NO: 1578832 - RNA, 19 nt, Homo sapiens
  misc_RNA (1)...(19): siRNA sense strand
gaggaaaugaaugcucuuu

SEQ ID NO: 1578833 - RNA, 19 nt, Homo sapiens
  misc_RNA (1)...(19): siRNA sense strand
gaaggaagagaugcguuau

SEQ ID NO: 1578834 - RNA, 19 nt, Homo sapiens
  misc_RNA (1)...(19): siRNA sense strand
ucagaggaaguagaaauaa

SEQ ID NO: 1578835 - RNA, 19 nt, Homo sapiens
  misc_RNA (1)...(19): siRNA sense strand
uagccgaaguucuuaucuu

SEQ ID NO: 1578836 - RNA, 19 nt, Homo sapiens
  misc_RNA (1)...(19): siRNA sense strand
ggagagugagccaacauca

SEQ ID NO: 1578837 - RNA, 19 nt, Homo sapiens
  misc_RNA (1)...(19): siRNA sense strand
acaaggcuuuacagagaaa

SEQ ID NO: 1578838 - RNA, 19 nt, Homo sapiens
  misc_RNA (1)...(19): siRNA sense strand
caauagcucccacuucagu

SEQ ID NO: 1578839 - RNA, 19 nt, Homo sapiens
  misc_RNA (1)...(19): siRNA sense strand
ugccagugcuguucccaaa

SEQ ID NO: 1578840 - RNA, 19 nt, Homo sapiens
  misc_RNA (1)...(19): siRNA sense strand
aagcaguacucucaucaca

SEQ ID NO: 1578841 - RNA, 19 nt, Homo sapiens
  misc_RNA (1)...(19): siRNA sense strand
agccgaaguucuuaucuug

SEQ ID NO: 1578842 - RNA, 19 nt, Homo sapiens
  misc_RNA (1)...(19): siRNA sense strand
gagagugagccaacaucaa

SEQ ID NO: 1578843 - RNA, 19 nt, Homo sapiens
  misc_RNA (1)...(19): siRNA sense strand
ccacaagccagcgcucaaa

SEQ ID NO: 1578844 - RNA, 19 nt, Homo sapiens
  misc_RNA (1)...(19): siRNA sense strand
ucagacaguacacaugaaa

SEQ ID NO: 1578845 - RNA, 19 nt, Homo sapiens
  misc_RNA (1)...(19): siRNA sense strand
gaaaagccuuacagguguu

SEQ ID NO: 1578846 - RNA, 19 nt, Homo sapiens
  misc_RNA (1)...(19): siRNA sense strand
guaucucaauguccugaau

SEQ ID NO: 1578847 - RNA, 19 nt, Homo sapiens
  misc_RNA (1)...(19): siRNA sense strand
gagcugaaucaccagaaug

SEQ ID NO: 1578848 - RNA, 19 nt, Homo sapiens
  misc_RNA (1)...(19): siRNA sense strand
gaaggcaauguagaaauuc

SEQ ID NO: 1578849 - RNA, 19 nt, Homo sapiens
  misc_RNA (1)...(19): siRNA sense strand
cagcagaacagccagaucu

SEQ ID NO: 1578850 - RNA, 19 nt, Homo sapiens
  misc_RNA (1)...(19): siRNA sense strand
ugagagaggcuucacuaag

SEQ ID NO: 1578851 - RNA, 19 nt, Homo sapiens
  misc_RNA (1)...(19): siRNA sense strand
cauugucuguggaaagaga

SEQ ID NO: 1578852 - RNA, 19 nt, Homo sapiens
  misc_RNA (1)...(19): siRNA sense strand
gaggaaguagaaauaaaca

SEQ ID NO: 1578853 - RNA, 19 nt, Homo sapiens
  misc_RNA (1)...(19): siRNA sense strand
cgaaguucuuaucuuguuc

SEQ ID NO: 1578854 - RNA, 19 nt, Homo sapiens
  misc_RNA (1)...(19): siRNA sense strand
aagaaggaagugauauuga

SEQ ID NO: 1578855 - RNA, 19 nt, Homo sapiens
  misc_RNA (1)...(19): siRNA sense strand
ucacaggaaggaagagaug

SEQ ID NO: 1578856 - RNA, 19 nt, Homo sapiens
  misc_RNA (1)...(19): siRNA sense strand
guggaaagagauucaacaa

SEQ ID NO: 1578857 - RNA, 19 nt, Homo sapiens
  misc_RNA (1)...(19): siRNA sense strand
cagaacagccagaucuaca

SEQ ID NO: 1578858 - RNA, 19 nt, Homo sapiens
  misc_RNA (1)...(19): siRNA sense strand
ggaugauucagaggaagua

SEQ ID NO: 1578859 - RNA, 19 nt, Homo sapiens
  misc_RNA (1)...(19): siRNA sense strand
aacaaggcuuuacagagaa

SEQ ID NO: 1578860 - RNA, 19 nt, Homo sapiens
  misc_RNA (1)...(19): siRNA sense strand
ccauacaagugugcagugu

SEQ ID NO: 1578861 - RNA, 19 nt, Homo sapiens
  misc_RNA (1)...(19): siRNA sense strand
gggagagcccauacaagug

SEQ ID NO: 1578862 - RNA, 19 nt, Homo sapiens
  misc_RNA (1)...(19): siRNA sense strand
ccagaguuccagccucauu

SEQ ID NO: 1578863 - RNA, 19 nt, Homo sapiens
  misc_RNA (1)...(19): siRNA sense strand
ugcauugucuguggaaaga

SEQ ID NO: 1578864 - RNA, 19 nt, Homo sapiens
  misc_RNA (1)...(19): siRNA sense strand
caacaguucccaguucagu

SEQ ID NO: 1578865 - RNA, 19 nt, Homo sapiens
  misc_RNA (1)...(19): siRNA sense strand
caucaagaaggcaauguag

SEQ ID NO: 1578866 - RNA, 19 nt, Homo sapiens
  misc_RNA (1)...(19): siRNA sense strand
gcccucacccgucaucaga

SEQ ID NO: 1578867 - RNA, 19 nt, Homo sapiens
  misc_RNA (1)...(19): siRNA sense strand
caggaagucaggaaacuag

SEQ ID NO: 1578868 - RNA, 19 nt, Homo sapiens
  misc_RNA (1)...(19): siRNA sense strand
aacaacaguucccaguuca

SEQ ID NO: 1578869 - RNA, 19 nt, Homo sapiens
  misc_RNA (1)...(19): siRNA sense strand
caagccagcgcucaaacug

SEQ ID NO: 1578870 - RNA, 19 nt, Homo sapiens
  misc_RNA (1)...(19): siRNA sense strand
agagugagccaacaucaag

SEQ ID NO: 1578871 - RNA, 19 nt, Homo sapiens
  misc_RNA (1)...(19): siRNA sense strand
ugauucagaggaaguagaa

SEQ ID NO: 1578872 - RNA, 19 nt, Homo sapiens
  misc_RNA (1)...(19): siRNA sense strand
uaaaaugggaugauucaga

SEQ ID NO: 1578873 - RNA, 19 nt, Homo sapiens
  misc_RNA (1)...(19): siRNA sense strand
ccaggaagucaggaaacua

SEQ ID NO: 1578874 - RNA, 19 nt, Homo sapiens
  misc_RNA (1)...(19): siRNA sense strand
ucaacaacaguucccaguu

SEQ ID NO: 1578875 - RNA, 19 nt, Homo sapiens
  misc_RNA (1)...(19): siRNA sense strand
gaaugugggaaaaccuuua

SEQ ID NO: 1578876 - RNA, 19 nt, Homo sapiens
  misc_RNA (1)...(19): siRNA sense strand
gcagaacagccagaucuac

SEQ ID NO: 1578877 - RNA, 19 nt, Homo sapiens
  misc_RNA (1)...(19): siRNA sense strand
agagcugaaucaccagaau

SEQ ID NO: 1578878 - RNA, 19 nt, Homo sapiens
  misc_RNA (1)...(19): siRNA sense strand
aaagccuacaguugaguua

SEQ ID NO: 1578879 - RNA, 19 nt, Homo sapiens
  misc_RNA (1)...(19): siRNA sense strand
uaucuuguucggcaucaaa

SEQ ID NO: 1578880 - RNA, 19 nt, Homo sapiens
  misc_RNA (1)...(19): siRNA sense strand
acaaagccuguacacauau

SEQ ID NO: 1578881 - RNA, 19 nt, Homo sapiens
  misc_RNA (1)...(19): siRNA sense strand
agaugagucaccagaguuu

SEQ ID NO: 1578882 - RNA, 19 nt, Homo sapiens
  misc_RNA (1)...(19): siRNA sense strand
caacaucaagaaggcaaug

SEQ ID NO: 1578883 - RNA, 19 nt, Homo sapiens
  misc_RNA (1)...(19): siRNA sense strand
agaaaguccagaggaguuu

SEQ ID NO: 1578884 - RNA, 19 nt, Homo sapiens
  misc_RNA (1)...(19): siRNA sense strand
gccaggaagucaggaaacu

SEQ ID NO: 1578885 - RNA, 19 nt, Homo sapiens
  misc_RNA (1)...(19): siRNA sense strand
uucagaggaaguagaaaua

SEQ ID NO: 1578886 - RNA, 19 nt, Homo sapiens
  misc_RNA (1)...(19): siRNA sense strand
ccucacccgucaucagaca

SEQ ID NO: 1578887 - RNA, 19 nt, Homo sapiens
  misc_RNA (1)...(19): siRNA sense strand
ccaugguucuuauuucaua

SEQ ID NO: 1578888 - RNA, 19 nt, Homo sapiens
  misc_RNA (1)...(19): siRNA sense strand
acacauacacacacgauua

SEQ ID NO: 1578889 - RNA, 19 nt, Homo sapiens
  misc_RNA (1)...(19): siRNA sense strand
ccauagcccuuauuauuuc

SEQ ID NO: 1578890 - RNA, 19 nt, Homo sapiens
  misc_RNA (1)...(19): siRNA sense strand
ucccauagcccuuauuauu

SEQ ID NO: 1578891 - RNA, 19 nt, Homo sapiens
  misc_RNA (1)...(19): siRNA sense strand
gcacacacacacgauauug

SEQ ID NO: 1578892 - RNA, 19 nt, Homo sapiens
  misc_RNA (1)...(19): siRNA sense strand
acauauacacccacacaua

SEQ ID NO: 1578893 - RNA, 19 nt, Homo sapiens
  misc_RNA (1)...(19): siRNA sense strand
caccguauauugugugugu

SEQ ID NO: 1578894 - RNA, 19 nt, Homo sapiens
  misc_RNA (1)...(19): siRNA sense strand
cccauagcccuuauuauuu

SEQ ID NO: 1578895 - RNA, 19 nt, Homo sapiens
  misc_RNA (1)...(19): siRNA sense strand
guacauauacacccacaca

SEQ ID NO: 1578896 - RNA, 19 nt, Homo sapiens
  misc_RNA (1)...(19): siRNA sense strand
guccaugguucuuauuuca

SEQ ID NO: 1578897 - RNA, 19 nt, Homo sapiens
  misc_RNA (1)...(19): siRNA sense strand
guguguguguguauguaua

SEQ ID NO: 1578898 - RNA, 19 nt, Homo sapiens
  misc_RNA (1)...(19): siRNA sense strand
cauacacacacgauuauau

SEQ ID NO: 1578899 - RNA, 19 nt, Homo sapiens
  misc_RNA (1)...(19): siRNA sense strand
uaacucccauagcccuuau

SEQ ID NO: 1578900 - RNA, 19 nt, Homo sapiens
  misc_RNA (1)...(19): siRNA sense strand
cauauacacccacacauac

SEQ ID NO: 1578901 - RNA, 19 nt, Homo sapiens
  misc_RNA (1)...(19): siRNA sense strand
acacacacgauuauauugu

SEQ ID NO: 1578902 - RNA, 19 nt, Homo sapiens
  misc_RNA (1)...(19): siRNA sense strand
cacauacacacacgauuau

SEQ ID NO: 1578903 - RNA, 19 nt, Homo sapiens
  misc_RNA (1)...(19): siRNA sense strand
ccacacauacacacacgau

SEQ ID NO: 1578904 - RNA, 19 nt, Homo sapiens
  misc_RNA (1)...(19): siRNA sense strand
guguguguguauguauaua

SEQ ID NO: 1578905 - RNA, 19 nt, Homo sapiens
  misc_RNA (1)...(19): siRNA sense strand
cacacacacacacauguuu

SEQ ID NO: 1578906 - RNA, 19 nt, Homo sapiens
  misc_RNA (1)...(19): siRNA sense strand
acacacacacacacauguu

SEQ ID NO: 1578907 - RNA, 19 nt, Homo sapiens
  misc_RNA (1)...(19): siRNA sense strand
uguguguguguguauauua

SEQ ID NO: 1578908 - RNA, 19 nt, Homo sapiens
  misc_RNA (1)...(19): siRNA sense strand
guguguguguguguaugua

SEQ ID NO: 1578909 - RNA, 19 nt, Homo sapiens
  misc_RNA (1)...(19): siRNA sense strand
uguccaugguucuuauuuc

SEQ ID NO: 1578910 - RNA, 19 nt, Homo sapiens
  misc_RNA (1)...(19): siRNA sense strand
acacacacacacacacaug

SEQ ID NO: 1578911 - RNA, 19 nt, Homo sapiens
  misc_RNA (1)...(19): siRNA sense strand
guguguguguguguauauu

SEQ ID NO: 1578912 - RNA, 19 nt, Homo sapiens
  misc_RNA (1)...(19): siRNA sense strand
acucccauagcccuuauua

SEQ ID NO: 1578913 - RNA, 19 nt, Homo sapiens
  misc_RNA (1)...(19): siRNA sense strand
uagcccuuauuauuuccua

SEQ ID NO: 1578914 - RNA, 19 nt, Homo sapiens
  misc_RNA (1)...(19): siRNA sense strand
gagcaaacccuggauaauu

SEQ ID NO: 1578915 - RNA, 19 nt, Homo sapiens
  misc_RNA (1)...(19): siRNA sense strand
ggaagacaguguacucuca

SEQ ID NO: 1578916 - RNA, 19 nt, Homo sapiens
  misc_RNA (1)...(19): siRNA sense strand
uagaggaggucaagaaaga

SEQ ID NO: 1578917 - RNA, 19 nt, Homo sapiens
  misc_RNA (1)...(19): siRNA sense strand
agcaaacccuggauaauuu

SEQ ID NO: 1578918 - RNA, 19 nt, Homo sapiens
  misc_RNA (1)...(19): siRNA sense strand
uggcagcgcucuucaacaa

SEQ ID NO: 1578919 - RNA, 19 nt, Homo sapiens
  misc_RNA (1)...(19): siRNA sense strand
cagcauguauucuggaaau

SEQ ID NO: 1578920 - RNA, 19 nt, Homo sapiens
  misc_RNA (1)...(19): siRNA sense strand
gaagauugauguggacaag

SEQ ID NO: 1578921 - RNA, 19 nt, Homo sapiens
  misc_RNA (1)...(19): siRNA sense strand
ggagaaguuucagcucuau

SEQ ID NO: 1578922 - RNA, 19 nt, Homo sapiens
  misc_RNA (1)...(19): siRNA sense strand
ggccuuagcugugcaaaca

SEQ ID NO: 1578923 - RNA, 19 nt, Homo sapiens
  misc_RNA (1)...(19): siRNA sense strand
aaagugagguuccgaguac

SEQ ID NO: 1578924 - RNA, 19 nt, Homo sapiens
  misc_RNA (1)...(19): siRNA sense strand
caaaguggcagguucugaa

SEQ ID NO: 1578925 - RNA, 19 nt, Homo sapiens
  misc_RNA (1)...(19): siRNA sense strand
aguggcagguucugaauaa

SEQ ID NO: 1578926 - RNA, 19 nt, Homo sapiens
  misc_RNA (1)...(19): siRNA sense strand
gugcaaacacucaaguaaa

SEQ ID NO: 1578927 - RNA, 19 nt, Homo sapiens
  misc_RNA (1)...(19): siRNA sense strand
cagagaccuuugacgauga

SEQ ID NO: 1578928 - RNA, 19 nt, Homo sapiens
  misc_RNA (1)...(19): siRNA sense strand
ugaauaaggcaaagaguca

SEQ ID NO: 1578929 - RNA, 19 nt, Homo sapiens
  misc_RNA (1)...(19): siRNA sense strand
auaauuugcugaagcugaa

SEQ ID NO: 1578930 - RNA, 19 nt, Homo sapiens
  misc_RNA (1)...(19): siRNA sense strand
cuugguaucucaacuuuua

SEQ ID NO: 1578931 - RNA, 19 nt, Homo sapiens
  misc_RNA (1)...(19): siRNA sense strand
ugcaaacacucaaguaaag

SEQ ID NO: 1578932 - RNA, 19 nt, Homo sapiens
  misc_RNA (1)...(19): siRNA sense strand
gcuuagaggaggucaagaa

SEQ ID NO: 1578933 - RNA, 19 nt, Homo sapiens
  misc_RNA (1)...(19): siRNA sense strand
ugacgaugaagauuuguaa

SEQ ID NO: 1578934 - RNA, 19 nt, Homo sapiens
  misc_RNA (1)...(19): siRNA sense strand
guacaucuagcuccaguuc

SEQ ID NO: 1578935 - RNA, 19 nt, Homo sapiens
  misc_RNA (1)...(19): siRNA sense strand
gcauguauucuggaaauga

SEQ ID NO: 1578936 - RNA, 19 nt, Homo sapiens
  misc_RNA (1)...(19): siRNA sense strand
ggaggucaagaaagaauau

SEQ ID NO: 1578937 - RNA, 19 nt, Homo sapiens
  misc_RNA (1)...(19): siRNA sense strand
aaagagucauauuccagaa

SEQ ID NO: 1578938 - RNA, 19 nt, Homo sapiens
  misc_RNA (1)...(19): siRNA sense strand
agauugauguggacaagau

SEQ ID NO: 1578939 - RNA, 19 nt, Homo sapiens
  misc_RNA (1)...(19): siRNA sense strand
gaaguuucagcucuauaug

SEQ ID NO: 1578940 - RNA, 19 nt, Homo sapiens
  misc_RNA (1)...(19): siRNA sense strand
ggagcaaacccuggauaau

SEQ ID NO: 1578941 - RNA, 19 nt, Homo sapiens
  misc_RNA (1)...(19): siRNA sense strand
gcagugcacagagaccuuu

SEQ ID NO: 1578942 - RNA, 19 nt, Homo sapiens
  misc_RNA (1)...(19): siRNA sense strand
aggagaaguuucagcucua

SEQ ID NO: 1578943 - RNA, 19 nt, Homo sapiens
  misc_RNA (1)...(19): siRNA sense strand
gagaaguuucagcucuaua

SEQ ID NO: 1578944 - RNA, 19 nt, Homo sapiens
  misc_RNA (1)...(19): siRNA sense strand
gaagaugggcaugcaagca

SEQ ID NO: 1578945 - RNA, 19 nt, Homo sapiens
  misc_RNA (1)...(19): siRNA sense strand
gaucucauagccucaaagu

SEQ ID NO: 1578946 - RNA, 19 nt, Homo sapiens
  misc_RNA (1)...(19): siRNA sense strand
aagcauccuuucccguuga

SEQ ID NO: 1578947 - RNA, 19 nt, Homo sapiens
  misc_RNA (1)...(19): siRNA sense strand
gaggaggucaagaaagaau

SEQ ID NO: 1578948 - RNA, 19 nt, Homo sapiens
  misc_RNA (1)...(19): siRNA sense strand
ggcaaagagucauauucca

SEQ ID NO: 1578949 - RNA, 19 nt, Homo sapiens
  misc_RNA (1)...(19): siRNA sense strand
agaaguuucagcucuauau

SEQ ID NO: 1578950 - RNA, 19 nt, Homo sapiens
  misc_RNA (1)...(19): siRNA sense strand
acuggcagcgggaucauua

SEQ ID NO: 1578951 - RNA, 19 nt, Homo sapiens
  misc_RNA (1)...(19): siRNA sense strand
auaugcagaucaucaacuu

SEQ ID NO: 1578952 - RNA, 19 nt, Homo sapiens
  misc_RNA (1)...(19): siRNA sense strand
cuuugacgaugaagauuug

SEQ ID NO: 1578953 - RNA, 19 nt, Homo sapiens
  misc_RNA (1)...(19): siRNA sense strand
aauaaggcaaagagucaua

SEQ ID NO: 1578954 - RNA, 19 nt, Homo sapiens
  misc_RNA (1)...(19): siRNA sense strand
ucaacaaccucaggaagac

SEQ ID NO: 1578955 - RNA, 19 nt, Homo sapiens
  misc_RNA (1)...(19): siRNA sense strand
ggaagauugauguggacaa

SEQ ID NO: 1578956 - RNA, 19 nt, Homo sapiens
  misc_RNA (1)...(19): siRNA sense strand
gaccuuugacgaugaagau

SEQ ID NO: 1578957 - RNA, 19 nt, Homo sapiens
  misc_RNA (1)...(19): siRNA sense strand
gagguuccgaguacaucua

SEQ ID NO: 1578958 - RNA, 19 nt, Homo sapiens
  misc_RNA (1)...(19): siRNA sense strand
agagaccuuugacgaugaa

SEQ ID NO: 1578959 - RNA, 19 nt, Homo sapiens
  misc_RNA (1)...(19): siRNA sense strand
uaaggcaaagagucauauu

SEQ ID NO: 1578960 - RNA, 19 nt, Homo sapiens
  misc_RNA (1)...(19): siRNA sense strand
ugugcaaacacucaaguaa

SEQ ID NO: 1578961 - RNA, 19 nt, Homo sapiens
  misc_RNA (1)...(19): siRNA sense strand
cccuugguaucucaacuuu

SEQ ID NO: 1578962 - RNA, 19 nt, Homo sapiens
  misc_RNA (1)...(19): siRNA sense strand
uggagcaaacccuggauaa

SEQ ID NO: 1578963 - RNA, 19 nt, Homo sapiens
  misc_RNA (1)...(19): siRNA sense strand
caaacacucaaguaaagca

SEQ ID NO: 1578964 - RNA, 19 nt, Homo sapiens
  misc_RNA (1)...(19): siRNA sense strand
ugaggaugccuuugaugug

SEQ ID NO: 1578965 - RNA, 19 nt, Homo sapiens
  misc_RNA (1)...(19): siRNA sense strand
ccuuugauguggcaagcuu

SEQ ID NO: 1578966 - RNA, 19 nt, Homo sapiens
  misc_RNA (1)...(19): siRNA sense strand
agagucauauuccagaacu

SEQ ID NO: 1578967 - RNA, 19 nt, Homo sapiens
  misc_RNA (1)...(19): siRNA sense strand
uagcuccaguucagugcuu

SEQ ID NO: 1578968 - RNA, 19 nt, Homo sapiens
  misc_RNA (1)...(19): siRNA sense strand
uggcaagcuuccuggacaa

SEQ ID NO: 1578969 - RNA, 19 nt, Homo sapiens
  misc_RNA (1)...(19): siRNA sense strand
ccuuugacgaugaagauuu

SEQ ID NO: 1578970 - RNA, 19 nt, Homo sapiens
  misc_RNA (1)...(19): siRNA sense strand
aagagaugaucauguugca

SEQ ID NO: 1578971 - RNA, 19 nt, Homo sapiens
  misc_RNA (1)...(19): siRNA sense strand
acaucuagcuccaguucag

SEQ ID NO: 1578972 - RNA, 19 nt, Homo sapiens
  misc_RNA (1)...(19): siRNA sense strand
gacaguguacucucagucu

SEQ ID NO: 1578973 - RNA, 19 nt, Homo sapiens
  misc_RNA (1)...(19): siRNA sense strand
ugagaugccaguccucugu

SEQ ID NO: 1578974 - RNA, 19 nt, Homo sapiens
  misc_RNA (1)...(19): siRNA sense strand
cugcaggcccgucguguau

SEQ ID NO: 1578975 - RNA, 19 nt, Homo sapiens
  misc_RNA (1)...(19): siRNA sense strand
gaaagugucagucaccuua

SEQ ID NO: 1578976 - RNA, 19 nt, Homo sapiens
  misc_RNA (1)...(19): siRNA sense strand
ccaaagacccugugaauca

SEQ ID NO: 1578977 - RNA, 19 nt, Homo sapiens
  misc_RNA (1)...(19): siRNA sense strand
gaugaucccuccuauguca

SEQ ID NO: 1578978 - RNA, 19 nt, Homo sapiens
  misc_RNA (1)...(19): siRNA sense strand
ggaguaaccugaaauuugc

SEQ ID NO: 1578979 - RNA, 19 nt, Homo sapiens
  misc_RNA (1)...(19): siRNA sense strand
gacaaucacuugcccauca

SEQ ID NO: 1578980 - RNA, 19 nt, Homo sapiens
  misc_RNA (1)...(19): siRNA sense strand
gaccacaccuggccaguau

SEQ ID NO: 1578981 - RNA, 19 nt, Homo sapiens
  misc_RNA (1)...(19): siRNA sense strand
ucagagagccugccacauu

SEQ ID NO: 1578982 - RNA, 19 nt, Homo sapiens
  misc_RNA (1)...(19): siRNA sense strand
gaguugcgcuucaaacaau

SEQ ID NO: 1578983 - RNA, 19 nt, Homo sapiens
  misc_RNA (1)...(19): siRNA sense strand
cacgggagcuuugucaaua

SEQ ID NO: 1578984 - RNA, 19 nt, Homo sapiens
  misc_RNA (1)...(19): siRNA sense strand
gaccaucaguacuauaaug

SEQ ID NO: 1578985 - RNA, 19 nt, Homo sapiens
  misc_RNA (1)...(19): siRNA sense strand
caugcaaucuaucucauuu

SEQ ID NO: 1578986 - RNA, 19 nt, Homo sapiens
  misc_RNA (1)...(19): siRNA sense strand
ucagucaccuuaucagcua

SEQ ID NO: 1578987 - RNA, 19 nt, Homo sapiens
  misc_RNA (1)...(19): siRNA sense strand
gacuaaggaucaccgcuuu

SEQ ID NO: 1578988 - RNA, 19 nt, Homo sapiens
  misc_RNA (1)...(19): siRNA sense strand
caggauggcuggcuuugau

SEQ ID NO: 1578989 - RNA, 19 nt, Homo sapiens
  misc_RNA (1)...(19): siRNA sense strand
cagagagccugccacauuc

SEQ ID NO: 1578990 - RNA, 19 nt, Homo sapiens
  misc_RNA (1)...(19): siRNA sense strand
ccacauggacaaucacuug

SEQ ID NO: 1578991 - RNA, 19 nt, Homo sapiens
  misc_RNA (1)...(19): siRNA sense strand
ggaggaguaaccugaaauu

SEQ ID NO: 1578992 - RNA, 19 nt, Homo sapiens
  misc_RNA (1)...(19): siRNA sense strand
caaucuaucucauuugcau

SEQ ID NO: 1578993 - RNA, 19 nt, Homo sapiens
  misc_RNA (1)...(19): siRNA sense strand
ccgaguaugucgccuaugu

SEQ ID NO: 1578994 - RNA, 19 nt, Homo sapiens
  misc_RNA (1)...(19): siRNA sense strand
gcuaccacauggacaauca

SEQ ID NO: 1578995 - RNA, 19 nt, Homo sapiens
  misc_RNA (1)...(19): siRNA sense strand
ccagaaguccgcaaacaga

SEQ ID NO: 1578996 - RNA, 19 nt, Homo sapiens
  misc_RNA (1)...(19): siRNA sense strand
gugggcagccuaagcauuu

SEQ ID NO: 1578997 - RNA, 19 nt, Homo sapiens
  misc_RNA (1)...(19): siRNA sense strand
ccaucagucugguguguga

SEQ ID NO: 1578998 - RNA, 19 nt, Homo sapiens
  misc_RNA (1)...(19): siRNA sense strand
ccugaaauuugcuggaaug

SEQ ID NO: 1578999 - RNA, 19 nt, Homo sapiens
  misc_RNA (1)...(19): siRNA sense strand
ggaccuguuugacaugaag

SEQ ID NO: 1579000 - RNA, 19 nt, Homo sapiens
  misc_RNA (1)...(19): siRNA sense strand
gaguaugucgccuauguug

SEQ ID NO: 1579001 - RNA, 19 nt, Homo sapiens
  misc_RNA (1)...(19): siRNA sense strand
ggaaugccaaucacucuca

SEQ ID NO: 1579002 - RNA, 19 nt, Homo sapiens
  misc_RNA (1)...(19): siRNA sense strand
gaggaguaaccugaaauuu

SEQ ID NO: 1579003 - RNA, 19 nt, Homo sapiens
  misc_RNA (1)...(19): siRNA sense strand
ccacuugggagcuacauug

SEQ ID NO: 1579004 - RNA, 19 nt, Homo sapiens
  misc_RNA (1)...(19): siRNA sense strand
ucaguacuauaaugacuuc

SEQ ID NO: 1579005 - RNA, 19 nt, Homo sapiens
  misc_RNA (1)...(19): siRNA sense strand
aggaguaaccugaaauuug

SEQ ID NO: 1579006 - RNA, 19 nt, Homo sapiens
  misc_RNA (1)...(19): siRNA sense strand
gggaugaggaggaggaaga

SEQ ID NO: 1579007 - RNA, 19 nt, Homo sapiens
  misc_RNA (1)...(19): siRNA sense strand
ccacaugcaaucuaucuca

SEQ ID NO: 1579008 - RNA, 19 nt, Homo sapiens
  misc_RNA (1)...(19): siRNA sense strand
ucgccuauguugccaaaga

SEQ ID NO: 1579009 - RNA, 19 nt, Homo sapiens
  misc_RNA (1)...(19): siRNA sense strand
caaagacccugugaaucag

SEQ ID NO: 1579010 - RNA, 19 nt, Homo sapiens
  misc_RNA (1)...(19): siRNA sense strand
aaggaucaccgcuuugaaa

SEQ ID NO: 1579011 - RNA, 19 nt, Homo sapiens
  misc_RNA (1)...(19): siRNA sense strand
caucaguacuauaaugacu

SEQ ID NO: 1579012 - RNA, 19 nt, Homo sapiens
  misc_RNA (1)...(19): siRNA sense strand
cuacuugguucgguacaug

SEQ ID NO: 1579013 - RNA, 19 nt, Homo sapiens
  misc_RNA (1)...(19): siRNA sense strand
acgggagcuuugucaauaa

SEQ ID NO: 1579014 - RNA, 19 nt, Homo sapiens
  misc_RNA (1)...(19): siRNA sense strand
cuaaggaucaccgcuuuga

SEQ ID NO: 1579015 - RNA, 19 nt, Homo sapiens
  misc_RNA (1)...(19): siRNA sense strand
ggaagagccaccugaccau

SEQ ID NO: 1579016 - RNA, 19 nt, Homo sapiens
  misc_RNA (1)...(19): siRNA sense strand
ccacgggagcuuugucaau

SEQ ID NO: 1579017 - RNA, 19 nt, Homo sapiens
  misc_RNA (1)...(19): siRNA sense strand
cgaguugcgcuucaaacaa

SEQ ID NO: 1579018 - RNA, 19 nt, Homo sapiens
  misc_RNA (1)...(19): siRNA sense strand
uugaugaucccuccuaugu

SEQ ID NO: 1579019 - RNA, 19 nt, Homo sapiens
  misc_RNA (1)...(19): siRNA sense strand
ggccaucagucuggugugu

SEQ ID NO: 1579020 - RNA, 19 nt, Homo sapiens
  misc_RNA (1)...(19): siRNA sense strand
ccagggaggccaucagucu

SEQ ID NO: 1579021 - RNA, 19 nt, Homo sapiens
  misc_RNA (1)...(19): siRNA sense strand
ucaaacaauaccucaggaa

SEQ ID NO: 1579022 - RNA, 19 nt, Homo sapiens
  misc_RNA (1)...(19): siRNA sense strand
aaccugaaauuugcuggaa

SEQ ID NO: 1579023 - RNA, 19 nt, Homo sapiens
  misc_RNA (1)...(19): siRNA sense strand
ggaggagaaagcccuguag

SEQ ID NO: 1579024 - RNA, 19 nt, Homo sapiens
  misc_RNA (1)...(19): siRNA sense strand
cgaccacaccuggccagua

SEQ ID NO: 1579025 - RNA, 19 nt, Homo sapiens
  misc_RNA (1)...(19): siRNA sense strand
ugccaaagacccugugaau

SEQ ID NO: 1579026 - RNA, 19 nt, Homo sapiens
  misc_RNA (1)...(19): siRNA sense strand
ugacaggauggcuggcuuu

SEQ ID NO: 1579027 - RNA, 19 nt, Homo sapiens
  misc_RNA (1)...(19): siRNA sense strand
ccaauccugcuaucaaugg

SEQ ID NO: 1579028 - RNA, 19 nt, Homo sapiens
  misc_RNA (1)...(19): siRNA sense strand
gagggugugguucggacua

SEQ ID NO: 1579029 - RNA, 19 nt, Homo sapiens
  misc_RNA (1)...(19): siRNA sense strand
ccacaccuggccaguaugu

SEQ ID NO: 1579030 - RNA, 19 nt, Homo sapiens
  misc_RNA (1)...(19): siRNA sense strand
ugucgccuauguugccaaa

SEQ ID NO: 1579031 - RNA, 19 nt, Homo sapiens
  misc_RNA (1)...(19): siRNA sense strand
ccucaggaacccacccaaa

SEQ ID NO: 1579032 - RNA, 19 nt, Homo sapiens
  misc_RNA (1)...(19): siRNA sense strand
gggaccuguuugacaugaa

SEQ ID NO: 1579033 - RNA, 19 nt, Homo sapiens
  misc_RNA (1)...(19): siRNA sense strand
gggaggaguaaccugaaau

SEQ ID NO: 1579034 - RNA, 19 nt, Homo sapiens
  misc_RNA (1)...(19): siRNA sense strand
uaaggaucaccgcuuugaa

SEQ ID NO: 1579035 - RNA, 19 nt, Homo sapiens
  misc_RNA (1)...(19): siRNA sense strand
gaaagugucagucaccuua

SEQ ID NO: 1579036 - RNA, 19 nt, Homo sapiens
  misc_RNA (1)...(19): siRNA sense strand
ccaaagacccugugaauca

SEQ ID NO: 1579037 - RNA, 19 nt, Homo sapiens
  misc_RNA (1)...(19): siRNA sense strand
gaugaucccuccuauguca

SEQ ID NO: 1579038 - RNA, 19 nt, Homo sapiens
  misc_RNA (1)...(19): siRNA sense strand
ggaguaaccugaaauuugc

SEQ ID NO: 1579039 - RNA, 19 nt, Homo sapiens
  misc_RNA (1)...(19): siRNA sense strand
gacaaucacuugcccauca

SEQ ID NO: 1579040 - RNA, 19 nt, Homo sapiens
  misc_RNA (1)...(19): siRNA sense strand
gaccacaccuggccaguau

SEQ ID NO: 1579041 - RNA, 19 nt, Homo sapiens
  misc_RNA (1)...(19): siRNA sense strand
ucagagagccugccacauu

SEQ ID NO: 1579042 - RNA, 19 nt, Homo sapiens
  misc_RNA (1)...(19): siRNA sense strand
gaguugcgcuucaaacaau

SEQ ID NO: 1579043 - RNA, 19 nt, Homo sapiens
  misc_RNA (1)...(19): siRNA sense strand
caugcaaucuaucucauuu

SEQ ID NO: 1579044 - RNA, 19 nt, Homo sapiens
  misc_RNA (1)...(19): siRNA sense strand
cacgggagcuuugucaaua

SEQ ID NO: 1579045 - RNA, 19 nt, Homo sapiens
  misc_RNA (1)...(19): siRNA sense strand
gaccaucaguacuauaaug

SEQ ID NO: 1579046 - RNA, 19 nt, Homo sapiens
  misc_RNA (1)...(19): siRNA sense strand
ucagucaccuuaucagcua

SEQ ID NO: 1579047 - RNA, 19 nt, Homo sapiens
  misc_RNA (1)...(19): siRNA sense strand
gacuaaggaucaccgcuuu

SEQ ID NO: 1579048 - RNA, 19 nt, Homo sapiens
  misc_RNA (1)...(19): siRNA sense strand
caggauggcuggcuuugau

SEQ ID NO: 1579049 - RNA, 19 nt, Homo sapiens
  misc_RNA (1)...(19): siRNA sense strand
cagagagccugccacauuc

SEQ ID NO: 1579050 - RNA, 19 nt, Homo sapiens
  misc_RNA (1)...(19): siRNA sense strand
ccacauggacaaucacuug

SEQ ID NO: 1579051 - RNA, 19 nt, Homo sapiens
  misc_RNA (1)...(19): siRNA sense strand
ggaggaguaaccugaaauu

SEQ ID NO: 1579052 - RNA, 19 nt, Homo sapiens
  misc_RNA (1)...(19): siRNA sense strand
caaucuaucucauuugcau

SEQ ID NO: 1579053 - RNA, 19 nt, Homo sapiens
  misc_RNA (1)...(19): siRNA sense strand
ccgaguaugucgccuaugu

SEQ ID NO: 1579054 - RNA, 19 nt, Homo sapiens
  misc_RNA (1)...(19): siRNA sense strand
gcuaccacauggacaauca

SEQ ID NO: 1579055 - RNA, 19 nt, Homo sapiens
  misc_RNA (1)...(19): siRNA sense strand
ccagaaguccgcaaacaga

SEQ ID NO: 1579056 - RNA, 19 nt, Homo sapiens
  misc_RNA (1)...(19): siRNA sense strand
gugggcagccuaagcauuu

SEQ ID NO: 1579057 - RNA, 19 nt, Homo sapiens
  misc_RNA (1)...(19): siRNA sense strand
ccaucagucugguguguga

SEQ ID NO: 1579058 - RNA, 19 nt, Homo sapiens
  misc_RNA (1)...(19): siRNA sense strand
ccugaaauuugcuggaaug

SEQ ID NO: 1579059 - RNA, 19 nt, Homo sapiens
  misc_RNA (1)...(19): siRNA sense strand
ggaccuguuugacaugaag

SEQ ID NO: 1579060 - RNA, 19 nt, Homo sapiens
  misc_RNA (1)...(19): siRNA sense strand
gaguaugucgccuauguug

SEQ ID NO: 1579061 - RNA, 19 nt, Homo sapiens
  misc_RNA (1)...(19): siRNA sense strand
ggaaugccaaucacucuca

SEQ ID NO: 1579062 - RNA, 19 nt, Homo sapiens
  misc_RNA (1)...(19): siRNA sense strand
gaggaguaaccugaaauuu

SEQ ID NO: 1579063 - RNA, 19 nt, Homo sapiens
  misc_RNA (1)...(19): siRNA sense strand
ccacuugggagcuacauug

SEQ ID NO: 1579064 - RNA, 19 nt, Homo sapiens
  misc_RNA (1)...(19): siRNA sense strand
ucaguacuauaaugacuuc

SEQ ID NO: 1579065 - RNA, 19 nt, Homo sapiens
  misc_RNA (1)...(19): siRNA sense strand
aggaguaaccugaaauuug

SEQ ID NO: 1579066 - RNA, 19 nt, Homo sapiens
  misc_RNA (1)...(19): siRNA sense strand
gggaugaggaggaggaaga

SEQ ID NO: 1579067 - RNA, 19 nt, Homo sapiens
  misc_RNA (1)...(19): siRNA sense strand
ccacaugcaaucuaucuca

SEQ ID NO: 1579068 - RNA, 19 nt, Homo sapiens
  misc_RNA (1)...(19): siRNA sense strand
ucgccuauguugccaaaga

SEQ ID NO: 1579069 - RNA, 19 nt, Homo sapiens
  misc_RNA (1)...(19): siRNA sense strand
caaagacccugugaaucag

SEQ ID NO: 1579070 - RNA, 19 nt, Homo sapiens
  misc_RNA (1)...(19): siRNA sense strand
aaggaucaccgcuuugaaa

SEQ ID NO: 1579071 - RNA, 19 nt, Homo sapiens
  misc_RNA (1)...(19): siRNA sense strand
caucaguacuauaaugacu

SEQ ID NO: 1579072 - RNA, 19 nt, Homo sapiens
  misc_RNA (1)...(19): siRNA sense strand
ggaagagccaccugaccau

SEQ ID NO: 1579073 - RNA, 19 nt, Homo sapiens
  misc_RNA (1)...(19): siRNA sense strand
cuaaggaucaccgcuuuga

SEQ ID NO: 1579074 - RNA, 19 nt, Homo sapiens
  misc_RNA (1)...(19): siRNA sense strand
acgggagcuuugucaauaa

SEQ ID NO: 1579075 - RNA, 19 nt, Homo sapiens
  misc_RNA (1)...(19): siRNA sense strand
cuacuugguucgguacaug

SEQ ID NO: 1579076 - RNA, 19 nt, Homo sapiens
  misc_RNA (1)...(19): siRNA sense strand
ccacgggagcuuugucaau

SEQ ID NO: 1579077 - RNA, 19 nt, Homo sapiens
  misc_RNA (1)...(19): siRNA sense strand
cgaguugcgcuucaaacaa

SEQ ID NO: 1579078 - RNA, 19 nt, Homo sapiens
  misc_RNA (1)...(19): siRNA sense strand
ggccaucagucuggugugu

SEQ ID NO: 1579079 - RNA, 19 nt, Homo sapiens
  misc_RNA (1)...(19): siRNA sense strand
uugaugaucccuccuaugu

SEQ ID NO: 1579080 - RNA, 19 nt, Homo sapiens
  misc_RNA (1)...(19): siRNA sense strand
ucaaacaauaccucaggaa

SEQ ID NO: 1579081 - RNA, 19 nt, Homo sapiens
  misc_RNA (1)...(19): siRNA sense strand
ccagggaggccaucagucu

SEQ ID NO: 1579082 - RNA, 19 nt, Homo sapiens
  misc_RNA (1)...(19): siRNA sense strand
aaccugaaauuugcuggaa

SEQ ID NO: 1579083 - RNA, 19 nt, Homo sapiens
  misc_RNA (1)...(19): siRNA sense strand
ggacaugaacaagcugagu

SEQ ID NO: 1579084 - RNA, 19 nt, Homo sapiens
  misc_RNA (1)...(19): siRNA sense strand
cgaccacaccuggccagua

SEQ ID NO: 1579085 - RNA, 19 nt, Homo sapiens
  misc_RNA (1)...(19): siRNA sense strand
ggaggagaaagcccuguag

SEQ ID NO: 1579086 - RNA, 19 nt, Homo sapiens
  misc_RNA (1)...(19): siRNA sense strand
ugccaaagacccugugaau

SEQ ID NO: 1579087 - RNA, 19 nt, Homo sapiens
  misc_RNA (1)...(19): siRNA sense strand
ugacaggauggcuggcuuu

SEQ ID NO: 1579088 - RNA, 19 nt, Homo sapiens
  misc_RNA (1)...(19): siRNA sense strand
ccaauccugcuaucaaugg

SEQ ID NO: 1579089 - RNA, 19 nt, Homo sapiens
  misc_RNA (1)...(19): siRNA sense strand
gagggugugguucggacua

SEQ ID NO: 1579090 - RNA, 19 nt, Homo sapiens
  misc_RNA (1)...(19): siRNA sense strand
ccacaccuggccaguaugu

SEQ ID NO: 1579091 - RNA, 19 nt, Homo sapiens
  misc_RNA (1)...(19): siRNA sense strand
ugucgccuauguugccaaa

SEQ ID NO: 1579092 - RNA, 19 nt, Homo sapiens
  misc_RNA (1)...(19): siRNA sense strand
ccucaggaacccacccaaa

SEQ ID NO: 1579093 - RNA, 19 nt, Homo sapiens
  misc_RNA (1)...(19): siRNA sense strand
gggaccuguuugacaugaa

SEQ ID NO: 1579094 - RNA, 19 nt, Homo sapiens
  misc_RNA (1)...(19): siRNA sense strand
uaaggaucaccgcuuugaa

SEQ ID NO: 1579095 - RNA, 19 nt, Homo sapiens
  misc_RNA (1)...(19): siRNA sense strand
gggaggaguaaccugaaau

SEQ ID NO: 1579096 - RNA, 19 nt, Homo sapiens
  misc_RNA (1)...(19): siRNA sense strand
agacccaucuccuacagua

SEQ ID NO: 1579097 - RNA, 19 nt, Homo sapiens
  misc_RNA (1)...(19): siRNA sense strand
cugcaggccugucguguau

SEQ ID NO: 1579098 - RNA, 19 nt, Homo sapiens
  misc_RNA (1)...(19): siRNA sense strand
gcagacccaucuccuacag

SEQ ID NO: 1579099 - RNA, 19 nt, Homo sapiens
  misc_RNA (1)...(19): siRNA sense strand
gcaggccugucguguaugc

SEQ ID NO: 1579100 - RNA, 19 nt, Homo sapiens
  misc_RNA (1)...(19): siRNA sense strand
gcugcaggccugucgugua

SEQ ID NO: 1579101 - RNA, 19 nt, Homo sapiens
  misc_RNA (1)...(19): siRNA sense strand
gcccaugagcuucaaguca

SEQ ID NO: 1579102 - RNA, 19 nt, Homo sapiens
  misc_RNA (1)...(19): siRNA sense strand
cccgugagcugccagucuu

SEQ ID NO: 1579103 - RNA, 19 nt, Homo sapiens
  misc_RNA (1)...(19): siRNA sense strand
cccgugagcugccagucuu

SEQ ID NO: 1579104 - RNA, 19 nt, Homo sapiens
  misc_RNA (1)...(19): siRNA sense strand
cugccagucuucugugugu

SEQ ID NO: 1579105 - RNA, 19 nt, Homo sapiens
  misc_RNA (1)...(19): siRNA sense strand
cugccagucuucugugugu

SEQ ID NO: 1579106 - RNA, 19 nt, Homo sapiens
  misc_RNA (1)...(19): siRNA sense strand
gaagaucgcugcucagagu

SEQ ID NO: 1579107 - RNA, 19 nt, Homo sapiens
  misc_RNA (1)...(19): siRNA sense strand
gcagaagaguguccacaaa

SEQ ID NO: 1579108 - RNA, 19 nt, Homo sapiens
  misc_RNA (1)...(19): siRNA sense strand
gaacuacugugaggguuuc

SEQ ID NO: 1579109 - RNA, 19 nt, Homo sapiens
  misc_RNA (1)...(19): siRNA sense strand
gcuuagaaauggugagaga

SEQ ID NO: 1579110 - RNA, 19 nt, Homo sapiens
  misc_RNA (1)...(19): siRNA sense strand
gaauggaguuguauuuuga

SEQ ID NO: 1579111 - RNA, 19 nt, Homo sapiens
  misc_RNA (1)...(19): siRNA sense strand
gaaauggugagagaacuuu

SEQ ID NO: 1579112 - RNA, 19 nt, Homo sapiens
  misc_RNA (1)...(19): siRNA sense strand
gaggaauggaguuguauuu

SEQ ID NO: 1579113 - RNA, 19 nt, Homo sapiens
  misc_RNA (1)...(19): siRNA sense strand
ggaauggaguuguauuuug

SEQ ID NO: 1579114 - RNA, 19 nt, Homo sapiens
  misc_RNA (1)...(19): siRNA sense strand
ugagagaacuuuggaugug

SEQ ID NO: 1579115 - RNA, 19 nt, Homo sapiens
  misc_RNA (1)...(19): siRNA sense strand
gaagaguguccacaaacuu

SEQ ID NO: 1579116 - RNA, 19 nt, Homo sapiens
  misc_RNA (1)...(19): siRNA sense strand
cagcugauggugaaacuuu

SEQ ID NO: 1579117 - RNA, 19 nt, Homo sapiens
  misc_RNA (1)...(19): siRNA sense strand
ggaacuacugugaggguuu

SEQ ID NO: 1579118 - RNA, 19 nt, Homo sapiens
  misc_RNA (1)...(19): siRNA sense strand
gaacguggaggaggaggaa

SEQ ID NO: 1579119 - RNA, 19 nt, Homo sapiens
  misc_RNA (1)...(19): siRNA sense strand
ggaggaggaggaacacgaa

SEQ ID NO: 1579120 - RNA, 19 nt, Homo sapiens
  misc_RNA (1)...(19): siRNA sense strand
ggagcaugaugguacuuag

SEQ ID NO: 1579121 - RNA, 19 nt, Homo sapiens
  misc_RNA (1)...(19): siRNA sense strand
ggaggaggaacacgaagug

SEQ ID NO: 1579122 - RNA, 19 nt, Homo sapiens
  misc_RNA (1)...(19): siRNA sense strand
agugaggaauggaguugua

SEQ ID NO: 1579123 - RNA, 19 nt, Homo sapiens
  misc_RNA (1)...(19): siRNA sense strand
aaauauccacgcauccuuu

SEQ ID NO: 1579124 - RNA, 19 nt, Homo sapiens
  misc_RNA (1)...(19): siRNA sense strand
agaagaguguccacaaacu

SEQ ID NO: 1579125 - RNA, 19 nt, Homo sapiens
  misc_RNA (1)...(19): siRNA sense strand
aaagcuccaugcugauugu

SEQ ID NO: 1579126 - RNA, 19 nt, Homo sapiens
  misc_RNA (1)...(19): siRNA sense strand
cauagugcagugaauagaa

SEQ ID NO: 1579127 - RNA, 19 nt, Homo sapiens
  misc_RNA (1)...(19): siRNA sense strand
cuacugugaggguuucuuu

SEQ ID NO: 1579128 - RNA, 19 nt, Homo sapiens
  misc_RNA (1)...(19): siRNA sense strand
gagcaaggagcaugauggu

SEQ ID NO: 1579129 - RNA, 19 nt, Homo sapiens
  misc_RNA (1)...(19): siRNA sense strand
aaaccauagugcagugaau

SEQ ID NO: 1579130 - RNA, 19 nt, Homo sapiens
  misc_RNA (1)...(19): siRNA sense strand
caaggagcaugaugguacu

SEQ ID NO: 1579131 - RNA, 19 nt, Homo sapiens
  misc_RNA (1)...(19): siRNA sense strand
gaggguuucuuuugauuuc

SEQ ID NO: 1579132 - RNA, 19 nt, Homo sapiens
  misc_RNA (1)...(19): siRNA sense strand
ggcagaagaguguccacaa

SEQ ID NO: 1579133 - RNA, 19 nt, Homo sapiens
  misc_RNA (1)...(19): siRNA sense strand
gaaggaaaugcuggaugga

SEQ ID NO: 1579134 - RNA, 19 nt, Homo sapiens
  misc_RNA (1)...(19): siRNA sense strand
gugagagaacuuuggaugu

SEQ ID NO: 1579135 - RNA, 19 nt, Homo sapiens
  misc_RNA (1)...(19): siRNA sense strand
aaccauagugcagugaaua

SEQ ID NO: 1579136 - RNA, 19 nt, Homo sapiens
  misc_RNA (1)...(19): siRNA sense strand
cggaagaucgcugcucaga

SEQ ID NO: 1579137 - RNA, 19 nt, Homo sapiens
  misc_RNA (1)...(19): siRNA sense strand
auagugcagugaauagaag

SEQ ID NO: 1579138 - RNA, 19 nt, Homo sapiens
  misc_RNA (1)...(19): siRNA sense strand
cagaagaguguccacaaac

SEQ ID NO: 1579139 - RNA, 19 nt, Homo sapiens
  misc_RNA (1)...(19): siRNA sense strand
gaagccagauccuaaauua

SEQ ID NO: 1579140 - RNA, 19 nt, Homo sapiens
  misc_RNA (1)...(19): siRNA sense strand
aaagagaacuugcucgaua

SEQ ID NO: 1579141 - RNA, 19 nt, Homo sapiens
  misc_RNA (1)...(19): siRNA sense strand
agagaaagcuucaggagua

SEQ ID NO: 1579142 - RNA, 19 nt, Homo sapiens
  misc_RNA (1)...(19): siRNA sense strand
ggaaacaacuagaagaaug

SEQ ID NO: 1579143 - RNA, 19 nt, Homo sapiens
  misc_RNA (1)...(19): siRNA sense strand
gaaguaagccaaagacuga

SEQ ID NO: 1579144 - RNA, 19 nt, Homo sapiens
  misc_RNA (1)...(19): siRNA sense strand
gaacuugcucgauaucuua

SEQ ID NO: 1579145 - RNA, 19 nt, Homo sapiens
  misc_RNA (1)...(19): siRNA sense strand
caacagacauccaaacauc

SEQ ID NO: 1579146 - RNA, 19 nt, Homo sapiens
  misc_RNA (1)...(19): siRNA sense strand
caggagaacugucaagaaa

SEQ ID NO: 1579147 - RNA, 19 nt, Homo sapiens
  misc_RNA (1)...(19): siRNA sense strand
gcaggaacacgauuuagua

SEQ ID NO: 1579148 - RNA, 19 nt, Homo sapiens
  misc_RNA (1)...(19): siRNA sense strand
gcaaaguuguuggcaagua

SEQ ID NO: 1579149 - RNA, 19 nt, Homo sapiens
  misc_RNA (1)...(19): siRNA sense strand
ggaacacgauuuaguagug

SEQ ID NO: 1579150 - RNA, 19 nt, Homo sapiens
  misc_RNA (1)...(19): siRNA sense strand
uggaagagcuggccaagaa

SEQ ID NO: 1579151 - RNA, 19 nt, Homo sapiens
  misc_RNA (1)...(19): siRNA sense strand
aaacuaagauacggucaua

SEQ ID NO: 1579152 - RNA, 19 nt, Homo sapiens
  misc_RNA (1)...(19): siRNA sense strand
caaaguuguuggcaaguaa

SEQ ID NO: 1579153 - RNA, 19 nt, Homo sapiens
  misc_RNA (1)...(19): siRNA sense strand
ucaaggaaaugguaaaugu

SEQ ID NO: 1579154 - RNA, 19 nt, Homo sapiens
  misc_RNA (1)...(19): siRNA sense strand
gaacaagacagcucccaaa

SEQ ID NO: 1579155 - RNA, 19 nt, Homo sapiens
  misc_RNA (1)...(19): siRNA sense strand
aauaauggcuuucagcaaa

SEQ ID NO: 1579156 - RNA, 19 nt, Homo sapiens
  misc_RNA (1)...(19): siRNA sense strand
ggucauacccuguuacuga

SEQ ID NO: 1579157 - RNA, 19 nt, Homo sapiens
  misc_RNA (1)...(19): siRNA sense strand
uaauagugcuguucugaaa

SEQ ID NO: 1579158 - RNA, 19 nt, Homo sapiens
  misc_RNA (1)...(19): siRNA sense strand
uaacagaaccugagaggaa

SEQ ID NO: 1579159 - RNA, 19 nt, Homo sapiens
  misc_RNA (1)...(19): siRNA sense strand
gguaucaaauuacagauug

SEQ ID NO: 1579160 - RNA, 19 nt, Homo sapiens
  misc_RNA (1)...(19): siRNA sense strand
gguccaaucccuagaauaa

SEQ ID NO: 1579161 - RNA, 19 nt, Homo sapiens
  misc_RNA (1)...(19): siRNA sense strand
gaaaacgaaucuuuggaua

SEQ ID NO: 1579162 - RNA, 19 nt, Homo sapiens
  misc_RNA (1)...(19): siRNA sense strand
gauuacuucugacucuuua

SEQ ID NO: 1579163 - RNA, 19 nt, Homo sapiens
  misc_RNA (1)...(19): siRNA sense strand
gugcaagacaugaaauuua

SEQ ID NO: 1579164 - RNA, 19 nt, Homo sapiens
  misc_RNA (1)...(19): siRNA sense strand
guuaacagaucaaggaaau

SEQ ID NO: 1579165 - RNA, 19 nt, Homo sapiens
  misc_RNA (1)...(19): siRNA sense strand
gcggaaaguuguucuuaau

SEQ ID NO: 1579166 - RNA, 19 nt, Homo sapiens
  misc_RNA (1)...(19): siRNA sense strand
aagcaggacuuucccagua

SEQ ID NO: 1579167 - RNA, 19 nt, Homo sapiens
  misc_RNA (1)...(19): siRNA sense strand
aggcagaacagcauaauua

SEQ ID NO: 1579168 - RNA, 19 nt, Homo sapiens
  misc_RNA (1)...(19): siRNA sense strand
cagcauaauuauccuggua

SEQ ID NO: 1579169 - RNA, 19 nt, Homo sapiens
  misc_RNA (1)...(19): siRNA sense strand
gaaggaaacaacuagaaga

SEQ ID NO: 1579170 - RNA, 19 nt, Homo sapiens
  misc_RNA (1)...(19): siRNA sense strand
caaagcagcaguuaacaga

SEQ ID NO: 1579171 - RNA, 19 nt, Homo sapiens
  misc_RNA (1)...(19): siRNA sense strand
aaagaaagcacaacucgaa

SEQ ID NO: 1579172 - RNA, 19 nt, Homo sapiens
  misc_RNA (1)...(19): siRNA sense strand
gcaguuaacagaucaagga

SEQ ID NO: 1579173 - RNA, 19 nt, Homo sapiens
  misc_RNA (1)...(19): siRNA sense strand
aaaguucagucaucaaaga

SEQ ID NO: 1579174 - RNA, 19 nt, Homo sapiens
  misc_RNA (1)...(19): siRNA sense strand
ggguguaccuucuaaugaa

SEQ ID NO: 1579175 - RNA, 19 nt, Homo sapiens
  misc_RNA (1)...(19): siRNA sense strand
uaaacggccuccuauggaa

SEQ ID NO: 1579176 - RNA, 19 nt, Homo sapiens
  misc_RNA (1)...(19): siRNA sense strand
ccaaacaaacccaaauauu

SEQ ID NO: 1579177 - RNA, 19 nt, Homo sapiens
  misc_RNA (1)...(19): siRNA sense strand
gucaagaacaucaaagaua

SEQ ID NO: 1579178 - RNA, 19 nt, Homo sapiens
  misc_RNA (1)...(19): siRNA sense strand
caaggacgguucccucuca

SEQ ID NO: 1579179 - RNA, 19 nt, Homo sapiens
  misc_RNA (1)...(19): siRNA sense strand
caacaccaauacaagaguu

SEQ ID NO: 1579180 - RNA, 19 nt, Homo sapiens
  misc_RNA (1)...(19): siRNA sense strand
caagaauaauugccagaau

SEQ ID NO: 1579181 - RNA, 19 nt, Homo sapiens
  misc_RNA (1)...(19): siRNA sense strand
gaagaauggcagaaaucua

SEQ ID NO: 1579182 - RNA, 19 nt, Homo sapiens
  misc_RNA (1)...(19): siRNA sense strand
uaaaugggaugccggaagu

SEQ ID NO: 1579183 - RNA, 19 nt, Homo sapiens
  misc_RNA (1)...(19): siRNA sense strand
aagaauggcagaaaucuaa

SEQ ID NO: 1579184 - RNA, 19 nt, Homo sapiens
  misc_RNA (1)...(19): siRNA sense strand
guaaaguucagucaucaaa

SEQ ID NO: 1579185 - RNA, 19 nt, Homo sapiens
  misc_RNA (1)...(19): siRNA sense strand
caaccaccuucuaaaucua

SEQ ID NO: 1579186 - RNA, 19 nt, Homo sapiens
  misc_RNA (1)...(19): siRNA sense strand
cagaaaugcugcaggaaca

SEQ ID NO: 1579187 - RNA, 19 nt, Homo sapiens
  misc_RNA (1)...(19): siRNA sense strand
gaauauaacaacagacauc

SEQ ID NO: 1579188 - RNA, 19 nt, Homo sapiens
  misc_RNA (1)...(19): siRNA sense strand
gcaggacuuucccaguaaa

SEQ ID NO: 1579189 - RNA, 19 nt, Homo sapiens
  misc_RNA (1)...(19): siRNA sense strand
ggaaaugguaaauguauag

SEQ ID NO: 1579190 - RNA, 19 nt, Homo sapiens
  misc_RNA (1)...(19): siRNA sense strand
ggaagugcaagacaugaaa

SEQ ID NO: 1579191 - RNA, 19 nt, Homo sapiens
  misc_RNA (1)...(19): siRNA sense strand
ucugugaagucuugucuuu

SEQ ID NO: 1579192 - RNA, 19 nt, Homo sapiens
  misc_RNA (1)...(19): siRNA sense strand
gcagaaaucuaagggaaaa

SEQ ID NO: 1579193 - RNA, 19 nt, Homo sapiens
  misc_RNA (1)...(19): siRNA sense strand
gauggaaucugugaagucu

SEQ ID NO: 1579194 - RNA, 19 nt, Homo sapiens
  misc_RNA (1)...(19): siRNA sense strand
gaaucaaccaccuucuaaa

SEQ ID NO: 1579195 - RNA, 19 nt, Homo sapiens
  misc_RNA (1)...(19): siRNA sense strand
gaagagcuggccaagaaga

SEQ ID NO: 1579196 - RNA, 19 nt, Homo sapiens
  misc_RNA (1)...(19): siRNA sense strand
acaccaagccuuaucuaaa

SEQ ID NO: 1579197 - RNA, 19 nt, Homo sapiens
  misc_RNA (1)...(19): siRNA sense strand
ucaaccaccuucuaaaucu

SEQ ID NO: 1579198 - RNA, 19 nt, Homo sapiens
  misc_RNA (1)...(19): siRNA sense strand
gccagauccuaaauuauau

SEQ ID NO: 1579199 - RNA, 19 nt, Homo sapiens
  misc_RNA (1)...(19): siRNA sense strand
agccagauccuaaauuaua

SEQ ID NO: 1579200 - RNA, 19 nt, Homo sapiens
  misc_RNA (1)...(19): siRNA sense strand
caaggaaaugguaaaugua

SEQ ID NO: 1579201 - RNA, 19 nt, Homo sapiens
  misc_RNA (1)...(19): siRNA sense strand
uggaaucugugaagucuug

SEQ ID NO: 1579202 - RNA, 19 nt, Homo sapiens
  misc_RNA (1)...(19): siRNA sense strand
gguguaccuucuaaugaaa

SEQ ID NO: 1579203 - RNA, 19 nt, Homo sapiens
  misc_RNA (1)...(19): siRNA sense strand
guuaauaggagucaauaug

SEQ ID NO: 1579204 - RNA, 19 nt, Homo sapiens
  misc_RNA (1)...(19): siRNA sense strand
caaagaaaccaguagucaa

SEQ ID NO: 1579205 - RNA, 19 nt, Homo sapiens
  misc_RNA (1)...(19): siRNA sense strand
ggcaaaaguucaguuaaua

SEQ ID NO: 1579206 - RNA, 19 nt, Homo sapiens
  misc_RNA (1)...(19): siRNA sense strand
aaacgaaucuuuggauaac

SEQ ID NO: 1579207 - RNA, 19 nt, Homo sapiens
  misc_RNA (1)...(19): siRNA sense strand
aaagguccaucagcauuaa

SEQ ID NO: 1579208 - RNA, 19 nt, Homo sapiens
  misc_RNA (1)...(19): siRNA sense strand
ucaaaccccugaaucauaa

SEQ ID NO: 1579209 - RNA, 19 nt, Homo sapiens
  misc_RNA (1)...(19): siRNA sense strand
uaacauauuguccagcauu

SEQ ID NO: 1579210 - RNA, 19 nt, Homo sapiens
  misc_RNA (1)...(19): siRNA sense strand
acaguuggcagauuuaauu

SEQ ID NO: 1579211 - RNA, 19 nt, Homo sapiens
  misc_RNA (1)...(19): siRNA sense strand
ggaagccagauccuaaauu

SEQ ID NO: 1579212 - RNA, 19 nt, Homo sapiens
  misc_RNA (1)...(19): siRNA sense strand
cuagaagaauggcagaaau

SEQ ID NO: 1579213 - RNA, 19 nt, Homo sapiens
  misc_RNA (1)...(19): siRNA sense strand
cagcccagaccaccuaaua

SEQ ID NO: 1579214 - RNA, 19 nt, Homo sapiens
  misc_RNA (1)...(19): siRNA sense strand
uugcaagacucaaacagaa

SEQ ID NO: 1579215 - RNA, 19 nt, Homo sapiens
  misc_RNA (1)...(19): siRNA sense strand
gaaagaccaaaugaaacua

SEQ ID NO: 1579216 - RNA, 19 nt, Homo sapiens
  misc_RNA (1)...(19): siRNA sense strand
gacugacucuuauaaucaa

SEQ ID NO: 1579217 - RNA, 19 nt, Homo sapiens
  misc_RNA (1)...(19): siRNA sense strand
ucgaagagcggcagagaaa

SEQ ID NO: 1579218 - RNA, 19 nt, Homo sapiens
  misc_RNA (1)...(19): siRNA sense strand
acgguucccucucacuuua

SEQ ID NO: 1579219 - RNA, 19 nt, Homo sapiens
  misc_RNA (1)...(19): siRNA sense strand
gaaacaacuagaagaaugg

SEQ ID NO: 1579220 - RNA, 19 nt, Homo sapiens
  misc_RNA (1)...(19): siRNA sense strand
aagaauaauugccagaauc

SEQ ID NO: 1579221 - RNA, 19 nt, Homo sapiens
  misc_RNA (1)...(19): siRNA sense strand
ggauuacuucugacucuuu

SEQ ID NO: 1579222 - RNA, 19 nt, Homo sapiens
  misc_RNA (1)...(19): siRNA sense strand
gggcaacaccaauacaaga

SEQ ID NO: 1579223 - RNA, 19 nt, Homo sapiens
  misc_RNA (1)...(19): siRNA sense strand
gaaagcacaacucgaacug

SEQ ID NO: 1579224 - RNA, 19 nt, Homo sapiens
  misc_RNA (1)...(19): siRNA sense strand
caccaagccuuaucuaaaa

SEQ ID NO: 1579225 - RNA, 19 nt, Homo sapiens
  misc_RNA (1)...(19): siRNA sense strand
gcugaugucacaaccguaa

SEQ ID NO: 1579226 - RNA, 19 nt, Homo sapiens
  misc_RNA (1)...(19): siRNA sense strand
agaaaccaguagucaagaa

SEQ ID NO: 1579227 - RNA, 19 nt, Homo sapiens
  misc_RNA (1)...(19): siRNA sense strand
aagagaacuugcucgauau

SEQ ID NO: 1579228 - RNA, 19 nt, Homo sapiens
  misc_RNA (1)...(19): siRNA sense strand
guaguggcuucucuugaug

SEQ ID NO: 1579229 - RNA, 19 nt, Homo sapiens
  misc_RNA (1)...(19): siRNA sense strand
agucuugucuuucuccaaa

SEQ ID NO: 1579230 - RNA, 19 nt, Homo sapiens
  misc_RNA (1)...(19): siRNA sense strand
uauaugaagaggccauuaa

SEQ ID NO: 1579231 - RNA, 19 nt, Homo sapiens
  misc_RNA (1)...(19): siRNA sense strand
gaucugcaaagcaaaguug

SEQ ID NO: 1579232 - RNA, 19 nt, Homo sapiens
  misc_RNA (1)...(19): siRNA sense strand
ccagugguaauaaacauaa

SEQ ID NO: 1579233 - RNA, 19 nt, Homo sapiens
  misc_RNA (1)...(19): siRNA sense strand
cagauuuaauucagccauu

SEQ ID NO: 1579234 - RNA, 19 nt, Homo sapiens
  misc_RNA (1)...(19): siRNA sense strand
uuaguaaaguucagucauc

SEQ ID NO: 1579235 - RNA, 19 nt, Homo sapiens
  misc_RNA (1)...(19): siRNA sense strand
gaaauuuaucacuccugua

SEQ ID NO: 1579236 - RNA, 19 nt, Homo sapiens
  misc_RNA (1)...(19): siRNA sense strand
cggaaaguuguucuuaaua

SEQ ID NO: 1579237 - RNA, 19 nt, Homo sapiens
  misc_RNA (1)...(19): siRNA sense strand
gaucgaaggaaacaacuag

SEQ ID NO: 1579238 - RNA, 19 nt, Homo sapiens
  misc_RNA (1)...(19): siRNA sense strand
gggugaauauaacaacaga

SEQ ID NO: 1579239 - RNA, 19 nt, Homo sapiens
  misc_RNA (1)...(19): siRNA sense strand
uggcagcucucaagaagga

SEQ ID NO: 1579240 - RNA, 19 nt, Homo sapiens
  misc_RNA (1)...(19): siRNA sense strand
gacaggccgugaaggaaga

SEQ ID NO: 1579241 - RNA, 19 nt, Homo sapiens
  misc_RNA (1)...(19): siRNA sense strand
gcucagagugucccaguug

SEQ ID NO: 1579242 - RNA, 19 nt, Homo sapiens
  misc_RNA (1)...(19): siRNA sense strand
gaggacaggccgugaagga

SEQ ID NO: 1579243 - RNA, 19 nt, Homo sapiens
  misc_RNA (1)...(19): siRNA sense strand
ucaagaaggagcuccgaaa

SEQ ID NO: 1579244 - RNA, 19 nt, Homo sapiens
  misc_RNA (1)...(19): siRNA sense strand
ggccaucuccacucacaaa

SEQ ID NO: 1579245 - RNA, 19 nt, Homo sapiens
  misc_RNA (1)...(19): siRNA sense strand
gcuacgaagugcgcaggaa

SEQ ID NO: 1579246 - RNA, 19 nt, Homo sapiens
  misc_RNA (1)...(19): siRNA sense strand
gcuccaagcccagggaaga

SEQ ID NO: 1579247 - RNA, 19 nt, Homo sapiens
  misc_RNA (1)...(19): siRNA sense strand
caggaaggccagagaagug

SEQ ID NO: 1579248 - RNA, 19 nt, Homo sapiens
  misc_RNA (1)...(19): siRNA sense strand
caagcuccgugcucagagu

SEQ ID NO: 1579249 - RNA, 19 nt, Homo sapiens
  misc_RNA (1)...(19): siRNA sense strand
ucuggcagcucucaagaag

SEQ ID NO: 1579250 - RNA, 19 nt, Homo sapiens
  misc_RNA (1)...(19): siRNA sense strand
agaagcaggagcccaagaa

SEQ ID NO: 1579251 - RNA, 19 nt, Homo sapiens
  misc_RNA (1)...(19): siRNA sense strand
gagaagcaggagcccaaga

SEQ ID NO: 1579252 - RNA, 19 nt, Homo sapiens
  misc_RNA (1)...(19): siRNA sense strand
gaagcaggagcccaagaag

SEQ ID NO: 1579253 - RNA, 19 nt, Homo sapiens
  misc_RNA (1)...(19): siRNA sense strand
caagaaggagcuccgaaac

SEQ ID NO: 1579254 - RNA, 19 nt, Homo sapiens
  misc_RNA (1)...(19): siRNA sense strand
ggucagggaaggacaagag

SEQ ID NO: 1579255 - RNA, 19 nt, Homo sapiens
  misc_RNA (1)...(19): siRNA sense strand
caggccaucuccacucaca

SEQ ID NO: 1579256 - RNA, 19 nt, Homo sapiens
  misc_RNA (1)...(19): siRNA sense strand
cacagcggaccauccagua

SEQ ID NO: 1579257 - RNA, 19 nt, Homo sapiens
  misc_RNA (1)...(19): siRNA sense strand
cgaaagccaaggccaaugc

SEQ ID NO: 1579258 - RNA, 19 nt, Homo sapiens
  misc_RNA (1)...(19): siRNA sense strand
ggugaucgcucucaacuaa

SEQ ID NO: 1579259 - RNA, 19 nt, Homo sapiens
  misc_RNA (1)...(19): siRNA sense strand
gaagaaugauagcacagaa

SEQ ID NO: 1579260 - RNA, 19 nt, Homo sapiens
  misc_RNA (1)...(19): siRNA sense strand
cgggaaggcuuaaagauga

SEQ ID NO: 1579261 - RNA, 19 nt, Homo sapiens
  misc_RNA (1)...(19): siRNA sense strand
uguucaagcucuuacauua

SEQ ID NO: 1579262 - RNA, 19 nt, Homo sapiens
  misc_RNA (1)...(19): siRNA sense strand
gaaccaaacuuuuaaaugg

SEQ ID NO: 1579263 - RNA, 19 nt, Homo sapiens
  misc_RNA (1)...(19): siRNA sense strand
guaauuggaggaagaauga

SEQ ID NO: 1579264 - RNA, 19 nt, Homo sapiens
  misc_RNA (1)...(19): siRNA sense strand
ugaaacggguacaagcaua

SEQ ID NO: 1579265 - RNA, 19 nt, Homo sapiens
  misc_RNA (1)...(19): siRNA sense strand
gcucuuacauuaacauucu

SEQ ID NO: 1579266 - RNA, 19 nt, Homo sapiens
  misc_RNA (1)...(19): siRNA sense strand
gaaacggguacaagcauaa

SEQ ID NO: 1579267 - RNA, 19 nt, Homo sapiens
  misc_RNA (1)...(19): siRNA sense strand
gcugccauaucaguuauua

SEQ ID NO: 1579268 - RNA, 19 nt, Homo sapiens
  misc_RNA (1)...(19): siRNA sense strand
ugaauugggugauaagaca

SEQ ID NO: 1579269 - RNA, 19 nt, Homo sapiens
  misc_RNA (1)...(19): siRNA sense strand
gcucucaacuaacuacaau

SEQ ID NO: 1579270 - RNA, 19 nt, Homo sapiens
  misc_RNA (1)...(19): siRNA sense strand
caagcugaauuaaagaaga

SEQ ID NO: 1579271 - RNA, 19 nt, Homo sapiens
  misc_RNA (1)...(19): siRNA sense strand
gcauaacaguaccucagaa

SEQ ID NO: 1579272 - RNA, 19 nt, Homo sapiens
  misc_RNA (1)...(19): siRNA sense strand
gcacgggauuggcaguaau

SEQ ID NO: 1579273 - RNA, 19 nt, Homo sapiens
  misc_RNA (1)...(19): siRNA sense strand
aagaggaacuggaagaagu

SEQ ID NO: 1579274 - RNA, 19 nt, Homo sapiens
  misc_RNA (1)...(19): siRNA sense strand
ggacuaaugacaugcuugu

SEQ ID NO: 1579275 - RNA, 19 nt, Homo sapiens
  misc_RNA (1)...(19): siRNA sense strand
ggcaguaauuggaggaaga

SEQ ID NO: 1579276 - RNA, 19 nt, Homo sapiens
  misc_RNA (1)...(19): siRNA sense strand
gaagauccugcuacccaaa

SEQ ID NO: 1579277 - RNA, 19 nt, Homo sapiens
  misc_RNA (1)...(19): siRNA sense strand
guucaagcucuuacauuaa

SEQ ID NO: 1579278 - RNA, 19 nt, Homo sapiens
  misc_RNA (1)...(19): siRNA sense strand
ggaagaaugauagcacaga

SEQ ID NO: 1579279 - RNA, 19 nt, Homo sapiens
  misc_RNA (1)...(19): siRNA sense strand
ugaugagggucaagaggaa

SEQ ID NO: 1579280 - RNA, 19 nt, Homo sapiens
  misc_RNA (1)...(19): siRNA sense strand
ucauggcaaugcgcuauaa

SEQ ID NO: 1579281 - RNA, 19 nt, Homo sapiens
  misc_RNA (1)...(19): siRNA sense strand
caacgaaccaaacuuuuaa

SEQ ID NO: 1579282 - RNA, 19 nt, Homo sapiens
  misc_RNA (1)...(19): siRNA sense strand
gggauuggcaguaauugga

SEQ ID NO: 1579283 - RNA, 19 nt, Homo sapiens
  misc_RNA (1)...(19): siRNA sense strand
cauaacaguaccucagaaa

SEQ ID NO: 1579284 - RNA, 19 nt, Homo sapiens
  misc_RNA (1)...(19): siRNA sense strand
uaaagaugagcccugauga

SEQ ID NO: 1579285 - RNA, 19 nt, Homo sapiens
  misc_RNA (1)...(19): siRNA sense strand
gaccuuagccaccggaaca

SEQ ID NO: 1579286 - RNA, 19 nt, Homo sapiens
  misc_RNA (1)...(19): siRNA sense strand
cagggucuauacauacuau

SEQ ID NO: 1579287 - RNA, 19 nt, Homo sapiens
  misc_RNA (1)...(19): siRNA sense strand
ucagaacugugacaaucau

SEQ ID NO: 1579288 - RNA, 19 nt, Homo sapiens
  misc_RNA (1)...(19): siRNA sense strand
aaucauaggaggcaucguu

SEQ ID NO: 1579289 - RNA, 19 nt, Homo sapiens
  misc_RNA (1)...(19): siRNA sense strand
ucaacgaaccaaacuuuua

SEQ ID NO: 1579290 - RNA, 19 nt, Homo sapiens
  misc_RNA (1)...(19): siRNA sense strand
gaacugugacaaucauagg

SEQ ID NO: 1579291 - RNA, 19 nt, Homo sapiens
  misc_RNA (1)...(19): siRNA sense strand
gcaguaauuggaggaagaa

SEQ ID NO: 1579292 - RNA, 19 nt, Homo sapiens
  misc_RNA (1)...(19): siRNA sense strand
ucucaacuaacuacaauug

SEQ ID NO: 1579293 - RNA, 19 nt, Homo sapiens
  misc_RNA (1)...(19): siRNA sense strand
guucauaccaauaaagaag

SEQ ID NO: 1579294 - RNA, 19 nt, Homo sapiens
  misc_RNA (1)...(19): siRNA sense strand
uaaauggaccgggagaugu

SEQ ID NO: 1579295 - RNA, 19 nt, Homo sapiens
  misc_RNA (1)...(19): siRNA sense strand
cgugcuggcuggugcaaug

SEQ ID NO: 1579296 - RNA, 19 nt, Homo sapiens
  misc_RNA (1)...(19): siRNA sense strand
uuucaacgaaccaaacuuu

SEQ ID NO: 1579297 - RNA, 19 nt, Homo sapiens
  misc_RNA (1)...(19): siRNA sense strand
gaauuucaacgaaccaaac

SEQ ID NO: 1579298 - RNA, 19 nt, Homo sapiens
  misc_RNA (1)...(19): siRNA sense strand
uuaaagaugagcccugaug

SEQ ID NO: 1579299 - RNA, 19 nt, Homo sapiens
  misc_RNA (1)...(19): siRNA sense strand
cagcuccaguucauaccaa

SEQ ID NO: 1579300 - RNA, 19 nt, Homo sapiens
  misc_RNA (1)...(19): siRNA sense strand
ggguacaagcauaacagua

SEQ ID NO: 1579301 - RNA, 19 nt, Homo sapiens
  misc_RNA (1)...(19): siRNA sense strand
ccugcuacccaaacuaauu

SEQ ID NO: 1579302 - RNA, 19 nt, Homo sapiens
  misc_RNA (1)...(19): siRNA sense strand
gcauuugucgcugccauau

SEQ ID NO: 1579303 - RNA, 19 nt, Homo sapiens
  misc_RNA (1)...(19): siRNA sense strand
aaauggaccgggagauguu

SEQ ID NO: 1579304 - RNA, 19 nt, Homo sapiens
  misc_RNA (1)...(19): siRNA sense strand
ucaagaggaacuggaagaa

SEQ ID NO: 1579305 - RNA, 19 nt, Homo sapiens
  misc_RNA (1)...(19): siRNA sense strand
gccauaucaguuauuauug

SEQ ID NO: 1579306 - RNA, 19 nt, Homo sapiens
  misc_RNA (1)...(19): siRNA sense strand
augcuugccuugggacuaa

SEQ ID NO: 1579307 - RNA, 19 nt, Homo sapiens
  misc_RNA (1)...(19): siRNA sense strand
gcuccaguucauaccaaua

SEQ ID NO: 1579308 - RNA, 19 nt, Homo sapiens
  misc_RNA (1)...(19): siRNA sense strand
caguucauaccaauaaaga

SEQ ID NO: 1579309 - RNA, 19 nt, Homo sapiens
  misc_RNA (1)...(19): siRNA sense strand
cugcuacccaaacuaauuu

SEQ ID NO: 1579310 - RNA, 19 nt, Homo sapiens
  misc_RNA (1)...(19): siRNA sense strand
gggaaggcuuaaagaugag

SEQ ID NO: 1579311 - RNA, 19 nt, Homo sapiens
  misc_RNA (1)...(19): siRNA sense strand
auuugucgcugccauauca

SEQ ID NO: 1579312 - RNA, 19 nt, Homo sapiens
  misc_RNA (1)...(19): siRNA sense strand
cuauuuauaagcccugauu

SEQ ID NO: 1579313 - RNA, 19 nt, Homo sapiens
  misc_RNA (1)...(19): siRNA sense strand
cggcccagaugaagaccuu

SEQ ID NO: 1579314 - RNA, 19 nt, Homo sapiens
  misc_RNA (1)...(19): siRNA sense strand
gauccugcuacccaaacua

SEQ ID NO: 1579315 - RNA, 19 nt, Homo sapiens
  misc_RNA (1)...(19): siRNA sense strand
ucgggaaggcuuaaagaug

SEQ ID NO: 1579316 - RNA, 19 nt, Homo sapiens
  misc_RNA (1)...(19): siRNA sense strand
cagcagcuccaguucauac

SEQ ID NO: 1579317 - RNA, 19 nt, Homo sapiens
  misc_RNA (1)...(19): siRNA sense strand
ggaccgggagauguugaaa

SEQ ID NO: 1579318 - RNA, 19 nt, Homo sapiens
  misc_RNA (1)...(19): siRNA sense strand
gucaagaggaacuggaaga

SEQ ID NO: 1579319 - RNA, 19 nt, Homo sapiens
  misc_RNA (1)...(19): siRNA sense strand
aauuggaggaagaaugaua

SEQ ID NO: 1579320 - RNA, 19 nt, Homo sapiens
  misc_RNA (1)...(19): siRNA sense strand
ugaucgcucucaacuaacu

SEQ ID NO: 1579321 - RNA, 19 nt, Homo sapiens
  misc_RNA (1)...(19): siRNA sense strand
uuaaauggaccgggagaug

SEQ ID NO: 1579322 - RNA, 19 nt, Homo sapiens
  misc_RNA (1)...(19): siRNA sense strand
cuccaguucauaccaauaa

SEQ ID NO: 1579323 - RNA, 19 nt, Homo sapiens
  misc_RNA (1)...(19): siRNA sense strand
ccuugggacuaaugacaug

SEQ ID NO: 1579324 - RNA, 19 nt, Homo sapiens
  misc_RNA (1)...(19): siRNA sense strand
caagaggaacuggaagaag

SEQ ID NO: 1579325 - RNA, 19 nt, Homo sapiens
  misc_RNA (1)...(19): siRNA sense strand
gucgcugccauaucaguua

SEQ ID NO: 1579326 - RNA, 19 nt, Homo sapiens
  misc_RNA (1)...(19): siRNA sense strand
gaagaauuucaacgaacca

SEQ ID NO: 1579327 - RNA, 19 nt, Homo sapiens
  misc_RNA (1)...(19): siRNA sense strand
aagaaugauagcacagaaa

SEQ ID NO: 1579328 - RNA, 19 nt, Homo sapiens
  misc_RNA (1)...(19): siRNA sense strand
ucgcugccauaucaguuau

SEQ ID NO: 1579329 - RNA, 19 nt, Homo sapiens
  misc_RNA (1)...(19): siRNA sense strand
uucaagcucuuacauuaac

SEQ ID NO: 1579330 - RNA, 19 nt, Homo sapiens
  misc_RNA (1)...(19): siRNA sense strand
gcugaugacucacaaggua

SEQ ID NO: 1579331 - RNA, 19 nt, Homo sapiens
  misc_RNA (1)...(19): siRNA sense strand
uuacgaagcucagaaucua

SEQ ID NO: 1579332 - RNA, 19 nt, Homo sapiens
  misc_RNA (1)...(19): siRNA sense strand
ggaaacguaugaagagagu

SEQ ID NO: 1579333 - RNA, 19 nt, Homo sapiens
  misc_RNA (1)...(19): siRNA sense strand
uggcuuagcuugccugaga

SEQ ID NO: 1579334 - RNA, 19 nt, Homo sapiens
  misc_RNA (1)...(19): siRNA sense strand
gaagagagugugccugugu

SEQ ID NO: 1579335 - RNA, 19 nt, Homo sapiens
  misc_RNA (1)...(19): siRNA sense strand
gcagaccagucguuucuag

SEQ ID NO: 1579336 - RNA, 19 nt, Homo sapiens
  misc_RNA (1)...(19): siRNA sense strand
gagaguggcugagcugauc

SEQ ID NO: 1579337 - RNA, 19 nt, Homo sapiens
  misc_RNA (1)...(19): siRNA sense strand
uuaaguugcugaugacuca

SEQ ID NO: 1579338 - RNA, 19 nt, Homo sapiens
  misc_RNA (1)...(19): siRNA sense strand
ggaucaacaugcuccugaa

SEQ ID NO: 1579339 - RNA, 19 nt, Homo sapiens
  misc_RNA (1)...(19): siRNA sense strand
aaaggcugcuccucccuaa

SEQ ID NO: 1579340 - RNA, 19 nt, Homo sapiens
  misc_RNA (1)...(19): siRNA sense strand
caacuuugccuccauugug

SEQ ID NO: 1579341 - RNA, 19 nt, Homo sapiens
  misc_RNA (1)...(19): siRNA sense strand
ucucuagugucuuuaaguu

SEQ ID NO: 1579342 - RNA, 19 nt, Homo sapiens
  misc_RNA (1)...(19): siRNA sense strand
ucaacaugcuccugaagau

SEQ ID NO: 1579343 - RNA, 19 nt, Homo sapiens
  misc_RNA (1)...(19): siRNA sense strand
caggucaacuuccggaaug

SEQ ID NO: 1579344 - RNA, 19 nt, Homo sapiens
  misc_RNA (1)...(19): siRNA sense strand
cccuaaagcugaccugguu

SEQ ID NO: 1579345 - RNA, 19 nt, Homo sapiens
  misc_RNA (1)...(19): siRNA sense strand
ggcuuucugugcccaauuu

SEQ ID NO: 1579346 - RNA, 19 nt, Homo sapiens
  misc_RNA (1)...(19): siRNA sense strand
agagaagucuugguggaaa

SEQ ID NO: 1579347 - RNA, 19 nt, Homo sapiens
  misc_RNA (1)...(19): siRNA sense strand
gcgcucuguuggugaaauu

SEQ ID NO: 1579348 - RNA, 19 nt, Homo sapiens
  misc_RNA (1)...(19): siRNA sense strand
ugugaaagccgucaaguuc

SEQ ID NO: 1579349 - RNA, 19 nt, Homo sapiens
  misc_RNA (1)...(19): siRNA sense strand
agguaaagcuugagagcaa

SEQ ID NO: 1579350 - RNA, 19 nt, Homo sapiens
  misc_RNA (1)...(19): siRNA sense strand
gaagaugauauuuguggau

SEQ ID NO: 1579351 - RNA, 19 nt, Homo sapiens
  misc_RNA (1)...(19): siRNA sense strand
gcugaugguccaacagauu

SEQ ID NO: 1579352 - RNA, 19 nt, Homo sapiens
  misc_RNA (1)...(19): siRNA sense strand
ggauaacuuuguccaugca

SEQ ID NO: 1579353 - RNA, 19 nt, Homo sapiens
  misc_RNA (1)...(19): siRNA sense strand
gaugauauuuguggauaac

SEQ ID NO: 1579354 - RNA, 19 nt, Homo sapiens
  misc_RNA (1)...(19): siRNA sense strand
ugaccugguuggaucaaau

SEQ ID NO: 1579355 - RNA, 19 nt, Homo sapiens
  misc_RNA (1)...(19): siRNA sense strand
gucuuuaaguugcugauga

SEQ ID NO: 1579356 - RNA, 19 nt, Homo sapiens
  misc_RNA (1)...(19): siRNA sense strand
caacuuccggaaugugaaa

SEQ ID NO: 1579357 - RNA, 19 nt, Homo sapiens
  misc_RNA (1)...(19): siRNA sense strand
ccaggcaucaaguggcuua

SEQ ID NO: 1579358 - RNA, 19 nt, Homo sapiens
  misc_RNA (1)...(19): siRNA sense strand
ggccggaaaccuccagaaa

SEQ ID NO: 1579359 - RNA, 19 nt, Homo sapiens
  misc_RNA (1)...(19): siRNA sense strand
gugugccuguguccaguua

SEQ ID NO: 1579360 - RNA, 19 nt, Homo sapiens
  misc_RNA (1)...(19): siRNA sense strand
gcagcaggcggacaucugu

SEQ ID NO: 1579361 - RNA, 19 nt, Homo sapiens
  misc_RNA (1)...(19): siRNA sense strand
uuucauggcuguggugaug

SEQ ID NO: 1579362 - RNA, 19 nt, Homo sapiens
  misc_RNA (1)...(19): siRNA sense strand
guggaaacguaugaagaga

SEQ ID NO: 1579363 - RNA, 19 nt, Homo sapiens
  misc_RNA (1)...(19): siRNA sense strand
ccggaaaccuccagaaaau

SEQ ID NO: 1579364 - RNA, 19 nt, Homo sapiens
  misc_RNA (1)...(19): siRNA sense strand
aaaccgagauggccaugcu

SEQ ID NO: 1579365 - RNA, 19 nt, Homo sapiens
  misc_RNA (1)...(19): siRNA sense strand
gagaagucuugguggaaac

SEQ ID NO: 1579366 - RNA, 19 nt, Homo sapiens
  misc_RNA (1)...(19): siRNA sense strand
ucgcucaggugcauaugga

SEQ ID NO: 1579367 - RNA, 19 nt, Homo sapiens
  misc_RNA (1)...(19): siRNA sense strand
gaccugcugcugaugaaga

SEQ ID NO: 1579368 - RNA, 19 nt, Homo sapiens
  misc_RNA (1)...(19): siRNA sense strand
caacaugcuccugaagaug

SEQ ID NO: 1579369 - RNA, 19 nt, Homo sapiens
  misc_RNA (1)...(19): siRNA sense strand
ggagcauccucucuuuuga

SEQ ID NO: 1579370 - RNA, 19 nt, Homo sapiens
  misc_RNA (1)...(19): siRNA sense strand
cuggaaacauccugguuca

SEQ ID NO: 1579371 - RNA, 19 nt, Homo sapiens
  misc_RNA (1)...(19): siRNA sense strand
gguggaaacguaugaagag

SEQ ID NO: 1579372 - RNA, 19 nt, Homo sapiens
  misc_RNA (1)...(19): siRNA sense strand
uagcuugccugagauugug

SEQ ID NO: 1579373 - RNA, 19 nt, Homo sapiens
  misc_RNA (1)...(19): siRNA sense strand
ccuuggaaauggccggaaa

SEQ ID NO: 1579374 - RNA, 19 nt, Homo sapiens
  misc_RNA (1)...(19): siRNA sense strand
uagaacacuuccaggucaa

SEQ ID NO: 1579375 - RNA, 19 nt, Homo sapiens
  misc_RNA (1)...(19): siRNA sense strand
uuggauaccuuggaaaugg

SEQ ID NO: 1579376 - RNA, 19 nt, Homo sapiens
  misc_RNA (1)...(19): siRNA sense strand
ccuucucucuagugucuuu

SEQ ID NO: 1579377 - RNA, 19 nt, Homo sapiens
  misc_RNA (1)...(19): siRNA sense strand
uccugaagaugauauuugu

SEQ ID NO: 1579378 - RNA, 19 nt, Homo sapiens
  misc_RNA (1)...(19): siRNA sense strand
cucagaaucuagaacacuu

SEQ ID NO: 1579379 - RNA, 19 nt, Homo sapiens
  misc_RNA (1)...(19): siRNA sense strand
agaccagucguuucuagaa

SEQ ID NO: 1579380 - RNA, 19 nt, Homo sapiens
  misc_RNA (1)...(19): siRNA sense strand
caaagcauacgccaacacu

SEQ ID NO: 1579381 - RNA, 19 nt, Homo sapiens
  misc_RNA (1)...(19): siRNA sense strand
uguccagccuucucucuag

SEQ ID NO: 1579382 - RNA, 19 nt, Homo sapiens
  misc_RNA (1)...(19): siRNA sense strand
aacaugcuccugaagauga

SEQ ID NO: 1579383 - RNA, 19 nt, Homo sapiens
  misc_RNA (1)...(19): siRNA sense strand
aaacguaugaagagagugu

SEQ ID NO: 1579384 - RNA, 19 nt, Homo sapiens
  misc_RNA (1)...(19): siRNA sense strand
agauugaccugcguuacga

SEQ ID NO: 1579385 - RNA, 19 nt, Homo sapiens
  misc_RNA (1)...(19): siRNA sense strand
gacagcguccagagacuug

SEQ ID NO: 1579386 - RNA, 19 nt, Homo sapiens
  misc_RNA (1)...(19): siRNA sense strand
gaccuucacccuggaaaca

SEQ ID NO: 1579387 - RNA, 19 nt, Homo sapiens
  misc_RNA (1)...(19): siRNA sense strand
cagagaagucuugguggaa

SEQ ID NO: 1579388 - RNA, 19 nt, Homo sapiens
  misc_RNA (1)...(19): siRNA sense strand
cugagauuguggaggaauu

SEQ ID NO: 1579389 - RNA, 19 nt, Homo sapiens
  misc_RNA (1)...(19): siRNA sense strand
ggcccaaccuacaucaaac

SEQ ID NO: 1579390 - RNA, 19 nt, Homo sapiens
  misc_RNA (1)...(19): siRNA sense strand
gaaugugaaagccgucaag

SEQ ID NO: 1579391 - RNA, 19 nt, Homo sapiens
  misc_RNA (1)...(19): siRNA sense strand
gaucaacaugcuccugaag

SEQ ID NO: 1579392 - RNA, 19 nt, Homo sapiens
  misc_RNA (1)...(19): siRNA sense strand
agaagcugaugguccaaca

SEQ ID NO: 1579393 - RNA, 19 nt, Homo sapiens
  misc_RNA (1)...(19): siRNA sense strand
cauuguguuugccaucaug

SEQ ID NO: 1579394 - RNA, 19 nt, Homo sapiens
  misc_RNA (1)...(19): siRNA sense strand
gcccagguguacaaagcau

SEQ ID NO: 1579395 - RNA, 19 nt, Homo sapiens
  misc_RNA (1)...(19): siRNA sense strand
ccagccuucucucuagugu

SEQ ID NO: 1579396 - RNA, 19 nt, Homo sapiens
  misc_RNA (1)...(19): siRNA sense strand
ccccugaccugaggaauuu

SEQ ID NO: 1579397 - RNA, 19 nt, Homo sapiens
  misc_RNA (1)...(19): siRNA sense strand
ugagauuguggaggaauuu

SEQ ID NO: 1579398 - RNA, 19 nt, Homo sapiens
  misc_RNA (1)...(19): siRNA sense strand
ggcaucaaguggcuuagcu

SEQ ID NO: 1579399 - RNA, 19 nt, Homo sapiens
  misc_RNA (1)...(19): siRNA sense strand
gaccugguuggaucaaaug

SEQ ID NO: 1579400 - RNA, 19 nt, Homo sapiens
  misc_RNA (1)...(19): siRNA sense strand
gagcucagacagggacuca

SEQ ID NO: 1579401 - RNA, 19 nt, Homo sapiens
  misc_RNA (1)...(19): siRNA sense strand
ugaugacucacaagguaaa

SEQ ID NO: 1579402 - RNA, 19 nt, Homo sapiens
  misc_RNA (1)...(19): siRNA sense strand
guuacgaagcucagaaucu

SEQ ID NO: 1579403 - RNA, 19 nt, Homo sapiens
  misc_RNA (1)...(19): siRNA sense strand
ggaauuugagaagcugaug

SEQ ID NO: 1579404 - RNA, 19 nt, Homo sapiens
  misc_RNA (1)...(19): siRNA sense strand
caaguugccugcaccuuua

SEQ ID NO: 1579405 - RNA, 19 nt, Homo sapiens
  misc_RNA (1)...(19): siRNA sense strand
cacggucgcuguuuaauua

SEQ ID NO: 1579406 - RNA, 19 nt, Homo sapiens
  misc_RNA (1)...(19): siRNA sense strand
caacauguuuccaggacuu

SEQ ID NO: 1579407 - RNA, 19 nt, Homo sapiens
  misc_RNA (1)...(19): siRNA sense strand
ucaucacggucgcuguuua

SEQ ID NO: 1579408 - RNA, 19 nt, Homo sapiens
  misc_RNA (1)...(19): siRNA sense strand
ggagggaugcccagaaugg

SEQ ID NO: 1579409 - RNA, 19 nt, Homo sapiens
  misc_RNA (1)...(19): siRNA sense strand
gccuggaccucaacauguu

SEQ ID NO: 1579410 - RNA, 19 nt, Homo sapiens
  misc_RNA (1)...(19): siRNA sense strand
caccucgccuggccaguuu

SEQ ID NO: 1579411 - RNA, 19 nt, Homo sapiens
  misc_RNA (1)...(19): siRNA sense strand
ggaaaggauuuggguuggu

SEQ ID NO: 1579412 - RNA, 19 nt, Homo sapiens
  misc_RNA (1)...(19): siRNA sense strand
caucacggucgcuguuuaa

SEQ ID NO: 1579413 - RNA, 19 nt, Homo sapiens
  misc_RNA (1)...(19): siRNA sense strand
caaggugggucggagagau

SEQ ID NO: 1579414 - RNA, 19 nt, Homo sapiens
  misc_RNA (1)...(19): siRNA sense strand
gcaacacccaggcccuuau

SEQ ID NO: 1579415 - RNA, 19 nt, Homo sapiens
  misc_RNA (1)...(19): siRNA sense strand
gcagcaguuucucuccaau

SEQ ID NO: 1579416 - RNA, 19 nt, Homo sapiens
  misc_RNA (1)...(19): siRNA sense strand
cccaggcccuuaucaggaa

SEQ ID NO: 1579417 - RNA, 19 nt, Homo sapiens
  misc_RNA (1)...(19): siRNA sense strand
ucacggucgcuguuuaauu

SEQ ID NO: 1579418 - RNA, 19 nt, Homo sapiens
  misc_RNA (1)...(19): siRNA sense strand
uugccugcaccuuuaauua

SEQ ID NO: 1579419 - RNA, 19 nt, Homo sapiens
  misc_RNA (1)...(19): siRNA sense strand
caguuucucuccaauucau

SEQ ID NO: 1579420 - RNA, 19 nt, Homo sapiens
  misc_RNA (1)...(19): siRNA sense strand
ggccuggaccucaacaugu

SEQ ID NO: 1579421 - RNA, 19 nt, Homo sapiens
  misc_RNA (1)...(19): siRNA sense strand
gcaguuucucuccaauuca

SEQ ID NO: 1579422 - RNA, 19 nt, Homo sapiens
  misc_RNA (1)...(19): siRNA sense strand
ucggagagauagggaagug

SEQ ID NO: 1579423 - RNA, 19 nt, Homo sapiens
  misc_RNA (1)...(19): siRNA sense strand
agcaguuucucuccaauuc

SEQ ID NO: 1579424 - RNA, 19 nt, Homo sapiens
  misc_RNA (1)...(19): siRNA sense strand
cagcaguuucucuccaauu

SEQ ID NO: 1579425 - RNA, 19 nt, Homo sapiens
  misc_RNA (1)...(19): siRNA sense strand
caacacccaggcccuuauc

SEQ ID NO: 1579426 - RNA, 19 nt, Homo sapiens
  misc_RNA (1)...(19): siRNA sense strand
aaggugggucggagagaua

SEQ ID NO: 1579427 - RNA, 19 nt, Homo sapiens
  misc_RNA (1)...(19): siRNA sense strand
ucgcuggccuggaccucaa

SEQ ID NO: 1579428 - RNA, 19 nt, Homo sapiens
  misc_RNA (1)...(19): siRNA sense strand
acacagagguagagaagua

SEQ ID NO: 1579429 - RNA, 19 nt, Homo sapiens
  misc_RNA (1)...(19): siRNA sense strand
gggaaguucuguaggcuua

SEQ ID NO: 1579430 - RNA, 19 nt, Homo sapiens
  misc_RNA (1)...(19): siRNA sense strand
gcaaugaauuugaucacuu

SEQ ID NO: 1579431 - RNA, 19 nt, Homo sapiens
  misc_RNA (1)...(19): siRNA sense strand
gaaguucuguaggcuuaua

SEQ ID NO: 1579432 - RNA, 19 nt, Homo sapiens
  misc_RNA (1)...(19): siRNA sense strand
ucuguaggcuuauaacaua

SEQ ID NO: 1579433 - RNA, 19 nt, Homo sapiens
  misc_RNA (1)...(19): siRNA sense strand
uaacauacagucauucuuc

SEQ ID NO: 1579434 - RNA, 19 nt, Homo sapiens
  misc_RNA (1)...(19): siRNA sense strand
ggagggauguguuucuagu

SEQ ID NO: 1579435 - RNA, 19 nt, Homo sapiens
  misc_RNA (1)...(19): siRNA sense strand
gaaggugucagcaaugaau

SEQ ID NO: 1579436 - RNA, 19 nt, Homo sapiens
  misc_RNA (1)...(19): siRNA sense strand
caacccagauguccacagu

SEQ ID NO: 1579437 - RNA, 19 nt, Homo sapiens
  misc_RNA (1)...(19): siRNA sense strand
guagagaaguaggaaagga

SEQ ID NO: 1579438 - RNA, 19 nt, Homo sapiens
  misc_RNA (1)...(19): siRNA sense strand
ggauguguuucuagucuuc

SEQ ID NO: 1579439 - RNA, 19 nt, Homo sapiens
  misc_RNA (1)...(19): siRNA sense strand
gaauuugaucacuuuggua

SEQ ID NO: 1579440 - RNA, 19 nt, Homo sapiens
  misc_RNA (1)...(19): siRNA sense strand
guuggaaggugucagcaau

SEQ ID NO: 1579441 - RNA, 19 nt, Homo sapiens
  misc_RNA (1)...(19): siRNA sense strand
ucacuuugguauuucucua

SEQ ID NO: 1579442 - RNA, 19 nt, Homo sapiens
  misc_RNA (1)...(19): siRNA sense strand
aagcuccucucuccucaaa

SEQ ID NO: 1579443 - RNA, 19 nt, Homo sapiens
  misc_RNA (1)...(19): siRNA sense strand
guggagggauguguuucua

SEQ ID NO: 1579444 - RNA, 19 nt, Homo sapiens
  misc_RNA (1)...(19): siRNA sense strand
uggaaggugucagcaauga

SEQ ID NO: 1579445 - RNA, 19 nt, Homo sapiens
  misc_RNA (1)...(19): siRNA sense strand
ugaauuugaucacuuuggu

SEQ ID NO: 1579446 - RNA, 19 nt, Homo sapiens
  misc_RNA (1)...(19): siRNA sense strand
ugucagcaaugaauuugau

SEQ ID NO: 1579447 - RNA, 19 nt, Homo sapiens
  misc_RNA (1)...(19): siRNA sense strand
ccucaugucagcuguuuga

SEQ ID NO: 1579448 - RNA, 19 nt, Homo sapiens
  misc_RNA (1)...(19): siRNA sense strand
uggccuuccuuuaccgaua

SEQ ID NO: 1579449 - RNA, 19 nt, Homo sapiens
  misc_RNA (1)...(19): siRNA sense strand
ccaguggagggauguguuu

SEQ ID NO: 1579450 - RNA, 19 nt, Homo sapiens
  misc_RNA (1)...(19): siRNA sense strand
acccagauguccacaguuc

SEQ ID NO: 1579451 - RNA, 19 nt, Homo sapiens
  misc_RNA (1)...(19): siRNA sense strand
gggauguguuucuagucuu

SEQ ID NO: 1579452 - RNA, 19 nt, Homo sapiens
  misc_RNA (1)...(19): siRNA sense strand
ggaaggugucagcaaugaa

SEQ ID NO: 1579453 - RNA, 19 nt, Homo sapiens
  misc_RNA (1)...(19): siRNA sense strand
gcaucucccugcuauuuug

SEQ ID NO: 1579454 - RNA, 19 nt, Homo sapiens
  misc_RNA (1)...(19): siRNA sense strand
ggucugggaaguucuguag

SEQ ID NO: 1579455 - RNA, 19 nt, Homo sapiens
  misc_RNA (1)...(19): siRNA sense strand
ggaggcaccaacccagaug

SEQ ID NO: 1579456 - RNA, 19 nt, Homo sapiens
  misc_RNA (1)...(19): siRNA sense strand
ccucucuccucaaaccauu

SEQ ID NO: 1579457 - RNA, 19 nt, Homo sapiens
  misc_RNA (1)...(19): siRNA sense strand
gccuuugcccucucacuuu

SEQ ID NO: 1579458 - RNA, 19 nt, Homo sapiens
  misc_RNA (1)...(19): siRNA sense strand
caaaccauuuucuuccaaa

SEQ ID NO: 1579459 - RNA, 19 nt, Homo sapiens
  misc_RNA (1)...(19): siRNA sense strand
gagacacagagguagagaa

SEQ ID NO: 1579460 - RNA, 19 nt, Homo sapiens
  misc_RNA (1)...(19): siRNA sense strand
agacacagagguagagaag

SEQ ID NO: 1579461 - RNA, 19 nt, Homo sapiens
  misc_RNA (1)...(19): siRNA sense strand
ggugucagcaaugaauuug

SEQ ID NO: 1579462 - RNA, 19 nt, Homo sapiens
  misc_RNA (1)...(19): siRNA sense strand
gcuccucucuccucaaacc

SEQ ID NO: 1579463 - RNA, 19 nt, Homo sapiens
  misc_RNA (1)...(19): siRNA sense strand
ggccuuccuuuaccgauac

SEQ ID NO: 1579464 - RNA, 19 nt, Homo sapiens
  misc_RNA (1)...(19): siRNA sense strand
gcuuauaacauacagucau

SEQ ID NO: 1579465 - RNA, 19 nt, Homo sapiens
  misc_RNA (1)...(19): siRNA sense strand
gaaagcaggucucguggau

SEQ ID NO: 1579466 - RNA, 19 nt, Homo sapiens
  misc_RNA (1)...(19): siRNA sense strand
aagcaggucucguggauaa

SEQ ID NO: 1579467 - RNA, 19 nt, Homo sapiens
  misc_RNA (1)...(19): siRNA sense strand
cagaggaaguggacauuga

SEQ ID NO: 1579468 - RNA, 19 nt, Homo sapiens
  misc_RNA (1)...(19): siRNA sense strand
gcaggucucguggauaaua

SEQ ID NO: 1579469 - RNA, 19 nt, Homo sapiens
  misc_RNA (1)...(19): siRNA sense strand
gagcggugguucccaaaca

SEQ ID NO: 1579470 - RNA, 19 nt, Homo sapiens
  misc_RNA (1)...(19): siRNA sense strand
gggaaggcaucaccucaag

SEQ ID NO: 1579471 - RNA, 19 nt, Homo sapiens
  misc_RNA (1)...(19): siRNA sense strand
gcucgacccugaagcucuu

SEQ ID NO: 1579472 - RNA, 19 nt, Homo sapiens
  misc_RNA (1)...(19): siRNA sense strand
gaguggcucucaacagaca

SEQ ID NO: 1579473 - RNA, 19 nt, Homo sapiens
  misc_RNA (1)...(19): siRNA sense strand
guccugggauucagcuaaa

SEQ ID NO: 1579474 - RNA, 19 nt, Homo sapiens
  misc_RNA (1)...(19): siRNA sense strand
caaacacgaugugggaagu

SEQ ID NO: 1579475 - RNA, 19 nt, Homo sapiens
  misc_RNA (1)...(19): siRNA sense strand
gaaggcaucaccucaagac

SEQ ID NO: 1579476 - RNA, 19 nt, Homo sapiens
  misc_RNA (1)...(19): siRNA sense strand
cgaugugggaaguguguua

SEQ ID NO: 1579477 - RNA, 19 nt, Homo sapiens
  misc_RNA (1)...(19): siRNA sense strand
ggaaguguguuaaaaugca

SEQ ID NO: 1579478 - RNA, 19 nt, Homo sapiens
  misc_RNA (1)...(19): siRNA sense strand
ggucucguggauaauauuu

SEQ ID NO: 1579479 - RNA, 19 nt, Homo sapiens
  misc_RNA (1)...(19): siRNA sense strand
ggaaggcaucaccucaaga

SEQ ID NO: 1579480 - RNA, 19 nt, Homo sapiens
  misc_RNA (1)...(19): siRNA sense strand
gaugugggaaguguguuaa

SEQ ID NO: 1579481 - RNA, 19 nt, Homo sapiens
  misc_RNA (1)...(19): siRNA sense strand
caggucucguggauaauau

SEQ ID NO: 1579482 - RNA, 19 nt, Homo sapiens
  misc_RNA (1)...(19): siRNA sense strand
cgaaugcauuaugggagaa

SEQ ID NO: 1579483 - RNA, 19 nt, Homo sapiens
  misc_RNA (1)...(19): siRNA sense strand
ucucguggauaauauuucu

SEQ ID NO: 1579484 - RNA, 19 nt, Homo sapiens
  misc_RNA (1)...(19): siRNA sense strand
gaaugcauuaugggagaaa

SEQ ID NO: 1579485 - RNA, 19 nt, Homo sapiens
  misc_RNA (1)...(19): siRNA sense strand
ccagccgaaugcauuaugg

SEQ ID NO: 1579486 - RNA, 19 nt, Homo sapiens
  misc_RNA (1)...(19): siRNA sense strand
gaagaugucuccauguuuc

SEQ ID NO: 1579487 - RNA, 19 nt, Homo sapiens
  misc_RNA (1)...(19): siRNA sense strand
gaaugaaguugguggauug

SEQ ID NO: 1579488 - RNA, 19 nt, Homo sapiens
  misc_RNA (1)...(19): siRNA sense strand
ucacagaguucucauguau

SEQ ID NO: 1579489 - RNA, 19 nt, Homo sapiens
  misc_RNA (1)...(19): siRNA sense strand
ggccauggguuauaaauau

SEQ ID NO: 1579490 - RNA, 19 nt, Homo sapiens
  misc_RNA (1)...(19): siRNA sense strand
ggaguauacugaagaagaa

SEQ ID NO: 1579491 - RNA, 19 nt, Homo sapiens
  misc_RNA (1)...(19): siRNA sense strand
gaaagacaccagaaguauu

SEQ ID NO: 1579492 - RNA, 19 nt, Homo sapiens
  misc_RNA (1)...(19): siRNA sense strand
ggacuggccuacagagugu

SEQ ID NO: 1579493 - RNA, 19 nt, Homo sapiens
  misc_RNA (1)...(19): siRNA sense strand
caggaagccuacuuuguuu

SEQ ID NO: 1579494 - RNA, 19 nt, Homo sapiens
  misc_RNA (1)...(19): siRNA sense strand
gaagaucucugaguuagac

SEQ ID NO: 1579495 - RNA, 19 nt, Homo sapiens
  misc_RNA (1)...(19): siRNA sense strand
aagaagagcuagaggaugu

SEQ ID NO: 1579496 - RNA, 19 nt, Homo sapiens
  misc_RNA (1)...(19): siRNA sense strand
ugaaguugguggauuggua

SEQ ID NO: 1579497 - RNA, 19 nt, Homo sapiens
  misc_RNA (1)...(19): siRNA sense strand
cgacagagaagaaaguauu

SEQ ID NO: 1579498 - RNA, 19 nt, Homo sapiens
  misc_RNA (1)...(19): siRNA sense strand
guucugagguugaaaucuu

SEQ ID NO: 1579499 - RNA, 19 nt, Homo sapiens
  misc_RNA (1)...(19): siRNA sense strand
ugacaaggcaugugugaaa

SEQ ID NO: 1579500 - RNA, 19 nt, Homo sapiens
  misc_RNA (1)...(19): siRNA sense strand
caaugugccucaacucgaa

SEQ ID NO: 1579501 - RNA, 19 nt, Homo sapiens
  misc_RNA (1)...(19): siRNA sense strand
ccaggaagccuacuuuguu

SEQ ID NO: 1579502 - RNA, 19 nt, Homo sapiens
  misc_RNA (1)...(19): siRNA sense strand
ggacauguuccacuacuug

SEQ ID NO: 1579503 - RNA, 19 nt, Homo sapiens
  misc_RNA (1)...(19): siRNA sense strand
uuacaggaaugccuuauca

SEQ ID NO: 1579504 - RNA, 19 nt, Homo sapiens
  misc_RNA (1)...(19): siRNA sense strand
gaaaguauuuuguggaugu

SEQ ID NO: 1579505 - RNA, 19 nt, Homo sapiens
  misc_RNA (1)...(19): siRNA sense strand
ggacuccuuuccuccauug

SEQ ID NO: 1579506 - RNA, 19 nt, Homo sapiens
  misc_RNA (1)...(19): siRNA sense strand
gaaguugguggauugguaa

SEQ ID NO: 1579507 - RNA, 19 nt, Homo sapiens
  misc_RNA (1)...(19): siRNA sense strand
cuuggcagcucaacacuaa

SEQ ID NO: 1579508 - RNA, 19 nt, Homo sapiens
  misc_RNA (1)...(19): siRNA sense strand
aaagacaccagaaguauug

SEQ ID NO: 1579509 - RNA, 19 nt, Homo sapiens
  misc_RNA (1)...(19): siRNA sense strand
ggaagaagagcuagaggau

SEQ ID NO: 1579510 - RNA, 19 nt, Homo sapiens
  misc_RNA (1)...(19): siRNA sense strand
cauauugaauccaggaaau

SEQ ID NO: 1579511 - RNA, 19 nt, Homo sapiens
  misc_RNA (1)...(19): siRNA sense strand
aaagacaacuugcuuacag

SEQ ID NO: 1579512 - RNA, 19 nt, Homo sapiens
  misc_RNA (1)...(19): siRNA sense strand
aaagaaaggucuggcuuca

SEQ ID NO: 1579513 - RNA, 19 nt, Homo sapiens
  misc_RNA (1)...(19): siRNA sense strand
ucgaagaugucuccauguu

SEQ ID NO: 1579514 - RNA, 19 nt, Homo sapiens
  misc_RNA (1)...(19): siRNA sense strand
caggaaaucucggcgaaga

SEQ ID NO: 1579515 - RNA, 19 nt, Homo sapiens
  misc_RNA (1)...(19): siRNA sense strand
gcagcucaacacuaaauaa

SEQ ID NO: 1579516 - RNA, 19 nt, Homo sapiens
  misc_RNA (1)...(19): siRNA sense strand
gaagagcaucagcuacuug

SEQ ID NO: 1579517 - RNA, 19 nt, Homo sapiens
  misc_RNA (1)...(19): siRNA sense strand
caacuugcuuacaggaaug

SEQ ID NO: 1579518 - RNA, 19 nt, Homo sapiens
  misc_RNA (1)...(19): siRNA sense strand
cagagaacauuuggacaga

SEQ ID NO: 1579519 - RNA, 19 nt, Homo sapiens
  misc_RNA (1)...(19): siRNA sense strand
cgacuugaauacagugugu

SEQ ID NO: 1579520 - RNA, 19 nt, Homo sapiens
  misc_RNA (1)...(19): siRNA sense strand
agacaaaugcucucacaga

SEQ ID NO: 1579521 - RNA, 19 nt, Homo sapiens
  misc_RNA (1)...(19): siRNA sense strand
uagaggaugugcccugguu

SEQ ID NO: 1579522 - RNA, 19 nt, Homo sapiens
  misc_RNA (1)...(19): siRNA sense strand
agaaugaaguugguggauu

SEQ ID NO: 1579523 - RNA, 19 nt, Homo sapiens
  misc_RNA (1)...(19): siRNA sense strand
ucccucugcugacuaaaua

SEQ ID NO: 1579524 - RNA, 19 nt, Homo sapiens
  misc_RNA (1)...(19): siRNA sense strand
gguggaguauacugaagaa

SEQ ID NO: 1579525 - RNA, 19 nt, Homo sapiens
  misc_RNA (1)...(19): siRNA sense strand
gaaguucugagguugaaau

SEQ ID NO: 1579526 - RNA, 19 nt, Homo sapiens
  misc_RNA (1)...(19): siRNA sense strand
caacaagggaagcagcaaa

SEQ ID NO: 1579527 - RNA, 19 nt, Homo sapiens
  misc_RNA (1)...(19): siRNA sense strand
gcagcgacuugaauacagu

SEQ ID NO: 1579528 - RNA, 19 nt, Homo sapiens
  misc_RNA (1)...(19): siRNA sense strand
gaagauguucagaaacuag

SEQ ID NO: 1579529 - RNA, 19 nt, Homo sapiens
  misc_RNA (1)...(19): siRNA sense strand
cagcucaacacuaaauaaa

SEQ ID NO: 1579530 - RNA, 19 nt, Homo sapiens
  misc_RNA (1)...(19): siRNA sense strand
cggaagaucucugaguuag

SEQ ID NO: 1579531 - RNA, 19 nt, Homo sapiens
  misc_RNA (1)...(19): siRNA sense strand
ugaaagacaccagaaguau

SEQ ID NO: 1579532 - RNA, 19 nt, Homo sapiens
  misc_RNA (1)...(19): siRNA sense strand
ggaagccuacuuuguuuca

SEQ ID NO: 1579533 - RNA, 19 nt, Homo sapiens
  misc_RNA (1)...(19): siRNA sense strand
ucucugaguuagacaaaug

SEQ ID NO: 1579534 - RNA, 19 nt, Homo sapiens
  misc_RNA (1)...(19): siRNA sense strand
gaacauuuggacagaggaa

SEQ ID NO: 1579535 - RNA, 19 nt, Homo sapiens
  misc_RNA (1)...(19): siRNA sense strand
ugaggccgguggcuggaua

SEQ ID NO: 1579536 - RNA, 19 nt, Homo sapiens
  misc_RNA (1)...(19): siRNA sense strand
gcucaacacuaaauaaacc

SEQ ID NO: 1579537 - RNA, 19 nt, Homo sapiens
  misc_RNA (1)...(19): siRNA sense strand
gacagagaagaaaguauuu

SEQ ID NO: 1579538 - RNA, 19 nt, Homo sapiens
  misc_RNA (1)...(19): siRNA sense strand
acagaguucucauguaugg

SEQ ID NO: 1579539 - RNA, 19 nt, Homo sapiens
  misc_RNA (1)...(19): siRNA sense strand
gcugaccacccaggauuua

SEQ ID NO: 1579540 - RNA, 19 nt, Homo sapiens
  misc_RNA (1)...(19): siRNA sense strand
cgaagagcaucagcuacuu

SEQ ID NO: 1579541 - RNA, 19 nt, Homo sapiens
  misc_RNA (1)...(19): siRNA sense strand
cgaagaugucuccauguuu

SEQ ID NO: 1579542 - RNA, 19 nt, Homo sapiens
  misc_RNA (1)...(19): siRNA sense strand
ggaagcagcaaacgugaag

SEQ ID NO: 1579543 - RNA, 19 nt, Homo sapiens
  misc_RNA (1)...(19): siRNA sense strand
aaauaggucuggcgucucu

SEQ ID NO: 1579544 - RNA, 19 nt, Homo sapiens
  misc_RNA (1)...(19): siRNA sense strand
gauccuaaguuugcucagu

SEQ ID NO: 1579545 - RNA, 19 nt, Homo sapiens
  misc_RNA (1)...(19): siRNA sense strand
ggacugugagugugggaaa

SEQ ID NO: 1579546 - RNA, 19 nt, Homo sapiens
  misc_RNA (1)...(19): siRNA sense strand
uuucaaaccacuauuguga

SEQ ID NO: 1579547 - RNA, 19 nt, Homo sapiens
  misc_RNA (1)...(19): siRNA sense strand
gaaccaauaucuggggauu

SEQ ID NO: 1579548 - RNA, 19 nt, Homo sapiens
  misc_RNA (1)...(19): siRNA sense strand
ccagaaguauugaaaaugu

SEQ ID NO: 1579549 - RNA, 19 nt, Homo sapiens
  misc_RNA (1)...(19): siRNA sense strand
cugaaagacaccagaagua

SEQ ID NO: 1579550 - RNA, 19 nt, Homo sapiens
  misc_RNA (1)...(19): siRNA sense strand
acacacagaguauugaaau

SEQ ID NO: 1579551 - RNA, 19 nt, Homo sapiens
  misc_RNA (1)...(19): siRNA sense strand
cuacagagaggacaaugug

SEQ ID NO: 1579552 - RNA, 19 nt, Homo sapiens
  misc_RNA (1)...(19): siRNA sense strand
gccauggguuauaaauaug

SEQ ID NO: 1579553 - RNA, 19 nt, Homo sapiens
  misc_RNA (1)...(19): siRNA sense strand
gauguggccauggguuaua

SEQ ID NO: 1579554 - RNA, 19 nt, Homo sapiens
  misc_RNA (1)...(19): siRNA sense strand
ccacuauugugacgcugaa

SEQ ID NO: 1579555 - RNA, 19 nt, Homo sapiens
  misc_RNA (1)...(19): siRNA sense strand
ugaaaucuuuguggacugu

SEQ ID NO: 1579556 - RNA, 19 nt, Homo sapiens
  misc_RNA (1)...(19): siRNA sense strand
cacacagaguauugaaauu

SEQ ID NO: 1579557 - RNA, 19 nt, Homo sapiens
  misc_RNA (1)...(19): siRNA sense strand
acaacuugcuuacaggaau

SEQ ID NO: 1579558 - RNA, 19 nt, Homo sapiens
  misc_RNA (1)...(19): siRNA sense strand
ggaaaucucggcgaagaag

SEQ ID NO: 1579559 - RNA, 19 nt, Homo sapiens
  misc_RNA (1)...(19): siRNA sense strand
gcacgcccuuucugacaag

SEQ ID NO: 1579560 - RNA, 19 nt, Homo sapiens
  misc_RNA (1)...(19): siRNA sense strand
uuagacaaaugcucucaca

SEQ ID NO: 1579561 - RNA, 19 nt, Homo sapiens
  misc_RNA (1)...(19): siRNA sense strand
gacagaggaagaagagcua

SEQ ID NO: 1579562 - RNA, 19 nt, Homo sapiens
  misc_RNA (1)...(19): siRNA sense strand
gacaaggcaugugugaaag

SEQ ID NO: 1579563 - RNA, 19 nt, Homo sapiens
  misc_RNA (1)...(19): siRNA sense strand
gacaccagaaguauugaaa

SEQ ID NO: 1579564 - RNA, 19 nt, Homo sapiens
  misc_RNA (1)...(19): siRNA sense strand
ggaaaacagaauucaauga

SEQ ID NO: 1579565 - RNA, 19 nt, Homo sapiens
  misc_RNA (1)...(19): siRNA sense strand
acacagaguauugaaauuc

SEQ ID NO: 1579566 - RNA, 19 nt, Homo sapiens
  misc_RNA (1)...(19): siRNA sense strand
gaucucugaguuagacaaa

SEQ ID NO: 1579567 - RNA, 19 nt, Homo sapiens
  misc_RNA (1)...(19): siRNA sense strand
ggaagaucucugaguuaga

SEQ ID NO: 1579568 - RNA, 19 nt, Homo sapiens
  misc_RNA (1)...(19): siRNA sense strand
gugucaacaugguucauau

SEQ ID NO: 1579569 - RNA, 19 nt, Homo sapiens
  misc_RNA (1)...(19): siRNA sense strand
ugaagcugcuaccgaaagu

SEQ ID NO: 1579570 - RNA, 19 nt, Homo sapiens
  misc_RNA (1)...(19): siRNA sense strand
cuugggacauguuccacua

SEQ ID NO: 1579571 - RNA, 19 nt, Homo sapiens
  misc_RNA (1)...(19): siRNA sense strand
caaacucuaucccacucau

SEQ ID NO: 1579572 - RNA, 19 nt, Homo sapiens
  misc_RNA (1)...(19): siRNA sense strand
ggcaagacagcaguuguuu

SEQ ID NO: 1579573 - RNA, 19 nt, Homo sapiens
  misc_RNA (1)...(19): siRNA sense strand
gcccgaagagcaucagcua

SEQ ID NO: 1579574 - RNA, 19 nt, Homo sapiens
  misc_RNA (1)...(19): siRNA sense strand
gucaacaugguucauauug

SEQ ID NO: 1579575 - RNA, 19 nt, Homo sapiens
  misc_RNA (1)...(19): siRNA sense strand
cacagaguauugaaauucu

SEQ ID NO: 1579576 - RNA, 19 nt, Homo sapiens
  misc_RNA (1)...(19): siRNA sense strand
ucaauuacccgucccuucu

SEQ ID NO: 1579577 - RNA, 19 nt, Homo sapiens
  misc_RNA (1)...(19): siRNA sense strand
ccaaagacaacuugcuuac

SEQ ID NO: 1579578 - RNA, 19 nt, Homo sapiens
  misc_RNA (1)...(19): siRNA sense strand
caaucgaguuuggccuuug

SEQ ID NO: 1579579 - RNA, 19 nt, Homo sapiens
  misc_RNA (1)...(19): siRNA sense strand
gcugaauccuccagagaac

SEQ ID NO: 1579580 - RNA, 19 nt, Homo sapiens
  misc_RNA (1)...(19): siRNA sense strand
cauguaugguucugagcuu

SEQ ID NO: 1579581 - RNA, 19 nt, Homo sapiens
  misc_RNA (1)...(19): siRNA sense strand
uaccgaaaguggcaagaca

SEQ ID NO: 1579582 - RNA, 19 nt, Homo sapiens
  misc_RNA (1)...(19): siRNA sense strand
aagccuacuuuguuucaga

SEQ ID NO: 1579583 - RNA, 19 nt, Homo sapiens
  misc_RNA (1)...(19): siRNA sense strand
aaaccuaacucuggcaaaa

SEQ ID NO: 1579584 - RNA, 19 nt, Homo sapiens
  misc_RNA (1)...(19): siRNA sense strand
gaugauguuuuccaguaaa

SEQ ID NO: 1579585 - RNA, 19 nt, Homo sapiens
  misc_RNA (1)...(19): siRNA sense strand
auacuucaaucccuacaca

SEQ ID NO: 1579586 - RNA, 19 nt, Homo sapiens
  misc_RNA (1)...(19): siRNA sense strand
ccacuucugugugaucuug

SEQ ID NO: 1579587 - RNA, 19 nt, Homo sapiens
  misc_RNA (1)...(19): siRNA sense strand
caaaucaccacuucugugu

SEQ ID NO: 1579588 - RNA, 19 nt, Homo sapiens
  misc_RNA (1)...(19): siRNA sense strand
gcggguggguggucaaauc

SEQ ID NO: 1579589 - RNA, 19 nt, Homo sapiens
  misc_RNA (1)...(19): siRNA sense strand
cgauagggaugcagaggau

SEQ ID NO: 1579590 - RNA, 19 nt, Homo sapiens
  misc_RNA (1)...(19): siRNA sense strand
ggucaaaucaccacuucug

SEQ ID NO: 1579591 - RNA, 19 nt, Homo sapiens
  misc_RNA (1)...(19): siRNA sense strand
caaagucaccaggcucaaa

SEQ ID NO: 1579592 - RNA, 19 nt, Homo sapiens
  misc_RNA (1)...(19): siRNA sense strand
ucagugcccugcccuagca

SEQ ID NO: 1579593 - RNA, 19 nt, Homo sapiens
  misc_RNA (1)...(19): siRNA sense strand
aaagucaccaggcucaaau

SEQ ID NO: 1579594 - RNA, 19 nt, Homo sapiens
  misc_RNA (1)...(19): siRNA sense strand
gggaugcagaggaucagaa

SEQ ID NO: 1579595 - RNA, 19 nt, Homo sapiens
  misc_RNA (1)...(19): siRNA sense strand
cagccuggccuccaaaguc

SEQ ID NO: 1579596 - RNA, 19 nt, Homo sapiens
  misc_RNA (1)...(19): siRNA sense strand
ggaccugacuuguauugua

SEQ ID NO: 1579597 - RNA, 19 nt, Homo sapiens
  misc_RNA (1)...(19): siRNA sense strand
gaagauagaagacuggaau

SEQ ID NO: 1579598 - RNA, 19 nt, Homo sapiens
  misc_RNA (1)...(19): siRNA sense strand
gaccugacuuguauuguau

SEQ ID NO: 1579599 - RNA, 19 nt, Homo sapiens
  misc_RNA (1)...(19): siRNA sense strand
gcuccaggcugacauuuca

SEQ ID NO: 1579600 - RNA, 19 nt, Homo sapiens
  misc_RNA (1)...(19): siRNA sense strand
gaucauguauccauuucca

SEQ ID NO: 1579601 - RNA, 19 nt, Homo sapiens
  misc_RNA (1)...(19): siRNA sense strand
gcucauuucuggacuagag

SEQ ID NO: 1579602 - RNA, 19 nt, Homo sapiens
  misc_RNA (1)...(19): siRNA sense strand
ggaaugugguggaacucau

SEQ ID NO: 1579603 - RNA, 19 nt, Homo sapiens
  misc_RNA (1)...(19): siRNA sense strand
gauagaagacuggaaugug

SEQ ID NO: 1579604 - RNA, 19 nt, Homo sapiens
  misc_RNA (1)...(19): siRNA sense strand
gaucacaugcucauuucug

SEQ ID NO: 1579605 - RNA, 19 nt, Homo sapiens
  misc_RNA (1)...(19): siRNA sense strand
uugcaacaguucccacaaa

SEQ ID NO: 1579606 - RNA, 19 nt, Homo sapiens
  misc_RNA (1)...(19): siRNA sense strand
caucuuccacugcaacauu

SEQ ID NO: 1579607 - RNA, 19 nt, Homo sapiens
  misc_RNA (1)...(19): siRNA sense strand
gcccagauuggaucaugua

SEQ ID NO: 1579608 - RNA, 19 nt, Homo sapiens
  misc_RNA (1)...(19): siRNA sense strand
gaaugugguggaacucaug

SEQ ID NO: 1579609 - RNA, 19 nt, Homo sapiens
  misc_RNA (1)...(19): siRNA sense strand
cauggugaaugaagaaguc

SEQ ID NO: 1579610 - RNA, 19 nt, Homo sapiens
  misc_RNA (1)...(19): siRNA sense strand
ucauguauccauuuccaaa

SEQ ID NO: 1579611 - RNA, 19 nt, Homo sapiens
  misc_RNA (1)...(19): siRNA sense strand
uggaucacaugcucauuuc

SEQ ID NO: 1579612 - RNA, 19 nt, Homo sapiens
  misc_RNA (1)...(19): siRNA sense strand
caagaacgcaguggucauc

SEQ ID NO: 1579613 - RNA, 19 nt, Homo sapiens
  misc_RNA (1)...(19): siRNA sense strand
caacaguucccacaaaaga

SEQ ID NO: 1579614 - RNA, 19 nt, Homo sapiens
  misc_RNA (1)...(19): siRNA sense strand
gaggucauccuagagaaga

SEQ ID NO: 1579615 - RNA, 19 nt, Homo sapiens
  misc_RNA (1)...(19): siRNA sense strand
uuaaggacuuggaguuugg

SEQ ID NO: 1579616 - RNA, 19 nt, Homo sapiens
  misc_RNA (1)...(19): siRNA sense strand
cauuaaggacuuggaguuu

SEQ ID NO: 1579617 - RNA, 19 nt, Homo sapiens
  misc_RNA (1)...(19): siRNA sense strand
agacuggaaugugguggaa

SEQ ID NO: 1579618 - RNA, 19 nt, Homo sapiens
  misc_RNA (1)...(19): siRNA sense strand
ggucauccuagagaagaua

SEQ ID NO: 1579619 - RNA, 19 nt, Homo sapiens
  misc_RNA (1)...(19): siRNA sense strand
ugguggaacucauggugaa

SEQ ID NO: 1579620 - RNA, 19 nt, Homo sapiens
  misc_RNA (1)...(19): siRNA sense strand
caagcuguguuggccauag

SEQ ID NO: 1579621 - RNA, 19 nt, Homo sapiens
  misc_RNA (1)...(19): siRNA sense strand
caugcucauuucuggacua

SEQ ID NO: 1579622 - RNA, 19 nt, Homo sapiens
  misc_RNA (1)...(19): siRNA sense strand
cuggaucacaugcucauuu

SEQ ID NO: 1579623 - RNA, 19 nt, Homo sapiens
  misc_RNA (1)...(19): siRNA sense strand
auuaaggacuuggaguuug

SEQ ID NO: 1579624 - RNA, 19 nt, Homo sapiens
  misc_RNA (1)...(19): siRNA sense strand
ccugacuuguauuguauug

SEQ ID NO: 1579625 - RNA, 19 nt, Homo sapiens
  misc_RNA (1)...(19): siRNA sense strand
guauccauuuccaaaccaa

SEQ ID NO: 1579626 - RNA, 19 nt, Homo sapiens
  misc_RNA (1)...(19): siRNA sense strand
acauuaaggacuuggaguu

SEQ ID NO: 1579627 - RNA, 19 nt, Homo sapiens
  misc_RNA (1)...(19): siRNA sense strand
aagcuguguuggccauaga

SEQ ID NO: 1579628 - RNA, 19 nt, Homo sapiens
  misc_RNA (1)...(19): siRNA sense strand
ugacauuucaccagcuuag

SEQ ID NO: 1579629 - RNA, 19 nt, Homo sapiens
  misc_RNA (1)...(19): siRNA sense strand
gaaagaggcccaucacauu

SEQ ID NO: 1579630 - RNA, 19 nt, Homo sapiens
  misc_RNA (1)...(19): siRNA sense strand
gaagagaacaaccgaagaa

SEQ ID NO: 1579631 - RNA, 19 nt, Homo sapiens
  misc_RNA (1)...(19): siRNA sense strand
gagaacaaccgaagaaaga

SEQ ID NO: 1579632 - RNA, 19 nt, Homo sapiens
  misc_RNA (1)...(19): siRNA sense strand
ggaagucuguccucccaaa

SEQ ID NO: 1579633 - RNA, 19 nt, Homo sapiens
  misc_RNA (1)...(19): siRNA sense strand
ccagugggcuuguuauaug

SEQ ID NO: 1579634 - RNA, 19 nt, Homo sapiens
  misc_RNA (1)...(19): siRNA sense strand
ggaacaucauuacagcuaa

SEQ ID NO: 1579635 - RNA, 19 nt, Homo sapiens
  misc_RNA (1)...(19): siRNA sense strand
agaaagaucuuccagaacu

SEQ ID NO: 1579636 - RNA, 19 nt, Homo sapiens
  misc_RNA (1)...(19): siRNA sense strand
ggaaagaggcccaucacau

SEQ ID NO: 1579637 - RNA, 19 nt, Homo sapiens
  misc_RNA (1)...(19): siRNA sense strand
ggaaacuccuuugauggaa

SEQ ID NO: 1579638 - RNA, 19 nt, Homo sapiens
  misc_RNA (1)...(19): siRNA sense strand
gaacaucauuacagcuaag

SEQ ID NO: 1579639 - RNA, 19 nt, Homo sapiens
  misc_RNA (1)...(19): siRNA sense strand
gaagccauccagagcauuu

SEQ ID NO: 1579640 - RNA, 19 nt, Homo sapiens
  misc_RNA (1)...(19): siRNA sense strand
cugcaacccugcuuucaaa

SEQ ID NO: 1579641 - RNA, 19 nt, Homo sapiens
  misc_RNA (1)...(19): siRNA sense strand
caggauaaauuggguguug

SEQ ID NO: 1579642 - RNA, 19 nt, Homo sapiens
  misc_RNA (1)...(19): siRNA sense strand
gugaaacauuccagucuga

SEQ ID NO: 1579643 - RNA, 19 nt, Homo sapiens
  misc_RNA (1)...(19): siRNA sense strand
gagcggguguugguagaaa

SEQ ID NO: 1579644 - RNA, 19 nt, Homo sapiens
  misc_RNA (1)...(19): siRNA sense strand
gaaacauuccagucugauu

SEQ ID NO: 1579645 - RNA, 19 nt, Homo sapiens
  misc_RNA (1)...(19): siRNA sense strand
gaaguucuccuaucaacag

SEQ ID NO: 1579646 - RNA, 19 nt, Homo sapiens
  misc_RNA (1)...(19): siRNA sense strand
ucaagaugcaagacacuua

SEQ ID NO: 1579647 - RNA, 19 nt, Homo sapiens
  misc_RNA (1)...(19): siRNA sense strand
gaaagaucuuccagaacuc

SEQ ID NO: 1579648 - RNA, 19 nt, Homo sapiens
  misc_RNA (1)...(19): siRNA sense strand
aagcagcucuaaugacgaa

SEQ ID NO: 1579649 - RNA, 19 nt, Homo sapiens
  misc_RNA (1)...(19): siRNA sense strand
gaacaaccgaagaaagauc

SEQ ID NO: 1579650 - RNA, 19 nt, Homo sapiens
  misc_RNA (1)...(19): siRNA sense strand
cugcggagcucuucguguu

SEQ ID NO: 1579651 - RNA, 19 nt, Homo sapiens
  misc_RNA (1)...(19): siRNA sense strand
ccaggugguucgugaaaca

SEQ ID NO: 1579652 - RNA, 19 nt, Homo sapiens
  misc_RNA (1)...(19): siRNA sense strand
gcucuucguguuucuguuu

SEQ ID NO: 1579653 - RNA, 19 nt, Homo sapiens
  misc_RNA (1)...(19): siRNA sense strand
guacacaggaucaaggaau

SEQ ID NO: 1579654 - RNA, 19 nt, Homo sapiens
  misc_RNA (1)...(19): siRNA sense strand
caaagcuccuucacacucu

SEQ ID NO: 1579655 - RNA, 19 nt, Homo sapiens
  misc_RNA (1)...(19): siRNA sense strand
gcacugcaacccugcuuuc

SEQ ID NO: 1579656 - RNA, 19 nt, Homo sapiens
  misc_RNA (1)...(19): siRNA sense strand
gcucuaaugacgaagaaga

SEQ ID NO: 1579657 - RNA, 19 nt, Homo sapiens
  misc_RNA (1)...(19): siRNA sense strand
gccaaagcagcucuaauga

SEQ ID NO: 1579658 - RNA, 19 nt, Homo sapiens
  misc_RNA (1)...(19): siRNA sense strand
cuucuuguguguccuuuga

SEQ ID NO: 1579659 - RNA, 19 nt, Homo sapiens
  misc_RNA (1)...(19): siRNA sense strand
gcggcaaaccagugcauuu

SEQ ID NO: 1579660 - RNA, 19 nt, Homo sapiens
  misc_RNA (1)...(19): siRNA sense strand
gcggagcucuucguguuuc

SEQ ID NO: 1579661 - RNA, 19 nt, Homo sapiens
  misc_RNA (1)...(19): siRNA sense strand
ugccaaagcagcucuaaug

SEQ ID NO: 1579662 - RNA, 19 nt, Homo sapiens
  misc_RNA (1)...(19): siRNA sense strand
gcaauaugaagcuucuugu

SEQ ID NO: 1579663 - RNA, 19 nt, Homo sapiens
  misc_RNA (1)...(19): siRNA sense strand
aaacauuccagucugauuc

SEQ ID NO: 1579664 - RNA, 19 nt, Homo sapiens
  misc_RNA (1)...(19): siRNA sense strand
gagacaaagcuccuucaca

SEQ ID NO: 1579665 - RNA, 19 nt, Homo sapiens
  misc_RNA (1)...(19): siRNA sense strand
ccagucugauuccaucuca

SEQ ID NO: 1579666 - RNA, 19 nt, Homo sapiens
  misc_RNA (1)...(19): siRNA sense strand
caaaucaagaugcaagaca

SEQ ID NO: 1579667 - RNA, 19 nt, Homo sapiens
  misc_RNA (1)...(19): siRNA sense strand
guucuccuaucaacaguca

SEQ ID NO: 1579668 - RNA, 19 nt, Homo sapiens
  misc_RNA (1)...(19): siRNA sense strand
ggccagugggcuuguuaua

SEQ ID NO: 1579669 - RNA, 19 nt, Homo sapiens
  misc_RNA (1)...(19): siRNA sense strand
cagcucuaaugacgaagaa

SEQ ID NO: 1579670 - RNA, 19 nt, Homo sapiens
  misc_RNA (1)...(19): siRNA sense strand
uaugaagcuucuugugugu

SEQ ID NO: 1579671 - RNA, 19 nt, Homo sapiens
  misc_RNA (1)...(19): siRNA sense strand
aaagaggcccaucacauuc

SEQ ID NO: 1579672 - RNA, 19 nt, Homo sapiens
  misc_RNA (1)...(19): siRNA sense strand
ggugguucgugaaacauuc

SEQ ID NO: 1579673 - RNA, 19 nt, Homo sapiens
  misc_RNA (1)...(19): siRNA sense strand
aagcuaggccaccaggaua

SEQ ID NO: 1579674 - RNA, 19 nt, Homo sapiens
  misc_RNA (1)...(19): siRNA sense strand
caucauuacagcuaagaga

SEQ ID NO: 1579675 - RNA, 19 nt, Homo sapiens
  misc_RNA (1)...(19): siRNA sense strand
gcccggagucucuggcuuu

SEQ ID NO: 1579676 - RNA, 19 nt, Homo sapiens
  misc_RNA (1)...(19): siRNA sense strand
caagcuaggccaccaggau

SEQ ID NO: 1579677 - RNA, 19 nt, Homo sapiens
  misc_RNA (1)...(19): siRNA sense strand
ccagaagcaccuuucacuu

SEQ ID NO: 1579678 - RNA, 19 nt, Homo sapiens
  misc_RNA (1)...(19): siRNA sense strand
aauaugaagcuucuugugu

SEQ ID NO: 1579679 - RNA, 19 nt, Homo sapiens
  misc_RNA (1)...(19): siRNA sense strand
caagaugcaagacacuuag

SEQ ID NO: 1579680 - RNA, 19 nt, Homo sapiens
  misc_RNA (1)...(19): siRNA sense strand
cugcaacaaugagcgguuu

SEQ ID NO: 1579681 - RNA, 19 nt, Homo sapiens
  misc_RNA (1)...(19): siRNA sense strand
aaacuccuuugauggaagu

SEQ ID NO: 1579682 - RNA, 19 nt, Homo sapiens
  misc_RNA (1)...(19): siRNA sense strand
caaagccggaccugugaau

SEQ ID NO: 1579683 - RNA, 19 nt, Homo sapiens
  misc_RNA (1)...(19): siRNA sense strand
caagcugcauggccucucu

SEQ ID NO: 1579684 - RNA, 19 nt, Homo sapiens
  misc_RNA (1)...(19): siRNA sense strand
cauuacagcuaagagaagu

SEQ ID NO: 1579685 - RNA, 19 nt, Homo sapiens
  misc_RNA (1)...(19): siRNA sense strand
cccggagucucuggcuuua

SEQ ID NO: 1579686 - RNA, 19 nt, Homo sapiens
  misc_RNA (1)...(19): siRNA sense strand
gccagugggcuuguuauau

SEQ ID NO: 1579687 - RNA, 19 nt, Homo sapiens
  misc_RNA (1)...(19): siRNA sense strand
ugaaucaccaaaucaagau

SEQ ID NO: 1579688 - RNA, 19 nt, Homo sapiens
  misc_RNA (1)...(19): siRNA sense strand
caauaugaagcuucuugug

SEQ ID NO: 1579689 - RNA, 19 nt, Homo sapiens
  misc_RNA (1)...(19): siRNA sense strand
gucaaagccggaccuguga

SEQ ID NO: 1579690 - RNA, 19 nt, Homo sapiens
  misc_RNA (1)...(19): siRNA sense strand
aggaacaucauuacagcua

SEQ ID NO: 1579691 - RNA, 19 nt, Homo sapiens
  misc_RNA (1)...(19): siRNA sense strand
cccaucaggaacaucauua

SEQ ID NO: 1579692 - RNA, 19 nt, Homo sapiens
  misc_RNA (1)...(19): siRNA sense strand
gcacuggugaagcccauca

SEQ ID NO: 1579693 - RNA, 19 nt, Homo sapiens
  misc_RNA (1)...(19): siRNA sense strand
gcagcucuaaugacgaaga

SEQ ID NO: 1579694 - RNA, 19 nt, Homo sapiens
  misc_RNA (1)...(19): siRNA sense strand
aaagcuccuucacacucua

SEQ ID NO: 1579695 - RNA, 19 nt, Homo sapiens
  misc_RNA (1)...(19): siRNA sense strand
uacacaggaucaaggaauc

SEQ ID NO: 1579696 - RNA, 19 nt, Homo sapiens
  misc_RNA (1)...(19): siRNA sense strand
cuaaugacgaagaagagaa

SEQ ID NO: 1579697 - RNA, 19 nt, Homo sapiens
  misc_RNA (1)...(19): siRNA sense strand
gcuaggccaccaggauaaa

SEQ ID NO: 1579698 - RNA, 19 nt, Homo sapiens
  misc_RNA (1)...(19): siRNA sense strand
ccaggaaagaggcccauca

SEQ ID NO: 1579699 - RNA, 19 nt, Homo sapiens
  misc_RNA (1)...(19): siRNA sense strand
agucuguccucccaaacuu

SEQ ID NO: 1579700 - RNA, 19 nt, Homo sapiens
  misc_RNA (1)...(19): siRNA sense strand
uggugaagcccaucaggaa

SEQ ID NO: 1579701 - RNA, 19 nt, Homo sapiens
  misc_RNA (1)...(19): siRNA sense strand
ucacccaaggccaccauuu

SEQ ID NO: 1579702 - RNA, 19 nt, Homo sapiens
  misc_RNA (1)...(19): siRNA sense strand
caucaggaacaucauuaca

SEQ ID NO: 1579703 - RNA, 19 nt, Homo sapiens
  misc_RNA (1)...(19): siRNA sense strand
gugaagcccaucaggaaca

SEQ ID NO: 1579704 - RNA, 19 nt, Homo sapiens
  misc_RNA (1)...(19): siRNA sense strand
ccaaagcagcucuaaugac

SEQ ID NO: 1579705 - RNA, 19 nt, Homo sapiens
  misc_RNA (1)...(19): siRNA sense strand
gcccaucacauuccagaag

SEQ ID NO: 1579706 - RNA, 19 nt, Homo sapiens
  misc_RNA (1)...(19): siRNA sense strand
uccagagcauuuccagaug

SEQ ID NO: 1579707 - RNA, 19 nt, Homo sapiens
  misc_RNA (1)...(19): siRNA sense strand
gagcucuucguguuucugu

SEQ ID NO: 1579708 - RNA, 19 nt, Homo sapiens
  misc_RNA (1)...(19): siRNA sense strand
gcccaucaggaacaucauu

SEQ ID NO: 1579709 - RNA, 19 nt, Homo sapiens
  misc_RNA (1)...(19): siRNA sense strand
gaagagagggucauuauua

SEQ ID NO: 1579710 - RNA, 19 nt, Homo sapiens
  misc_RNA (1)...(19): siRNA sense strand
gcaaagaaccgaaaguaua

SEQ ID NO: 1579711 - RNA, 19 nt, Homo sapiens
  misc_RNA (1)...(19): siRNA sense strand
gaagggagaugggaugaua

SEQ ID NO: 1579712 - RNA, 19 nt, Homo sapiens
  misc_RNA (1)...(19): siRNA sense strand
gagaugggaugauagauaa

SEQ ID NO: 1579713 - RNA, 19 nt, Homo sapiens
  misc_RNA (1)...(19): siRNA sense strand
gaacaaacucuccucauaa

SEQ ID NO: 1579714 - RNA, 19 nt, Homo sapiens
  misc_RNA (1)...(19): siRNA sense strand
ggacagcagucaucaaaga

SEQ ID NO: 1579715 - RNA, 19 nt, Homo sapiens
  misc_RNA (1)...(19): siRNA sense strand
gcagagauauuguguaaca

SEQ ID NO: 1579716 - RNA, 19 nt, Homo sapiens
  misc_RNA (1)...(19): siRNA sense strand
ugaacaaacucuccucaua

SEQ ID NO: 1579717 - RNA, 19 nt, Homo sapiens
  misc_RNA (1)...(19): siRNA sense strand
caaacugucugaugaagaa

SEQ ID NO: 1579718 - RNA, 19 nt, Homo sapiens
  misc_RNA (1)...(19): siRNA sense strand
caaagaaccgaaaguauaa

SEQ ID NO: 1579719 - RNA, 19 nt, Homo sapiens
  misc_RNA (1)...(19): siRNA sense strand
gaaaggaguguuugaaaga

SEQ ID NO: 1579720 - RNA, 19 nt, Homo sapiens
  misc_RNA (1)...(19): siRNA sense strand
gaaaauguauggaaucuug

SEQ ID NO: 1579721 - RNA, 19 nt, Homo sapiens
  misc_RNA (1)...(19): siRNA sense strand
aaaggaggcuggaaacauu

SEQ ID NO: 1579722 - RNA, 19 nt, Homo sapiens
  misc_RNA (1)...(19): siRNA sense strand
ggaaaggaguguuugaaag

SEQ ID NO: 1579723 - RNA, 19 nt, Homo sapiens
  misc_RNA (1)...(19): siRNA sense strand
ggagaugggaugauagaua

SEQ ID NO: 1579724 - RNA, 19 nt, Homo sapiens
  misc_RNA (1)...(19): siRNA sense strand
ugaaggacaugauuuguau

SEQ ID NO: 1579725 - RNA, 19 nt, Homo sapiens
  misc_RNA (1)...(19): siRNA sense strand
gagcuaaguuuguauccaa

SEQ ID NO: 1579726 - RNA, 19 nt, Homo sapiens
  misc_RNA (1)...(19): siRNA sense strand
aaacuucccaggcuaauua

SEQ ID NO: 1579727 - RNA, 19 nt, Homo sapiens
  misc_RNA (1)...(19): siRNA sense strand
uauggaaucuugcaucaaa

SEQ ID NO: 1579728 - RNA, 19 nt, Homo sapiens
  misc_RNA (1)...(19): siRNA sense strand
caaaugggcuuggugauag

SEQ ID NO: 1579729 - RNA, 19 nt, Homo sapiens
  misc_RNA (1)...(19): siRNA sense strand
ugaagaagguagugcauau

SEQ ID NO: 1579730 - RNA, 19 nt, Homo sapiens
  misc_RNA (1)...(19): siRNA sense strand
gaaaagaggagcuaaguuu

SEQ ID NO: 1579731 - RNA, 19 nt, Homo sapiens
  misc_RNA (1)...(19): siRNA sense strand
gcaaccugcuugacugaaa

SEQ ID NO: 1579732 - RNA, 19 nt, Homo sapiens
  misc_RNA (1)...(19): siRNA sense strand
cagcagucaucaaagaaua

SEQ ID NO: 1579733 - RNA, 19 nt, Homo sapiens
  misc_RNA (1)...(19): siRNA sense strand
gagauauuguguaacauug

SEQ ID NO: 1579734 - RNA, 19 nt, Homo sapiens
  misc_RNA (1)...(19): siRNA sense strand
ggugaucucauccauaaua

SEQ ID NO: 1579735 - RNA, 19 nt, Homo sapiens
  misc_RNA (1)...(19): siRNA sense strand
caaagaauacucugcuaaa

SEQ ID NO: 1579736 - RNA, 19 nt, Homo sapiens
  misc_RNA (1)...(19): siRNA sense strand
aagagagggucauuauuaa

SEQ ID NO: 1579737 - RNA, 19 nt, Homo sapiens
  misc_RNA (1)...(19): siRNA sense strand
gagcagaugauuucaaaga

SEQ ID NO: 1579738 - RNA, 19 nt, Homo sapiens
  misc_RNA (1)...(19): siRNA sense strand
ggaaaugaaggacaugauu

SEQ ID NO: 1579739 - RNA, 19 nt, Homo sapiens
  misc_RNA (1)...(19): siRNA sense strand
ugaagaaccugaacaaacu

SEQ ID NO: 1579740 - RNA, 19 nt, Homo sapiens
  misc_RNA (1)...(19): siRNA sense strand
gagaccaagugauaaaguu

SEQ ID NO: 1579741 - RNA, 19 nt, Homo sapiens
  misc_RNA (1)...(19): siRNA sense strand
cauauacucugggaaguuu

SEQ ID NO: 1579742 - RNA, 19 nt, Homo sapiens
  misc_RNA (1)...(19): siRNA sense strand
uaacauuggugucaaacug

SEQ ID NO: 1579743 - RNA, 19 nt, Homo sapiens
  misc_RNA (1)...(19): siRNA sense strand
gaggagaaguuuguguuga

SEQ ID NO: 1579744 - RNA, 19 nt, Homo sapiens
  misc_RNA (1)...(19): siRNA sense strand
ccaacaacaugaacagaga

SEQ ID NO: 1579745 - RNA, 19 nt, Homo sapiens
  misc_RNA (1)...(19): siRNA sense strand
uugcagagauauuguguaa

SEQ ID NO: 1579746 - RNA, 19 nt, Homo sapiens
  misc_RNA (1)...(19): siRNA sense strand
ugacagaacuaauuauggu

SEQ ID NO: 1579747 - RNA, 19 nt, Homo sapiens
  misc_RNA (1)...(19): siRNA sense strand
gcaaacacauugauaaacc

SEQ ID NO: 1579748 - RNA, 19 nt, Homo sapiens
  misc_RNA (1)...(19): siRNA sense strand
agaauacucugcuaaagau

SEQ ID NO: 1579749 - RNA, 19 nt, Homo sapiens
  misc_RNA (1)...(19): siRNA sense strand
aagagcagaugauuucaaa

SEQ ID NO: 1579750 - RNA, 19 nt, Homo sapiens
  misc_RNA (1)...(19): siRNA sense strand
gcuaauuacuccaccugaa

SEQ ID NO: 1579751 - RNA, 19 nt, Homo sapiens
  misc_RNA (1)...(19): siRNA sense strand
agaagagauugcagagaua

SEQ ID NO: 1579752 - RNA, 19 nt, Homo sapiens
  misc_RNA (1)...(19): siRNA sense strand
aacaaacucuccucauaaa

SEQ ID NO: 1579753 - RNA, 19 nt, Homo sapiens
  misc_RNA (1)...(19): siRNA sense strand
auaauagacuuccggauga

SEQ ID NO: 1579754 - RNA, 19 nt, Homo sapiens
  misc_RNA (1)...(19): siRNA sense strand
gaaaguauaacccaucaag

SEQ ID NO: 1579755 - RNA, 19 nt, Homo sapiens
  misc_RNA (1)...(19): siRNA sense strand
aagaagagauugcagagau

SEQ ID NO: 1579756 - RNA, 19 nt, Homo sapiens
  misc_RNA (1)...(19): siRNA sense strand
aagaggagcuaaguuugua

SEQ ID NO: 1579757 - RNA, 19 nt, Homo sapiens
  misc_RNA (1)...(19): siRNA sense strand
gaaaggaggcuggaaacau

SEQ ID NO: 1579758 - RNA, 19 nt, Homo sapiens
  misc_RNA (1)...(19): siRNA sense strand
cgaucaagcaccaggauua

SEQ ID NO: 1579759 - RNA, 19 nt, Homo sapiens
  misc_RNA (1)...(19): siRNA sense strand
uuggugaucucauccauaa

SEQ ID NO: 1579760 - RNA, 19 nt, Homo sapiens
  misc_RNA (1)...(19): siRNA sense strand
ucagugacagaacuaauua

SEQ ID NO: 1579761 - RNA, 19 nt, Homo sapiens
  misc_RNA (1)...(19): siRNA sense strand
gauugcaccuuauuugaca

SEQ ID NO: 1579762 - RNA, 19 nt, Homo sapiens
  misc_RNA (1)...(19): siRNA sense strand
ggagaaguuuguguugaga

SEQ ID NO: 1579763 - RNA, 19 nt, Homo sapiens
  misc_RNA (1)...(19): siRNA sense strand
ucauaaagccagaagauau

SEQ ID NO: 1579764 - RNA, 19 nt, Homo sapiens
  misc_RNA (1)...(19): siRNA sense strand
ccagaugagacuaagaaua

SEQ ID NO: 1579765 - RNA, 19 nt, Homo sapiens
  misc_RNA (1)...(19): siRNA sense strand
cauaaagccagaagauauu

SEQ ID NO: 1579766 - RNA, 19 nt, Homo sapiens
  misc_RNA (1)...(19): siRNA sense strand
ggcaucaccugaagaaagu

SEQ ID NO: 1579767 - RNA, 19 nt, Homo sapiens
  misc_RNA (1)...(19): siRNA sense strand
caaaagagcagaugauuuc

SEQ ID NO: 1579768 - RNA, 19 nt, Homo sapiens
  misc_RNA (1)...(19): siRNA sense strand
cagaccggaucaaguguaa

SEQ ID NO: 1579769 - RNA, 19 nt, Homo sapiens
  misc_RNA (1)...(19): siRNA sense strand
gaagcaggaagcacagaaa

SEQ ID NO: 1579770 - RNA, 19 nt, Homo sapiens
  misc_RNA (1)...(19): siRNA sense strand
cuacugaggcuaauguuga

SEQ ID NO: 1579771 - RNA, 19 nt, Homo sapiens
  misc_RNA (1)...(19): siRNA sense strand
uaaugaaacccaacacaga

SEQ ID NO: 1579772 - RNA, 19 nt, Homo sapiens
  misc_RNA (1)...(19): siRNA sense strand
gaagagauugcagagauau

SEQ ID NO: 1579773 - RNA, 19 nt, Homo sapiens
  misc_RNA (1)...(19): siRNA sense strand
cagaugagacuaagaauac

SEQ ID NO: 1579774 - RNA, 19 nt, Homo sapiens
  misc_RNA (1)...(19): siRNA sense strand
gaagaagguagugcauauu

SEQ ID NO: 1579775 - RNA, 19 nt, Homo sapiens
  misc_RNA (1)...(19): siRNA sense strand
gaacuaauuauggugaaga

SEQ ID NO: 1579776 - RNA, 19 nt, Homo sapiens
  misc_RNA (1)...(19): siRNA sense strand
uaaagaaggaaaugaagga

SEQ ID NO: 1579777 - RNA, 19 nt, Homo sapiens
  misc_RNA (1)...(19): siRNA sense strand
gaucgcaucagacccauau

SEQ ID NO: 1579778 - RNA, 19 nt, Homo sapiens
  misc_RNA (1)...(19): siRNA sense strand
guugagaacaucagaaaug

SEQ ID NO: 1579779 - RNA, 19 nt, Homo sapiens
  misc_RNA (1)...(19): siRNA sense strand
ucacagaggagaaguuugu

SEQ ID NO: 1579780 - RNA, 19 nt, Homo sapiens
  misc_RNA (1)...(19): siRNA sense strand
cuucugagaccaagugaua

SEQ ID NO: 1579781 - RNA, 19 nt, Homo sapiens
  misc_RNA (1)...(19): siRNA sense strand
acugugauguggauaauga

SEQ ID NO: 1579782 - RNA, 19 nt, Homo sapiens
  misc_RNA (1)...(19): siRNA sense strand
cuaaagauguggugaaucc

SEQ ID NO: 1579783 - RNA, 19 nt, Homo sapiens
  misc_RNA (1)...(19): siRNA sense strand
ucaaagaauacucugcuaa

SEQ ID NO: 1579784 - RNA, 19 nt, Homo sapiens
  misc_RNA (1)...(19): siRNA sense strand
ggcauggacacaaucaaua

SEQ ID NO: 1579785 - RNA, 19 nt, Homo sapiens
  misc_RNA (1)...(19): siRNA sense strand
gugucaaacugucugauga

SEQ ID NO: 1579786 - RNA, 19 nt, Homo sapiens
  misc_RNA (1)...(19): siRNA sense strand
gagagggucauuauuaaag

SEQ ID NO: 1579787 - RNA, 19 nt, Homo sapiens
  misc_RNA (1)...(19): siRNA sense strand
uauauuggcuccaugaacu

SEQ ID NO: 1579788 - RNA, 19 nt, Homo sapiens
  misc_RNA (1)...(19): siRNA sense strand
ccaguugguuacagaguug

SEQ ID NO: 1579789 - RNA, 19 nt, Homo sapiens
  misc_RNA (1)...(19): siRNA sense strand
caacauaaacuuggaagag

SEQ ID NO: 1579790 - RNA, 19 nt, Homo sapiens
  misc_RNA (1)...(19): siRNA sense strand
ccagauugcaccuuauuug

SEQ ID NO: 1579791 - RNA, 19 nt, Homo sapiens
  misc_RNA (1)...(19): siRNA sense strand
acacauggaauuagaucua

SEQ ID NO: 1579792 - RNA, 19 nt, Homo sapiens
  misc_RNA (1)...(19): siRNA sense strand
ggagguggacauuggacua

SEQ ID NO: 1579793 - RNA, 19 nt, Homo sapiens
  misc_RNA (1)...(19): siRNA sense strand
gacaacuucuucugagauc

SEQ ID NO: 1579794 - RNA, 19 nt, Homo sapiens
  misc_RNA (1)...(19): siRNA sense strand
gcaccuuauuugacacaug

SEQ ID NO: 1579795 - RNA, 19 nt, Homo sapiens
  misc_RNA (1)...(19): siRNA sense strand
gcagaccggaucaagugua

SEQ ID NO: 1579796 - RNA, 19 nt, Homo sapiens
  misc_RNA (1)...(19): siRNA sense strand
gauauuguguaacauuggu

SEQ ID NO: 1579797 - RNA, 19 nt, Homo sapiens
  misc_RNA (1)...(19): siRNA sense strand
gaauucgucgcaucaguga

SEQ ID NO: 1579798 - RNA, 19 nt, Homo sapiens
  misc_RNA (1)...(19): siRNA sense strand
caacacagagauuaagcuu

SEQ ID NO: 1579799 - RNA, 19 nt, Homo sapiens
  misc_RNA (1)...(19): siRNA sense strand
gauacuggcaaacacauug

SEQ ID NO: 1579800 - RNA, 19 nt, Homo sapiens
  misc_RNA (1)...(19): siRNA sense strand
aaauuucgauacuggcaaa

SEQ ID NO: 1579801 - RNA, 19 nt, Homo sapiens
  misc_RNA (1)...(19): siRNA sense strand
cuucugagaucaaugcaau

SEQ ID NO: 1579802 - RNA, 19 nt, Homo sapiens
  misc_RNA (1)...(19): siRNA sense strand
ugacuacugugauguggau

SEQ ID NO: 1579803 - RNA, 19 nt, Homo sapiens
  misc_RNA (1)...(19): siRNA sense strand
ccauagguguaguguguau

SEQ ID NO: 1579804 - RNA, 19 nt, Homo sapiens
  misc_RNA (1)...(19): siRNA sense strand
gaaccaagacaggaaaugg

SEQ ID NO: 1579805 - RNA, 19 nt, Homo sapiens
  misc_RNA (1)...(19): siRNA sense strand
agaaggaaaugaaggacau

SEQ ID NO: 1579806 - RNA, 19 nt, Homo sapiens
  misc_RNA (1)...(19): siRNA sense strand
cacaaucaauacgacauuu

SEQ ID NO: 1579807 - RNA, 19 nt, Homo sapiens
  misc_RNA (1)...(19): siRNA sense strand
caaucgacgagcaccauua

SEQ ID NO: 1579808 - RNA, 19 nt, Homo sapiens
  misc_RNA (1)...(19): siRNA sense strand
gugcauauucacuacuaua

SEQ ID NO: 1579809 - RNA, 19 nt, Homo sapiens
  misc_RNA (1)...(19): siRNA sense strand
ggacagcgcuggcaugaga

SEQ ID NO: 1579810 - RNA, 19 nt, Homo sapiens
  misc_RNA (1)...(19): siRNA sense strand
ugauaaaccucaucuacuu

SEQ ID NO: 1579811 - RNA, 19 nt, Homo sapiens
  misc_RNA (1)...(19): siRNA sense strand
ccaaagggcaggagcaaug

SEQ ID NO: 1579812 - RNA, 19 nt, Homo sapiens
  misc_RNA (1)...(19): siRNA sense strand
caacuggacuggacuucag

SEQ ID NO: 1579813 - RNA, 19 nt, Homo sapiens
  misc_RNA (1)...(19): siRNA sense strand
gagcuuggguucccuuugc

SEQ ID NO: 1579814 - RNA, 19 nt, Homo sapiens
  misc_RNA (1)...(19): siRNA sense strand
gaaccgaccuggggacaaa

SEQ ID NO: 1579815 - RNA, 19 nt, Homo sapiens
  misc_RNA (1)...(19): siRNA sense strand
gaccaaaccucggugaacu

SEQ ID NO: 1579816 - RNA, 19 nt, Homo sapiens
  misc_RNA (1)...(19): siRNA sense strand
caacucagacagugacuca

SEQ ID NO: 1579817 - RNA, 19 nt, Homo sapiens
  misc_RNA (1)...(19): siRNA sense strand
cucggaaccugaaggauuu

SEQ ID NO: 1579818 - RNA, 19 nt, Homo sapiens
  misc_RNA (1)...(19): siRNA sense strand
guuccagccugcaaacuca

SEQ ID NO: 1579819 - RNA, 19 nt, Homo sapiens
  misc_RNA (1)...(19): siRNA sense strand
gacagcaacgccucuaaga

SEQ ID NO: 1579820 - RNA, 19 nt, Homo sapiens
  misc_RNA (1)...(19): siRNA sense strand
gauaaaccucaucuacuuc

SEQ ID NO: 1579821 - RNA, 19 nt, Homo sapiens
  misc_RNA (1)...(19): siRNA sense strand
ggacagcaacgccucuaag

SEQ ID NO: 1579822 - RNA, 19 nt, Homo sapiens
  misc_RNA (1)...(19): siRNA sense strand
ggacucgaccgaacugaag

SEQ ID NO: 1579823 - RNA, 19 nt, Homo sapiens
  misc_RNA (1)...(19): siRNA sense strand
uaaaccucaucuacuucua

SEQ ID NO: 1579824 - RNA, 19 nt, Homo sapiens
  misc_RNA (1)...(19): siRNA sense strand
gggaggacccugaggauac

SEQ ID NO: 1579825 - RNA, 19 nt, Homo sapiens
  misc_RNA (1)...(19): siRNA sense strand
caaagcggaggcacccaaa

SEQ ID NO: 1579826 - RNA, 19 nt, Homo sapiens
  misc_RNA (1)...(19): siRNA sense strand
gcaacccucucccgaacac

SEQ ID NO: 1579827 - RNA, 19 nt, Homo sapiens
  misc_RNA (1)...(19): siRNA sense strand
gugaccagcugaucuucuc

SEQ ID NO: 1579828 - RNA, 19 nt, Homo sapiens
  misc_RNA (1)...(19): siRNA sense strand
aagacgcacugcaccaugu

SEQ ID NO: 1579829 - RNA, 19 nt, Homo sapiens
  misc_RNA (1)...(19): siRNA sense strand
acucggaaccugaaggauu

SEQ ID NO: 1579830 - RNA, 19 nt, Homo sapiens
  misc_RNA (1)...(19): siRNA sense strand
ggaccaaaccucggugaac

SEQ ID NO: 1579831 - RNA, 19 nt, Homo sapiens
  misc_RNA (1)...(19): siRNA sense strand
gaaggaagggaccaaaccu

SEQ ID NO: 1579832 - RNA, 19 nt, Homo sapiens
  misc_RNA (1)...(19): siRNA sense strand
ccugauaaaccucaucuac

SEQ ID NO: 1579833 - RNA, 19 nt, Homo sapiens
  misc_RNA (1)...(19): siRNA sense strand
guccugcaguucugagcuu

SEQ ID NO: 1579834 - RNA, 19 nt, Homo sapiens
  misc_RNA (1)...(19): siRNA sense strand
ccugguacuucccaagcuu

SEQ ID NO: 1579835 - RNA, 19 nt, Homo sapiens
  misc_RNA (1)...(19): siRNA sense strand
caaugccgccuggagacua

SEQ ID NO: 1579836 - RNA, 19 nt, Homo sapiens
  misc_RNA (1)...(19): siRNA sense strand
gaagauggauggaauaaac

SEQ ID NO: 1579837 - RNA, 19 nt, Homo sapiens
  misc_RNA (1)...(19): siRNA sense strand
agaaagccguugaauguua

SEQ ID NO: 1579838 - RNA, 19 nt, Homo sapiens
  misc_RNA (1)...(19): siRNA sense strand
gaauuaaacccaacacaaa

SEQ ID NO: 1579839 - RNA, 19 nt, Homo sapiens
  misc_RNA (1)...(19): siRNA sense strand
ucccagagcucacagauuu

SEQ ID NO: 1579840 - RNA, 19 nt, Homo sapiens
  misc_RNA (1)...(19): siRNA sense strand
aggaacagcuucuagauug

SEQ ID NO: 1579841 - RNA, 19 nt, Homo sapiens
  misc_RNA (1)...(19): siRNA sense strand
ggaauuaaacccaacacaa

SEQ ID NO: 1579842 - RNA, 19 nt, Homo sapiens
  misc_RNA (1)...(19): siRNA sense strand
gaaguccugcaauuuauaa

SEQ ID NO: 1579843 - RNA, 19 nt, Homo sapiens
  misc_RNA (1)...(19): siRNA sense strand
agagaaagccguugaaugu

SEQ ID NO: 1579844 - RNA, 19 nt, Homo sapiens
  misc_RNA (1)...(19): siRNA sense strand
gaagauugcagaauugcuu

SEQ ID NO: 1579845 - RNA, 19 nt, Homo sapiens
  misc_RNA (1)...(19): siRNA sense strand
ggaaguccugcaauuuaua

SEQ ID NO: 1579846 - RNA, 19 nt, Homo sapiens
  misc_RNA (1)...(19): siRNA sense strand
gaaagccguugaauguuac

SEQ ID NO: 1579847 - RNA, 19 nt, Homo sapiens
  misc_RNA (1)...(19): siRNA sense strand
ggaaagagcagcaaaacuu

SEQ ID NO: 1579848 - RNA, 19 nt, Homo sapiens
  misc_RNA (1)...(19): siRNA sense strand
guugaagauugcagaauug

SEQ ID NO: 1579849 - RNA, 19 nt, Homo sapiens
  misc_RNA (1)...(19): siRNA sense strand
guacagacccuuaaguuuu

SEQ ID NO: 1579850 - RNA, 19 nt, Homo sapiens
  misc_RNA (1)...(19): siRNA sense strand
uugcagaauugcuuuguaa

SEQ ID NO: 1579851 - RNA, 19 nt, Homo sapiens
  misc_RNA (1)...(19): siRNA sense strand
ggaacagcuucuagauugu

SEQ ID NO: 1579852 - RNA, 19 nt, Homo sapiens
  misc_RNA (1)...(19): siRNA sense strand
gaguggaauucguguguug

SEQ ID NO: 1579853 - RNA, 19 nt, Homo sapiens
  misc_RNA (1)...(19): siRNA sense strand
uaaaggaacagcuucuaga

SEQ ID NO: 1579854 - RNA, 19 nt, Homo sapiens
  misc_RNA (1)...(19): siRNA sense strand
gucagaacuuuauguaaga

SEQ ID NO: 1579855 - RNA, 19 nt, Homo sapiens
  misc_RNA (1)...(19): siRNA sense strand
uuacaggcguucaguggaa

SEQ ID NO: 1579856 - RNA, 19 nt, Homo sapiens
  misc_RNA (1)...(19): siRNA sense strand
uguugaagauugcagaauu

SEQ ID NO: 1579857 - RNA, 19 nt, Homo sapiens
  misc_RNA (1)...(19): siRNA sense strand
agucagaacuuuauguaag

SEQ ID NO: 1579858 - RNA, 19 nt, Homo sapiens
  misc_RNA (1)...(19): siRNA sense strand
gcagagaggaacauagcuu

SEQ ID NO: 1579859 - RNA, 19 nt, Homo sapiens
  misc_RNA (1)...(19): siRNA sense strand
ggcguucaguggaauuaaa

SEQ ID NO: 1579860 - RNA, 19 nt, Homo sapiens
  misc_RNA (1)...(19): siRNA sense strand
gagaaagccguugaauguu

SEQ ID NO: 1579861 - RNA, 19 nt, Homo sapiens
  misc_RNA (1)...(19): siRNA sense strand
ucagucagaacuuuaugua

SEQ ID NO: 1579862 - RNA, 19 nt, Homo sapiens
  misc_RNA (1)...(19): siRNA sense strand
gaacagcuucuagauugug

SEQ ID NO: 1579863 - RNA, 19 nt, Homo sapiens
  misc_RNA (1)...(19): siRNA sense strand
uagcuuugcguucaaguuu

SEQ ID NO: 1579864 - RNA, 19 nt, Homo sapiens
  misc_RNA (1)...(19): siRNA sense strand
gcaaaauacuggguggaaa

SEQ ID NO: 1579865 - RNA, 19 nt, Homo sapiens
  misc_RNA (1)...(19): siRNA sense strand
guucaaguuuagaguggaa

SEQ ID NO: 1579866 - RNA, 19 nt, Homo sapiens
  misc_RNA (1)...(19): siRNA sense strand
ugauguuacugauggaaga

SEQ ID NO: 1579867 - RNA, 19 nt, Homo sapiens
  misc_RNA (1)...(19): siRNA sense strand
gaauucguguguuguacag

SEQ ID NO: 1579868 - RNA, 19 nt, Homo sapiens
  misc_RNA (1)...(19): siRNA sense strand
cagagaaagccguugaaug

SEQ ID NO: 1579869 - RNA, 19 nt, Homo sapiens
  misc_RNA (1)...(19): siRNA sense strand
cagagaggaacauagcuuu

SEQ ID NO: 1579870 - RNA, 19 nt, Homo sapiens
  misc_RNA (1)...(19): siRNA sense strand
ggugaagauggauggaaua

SEQ ID NO: 1579871 - RNA, 19 nt, Homo sapiens
  misc_RNA (1)...(19): siRNA sense strand
gugaagauggauggaauaa

SEQ ID NO: 1579872 - RNA, 19 nt, Homo sapiens
  misc_RNA (1)...(19): siRNA sense strand
ggaagaaaacacagagaaa

SEQ ID NO: 1579873 - RNA, 19 nt, Homo sapiens
  misc_RNA (1)...(19): siRNA sense strand
gauggauggaauaaacuuu

SEQ ID NO: 1579874 - RNA, 19 nt, Homo sapiens
  misc_RNA (1)...(19): siRNA sense strand
gcuuugcguucaaguuuag

SEQ ID NO: 1579875 - RNA, 19 nt, Homo sapiens
  misc_RNA (1)...(19): siRNA sense strand
acacagagaaagccguuga

SEQ ID NO: 1579876 - RNA, 19 nt, Homo sapiens
  misc_RNA (1)...(19): siRNA sense strand
gcagaauugcuuuguaaaa

SEQ ID NO: 1579877 - RNA, 19 nt, Homo sapiens
  misc_RNA (1)...(19): siRNA sense strand
uguacagacccuuaaguuu

SEQ ID NO: 1579878 - RNA, 19 nt, Homo sapiens
  misc_RNA (1)...(19): siRNA sense strand
ggaauucguguguuguaca

SEQ ID NO: 1579879 - RNA, 19 nt, Homo sapiens
  misc_RNA (1)...(19): siRNA sense strand
uaaacuaaaggaacagcuu

SEQ ID NO: 1579880 - RNA, 19 nt, Homo sapiens
  misc_RNA (1)...(19): siRNA sense strand
cugaugacguccaugugaa

SEQ ID NO: 1579881 - RNA, 19 nt, Homo sapiens
  misc_RNA (1)...(19): siRNA sense strand
guccugcaauuuauaaacu

SEQ ID NO: 1579882 - RNA, 19 nt, Homo sapiens
  misc_RNA (1)...(19): siRNA sense strand
gccaugaggcagagaggaa

SEQ ID NO: 1579883 - RNA, 19 nt, Homo sapiens
  misc_RNA (1)...(19): siRNA sense strand
ugauucagucagaacuuua

SEQ ID NO: 1579884 - RNA, 19 nt, Homo sapiens
  misc_RNA (1)...(19): siRNA sense strand
uugauucagucagaacuuu

SEQ ID NO: 1579885 - RNA, 19 nt, Homo sapiens
  misc_RNA (1)...(19): siRNA sense strand
aaaggaacagcuucuagau

SEQ ID NO: 1579886 - RNA, 19 nt, Homo sapiens
  misc_RNA (1)...(19): siRNA sense strand
ugggucuucuuuaugaauu

SEQ ID NO: 1579887 - RNA, 19 nt, Homo sapiens
  misc_RNA (1)...(19): siRNA sense strand
guggaauucguguguugua

SEQ ID NO: 1579888 - RNA, 19 nt, Homo sapiens
  misc_RNA (1)...(19): siRNA sense strand
ccugaugacguccauguga

SEQ ID NO: 1579889 - RNA, 19 nt, Homo sapiens
  misc_RNA (1)...(19): siRNA sense strand
gaccugaugacguccaugu

SEQ ID NO: 1579890 - RNA, 19 nt, Homo sapiens
  misc_RNA (1)...(19): siRNA sense strand
gauucagucagaacuuuau

SEQ ID NO: 1579891 - RNA, 19 nt, Homo sapiens
  misc_RNA (1)...(19): siRNA sense strand
gauuucugggucuucuuua

SEQ ID NO: 1579892 - RNA, 19 nt, Homo sapiens
  misc_RNA (1)...(19): siRNA sense strand
aaggaacagcuucuagauu

SEQ ID NO: 1579893 - RNA, 19 nt, Homo sapiens
  misc_RNA (1)...(19): siRNA sense strand
gaagaaaacacagagaaag

SEQ ID NO: 1579894 - RNA, 19 nt, Homo sapiens
  misc_RNA (1)...(19): siRNA sense strand
cuaaaggaacagcuucuag

SEQ ID NO: 1579895 - RNA, 19 nt, Homo sapiens
  misc_RNA (1)...(19): siRNA sense strand
gggucuucuuuaugaauug

SEQ ID NO: 1579896 - RNA, 19 nt, Homo sapiens
  misc_RNA (1)...(19): siRNA sense strand
gagaggaacauagcuuugc

SEQ ID NO: 1579897 - RNA, 19 nt, Homo sapiens
  misc_RNA (1)...(19): siRNA sense strand
uucugggucuucuuuauga

SEQ ID NO: 1579898 - RNA, 19 nt, Homo sapiens
  misc_RNA (1)...(19): siRNA sense strand
cagucagaacuuuauguaa

SEQ ID NO: 1579899 - RNA, 19 nt, Homo sapiens
  misc_RNA (1)...(19): siRNA sense strand
uacagacccuuaaguuuug

SEQ ID NO: 1579900 - RNA, 19 nt, Homo sapiens
  misc_RNA (1)...(19): siRNA sense strand
uuguaucgcucaacuaaaa

SEQ ID NO: 1579901 - RNA, 19 nt, Homo sapiens
  misc_RNA (1)...(19): siRNA sense strand
agcuuugcguucaaguuua

SEQ ID NO: 1579902 - RNA, 19 nt, Homo sapiens
  misc_RNA (1)...(19): siRNA sense strand
uagaguggaauucgugugu

SEQ ID NO: 1579903 - RNA, 19 nt, Homo sapiens
  misc_RNA (1)...(19): siRNA sense strand
gaucccagagcucacagau

SEQ ID NO: 1579904 - RNA, 19 nt, Homo sapiens
  misc_RNA (1)...(19): siRNA sense strand
caacaaaucucaauacagu

SEQ ID NO: 1579905 - RNA, 19 nt, Homo sapiens
  misc_RNA (1)...(19): siRNA sense strand
uaacuuggcugcugucuug

SEQ ID NO: 1579906 - RNA, 19 nt, Homo sapiens
  misc_RNA (1)...(19): siRNA sense strand
gaaagggaauacucugcua

SEQ ID NO: 1579907 - RNA, 19 nt, Homo sapiens
  misc_RNA (1)...(19): siRNA sense strand
gaggcaagauuacuuaaau

SEQ ID NO: 1579908 - RNA, 19 nt, Homo sapiens
  misc_RNA (1)...(19): siRNA sense strand
agacuuagaucacuaugaa

SEQ ID NO: 1579909 - RNA, 19 nt, Homo sapiens
  misc_RNA (1)...(19): siRNA sense strand
ugaaggagcucagggauau

SEQ ID NO: 1579910 - RNA, 19 nt, Homo sapiens
  misc_RNA (1)...(19): siRNA sense strand
gcauggaacuucucaccaa

SEQ ID NO: 1579911 - RNA, 19 nt, Homo sapiens
  misc_RNA (1)...(19): siRNA sense strand
gagcagugccuacuccaua

SEQ ID NO: 1579912 - RNA, 19 nt, Homo sapiens
  misc_RNA (1)...(19): siRNA sense strand
gcacagcaguccuacaagu

SEQ ID NO: 1579913 - RNA, 19 nt, Homo sapiens
  misc_RNA (1)...(19): siRNA sense strand
ggacagcgcuuugcacaac

SEQ ID NO: 1579914 - RNA, 19 nt, Homo sapiens
  misc_RNA (1)...(19): siRNA sense strand
ggacacagaagacuuagau

SEQ ID NO: 1579915 - RNA, 19 nt, Homo sapiens
  misc_RNA (1)...(19): siRNA sense strand
gagcacagcaguccuacaa

SEQ ID NO: 1579916 - RNA, 19 nt, Homo sapiens
  misc_RNA (1)...(19): siRNA sense strand
gaucaucuccgaccugugu

SEQ ID NO: 1579917 - RNA, 19 nt, Homo sapiens
  misc_RNA (1)...(19): siRNA sense strand
ccagaggcaagauuacuua

SEQ ID NO: 1579918 - RNA, 19 nt, Homo sapiens
  misc_RNA (1)...(19): siRNA sense strand
cagaagacuuagaucacua

SEQ ID NO: 1579919 - RNA, 19 nt, Homo sapiens
  misc_RNA (1)...(19): siRNA sense strand
ggagaugccugaggacaca

SEQ ID NO: 1579920 - RNA, 19 nt, Homo sapiens
  misc_RNA (1)...(19): siRNA sense strand
cacgagcgcuuccgcauug

SEQ ID NO: 1579921 - RNA, 19 nt, Homo sapiens
  misc_RNA (1)...(19): siRNA sense strand
cagucgaacucgugaauga

SEQ ID NO: 1579922 - RNA, 19 nt, Homo sapiens
  misc_RNA (1)...(19): siRNA sense strand
ugaggacacagaagacuua

SEQ ID NO: 1579923 - RNA, 19 nt, Homo sapiens
  misc_RNA (1)...(19): siRNA sense strand
aagauaacuuucccuuuga

SEQ ID NO: 1579924 - RNA, 19 nt, Homo sapiens
  misc_RNA (1)...(19): siRNA sense strand
ggacauaaagaaagggaau

SEQ ID NO: 1579925 - RNA, 19 nt, Homo sapiens
  misc_RNA (1)...(19): siRNA sense strand
caagagcacagcaguccua

SEQ ID NO: 1579926 - RNA, 19 nt, Homo sapiens
  misc_RNA (1)...(19): siRNA sense strand
gccaacaaaucucaauaca

SEQ ID NO: 1579927 - RNA, 19 nt, Homo sapiens
  misc_RNA (1)...(19): siRNA sense strand
gauauauaccgaucacaga

SEQ ID NO: 1579928 - RNA, 19 nt, Homo sapiens
  misc_RNA (1)...(19): siRNA sense strand
gaagaugauggcauuggaa

SEQ ID NO: 1579929 - RNA, 19 nt, Homo sapiens
  misc_RNA (1)...(19): siRNA sense strand
gcaacaucacggagucaua

SEQ ID NO: 1579930 - RNA, 19 nt, Homo sapiens
  misc_RNA (1)...(19): siRNA sense strand
cggaaacuaugcagucgaa

SEQ ID NO: 1579931 - RNA, 19 nt, Homo sapiens
  misc_RNA (1)...(19): siRNA sense strand
gaaugucaaacuccucaaa

SEQ ID NO: 1579932 - RNA, 19 nt, Homo sapiens
  misc_RNA (1)...(19): siRNA sense strand
gagccaacaaaucucaaua

SEQ ID NO: 1579933 - RNA, 19 nt, Homo sapiens
  misc_RNA (1)...(19): siRNA sense strand
ccacugaccggcugaugaa

SEQ ID NO: 1579934 - RNA, 19 nt, Homo sapiens
  misc_RNA (1)...(19): siRNA sense strand
gaucacagaguuucaaagg

SEQ ID NO: 1579935 - RNA, 19 nt, Homo sapiens
  misc_RNA (1)...(19): siRNA sense strand
ugaagaugauggcauugga

SEQ ID NO: 1579936 - RNA, 19 nt, Homo sapiens
  misc_RNA (1)...(19): siRNA sense strand
cauggaacuucucaccaaa

SEQ ID NO: 1579937 - RNA, 19 nt, Homo sapiens
  misc_RNA (1)...(19): siRNA sense strand
cgaccuguguaaacucuau

SEQ ID NO: 1579938 - RNA, 19 nt, Homo sapiens
  misc_RNA (1)...(19): siRNA sense strand
ucaauacagucugacaaga

SEQ ID NO: 1579939 - RNA, 19 nt, Homo sapiens
  misc_RNA (1)...(19): siRNA sense strand
agaaccagaggcaagauua

SEQ ID NO: 1579940 - RNA, 19 nt, Homo sapiens
  misc_RNA (1)...(19): siRNA sense strand
ggagccgacuucauucuac

SEQ ID NO: 1579941 - RNA, 19 nt, Homo sapiens
  misc_RNA (1)...(19): siRNA sense strand
acacagaagacuuagauca

SEQ ID NO: 1579942 - RNA, 19 nt, Homo sapiens
  misc_RNA (1)...(19): siRNA sense strand
uaaagaaagggaauacucu

SEQ ID NO: 1579943 - RNA, 19 nt, Homo sapiens
  misc_RNA (1)...(19): siRNA sense strand
gcugguggacauaaagaaa

SEQ ID NO: 1579944 - RNA, 19 nt, Homo sapiens
  misc_RNA (1)...(19): siRNA sense strand
cgacuucauucuacuuaac

SEQ ID NO: 1579945 - RNA, 19 nt, Homo sapiens
  misc_RNA (1)...(19): siRNA sense strand
gaaggagcucagggauaua

SEQ ID NO: 1579946 - RNA, 19 nt, Homo sapiens
  misc_RNA (1)...(19): siRNA sense strand
gacauaaagaaagggaaua

SEQ ID NO: 1579947 - RNA, 19 nt, Homo sapiens
  misc_RNA (1)...(19): siRNA sense strand
cagcugagggcaagaaauc

SEQ ID NO: 1579948 - RNA, 19 nt, Homo sapiens
  misc_RNA (1)...(19): siRNA sense strand
ucuggucgguggagucuga

SEQ ID NO: 1579949 - RNA, 19 nt, Homo sapiens
  misc_RNA (1)...(19): siRNA sense strand
gaaacuaugcagucgaacu

SEQ ID NO: 1579950 - RNA, 19 nt, Homo sapiens
  misc_RNA (1)...(19): siRNA sense strand
agaugaagaugaggagaug

SEQ ID NO: 1579951 - RNA, 19 nt, Homo sapiens
  misc_RNA (1)...(19): siRNA sense strand
caacaucacggagucauac

SEQ ID NO: 1579952 - RNA, 19 nt, Homo sapiens
  misc_RNA (1)...(19): siRNA sense strand
ggagaggcugguggacaua

SEQ ID NO: 1579953 - RNA, 19 nt, Homo sapiens
  misc_RNA (1)...(19): siRNA sense strand
ccucaaagagaaagaagga

SEQ ID NO: 1579954 - RNA, 19 nt, Homo sapiens
  misc_RNA (1)...(19): siRNA sense strand
gcaagauuacuuaaauggu

SEQ ID NO: 1579955 - RNA, 19 nt, Homo sapiens
  misc_RNA (1)...(19): siRNA sense strand
aaacuuggccauccuagag

SEQ ID NO: 1579956 - RNA, 19 nt, Homo sapiens
  misc_RNA (1)...(19): siRNA sense strand
gagaggcugguggacauaa

SEQ ID NO: 1579957 - RNA, 19 nt, Homo sapiens
  misc_RNA (1)...(19): siRNA sense strand
gccgacuucauucuacuua

SEQ ID NO: 1579958 - RNA, 19 nt, Homo sapiens
  misc_RNA (1)...(19): siRNA sense strand
gaaccagaggcaagauuac

SEQ ID NO: 1579959 - RNA, 19 nt, Homo sapiens
  misc_RNA (1)...(19): siRNA sense strand
aaaucucaauacagucuga

SEQ ID NO: 1579960 - RNA, 19 nt, Homo sapiens
  misc_RNA (1)...(19): siRNA sense strand
aggcaagauuacuuaaaug

SEQ ID NO: 1579961 - RNA, 19 nt, Homo sapiens
  misc_RNA (1)...(19): siRNA sense strand
uggaacuucucaccaaaca

SEQ ID NO: 1579962 - RNA, 19 nt, Homo sapiens
  misc_RNA (1)...(19): siRNA sense strand
ccgacuucauucuacuuaa

SEQ ID NO: 1579963 - RNA, 19 nt, Homo sapiens
  misc_RNA (1)...(19): siRNA sense strand
uggagaggcugguggacau

SEQ ID NO: 1579964 - RNA, 19 nt, Homo sapiens
  misc_RNA (1)...(19): siRNA sense strand
caauacagucugacaagag

SEQ ID NO: 1579965 - RNA, 19 nt, Homo sapiens
  misc_RNA (1)...(19): siRNA sense strand
ccagauccucaaagagaaa

SEQ ID NO: 1579966 - RNA, 19 nt, Homo sapiens
  misc_RNA (1)...(19): siRNA sense strand
cuccagauccucaaagaga

SEQ ID NO: 1579967 - RNA, 19 nt, Homo sapiens
  misc_RNA (1)...(19): siRNA sense strand
ccacgagcgcuuccgcauu

SEQ ID NO: 1579968 - RNA, 19 nt, Homo sapiens
  misc_RNA (1)...(19): siRNA sense strand
agaggcugguggacauaaa

SEQ ID NO: 1579969 - RNA, 19 nt, Homo sapiens
  misc_RNA (1)...(19): siRNA sense strand
cagcagagcagugcacaca

SEQ ID NO: 1579970 - RNA, 19 nt, Homo sapiens
  misc_RNA (1)...(19): siRNA sense strand
uguguaaacucuauaaccu

SEQ ID NO: 1579971 - RNA, 19 nt, Homo sapiens
  misc_RNA (1)...(19): siRNA sense strand
ugaagcugcucgaguccau

SEQ ID NO: 1579972 - RNA, 19 nt, Homo sapiens
  misc_RNA (1)...(19): siRNA sense strand
uagagucagugaucaugca

SEQ ID NO: 1579973 - RNA, 19 nt, Homo sapiens
  misc_RNA (1)...(19): siRNA sense strand
auauaccgaucacagaguu

SEQ ID NO: 1579974 - RNA, 19 nt, Homo sapiens
  misc_RNA (1)...(19): siRNA sense strand
ggcaagauuacuuaaaugg

SEQ ID NO: 1579975 - RNA, 19 nt, Homo sapiens
  misc_RNA (1)...(19): siRNA sense strand
acagaagacuuagaucacu

SEQ ID NO: 1579976 - RNA, 19 nt, Homo sapiens
  misc_RNA (1)...(19): siRNA sense strand
gagccgacuucauucuacu

SEQ ID NO: 1579977 - RNA, 19 nt, Homo sapiens
  misc_RNA (1)...(19): siRNA sense strand
cgcauccacugcaacauca

SEQ ID NO: 1579978 - RNA, 19 nt, Homo sapiens
  misc_RNA (1)...(19): siRNA sense strand
ggagccaacaaaucucaau

SEQ ID NO: 1579979 - RNA, 19 nt, Homo sapiens
  misc_RNA (1)...(19): siRNA sense strand
gccacugaccggcugauga

SEQ ID NO: 1579980 - RNA, 19 nt, Homo sapiens
  misc_RNA (1)...(19): siRNA sense strand
uccagauccucaaagagaa

SEQ ID NO: 1579981 - RNA, 19 nt, Homo sapiens
  misc_RNA (1)...(19): siRNA sense strand
ggucgguggagucugauga

SEQ ID NO: 1579982 - RNA, 19 nt, Homo sapiens
  misc_RNA (1)...(19): siRNA sense strand
aagaugauggcauuggaaa

SEQ ID NO: 1579983 - RNA, 19 nt, Homo sapiens
  misc_RNA (1)...(19): siRNA sense strand
ggagucugaugacccuaac

SEQ ID NO: 1579984 - RNA, 19 nt, Homo sapiens
  misc_RNA (1)...(19): siRNA sense strand
agucagugaucaugcagau

SEQ ID NO: 1579985 - RNA, 19 nt, Homo sapiens
  misc_RNA (1)...(19): siRNA sense strand
gcagugccuacuccauaga

SEQ ID NO: 1579986 - RNA, 19 nt, Homo sapiens
  misc_RNA (1)...(19): siRNA sense strand
ugauuggaaugucaaacuc

SEQ ID NO: 1579987 - RNA, 19 nt, Homo sapiens
  misc_RNA (1)...(19): siRNA sense strand
cuuaaauggugcagugucu

SEQ ID NO: 1579988 - RNA, 19 nt, Homo sapiens
  misc_RNA (1)...(19): siRNA sense strand
cagaggcaagauuacuuaa

SEQ ID NO: 1579989 - RNA, 19 nt, Homo sapiens
  misc_RNA (1)...(19): siRNA sense strand
ugcagcaucugaagaggau

SEQ ID NO: 1579990 - RNA, 19 nt, Homo sapiens
  misc_RNA (1)...(19): siRNA sense strand
gauccucaaagagaaagaa

SEQ ID NO: 1579991 - RNA, 19 nt, Homo sapiens
  misc_RNA (1)...(19): siRNA sense strand
ggagcucagggauauauac

SEQ ID NO: 1579992 - RNA, 19 nt, Homo sapiens
  misc_RNA (1)...(19): siRNA sense strand
cugaccggcugaugaagga

SEQ ID NO: 1579993 - RNA, 19 nt, Homo sapiens
  misc_RNA (1)...(19): siRNA sense strand
agaggcaagauuacuuaaa

SEQ ID NO: 1579994 - RNA, 19 nt, Homo sapiens
  misc_RNA (1)...(19): siRNA sense strand
acaaaucucaauacagucu

SEQ ID NO: 1579995 - RNA, 19 nt, Homo sapiens
  misc_RNA (1)...(19): siRNA sense strand
caaaggcggaaacuaugca

SEQ ID NO: 1579996 - RNA, 19 nt, Homo sapiens
  misc_RNA (1)...(19): siRNA sense strand
aaacuaugcagucgaacuc

SEQ ID NO: 1579997 - RNA, 19 nt, Homo sapiens
  misc_RNA (1)...(19): siRNA sense strand
ggaaagacagugauuguua

SEQ ID NO: 1579998 - RNA, 19 nt, Homo sapiens
  misc_RNA (1)...(19): siRNA sense strand
gaaagacagugauuguuau

SEQ ID NO: 1579999 - RNA, 19 nt, Homo sapiens
  misc_RNA (1)...(19): siRNA sense strand
gaaagacaccauagucaua

SEQ ID NO: 1580000 - RNA, 19 nt, Homo sapiens
  misc_RNA (1)...(19): siRNA sense strand
gaagaacucagcaaucauu

SEQ ID NO: 1580001 - RNA, 19 nt, Homo sapiens
  misc_RNA (1)...(19): siRNA sense strand
gaagaaaggcgaucagcuu

SEQ ID NO: 1580002 - RNA, 19 nt, Homo sapiens
  misc_RNA (1)...(19): siRNA sense strand
caaagcacauggcaucuug

SEQ ID NO: 1580003 - RNA, 19 nt, Homo sapiens
  misc_RNA (1)...(19): siRNA sense strand
gcgaucagcuucaguagau

SEQ ID NO: 1580004 - RNA, 19 nt, Homo sapiens
  misc_RNA (1)...(19): siRNA sense strand
gcacauggcaucuuguaga

SEQ ID NO: 1580005 - RNA, 19 nt, Homo sapiens
  misc_RNA (1)...(19): siRNA sense strand
agaagaggaugaaauguau

SEQ ID NO: 1580006 - RNA, 19 nt, Homo sapiens
  misc_RNA (1)...(19): siRNA sense strand
ggacucacaauuccagaua

SEQ ID NO: 1580007 - RNA, 19 nt, Homo sapiens
  misc_RNA (1)...(19): siRNA sense strand
gaaguuccuuugaaucaca

SEQ ID NO: 1580008 - RNA, 19 nt, Homo sapiens
  misc_RNA (1)...(19): siRNA sense strand
gcagaaguacgagauuaua

SEQ ID NO: 1580009 - RNA, 19 nt, Homo sapiens
  misc_RNA (1)...(19): siRNA sense strand
ggaccuagauagucuggau

SEQ ID NO: 1580010 - RNA, 19 nt, Homo sapiens
  misc_RNA (1)...(19): siRNA sense strand
ggaugaaguugugauaugu

SEQ ID NO: 1580011 - RNA, 19 nt, Homo sapiens
  misc_RNA (1)...(19): siRNA sense strand
gcugaguguucacgacaua

SEQ ID NO: 1580012 - RNA, 19 nt, Homo sapiens
  misc_RNA (1)...(19): siRNA sense strand
ugaauaaggacucacaauu

SEQ ID NO: 1580013 - RNA, 19 nt, Homo sapiens
  misc_RNA (1)...(19): siRNA sense strand
gcgcucugauucucaaauu

SEQ ID NO: 1580014 - RNA, 19 nt, Homo sapiens
  misc_RNA (1)...(19): siRNA sense strand
gaaaaugggcuauaccaaa

SEQ ID NO: 1580015 - RNA, 19 nt, Homo sapiens
  misc_RNA (1)...(19): siRNA sense strand
uggaagaacucagcaauca

SEQ ID NO: 1580016 - RNA, 19 nt, Homo sapiens
  misc_RNA (1)...(19): siRNA sense strand
gcaagaagagcaagagaag

SEQ ID NO: 1580017 - RNA, 19 nt, Homo sapiens
  misc_RNA (1)...(19): siRNA sense strand
ucacaugccuaaaucaucu

SEQ ID NO: 1580018 - RNA, 19 nt, Homo sapiens
  misc_RNA (1)...(19): siRNA sense strand
aggaggagcugaacgaguu

SEQ ID NO: 1580019 - RNA, 19 nt, Homo sapiens
  misc_RNA (1)...(19): siRNA sense strand
gaagacgccaguccuauag

SEQ ID NO: 1580020 - RNA, 19 nt, Homo sapiens
  misc_RNA (1)...(19): siRNA sense strand
uggcagaaguacgagauua

SEQ ID NO: 1580021 - RNA, 19 nt, Homo sapiens
  misc_RNA (1)...(19): siRNA sense strand
ggaggaugaaguugugaua

SEQ ID NO: 1580022 - RNA, 19 nt, Homo sapiens
  misc_RNA (1)...(19): siRNA sense strand
gaagaggaugaaauguaua

SEQ ID NO: 1580023 - RNA, 19 nt, Homo sapiens
  misc_RNA (1)...(19): siRNA sense strand
aagaagaggaugaaaugua

SEQ ID NO: 1580024 - RNA, 19 nt, Homo sapiens
  misc_RNA (1)...(19): siRNA sense strand
gaguagaagcccacauaaa

SEQ ID NO: 1580025 - RNA, 19 nt, Homo sapiens
  misc_RNA (1)...(19): siRNA sense strand
ccaaucaucacaugccuaa

SEQ ID NO: 1580026 - RNA, 19 nt, Homo sapiens
  misc_RNA (1)...(19): siRNA sense strand
ggaguagaagcccacauaa

SEQ ID NO: 1580027 - RNA, 19 nt, Homo sapiens
  misc_RNA (1)...(19): siRNA sense strand
ucacauaaccaagaaauca

SEQ ID NO: 1580028 - RNA, 19 nt, Homo sapiens
  misc_RNA (1)...(19): siRNA sense strand
ggaaagacaccauagucau

SEQ ID NO: 1580029 - RNA, 19 nt, Homo sapiens
  misc_RNA (1)...(19): siRNA sense strand
gauucgagaugugauaaau

SEQ ID NO: 1580030 - RNA, 19 nt, Homo sapiens
  misc_RNA (1)...(19): siRNA sense strand
ccaaagaagaagaggauga

SEQ ID NO: 1580031 - RNA, 19 nt, Homo sapiens
  misc_RNA (1)...(19): siRNA sense strand
gaaaggcgaucagcuucag

SEQ ID NO: 1580032 - RNA, 19 nt, Homo sapiens
  misc_RNA (1)...(19): siRNA sense strand
ccucuaugauuucguaguu

SEQ ID NO: 1580033 - RNA, 19 nt, Homo sapiens
  misc_RNA (1)...(19): siRNA sense strand
uaccuucgauuacuuugaa

SEQ ID NO: 1580034 - RNA, 19 nt, Homo sapiens
  misc_RNA (1)...(19): siRNA sense strand
agaagaagaggaugaaaug

SEQ ID NO: 1580035 - RNA, 19 nt, Homo sapiens
  misc_RNA (1)...(19): siRNA sense strand
caaagaagaagaggaugaa

SEQ ID NO: 1580036 - RNA, 19 nt, Homo sapiens
  misc_RNA (1)...(19): siRNA sense strand
gcucugauucucaaauuau

SEQ ID NO: 1580037 - RNA, 19 nt, Homo sapiens
  misc_RNA (1)...(19): siRNA sense strand
cagaaguacgagauuauaa

SEQ ID NO: 1580038 - RNA, 19 nt, Homo sapiens
  misc_RNA (1)...(19): siRNA sense strand
agaagacgccaguccuaua

SEQ ID NO: 1580039 - RNA, 19 nt, Homo sapiens
  misc_RNA (1)...(19): siRNA sense strand
gcagucugguggaagcuau

SEQ ID NO: 1580040 - RNA, 19 nt, Homo sapiens
  misc_RNA (1)...(19): siRNA sense strand
gacucacaauuccagauaa

SEQ ID NO: 1580041 - RNA, 19 nt, Homo sapiens
  misc_RNA (1)...(19): siRNA sense strand
aaagacaccauagucauaa

SEQ ID NO: 1580042 - RNA, 19 nt, Homo sapiens
  misc_RNA (1)...(19): siRNA sense strand
gggaaagacaccauaguca

SEQ ID NO: 1580043 - RNA, 19 nt, Homo sapiens
  misc_RNA (1)...(19): siRNA sense strand
ucuaugauuucguaguuga

SEQ ID NO: 1580044 - RNA, 19 nt, Homo sapiens
  misc_RNA (1)...(19): siRNA sense strand
cauagaagggauaggagua

SEQ ID NO: 1580045 - RNA, 19 nt, Homo sapiens
  misc_RNA (1)...(19): siRNA sense strand
cgacauagaagggauagga

SEQ ID NO: 1580046 - RNA, 19 nt, Homo sapiens
  misc_RNA (1)...(19): siRNA sense strand
gaggaugaaauguauaauc

SEQ ID NO: 1580047 - RNA, 19 nt, Homo sapiens
  misc_RNA (1)...(19): siRNA sense strand
ugaaauccuggcagaagua

SEQ ID NO: 1580048 - RNA, 19 nt, Homo sapiens
  misc_RNA (1)...(19): siRNA sense strand
gucuugcccucuaugauuu

SEQ ID NO: 1580049 - RNA, 19 nt, Homo sapiens
  misc_RNA (1)...(19): siRNA sense strand
gcugggaccuagauagucu

SEQ ID NO: 1580050 - RNA, 19 nt, Homo sapiens
  misc_RNA (1)...(19): siRNA sense strand
gcaaagcacauggcaucuu

SEQ ID NO: 1580051 - RNA, 19 nt, Homo sapiens
  misc_RNA (1)...(19): siRNA sense strand
aggaugaaguugugauaug

SEQ ID NO: 1580052 - RNA, 19 nt, Homo sapiens
  misc_RNA (1)...(19): siRNA sense strand
cgauuacuuugaauaagga

SEQ ID NO: 1580053 - RNA, 19 nt, Homo sapiens
  misc_RNA (1)...(19): siRNA sense strand
aaagaagacgccaguccua

SEQ ID NO: 1580054 - RNA, 19 nt, Homo sapiens
  misc_RNA (1)...(19): siRNA sense strand
gaagaagaggaugaaaugu

SEQ ID NO: 1580055 - RNA, 19 nt, Homo sapiens
  misc_RNA (1)...(19): siRNA sense strand
ccagauaauuaaacaagcu

SEQ ID NO: 1580056 - RNA, 19 nt, Homo sapiens
  misc_RNA (1)...(19): siRNA sense strand
cgucuugcccucuaugauu

SEQ ID NO: 1580057 - RNA, 19 nt, Homo sapiens
  misc_RNA (1)...(19): siRNA sense strand
cuauuuggaugcugagugu

SEQ ID NO: 1580058 - RNA, 19 nt, Homo sapiens
  misc_RNA (1)...(19): siRNA sense strand
ccaaaauccuaccuugaaa

SEQ ID NO: 1580059 - RNA, 19 nt, Homo sapiens
  misc_RNA (1)...(19): siRNA sense strand
aaucaucacaugccuaaau

SEQ ID NO: 1580060 - RNA, 19 nt, Homo sapiens
  misc_RNA (1)...(19): siRNA sense strand
aaagcgcucugauucucaa

SEQ ID NO: 1580061 - RNA, 19 nt, Homo sapiens
  misc_RNA (1)...(19): siRNA sense strand
gaucagcuucaguagauuc

SEQ ID NO: 1580062 - RNA, 19 nt, Homo sapiens
  misc_RNA (1)...(19): siRNA sense strand
ggcaagaagagcaagagaa

SEQ ID NO: 1580063 - RNA, 19 nt, Homo sapiens
  misc_RNA (1)...(19): siRNA sense strand
gggcuauaccaaagaagaa

SEQ ID NO: 1580064 - RNA, 19 nt, Homo sapiens
  misc_RNA (1)...(19): siRNA sense strand
aggaguagaagcccacaua

SEQ ID NO: 1580065 - RNA, 19 nt, Homo sapiens
  misc_RNA (1)...(19): siRNA sense strand
ggugauucgagaugugaua

SEQ ID NO: 1580066 - RNA, 19 nt, Homo sapiens
  misc_RNA (1)...(19): siRNA sense strand
aagauaccuucgauuacuu

SEQ ID NO: 1580067 - RNA, 19 nt, Homo sapiens
  misc_RNA (1)...(19): siRNA sense strand
gaaguugugauauguccau

SEQ ID NO: 1580068 - RNA, 19 nt, Homo sapiens
  misc_RNA (1)...(19): siRNA sense strand
uucgagaugugauaaaugu

SEQ ID NO: 1580069 - RNA, 19 nt, Homo sapiens
  misc_RNA (1)...(19): siRNA sense strand
accaagaaaucauguacug

SEQ ID NO: 1580070 - RNA, 19 nt, Homo sapiens
  misc_RNA (1)...(19): siRNA sense strand
gggaaagacagugauuguu

SEQ ID NO: 1580071 - RNA, 19 nt, Homo sapiens
  misc_RNA (1)...(19): siRNA sense strand
aauaaggacucacaauucc

SEQ ID NO: 1580072 - RNA, 19 nt, Homo sapiens
  misc_RNA (1)...(19): siRNA sense strand
ucgauuacuuugaauaagg

SEQ ID NO: 1580073 - RNA, 19 nt, Homo sapiens
  misc_RNA (1)...(19): siRNA sense strand
aagagaaggcagaggauga

SEQ ID NO: 1580074 - RNA, 19 nt, Homo sapiens
  misc_RNA (1)...(19): siRNA sense strand
gcaagagaaggcagaggau

SEQ ID NO: 1580075 - RNA, 19 nt, Homo sapiens
  misc_RNA (1)...(19): siRNA sense strand
ugaucuaacucaagcugau

SEQ ID NO: 1580076 - RNA, 19 nt, Homo sapiens
  misc_RNA (1)...(19): siRNA sense strand
ggcggaggaugaaguugug

SEQ ID NO: 1580077 - RNA, 19 nt, Homo sapiens
  misc_RNA (1)...(19): siRNA sense strand
ggcagaaguacgagauuau

SEQ ID NO: 1580078 - RNA, 19 nt, Homo sapiens
  misc_RNA (1)...(19): siRNA sense strand
gaagggauaggaguagaag

SEQ ID NO: 1580079 - RNA, 19 nt, Homo sapiens
  misc_RNA (1)...(19): siRNA sense strand
gaaugaagaaaggcgauca

SEQ ID NO: 1580080 - RNA, 19 nt, Homo sapiens
  misc_RNA (1)...(19): siRNA sense strand
cgaaaagaaugaagaaagg

SEQ ID NO: 1580081 - RNA, 19 nt, Homo sapiens
  misc_RNA (1)...(19): siRNA sense strand
gaggaugaaguugugauau

SEQ ID NO: 1580082 - RNA, 19 nt, Homo sapiens
  misc_RNA (1)...(19): siRNA sense strand
uagaagggauaggaguaga

SEQ ID NO: 1580083 - RNA, 19 nt, Homo sapiens
  misc_RNA (1)...(19): siRNA sense strand
gaggugauucgagauguga

SEQ ID NO: 1580084 - RNA, 19 nt, Homo sapiens
  misc_RNA (1)...(19): siRNA sense strand
acucacaauuccagauaau

SEQ ID NO: 1580085 - RNA, 19 nt, Homo sapiens
  misc_RNA (1)...(19): siRNA sense strand
aagacaccauagucauaaa

SEQ ID NO: 1580086 - RNA, 19 nt, Homo sapiens
  misc_RNA (1)...(19): siRNA sense strand
aaugggcuauaccaaagaa

SEQ ID NO: 1580087 - RNA, 19 nt, Homo sapiens
  misc_RNA (1)...(19): siRNA sense strand
ggaagaacucagcaaucau

SEQ ID NO: 1580088 - RNA, 19 nt, Homo sapiens
  misc_RNA (1)...(19): siRNA sense strand
ccaagaaaucauguacuga

SEQ ID NO: 1580089 - RNA, 19 nt, Homo sapiens
  misc_RNA (1)...(19): siRNA sense strand
aagaagaagaggaugaaau

SEQ ID NO: 1580090 - RNA, 19 nt, Homo sapiens
  misc_RNA (1)...(19): siRNA sense strand
uguugaaguuccuuugaau

SEQ ID NO: 1580091 - RNA, 19 nt, Homo sapiens
  misc_RNA (1)...(19): siRNA sense strand
cgcucugauucucaaauua

SEQ ID NO: 1580092 - RNA, 19 nt, Homo sapiens
  misc_RNA (1)...(19): siRNA sense strand
aagcacauggcaucuugua

SEQ ID NO: 1580093 - RNA, 19 nt, Homo sapiens
  misc_RNA (1)...(19): siRNA sense strand
aaaaugggcuauaccaaag

SEQ ID NO: 1580094 - RNA, 19 nt, Homo sapiens
  misc_RNA (1)...(19): siRNA sense strand
uaaccaagaaaucauguac

SEQ ID NO: 1580095 - RNA, 19 nt, Homo sapiens
  misc_RNA (1)...(19): siRNA sense strand
guucacauaaccaagaaau

SEQ ID NO: 1580096 - RNA, 19 nt, Homo sapiens
  misc_RNA (1)...(19): siRNA sense strand
cuauagagccaagaauguu

SEQ ID NO: 1580097 - RNA, 19 nt, Homo sapiens
  misc_RNA (1)...(19): siRNA sense strand
gaaagaagugugggaaaua

SEQ ID NO: 1580098 - RNA, 19 nt, Homo sapiens
  misc_RNA (1)...(19): siRNA sense strand
gaaggucgcaucagguaua

SEQ ID NO: 1580099 - RNA, 19 nt, Homo sapiens
  misc_RNA (1)...(19): siRNA sense strand
aaagaagugugggaaauaa

SEQ ID NO: 1580100 - RNA, 19 nt, Homo sapiens
  misc_RNA (1)...(19): siRNA sense strand
caaaaggccucacagcaua

SEQ ID NO: 1580101 - RNA, 19 nt, Homo sapiens
  misc_RNA (1)...(19): siRNA sense strand
cagcauauguaaguaauga

SEQ ID NO: 1580102 - RNA, 19 nt, Homo sapiens
  misc_RNA (1)...(19): siRNA sense strand
ccaugaagguggacaguau

SEQ ID NO: 1580103 - RNA, 19 nt, Homo sapiens
  misc_RNA (1)...(19): siRNA sense strand
ucauugaacucauggaugu

SEQ ID NO: 1580104 - RNA, 19 nt, Homo sapiens
  misc_RNA (1)...(19): siRNA sense strand
ccucaucggugucuacuuc

SEQ ID NO: 1580105 - RNA, 19 nt, Homo sapiens
  misc_RNA (1)...(19): siRNA sense strand
ggacauggagaaagaagug

SEQ ID NO: 1580106 - RNA, 19 nt, Homo sapiens
  misc_RNA (1)...(19): siRNA sense strand
gcucauuccucuacacagu

SEQ ID NO: 1580107 - RNA, 19 nt, Homo sapiens
  misc_RNA (1)...(19): siRNA sense strand
agaaagaagugugggaaau

SEQ ID NO: 1580108 - RNA, 19 nt, Homo sapiens
  misc_RNA (1)...(19): siRNA sense strand
gagcugugguugcaguuca

SEQ ID NO: 1580109 - RNA, 19 nt, Homo sapiens
  misc_RNA (1)...(19): siRNA sense strand
gagaaagaagugugggaaa

SEQ ID NO: 1580110 - RNA, 19 nt, Homo sapiens
  misc_RNA (1)...(19): siRNA sense strand
ggaggcaaccuguaugauc

SEQ ID NO: 1580111 - RNA, 19 nt, Homo sapiens
  misc_RNA (1)...(19): siRNA sense strand
ucacagcauauguaaguaa

SEQ ID NO: 1580112 - RNA, 19 nt, Homo sapiens
  misc_RNA (1)...(19): siRNA sense strand
ggucgcaucagguauaaga

SEQ ID NO: 1580113 - RNA, 19 nt, Homo sapiens
  misc_RNA (1)...(19): siRNA sense strand
gaacucauggauguggaua

SEQ ID NO: 1580114 - RNA, 19 nt, Homo sapiens
  misc_RNA (1)...(19): siRNA sense strand
gaaggagccagagguauca

SEQ ID NO: 1580115 - RNA, 19 nt, Homo sapiens
  misc_RNA (1)...(19): siRNA sense strand
gguauaagaaacccaugaa

SEQ ID NO: 1580116 - RNA, 19 nt, Homo sapiens
  misc_RNA (1)...(19): siRNA sense strand
ucuguaaccuggacaucuu

SEQ ID NO: 1580117 - RNA, 19 nt, Homo sapiens
  misc_RNA (1)...(19): siRNA sense strand
ccucacagcauauguaagu

SEQ ID NO: 1580118 - RNA, 19 nt, Homo sapiens
  misc_RNA (1)...(19): siRNA sense strand
ggaucccacugcucugaau

SEQ ID NO: 1580119 - RNA, 19 nt, Homo sapiens
  misc_RNA (1)...(19): siRNA sense strand
cgugucccauucaagauaa

SEQ ID NO: 1580120 - RNA, 19 nt, Homo sapiens
  misc_RNA (1)...(19): siRNA sense strand
gcuucuaccugccagugaa

SEQ ID NO: 1580121 - RNA, 19 nt, Homo sapiens
  misc_RNA (1)...(19): siRNA sense strand
ggcguuacuuucaccauca

SEQ ID NO: 1580122 - RNA, 19 nt, Homo sapiens
  misc_RNA (1)...(19): siRNA sense strand
cacagcauauguaaguaau

SEQ ID NO: 1580123 - RNA, 19 nt, Homo sapiens
  misc_RNA (1)...(19): siRNA sense strand
ugaaggagccagagguauc

SEQ ID NO: 1580124 - RNA, 19 nt, Homo sapiens
  misc_RNA (1)...(19): siRNA sense strand
caucaauugcucaggguuu

SEQ ID NO: 1580125 - RNA, 19 nt, Homo sapiens
  misc_RNA (1)...(19): siRNA sense strand
gcauauguaaguaaugaag

SEQ ID NO: 1580126 - RNA, 19 nt, Homo sapiens
  misc_RNA (1)...(19): siRNA sense strand
uaucaucaccgucauaugc

SEQ ID NO: 1580127 - RNA, 19 nt, Homo sapiens
  misc_RNA (1)...(19): siRNA sense strand
ccagacauuuucaucauug

SEQ ID NO: 1580128 - RNA, 19 nt, Homo sapiens
  misc_RNA (1)...(19): siRNA sense strand
acacucaccuucagcucau

SEQ ID NO: 1580129 - RNA, 19 nt, Homo sapiens
  misc_RNA (1)...(19): siRNA sense strand
auaagaaacccaugaaggu

SEQ ID NO: 1580130 - RNA, 19 nt, Homo sapiens
  misc_RNA (1)...(19): siRNA sense strand
ggccucacagcauauguaa

SEQ ID NO: 1580131 - RNA, 19 nt, Homo sapiens
  misc_RNA (1)...(19): siRNA sense strand
ggaaggggcguuacuuuca

SEQ ID NO: 1580132 - RNA, 19 nt, Homo sapiens
  misc_RNA (1)...(19): siRNA sense strand
aaucgugucccauucaaga

SEQ ID NO: 1580133 - RNA, 19 nt, Homo sapiens
  misc_RNA (1)...(19): siRNA sense strand
uuacuuucaccaucaauug

SEQ ID NO: 1580134 - RNA, 19 nt, Homo sapiens
  misc_RNA (1)...(19): siRNA sense strand
ggaacccagaggaauguga

SEQ ID NO: 1580135 - RNA, 19 nt, Homo sapiens
  misc_RNA (1)...(19): siRNA sense strand
ucgaugcccucagcuucua

SEQ ID NO: 1580136 - RNA, 19 nt, Homo sapiens
  misc_RNA (1)...(19): siRNA sense strand
ucauggauguggauaagac

SEQ ID NO: 1580137 - RNA, 19 nt, Homo sapiens
  misc_RNA (1)...(19): siRNA sense strand
uucauggccuccucuauca

SEQ ID NO: 1580138 - RNA, 19 nt, Homo sapiens
  misc_RNA (1)...(19): siRNA sense strand
ucgcaucagguauaagaaa

SEQ ID NO: 1580139 - RNA, 19 nt, Homo sapiens
  misc_RNA (1)...(19): siRNA sense strand
gggaacacgaggcccagaa

SEQ ID NO: 1580140 - RNA, 19 nt, Homo sapiens
  misc_RNA (1)...(19): siRNA sense strand
gguaucagcagggcagaug

SEQ ID NO: 1580141 - RNA, 19 nt, Homo sapiens
  misc_RNA (1)...(19): siRNA sense strand
aaggucgcaucagguauaa

SEQ ID NO: 1580142 - RNA, 19 nt, Homo sapiens
  misc_RNA (1)...(19): siRNA sense strand
ggaacacgaggcccagaag

SEQ ID NO: 1580143 - RNA, 19 nt, Homo sapiens
  misc_RNA (1)...(19): siRNA sense strand
caguggagcugugguugca

SEQ ID NO: 1580144 - RNA, 19 nt, Homo sapiens
  misc_RNA (1)...(19): siRNA sense strand
gcguuacuuucaccaucaa

SEQ ID NO: 1580145 - RNA, 19 nt, Homo sapiens
  misc_RNA (1)...(19): siRNA sense strand
gaucccacugcucugaauu

SEQ ID NO: 1580146 - RNA, 19 nt, Homo sapiens
  misc_RNA (1)...(19): siRNA sense strand
ugugaaggagccagaggua

SEQ ID NO: 1580147 - RNA, 19 nt, Homo sapiens
  misc_RNA (1)...(19): siRNA sense strand
gcggaucccacugcucuga

SEQ ID NO: 1580148 - RNA, 19 nt, Homo sapiens
  misc_RNA (1)...(19): siRNA sense strand
acucauggauguggauaag

SEQ ID NO: 1580149 - RNA, 19 nt, Homo sapiens
  misc_RNA (1)...(19): siRNA sense strand
agaagugugggaaauaaca

SEQ ID NO: 1580150 - RNA, 19 nt, Homo sapiens
  misc_RNA (1)...(19): siRNA sense strand
ugcuggacauggagaaaga

SEQ ID NO: 1580151 - RNA, 19 nt, Homo sapiens
  misc_RNA (1)...(19): siRNA sense strand
cacaguggacagcauguug

SEQ ID NO: 1580152 - RNA, 19 nt, Homo sapiens
  misc_RNA (1)...(19): siRNA sense strand
uaaccuggacaucuucuac

SEQ ID NO: 1580153 - RNA, 19 nt, Homo sapiens
  misc_RNA (1)...(19): siRNA sense strand
gaaagaagugugggaaaua

SEQ ID NO: 1580154 - RNA, 19 nt, Homo sapiens
  misc_RNA (1)...(19): siRNA sense strand
gaaggucgcaucagguaua

SEQ ID NO: 1580155 - RNA, 19 nt, Homo sapiens
  misc_RNA (1)...(19): siRNA sense strand
aaagaagugugggaaauaa

SEQ ID NO: 1580156 - RNA, 19 nt, Homo sapiens
  misc_RNA (1)...(19): siRNA sense strand
caaaaggccucacagcaua

SEQ ID NO: 1580157 - RNA, 19 nt, Homo sapiens
  misc_RNA (1)...(19): siRNA sense strand
cagcauauguaaguaauga

SEQ ID NO: 1580158 - RNA, 19 nt, Homo sapiens
  misc_RNA (1)...(19): siRNA sense strand
ccaugaagguggacaguau

SEQ ID NO: 1580159 - RNA, 19 nt, Homo sapiens
  misc_RNA (1)...(19): siRNA sense strand
ucauugaacucauggaugu

SEQ ID NO: 1580160 - RNA, 19 nt, Homo sapiens
  misc_RNA (1)...(19): siRNA sense strand
ccucaucggugucuacuuc

SEQ ID NO: 1580161 - RNA, 19 nt, Homo sapiens
  misc_RNA (1)...(19): siRNA sense strand
ggacauggagaaagaagug

SEQ ID NO: 1580162 - RNA, 19 nt, Homo sapiens
  misc_RNA (1)...(19): siRNA sense strand
gcucauuccucuacacagu

SEQ ID NO: 1580163 - RNA, 19 nt, Homo sapiens
  misc_RNA (1)...(19): siRNA sense strand
agaaagaagugugggaaau

SEQ ID NO: 1580164 - RNA, 19 nt, Homo sapiens
  misc_RNA (1)...(19): siRNA sense strand
gagcugugguugcaguuca

SEQ ID NO: 1580165 - RNA, 19 nt, Homo sapiens
  misc_RNA (1)...(19): siRNA sense strand
gagaaagaagugugggaaa

SEQ ID NO: 1580166 - RNA, 19 nt, Homo sapiens
  misc_RNA (1)...(19): siRNA sense strand
ggaggcaaccuguaugauc

SEQ ID NO: 1580167 - RNA, 19 nt, Homo sapiens
  misc_RNA (1)...(19): siRNA sense strand
ucacagcauauguaaguaa

SEQ ID NO: 1580168 - RNA, 19 nt, Homo sapiens
  misc_RNA (1)...(19): siRNA sense strand
ggucgcaucagguauaaga

SEQ ID NO: 1580169 - RNA, 19 nt, Homo sapiens
  misc_RNA (1)...(19): siRNA sense strand
gaacucauggauguggaua

SEQ ID NO: 1580170 - RNA, 19 nt, Homo sapiens
  misc_RNA (1)...(19): siRNA sense strand
gaaggagccagagguauca

SEQ ID NO: 1580171 - RNA, 19 nt, Homo sapiens
  misc_RNA (1)...(19): siRNA sense strand
gguauaagaaacccaugaa

SEQ ID NO: 1580172 - RNA, 19 nt, Homo sapiens
  misc_RNA (1)...(19): siRNA sense strand
ucuguaaccuggacaucuu

SEQ ID NO: 1580173 - RNA, 19 nt, Homo sapiens
  misc_RNA (1)...(19): siRNA sense strand
ccucacagcauauguaagu

SEQ ID NO: 1580174 - RNA, 19 nt, Homo sapiens
  misc_RNA (1)...(19): siRNA sense strand
ggaucccacugcucugaau

SEQ ID NO: 1580175 - RNA, 19 nt, Homo sapiens
  misc_RNA (1)...(19): siRNA sense strand
cgugucccauucaagauaa

SEQ ID NO: 1580176 - RNA, 19 nt, Homo sapiens
  misc_RNA (1)...(19): siRNA sense strand
gcuucuaccugccagugaa

SEQ ID NO: 1580177 - RNA, 19 nt, Homo sapiens
  misc_RNA (1)...(19): siRNA sense strand
ggcguuacuuucaccauca

SEQ ID NO: 1580178 - RNA, 19 nt, Homo sapiens
  misc_RNA (1)...(19): siRNA sense strand
cacagcauauguaaguaau

SEQ ID NO: 1580179 - RNA, 19 nt, Homo sapiens
  misc_RNA (1)...(19): siRNA sense strand
ugaaggagccagagguauc

SEQ ID NO: 1580180 - RNA, 19 nt, Homo sapiens
  misc_RNA (1)...(19): siRNA sense strand
caucaauugcucaggguuu

SEQ ID NO: 1580181 - RNA, 19 nt, Homo sapiens
  misc_RNA (1)...(19): siRNA sense strand
gcauauguaaguaaugaag

SEQ ID NO: 1580182 - RNA, 19 nt, Homo sapiens
  misc_RNA (1)...(19): siRNA sense strand
uaucaucaccgucauaugc

SEQ ID NO: 1580183 - RNA, 19 nt, Homo sapiens
  misc_RNA (1)...(19): siRNA sense strand
ccagacauuuucaucauug

SEQ ID NO: 1580184 - RNA, 19 nt, Homo sapiens
  misc_RNA (1)...(19): siRNA sense strand
acacucaccuucagcucau

SEQ ID NO: 1580185 - RNA, 19 nt, Homo sapiens
  misc_RNA (1)...(19): siRNA sense strand
auaagaaacccaugaaggu

SEQ ID NO: 1580186 - RNA, 19 nt, Homo sapiens
  misc_RNA (1)...(19): siRNA sense strand
ggccucacagcauauguaa

SEQ ID NO: 1580187 - RNA, 19 nt, Homo sapiens
  misc_RNA (1)...(19): siRNA sense strand
ggaaggggcguuacuuuca

SEQ ID NO: 1580188 - RNA, 19 nt, Homo sapiens
  misc_RNA (1)...(19): siRNA sense strand
aaucgugucccauucaaga

SEQ ID NO: 1580189 - RNA, 19 nt, Homo sapiens
  misc_RNA (1)...(19): siRNA sense strand
uuacuuucaccaucaauug

SEQ ID NO: 1580190 - RNA, 19 nt, Homo sapiens
  misc_RNA (1)...(19): siRNA sense strand
ggaacccagaggaauguga

SEQ ID NO: 1580191 - RNA, 19 nt, Homo sapiens
  misc_RNA (1)...(19): siRNA sense strand
ucgaugcccucagcuucua

SEQ ID NO: 1580192 - RNA, 19 nt, Homo sapiens
  misc_RNA (1)...(19): siRNA sense strand
ucauggauguggauaagac

SEQ ID NO: 1580193 - RNA, 19 nt, Homo sapiens
  misc_RNA (1)...(19): siRNA sense strand
uucauggccuccucuauca

SEQ ID NO: 1580194 - RNA, 19 nt, Homo sapiens
  misc_RNA (1)...(19): siRNA sense strand
ucgcaucagguauaagaaa

SEQ ID NO: 1580195 - RNA, 19 nt, Homo sapiens
  misc_RNA (1)...(19): siRNA sense strand
gggaacacgaggcccagaa

SEQ ID NO: 1580196 - RNA, 19 nt, Homo sapiens
  misc_RNA (1)...(19): siRNA sense strand
gguaucagcagggcagaug

SEQ ID NO: 1580197 - RNA, 19 nt, Homo sapiens
  misc_RNA (1)...(19): siRNA sense strand
aaggucgcaucagguauaa

SEQ ID NO: 1580198 - RNA, 19 nt, Homo sapiens
  misc_RNA (1)...(19): siRNA sense strand
ggaacacgaggcccagaag

SEQ ID NO: 1580199 - RNA, 19 nt, Homo sapiens
  misc_RNA (1)...(19): siRNA sense strand
caguggagcugugguugca

SEQ ID NO: 1580200 - RNA, 19 nt, Homo sapiens
  misc_RNA (1)...(19): siRNA sense strand
gcguuacuuucaccaucaa

SEQ ID NO: 1580201 - RNA, 19 nt, Homo sapiens
  misc_RNA (1)...(19): siRNA sense strand
gaucccacugcucugaauu

SEQ ID NO: 1580202 - RNA, 19 nt, Homo sapiens
  misc_RNA (1)...(19): siRNA sense strand
ugugaaggagccagaggua

SEQ ID NO: 1580203 - RNA, 19 nt, Homo sapiens
  misc_RNA (1)...(19): siRNA sense strand
gcggaucccacugcucuga

SEQ ID NO: 1580204 - RNA, 19 nt, Homo sapiens
  misc_RNA (1)...(19): siRNA sense strand
acucauggauguggauaag

SEQ ID NO: 1580205 - RNA, 19 nt, Homo sapiens
  misc_RNA (1)...(19): siRNA sense strand
agaagugugggaaauaaca

SEQ ID NO: 1580206 - RNA, 19 nt, Homo sapiens
  misc_RNA (1)...(19): siRNA sense strand
ugcuggacauggagaaaga

SEQ ID NO: 1580207 - RNA, 19 nt, Homo sapiens
  misc_RNA (1)...(19): siRNA sense strand
cacaguggacagcauguug

SEQ ID NO: 1580208 - RNA, 19 nt, Homo sapiens
  misc_RNA (1)...(19): siRNA sense strand
uaaccuggacaucuucuac

SEQ ID NO: 1580209 - RNA, 19 nt, Homo sapiens
  misc_RNA (1)...(19): siRNA sense strand
gcaugaagaucaaagauaa

SEQ ID NO: 1580210 - RNA, 19 nt, Homo sapiens
  misc_RNA (1)...(19): siRNA sense strand
caacaacgaucuaaccauu

SEQ ID NO: 1580211 - RNA, 19 nt, Homo sapiens
  misc_RNA (1)...(19): siRNA sense strand
gaauggaacugcaagaaga

SEQ ID NO: 1580212 - RNA, 19 nt, Homo sapiens
  misc_RNA (1)...(19): siRNA sense strand
uaacaucacugucauauac

SEQ ID NO: 1580213 - RNA, 19 nt, Homo sapiens
  misc_RNA (1)...(19): siRNA sense strand
cccagaagcuccugacuua

SEQ ID NO: 1580214 - RNA, 19 nt, Homo sapiens
  misc_RNA (1)...(19): siRNA sense strand
uaaaggauauuguggagaa

SEQ ID NO: 1580215 - RNA, 19 nt, Homo sapiens
  misc_RNA (1)...(19): siRNA sense strand
gcaagaagacuacggauau

SEQ ID NO: 1580216 - RNA, 19 nt, Homo sapiens
  misc_RNA (1)...(19): siRNA sense strand
caagaucccuguagguuca

SEQ ID NO: 1580217 - RNA, 19 nt, Homo sapiens
  misc_RNA (1)...(19): siRNA sense strand
ggagacaucuacaguacug

SEQ ID NO: 1580218 - RNA, 19 nt, Homo sapiens
  misc_RNA (1)...(19): siRNA sense strand
gaagacuacggauaugaua

SEQ ID NO: 1580219 - RNA, 19 nt, Homo sapiens
  misc_RNA (1)...(19): siRNA sense strand
caacuccucucccuucaau

SEQ ID NO: 1580220 - RNA, 19 nt, Homo sapiens
  misc_RNA (1)...(19): siRNA sense strand
gcacaucacagccaauuuc

SEQ ID NO: 1580221 - RNA, 19 nt, Homo sapiens
  misc_RNA (1)...(19): siRNA sense strand
gaauacaaguacucaugga

SEQ ID NO: 1580222 - RNA, 19 nt, Homo sapiens
  misc_RNA (1)...(19): siRNA sense strand
ggucagguacuaaaggaua

SEQ ID NO: 1580223 - RNA, 19 nt, Homo sapiens
  misc_RNA (1)...(19): siRNA sense strand
gaaaagugggucaguguua

SEQ ID NO: 1580224 - RNA, 19 nt, Homo sapiens
  misc_RNA (1)...(19): siRNA sense strand
aaaccacaaugacaucuug

SEQ ID NO: 1580225 - RNA, 19 nt, Homo sapiens
  misc_RNA (1)...(19): siRNA sense strand
caagaagacuacggauaug

SEQ ID NO: 1580226 - RNA, 19 nt, Homo sapiens
  misc_RNA (1)...(19): siRNA sense strand
ggccggagccuacaacuug

SEQ ID NO: 1580227 - RNA, 19 nt, Homo sapiens
  misc_RNA (1)...(19): siRNA sense strand
gccgauagccguccgcuuu

SEQ ID NO: 1580228 - RNA, 19 nt, Homo sapiens
  misc_RNA (1)...(19): siRNA sense strand
gaggcgaccuugccgauag

SEQ ID NO: 1580229 - RNA, 19 nt, Homo sapiens
  misc_RNA (1)...(19): siRNA sense strand
ggcaagacauaccuagaug

SEQ ID NO: 1580230 - RNA, 19 nt, Homo sapiens
  misc_RNA (1)...(19): siRNA sense strand
cagccaauuucacacagua

SEQ ID NO: 1580231 - RNA, 19 nt, Homo sapiens
  misc_RNA (1)...(19): siRNA sense strand
aaagacaaauggagaacug

SEQ ID NO: 1580232 - RNA, 19 nt, Homo sapiens
  misc_RNA (1)...(19): siRNA sense strand
caugcaggcucucucugua

SEQ ID NO: 1580233 - RNA, 19 nt, Homo sapiens
  misc_RNA (1)...(19): siRNA sense strand
gaaaggcaagacauaccua

SEQ ID NO: 1580234 - RNA, 19 nt, Homo sapiens
  misc_RNA (1)...(19): siRNA sense strand
cuacggauaugauacucaa

SEQ ID NO: 1580235 - RNA, 19 nt, Homo sapiens
  misc_RNA (1)...(19): siRNA sense strand
caucaauguuagugugaaa

SEQ ID NO: 1580236 - RNA, 19 nt, Homo sapiens
  misc_RNA (1)...(19): siRNA sense strand
caacgagaccaucaauguu

SEQ ID NO: 1580237 - RNA, 19 nt, Homo sapiens
  misc_RNA (1)...(19): siRNA sense strand
aacgagaccaucaauguua

SEQ ID NO: 1580238 - RNA, 19 nt, Homo sapiens
  misc_RNA (1)...(19): siRNA sense strand
cggauaugauacucaauga

SEQ ID NO: 1580239 - RNA, 19 nt, Homo sapiens
  misc_RNA (1)...(19): siRNA sense strand
uguaacaccuuugaaugaa

SEQ ID NO: 1580240 - RNA, 19 nt, Homo sapiens
  misc_RNA (1)...(19): siRNA sense strand
ucaacgagaccaucaaugu

SEQ ID NO: 1580241 - RNA, 19 nt, Homo sapiens
  misc_RNA (1)...(19): siRNA sense strand
uaacaccugagccaucuaa

SEQ ID NO: 1580242 - RNA, 19 nt, Homo sapiens
  misc_RNA (1)...(19): siRNA sense strand
gagcacaucacagccaauu

SEQ ID NO: 1580243 - RNA, 19 nt, Homo sapiens
  misc_RNA (1)...(19): siRNA sense strand
uacaaguacucauggagaa

SEQ ID NO: 1580244 - RNA, 19 nt, Homo sapiens
  misc_RNA (1)...(19): siRNA sense strand
ggucaauggaauacaagua

SEQ ID NO: 1580245 - RNA, 19 nt, Homo sapiens
  misc_RNA (1)...(19): siRNA sense strand
ggaauggaacugcaagaag

SEQ ID NO: 1580246 - RNA, 19 nt, Homo sapiens
  misc_RNA (1)...(19): siRNA sense strand
aauccucccuucccugaaa

SEQ ID NO: 1580247 - RNA, 19 nt, Homo sapiens
  misc_RNA (1)...(19): siRNA sense strand
caucacagccaauuucaca

SEQ ID NO: 1580248 - RNA, 19 nt, Homo sapiens
  misc_RNA (1)...(19): siRNA sense strand
gagaaaaucagcaugaaga

SEQ ID NO: 1580249 - RNA, 19 nt, Homo sapiens
  misc_RNA (1)...(19): siRNA sense strand
gcaguuucuuaguggugua

SEQ ID NO: 1580250 - RNA, 19 nt, Homo sapiens
  misc_RNA (1)...(19): siRNA sense strand
gaaaccacaaugacaucuu

SEQ ID NO: 1580251 - RNA, 19 nt, Homo sapiens
  misc_RNA (1)...(19): siRNA sense strand
gaucaugagguacaaccaa

SEQ ID NO: 1580252 - RNA, 19 nt, Homo sapiens
  misc_RNA (1)...(19): siRNA sense strand
gcaucuaacaucacuguca

SEQ ID NO: 1580253 - RNA, 19 nt, Homo sapiens
  misc_RNA (1)...(19): siRNA sense strand
caauuucacacaguacuaa

SEQ ID NO: 1580254 - RNA, 19 nt, Homo sapiens
  misc_RNA (1)...(19): siRNA sense strand
caucuaacaucacugucau

SEQ ID NO: 1580255 - RNA, 19 nt, Homo sapiens
  misc_RNA (1)...(19): siRNA sense strand
acaacgaucuaaccauugg

SEQ ID NO: 1580256 - RNA, 19 nt, Homo sapiens
  misc_RNA (1)...(19): siRNA sense strand
caggagcccuuggucaaug

SEQ ID NO: 1580257 - RNA, 19 nt, Homo sapiens
  misc_RNA (1)...(19): siRNA sense strand
guaacaccuuugaaugaag

SEQ ID NO: 1580258 - RNA, 19 nt, Homo sapiens
  misc_RNA (1)...(19): siRNA sense strand
ccauguccauugcucaaau

SEQ ID NO: 1580259 - RNA, 19 nt, Homo sapiens
  misc_RNA (1)...(19): siRNA sense strand
caggagcaauggcaaccuu

SEQ ID NO: 1580260 - RNA, 19 nt, Homo sapiens
  misc_RNA (1)...(19): siRNA sense strand
agaacucggugacuucauc

SEQ ID NO: 1580261 - RNA, 19 nt, Homo sapiens
  misc_RNA (1)...(19): siRNA sense strand
caacaagaucccuguaggu

SEQ ID NO: 1580262 - RNA, 19 nt, Homo sapiens
  misc_RNA (1)...(19): siRNA sense strand
guacccagacccagaguuc

SEQ ID NO: 1580263 - RNA, 19 nt, Homo sapiens
  misc_RNA (1)...(19): siRNA sense strand
gggucaguguuacuuguug

SEQ ID NO: 1580264 - RNA, 19 nt, Homo sapiens
  misc_RNA (1)...(19): siRNA sense strand
ucaacaauaucgcggaaaa

SEQ ID NO: 1580265 - RNA, 19 nt, Homo sapiens
  misc_RNA (1)...(19): siRNA sense strand
caaauuugaaaccacaaug

SEQ ID NO: 1580266 - RNA, 19 nt, Homo sapiens
  misc_RNA (1)...(19): siRNA sense strand
ggucaguguuacuuguugu

SEQ ID NO: 1580267 - RNA, 19 nt, Homo sapiens
  misc_RNA (1)...(19): siRNA sense strand
gccggagccuacaacuuga

SEQ ID NO: 1580268 - RNA, 19 nt, Homo sapiens
  misc_RNA (1)...(19): siRNA sense strand
ccaauuucacacaguacua

SEQ ID NO: 1580269 - RNA, 19 nt, Homo sapiens
  misc_RNA (1)...(19): siRNA sense strand
gcccuuggucaauggaaua

SEQ ID NO: 1580270 - RNA, 19 nt, Homo sapiens
  misc_RNA (1)...(19): siRNA sense strand
ccuuggcucugaccuguau

SEQ ID NO: 1580271 - RNA, 19 nt, Homo sapiens
  misc_RNA (1)...(19): siRNA sense strand
gaacucggugacuucauca

SEQ ID NO: 1580272 - RNA, 19 nt, Homo sapiens
  misc_RNA (1)...(19): siRNA sense strand
gcauccugauugccaugaa

SEQ ID NO: 1580273 - RNA, 19 nt, Homo sapiens
  misc_RNA (1)...(19): siRNA sense strand
ggagaacucggugacuuca

SEQ ID NO: 1580274 - RNA, 19 nt, Homo sapiens
  misc_RNA (1)...(19): siRNA sense strand
acugucauauacaccauaa

SEQ ID NO: 1580275 - RNA, 19 nt, Homo sapiens
  misc_RNA (1)...(19): siRNA sense strand
gucagguacuaaaggauau

SEQ ID NO: 1580276 - RNA, 19 nt, Homo sapiens
  misc_RNA (1)...(19): siRNA sense strand
gcccagaagcuccugacuu

SEQ ID NO: 1580277 - RNA, 19 nt, Homo sapiens
  misc_RNA (1)...(19): siRNA sense strand
cggaaaauguuaaucacaa

SEQ ID NO: 1580278 - RNA, 19 nt, Homo sapiens
  misc_RNA (1)...(19): siRNA sense strand
cuaacaucacugucauaua

SEQ ID NO: 1580279 - RNA, 19 nt, Homo sapiens
  misc_RNA (1)...(19): siRNA sense strand
ugacuuaccagcucauguc

SEQ ID NO: 1580280 - RNA, 19 nt, Homo sapiens
  misc_RNA (1)...(19): siRNA sense strand
ugucgucucuucuaucaac

SEQ ID NO: 1580281 - RNA, 19 nt, Homo sapiens
  misc_RNA (1)...(19): siRNA sense strand
cuugucgucucuucuauca

SEQ ID NO: 1580282 - RNA, 19 nt, Homo sapiens
  misc_RNA (1)...(19): siRNA sense strand
aguguuacuuguuguccua

SEQ ID NO: 1580283 - RNA, 19 nt, Homo sapiens
  misc_RNA (1)...(19): siRNA sense strand
cacaggagcccuuggucaa

SEQ ID NO: 1580284 - RNA, 19 nt, Homo sapiens
  misc_RNA (1)...(19): siRNA sense strand
cuagcgaucuuggcacugu

SEQ ID NO: 1580285 - RNA, 19 nt, Homo sapiens
  misc_RNA (1)...(19): siRNA sense strand
cagcucggccucaccauca

SEQ ID NO: 1580286 - RNA, 19 nt, Homo sapiens
  misc_RNA (1)...(19): siRNA sense strand
ggccuugucgucucuucua

SEQ ID NO: 1580287 - RNA, 19 nt, Homo sapiens
  misc_RNA (1)...(19): siRNA sense strand
uggaauacaaguacucaug

SEQ ID NO: 1580288 - RNA, 19 nt, Homo sapiens
  misc_RNA (1)...(19): siRNA sense strand
cccuguagguucagaggaa

SEQ ID NO: 1580289 - RNA, 19 nt, Homo sapiens
  misc_RNA (1)...(19): siRNA sense strand
gccaacuccucucccuuca

SEQ ID NO: 1580290 - RNA, 19 nt, Homo sapiens
  misc_RNA (1)...(19): siRNA sense strand
ggaaaauguuaaucacaag

SEQ ID NO: 1580291 - RNA, 19 nt, Homo sapiens
  misc_RNA (1)...(19): siRNA sense strand
cauccugauugccaugaau

SEQ ID NO: 1580292 - RNA, 19 nt, Homo sapiens
  misc_RNA (1)...(19): siRNA sense strand
aaccaacucuacccagcaa

SEQ ID NO: 1580293 - RNA, 19 nt, Homo sapiens
  misc_RNA (1)...(19): siRNA sense strand
gguacuaaaggauauugug

SEQ ID NO: 1580294 - RNA, 19 nt, Homo sapiens
  misc_RNA (1)...(19): siRNA sense strand
caaccacgagcacaucaca

SEQ ID NO: 1580295 - RNA, 19 nt, Homo sapiens
  misc_RNA (1)...(19): siRNA sense strand
cuuggucaauggaauacaa

SEQ ID NO: 1580296 - RNA, 19 nt, Homo sapiens
  misc_RNA (1)...(19): siRNA sense strand
ugcaagaagacuacggaua

SEQ ID NO: 1580297 - RNA, 19 nt, Homo sapiens
  misc_RNA (1)...(19): siRNA sense strand
aaaucagcaugaagaucaa

SEQ ID NO: 1580298 - RNA, 19 nt, Homo sapiens
  misc_RNA (1)...(19): siRNA sense strand
caacuugaaggcccagaag

SEQ ID NO: 1580299 - RNA, 19 nt, Homo sapiens
  misc_RNA (1)...(19): siRNA sense strand
ucacagccaauuucacaca

SEQ ID NO: 1580300 - RNA, 19 nt, Homo sapiens
  misc_RNA (1)...(19): siRNA sense strand
gugggucaguguuacuugu

SEQ ID NO: 1580301 - RNA, 19 nt, Homo sapiens
  misc_RNA (1)...(19): siRNA sense strand
ccaucaauguuagugugaa

SEQ ID NO: 1580302 - RNA, 19 nt, Homo sapiens
  misc_RNA (1)...(19): siRNA sense strand
gagguacaaccaacucuac

SEQ ID NO: 1580303 - RNA, 19 nt, Homo sapiens
  misc_RNA (1)...(19): siRNA sense strand
ucacuuguaguccugauca

SEQ ID NO: 1580304 - RNA, 19 nt, Homo sapiens
  misc_RNA (1)...(19): siRNA sense strand
uguaacaccugagccaucu

SEQ ID NO: 1580305 - RNA, 19 nt, Homo sapiens
  misc_RNA (1)...(19): siRNA sense strand
aaaggauauuguggagaaa

SEQ ID NO: 1580306 - RNA, 19 nt, Homo sapiens
  misc_RNA (1)...(19): siRNA sense strand
uagguucagaggaagguua

SEQ ID NO: 1580307 - RNA, 19 nt, Homo sapiens
  misc_RNA (1)...(19): siRNA sense strand
ggaacugcaagaagacuac

SEQ ID NO: 1580308 - RNA, 19 nt, Homo sapiens
  misc_RNA (1)...(19): siRNA sense strand
ugagguacaaccaacucua

SEQ ID NO: 1580309 - RNA, 19 nt, Homo sapiens
  misc_RNA (1)...(19): siRNA sense strand
gaacaaaguugcuggaaga

SEQ ID NO: 1580310 - RNA, 19 nt, Homo sapiens
  misc_RNA (1)...(19): siRNA sense strand
cggcgaagcuggcaaauuc

SEQ ID NO: 1580311 - RNA, 19 nt, Homo sapiens
  misc_RNA (1)...(19): siRNA sense strand
caacauccaucuccaucuu

SEQ ID NO: 1580312 - RNA, 19 nt, Homo sapiens
  misc_RNA (1)...(19): siRNA sense strand
cuaccaaccuucugaacaa

SEQ ID NO: 1580313 - RNA, 19 nt, Homo sapiens
  misc_RNA (1)...(19): siRNA sense strand
gaaacucccucaacaucca

SEQ ID NO: 1580314 - RNA, 19 nt, Homo sapiens
  misc_RNA (1)...(19): siRNA sense strand
gagaaacucccucaacauc

SEQ ID NO: 1580315 - RNA, 19 nt, Homo sapiens
  misc_RNA (1)...(19): siRNA sense strand
gcaaauuccgggcaacaga

SEQ ID NO: 1580316 - RNA, 19 nt, Homo sapiens
  misc_RNA (1)...(19): siRNA sense strand
aaagcggaguggagacuug

SEQ ID NO: 1580317 - RNA, 19 nt, Homo sapiens
  misc_RNA (1)...(19): siRNA sense strand
ggaaggagaagcgagaagu

SEQ ID NO: 1580318 - RNA, 19 nt, Homo sapiens
  misc_RNA (1)...(19): siRNA sense strand
ccaaccuucugaacaaagu

SEQ ID NO: 1580319 - RNA, 19 nt, Homo sapiens
  misc_RNA (1)...(19): siRNA sense strand
gaaggagaagcgagaaguc

SEQ ID NO: 1580320 - RNA, 19 nt, Homo sapiens
  misc_RNA (1)...(19): siRNA sense strand
ccacgcuccuagccgcuuu

SEQ ID NO: 1580321 - RNA, 19 nt, Homo sapiens
  misc_RNA (1)...(19): siRNA sense strand
ccaucuccaucuucccauu

SEQ ID NO: 1580322 - RNA, 19 nt, Homo sapiens
  misc_RNA (1)...(19): siRNA sense strand
uaccaaccuucugaacaaa

SEQ ID NO: 1580323 - RNA, 19 nt, Homo sapiens
  misc_RNA (1)...(19): siRNA sense strand
gccaggcauuuacugcaau

SEQ ID NO: 1580324 - RNA, 19 nt, Homo sapiens
  misc_RNA (1)...(19): siRNA sense strand
gaaaguaccuugccgaaug

SEQ ID NO: 1580325 - RNA, 19 nt, Homo sapiens
  misc_RNA (1)...(19): siRNA sense strand
caaacaaacucuacuauca

SEQ ID NO: 1580326 - RNA, 19 nt, Homo sapiens
  misc_RNA (1)...(19): siRNA sense strand
gagcaagacuuucuauaag

SEQ ID NO: 1580327 - RNA, 19 nt, Homo sapiens
  misc_RNA (1)...(19): siRNA sense strand
gcacuucuguggccuauca

SEQ ID NO: 1580328 - RNA, 19 nt, Homo sapiens
  misc_RNA (1)...(19): siRNA sense strand
gaacucugcuggccuuuca

SEQ ID NO: 1580329 - RNA, 19 nt, Homo sapiens
  misc_RNA (1)...(19): siRNA sense strand
gaagauggcagacuacuca

SEQ ID NO: 1580330 - RNA, 19 nt, Homo sapiens
  misc_RNA (1)...(19): siRNA sense strand
gaacugguccucugcaaga

SEQ ID NO: 1580331 - RNA, 19 nt, Homo sapiens
  misc_RNA (1)...(19): siRNA sense strand
gaaaaugacugcagcauag

SEQ ID NO: 1580332 - RNA, 19 nt, Homo sapiens
  misc_RNA (1)...(19): siRNA sense strand
ggagaaacauggauuugag

SEQ ID NO: 1580333 - RNA, 19 nt, Homo sapiens
  misc_RNA (1)...(19): siRNA sense strand
gaagcagaauggaguguau

SEQ ID NO: 1580334 - RNA, 19 nt, Homo sapiens
  misc_RNA (1)...(19): siRNA sense strand
gagaagaacccgaaaccaa

SEQ ID NO: 1580335 - RNA, 19 nt, Homo sapiens
  misc_RNA (1)...(19): siRNA sense strand
gaagaacccgaaaccaauu

SEQ ID NO: 1580336 - RNA, 19 nt, Homo sapiens
  misc_RNA (1)...(19): siRNA sense strand
gaagucaagugcuguaagg

SEQ ID NO: 1580337 - RNA, 19 nt, Homo sapiens
  misc_RNA (1)...(19): siRNA sense strand
agaaacacaugccgaaaga

SEQ ID NO: 1580338 - RNA, 19 nt, Homo sapiens
  misc_RNA (1)...(19): siRNA sense strand
ucauugacauguccucuuu

SEQ ID NO: 1580339 - RNA, 19 nt, Homo sapiens
  misc_RNA (1)...(19): siRNA sense strand
gcugauggaagaauuuaua

SEQ ID NO: 1580340 - RNA, 19 nt, Homo sapiens
  misc_RNA (1)...(19): siRNA sense strand
gaucaggcauuagaaguuc

SEQ ID NO: 1580341 - RNA, 19 nt, Homo sapiens
  misc_RNA (1)...(19): siRNA sense strand
gggccuggcuuaagaaaca

SEQ ID NO: 1580342 - RNA, 19 nt, Homo sapiens
  misc_RNA (1)...(19): siRNA sense strand
gaacaagcgcaguuucuuc

SEQ ID NO: 1580343 - RNA, 19 nt, Homo sapiens
  misc_RNA (1)...(19): siRNA sense strand
ggaagacugggaucacuuu

SEQ ID NO: 1580344 - RNA, 19 nt, Homo sapiens
  misc_RNA (1)...(19): siRNA sense strand
ugaggaggaugccagaauu

SEQ ID NO: 1580345 - RNA, 19 nt, Homo sapiens
  misc_RNA (1)...(19): siRNA sense strand
gaugaguguuggccagaaa

SEQ ID NO: 1580346 - RNA, 19 nt, Homo sapiens
  misc_RNA (1)...(19): siRNA sense strand
acaaugaagugaugagugu

SEQ ID NO: 1580347 - RNA, 19 nt, Homo sapiens
  misc_RNA (1)...(19): siRNA sense strand
gaauuggaccugaaacguu

SEQ ID NO: 1580348 - RNA, 19 nt, Homo sapiens
  misc_RNA (1)...(19): siRNA sense strand
gccaggcacuugaccauug

SEQ ID NO: 1580349 - RNA, 19 nt, Homo sapiens
  misc_RNA (1)...(19): siRNA sense strand
gaggaggaugccagaauua

SEQ ID NO: 1580350 - RNA, 19 nt, Homo sapiens
  misc_RNA (1)...(19): siRNA sense strand
gauaaaggacagauugaau

SEQ ID NO: 1580351 - RNA, 19 nt, Homo sapiens
  misc_RNA (1)...(19): siRNA sense strand
gaagcugugugugucauug

SEQ ID NO: 1580352 - RNA, 19 nt, Homo sapiens
  misc_RNA (1)...(19): siRNA sense strand
agagcaagacuuucuauaa

SEQ ID NO: 1580353 - RNA, 19 nt, Homo sapiens
  misc_RNA (1)...(19): siRNA sense strand
gggcauggauuucauuggu

SEQ ID NO: 1580354 - RNA, 19 nt, Homo sapiens
  misc_RNA (1)...(19): siRNA sense strand
gaagucaugccuuugaugu

SEQ ID NO: 1580355 - RNA, 19 nt, Homo sapiens
  misc_RNA (1)...(19): siRNA sense strand
guacacagcccucaaucug

SEQ ID NO: 1580356 - RNA, 19 nt, Homo sapiens
  misc_RNA (1)...(19): siRNA sense strand
ccagguggauggagaaaca

SEQ ID NO: 1580357 - RNA, 19 nt, Homo sapiens
  misc_RNA (1)...(19): siRNA sense strand
caagaaacagggauccaaa

SEQ ID NO: 1580358 - RNA, 19 nt, Homo sapiens
  misc_RNA (1)...(19): siRNA sense strand
ggagaugagugugggcuau

SEQ ID NO: 1580359 - RNA, 19 nt, Homo sapiens
  misc_RNA (1)...(19): siRNA sense strand
agaaccagcuggagauuca

SEQ ID NO: 1580360 - RNA, 19 nt, Homo sapiens
  misc_RNA (1)...(19): siRNA sense strand
gcaagaaccagcuggagau

SEQ ID NO: 1580361 - RNA, 19 nt, Homo sapiens
  misc_RNA (1)...(19): siRNA sense strand
gagcagcacaccaacuauu

SEQ ID NO: 1580362 - RNA, 19 nt, Homo sapiens
  misc_RNA (1)...(19): siRNA sense strand
cagauugaaugccaguauu

SEQ ID NO: 1580363 - RNA, 19 nt, Homo sapiens
  misc_RNA (1)...(19): siRNA sense strand
gaaguacacagcccucaau

SEQ ID NO: 1580364 - RNA, 19 nt, Homo sapiens
  misc_RNA (1)...(19): siRNA sense strand
acgcagggcugaauguuau

SEQ ID NO: 1580365 - RNA, 19 nt, Homo sapiens
  misc_RNA (1)...(19): siRNA sense strand
ccagaccgguaggcaguua

SEQ ID NO: 1580366 - RNA, 19 nt, Homo sapiens
  misc_RNA (1)...(19): siRNA sense strand
aauuggaccugaaacguuu

SEQ ID NO: 1580367 - RNA, 19 nt, Homo sapiens
  misc_RNA (1)...(19): siRNA sense strand
ggaugcugauggaagaauu

SEQ ID NO: 1580368 - RNA, 19 nt, Homo sapiens
  misc_RNA (1)...(19): siRNA sense strand
caaacagguuacacaagga

SEQ ID NO: 1580369 - RNA, 19 nt, Homo sapiens
  misc_RNA (1)...(19): siRNA sense strand
uauaaacgccucaccaugu

SEQ ID NO: 1580370 - RNA, 19 nt, Homo sapiens
  misc_RNA (1)...(19): siRNA sense strand
guaaggaagcugugugugu

SEQ ID NO: 1580371 - RNA, 19 nt, Homo sapiens
  misc_RNA (1)...(19): siRNA sense strand
gagcagagcaagacuuucu

SEQ ID NO: 1580372 - RNA, 19 nt, Homo sapiens
  misc_RNA (1)...(19): siRNA sense strand
gaauggaugguacaugguu

SEQ ID NO: 1580373 - RNA, 19 nt, Homo sapiens
  misc_RNA (1)...(19): siRNA sense strand
cgaccaugauucagaccua

SEQ ID NO: 1580374 - RNA, 19 nt, Homo sapiens
  misc_RNA (1)...(19): siRNA sense strand
uagagaagggcauggauuu

SEQ ID NO: 1580375 - RNA, 19 nt, Homo sapiens
  misc_RNA (1)...(19): siRNA sense strand
uacaguaccucuucuccaa

SEQ ID NO: 1580376 - RNA, 19 nt, Homo sapiens
  misc_RNA (1)...(19): siRNA sense strand
gacauguccucuuucacaa

SEQ ID NO: 1580377 - RNA, 19 nt, Homo sapiens
  misc_RNA (1)...(19): siRNA sense strand
gcagacuacucaaacaaac

SEQ ID NO: 1580378 - RNA, 19 nt, Homo sapiens
  misc_RNA (1)...(19): siRNA sense strand
agauugacaucgcgggaua

SEQ ID NO: 1580379 - RNA, 19 nt, Homo sapiens
  misc_RNA (1)...(19): siRNA sense strand
gacagcagauuucaucaac

SEQ ID NO: 1580380 - RNA, 19 nt, Homo sapiens
  misc_RNA (1)...(19): siRNA sense strand
caagcgcaguuucuucaug

SEQ ID NO: 1580381 - RNA, 19 nt, Homo sapiens
  misc_RNA (1)...(19): siRNA sense strand
cagagcagcacaccaacua

SEQ ID NO: 1580382 - RNA, 19 nt, Homo sapiens
  misc_RNA (1)...(19): siRNA sense strand
gagaagggcauggauuuca

SEQ ID NO: 1580383 - RNA, 19 nt, Homo sapiens
  misc_RNA (1)...(19): siRNA sense strand
acacagcccucaaucugau

SEQ ID NO: 1580384 - RNA, 19 nt, Homo sapiens
  misc_RNA (1)...(19): siRNA sense strand
gcaagaaacagggauccaa

SEQ ID NO: 1580385 - RNA, 19 nt, Homo sapiens
  misc_RNA (1)...(19): siRNA sense strand
gaagggcauggauuucauu

SEQ ID NO: 1580386 - RNA, 19 nt, Homo sapiens
  misc_RNA (1)...(19): siRNA sense strand
aagcgcaguuucuucauga

SEQ ID NO: 1580387 - RNA, 19 nt, Homo sapiens
  misc_RNA (1)...(19): siRNA sense strand
ggaucaggcauuagaaguu

SEQ ID NO: 1580388 - RNA, 19 nt, Homo sapiens
  misc_RNA (1)...(19): siRNA sense strand
ugacauguccucuuucaca

SEQ ID NO: 1580389 - RNA, 19 nt, Homo sapiens
  misc_RNA (1)...(19): siRNA sense strand
gauggagaaacauggauuu

SEQ ID NO: 1580390 - RNA, 19 nt, Homo sapiens
  misc_RNA (1)...(19): siRNA sense strand
guuaguaucccgcuacaug

SEQ ID NO: 1580391 - RNA, 19 nt, Homo sapiens
  misc_RNA (1)...(19): siRNA sense strand
gaccggacaucuguucuuc

SEQ ID NO: 1580392 - RNA, 19 nt, Homo sapiens
  misc_RNA (1)...(19): siRNA sense strand
aaaaugggguggaaggaua

SEQ ID NO: 1580393 - RNA, 19 nt, Homo sapiens
  misc_RNA (1)...(19): siRNA sense strand
caucuguucuucauguaau

SEQ ID NO: 1580394 - RNA, 19 nt, Homo sapiens
  misc_RNA (1)...(19): siRNA sense strand
auaaacgccucaccauguu

SEQ ID NO: 1580395 - RNA, 19 nt, Homo sapiens
  misc_RNA (1)...(19): siRNA sense strand
ccaggcacuugaccauuga

SEQ ID NO: 1580396 - RNA, 19 nt, Homo sapiens
  misc_RNA (1)...(19): siRNA sense strand
uuauagguaucccuucuga

SEQ ID NO: 1580397 - RNA, 19 nt, Homo sapiens
  misc_RNA (1)...(19): siRNA sense strand
ggagcugagugacuuacau

SEQ ID NO: 1580398 - RNA, 19 nt, Homo sapiens
  misc_RNA (1)...(19): siRNA sense strand
gauguaugaucugaagguu

SEQ ID NO: 1580399 - RNA, 19 nt, Homo sapiens
  misc_RNA (1)...(19): siRNA sense strand
ggaggaugccagaauuaga

SEQ ID NO: 1580400 - RNA, 19 nt, Homo sapiens
  misc_RNA (1)...(19): siRNA sense strand
gggcugaauguuauaggua

SEQ ID NO: 1580401 - RNA, 19 nt, Homo sapiens
  misc_RNA (1)...(19): siRNA sense strand
gcaccucuccucucuacga

SEQ ID NO: 1580402 - RNA, 19 nt, Homo sapiens
  misc_RNA (1)...(19): siRNA sense strand
gagaaacauggauuugaga

SEQ ID NO: 1580403 - RNA, 19 nt, Homo sapiens
  misc_RNA (1)...(19): siRNA sense strand
uguauacaaugaagugaug

SEQ ID NO: 1580404 - RNA, 19 nt, Homo sapiens
  misc_RNA (1)...(19): siRNA sense strand
gcauguauacaaugaagug

SEQ ID NO: 1580405 - RNA, 19 nt, Homo sapiens
  misc_RNA (1)...(19): siRNA sense strand
gcagagcaagacuuucuau

SEQ ID NO: 1580406 - RNA, 19 nt, Homo sapiens
  misc_RNA (1)...(19): siRNA sense strand
gauccaaacagguuacaca

SEQ ID NO: 1580407 - RNA, 19 nt, Homo sapiens
  misc_RNA (1)...(19): siRNA sense strand
caaaugggauccgggugau

SEQ ID NO: 1580408 - RNA, 19 nt, Homo sapiens
  misc_RNA (1)...(19): siRNA sense strand
ccacuucccaagccucuuu

SEQ ID NO: 1580409 - RNA, 19 nt, Homo sapiens
  misc_RNA (1)...(19): siRNA sense strand
uggaugugcugucugaguu

SEQ ID NO: 1580410 - RNA, 19 nt, Homo sapiens
  misc_RNA (1)...(19): siRNA sense strand
gaggguggaggguaugaaa

SEQ ID NO: 1580411 - RNA, 19 nt, Homo sapiens
  misc_RNA (1)...(19): siRNA sense strand
agucaugccuuugauguau

SEQ ID NO: 1580412 - RNA, 19 nt, Homo sapiens
  misc_RNA (1)...(19): siRNA sense strand
aaggacaggcucaaucuuu

SEQ ID NO: 1580413 - RNA, 19 nt, Homo sapiens
  misc_RNA (1)...(19): siRNA sense strand
ggcugaauguuauagguau

SEQ ID NO: 1580414 - RNA, 19 nt, Homo sapiens
  misc_RNA (1)...(19): siRNA sense strand
ggugacagcagauuucauc

SEQ ID NO: 1580415 - RNA, 19 nt, Homo sapiens
  misc_RNA (1)...(19): siRNA sense strand
gcagaauggaguguauaaa

SEQ ID NO: 1580416 - RNA, 19 nt, Homo sapiens
  misc_RNA (1)...(19): siRNA sense strand
ucuauaagccagauugguu

SEQ ID NO: 1580417 - RNA, 19 nt, Homo sapiens
  misc_RNA (1)...(19): siRNA sense strand
agaagaacccgaaaccaau

SEQ ID NO: 1580418 - RNA, 19 nt, Homo sapiens
  misc_RNA (1)...(19): siRNA sense strand
agcagaagauggcagacua

SEQ ID NO: 1580419 - RNA, 19 nt, Homo sapiens
  misc_RNA (1)...(19): siRNA sense strand
caagaaaguggccgagcuu

SEQ ID NO: 1580420 - RNA, 19 nt, Homo sapiens
  misc_RNA (1)...(19): siRNA sense strand
caguaccucuucuccaaug

SEQ ID NO: 1580421 - RNA, 19 nt, Homo sapiens
  misc_RNA (1)...(19): siRNA sense strand
ucaguuagagcaagaaaca

SEQ ID NO: 1580422 - RNA, 19 nt, Homo sapiens
  misc_RNA (1)...(19): siRNA sense strand
ggauggagaaacauggauu

SEQ ID NO: 1580423 - RNA, 19 nt, Homo sapiens
  misc_RNA (1)...(19): siRNA sense strand
auucagaccuagaccuuug

SEQ ID NO: 1580424 - RNA, 19 nt, Homo sapiens
  misc_RNA (1)...(19): siRNA sense strand
gaagaagccaucaaucaaa

SEQ ID NO: 1580425 - RNA, 19 nt, Homo sapiens
  misc_RNA (1)...(19): siRNA sense strand
gagguagucuuacucuuuc

SEQ ID NO: 1580426 - RNA, 19 nt, Homo sapiens
  misc_RNA (1)...(19): siRNA sense strand
gaauaccacucuggaaauc

SEQ ID NO: 1580427 - RNA, 19 nt, Homo sapiens
  misc_RNA (1)...(19): siRNA sense strand
uggagguacuguugaauaa

SEQ ID NO: 1580428 - RNA, 19 nt, Homo sapiens
  misc_RNA (1)...(19): siRNA sense strand
ugaggaacuuggaacaauu

SEQ ID NO: 1580429 - RNA, 19 nt, Homo sapiens
  misc_RNA (1)...(19): siRNA sense strand
gaaugagaguccugcuuuc

SEQ ID NO: 1580430 - RNA, 19 nt, Homo sapiens
  misc_RNA (1)...(19): siRNA sense strand
gaggaacuuggaacaauuu

SEQ ID NO: 1580431 - RNA, 19 nt, Homo sapiens
  misc_RNA (1)...(19): siRNA sense strand
ggacuggucuggagguacu

SEQ ID NO: 1580432 - RNA, 19 nt, Homo sapiens
  misc_RNA (1)...(19): siRNA sense strand
ugaagaagccaucaaucaa

SEQ ID NO: 1580433 - RNA, 19 nt, Homo sapiens
  misc_RNA (1)...(19): siRNA sense strand
gaccugauauuuucgcaua

SEQ ID NO: 1580434 - RNA, 19 nt, Homo sapiens
  misc_RNA (1)...(19): siRNA sense strand
uuuacuggcuccacuguuu

SEQ ID NO: 1580435 - RNA, 19 nt, Homo sapiens
  misc_RNA (1)...(19): siRNA sense strand
cauaguggccacagauauu

SEQ ID NO: 1580436 - RNA, 19 nt, Homo sapiens
  misc_RNA (1)...(19): siRNA sense strand
agaaugagaguccugcuuu

SEQ ID NO: 1580437 - RNA, 19 nt, Homo sapiens
  misc_RNA (1)...(19): siRNA sense strand
gcucaagucacucagaaug

SEQ ID NO: 1580438 - RNA, 19 nt, Homo sapiens
  misc_RNA (1)...(19): siRNA sense strand
gugcucaagucacucagaa

SEQ ID NO: 1580439 - RNA, 19 nt, Homo sapiens
  misc_RNA (1)...(19): siRNA sense strand
gcauaguggccacagauau

SEQ ID NO: 1580440 - RNA, 19 nt, Homo sapiens
  misc_RNA (1)...(19): siRNA sense strand
ucagcacucuugcccuuug

SEQ ID NO: 1580441 - RNA, 19 nt, Homo sapiens
  misc_RNA (1)...(19): siRNA sense strand
ccaccucucugcucuccau

SEQ ID NO: 1580442 - RNA, 19 nt, Homo sapiens
  misc_RNA (1)...(19): siRNA sense strand
ucucaagaccagacauaaa

SEQ ID NO: 1580443 - RNA, 19 nt, Homo sapiens
  misc_RNA (1)...(19): siRNA sense strand
ugaauaccacucuggaaau

SEQ ID NO: 1580444 - RNA, 19 nt, Homo sapiens
  misc_RNA (1)...(19): siRNA sense strand
auaccacucuggaaaucuu

SEQ ID NO: 1580445 - RNA, 19 nt, Homo sapiens
  misc_RNA (1)...(19): siRNA sense strand
cuccaucgcuaccacucua

SEQ ID NO: 1580446 - RNA, 19 nt, Homo sapiens
  misc_RNA (1)...(19): siRNA sense strand
uugaggaacuuggaacaau

SEQ ID NO: 1580447 - RNA, 19 nt, Homo sapiens
  misc_RNA (1)...(19): siRNA sense strand
cuggagguacuguugaaua

SEQ ID NO: 1580448 - RNA, 19 nt, Homo sapiens
  misc_RNA (1)...(19): siRNA sense strand
aagaagccaucaaucaaaa

SEQ ID NO: 1580449 - RNA, 19 nt, Homo sapiens
  misc_RNA (1)...(19): siRNA sense strand
cagcacucuugcccuuuga

SEQ ID NO: 1580450 - RNA, 19 nt, Homo sapiens
  misc_RNA (1)...(19): siRNA sense strand
gaaaucuuggguggucuga

SEQ ID NO: 1580451 - RNA, 19 nt, Homo sapiens
  misc_RNA (1)...(19): siRNA sense strand
ggucuggagguacuguuga

SEQ ID NO: 1580452 - RNA, 19 nt, Homo sapiens
  misc_RNA (1)...(19): siRNA sense strand
gucuggagguacuguugaa

SEQ ID NO: 1580453 - RNA, 19 nt, Homo sapiens
  misc_RNA (1)...(19): siRNA sense strand
augaauaccacucuggaaa

SEQ ID NO: 1580454 - RNA, 19 nt, Homo sapiens
  misc_RNA (1)...(19): siRNA sense strand
gaaaagccgcaaagagcaa

SEQ ID NO: 1580455 - RNA, 19 nt, Homo sapiens
  misc_RNA (1)...(19): siRNA sense strand
gagaaacugugucaccuua

SEQ ID NO: 1580456 - RNA, 19 nt, Homo sapiens
  misc_RNA (1)...(19): siRNA sense strand
guagauggcagcauuauga

SEQ ID NO: 1580457 - RNA, 19 nt, Homo sapiens
  misc_RNA (1)...(19): siRNA sense strand
uggaggaucuuucuauaaa

SEQ ID NO: 1580458 - RNA, 19 nt, Homo sapiens
  misc_RNA (1)...(19): siRNA sense strand
ggaccucacuggacccauu

SEQ ID NO: 1580459 - RNA, 19 nt, Homo sapiens
  misc_RNA (1)...(19): siRNA sense strand
ugaagagccuccuuugcua

SEQ ID NO: 1580460 - RNA, 19 nt, Homo sapiens
  misc_RNA (1)...(19): siRNA sense strand
caccuuacauagugaauuu

SEQ ID NO: 1580461 - RNA, 19 nt, Homo sapiens
  misc_RNA (1)...(19): siRNA sense strand
gaaacugugucaccuuaca

SEQ ID NO: 1580462 - RNA, 19 nt, Homo sapiens
  misc_RNA (1)...(19): siRNA sense strand
ucacacaaagcuacauuua

SEQ ID NO: 1580463 - RNA, 19 nt, Homo sapiens
  misc_RNA (1)...(19): siRNA sense strand
acacaaagcuacauuuacu

SEQ ID NO: 1580464 - RNA, 19 nt, Homo sapiens
  misc_RNA (1)...(19): siRNA sense strand
ggaaaucuuuauggaucua

SEQ ID NO: 1580465 - RNA, 19 nt, Homo sapiens
  misc_RNA (1)...(19): siRNA sense strand
cagcauccaacucagauua

SEQ ID NO: 1580466 - RNA, 19 nt, Homo sapiens
  misc_RNA (1)...(19): siRNA sense strand
ugucaaacuuggcacaauu

SEQ ID NO: 1580467 - RNA, 19 nt, Homo sapiens
  misc_RNA (1)...(19): siRNA sense strand
gcauccaacucagauuauu

SEQ ID NO: 1580468 - RNA, 19 nt, Homo sapiens
  misc_RNA (1)...(19): siRNA sense strand
cauccaacucagauuauua

SEQ ID NO: 1580469 - RNA, 19 nt, Homo sapiens
  misc_RNA (1)...(19): siRNA sense strand
ggguuacgcaggacaauuu

SEQ ID NO: 1580470 - RNA, 19 nt, Homo sapiens
  misc_RNA (1)...(19): siRNA sense strand
cuccuuacauugacaguuu

SEQ ID NO: 1580471 - RNA, 19 nt, Homo sapiens
  misc_RNA (1)...(19): siRNA sense strand
ucuaauaccuauggaaauc

SEQ ID NO: 1580472 - RNA, 19 nt, Homo sapiens
  misc_RNA (1)...(19): siRNA sense strand
aaacagaggaugucaaacu

SEQ ID NO: 1580473 - RNA, 19 nt, Homo sapiens
  misc_RNA (1)...(19): siRNA sense strand
ccaccuugcuucugguaau

SEQ ID NO: 1580474 - RNA, 19 nt, Homo sapiens
  misc_RNA (1)...(19): siRNA sense strand
acuggaggaucuuucuaua

SEQ ID NO: 1580475 - RNA, 19 nt, Homo sapiens
  misc_RNA (1)...(19): siRNA sense strand
uggcacaauuugacucuga

SEQ ID NO: 1580476 - RNA, 19 nt, Homo sapiens
  misc_RNA (1)...(19): siRNA sense strand
cagccugccuccuuuguuc

SEQ ID NO: 1580477 - RNA, 19 nt, Homo sapiens
  misc_RNA (1)...(19): siRNA sense strand
ggugaugacucuaauaccu

SEQ ID NO: 1580478 - RNA, 19 nt, Homo sapiens
  misc_RNA (1)...(19): siRNA sense strand
cuauggaaaucuuuaugga

SEQ ID NO: 1580479 - RNA, 19 nt, Homo sapiens
  misc_RNA (1)...(19): siRNA sense strand
gcuagaagaacuuggaauc

SEQ ID NO: 1580480 - RNA, 19 nt, Homo sapiens
  misc_RNA (1)...(19): siRNA sense strand
auaaacagaggaugucaaa

SEQ ID NO: 1580481 - RNA, 19 nt, Homo sapiens
  misc_RNA (1)...(19): siRNA sense strand
ugaugacucuaauaccuau

SEQ ID NO: 1580482 - RNA, 19 nt, Homo sapiens
  misc_RNA (1)...(19): siRNA sense strand
aacagaggaugucaaacuu

SEQ ID NO: 1580483 - RNA, 19 nt, Homo sapiens
  misc_RNA (1)...(19): siRNA sense strand
ugugucaccuuacauagug

SEQ ID NO: 1580484 - RNA, 19 nt, Homo sapiens
  misc_RNA (1)...(19): siRNA sense strand
uucacaaucuccuuacauu

SEQ ID NO: 1580485 - RNA, 19 nt, Homo sapiens
  misc_RNA (1)...(19): siRNA sense strand
uauaagagaaacuguguca

SEQ ID NO: 1580486 - RNA, 19 nt, Homo sapiens
  misc_RNA (1)...(19): siRNA sense strand
ucacaggaagcaccagauu

SEQ ID NO: 1580487 - RNA, 19 nt, Homo sapiens
  misc_RNA (1)...(19): siRNA sense strand
gaaugaaacggaccucacu

SEQ ID NO: 1580488 - RNA, 19 nt, Homo sapiens
  misc_RNA (1)...(19): siRNA sense strand
ccaguagauggcagcauua

SEQ ID NO: 1580489 - RNA, 19 nt, Homo sapiens
  misc_RNA (1)...(19): siRNA sense strand
gugaugacucuaauaccua

SEQ ID NO: 1580490 - RNA, 19 nt, Homo sapiens
  misc_RNA (1)...(19): siRNA sense strand
ggaggaucuuucuauaaaa

SEQ ID NO: 1580491 - RNA, 19 nt, Homo sapiens
  misc_RNA (1)...(19): siRNA sense strand
gcacaauuugacucugauu

SEQ ID NO: 1580492 - RNA, 19 nt, Homo sapiens
  misc_RNA (1)...(19): siRNA sense strand
ccaacucagauuauuauuc

SEQ ID NO: 1580493 - RNA, 19 nt, Homo sapiens
  misc_RNA (1)...(19): siRNA sense strand
ugacaguguuaaacccaau

SEQ ID NO: 1580494 - RNA, 19 nt, Homo sapiens
  misc_RNA (1)...(19): siRNA sense strand
cacaggaagcaccagauuu

SEQ ID NO: 1580495 - RNA, 19 nt, Homo sapiens
  misc_RNA (1)...(19): siRNA sense strand
gucaaacuuggcacaauuu

SEQ ID NO: 1580496 - RNA, 19 nt, Homo sapiens
  misc_RNA (1)...(19): siRNA sense strand
gagccuccuuugcuagaag

SEQ ID NO: 1580497 - RNA, 19 nt, Homo sapiens
  misc_RNA (1)...(19): siRNA sense strand
cacaauuugacucugauuu

SEQ ID NO: 1580498 - RNA, 19 nt, Homo sapiens
  misc_RNA (1)...(19): siRNA sense strand
acucuaauaccuauggaaa

SEQ ID NO: 1580499 - RNA, 19 nt, Homo sapiens
  misc_RNA (1)...(19): siRNA sense strand
cuggaggaucuuucuauaa

SEQ ID NO: 1580500 - RNA, 19 nt, Homo sapiens
  misc_RNA (1)...(19): siRNA sense strand
ggaagcaccagauuuuaau

SEQ ID NO: 1580501 - RNA, 19 nt, Homo sapiens
  misc_RNA (1)...(19): siRNA sense strand
aaacuuggcacaauuugac

SEQ ID NO: 1580502 - RNA, 19 nt, Homo sapiens
  misc_RNA (1)...(19): siRNA sense strand
gccucagccugccuccuuu

SEQ ID NO: 1580503 - RNA, 19 nt, Homo sapiens
  misc_RNA (1)...(19): siRNA sense strand
ggagcagaguggugaugac

SEQ ID NO: 1580504 - RNA, 19 nt, Homo sapiens
  misc_RNA (1)...(19): siRNA sense strand
ugaugaagagccuccuuug

SEQ ID NO: 1580505 - RNA, 19 nt, Homo sapiens
  misc_RNA (1)...(19): siRNA sense strand
uacauuuacuggaggaucu

SEQ ID NO: 1580506 - RNA, 19 nt, Homo sapiens
  misc_RNA (1)...(19): siRNA sense strand
acaggaagcaccagauuuu

SEQ ID NO: 1580507 - RNA, 19 nt, Homo sapiens
  misc_RNA (1)...(19): siRNA sense strand
gaugaagagccuccuuugc

SEQ ID NO: 1580508 - RNA, 19 nt, Homo sapiens
  misc_RNA (1)...(19): siRNA sense strand
gcaccagauuuuaaugcuu

SEQ ID NO: 1580509 - RNA, 19 nt, Homo sapiens
  misc_RNA (1)...(19): siRNA sense strand
ggcacaauuugacucugau

SEQ ID NO: 1580510 - RNA, 19 nt, Homo sapiens
  misc_RNA (1)...(19): siRNA sense strand
cuuugaagcaaucuguaua

SEQ ID NO: 1580511 - RNA, 19 nt, Homo sapiens
  misc_RNA (1)...(19): siRNA sense strand
ucacuggacccauucuuuu

SEQ ID NO: 1580512 - RNA, 19 nt, Homo sapiens
  misc_RNA (1)...(19): siRNA sense strand
ccaauggagccaguagaug

SEQ ID NO: 1580513 - RNA, 19 nt, Homo sapiens
  misc_RNA (1)...(19): siRNA sense strand
gagaaacccuauaaaugua

SEQ ID NO: 1580514 - RNA, 19 nt, Homo sapiens
  misc_RNA (1)...(19): siRNA sense strand
gaacaucagagaauucaua

SEQ ID NO: 1580515 - RNA, 19 nt, Homo sapiens
  misc_RNA (1)...(19): siRNA sense strand
gagaaacccuuugaaugua

SEQ ID NO: 1580516 - RNA, 19 nt, Homo sapiens
  misc_RNA (1)...(19): siRNA sense strand
gaaugcaacuuauguggaa

SEQ ID NO: 1580517 - RNA, 19 nt, Homo sapiens
  misc_RNA (1)...(19): siRNA sense strand
gagagaaaccuuauaaaug

SEQ ID NO: 1580518 - RNA, 19 nt, Homo sapiens
  misc_RNA (1)...(19): siRNA sense strand
gagagaaacccuauaaaug

SEQ ID NO: 1580519 - RNA, 19 nt, Homo sapiens
  misc_RNA (1)...(19): siRNA sense strand
gagagaaacccuauaaaug

SEQ ID NO: 1580520 - RNA, 19 nt, Homo sapiens
  misc_RNA (1)...(19): siRNA sense strand
ggagagaaaccuuauaaau

SEQ ID NO: 1580521 - RNA, 19 nt, Homo sapiens
  misc_RNA (1)...(19): siRNA sense strand
gagaaacccuaugaaugua

SEQ ID NO: 1580522 - RNA, 19 nt, Homo sapiens
  misc_RNA (1)...(19): siRNA sense strand
gcacucaccugacucaaca

SEQ ID NO: 1580523 - RNA, 19 nt, Homo sapiens
  misc_RNA (1)...(19): siRNA sense strand
guacgcaccuuauccauca

SEQ ID NO: 1580524 - RNA, 19 nt, Homo sapiens
  misc_RNA (1)...(19): siRNA sense strand
ggagagaaacccuauaaau

SEQ ID NO: 1580525 - RNA, 19 nt, Homo sapiens
  misc_RNA (1)...(19): siRNA sense strand
caacaucagagaauucaua

SEQ ID NO: 1580526 - RNA, 19 nt, Homo sapiens
  misc_RNA (1)...(19): siRNA sense strand
ggagagaaacccuauaaau

SEQ ID NO: 1580527 - RNA, 19 nt, Homo sapiens
  misc_RNA (1)...(19): siRNA sense strand
uaagaaaucuacugucaag

SEQ ID NO: 1580528 - RNA, 19 nt, Homo sapiens
  misc_RNA (1)...(19): siRNA sense strand
agagaaaccuuacagaugu

SEQ ID NO: 1580529 - RNA, 19 nt, Homo sapiens
  misc_RNA (1)...(19): siRNA sense strand
gggcacaccuuaccaaaca

SEQ ID NO: 1580530 - RNA, 19 nt, Homo sapiens
  misc_RNA (1)...(19): siRNA sense strand
gaaagauucaguagcagua

SEQ ID NO: 1580531 - RNA, 19 nt, Homo sapiens
  misc_RNA (1)...(19): siRNA sense strand
gagagaaacccuuugaaug

SEQ ID NO: 1580532 - RNA, 19 nt, Homo sapiens
  misc_RNA (1)...(19): siRNA sense strand
gagagaaaccuuacagaug

SEQ ID NO: 1580533 - RNA, 19 nt, Homo sapiens
  misc_RNA (1)...(19): siRNA sense strand
cgagaaacccuaugaaugu

SEQ ID NO: 1580534 - RNA, 19 nt, Homo sapiens
  misc_RNA (1)...(19): siRNA sense strand
ggcaaggccuucucaguga

SEQ ID NO: 1580535 - RNA, 19 nt, Homo sapiens
  misc_RNA (1)...(19): siRNA sense strand
ggauguggcuauacuguuc

SEQ ID NO: 1580536 - RNA, 19 nt, Homo sapiens
  misc_RNA (1)...(19): siRNA sense strand
caucagagacaucauauug

SEQ ID NO: 1580537 - RNA, 19 nt, Homo sapiens
  misc_RNA (1)...(19): siRNA sense strand
gagcucaucucuucacagu

SEQ ID NO: 1580538 - RNA, 19 nt, Homo sapiens
  misc_RNA (1)...(19): siRNA sense strand
gagaaacccuauaaaugca

SEQ ID NO: 1580539 - RNA, 19 nt, Homo sapiens
  misc_RNA (1)...(19): siRNA sense strand
ggagagaaacccuuugaau

SEQ ID NO: 1580540 - RNA, 19 nt, Homo sapiens
  misc_RNA (1)...(19): siRNA sense strand
ucagagacaucauauugga

SEQ ID NO: 1580541 - RNA, 19 nt, Homo sapiens
  misc_RNA (1)...(19): siRNA sense strand
caaguuuccuucagcauca

SEQ ID NO: 1580542 - RNA, 19 nt, Homo sapiens
  misc_RNA (1)...(19): siRNA sense strand
agagaaacccuauaaaugu

SEQ ID NO: 1580543 - RNA, 19 nt, Homo sapiens
  misc_RNA (1)...(19): siRNA sense strand
uuacagauguggcuugugu

SEQ ID NO: 1580544 - RNA, 19 nt, Homo sapiens
  misc_RNA (1)...(19): siRNA sense strand
agagauuccugaagaagaa

SEQ ID NO: 1580545 - RNA, 19 nt, Homo sapiens
  misc_RNA (1)...(19): siRNA sense strand
ggagagaaaccuuacagau

SEQ ID NO: 1580546 - RNA, 19 nt, Homo sapiens
  misc_RNA (1)...(19): siRNA sense strand
agaaacccuuugaauguaa

SEQ ID NO: 1580547 - RNA, 19 nt, Homo sapiens
  misc_RNA (1)...(19): siRNA sense strand
gcgagaaacccuaugaaug

SEQ ID NO: 1580548 - RNA, 19 nt, Homo sapiens
  misc_RNA (1)...(19): siRNA sense strand
ggacaauaaaggaaagauu

SEQ ID NO: 1580549 - RNA, 19 nt, Homo sapiens
  misc_RNA (1)...(19): siRNA sense strand
agagaaacccuuugaaugu

SEQ ID NO: 1580550 - RNA, 19 nt, Homo sapiens
  misc_RNA (1)...(19): siRNA sense strand
aggcagagauuccugaaga

SEQ ID NO: 1580551 - RNA, 19 nt, Homo sapiens
  misc_RNA (1)...(19): siRNA sense strand
ucacuuacguaccaucaga

SEQ ID NO: 1580552 - RNA, 19 nt, Homo sapiens
  misc_RNA (1)...(19): siRNA sense strand
ugacuaugccugccaguaa

SEQ ID NO: 1580553 - RNA, 19 nt, Homo sapiens
  misc_RNA (1)...(19): siRNA sense strand
ccuggaggcuucugucuug

SEQ ID NO: 1580554 - RNA, 19 nt, Homo sapiens
  misc_RNA (1)...(19): siRNA sense strand
gcacuagcccaacaucaga

SEQ ID NO: 1580555 - RNA, 19 nt, Homo sapiens
  misc_RNA (1)...(19): siRNA sense strand
gacaauaaaggaaagauuc

SEQ ID NO: 1580556 - RNA, 19 nt, Homo sapiens
  misc_RNA (1)...(19): siRNA sense strand
aaggaaagauucaguagca

SEQ ID NO: 1580557 - RNA, 19 nt, Homo sapiens
  misc_RNA (1)...(19): siRNA sense strand
caggagagaaacccuauaa

SEQ ID NO: 1580558 - RNA, 19 nt, Homo sapiens
  misc_RNA (1)...(19): siRNA sense strand
ugucuugacuggaugacua

SEQ ID NO: 1580559 - RNA, 19 nt, Homo sapiens
  misc_RNA (1)...(19): siRNA sense strand
agucagggauuucaaccua

SEQ ID NO: 1580560 - RNA, 19 nt, Homo sapiens
  misc_RNA (1)...(19): siRNA sense strand
uuggaucaauggacaauaa

SEQ ID NO: 1580561 - RNA, 19 nt, Homo sapiens
  misc_RNA (1)...(19): siRNA sense strand
gaaacccuaugaauguaag

SEQ ID NO: 1580562 - RNA, 19 nt, Homo sapiens
  misc_RNA (1)...(19): siRNA sense strand
gaaacccuuugaauguaau

SEQ ID NO: 1580563 - RNA, 19 nt, Homo sapiens
  misc_RNA (1)...(19): siRNA sense strand
gaaacccuauaaaugcaau

SEQ ID NO: 1580564 - RNA, 19 nt, Homo sapiens
  misc_RNA (1)...(19): siRNA sense strand
gagagaaaccuuuuaaaug

SEQ ID NO: 1580565 - RNA, 19 nt, Homo sapiens
  misc_RNA (1)...(19): siRNA sense strand
caucauagaauacauacug

SEQ ID NO: 1580566 - RNA, 19 nt, Homo sapiens
  misc_RNA (1)...(19): siRNA sense strand
guggagagaaacccuauaa

SEQ ID NO: 1580567 - RNA, 19 nt, Homo sapiens
  misc_RNA (1)...(19): siRNA sense strand
cagcaucagagacaucaua

SEQ ID NO: 1580568 - RNA, 19 nt, Homo sapiens
  misc_RNA (1)...(19): siRNA sense strand
agauguggcuugugugaga

SEQ ID NO: 1580569 - RNA, 19 nt, Homo sapiens
  misc_RNA (1)...(19): siRNA sense strand
gagaaaccuuacagaugug

SEQ ID NO: 1580570 - RNA, 19 nt, Homo sapiens
  misc_RNA (1)...(19): siRNA sense strand
gaacucuucccuuacugaa

SEQ ID NO: 1580571 - RNA, 19 nt, Homo sapiens
  misc_RNA (1)...(19): siRNA sense strand
gagagaagccuuuugaaug

SEQ ID NO: 1580572 - RNA, 19 nt, Homo sapiens
  misc_RNA (1)...(19): siRNA sense strand
ggugaacucuucccuuacu

SEQ ID NO: 1580573 - RNA, 19 nt, Homo sapiens
  misc_RNA (1)...(19): siRNA sense strand
gacaucauauuggagagaa

SEQ ID NO: 1580574 - RNA, 19 nt, Homo sapiens
  misc_RNA (1)...(19): siRNA sense strand
caucagagaauucauacug

SEQ ID NO: 1580575 - RNA, 19 nt, Homo sapiens
  misc_RNA (1)...(19): siRNA sense strand
caucagagaauucauacug

SEQ ID NO: 1580576 - RNA, 19 nt, Homo sapiens
  misc_RNA (1)...(19): siRNA sense strand
gaauacauacuggagagaa

SEQ ID NO: 1580577 - RNA, 19 nt, Homo sapiens
  misc_RNA (1)...(19): siRNA sense strand
cuucaaggauguggcuaua

SEQ ID NO: 1580578 - RNA, 19 nt, Homo sapiens
  misc_RNA (1)...(19): siRNA sense strand
ggagagaaaccuuuuaaau

SEQ ID NO: 1580579 - RNA, 19 nt, Homo sapiens
  misc_RNA (1)...(19): siRNA sense strand
guggaaaagucuucucuaa

SEQ ID NO: 1580580 - RNA, 19 nt, Homo sapiens
  misc_RNA (1)...(19): siRNA sense strand
ucaaggauguggcuauacu

SEQ ID NO: 1580581 - RNA, 19 nt, Homo sapiens
  misc_RNA (1)...(19): siRNA sense strand
ggcagagauuccugaagaa

SEQ ID NO: 1580582 - RNA, 19 nt, Homo sapiens
  misc_RNA (1)...(19): siRNA sense strand
caaccaugguccaggaauc

SEQ ID NO: 1580583 - RNA, 19 nt, Homo sapiens
  misc_RNA (1)...(19): siRNA sense strand
agagaaacccuauaaaugc

SEQ ID NO: 1580584 - RNA, 19 nt, Homo sapiens
  misc_RNA (1)...(19): siRNA sense strand
caccagaguacgcaccuua

SEQ ID NO: 1580585 - RNA, 19 nt, Homo sapiens
  misc_RNA (1)...(19): siRNA sense strand
gaagcacucaccugacuca

SEQ ID NO: 1580586 - RNA, 19 nt, Homo sapiens
  misc_RNA (1)...(19): siRNA sense strand
uuaccaaacaccagaauau

SEQ ID NO: 1580587 - RNA, 19 nt, Homo sapiens
  misc_RNA (1)...(19): siRNA sense strand
caacaucagaggauucaca

SEQ ID NO: 1580588 - RNA, 19 nt, Homo sapiens
  misc_RNA (1)...(19): siRNA sense strand
caauggacaauaaaggaaa

SEQ ID NO: 1580589 - RNA, 19 nt, Homo sapiens
  misc_RNA (1)...(19): siRNA sense strand
aauacauacuggagagaaa

SEQ ID NO: 1580590 - RNA, 19 nt, Homo sapiens
  misc_RNA (1)...(19): siRNA sense strand
ggucucacugggacucuua

SEQ ID NO: 1580591 - RNA, 19 nt, Homo sapiens
  misc_RNA (1)...(19): siRNA sense strand
ccuuauccaucaccaaaga

SEQ ID NO: 1580592 - RNA, 19 nt, Homo sapiens
  misc_RNA (1)...(19): siRNA sense strand
gaucaaagucagggauuuc

SEQ ID NO: 1580593 - RNA, 19 nt, Homo sapiens
  misc_RNA (1)...(19): siRNA sense strand
guaagaaaucuacugucaa

SEQ ID NO: 1580594 - RNA, 19 nt, Homo sapiens
  misc_RNA (1)...(19): siRNA sense strand
uaaaggaaagauucaguag

SEQ ID NO: 1580595 - RNA, 19 nt, Homo sapiens
  misc_RNA (1)...(19): siRNA sense strand
acacuggagagaaaccuua

SEQ ID NO: 1580596 - RNA, 19 nt, Homo sapiens
  misc_RNA (1)...(19): siRNA sense strand
gcuccucacuuacguacca

SEQ ID NO: 1580597 - RNA, 19 nt, Homo sapiens
  misc_RNA (1)...(19): siRNA sense strand
ugaucaaagucagggauuu

SEQ ID NO: 1580598 - RNA, 19 nt, Homo sapiens
  misc_RNA (1)...(19): siRNA sense strand
ggagaaaagauaugaaugu

SEQ ID NO: 1580599 - RNA, 19 nt, Homo sapiens
  misc_RNA (1)...(19): siRNA sense strand
aggaaucggugaccuucaa

SEQ ID NO: 1580600 - RNA, 19 nt, Homo sapiens
  misc_RNA (1)...(19): siRNA sense strand
gaauucauacuggagagaa

SEQ ID NO: 1580601 - RNA, 19 nt, Homo sapiens
  misc_RNA (1)...(19): siRNA sense strand
caccuugcccaucaucaua

SEQ ID NO: 1580602 - RNA, 19 nt, Homo sapiens
  misc_RNA (1)...(19): siRNA sense strand
auauacaccuugcccauca

SEQ ID NO: 1580603 - RNA, 19 nt, Homo sapiens
  misc_RNA (1)...(19): siRNA sense strand
gggacgugaugcuggagaa

SEQ ID NO: 1580604 - RNA, 19 nt, Homo sapiens
  misc_RNA (1)...(19): siRNA sense strand
gaucaauggacaauaaagg

SEQ ID NO: 1580605 - RNA, 19 nt, Homo sapiens
  misc_RNA (1)...(19): siRNA sense strand
caaaccucauucagcauca

SEQ ID NO: 1580606 - RNA, 19 nt, Homo sapiens
  misc_RNA (1)...(19): siRNA sense strand
uguaauaaaugugggaaag

SEQ ID NO: 1580607 - RNA, 19 nt, Homo sapiens
  misc_RNA (1)...(19): siRNA sense strand
aaucagcacuagcccaaca

SEQ ID NO: 1580608 - RNA, 19 nt, Homo sapiens
  misc_RNA (1)...(19): siRNA sense strand
cuggagagaaaccuuauaa

SEQ ID NO: 1580609 - RNA, 19 nt, Homo sapiens
  misc_RNA (1)...(19): siRNA sense strand
gcagggcacaccuuaccaa

SEQ ID NO: 1580610 - RNA, 19 nt, Homo sapiens
  misc_RNA (1)...(19): siRNA sense strand
gaugaauccgggagcacua

SEQ ID NO: 1580611 - RNA, 19 nt, Homo sapiens
  misc_RNA (1)...(19): siRNA sense strand
gaggccaggagaucaguuu

SEQ ID NO: 1580612 - RNA, 19 nt, Homo sapiens
  misc_RNA (1)...(19): siRNA sense strand
uaauaaaugugggaaagcu

SEQ ID NO: 1580613 - RNA, 19 nt, Homo sapiens
  misc_RNA (1)...(19): siRNA sense strand
aaacuggacuugaucaaua

SEQ ID NO: 1580614 - RNA, 19 nt, Homo sapiens
  misc_RNA (1)...(19): siRNA sense strand
gcaugaaucuggaauagaa

SEQ ID NO: 1580615 - RNA, 19 nt, Homo sapiens
  misc_RNA (1)...(19): siRNA sense strand
guaugaagcucagaauaua

SEQ ID NO: 1580616 - RNA, 19 nt, Homo sapiens
  misc_RNA (1)...(19): siRNA sense strand
gaugugcuguuaacucuua

SEQ ID NO: 1580617 - RNA, 19 nt, Homo sapiens
  misc_RNA (1)...(19): siRNA sense strand
gaacacaaacuguaccuaa

SEQ ID NO: 1580618 - RNA, 19 nt, Homo sapiens
  misc_RNA (1)...(19): siRNA sense strand
gaagaacuuacacguauua

SEQ ID NO: 1580619 - RNA, 19 nt, Homo sapiens
  misc_RNA (1)...(19): siRNA sense strand
ugacagugauacagacuua

SEQ ID NO: 1580620 - RNA, 19 nt, Homo sapiens
  misc_RNA (1)...(19): siRNA sense strand
uaacugaugucucucaaau

SEQ ID NO: 1580621 - RNA, 19 nt, Homo sapiens
  misc_RNA (1)...(19): siRNA sense strand
caagacaaguuucauauac

SEQ ID NO: 1580622 - RNA, 19 nt, Homo sapiens
  misc_RNA (1)...(19): siRNA sense strand
aagaagaacuuacacguau

SEQ ID NO: 1580623 - RNA, 19 nt, Homo sapiens
  misc_RNA (1)...(19): siRNA sense strand
uacagaagcugauuaugaa

SEQ ID NO: 1580624 - RNA, 19 nt, Homo sapiens
  misc_RNA (1)...(19): siRNA sense strand
uaaacacacuguaaaggaa

SEQ ID NO: 1580625 - RNA, 19 nt, Homo sapiens
  misc_RNA (1)...(19): siRNA sense strand
ccagagagcugcaaaauau

SEQ ID NO: 1580626 - RNA, 19 nt, Homo sapiens
  misc_RNA (1)...(19): siRNA sense strand
uaacaggaguagaguauca

SEQ ID NO: 1580627 - RNA, 19 nt, Homo sapiens
  misc_RNA (1)...(19): siRNA sense strand
ggaagauucucuagcaaca

SEQ ID NO: 1580628 - RNA, 19 nt, Homo sapiens
  misc_RNA (1)...(19): siRNA sense strand
acaaacauauccuggcuaa

SEQ ID NO: 1580629 - RNA, 19 nt, Homo sapiens
  misc_RNA (1)...(19): siRNA sense strand
ggaaagcugcucuguguga

SEQ ID NO: 1580630 - RNA, 19 nt, Homo sapiens
  misc_RNA (1)...(19): siRNA sense strand
ggaaacacagcaagaacua

SEQ ID NO: 1580631 - RNA, 19 nt, Homo sapiens
  misc_RNA (1)...(19): siRNA sense strand
ccacacagaugacuaacau

SEQ ID NO: 1580632 - RNA, 19 nt, Homo sapiens
  misc_RNA (1)...(19): siRNA sense strand
cgaaagacucaguauauuu

SEQ ID NO: 1580633 - RNA, 19 nt, Homo sapiens
  misc_RNA (1)...(19): siRNA sense strand
ugacuaacauugguguaua

SEQ ID NO: 1580634 - RNA, 19 nt, Homo sapiens
  misc_RNA (1)...(19): siRNA sense strand
gaugauaguuuggcauuuc

SEQ ID NO: 1580635 - RNA, 19 nt, Homo sapiens
  misc_RNA (1)...(19): siRNA sense strand
gacacaacaccuaagauua

SEQ ID NO: 1580636 - RNA, 19 nt, Homo sapiens
  misc_RNA (1)...(19): siRNA sense strand
agacauagauacauugcuu

SEQ ID NO: 1580637 - RNA, 19 nt, Homo sapiens
  misc_RNA (1)...(19): siRNA sense strand
caagaagaacuuacacgua

SEQ ID NO: 1580638 - RNA, 19 nt, Homo sapiens
  misc_RNA (1)...(19): siRNA sense strand
ucacaaugcuggaacacaa

SEQ ID NO: 1580639 - RNA, 19 nt, Homo sapiens
  misc_RNA (1)...(19): siRNA sense strand
cagauaagauacucaggaa

SEQ ID NO: 1580640 - RNA, 19 nt, Homo sapiens
  misc_RNA (1)...(19): siRNA sense strand
gagcaugaaucuggaauag

SEQ ID NO: 1580641 - RNA, 19 nt, Homo sapiens
  misc_RNA (1)...(19): siRNA sense strand
cagaagaauagauggauua

SEQ ID NO: 1580642 - RNA, 19 nt, Homo sapiens
  misc_RNA (1)...(19): siRNA sense strand
aaacauauccuggcuaaga

SEQ ID NO: 1580643 - RNA, 19 nt, Homo sapiens
  misc_RNA (1)...(19): siRNA sense strand
aaggaaagcugcucugugu

SEQ ID NO: 1580644 - RNA, 19 nt, Homo sapiens
  misc_RNA (1)...(19): siRNA sense strand
uaaugagacucuaguacaa

SEQ ID NO: 1580645 - RNA, 19 nt, Homo sapiens
  misc_RNA (1)...(19): siRNA sense strand
gagaucagauggaaguauc

SEQ ID NO: 1580646 - RNA, 19 nt, Homo sapiens
  misc_RNA (1)...(19): siRNA sense strand
caacagcucuacuauacag

SEQ ID NO: 1580647 - RNA, 19 nt, Homo sapiens
  misc_RNA (1)...(19): siRNA sense strand
gaggcuggaugugcuguua

SEQ ID NO: 1580648 - RNA, 19 nt, Homo sapiens
  misc_RNA (1)...(19): siRNA sense strand
ucagauaauugcuuccauu

SEQ ID NO: 1580649 - RNA, 19 nt, Homo sapiens
  misc_RNA (1)...(19): siRNA sense strand
caagaacuaaggaagauaa

SEQ ID NO: 1580650 - RNA, 19 nt, Homo sapiens
  misc_RNA (1)...(19): siRNA sense strand
gaauagauggauuaacuga

SEQ ID NO: 1580651 - RNA, 19 nt, Homo sapiens
  misc_RNA (1)...(19): siRNA sense strand
ccaacaaacuacaaauaca

SEQ ID NO: 1580652 - RNA, 19 nt, Homo sapiens
  misc_RNA (1)...(19): siRNA sense strand
gaaagcugcucugugugaa

SEQ ID NO: 1580653 - RNA, 19 nt, Homo sapiens
  misc_RNA (1)...(19): siRNA sense strand
gcagagugaccaaagcuuu

SEQ ID NO: 1580654 - RNA, 19 nt, Homo sapiens
  misc_RNA (1)...(19): siRNA sense strand
cacaacaccuaagauuaua

SEQ ID NO: 1580655 - RNA, 19 nt, Homo sapiens
  misc_RNA (1)...(19): siRNA sense strand
gaacuaaggaagauaagag

SEQ ID NO: 1580656 - RNA, 19 nt, Homo sapiens
  misc_RNA (1)...(19): siRNA sense strand
agaauaccaugcucaaaga

SEQ ID NO: 1580657 - RNA, 19 nt, Homo sapiens
  misc_RNA (1)...(19): siRNA sense strand
ggaguagaguaucacaaug

SEQ ID NO: 1580658 - RNA, 19 nt, Homo sapiens
  misc_RNA (1)...(19): siRNA sense strand
ggauucagacauaaaguaa

SEQ ID NO: 1580659 - RNA, 19 nt, Homo sapiens
  misc_RNA (1)...(19): siRNA sense strand
ggaguuaagccacaggaaa

SEQ ID NO: 1580660 - RNA, 19 nt, Homo sapiens
  misc_RNA (1)...(19): siRNA sense strand
gaacgcucauuuauucaca

SEQ ID NO: 1580661 - RNA, 19 nt, Homo sapiens
  misc_RNA (1)...(19): siRNA sense strand
ccaagacaaguuucauaua

SEQ ID NO: 1580662 - RNA, 19 nt, Homo sapiens
  misc_RNA (1)...(19): siRNA sense strand
acacaacaccuaagauuau

SEQ ID NO: 1580663 - RNA, 19 nt, Homo sapiens
  misc_RNA (1)...(19): siRNA sense strand
gcucauuuauucacaagau

SEQ ID NO: 1580664 - RNA, 19 nt, Homo sapiens
  misc_RNA (1)...(19): siRNA sense strand
auacagaagcugauuauga

SEQ ID NO: 1580665 - RNA, 19 nt, Homo sapiens
  misc_RNA (1)...(19): siRNA sense strand
uagaauugauugacagaga

SEQ ID NO: 1580666 - RNA, 19 nt, Homo sapiens
  misc_RNA (1)...(19): siRNA sense strand
ccgaaagacucaguauauu

SEQ ID NO: 1580667 - RNA, 19 nt, Homo sapiens
  misc_RNA (1)...(19): siRNA sense strand
agaagagccucaagaguca

SEQ ID NO: 1580668 - RNA, 19 nt, Homo sapiens
  misc_RNA (1)...(19): siRNA sense strand
guagagaauuuaagaagac

SEQ ID NO: 1580669 - RNA, 19 nt, Homo sapiens
  misc_RNA (1)...(19): siRNA sense strand
ggccaaaugaugauaguuu

SEQ ID NO: 1580670 - RNA, 19 nt, Homo sapiens
  misc_RNA (1)...(19): siRNA sense strand
caacagaagagagugauga

SEQ ID NO: 1580671 - RNA, 19 nt, Homo sapiens
  misc_RNA (1)...(19): siRNA sense strand
gaucaaacacaaacauauc

SEQ ID NO: 1580672 - RNA, 19 nt, Homo sapiens
  misc_RNA (1)...(19): siRNA sense strand
ugagaggagucaaacauca

SEQ ID NO: 1580673 - RNA, 19 nt, Homo sapiens
  misc_RNA (1)...(19): siRNA sense strand
auagauggauuaacugaug

SEQ ID NO: 1580674 - RNA, 19 nt, Homo sapiens
  misc_RNA (1)...(19): siRNA sense strand
caucucaagcuaacaagua

SEQ ID NO: 1580675 - RNA, 19 nt, Homo sapiens
  misc_RNA (1)...(19): siRNA sense strand
gauacgcaguucaccauca

SEQ ID NO: 1580676 - RNA, 19 nt, Homo sapiens
  misc_RNA (1)...(19): siRNA sense strand
gaacuuacacguauuaacc

SEQ ID NO: 1580677 - RNA, 19 nt, Homo sapiens
  misc_RNA (1)...(19): siRNA sense strand
gguaacaccaggaaaguau

SEQ ID NO: 1580678 - RNA, 19 nt, Homo sapiens
  misc_RNA (1)...(19): siRNA sense strand
gacuaacauugguguauau

SEQ ID NO: 1580679 - RNA, 19 nt, Homo sapiens
  misc_RNA (1)...(19): siRNA sense strand
gagguuauaucaccaagac

SEQ ID NO: 1580680 - RNA, 19 nt, Homo sapiens
  misc_RNA (1)...(19): siRNA sense strand
agugcuggcuucauuuaua

SEQ ID NO: 1580681 - RNA, 19 nt, Homo sapiens
  misc_RNA (1)...(19): siRNA sense strand
gcauauaccggugucguaa

SEQ ID NO: 1580682 - RNA, 19 nt, Homo sapiens
  misc_RNA (1)...(19): siRNA sense strand
gcaaaacaauugagaugga

SEQ ID NO: 1580683 - RNA, 19 nt, Homo sapiens
  misc_RNA (1)...(19): siRNA sense strand
uaaaggcggugacagugau

SEQ ID NO: 1580684 - RNA, 19 nt, Homo sapiens
  misc_RNA (1)...(19): siRNA sense strand
gcaagaaucaguggaagau

SEQ ID NO: 1580685 - RNA, 19 nt, Homo sapiens
  misc_RNA (1)...(19): siRNA sense strand
uaaagucuguaaaggaauc

SEQ ID NO: 1580686 - RNA, 19 nt, Homo sapiens
  misc_RNA (1)...(19): siRNA sense strand
ucagaagaauagauggauu

SEQ ID NO: 1580687 - RNA, 19 nt, Homo sapiens
  misc_RNA (1)...(19): siRNA sense strand
guaacugcauuaaccuuca

SEQ ID NO: 1580688 - RNA, 19 nt, Homo sapiens
  misc_RNA (1)...(19): siRNA sense strand
cguagagaauuuaagaaga

SEQ ID NO: 1580689 - RNA, 19 nt, Homo sapiens
  misc_RNA (1)...(19): siRNA sense strand
cuugguggauucagacaua

SEQ ID NO: 1580690 - RNA, 19 nt, Homo sapiens
  misc_RNA (1)...(19): siRNA sense strand
caaaucugacuuucacaaa

SEQ ID NO: 1580691 - RNA, 19 nt, Homo sapiens
  misc_RNA (1)...(19): siRNA sense strand
ccucagugcuugcgacaau

SEQ ID NO: 1580692 - RNA, 19 nt, Homo sapiens
  misc_RNA (1)...(19): siRNA sense strand
gaugagaucagauggaagu

SEQ ID NO: 1580693 - RNA, 19 nt, Homo sapiens
  misc_RNA (1)...(19): siRNA sense strand
gcuaacaaguauugaagag

SEQ ID NO: 1580694 - RNA, 19 nt, Homo sapiens
  misc_RNA (1)...(19): siRNA sense strand
ggaacugcauucuucuuac

SEQ ID NO: 1580695 - RNA, 19 nt, Homo sapiens
  misc_RNA (1)...(19): siRNA sense strand
gcaaugcagaggccaaaug

SEQ ID NO: 1580696 - RNA, 19 nt, Homo sapiens
  misc_RNA (1)...(19): siRNA sense strand
agacacaacaccuaagauu

SEQ ID NO: 1580697 - RNA, 19 nt, Homo sapiens
  misc_RNA (1)...(19): siRNA sense strand
ucaggaagcagcaauacaa

SEQ ID NO: 1580698 - RNA, 19 nt, Homo sapiens
  misc_RNA (1)...(19): siRNA sense strand
gaaacacagcaagaacuaa

SEQ ID NO: 1580699 - RNA, 19 nt, Homo sapiens
  misc_RNA (1)...(19): siRNA sense strand
uaacaccaggaaaguauuu

SEQ ID NO: 1580700 - RNA, 19 nt, Homo sapiens
  misc_RNA (1)...(19): siRNA sense strand
acacagaugacuaacauug

SEQ ID NO: 1580701 - RNA, 19 nt, Homo sapiens
  misc_RNA (1)...(19): siRNA sense strand
uaaaguaacaggaguagag

SEQ ID NO: 1580702 - RNA, 19 nt, Homo sapiens
  misc_RNA (1)...(19): siRNA sense strand
uggauuaacugaugucucu

SEQ ID NO: 1580703 - RNA, 19 nt, Homo sapiens
  misc_RNA (1)...(19): siRNA sense strand
gaaauuguacaaguggaaa

SEQ ID NO: 1580704 - RNA, 19 nt, Homo sapiens
  misc_RNA (1)...(19): siRNA sense strand
ggaaauuguacaaguggaa

SEQ ID NO: 1580705 - RNA, 19 nt, Homo sapiens
  misc_RNA (1)...(19): siRNA sense strand
gauaagauacucaggaaaa

SEQ ID NO: 1580706 - RNA, 19 nt, Homo sapiens
  misc_RNA (1)...(19): siRNA sense strand
gcuaaaaucuucguagaga

SEQ ID NO: 1580707 - RNA, 19 nt, Homo sapiens
  misc_RNA (1)...(19): siRNA sense strand
ucagugaucuggucauggu

SEQ ID NO: 1580708 - RNA, 19 nt, Homo sapiens
  misc_RNA (1)...(19): siRNA sense strand
caagacccauugaaauuuu

SEQ ID NO: 1580709 - RNA, 19 nt, Homo sapiens
  misc_RNA (1)...(19): siRNA sense strand
agucaaacaucauaaccuu

SEQ ID NO: 1580710 - RNA, 19 nt, Homo sapiens
  misc_RNA (1)...(19): siRNA sense strand
aaagagacucagauaauug

SEQ ID NO: 1580711 - RNA, 19 nt, Homo sapiens
  misc_RNA (1)...(19): siRNA sense strand
gaaaggaaagcugcucugu

SEQ ID NO: 1580712 - RNA, 19 nt, Homo sapiens
  misc_RNA (1)...(19): siRNA sense strand
uacuggagcugaaaggaaa

SEQ ID NO: 1580713 - RNA, 19 nt, Homo sapiens
  misc_RNA (1)...(19): siRNA sense strand
guacagaacuaaagagaua

SEQ ID NO: 1580714 - RNA, 19 nt, Homo sapiens
  misc_RNA (1)...(19): siRNA sense strand
uaacaucacucccaauaaa

SEQ ID NO: 1580715 - RNA, 19 nt, Homo sapiens
  misc_RNA (1)...(19): siRNA sense strand
gcacugaaauuuaacauca

SEQ ID NO: 1580716 - RNA, 19 nt, Homo sapiens
  misc_RNA (1)...(19): siRNA sense strand
gaacaugauugacaacuuc

SEQ ID NO: 1580717 - RNA, 19 nt, Homo sapiens
  misc_RNA (1)...(19): siRNA sense strand
ggagaaagcagccagagua

SEQ ID NO: 1580718 - RNA, 19 nt, Homo sapiens
  misc_RNA (1)...(19): siRNA sense strand
ccauagcacugaaauuuaa

SEQ ID NO: 1580719 - RNA, 19 nt, Homo sapiens
  misc_RNA (1)...(19): siRNA sense strand
gugcacaaauggauaauaa

SEQ ID NO: 1580720 - RNA, 19 nt, Homo sapiens
  misc_RNA (1)...(19): siRNA sense strand
ggaauagacauuacccuua

SEQ ID NO: 1580721 - RNA, 19 nt, Homo sapiens
  misc_RNA (1)...(19): siRNA sense strand
gaauagacauuacccuuag

SEQ ID NO: 1580722 - RNA, 19 nt, Homo sapiens
  misc_RNA (1)...(19): siRNA sense strand
gaacggaaacaaaguuauu

SEQ ID NO: 1580723 - RNA, 19 nt, Homo sapiens
  misc_RNA (1)...(19): siRNA sense strand
gcaauaaagagccagauaa

SEQ ID NO: 1580724 - RNA, 19 nt, Homo sapiens
  misc_RNA (1)...(19): siRNA sense strand
gaucaucacuguugaagag

SEQ ID NO: 1580725 - RNA, 19 nt, Homo sapiens
  misc_RNA (1)...(19): siRNA sense strand
gggagaggguggaucauuu

SEQ ID NO: 1580726 - RNA, 19 nt, Homo sapiens
  misc_RNA (1)...(19): siRNA sense strand
guacaggccuggagaaugg

SEQ ID NO: 1580727 - RNA, 19 nt, Homo sapiens
  misc_RNA (1)...(19): siRNA sense strand
gaacugaacaugauugaca

SEQ ID NO: 1580728 - RNA, 19 nt, Homo sapiens
  misc_RNA (1)...(19): siRNA sense strand
gaauucagguacccauuga

SEQ ID NO: 1580729 - RNA, 19 nt, Homo sapiens
  misc_RNA (1)...(19): siRNA sense strand
gauaucaacccauucagua

SEQ ID NO: 1580730 - RNA, 19 nt, Homo sapiens
  misc_RNA (1)...(19): siRNA sense strand
gaucaggcguacagaacua

SEQ ID NO: 1580731 - RNA, 19 nt, Homo sapiens
  misc_RNA (1)...(19): siRNA sense strand
gaaagcugagucacaaaua

SEQ ID NO: 1580732 - RNA, 19 nt, Homo sapiens
  misc_RNA (1)...(19): siRNA sense strand
ucaaaucuaucaacaagga

SEQ ID NO: 1580733 - RNA, 19 nt, Homo sapiens
  misc_RNA (1)...(19): siRNA sense strand
aaagaaagcugagucacaa

SEQ ID NO: 1580734 - RNA, 19 nt, Homo sapiens
  misc_RNA (1)...(19): siRNA sense strand
ugacuaagcucagcaagga

SEQ ID NO: 1580735 - RNA, 19 nt, Homo sapiens
  misc_RNA (1)...(19): siRNA sense strand
gcacaugcagcuacuauga

SEQ ID NO: 1580736 - RNA, 19 nt, Homo sapiens
  misc_RNA (1)...(19): siRNA sense strand
ggaauacacugcuggaaac

SEQ ID NO: 1580737 - RNA, 19 nt, Homo sapiens
  misc_RNA (1)...(19): siRNA sense strand
gacauuacccuuaguaguu

SEQ ID NO: 1580738 - RNA, 19 nt, Homo sapiens
  misc_RNA (1)...(19): siRNA sense strand
gaauauuaccugacuaaga

SEQ ID NO: 1580739 - RNA, 19 nt, Homo sapiens
  misc_RNA (1)...(19): siRNA sense strand
gcagucagcccuagccuuu

SEQ ID NO: 1580740 - RNA, 19 nt, Homo sapiens
  misc_RNA (1)...(19): siRNA sense strand
gaaagaaagcugagucaca

SEQ ID NO: 1580741 - RNA, 19 nt, Homo sapiens
  misc_RNA (1)...(19): siRNA sense strand
caaagaagggccacaggua

SEQ ID NO: 1580742 - RNA, 19 nt, Homo sapiens
  misc_RNA (1)...(19): siRNA sense strand
gcagcacuuucaauaauga

SEQ ID NO: 1580743 - RNA, 19 nt, Homo sapiens
  misc_RNA (1)...(19): siRNA sense strand
ccagacaagugcaacauug

SEQ ID NO: 1580744 - RNA, 19 nt, Homo sapiens
  misc_RNA (1)...(19): siRNA sense strand
gcuagaugcugauuuauac

SEQ ID NO: 1580745 - RNA, 19 nt, Homo sapiens
  misc_RNA (1)...(19): siRNA sense strand
aaagcugagucacaaauaa

SEQ ID NO: 1580746 - RNA, 19 nt, Homo sapiens
  misc_RNA (1)...(19): siRNA sense strand
uaacugagggcaauaaaga

SEQ ID NO: 1580747 - RNA, 19 nt, Homo sapiens
  misc_RNA (1)...(19): siRNA sense strand
aaacaauucugccguggaa

SEQ ID NO: 1580748 - RNA, 19 nt, Homo sapiens
  misc_RNA (1)...(19): siRNA sense strand
gguuggcgguguuaugaua

SEQ ID NO: 1580749 - RNA, 19 nt, Homo sapiens
  misc_RNA (1)...(19): siRNA sense strand
aaacugaacucuucuacag

SEQ ID NO: 1580750 - RNA, 19 nt, Homo sapiens
  misc_RNA (1)...(19): siRNA sense strand
aggaauauaugacugauga

SEQ ID NO: 1580751 - RNA, 19 nt, Homo sapiens
  misc_RNA (1)...(19): siRNA sense strand
gaaagcagccagaguacug

SEQ ID NO: 1580752 - RNA, 19 nt, Homo sapiens
  misc_RNA (1)...(19): siRNA sense strand
ccagaaagccgaguagaaa

SEQ ID NO: 1580753 - RNA, 19 nt, Homo sapiens
  misc_RNA (1)...(19): siRNA sense strand
guucaaaucuaucaacaag

SEQ ID NO: 1580754 - RNA, 19 nt, Homo sapiens
  misc_RNA (1)...(19): siRNA sense strand
ggaaggaagauaauaauac

SEQ ID NO: 1580755 - RNA, 19 nt, Homo sapiens
  misc_RNA (1)...(19): siRNA sense strand
gcugggagaucaucacugu

SEQ ID NO: 1580756 - RNA, 19 nt, Homo sapiens
  misc_RNA (1)...(19): siRNA sense strand
gauagugacuccuaacaac

SEQ ID NO: 1580757 - RNA, 19 nt, Homo sapiens
  misc_RNA (1)...(19): siRNA sense strand
uaugauaaauugccugaug

SEQ ID NO: 1580758 - RNA, 19 nt, Homo sapiens
  misc_RNA (1)...(19): siRNA sense strand
agaagaagauggugguuca

SEQ ID NO: 1580759 - RNA, 19 nt, Homo sapiens
  misc_RNA (1)...(19): siRNA sense strand
gaacuuucuucucaaacug

SEQ ID NO: 1580760 - RNA, 19 nt, Homo sapiens
  misc_RNA (1)...(19): siRNA sense strand
caacauugcuguggaagag

SEQ ID NO: 1580761 - RNA, 19 nt, Homo sapiens
  misc_RNA (1)...(19): siRNA sense strand
gauaagaccugggugaaaa

SEQ ID NO: 1580762 - RNA, 19 nt, Homo sapiens
  misc_RNA (1)...(19): siRNA sense strand
agaaugauguugaacugaa

SEQ ID NO: 1580763 - RNA, 19 nt, Homo sapiens
  misc_RNA (1)...(19): siRNA sense strand
gggaaggaagauaauaaua

SEQ ID NO: 1580764 - RNA, 19 nt, Homo sapiens
  misc_RNA (1)...(19): siRNA sense strand
gaagaacugaacaugauug

SEQ ID NO: 1580765 - RNA, 19 nt, Homo sapiens
  misc_RNA (1)...(19): siRNA sense strand
gaagagguuguuuccauug

SEQ ID NO: 1580766 - RNA, 19 nt, Homo sapiens
  misc_RNA (1)...(19): siRNA sense strand
ggaaaucggcaucacuaga

SEQ ID NO: 1580767 - RNA, 19 nt, Homo sapiens
  misc_RNA (1)...(19): siRNA sense strand
ggacauacaccuacaaagc

SEQ ID NO: 1580768 - RNA, 19 nt, Homo sapiens
  misc_RNA (1)...(19): siRNA sense strand
ugacauuucucacaugaag

SEQ ID NO: 1580769 - RNA, 19 nt, Homo sapiens
  misc_RNA (1)...(19): siRNA sense strand
gaggguggaucauuuguac

SEQ ID NO: 1580770 - RNA, 19 nt, Homo sapiens
  misc_RNA (1)...(19): siRNA sense strand
gcucuagacuccucuuugg

SEQ ID NO: 1580771 - RNA, 19 nt, Homo sapiens
  misc_RNA (1)...(19): siRNA sense strand
gaaggaagaacugaacaug

SEQ ID NO: 1580772 - RNA, 19 nt, Homo sapiens
  misc_RNA (1)...(19): siRNA sense strand
gaaaccaggacacccuaaa

SEQ ID NO: 1580773 - RNA, 19 nt, Homo sapiens
  misc_RNA (1)...(19): siRNA sense strand
gaaaauccuuugccacuca

SEQ ID NO: 1580774 - RNA, 19 nt, Homo sapiens
  misc_RNA (1)...(19): siRNA sense strand
gagagaaaauuaugacuuc

SEQ ID NO: 1580775 - RNA, 19 nt, Homo sapiens
  misc_RNA (1)...(19): siRNA sense strand
uaaaucugauccucugguu

SEQ ID NO: 1580776 - RNA, 19 nt, Homo sapiens
  misc_RNA (1)...(19): siRNA sense strand
guaaucaguuaaaggagau

SEQ ID NO: 1580777 - RNA, 19 nt, Homo sapiens
  misc_RNA (1)...(19): siRNA sense strand
cauggagacuggccuauag

SEQ ID NO: 1580778 - RNA, 19 nt, Homo sapiens
  misc_RNA (1)...(19): siRNA sense strand
aggaagaacugaacaugau

SEQ ID NO: 1580779 - RNA, 19 nt, Homo sapiens
  misc_RNA (1)...(19): siRNA sense strand
ccaggcgggugaucccaua

SEQ ID NO: 1580780 - RNA, 19 nt, Homo sapiens
  misc_RNA (1)...(19): siRNA sense strand
gaagaaggaacggaaacaa

SEQ ID NO: 1580781 - RNA, 19 nt, Homo sapiens
  misc_RNA (1)...(19): siRNA sense strand
cagaagcaaaugugauuaa

SEQ ID NO: 1580782 - RNA, 19 nt, Homo sapiens
  misc_RNA (1)...(19): siRNA sense strand
guucaguuguggcuguuaa

SEQ ID NO: 1580783 - RNA, 19 nt, Homo sapiens
  misc_RNA (1)...(19): siRNA sense strand
gaaucuacagccaaagaaa

SEQ ID NO: 1580784 - RNA, 19 nt, Homo sapiens
  misc_RNA (1)...(19): siRNA sense strand
ggaagaacugaacaugauu

SEQ ID NO: 1580785 - RNA, 19 nt, Homo sapiens
  misc_RNA (1)...(19): siRNA sense strand
ggagaggguggaucauuug

SEQ ID NO: 1580786 - RNA, 19 nt, Homo sapiens
  misc_RNA (1)...(19): siRNA sense strand
gaauauaugacugaugaga

SEQ ID NO: 1580787 - RNA, 19 nt, Homo sapiens
  misc_RNA (1)...(19): siRNA sense strand
ccagaccaauaguaccuuu

SEQ ID NO: 1580788 - RNA, 19 nt, Homo sapiens
  misc_RNA (1)...(19): siRNA sense strand
ggcuagaugcugauuuaua

SEQ ID NO: 1580789 - RNA, 19 nt, Homo sapiens
  misc_RNA (1)...(19): siRNA sense strand
gguacccauugaagauaua

SEQ ID NO: 1580790 - RNA, 19 nt, Homo sapiens
  misc_RNA (1)...(19): siRNA sense strand
ggaagaugaugauuuuguu

SEQ ID NO: 1580791 - RNA, 19 nt, Homo sapiens
  misc_RNA (1)...(19): siRNA sense strand
gaaugauguugaacugaag

SEQ ID NO: 1580792 - RNA, 19 nt, Homo sapiens
  misc_RNA (1)...(19): siRNA sense strand
ggagacauaaguucuuuag

SEQ ID NO: 1580793 - RNA, 19 nt, Homo sapiens
  misc_RNA (1)...(19): siRNA sense strand
agaagauggugguucagaa

SEQ ID NO: 1580794 - RNA, 19 nt, Homo sapiens
  misc_RNA (1)...(19): siRNA sense strand
auggcuagaugcugauuua

SEQ ID NO: 1580795 - RNA, 19 nt, Homo sapiens
  misc_RNA (1)...(19): siRNA sense strand
gaaaucggcaucacuagac

SEQ ID NO: 1580796 - RNA, 19 nt, Homo sapiens
  misc_RNA (1)...(19): siRNA sense strand
ugaacaugauugacaacuu

SEQ ID NO: 1580797 - RNA, 19 nt, Homo sapiens
  misc_RNA (1)...(19): siRNA sense strand
ggcaauaaagagccagaua

SEQ ID NO: 1580798 - RNA, 19 nt, Homo sapiens
  misc_RNA (1)...(19): siRNA sense strand
guagcuacaaggacucaua

SEQ ID NO: 1580799 - RNA, 19 nt, Homo sapiens
  misc_RNA (1)...(19): siRNA sense strand
ucaaacuggugguggaaug

SEQ ID NO: 1580800 - RNA, 19 nt, Homo sapiens
  misc_RNA (1)...(19): siRNA sense strand
ugaaacccauugaaagagu

SEQ ID NO: 1580801 - RNA, 19 nt, Homo sapiens
  misc_RNA (1)...(19): siRNA sense strand
uugcagcacuuucaauaau

SEQ ID NO: 1580802 - RNA, 19 nt, Homo sapiens
  misc_RNA (1)...(19): siRNA sense strand
cuuuaucaauggagacaua

SEQ ID NO: 1580803 - RNA, 19 nt, Homo sapiens
  misc_RNA (1)...(19): siRNA sense strand
gcacgggaccagcuuaaag

SEQ ID NO: 1580804 - RNA, 19 nt, Homo sapiens
  misc_RNA (1)...(19): siRNA sense strand
gagcacaugcagcuacuau

SEQ ID NO: 1580805 - RNA, 19 nt, Homo sapiens
  misc_RNA (1)...(19): siRNA sense strand
gaucauuuguacacauucu

SEQ ID NO: 1580806 - RNA, 19 nt, Homo sapiens
  misc_RNA (1)...(19): siRNA sense strand
gaaggaacggaaacaaagu

SEQ ID NO: 1580807 - RNA, 19 nt, Homo sapiens
  misc_RNA (1)...(19): siRNA sense strand
uccaguaccuuaaggcuau

SEQ ID NO: 1580808 - RNA, 19 nt, Homo sapiens
  misc_RNA (1)...(19): siRNA sense strand
gggagaucaucacuguuga

SEQ ID NO: 1580809 - RNA, 19 nt, Homo sapiens
  misc_RNA (1)...(19): siRNA sense strand
ggagaucaggcguacagaa

SEQ ID NO: 1580810 - RNA, 19 nt, Homo sapiens
  misc_RNA (1)...(19): siRNA sense strand
gaagauggugguucagaag

SEQ ID NO: 1580811 - RNA, 19 nt, Homo sapiens
  misc_RNA (1)...(19): siRNA sense strand
gagcacgggaccagcuuaa

SEQ ID NO: 1580812 - RNA, 19 nt, Homo sapiens
  misc_RNA (1)...(19): siRNA sense strand
gggacgauuugguuuaugg

SEQ ID NO: 1580813 - RNA, 19 nt, Homo sapiens
  misc_RNA (1)...(19): siRNA sense strand
gcaugaaacugagugaaga

SEQ ID NO: 1580814 - RNA, 19 nt, Homo sapiens
  misc_RNA (1)...(19): siRNA sense strand
cuacacggguuucaucaaa

SEQ ID NO: 1580815 - RNA, 19 nt, Homo sapiens
  misc_RNA (1)...(19): siRNA sense strand
ccuggugcauucagauuua

SEQ ID NO: 1580816 - RNA, 19 nt, Homo sapiens
  misc_RNA (1)...(19): siRNA sense strand
ucaagaaguucaugguugu

SEQ ID NO: 1580817 - RNA, 19 nt, Homo sapiens
  misc_RNA (1)...(19): siRNA sense strand
caucaaagugcaucugaaa

SEQ ID NO: 1580818 - RNA, 19 nt, Homo sapiens
  misc_RNA (1)...(19): siRNA sense strand
gaagaucgacagcuacaac

SEQ ID NO: 1580819 - RNA, 19 nt, Homo sapiens
  misc_RNA (1)...(19): siRNA sense strand
ucaagcagcugcacaucag

SEQ ID NO: 1580820 - RNA, 19 nt, Homo sapiens
  misc_RNA (1)...(19): siRNA sense strand
ugcaggagaucaagcagaa

SEQ ID NO: 1580821 - RNA, 19 nt, Homo sapiens
  misc_RNA (1)...(19): siRNA sense strand
gcaccaccaccgucaguga

SEQ ID NO: 1580822 - RNA, 19 nt, Homo sapiens
  misc_RNA (1)...(19): siRNA sense strand
caaagugcaucugaaacuc

SEQ ID NO: 1580823 - RNA, 19 nt, Homo sapiens
  misc_RNA (1)...(19): siRNA sense strand
agcagaagaucgacagcua

SEQ ID NO: 1580824 - RNA, 19 nt, Homo sapiens
  misc_RNA (1)...(19): siRNA sense strand
acacaaggacggacaagug

SEQ ID NO: 1580825 - RNA, 19 nt, Homo sapiens
  misc_RNA (1)...(19): siRNA sense strand
gcucaagaaguucaugguu

SEQ ID NO: 1580826 - RNA, 19 nt, Homo sapiens
  misc_RNA (1)...(19): siRNA sense strand
ggugcauucagauuuauuu

SEQ ID NO: 1580827 - RNA, 19 nt, Homo sapiens
  misc_RNA (1)...(19): siRNA sense strand
acacggguuucaucaaagu

SEQ ID NO: 1580828 - RNA, 19 nt, Homo sapiens
  misc_RNA (1)...(19): siRNA sense strand
ucaucaaagugcaucugaa

SEQ ID NO: 1580829 - RNA, 19 nt, Homo sapiens
  misc_RNA (1)...(19): siRNA sense strand
uuaagcggauacacaagga

SEQ ID NO: 1580830 - RNA, 19 nt, Homo sapiens
  misc_RNA (1)...(19): siRNA sense strand
ucaaagugcaucugaaacu

SEQ ID NO: 1580831 - RNA, 19 nt, Homo sapiens
  misc_RNA (1)...(19): siRNA sense strand
caggagaucaagcagaaga

SEQ ID NO: 1580832 - RNA, 19 nt, Homo sapiens
  misc_RNA (1)...(19): siRNA sense strand
ggacaauccccagaaguuu

SEQ ID NO: 1580833 - RNA, 19 nt, Homo sapiens
  misc_RNA (1)...(19): siRNA sense strand
ggcaugaaacugagugaag

SEQ ID NO: 1580834 - RNA, 19 nt, Homo sapiens
  misc_RNA (1)...(19): siRNA sense strand
cuacaacacgcgagagaag

SEQ ID NO: 1580835 - RNA, 19 nt, Homo sapiens
  misc_RNA (1)...(19): siRNA sense strand
ccacacugcaggagaucaa

SEQ ID NO: 1580836 - RNA, 19 nt, Homo sapiens
  misc_RNA (1)...(19): siRNA sense strand
acaacacgcgagagaagaa

SEQ ID NO: 1580837 - RNA, 19 nt, Homo sapiens
  misc_RNA (1)...(19): siRNA sense strand
cagaagaucgacagcuaca

SEQ ID NO: 1580838 - RNA, 19 nt, Homo sapiens
  misc_RNA (1)...(19): siRNA sense strand
gcaugaaacugagugaaga

SEQ ID NO: 1580839 - RNA, 19 nt, Homo sapiens
  misc_RNA (1)...(19): siRNA sense strand
cuacacggguuucaucaaa

SEQ ID NO: 1580840 - RNA, 19 nt, Homo sapiens
  misc_RNA (1)...(19): siRNA sense strand
ucaagaaguucaugguugu

SEQ ID NO: 1580841 - RNA, 19 nt, Homo sapiens
  misc_RNA (1)...(19): siRNA sense strand
caucaaagugcaucugaaa

SEQ ID NO: 1580842 - RNA, 19 nt, Homo sapiens
  misc_RNA (1)...(19): siRNA sense strand
gaagaucgacagcuacaac

SEQ ID NO: 1580843 - RNA, 19 nt, Homo sapiens
  misc_RNA (1)...(19): siRNA sense strand
ucaagcagcugcacaucag

SEQ ID NO: 1580844 - RNA, 19 nt, Homo sapiens
  misc_RNA (1)...(19): siRNA sense strand
ugcaggagaucaagcagaa

SEQ ID NO: 1580845 - RNA, 19 nt, Homo sapiens
  misc_RNA (1)...(19): siRNA sense strand
gcaccaccaccgucaguga

SEQ ID NO: 1580846 - RNA, 19 nt, Homo sapiens
  misc_RNA (1)...(19): siRNA sense strand
caaagugcaucugaaacuc

SEQ ID NO: 1580847 - RNA, 19 nt, Homo sapiens
  misc_RNA (1)...(19): siRNA sense strand
agcagaagaucgacagcua

SEQ ID NO: 1580848 - RNA, 19 nt, Homo sapiens
  misc_RNA (1)...(19): siRNA sense strand
acacaaggacggacaagug

SEQ ID NO: 1580849 - RNA, 19 nt, Homo sapiens
  misc_RNA (1)...(19): siRNA sense strand
gcucaagaaguucaugguu

SEQ ID NO: 1580850 - RNA, 19 nt, Homo sapiens
  misc_RNA (1)...(19): siRNA sense strand
acacggguuucaucaaagu

SEQ ID NO: 1580851 - RNA, 19 nt, Homo sapiens
  misc_RNA (1)...(19): siRNA sense strand
ucaucaaagugcaucugaa

SEQ ID NO: 1580852 - RNA, 19 nt, Homo sapiens
  misc_RNA (1)...(19): siRNA sense strand
uuaagcggauacacaagga

SEQ ID NO: 1580853 - RNA, 19 nt, Homo sapiens
  misc_RNA (1)...(19): siRNA sense strand
ucaaagugcaucugaaacu

SEQ ID NO: 1580854 - RNA, 19 nt, Homo sapiens
  misc_RNA (1)...(19): siRNA sense strand
caggagaucaagcagaaga

SEQ ID NO: 1580855 - RNA, 19 nt, Homo sapiens
  misc_RNA (1)...(19): siRNA sense strand
ggacaauccccagaaguuu

SEQ ID NO: 1580856 - RNA, 19 nt, Homo sapiens
  misc_RNA (1)...(19): siRNA sense strand
cuacaacacgcgagagaag

SEQ ID NO: 1580857 - RNA, 19 nt, Homo sapiens
  misc_RNA (1)...(19): siRNA sense strand
ccacacugcaggagaucaa

SEQ ID NO: 1580858 - RNA, 19 nt, Homo sapiens
  misc_RNA (1)...(19): siRNA sense strand
ggcaugaaacugagugaag

SEQ ID NO: 1580859 - RNA, 19 nt, Homo sapiens
  misc_RNA (1)...(19): siRNA sense strand
acaacacgcgagagaagaa

SEQ ID NO: 1580860 - RNA, 19 nt, Homo sapiens
  misc_RNA (1)...(19): siRNA sense strand
cagaagaucgacagcuaca

SEQ ID NO: 1580861 - RNA, 19 nt, Homo sapiens
  misc_RNA (1)...(19): siRNA sense strand
gcaugaaacugagugaaga

SEQ ID NO: 1580862 - RNA, 19 nt, Homo sapiens
  misc_RNA (1)...(19): siRNA sense strand
cuacacggguuucaucaaa

SEQ ID NO: 1580863 - RNA, 19 nt, Homo sapiens
  misc_RNA (1)...(19): siRNA sense strand
ucaagaaguucaugguugu

SEQ ID NO: 1580864 - RNA, 19 nt, Homo sapiens
  misc_RNA (1)...(19): siRNA sense strand
caucaaagugcaucugaaa

SEQ ID NO: 1580865 - RNA, 19 nt, Homo sapiens
  misc_RNA (1)...(19): siRNA sense strand
gaagaucgacagcuacaac

SEQ ID NO: 1580866 - RNA, 19 nt, Homo sapiens
  misc_RNA (1)...(19): siRNA sense strand
ucaagcagcugcacaucag

SEQ ID NO: 1580867 - RNA, 19 nt, Homo sapiens
  misc_RNA (1)...(19): siRNA sense strand
ugcaggagaucaagcagaa

SEQ ID NO: 1580868 - RNA, 19 nt, Homo sapiens
  misc_RNA (1)...(19): siRNA sense strand
gcaccaccaccgucaguga

SEQ ID NO: 1580869 - RNA, 19 nt, Homo sapiens
  misc_RNA (1)...(19): siRNA sense strand
caaagugcaucugaaacuc

SEQ ID NO: 1580870 - RNA, 19 nt, Homo sapiens
  misc_RNA (1)...(19): siRNA sense strand
agcagaagaucgacagcua

SEQ ID NO: 1580871 - RNA, 19 nt, Homo sapiens
  misc_RNA (1)...(19): siRNA sense strand
acacaaggacggacaagug

SEQ ID NO: 1580872 - RNA, 19 nt, Homo sapiens
  misc_RNA (1)...(19): siRNA sense strand
gcucaagaaguucaugguu

SEQ ID NO: 1580873 - RNA, 19 nt, Homo sapiens
  misc_RNA (1)...(19): siRNA sense strand
acacggguuucaucaaagu

SEQ ID NO: 1580874 - RNA, 19 nt, Homo sapiens
  misc_RNA (1)...(19): siRNA sense strand
ucaucaaagugcaucugaa

SEQ ID NO: 1580875 - RNA, 19 nt, Homo sapiens
  misc_RNA (1)...(19): siRNA sense strand
uuaagcggauacacaagga

SEQ ID NO: 1580876 - RNA, 19 nt, Homo sapiens
  misc_RNA (1)...(19): siRNA sense strand
ucaaagugcaucugaaacu

SEQ ID NO: 1580877 - RNA, 19 nt, Homo sapiens
  misc_RNA (1)...(19): siRNA sense strand
caggagaucaagcagaaga

SEQ ID NO: 1580878 - RNA, 19 nt, Homo sapiens
  misc_RNA (1)...(19): siRNA sense strand
ggacaauccccagaaguuu

SEQ ID NO: 1580879 - RNA, 19 nt, Homo sapiens
  misc_RNA (1)...(19): siRNA sense strand
cuacaacacgcgagagaag

SEQ ID NO: 1580880 - RNA, 19 nt, Homo sapiens
  misc_RNA (1)...(19): siRNA sense strand
ccacacugcaggagaucaa

SEQ ID NO: 1580881 - RNA, 19 nt, Homo sapiens
  misc_RNA (1)...(19): siRNA sense strand
ggcaugaaacugagugaag

SEQ ID NO: 1580882 - RNA, 19 nt, Homo sapiens
  misc_RNA (1)...(19): siRNA sense strand
acaacacgcgagagaagaa

SEQ ID NO: 1580883 - RNA, 19 nt, Homo sapiens
  misc_RNA (1)...(19): siRNA sense strand
cagaagaucgacagcuaca

SEQ ID NO: 1580884 - RNA, 19 nt, Homo sapiens
  misc_RNA (1)...(19): siRNA sense strand
gcaugaaacugagugaaga

SEQ ID NO: 1580885 - RNA, 19 nt, Homo sapiens
  misc_RNA (1)...(19): siRNA sense strand
cuacacggguuucaucaaa

SEQ ID NO: 1580886 - RNA, 19 nt, Homo sapiens
  misc_RNA (1)...(19): siRNA sense strand
ucaagaaguucaugguugu

SEQ ID NO: 1580887 - RNA, 19 nt, Homo sapiens
  misc_RNA (1)...(19): siRNA sense strand
caucaaagugcaucugaaa

SEQ ID NO: 1580888 - RNA, 19 nt, Homo sapiens
  misc_RNA (1)...(19): siRNA sense strand
gaagaucgacagcuacaac

SEQ ID NO: 1580889 - RNA, 19 nt, Homo sapiens
  misc_RNA (1)...(19): siRNA sense strand
ucaagcagcugcacaucag

SEQ ID NO: 1580890 - RNA, 19 nt, Homo sapiens
  misc_RNA (1)...(19): siRNA sense strand
ugcaggagaucaagcagaa

SEQ ID NO: 1580891 - RNA, 19 nt, Homo sapiens
  misc_RNA (1)...(19): siRNA sense strand
gcaccaccaccgucaguga

SEQ ID NO: 1580892 - RNA, 19 nt, Homo sapiens
  misc_RNA (1)...(19): siRNA sense strand
caaagugcaucugaaacuc

SEQ ID NO: 1580893 - RNA, 19 nt, Homo sapiens
  misc_RNA (1)...(19): siRNA sense strand
agcagaagaucgacagcua

SEQ ID NO: 1580894 - RNA, 19 nt, Homo sapiens
  misc_RNA (1)...(19): siRNA sense strand
acacaaggacggacaagug

SEQ ID NO: 1580895 - RNA, 19 nt, Homo sapiens
  misc_RNA (1)...(19): siRNA sense strand
gcucaagaaguucaugguu

SEQ ID NO: 1580896 - RNA, 19 nt, Homo sapiens
  misc_RNA (1)...(19): siRNA sense strand
acacggguuucaucaaagu

SEQ ID NO: 1580897 - RNA, 19 nt, Homo sapiens
  misc_RNA (1)...(19): siRNA sense strand
ucaucaaagugcaucugaa

SEQ ID NO: 1580898 - RNA, 19 nt, Homo sapiens
  misc_RNA (1)...(19): siRNA sense strand
uuaagcggauacacaagga

SEQ ID NO: 1580899 - RNA, 19 nt, Homo sapiens
  misc_RNA (1)...(19): siRNA sense strand
ucaaagugcaucugaaacu

SEQ ID NO: 1580900 - RNA, 19 nt, Homo sapiens
  misc_RNA (1)...(19): siRNA sense strand
caggagaucaagcagaaga

SEQ ID NO: 1580901 - RNA, 19 nt, Homo sapiens
  misc_RNA (1)...(19): siRNA sense strand
ggacaauccccagaaguuu

SEQ ID NO: 1580902 - RNA, 19 nt, Homo sapiens
  misc_RNA (1)...(19): siRNA sense strand
cuacaacacgcgagagaag

SEQ ID NO: 1580903 - RNA, 19 nt, Homo sapiens
  misc_RNA (1)...(19): siRNA sense strand
ccacacugcaggagaucaa

SEQ ID NO: 1580904 - RNA, 19 nt, Homo sapiens
  misc_RNA (1)...(19): siRNA sense strand
ggcaugaaacugagugaag

SEQ ID NO: 1580905 - RNA, 19 nt, Homo sapiens
  misc_RNA (1)...(19): siRNA sense strand
acaacacgcgagagaagaa

SEQ ID NO: 1580906 - RNA, 19 nt, Homo sapiens
  misc_RNA (1)...(19): siRNA sense strand
cagaagaucgacagcuaca

SEQ ID NO: 1580907 - RNA, 19 nt, Homo sapiens
  misc_RNA (1)...(19): siRNA sense strand
ccgcagaccucgggaacuu

SEQ ID NO: 1580908 - RNA, 19 nt, Homo sapiens
  misc_RNA (1)...(19): siRNA sense strand
ugacucagagccauauuga

SEQ ID NO: 1580909 - RNA, 19 nt, Homo sapiens
  misc_RNA (1)...(19): siRNA sense strand
ucagagccauauugaguac

SEQ ID NO: 1580910 - RNA, 19 nt, Homo sapiens
  misc_RNA (1)...(19): siRNA sense strand
cugggaggguugcaugaaa

SEQ ID NO: 1580911 - RNA, 19 nt, Homo sapiens
  misc_RNA (1)...(19): siRNA sense strand
agagccauauugaguacuu

SEQ ID NO: 1580912 - RNA, 19 nt, Homo sapiens
  misc_RNA (1)...(19): siRNA sense strand
gagauccccuggacagaga

SEQ ID NO: 1580913 - RNA, 19 nt, Homo sapiens
  misc_RNA (1)...(19): siRNA sense strand
ccaagggaagcgcuagguu

SEQ ID NO: 1580914 - RNA, 19 nt, Homo sapiens
  misc_RNA (1)...(19): siRNA sense strand
gcagaccucgggaacuucu

SEQ ID NO: 1580915 - RNA, 19 nt, Homo sapiens
  misc_RNA (1)...(19): siRNA sense strand
gaacagcaguggcgugaug

SEQ ID NO: 1580916 - RNA, 19 nt, Homo sapiens
  misc_RNA (1)...(19): siRNA sense strand
gcugaugccuucacaguuu

SEQ ID NO: 1580917 - RNA, 19 nt, Homo sapiens
  misc_RNA (1)...(19): siRNA sense strand
gaccucaccaucaguauua

SEQ ID NO: 1580918 - RNA, 19 nt, Homo sapiens
  misc_RNA (1)...(19): siRNA sense strand
ugacccagauguccaagua

SEQ ID NO: 1580919 - RNA, 19 nt, Homo sapiens
  misc_RNA (1)...(19): siRNA sense strand
ccuagcaacucaagucuga

SEQ ID NO: 1580920 - RNA, 19 nt, Homo sapiens
  misc_RNA (1)...(19): siRNA sense strand
gcagcacccuccaguacuu

SEQ ID NO: 1580921 - RNA, 19 nt, Homo sapiens
  misc_RNA (1)...(19): siRNA sense strand
gaagagaaacggcggaaag

SEQ ID NO: 1580922 - RNA, 19 nt, Homo sapiens
  misc_RNA (1)...(19): siRNA sense strand
ucagagggcuuguccaaag

SEQ ID NO: 1580923 - RNA, 19 nt, Homo sapiens
  misc_RNA (1)...(19): siRNA sense strand
gcccauggauguucaagau

SEQ ID NO: 1580924 - RNA, 19 nt, Homo sapiens
  misc_RNA (1)...(19): siRNA sense strand
gaaagccucccucgcaguu

SEQ ID NO: 1580925 - RNA, 19 nt, Homo sapiens
  misc_RNA (1)...(19): siRNA sense strand
ggaguacuacgaagagaaa

SEQ ID NO: 1580926 - RNA, 19 nt, Homo sapiens
  misc_RNA (1)...(19): siRNA sense strand
gauccuggcuaacaagaca

SEQ ID NO: 1580927 - RNA, 19 nt, Homo sapiens
  misc_RNA (1)...(19): siRNA sense strand
ccucugggcuccaacauuc

SEQ ID NO: 1580928 - RNA, 19 nt, Homo sapiens
  misc_RNA (1)...(19): siRNA sense strand
gcagaugaacaugaugaua

SEQ ID NO: 1580929 - RNA, 19 nt, Homo sapiens
  misc_RNA (1)...(19): siRNA sense strand
gcggaaagaggaacagauu

SEQ ID NO: 1580930 - RNA, 19 nt, Homo sapiens
  misc_RNA (1)...(19): siRNA sense strand
ggaaagaggaacagauugg

SEQ ID NO: 1580931 - RNA, 19 nt, Homo sapiens
  misc_RNA (1)...(19): siRNA sense strand
caggcaaccucaacaugaa

SEQ ID NO: 1580932 - RNA, 19 nt, Homo sapiens
  misc_RNA (1)...(19): siRNA sense strand
gaucucgccuagcaacuca

SEQ ID NO: 1580933 - RNA, 19 nt, Homo sapiens
  misc_RNA (1)...(19): siRNA sense strand
ccucaaaacuccaugauga

SEQ ID NO: 1580934 - RNA, 19 nt, Homo sapiens
  misc_RNA (1)...(19): siRNA sense strand
gcaagcugcaggaggagua

SEQ ID NO: 1580935 - RNA, 19 nt, Homo sapiens
  misc_RNA (1)...(19): siRNA sense strand
gcaauacccaagacauguu

SEQ ID NO: 1580936 - RNA, 19 nt, Homo sapiens
  misc_RNA (1)...(19): siRNA sense strand
ccaggcaaccucaacauga

SEQ ID NO: 1580937 - RNA, 19 nt, Homo sapiens
  misc_RNA (1)...(19): siRNA sense strand
gcagccgccucucaacaug

SEQ ID NO: 1580938 - RNA, 19 nt, Homo sapiens
  misc_RNA (1)...(19): siRNA sense strand
gcaacucaagucugaagaa

SEQ ID NO: 1580939 - RNA, 19 nt, Homo sapiens
  misc_RNA (1)...(19): siRNA sense strand
ucaugaaccugcagaacau

SEQ ID NO: 1580940 - RNA, 19 nt, Homo sapiens
  misc_RNA (1)...(19): siRNA sense strand
gcucuggaccggacaguga

SEQ ID NO: 1580941 - RNA, 19 nt, Homo sapiens
  misc_RNA (1)...(19): siRNA sense strand
gcaggaggaguacuacgaa

SEQ ID NO: 1580942 - RNA, 19 nt, Homo sapiens
  misc_RNA (1)...(19): siRNA sense strand
gggcuggaccgaagacuug

SEQ ID NO: 1580943 - RNA, 19 nt, Homo sapiens
  misc_RNA (1)...(19): siRNA sense strand
cacccacaauuguaaugua

SEQ ID NO: 1580944 - RNA, 19 nt, Homo sapiens
  misc_RNA (1)...(19): siRNA sense strand
ggaccucaccaucaguauu

SEQ ID NO: 1580945 - RNA, 19 nt, Homo sapiens
  misc_RNA (1)...(19): siRNA sense strand
gacagagcauggagaugga

SEQ ID NO: 1580946 - RNA, 19 nt, Homo sapiens
  misc_RNA (1)...(19): siRNA sense strand
gaucaguggccaccuggaa

SEQ ID NO: 1580947 - RNA, 19 nt, Homo sapiens
  misc_RNA (1)...(19): siRNA sense strand
gcaccagaaugugaaccaa

SEQ ID NO: 1580948 - RNA, 19 nt, Homo sapiens
  misc_RNA (1)...(19): siRNA sense strand
ggcagcagaugaacaugau

SEQ ID NO: 1580949 - RNA, 19 nt, Homo sapiens
  misc_RNA (1)...(19): siRNA sense strand
cagagggcuuguccaaaga

SEQ ID NO: 1580950 - RNA, 19 nt, Homo sapiens
  misc_RNA (1)...(19): siRNA sense strand
gcucagagggcuuguccaa

SEQ ID NO: 1580951 - RNA, 19 nt, Homo sapiens
  misc_RNA (1)...(19): siRNA sense strand
ccucgcaguucguauaugu

SEQ ID NO: 1580952 - RNA, 19 nt, Homo sapiens
  misc_RNA (1)...(19): siRNA sense strand
aaccagaucucgccuagca

SEQ ID NO: 1580953 - RNA, 19 nt, Homo sapiens
  misc_RNA (1)...(19): siRNA sense strand
ccacaauuguaauguagca

SEQ ID NO: 1580954 - RNA, 19 nt, Homo sapiens
  misc_RNA (1)...(19): siRNA sense strand
gaccaaucauggcaagaca

SEQ ID NO: 1580955 - RNA, 19 nt, Homo sapiens
  misc_RNA (1)...(19): siRNA sense strand
uggccaaccugcccuucua

SEQ ID NO: 1580956 - RNA, 19 nt, Homo sapiens
  misc_RNA (1)...(19): siRNA sense strand
gcaguucguauaugucuuc

SEQ ID NO: 1580957 - RNA, 19 nt, Homo sapiens
  misc_RNA (1)...(19): siRNA sense strand
uggguugccucaccuaaga

SEQ ID NO: 1580958 - RNA, 19 nt, Homo sapiens
  misc_RNA (1)...(19): siRNA sense strand
gggcaauacccaagacaug

SEQ ID NO: 1580959 - RNA, 19 nt, Homo sapiens
  misc_RNA (1)...(19): siRNA sense strand
gggcagcagaugaacauga

SEQ ID NO: 1580960 - RNA, 19 nt, Homo sapiens
  misc_RNA (1)...(19): siRNA sense strand
gggccacccacaauuguaa

SEQ ID NO: 1580961 - RNA, 19 nt, Homo sapiens
  misc_RNA (1)...(19): siRNA sense strand
gaggaguacuacgaagaga

SEQ ID NO: 1580962 - RNA, 19 nt, Homo sapiens
  misc_RNA (1)...(19): siRNA sense strand
cagcagaugaacaugauga

SEQ ID NO: 1580963 - RNA, 19 nt, Homo sapiens
  misc_RNA (1)...(19): siRNA sense strand
caacucaagucugaagaac

SEQ ID NO: 1580964 - RNA, 19 nt, Homo sapiens
  misc_RNA (1)...(19): siRNA sense strand
ucaugacccagcagaauuu

SEQ ID NO: 1580965 - RNA, 19 nt, Homo sapiens
  misc_RNA (1)...(19): siRNA sense strand
cagaugaacaugaugauac

SEQ ID NO: 1580966 - RNA, 19 nt, Homo sapiens
  misc_RNA (1)...(19): siRNA sense strand
ccagccagaugcaccugaa

SEQ ID NO: 1580967 - RNA, 19 nt, Homo sapiens
  misc_RNA (1)...(19): siRNA sense strand
agaugaacaugaugauaca

SEQ ID NO: 1580968 - RNA, 19 nt, Homo sapiens
  misc_RNA (1)...(19): siRNA sense strand
ugaagucgcccacccuuag

SEQ ID NO: 1580969 - RNA, 19 nt, Homo sapiens
  misc_RNA (1)...(19): siRNA sense strand
ggagauggagcggaugaug

SEQ ID NO: 1580970 - RNA, 19 nt, Homo sapiens
  misc_RNA (1)...(19): siRNA sense strand
gaaccugaacgugcagaug

SEQ ID NO: 1580971 - RNA, 19 nt, Homo sapiens
  misc_RNA (1)...(19): siRNA sense strand
gcugaagaaauaugaggaa

SEQ ID NO: 1580972 - RNA, 19 nt, Homo sapiens
  misc_RNA (1)...(19): siRNA sense strand
gaaccugcagaacaugaug

SEQ ID NO: 1580973 - RNA, 19 nt, Homo sapiens
  misc_RNA (1)...(19): siRNA sense strand
caagcagcacccuccagua

SEQ ID NO: 1580974 - RNA, 19 nt, Homo sapiens
  misc_RNA (1)...(19): siRNA sense strand
aaucucagcaccagaaugu

SEQ ID NO: 1580975 - RNA, 19 nt, Homo sapiens
  misc_RNA (1)...(19): siRNA sense strand
ggaggaguacuacgaagag

SEQ ID NO: 1580976 - RNA, 19 nt, Homo sapiens
  misc_RNA (1)...(19): siRNA sense strand
ccaaugcacccagaaaaua

SEQ ID NO: 1580977 - RNA, 19 nt, Homo sapiens
  misc_RNA (1)...(19): siRNA sense strand
gaaacggcggaaagaggaa

SEQ ID NO: 1580978 - RNA, 19 nt, Homo sapiens
  misc_RNA (1)...(19): siRNA sense strand
ucucagcaccagaauguga

SEQ ID NO: 1580979 - RNA, 19 nt, Homo sapiens
  misc_RNA (1)...(19): siRNA sense strand
acaaugccaucaagaccau

SEQ ID NO: 1580980 - RNA, 19 nt, Homo sapiens
  misc_RNA (1)...(19): siRNA sense strand
ccuaaucugcaucucauga

SEQ ID NO: 1580981 - RNA, 19 nt, Homo sapiens
  misc_RNA (1)...(19): siRNA sense strand
ccaucaguauuaaucagau

SEQ ID NO: 1580982 - RNA, 19 nt, Homo sapiens
  misc_RNA (1)...(19): siRNA sense strand
guccaugauuucacagaca

SEQ ID NO: 1580983 - RNA, 19 nt, Homo sapiens
  misc_RNA (1)...(19): siRNA sense strand
ccaccacccugagcaacau

SEQ ID NO: 1580984 - RNA, 19 nt, Homo sapiens
  misc_RNA (1)...(19): siRNA sense strand
ggcaauacccaagacaugu

SEQ ID NO: 1580985 - RNA, 19 nt, Homo sapiens
  misc_RNA (1)...(19): siRNA sense strand
gaggcggagcgauucauga

SEQ ID NO: 1580986 - RNA, 19 nt, Homo sapiens
  misc_RNA (1)...(19): siRNA sense strand
gaggacgacaagcccauug

SEQ ID NO: 1580987 - RNA, 19 nt, Homo sapiens
  misc_RNA (1)...(19): siRNA sense strand
cuaccacaaugccaucaag

SEQ ID NO: 1580988 - RNA, 19 nt, Homo sapiens
  misc_RNA (1)...(19): siRNA sense strand
acaagcagccgccucucaa

SEQ ID NO: 1580989 - RNA, 19 nt, Homo sapiens
  misc_RNA (1)...(19): siRNA sense strand
augcugaugucgcagaaga

SEQ ID NO: 1580990 - RNA, 19 nt, Homo sapiens
  misc_RNA (1)...(19): siRNA sense strand
aaccugaacgugcagauga

SEQ ID NO: 1580991 - RNA, 19 nt, Homo sapiens
  misc_RNA (1)...(19): siRNA sense strand
caacggguaccuggguuug

SEQ ID NO: 1580992 - RNA, 19 nt, Homo sapiens
  misc_RNA (1)...(19): siRNA sense strand
caaugcacccagaaaauaa

SEQ ID NO: 1580993 - RNA, 19 nt, Homo sapiens
  misc_RNA (1)...(19): siRNA sense strand
ggaggacgacaagcccauu

SEQ ID NO: 1580994 - RNA, 19 nt, Homo sapiens
  misc_RNA (1)...(19): siRNA sense strand
cccuugcaguccaugauuu

SEQ ID NO: 1580995 - RNA, 19 nt, Homo sapiens
  misc_RNA (1)...(19): siRNA sense strand
gaacccuugcaguccauga

SEQ ID NO: 1580996 - RNA, 19 nt, Homo sapiens
  misc_RNA (1)...(19): siRNA sense strand
ggauucagaggccaaagag

SEQ ID NO: 1580997 - RNA, 19 nt, Homo sapiens
  misc_RNA (1)...(19): siRNA sense strand
cuaaucugcaucucaugaa

SEQ ID NO: 1580998 - RNA, 19 nt, Homo sapiens
  misc_RNA (1)...(19): siRNA sense strand
gcacccagaaaauaaauug

SEQ ID NO: 1580999 - RNA, 19 nt, Homo sapiens
  misc_RNA (1)...(19): siRNA sense strand
aagagaaacggcggaaaga

SEQ ID NO: 1581000 - RNA, 19 nt, Homo sapiens
  misc_RNA (1)...(19): siRNA sense strand
ggccagggaucagcaacag

SEQ ID NO: 1581001 - RNA, 19 nt, Homo sapiens
  misc_RNA (1)...(19): siRNA sense strand
ccagacucccucacagaug

SEQ ID NO: 1581002 - RNA, 19 nt, Homo sapiens
  misc_RNA (1)...(19): siRNA sense strand
cuucacaguuucccaacca

SEQ ID NO: 1581003 - RNA, 19 nt, Homo sapiens
  misc_RNA (1)...(19): siRNA sense strand
gcugaugucgcagaagaug

SEQ ID NO: 1581004 - RNA, 19 nt, Homo sapiens
  misc_RNA (1)...(19): siRNA sense strand
gaaauacgcuuaguugaug

SEQ ID NO: 1581005 - RNA, 19 nt, Homo sapiens
  misc_RNA (1)...(19): siRNA sense strand
gaagaaauacgcuuaguug

SEQ ID NO: 1581006 - RNA, 19 nt, Homo sapiens
  misc_RNA (1)...(19): siRNA sense strand
gcaagucaguucucauuuc

SEQ ID NO: 1581007 - RNA, 19 nt, Homo sapiens
  misc_RNA (1)...(19): siRNA sense strand
guacuaauguuucaaccaa

SEQ ID NO: 1581008 - RNA, 19 nt, Homo sapiens
  misc_RNA (1)...(19): siRNA sense strand
gaacucuuaugcuguacua

SEQ ID NO: 1581009 - RNA, 19 nt, Homo sapiens
  misc_RNA (1)...(19): siRNA sense strand
gcugagaagugccuugauu

SEQ ID NO: 1581010 - RNA, 19 nt, Homo sapiens
  misc_RNA (1)...(19): siRNA sense strand
gaagugccuugauuuccua

SEQ ID NO: 1581011 - RNA, 19 nt, Homo sapiens
  misc_RNA (1)...(19): siRNA sense strand
caugaacucuuaugcugua

SEQ ID NO: 1581012 - RNA, 19 nt, Homo sapiens
  misc_RNA (1)...(19): siRNA sense strand
gaucugaggaggaaacgua

SEQ ID NO: 1581013 - RNA, 19 nt, Homo sapiens
  misc_RNA (1)...(19): siRNA sense strand
caucaggccuugcaggaaa

SEQ ID NO: 1581014 - RNA, 19 nt, Homo sapiens
  misc_RNA (1)...(19): siRNA sense strand
gcagaaagugggaagauga

SEQ ID NO: 1581015 - RNA, 19 nt, Homo sapiens
  misc_RNA (1)...(19): siRNA sense strand
caacaucacccuccgagaa

SEQ ID NO: 1581016 - RNA, 19 nt, Homo sapiens
  misc_RNA (1)...(19): siRNA sense strand
gagcaagucaguucucauu

SEQ ID NO: 1581017 - RNA, 19 nt, Homo sapiens
  misc_RNA (1)...(19): siRNA sense strand
ccaauuccuucuucuaaug

SEQ ID NO: 1581018 - RNA, 19 nt, Homo sapiens
  misc_RNA (1)...(19): siRNA sense strand
gagcauuguucucagauca

SEQ ID NO: 1581019 - RNA, 19 nt, Homo sapiens
  misc_RNA (1)...(19): siRNA sense strand
gcugugaacuugauugagu

SEQ ID NO: 1581020 - RNA, 19 nt, Homo sapiens
  misc_RNA (1)...(19): siRNA sense strand
ggaaacguacugcacauga

SEQ ID NO: 1581021 - RNA, 19 nt, Homo sapiens
  misc_RNA (1)...(19): siRNA sense strand
gcucuugggugguucaugu

SEQ ID NO: 1581022 - RNA, 19 nt, Homo sapiens
  misc_RNA (1)...(19): siRNA sense strand
cgucugcaguccauacaua

SEQ ID NO: 1581023 - RNA, 19 nt, Homo sapiens
  misc_RNA (1)...(19): siRNA sense strand
gcuaaaaccuguccaacaa

SEQ ID NO: 1581024 - RNA, 19 nt, Homo sapiens
  misc_RNA (1)...(19): siRNA sense strand
aagaucagcuugacacugu

SEQ ID NO: 1581025 - RNA, 19 nt, Homo sapiens
  misc_RNA (1)...(19): siRNA sense strand
gaugauccagcuuauauug

SEQ ID NO: 1581026 - RNA, 19 nt, Homo sapiens
  misc_RNA (1)...(19): siRNA sense strand
ggaagugcuugaaguuucu

SEQ ID NO: 1581027 - RNA, 19 nt, Homo sapiens
  misc_RNA (1)...(19): siRNA sense strand
gacagucuuucucaucuug

SEQ ID NO: 1581028 - RNA, 19 nt, Homo sapiens
  misc_RNA (1)...(19): siRNA sense strand
gaaacguacugcacaugag

SEQ ID NO: 1581029 - RNA, 19 nt, Homo sapiens
  misc_RNA (1)...(19): siRNA sense strand
ggauucaucuugcauuggu

SEQ ID NO: 1581030 - RNA, 19 nt, Homo sapiens
  misc_RNA (1)...(19): siRNA sense strand
caagucaguucucauuucu

SEQ ID NO: 1581031 - RNA, 19 nt, Homo sapiens
  misc_RNA (1)...(19): siRNA sense strand
gccuugagguugccaggua

SEQ ID NO: 1581032 - RNA, 19 nt, Homo sapiens
  misc_RNA (1)...(19): siRNA sense strand
guuggaagaugagauguau

SEQ ID NO: 1581033 - RNA, 19 nt, Homo sapiens
  misc_RNA (1)...(19): siRNA sense strand
cgaugaaauugaggaagua

SEQ ID NO: 1581034 - RNA, 19 nt, Homo sapiens
  misc_RNA (1)...(19): siRNA sense strand
guagaaaacuggugucauc

SEQ ID NO: 1581035 - RNA, 19 nt, Homo sapiens
  misc_RNA (1)...(19): siRNA sense strand
agucaguucucauuucuug

SEQ ID NO: 1581036 - RNA, 19 nt, Homo sapiens
  misc_RNA (1)...(19): siRNA sense strand
gaaaagucguggaauguag

SEQ ID NO: 1581037 - RNA, 19 nt, Homo sapiens
  misc_RNA (1)...(19): siRNA sense strand
guucauggguuggaagaug

SEQ ID NO: 1581038 - RNA, 19 nt, Homo sapiens
  misc_RNA (1)...(19): siRNA sense strand
gaggaaacguacugcacau

SEQ ID NO: 1581039 - RNA, 19 nt, Homo sapiens
  misc_RNA (1)...(19): siRNA sense strand
guccauacauaccaugaga

SEQ ID NO: 1581040 - RNA, 19 nt, Homo sapiens
  misc_RNA (1)...(19): siRNA sense strand
uggaagugcuugaaguuuc

SEQ ID NO: 1581041 - RNA, 19 nt, Homo sapiens
  misc_RNA (1)...(19): siRNA sense strand
uggaagaugagauguauga

SEQ ID NO: 1581042 - RNA, 19 nt, Homo sapiens
  misc_RNA (1)...(19): siRNA sense strand
cagcuuauauugcaguuuu

SEQ ID NO: 1581043 - RNA, 19 nt, Homo sapiens
  misc_RNA (1)...(19): siRNA sense strand
ccauacauaccaugagaaa

SEQ ID NO: 1581044 - RNA, 19 nt, Homo sapiens
  misc_RNA (1)...(19): siRNA sense strand
agaaauacgcuuaguugau

SEQ ID NO: 1581045 - RNA, 19 nt, Homo sapiens
  misc_RNA (1)...(19): siRNA sense strand
ggagauacggacccuggaa

SEQ ID NO: 1581046 - RNA, 19 nt, Homo sapiens
  misc_RNA (1)...(19): siRNA sense strand
gcucaucggcaucuccauu

SEQ ID NO: 1581047 - RNA, 19 nt, Homo sapiens
  misc_RNA (1)...(19): siRNA sense strand
ccaaagaagggauucaucu

SEQ ID NO: 1581048 - RNA, 19 nt, Homo sapiens
  misc_RNA (1)...(19): siRNA sense strand
gugccuugauuuccuaguu

SEQ ID NO: 1581049 - RNA, 19 nt, Homo sapiens
  misc_RNA (1)...(19): siRNA sense strand
ugaagaaauacgcuuaguu

SEQ ID NO: 1581050 - RNA, 19 nt, Homo sapiens
  misc_RNA (1)...(19): siRNA sense strand
cuuaguugaugaugcguuu

SEQ ID NO: 1581051 - RNA, 19 nt, Homo sapiens
  misc_RNA (1)...(19): siRNA sense strand
ggcagaaagugggaagaug

SEQ ID NO: 1581052 - RNA, 19 nt, Homo sapiens
  misc_RNA (1)...(19): siRNA sense strand
uacggacccuggaacauug

SEQ ID NO: 1581053 - RNA, 19 nt, Homo sapiens
  misc_RNA (1)...(19): siRNA sense strand
cacaugagcgugccaagga

SEQ ID NO: 1581054 - RNA, 19 nt, Homo sapiens
  misc_RNA (1)...(19): siRNA sense strand
agaugaugcucccaaggaa

SEQ ID NO: 1581055 - RNA, 19 nt, Homo sapiens
  misc_RNA (1)...(19): siRNA sense strand
ucugagcacccacccauuu

SEQ ID NO: 1581056 - RNA, 19 nt, Homo sapiens
  misc_RNA (1)...(19): siRNA sense strand
gcauuguucucagaucaca

SEQ ID NO: 1581057 - RNA, 19 nt, Homo sapiens
  misc_RNA (1)...(19): siRNA sense strand
gcaaaacuguugggcucua

SEQ ID NO: 1581058 - RNA, 19 nt, Homo sapiens
  misc_RNA (1)...(19): siRNA sense strand
ggaaaagucguggaaugua

SEQ ID NO: 1581059 - RNA, 19 nt, Homo sapiens
  misc_RNA (1)...(19): siRNA sense strand
ugauccagcuuauauugca

SEQ ID NO: 1581060 - RNA, 19 nt, Homo sapiens
  misc_RNA (1)...(19): siRNA sense strand
ugagaagugccuugauuuc

SEQ ID NO: 1581061 - RNA, 19 nt, Homo sapiens
  misc_RNA (1)...(19): siRNA sense strand
acgaugaaauugaggaagu

SEQ ID NO: 1581062 - RNA, 19 nt, Homo sapiens
  misc_RNA (1)...(19): siRNA sense strand
caauuccuucuucuaauga

SEQ ID NO: 1581063 - RNA, 19 nt, Homo sapiens
  misc_RNA (1)...(19): siRNA sense strand
uaaaaccuguccaacaaug

SEQ ID NO: 1581064 - RNA, 19 nt, Homo sapiens
  misc_RNA (1)...(19): siRNA sense strand
gaaccagacauggaugauc

SEQ ID NO: 1581065 - RNA, 19 nt, Homo sapiens
  misc_RNA (1)...(19): siRNA sense strand
gagcgugccaaggaacuuu

SEQ ID NO: 1581066 - RNA, 19 nt, Homo sapiens
  misc_RNA (1)...(19): siRNA sense strand
uguguagucuucagcacuu

SEQ ID NO: 1581067 - RNA, 19 nt, Homo sapiens
  misc_RNA (1)...(19): siRNA sense strand
ggcucuucaugaacucuua

SEQ ID NO: 1581068 - RNA, 19 nt, Homo sapiens
  misc_RNA (1)...(19): siRNA sense strand
caacgaugaaauugaggaa

SEQ ID NO: 1581069 - RNA, 19 nt, Homo sapiens
  misc_RNA (1)...(19): siRNA sense strand
gccuugauuuccuaguuga

SEQ ID NO: 1581070 - RNA, 19 nt, Homo sapiens
  misc_RNA (1)...(19): siRNA sense strand
cccaauuccuucuucuaau

SEQ ID NO: 1581071 - RNA, 19 nt, Homo sapiens
  misc_RNA (1)...(19): siRNA sense strand
gguuggaagaugagaugua

SEQ ID NO: 1581072 - RNA, 19 nt, Homo sapiens
  misc_RNA (1)...(19): siRNA sense strand
gggcugugaacuugauuga

SEQ ID NO: 1581073 - RNA, 19 nt, Homo sapiens
  misc_RNA (1)...(19): siRNA sense strand
aaauacgcuuaguugauga

SEQ ID NO: 1581074 - RNA, 19 nt, Homo sapiens
  misc_RNA (1)...(19): siRNA sense strand
cagcugaaccagacaugga

SEQ ID NO: 1581075 - RNA, 19 nt, Homo sapiens
  misc_RNA (1)...(19): siRNA sense strand
gaagggauucaucuugcau

SEQ ID NO: 1581076 - RNA, 19 nt, Homo sapiens
  misc_RNA (1)...(19): siRNA sense strand
ucccaauuccuucuucuaa

SEQ ID NO: 1581077 - RNA, 19 nt, Homo sapiens
  misc_RNA (1)...(19): siRNA sense strand
gauguaugagguucguauu

SEQ ID NO: 1581078 - RNA, 19 nt, Homo sapiens
  misc_RNA (1)...(19): siRNA sense strand
cugagaagugccuugauuu

SEQ ID NO: 1581079 - RNA, 19 nt, Homo sapiens
  misc_RNA (1)...(19): siRNA sense strand
caggaaaagucguggaaug

SEQ ID NO: 1581080 - RNA, 19 nt, Homo sapiens
  misc_RNA (1)...(19): siRNA sense strand
cugcuggaauucaccauca

SEQ ID NO: 1581081 - RNA, 19 nt, Homo sapiens
  misc_RNA (1)...(19): siRNA sense strand
uauggaagugcuugaaguu

SEQ ID NO: 1581082 - RNA, 19 nt, Homo sapiens
  misc_RNA (1)...(19): siRNA sense strand
ugauagggacuccauaugg

SEQ ID NO: 1581083 - RNA, 19 nt, Homo sapiens
  misc_RNA (1)...(19): siRNA sense strand
uggcugugcuagaggauuc

SEQ ID NO: 1581084 - RNA, 19 nt, Homo sapiens
  misc_RNA (1)...(19): siRNA sense strand
auacggacccuggaacauu

SEQ ID NO: 1581085 - RNA, 19 nt, Homo sapiens
  misc_RNA (1)...(19): siRNA sense strand
uuuccuaguugacauguuc

SEQ ID NO: 1581086 - RNA, 19 nt, Homo sapiens
  misc_RNA (1)...(19): siRNA sense strand
aagaugaugcucccaagga

SEQ ID NO: 1581087 - RNA, 19 nt, Homo sapiens
  misc_RNA (1)...(19): siRNA sense strand
ccaagugcgcuguguccaa

SEQ ID NO: 1581088 - RNA, 19 nt, Homo sapiens
  misc_RNA (1)...(19): siRNA sense strand
ugauggcucuugggugguu

SEQ ID NO: 1581089 - RNA, 19 nt, Homo sapiens
  misc_RNA (1)...(19): siRNA sense strand
cuuaugcuguacuaauguu

SEQ ID NO: 1581090 - RNA, 19 nt, Homo sapiens
  misc_RNA (1)...(19): siRNA sense strand
gcauguuggcccagucuuc

SEQ ID NO: 1581091 - RNA, 19 nt, Homo sapiens
  misc_RNA (1)...(19): siRNA sense strand
ucaguucucauuucuugga

SEQ ID NO: 1581092 - RNA, 19 nt, Homo sapiens
  misc_RNA (1)...(19): siRNA sense strand
agaagugccuugauuuccu

SEQ ID NO: 1581093 - RNA, 19 nt, Homo sapiens
  misc_RNA (1)...(19): siRNA sense strand
acaugagcgugccaaggaa

SEQ ID NO: 1581094 - RNA, 19 nt, Homo sapiens
  misc_RNA (1)...(19): siRNA sense strand
aagaaauacgcuuaguuga

SEQ ID NO: 1581095 - RNA, 19 nt, Homo sapiens
  misc_RNA (1)...(19): siRNA sense strand
agggauucaucuugcauug

SEQ ID NO: 1581096 - RNA, 19 nt, Homo sapiens
  misc_RNA (1)...(19): siRNA sense strand
acuaauguuucaaccaaag

SEQ ID NO: 1581097 - RNA, 19 nt, Homo sapiens
  misc_RNA (1)...(19): siRNA sense strand
uguaugagguucguauugc

SEQ ID NO: 1581098 - RNA, 19 nt, Homo sapiens
  misc_RNA (1)...(19): siRNA sense strand
cagucuuucucaucuuguu

SEQ ID NO: 1581099 - RNA, 19 nt, Homo sapiens
  misc_RNA (1)...(19): siRNA sense strand
gcaguuuugguacuuauuu

SEQ ID NO: 1581100 - RNA, 19 nt, Homo sapiens
  misc_RNA (1)...(19): siRNA sense strand
agaagggauucaucuugca

SEQ ID NO: 1581101 - RNA, 19 nt, Homo sapiens
  misc_RNA (1)...(19): siRNA sense strand
ugccuugauuuccuaguug

SEQ ID NO: 1581102 - RNA, 19 nt, Homo sapiens
  misc_RNA (1)...(19): siRNA sense strand
ccaaggaagaaguagauac

SEQ ID NO: 1581103 - RNA, 19 nt, Homo sapiens
  misc_RNA (1)...(19): siRNA sense strand
ugaaggaguguguagucuu

SEQ ID NO: 1581104 - RNA, 19 nt, Homo sapiens
  misc_RNA (1)...(19): siRNA sense strand
ggaaugagacguuugaauu

SEQ ID NO: 1581105 - RNA, 19 nt, Homo sapiens
  misc_RNA (1)...(19): siRNA sense strand
gcaaaguggugauugaugu

SEQ ID NO: 1581106 - RNA, 19 nt, Homo sapiens
  misc_RNA (1)...(19): siRNA sense strand
gcaacucucuggccucaaa

SEQ ID NO: 1581107 - RNA, 19 nt, Homo sapiens
  misc_RNA (1)...(19): siRNA sense strand
gaaugagacguuugaauuu

SEQ ID NO: 1581108 - RNA, 19 nt, Homo sapiens
  misc_RNA (1)...(19): siRNA sense strand
ggucagggcugcgauaaga

SEQ ID NO: 1581109 - RNA, 19 nt, Homo sapiens
  misc_RNA (1)...(19): siRNA sense strand
ccagcaaaguggaaguuaa

SEQ ID NO: 1581110 - RNA, 19 nt, Homo sapiens
  misc_RNA (1)...(19): siRNA sense strand
gaaugacccucuugaccau

SEQ ID NO: 1581111 - RNA, 19 nt, Homo sapiens
  misc_RNA (1)...(19): siRNA sense strand
ccacgaaccugcucaagcu

SEQ ID NO: 1581112 - RNA, 19 nt, Homo sapiens
  misc_RNA (1)...(19): siRNA sense strand
gggacgacguuaucggaaa

SEQ ID NO: 1581113 - RNA, 19 nt, Homo sapiens
  misc_RNA (1)...(19): siRNA sense strand
ggugauugauguccagaga

SEQ ID NO: 1581114 - RNA, 19 nt, Homo sapiens
  misc_RNA (1)...(19): siRNA sense strand
aaagcgcccucaucaaguu

SEQ ID NO: 1581115 - RNA, 19 nt, Homo sapiens
  misc_RNA (1)...(19): siRNA sense strand
agaccucgaucgugaagaa

SEQ ID NO: 1581116 - RNA, 19 nt, Homo sapiens
  misc_RNA (1)...(19): siRNA sense strand
ucaccaagcucguggacau

SEQ ID NO: 1581117 - RNA, 19 nt, Homo sapiens
  misc_RNA (1)...(19): siRNA sense strand
ggacgacguuaucggaaag

SEQ ID NO: 1581118 - RNA, 19 nt, Homo sapiens
  misc_RNA (1)...(19): siRNA sense strand
ucgugaagguggacaauga

SEQ ID NO: 1581119 - RNA, 19 nt, Homo sapiens
  misc_RNA (1)...(19): siRNA sense strand
ggaguggaaugacccucuu

SEQ ID NO: 1581120 - RNA, 19 nt, Homo sapiens
  misc_RNA (1)...(19): siRNA sense strand
gaaaagcgcccucaucaag

SEQ ID NO: 1581121 - RNA, 19 nt, Homo sapiens
  misc_RNA (1)...(19): siRNA sense strand
cggaaaagguugaggaaaa

SEQ ID NO: 1581122 - RNA, 19 nt, Homo sapiens
  misc_RNA (1)...(19): siRNA sense strand
aaugagacguuugaauuug

SEQ ID NO: 1581123 - RNA, 19 nt, Homo sapiens
  misc_RNA (1)...(19): siRNA sense strand
ggaccgcaauggcacaucu

SEQ ID NO: 1581124 - RNA, 19 nt, Homo sapiens
  misc_RNA (1)...(19): siRNA sense strand
gcaaaguggaaguuaagga

SEQ ID NO: 1581125 - RNA, 19 nt, Homo sapiens
  misc_RNA (1)...(19): siRNA sense strand
caaaguggaaguuaaggau

SEQ ID NO: 1581126 - RNA, 19 nt, Homo sapiens
  misc_RNA (1)...(19): siRNA sense strand
ggaaggugagcaucaacaa

SEQ ID NO: 1581127 - RNA, 19 nt, Homo sapiens
  misc_RNA (1)...(19): siRNA sense strand
uggcgcagcugaaggacuu

SEQ ID NO: 1581128 - RNA, 19 nt, Homo sapiens
  misc_RNA (1)...(19): siRNA sense strand
uacccacgcuggaaugaga

SEQ ID NO: 1581129 - RNA, 19 nt, Homo sapiens
  misc_RNA (1)...(19): siRNA sense strand
cuaccacccuggcgucuuc

SEQ ID NO: 1581130 - RNA, 19 nt, Homo sapiens
  misc_RNA (1)...(19): siRNA sense strand
gcuguggcuuucuauguca

SEQ ID NO: 1581131 - RNA, 19 nt, Homo sapiens
  misc_RNA (1)...(19): siRNA sense strand
acaagguguuugaggagaa

SEQ ID NO: 1581132 - RNA, 19 nt, Homo sapiens
  misc_RNA (1)...(19): siRNA sense strand
gcuggaaugagacguuuga

SEQ ID NO: 1581133 - RNA, 19 nt, Homo sapiens
  misc_RNA (1)...(19): siRNA sense strand
ggaaaagguugaggaaaag

SEQ ID NO: 1581134 - RNA, 19 nt, Homo sapiens
  misc_RNA (1)...(19): siRNA sense strand
ccaaggcaguccagaacgu

SEQ ID NO: 1581135 - RNA, 19 nt, Homo sapiens
  misc_RNA (1)...(19): siRNA sense strand
gcagugcaagugugugaau

SEQ ID NO: 1581136 - RNA, 19 nt, Homo sapiens
  misc_RNA (1)...(19): siRNA sense strand
ggacacgggagaccucgau

SEQ ID NO: 1581137 - RNA, 19 nt, Homo sapiens
  misc_RNA (1)...(19): siRNA sense strand
cacgagcccuggcaaaguc

SEQ ID NO: 1581138 - RNA, 19 nt, Homo sapiens
  misc_RNA (1)...(19): siRNA sense strand
augagacguuugaauuuga

SEQ ID NO: 1581139 - RNA, 19 nt, Homo sapiens
  misc_RNA (1)...(19): siRNA sense strand
ugggcaaaguggugauuga

SEQ ID NO: 1581140 - RNA, 19 nt, Homo sapiens
  misc_RNA (1)...(19): siRNA sense strand
cagcaaaguggaaguuaag

SEQ ID NO: 1581141 - RNA, 19 nt, Homo sapiens
  misc_RNA (1)...(19): siRNA sense strand
gcgcccagcacgagaaugu

SEQ ID NO: 1581142 - RNA, 19 nt, Homo sapiens
  misc_RNA (1)...(19): siRNA sense strand
aaguggaaguuaaggaugu

SEQ ID NO: 1581143 - RNA, 19 nt, Homo sapiens
  misc_RNA (1)...(19): siRNA sense strand
cauagccucucacccuaag

SEQ ID NO: 1581144 - RNA, 19 nt, Homo sapiens
  misc_RNA (1)...(19): siRNA sense strand
uguuugaggagaagaagua

SEQ ID NO: 1581145 - RNA, 19 nt, Homo sapiens
  misc_RNA (1)...(19): siRNA sense strand
cgaaccugcucaagcucuu

SEQ ID NO: 1581146 - RNA, 19 nt, Homo sapiens
  misc_RNA (1)...(19): siRNA sense strand
gggacaccauagccucuca

SEQ ID NO: 1581147 - RNA, 19 nt, Homo sapiens
  misc_RNA (1)...(19): siRNA sense strand
ugauugauguccagagacu

SEQ ID NO: 1581148 - RNA, 19 nt, Homo sapiens
  misc_RNA (1)...(19): siRNA sense strand
gaaggugagcaucaacaac

SEQ ID NO: 1581149 - RNA, 19 nt, Homo sapiens
  misc_RNA (1)...(19): siRNA sense strand
ggcaaaguggugauugaug

SEQ ID NO: 1581150 - RNA, 19 nt, Homo sapiens
  misc_RNA (1)...(19): siRNA sense strand
uggagcugcugccaccaaa

SEQ ID NO: 1581151 - RNA, 19 nt, Homo sapiens
  misc_RNA (1)...(19): siRNA sense strand
gggcagcugaucccacuca

SEQ ID NO: 1581152 - RNA, 19 nt, Homo sapiens
  misc_RNA (1)...(19): siRNA sense strand
ccagaacgugggcaacaug

SEQ ID NO: 1581153 - RNA, 19 nt, Homo sapiens
  misc_RNA (1)...(19): siRNA sense strand
caagguguuugaggagaag

SEQ ID NO: 1581154 - RNA, 19 nt, Homo sapiens
  misc_RNA (1)...(19): siRNA sense strand
ccauagccucucacccuaa

SEQ ID NO: 1581155 - RNA, 19 nt, Homo sapiens
  misc_RNA (1)...(19): siRNA sense strand
aaggugagcaucaacaaca

SEQ ID NO: 1581156 - RNA, 19 nt, Homo sapiens
  misc_RNA (1)...(19): siRNA sense strand
ucguggacaucgaggagaa

SEQ ID NO: 1581157 - RNA, 19 nt, Homo sapiens
  misc_RNA (1)...(19): siRNA sense strand
ccacgagcccuggcaaagu

SEQ ID NO: 1581158 - RNA, 19 nt, Homo sapiens
  misc_RNA (1)...(19): siRNA sense strand
gaaacaagauggaugaugu

SEQ ID NO: 1581159 - RNA, 19 nt, Homo sapiens
  misc_RNA (1)...(19): siRNA sense strand
caagauggaugauguguca

SEQ ID NO: 1581160 - RNA, 19 nt, Homo sapiens
  misc_RNA (1)...(19): siRNA sense strand
caacuggacucugaacaaa

SEQ ID NO: 1581161 - RNA, 19 nt, Homo sapiens
  misc_RNA (1)...(19): siRNA sense strand
ucaaccaacuggacucuga

SEQ ID NO: 1581162 - RNA, 19 nt, Homo sapiens
  misc_RNA (1)...(19): siRNA sense strand
ucaggaagauggaaagcuu

SEQ ID NO: 1581163 - RNA, 19 nt, Homo sapiens
  misc_RNA (1)...(19): siRNA sense strand
gaagauggaaagcuuuaug

SEQ ID NO: 1581164 - RNA, 19 nt, Homo sapiens
  misc_RNA (1)...(19): siRNA sense strand
cagcaucuguucccucuag

SEQ ID NO: 1581165 - RNA, 19 nt, Homo sapiens
  misc_RNA (1)...(19): siRNA sense strand
gaugaugugucaagaagac

SEQ ID NO: 1581166 - RNA, 19 nt, Homo sapiens
  misc_RNA (1)...(19): siRNA sense strand
ggcacaaacucaggaaaug

SEQ ID NO: 1581167 - RNA, 19 nt, Homo sapiens
  misc_RNA (1)...(19): siRNA sense strand
uaaagcgacucaaccaacu

SEQ ID NO: 1581168 - RNA, 19 nt, Homo sapiens
  misc_RNA (1)...(19): siRNA sense strand
ggaaacaagauggaugaug

SEQ ID NO: 1581169 - RNA, 19 nt, Homo sapiens
  misc_RNA (1)...(19): siRNA sense strand
gauggaugaugugucaaga

SEQ ID NO: 1581170 - RNA, 19 nt, Homo sapiens
  misc_RNA (1)...(19): siRNA sense strand
acuaacagcugaaggaaaa

SEQ ID NO: 1581171 - RNA, 19 nt, Homo sapiens
  misc_RNA (1)...(19): siRNA sense strand
ccaacuggacucugaacaa

SEQ ID NO: 1581172 - RNA, 19 nt, Homo sapiens
  misc_RNA (1)...(19): siRNA sense strand
gcacaaacucaggaaaugg

SEQ ID NO: 1581173 - RNA, 19 nt, Homo sapiens
  misc_RNA (1)...(19): siRNA sense strand
ucaaccaacucaaccaacu

SEQ ID NO: 1581174 - RNA, 19 nt, Homo sapiens
  misc_RNA (1)...(19): siRNA sense strand
uggaugaugugucaagaag

SEQ ID NO: 1581175 - RNA, 19 nt, Homo sapiens
  misc_RNA (1)...(19): siRNA sense strand
gaugugucaagaagacuaa

SEQ ID NO: 1581176 - RNA, 19 nt, Homo sapiens
  misc_RNA (1)...(19): siRNA sense strand
gcugcuaauugugcugauu

SEQ ID NO: 1581177 - RNA, 19 nt, Homo sapiens
  misc_RNA (1)...(19): siRNA sense strand
guucaaacuggaaacaaga

SEQ ID NO: 1581178 - RNA, 19 nt, Homo sapiens
  misc_RNA (1)...(19): siRNA sense strand
cuaauugugcugauuguca

SEQ ID NO: 1581179 - RNA, 19 nt, Homo sapiens
  misc_RNA (1)...(19): siRNA sense strand
aauggaagccggagucugu

SEQ ID NO: 1581180 - RNA, 19 nt, Homo sapiens
  misc_RNA (1)...(19): siRNA sense strand
ggauuccauaaaugacuua

SEQ ID NO: 1581181 - RNA, 19 nt, Homo sapiens
  misc_RNA (1)...(19): siRNA sense strand
aggaagauggaaagcuuua

SEQ ID NO: 1581182 - RNA, 19 nt, Homo sapiens
  misc_RNA (1)...(19): siRNA sense strand
aaacaaacuaaaccucugu

SEQ ID NO: 1581183 - RNA, 19 nt, Homo sapiens
  misc_RNA (1)...(19): siRNA sense strand
gcauucaggaagauggaaa

SEQ ID NO: 1581184 - RNA, 19 nt, Homo sapiens
  misc_RNA (1)...(19): siRNA sense strand
gaucguaaagcgacucaac

SEQ ID NO: 1581185 - RNA, 19 nt, Homo sapiens
  misc_RNA (1)...(19): siRNA sense strand
gacuaacagcugaaggaaa

SEQ ID NO: 1581186 - RNA, 19 nt, Homo sapiens
  misc_RNA (1)...(19): siRNA sense strand
cacaaacucaggaaaugga

SEQ ID NO: 1581187 - RNA, 19 nt, Homo sapiens
  misc_RNA (1)...(19): siRNA sense strand
ggaagauggaaagcuuuau

SEQ ID NO: 1581188 - RNA, 19 nt, Homo sapiens
  misc_RNA (1)...(19): siRNA sense strand
gaaauggaagccggagucu

SEQ ID NO: 1581189 - RNA, 19 nt, Homo sapiens
  misc_RNA (1)...(19): siRNA sense strand
aaacuggaaacaagaugga

SEQ ID NO: 1581190 - RNA, 19 nt, Homo sapiens
  misc_RNA (1)...(19): siRNA sense strand
aaacaagauggaugaugug

SEQ ID NO: 1581191 - RNA, 19 nt, Homo sapiens
  misc_RNA (1)...(19): siRNA sense strand
caaccaacuggacucugaa

SEQ ID NO: 1581192 - RNA, 19 nt, Homo sapiens
  misc_RNA (1)...(19): siRNA sense strand
cuggaaacaagauggauga

SEQ ID NO: 1581193 - RNA, 19 nt, Homo sapiens
  misc_RNA (1)...(19): siRNA sense strand
ggacucugaacaaaacuaa

SEQ ID NO: 1581194 - RNA, 19 nt, Homo sapiens
  misc_RNA (1)...(19): siRNA sense strand
gaaggaaaagacauagaug

SEQ ID NO: 1581195 - RNA, 19 nt, Homo sapiens
  misc_RNA (1)...(19): siRNA sense strand
aagacuaacagcugaagga

SEQ ID NO: 1581196 - RNA, 19 nt, Homo sapiens
  misc_RNA (1)...(19): siRNA sense strand
caggaagauggaaagcuuu

SEQ ID NO: 1581197 - RNA, 19 nt, Homo sapiens
  misc_RNA (1)...(19): siRNA sense strand
cuuguggcauucaggaaga

SEQ ID NO: 1581198 - RNA, 19 nt, Homo sapiens
  misc_RNA (1)...(19): siRNA sense strand
gagaaggaccgcacuauuu

SEQ ID NO: 1581199 - RNA, 19 nt, Homo sapiens
  misc_RNA (1)...(19): siRNA sense strand
ggaccgcacuauuucauuu

SEQ ID NO: 1581200 - RNA, 19 nt, Homo sapiens
  misc_RNA (1)...(19): siRNA sense strand
cacaagagguuuaucauga

SEQ ID NO: 1581201 - RNA, 19 nt, Homo sapiens
  misc_RNA (1)...(19): siRNA sense strand
ucauuuacguuacacauug

SEQ ID NO: 1581202 - RNA, 19 nt, Homo sapiens
  misc_RNA (1)...(19): siRNA sense strand
caagagguuuaucaugaga

SEQ ID NO: 1581203 - RNA, 19 nt, Homo sapiens
  misc_RNA (1)...(19): siRNA sense strand
ggccugugcuuccuucaga

SEQ ID NO: 1581204 - RNA, 19 nt, Homo sapiens
  misc_RNA (1)...(19): siRNA sense strand
ucacacaagagguuuauca

SEQ ID NO: 1581205 - RNA, 19 nt, Homo sapiens
  misc_RNA (1)...(19): siRNA sense strand
gaaggaccgcacuauuuca

SEQ ID NO: 1581206 - RNA, 19 nt, Homo sapiens
  misc_RNA (1)...(19): siRNA sense strand
ugagaaggaccgcacuauu

SEQ ID NO: 1581207 - RNA, 19 nt, Homo sapiens
  misc_RNA (1)...(19): siRNA sense strand
ucauuucacuccuacaagu

SEQ ID NO: 1581208 - RNA, 19 nt, Homo sapiens
  misc_RNA (1)...(19): siRNA sense strand
agaaggaccgcacuauuuc

SEQ ID NO: 1581209 - RNA, 19 nt, Homo sapiens
  misc_RNA (1)...(19): siRNA sense strand
gagacucacacaagagguu

SEQ ID NO: 1581210 - RNA, 19 nt, Homo sapiens
  misc_RNA (1)...(19): siRNA sense strand
cauuuacguuacacauuga

SEQ ID NO: 1581211 - RNA, 19 nt, Homo sapiens
  misc_RNA (1)...(19): siRNA sense strand
gaccggagcacugacaaug

SEQ ID NO: 1581212 - RNA, 19 nt, Homo sapiens
  misc_RNA (1)...(19): siRNA sense strand
acaagagguuuaucaugag

SEQ ID NO: 1581213 - RNA, 19 nt, Homo sapiens
  misc_RNA (1)...(19): siRNA sense strand
cuauuucauuucacuccua

SEQ ID NO: 1581214 - RNA, 19 nt, Homo sapiens
  misc_RNA (1)...(19): siRNA sense strand
acacaagagguuuaucaug

SEQ ID NO: 1581215 - RNA, 19 nt, Homo sapiens
  misc_RNA (1)...(19): siRNA sense strand
cguuacacauugagaaagu

SEQ ID NO: 1581216 - RNA, 19 nt, Homo sapiens
  misc_RNA (1)...(19): siRNA sense strand
ccggagcacugacaauggu

SEQ ID NO: 1581217 - RNA, 19 nt, Homo sapiens
  misc_RNA (1)...(19): siRNA sense strand
cuucagagacucacacaag

SEQ ID NO: 1581218 - RNA, 19 nt, Homo sapiens
  misc_RNA (1)...(19): siRNA sense strand
uucagagacucacacaaga

SEQ ID NO: 1581219 - RNA, 19 nt, Homo sapiens
  misc_RNA (1)...(19): siRNA sense strand
guuacacauugagaaaguu

SEQ ID NO: 1581220 - RNA, 19 nt, Homo sapiens
  misc_RNA (1)...(19): siRNA sense strand
ugacaauggucugcauagg

SEQ ID NO: 1581221 - RNA, 19 nt, Homo sapiens
  misc_RNA (1)...(19): siRNA sense strand
caugagaaggaccgcacua

SEQ ID NO: 1581222 - RNA, 19 nt, Homo sapiens
  misc_RNA (1)...(19): siRNA sense strand
agaaaugacuugucgauua

SEQ ID NO: 1581223 - RNA, 19 nt, Homo sapiens
  misc_RNA (1)...(19): siRNA sense strand
gaaaugacuugucgauuau

SEQ ID NO: 1581224 - RNA, 19 nt, Homo sapiens
  misc_RNA (1)...(19): siRNA sense strand
ggaagaggcucacgguaag

SEQ ID NO: 1581225 - RNA, 19 nt, Homo sapiens
  misc_RNA (1)...(19): siRNA sense strand
caagagcugucgugacuca

SEQ ID NO: 1581226 - RNA, 19 nt, Homo sapiens
  misc_RNA (1)...(19): siRNA sense strand
ggugguggccuucacauuu

SEQ ID NO: 1581227 - RNA, 19 nt, Homo sapiens
  misc_RNA (1)...(19): siRNA sense strand
acaaaggcaucaaggaaga

SEQ ID NO: 1581228 - RNA, 19 nt, Homo sapiens
  misc_RNA (1)...(19): siRNA sense strand
ucacaaaggcaucaaggaa

SEQ ID NO: 1581229 - RNA, 19 nt, Homo sapiens
  misc_RNA (1)...(19): siRNA sense strand
gugguggccuucacauuug

SEQ ID NO: 1581230 - RNA, 19 nt, Homo sapiens
  misc_RNA (1)...(19): siRNA sense strand
gcgcggaccugcucuucau

SEQ ID NO: 1581231 - RNA, 19 nt, Homo sapiens
  misc_RNA (1)...(19): siRNA sense strand
gaacaccuccuggaugcaa

SEQ ID NO: 1581232 - RNA, 19 nt, Homo sapiens
  misc_RNA (1)...(19): siRNA sense strand
ugggaugucucuuuuguua

SEQ ID NO: 1581233 - RNA, 19 nt, Homo sapiens
  misc_RNA (1)...(19): siRNA sense strand
ggacuggucauugugauca

SEQ ID NO: 1581234 - RNA, 19 nt, Homo sapiens
  misc_RNA (1)...(19): siRNA sense strand
ugugaucaguuacuccaaa

SEQ ID NO: 1581235 - RNA, 19 nt, Homo sapiens
  misc_RNA (1)...(19): siRNA sense strand
gcaggaaugaguggaagaa

SEQ ID NO: 1581236 - RNA, 19 nt, Homo sapiens
  misc_RNA (1)...(19): siRNA sense strand
aggaagaggcucacgguaa

SEQ ID NO: 1581237 - RNA, 19 nt, Homo sapiens
  misc_RNA (1)...(19): siRNA sense strand
ugcaagagcugucgugacu

SEQ ID NO: 1581238 - RNA, 19 nt, Homo sapiens
  misc_RNA (1)...(19): siRNA sense strand
acacaucugucaaaagaaa

SEQ ID NO: 1581239 - RNA, 19 nt, Homo sapiens
  misc_RNA (1)...(19): siRNA sense strand
gugcucaucuuugcagugu

SEQ ID NO: 1581240 - RNA, 19 nt, Homo sapiens
  misc_RNA (1)...(19): siRNA sense strand
caccauuccuggagagauc

SEQ ID NO: 1581241 - RNA, 19 nt, Homo sapiens
  misc_RNA (1)...(19): siRNA sense strand
cuucacauuugcuaauuca

SEQ ID NO: 1581242 - RNA, 19 nt, Homo sapiens
  misc_RNA (1)...(19): siRNA sense strand
caaccgugcuggugcucau

SEQ ID NO: 1581243 - RNA, 19 nt, Homo sapiens
  misc_RNA (1)...(19): siRNA sense strand
aaagaaaugacuugucgau

SEQ ID NO: 1581244 - RNA, 19 nt, Homo sapiens
  misc_RNA (1)...(19): siRNA sense strand
ggaaugaguggaagaaaau

SEQ ID NO: 1581245 - RNA, 19 nt, Homo sapiens
  misc_RNA (1)...(19): siRNA sense strand
ggccgucccucuucuucug

SEQ ID NO: 1581246 - RNA, 19 nt, Homo sapiens
  misc_RNA (1)...(19): siRNA sense strand
ucgauuugcacacugauuu

SEQ ID NO: 1581247 - RNA, 19 nt, Homo sapiens
  misc_RNA (1)...(19): siRNA sense strand
gcgccgaccaggaaauuuc

SEQ ID NO: 1581248 - RNA, 19 nt, Homo sapiens
  misc_RNA (1)...(19): siRNA sense strand
gccuucacauuugcuaauu

SEQ ID NO: 1581249 - RNA, 19 nt, Homo sapiens
  misc_RNA (1)...(19): siRNA sense strand
gauccagaacuucaagcaa

SEQ ID NO: 1581250 - RNA, 19 nt, Homo sapiens
  misc_RNA (1)...(19): siRNA sense strand
gaucaguuacuccaaaauu

SEQ ID NO: 1581251 - RNA, 19 nt, Homo sapiens
  misc_RNA (1)...(19): siRNA sense strand
ccugccaccugcucuucua

SEQ ID NO: 1581252 - RNA, 19 nt, Homo sapiens
  misc_RNA (1)...(19): siRNA sense strand
gcacccgcuuucccuucuu

SEQ ID NO: 1581253 - RNA, 19 nt, Homo sapiens
  misc_RNA (1)...(19): siRNA sense strand
cccauccucuacaacauga

SEQ ID NO: 1581254 - RNA, 19 nt, Homo sapiens
  misc_RNA (1)...(19): siRNA sense strand
uccagaacuucaagcaaga

SEQ ID NO: 1581255 - RNA, 19 nt, Homo sapiens
  misc_RNA (1)...(19): siRNA sense strand
ucucgugggaugucucuuu

SEQ ID NO: 1581256 - RNA, 19 nt, Homo sapiens
  misc_RNA (1)...(19): siRNA sense strand
gucgauuauuucuggcuaa

SEQ ID NO: 1581257 - RNA, 19 nt, Homo sapiens
  misc_RNA (1)...(19): siRNA sense strand
ccucauggucuccuucuuc

SEQ ID NO: 1581258 - RNA, 19 nt, Homo sapiens
  misc_RNA (1)...(19): siRNA sense strand
cauggucuccuucuucauc

SEQ ID NO: 1581259 - RNA, 19 nt, Homo sapiens
  misc_RNA (1)...(19): siRNA sense strand
acaugacacugugcaggaa

SEQ ID NO: 1581260 - RNA, 19 nt, Homo sapiens
  misc_RNA (1)...(19): siRNA sense strand
uggucauugugaucaguua

SEQ ID NO: 1581261 - RNA, 19 nt, Homo sapiens
  misc_RNA (1)...(19): siRNA sense strand
caucuggccgucccucuuc

SEQ ID NO: 1581262 - RNA, 19 nt, Homo sapiens
  misc_RNA (1)...(19): siRNA sense strand
cgaccaggaaauuucgauu

SEQ ID NO: 1581263 - RNA, 19 nt, Homo sapiens
  misc_RNA (1)...(19): siRNA sense strand
cucauggucuccuucuuca

SEQ ID NO: 1581264 - RNA, 19 nt, Homo sapiens
  misc_RNA (1)...(19): siRNA sense strand
gugcuggugcucaucuuug

SEQ ID NO: 1581265 - RNA, 19 nt, Homo sapiens
  misc_RNA (1)...(19): siRNA sense strand
ggaugucucuuuuguuacu

SEQ ID NO: 1581266 - RNA, 19 nt, Homo sapiens
  misc_RNA (1)...(19): siRNA sense strand
gaaggcgaaucccgaccua

SEQ ID NO: 1581267 - RNA, 19 nt, Homo sapiens
  misc_RNA (1)...(19): siRNA sense strand
agacgaaugucccuuugaa

SEQ ID NO: 1581268 - RNA, 19 nt, Homo sapiens
  misc_RNA (1)...(19): siRNA sense strand
gagauucgcauccacuuau

SEQ ID NO: 1581269 - RNA, 19 nt, Homo sapiens
  misc_RNA (1)...(19): siRNA sense strand
ucagggacuucauugagaa

SEQ ID NO: 1581270 - RNA, 19 nt, Homo sapiens
  misc_RNA (1)...(19): siRNA sense strand
gucagggacuucauugaga

SEQ ID NO: 1581271 - RNA, 19 nt, Homo sapiens
  misc_RNA (1)...(19): siRNA sense strand
gaaugucccuuugaacaac

SEQ ID NO: 1581272 - RNA, 19 nt, Homo sapiens
  misc_RNA (1)...(19): siRNA sense strand
cgaaugucccuuugaacaa

SEQ ID NO: 1581273 - RNA, 19 nt, Homo sapiens
  misc_RNA (1)...(19): siRNA sense strand
ugagauucgcauccacuua

SEQ ID NO: 1581274 - RNA, 19 nt, Homo sapiens
  misc_RNA (1)...(19): siRNA sense strand
cgaccuacccauccuaauc

SEQ ID NO: 1581275 - RNA, 19 nt, Homo sapiens
  misc_RNA (1)...(19): siRNA sense strand
agagacgaaugucccuuug

SEQ ID NO: 1581276 - RNA, 19 nt, Homo sapiens
  misc_RNA (1)...(19): siRNA sense strand
gagacgaaugucccuuuga

SEQ ID NO: 1581277 - RNA, 19 nt, Homo sapiens
  misc_RNA (1)...(19): siRNA sense strand
gggcgucagggacuucauu

SEQ ID NO: 1581278 - RNA, 19 nt, Homo sapiens
  misc_RNA (1)...(19): siRNA sense strand
gaacguucuaagugguaaa

SEQ ID NO: 1581279 - RNA, 19 nt, Homo sapiens
  misc_RNA (1)...(19): siRNA sense strand
aagcugggccugcgugaga

SEQ ID NO: 1581280 - RNA, 19 nt, Homo sapiens
  misc_RNA (1)...(19): siRNA sense strand
aagagacgaaugucccuuu

SEQ ID NO: 1581281 - RNA, 19 nt, Homo sapiens
  misc_RNA (1)...(19): siRNA sense strand
cuacgcauuuggccaagag

SEQ ID NO: 1581282 - RNA, 19 nt, Homo sapiens
  misc_RNA (1)...(19): siRNA sense strand
acgaaugucccuuugaaca

SEQ ID NO: 1581283 - RNA, 19 nt, Homo sapiens
  misc_RNA (1)...(19): siRNA sense strand
gaacugggaggucuuauua

SEQ ID NO: 1581284 - RNA, 19 nt, Homo sapiens
  misc_RNA (1)...(19): siRNA sense strand
gaauuugacuucauggaaa

SEQ ID NO: 1581285 - RNA, 19 nt, Homo sapiens
  misc_RNA (1)...(19): siRNA sense strand
aaacucaacugcuggcuaa

SEQ ID NO: 1581286 - RNA, 19 nt, Homo sapiens
  misc_RNA (1)...(19): siRNA sense strand
gaaaacagcuccuugaaca

SEQ ID NO: 1581287 - RNA, 19 nt, Homo sapiens
  misc_RNA (1)...(19): siRNA sense strand
ggugauauuucgcguguuu

SEQ ID NO: 1581288 - RNA, 19 nt, Homo sapiens
  misc_RNA (1)...(19): siRNA sense strand
gccggaaucuuaagguaua

SEQ ID NO: 1581289 - RNA, 19 nt, Homo sapiens
  misc_RNA (1)...(19): siRNA sense strand
gaaccaagcaaauuucaga

SEQ ID NO: 1581290 - RNA, 19 nt, Homo sapiens
  misc_RNA (1)...(19): siRNA sense strand
uauagcagccggaaucuua

SEQ ID NO: 1581291 - RNA, 19 nt, Homo sapiens
  misc_RNA (1)...(19): siRNA sense strand
uguuauggcuuccuugaua

SEQ ID NO: 1581292 - RNA, 19 nt, Homo sapiens
  misc_RNA (1)...(19): siRNA sense strand
ccaagcaaauuucagaaga

SEQ ID NO: 1581293 - RNA, 19 nt, Homo sapiens
  misc_RNA (1)...(19): siRNA sense strand
aagcgacucugcugauaua

SEQ ID NO: 1581294 - RNA, 19 nt, Homo sapiens
  misc_RNA (1)...(19): siRNA sense strand
uuaaugacaugggcaauaa

SEQ ID NO: 1581295 - RNA, 19 nt, Homo sapiens
  misc_RNA (1)...(19): siRNA sense strand
ccauguauguugugggaua

SEQ ID NO: 1581296 - RNA, 19 nt, Homo sapiens
  misc_RNA (1)...(19): siRNA sense strand
ggcaauaauucuaaagaga

SEQ ID NO: 1581297 - RNA, 19 nt, Homo sapiens
  misc_RNA (1)...(19): siRNA sense strand
uuacacagauagcaucauu

SEQ ID NO: 1581298 - RNA, 19 nt, Homo sapiens
  misc_RNA (1)...(19): siRNA sense strand
gcuacaaacguuuaucuaa

SEQ ID NO: 1581299 - RNA, 19 nt, Homo sapiens
  misc_RNA (1)...(19): siRNA sense strand
ggauuguucuucauauaug

SEQ ID NO: 1581300 - RNA, 19 nt, Homo sapiens
  misc_RNA (1)...(19): siRNA sense strand
cuacaaacguuuaucuaag

SEQ ID NO: 1581301 - RNA, 19 nt, Homo sapiens
  misc_RNA (1)...(19): siRNA sense strand
guacuucagauguauguuu

SEQ ID NO: 1581302 - RNA, 19 nt, Homo sapiens
  misc_RNA (1)...(19): siRNA sense strand
caccuguucucccgaauuu

SEQ ID NO: 1581303 - RNA, 19 nt, Homo sapiens
  misc_RNA (1)...(19): siRNA sense strand
cagauagcaucauuauuuc

SEQ ID NO: 1581304 - RNA, 19 nt, Homo sapiens
  misc_RNA (1)...(19): siRNA sense strand
ggagaggccaccuguguga

SEQ ID NO: 1581305 - RNA, 19 nt, Homo sapiens
  misc_RNA (1)...(19): siRNA sense strand
caucauuauuucccaugua

SEQ ID NO: 1581306 - RNA, 19 nt, Homo sapiens
  misc_RNA (1)...(19): siRNA sense strand
caagcaaauuucagaagau

SEQ ID NO: 1581307 - RNA, 19 nt, Homo sapiens
  misc_RNA (1)...(19): siRNA sense strand
gaacaugauuucaguuacc

SEQ ID NO: 1581308 - RNA, 19 nt, Homo sapiens
  misc_RNA (1)...(19): siRNA sense strand
gaugggauuguucuucaua

SEQ ID NO: 1581309 - RNA, 19 nt, Homo sapiens
  misc_RNA (1)...(19): siRNA sense strand
ucaguuacccuuaguuuca

SEQ ID NO: 1581310 - RNA, 19 nt, Homo sapiens
  misc_RNA (1)...(19): siRNA sense strand
cagccggaaucuuaaggua

SEQ ID NO: 1581311 - RNA, 19 nt, Homo sapiens
  misc_RNA (1)...(19): siRNA sense strand
acacagauagcaucauuau

SEQ ID NO: 1581312 - RNA, 19 nt, Homo sapiens
  misc_RNA (1)...(19): siRNA sense strand
gggcaauaauucuaaagag

SEQ ID NO: 1581313 - RNA, 19 nt, Homo sapiens
  misc_RNA (1)...(19): siRNA sense strand
ugggauuguucuucauaua

SEQ ID NO: 1581314 - RNA, 19 nt, Homo sapiens
  misc_RNA (1)...(19): siRNA sense strand
aaagacuguuggugauauu

SEQ ID NO: 1581315 - RNA, 19 nt, Homo sapiens
  misc_RNA (1)...(19): siRNA sense strand
gggauuguucuucauauau

SEQ ID NO: 1581316 - RNA, 19 nt, Homo sapiens
  misc_RNA (1)...(19): siRNA sense strand
guuaaugacaugggcaaua

SEQ ID NO: 1581317 - RNA, 19 nt, Homo sapiens
  misc_RNA (1)...(19): siRNA sense strand
guuauggcuuccuugauau

SEQ ID NO: 1581318 - RNA, 19 nt, Homo sapiens
  misc_RNA (1)...(19): siRNA sense strand
gacaugggcaauaauucua

SEQ ID NO: 1581319 - RNA, 19 nt, Homo sapiens
  misc_RNA (1)...(19): siRNA sense strand
gcaaauuucagaagaucau

SEQ ID NO: 1581320 - RNA, 19 nt, Homo sapiens
  misc_RNA (1)...(19): siRNA sense strand
cgaauuugacuucauggaa

SEQ ID NO: 1581321 - RNA, 19 nt, Homo sapiens
  misc_RNA (1)...(19): siRNA sense strand
gacaccaccucuccgugaa

SEQ ID NO: 1581322 - RNA, 19 nt, Homo sapiens
  misc_RNA (1)...(19): siRNA sense strand
cauuauugcuuccaguugu

SEQ ID NO: 1581323 - RNA, 19 nt, Homo sapiens
  misc_RNA (1)...(19): siRNA sense strand
cugcugauauacacaaaga

SEQ ID NO: 1581324 - RNA, 19 nt, Homo sapiens
  misc_RNA (1)...(19): siRNA sense strand
cauugaaccaagcaaauuu

SEQ ID NO: 1581325 - RNA, 19 nt, Homo sapiens
  misc_RNA (1)...(19): siRNA sense strand
caugggcaauaauucuaaa

SEQ ID NO: 1581326 - RNA, 19 nt, Homo sapiens
  misc_RNA (1)...(19): siRNA sense strand
ucacacauugcaguuguua

SEQ ID NO: 1581327 - RNA, 19 nt, Homo sapiens
  misc_RNA (1)...(19): siRNA sense strand
gggaggucuuauuacagua

SEQ ID NO: 1581328 - RNA, 19 nt, Homo sapiens
  misc_RNA (1)...(19): siRNA sense strand
cucaggaccucaagcaaug

SEQ ID NO: 1581329 - RNA, 19 nt, Homo sapiens
  misc_RNA (1)...(19): siRNA sense strand
ugggaggucuuauuacagu

SEQ ID NO: 1581330 - RNA, 19 nt, Homo sapiens
  misc_RNA (1)...(19): siRNA sense strand
gcaucauuauuucccaugu

SEQ ID NO: 1581331 - RNA, 19 nt, Homo sapiens
  misc_RNA (1)...(19): siRNA sense strand
uuacugcccuugccauuuu

SEQ ID NO: 1581332 - RNA, 19 nt, Homo sapiens
  misc_RNA (1)...(19): siRNA sense strand
uugcaguuguuagcauuua

SEQ ID NO: 1581333 - RNA, 19 nt, Homo sapiens
  misc_RNA (1)...(19): siRNA sense strand
cauugcaguuguuagcauu

SEQ ID NO: 1581334 - RNA, 19 nt, Homo sapiens
  misc_RNA (1)...(19): siRNA sense strand
guuuggaaauucaauguac

SEQ ID NO: 1581335 - RNA, 19 nt, Homo sapiens
  misc_RNA (1)...(19): siRNA sense strand
acagugagcuggcuuuuca

SEQ ID NO: 1581336 - RNA, 19 nt, Homo sapiens
  misc_RNA (1)...(19): siRNA sense strand
caacugcuggcuaauucaa

SEQ ID NO: 1581337 - RNA, 19 nt, Homo sapiens
  misc_RNA (1)...(19): siRNA sense strand
caucuuuguuaaugacaug

SEQ ID NO: 1581338 - RNA, 19 nt, Homo sapiens
  misc_RNA (1)...(19): siRNA sense strand
uugccugagugaucuuaua

SEQ ID NO: 1581339 - RNA, 19 nt, Homo sapiens
  misc_RNA (1)...(19): siRNA sense strand
aaacagcuccuugaacaca

SEQ ID NO: 1581340 - RNA, 19 nt, Homo sapiens
  misc_RNA (1)...(19): siRNA sense strand
gcugauauacacaaagaca

SEQ ID NO: 1581341 - RNA, 19 nt, Homo sapiens
  misc_RNA (1)...(19): siRNA sense strand
augcuucccuggcaauuug

SEQ ID NO: 1581342 - RNA, 19 nt, Homo sapiens
  misc_RNA (1)...(19): siRNA sense strand
gacauuauugcuuccaguu

SEQ ID NO: 1581343 - RNA, 19 nt, Homo sapiens
  misc_RNA (1)...(19): siRNA sense strand
cauauuugccugagugauc

SEQ ID NO: 1581344 - RNA, 19 nt, Homo sapiens
  misc_RNA (1)...(19): siRNA sense strand
gaggccaccugugugaugu

SEQ ID NO: 1581345 - RNA, 19 nt, Homo sapiens
  misc_RNA (1)...(19): siRNA sense strand
ggaccucaagcaaugauag

SEQ ID NO: 1581346 - RNA, 19 nt, Homo sapiens
  misc_RNA (1)...(19): siRNA sense strand
gcacucugucuuuccaaug

SEQ ID NO: 1581347 - RNA, 19 nt, Homo sapiens
  misc_RNA (1)...(19): siRNA sense strand
acugggaggucuuauuaca

SEQ ID NO: 1581348 - RNA, 19 nt, Homo sapiens
  misc_RNA (1)...(19): siRNA sense strand
cgacucugcugauauacac

SEQ ID NO: 1581349 - RNA, 19 nt, Homo sapiens
  misc_RNA (1)...(19): siRNA sense strand
ccugagugaucuuauagca

SEQ ID NO: 1581350 - RNA, 19 nt, Homo sapiens
  misc_RNA (1)...(19): siRNA sense strand
ugacaugggcaauaauucu

SEQ ID NO: 1581351 - RNA, 19 nt, Homo sapiens
  misc_RNA (1)...(19): siRNA sense strand
aagcaaauuucagaagauc

SEQ ID NO: 1581352 - RNA, 19 nt, Homo sapiens
  misc_RNA (1)...(19): siRNA sense strand
cucaacugcuggcuaauuc

SEQ ID NO: 1581353 - RNA, 19 nt, Homo sapiens
  misc_RNA (1)...(19): siRNA sense strand
cacaaagacauuauugcuu

SEQ ID NO: 1581354 - RNA, 19 nt, Homo sapiens
  misc_RNA (1)...(19): siRNA sense strand
ccuguucucccgaauuuga

SEQ ID NO: 1581355 - RNA, 19 nt, Homo sapiens
  misc_RNA (1)...(19): siRNA sense strand
cauuauuucccauguaugu

SEQ ID NO: 1581356 - RNA, 19 nt, Homo sapiens
  misc_RNA (1)...(19): siRNA sense strand
aaaagcgacucugcugaua

SEQ ID NO: 1581357 - RNA, 19 nt, Homo sapiens
  misc_RNA (1)...(19): siRNA sense strand
gauuguucuucauauaugg

SEQ ID NO: 1581358 - RNA, 19 nt, Homo sapiens
  misc_RNA (1)...(19): siRNA sense strand
gcccuucauugcacucugu

SEQ ID NO: 1581359 - RNA, 19 nt, Homo sapiens
  misc_RNA (1)...(19): siRNA sense strand
aaacugggaguaucuaaac

SEQ ID NO: 1581360 - RNA, 19 nt, Homo sapiens
  misc_RNA (1)...(19): siRNA sense strand
gauuucaguuacccuuagu

SEQ ID NO: 1581361 - RNA, 19 nt, Homo sapiens
  misc_RNA (1)...(19): siRNA sense strand
ugaacugggaggucuuauu

SEQ ID NO: 1581362 - RNA, 19 nt, Homo sapiens
  misc_RNA (1)...(19): siRNA sense strand
ugauuucaguuacccuuag

SEQ ID NO: 1581363 - RNA, 19 nt, Homo sapiens
  misc_RNA (1)...(19): siRNA sense strand
ccaccucuccgugaaaguu

SEQ ID NO: 1581364 - RNA, 19 nt, Homo sapiens
  misc_RNA (1)...(19): siRNA sense strand
uaagaaaacagcuccuuga

SEQ ID NO: 1581365 - RNA, 19 nt, Homo sapiens
  misc_RNA (1)...(19): siRNA sense strand
ccaguuguuauggugauua

SEQ ID NO: 1581366 - RNA, 19 nt, Homo sapiens
  misc_RNA (1)...(19): siRNA sense strand
aaugacaugggcaauaauu

SEQ ID NO: 1581367 - RNA, 19 nt, Homo sapiens
  misc_RNA (1)...(19): siRNA sense strand
caauguugcuuuuaugcuu

SEQ ID NO: 1581368 - RNA, 19 nt, Homo sapiens
  misc_RNA (1)...(19): siRNA sense strand
ccuaagugguacugaacug

SEQ ID NO: 1581369 - RNA, 19 nt, Homo sapiens
  misc_RNA (1)...(19): siRNA sense strand
uuccuauccuuuccuugua

SEQ ID NO: 1581370 - RNA, 19 nt, Homo sapiens
  misc_RNA (1)...(19): siRNA sense strand
ucccgaauuugacuucaug

SEQ ID NO: 1581371 - RNA, 19 nt, Homo sapiens
  misc_RNA (1)...(19): siRNA sense strand
cacucugucuuuccaaugu

SEQ ID NO: 1581372 - RNA, 19 nt, Homo sapiens
  misc_RNA (1)...(19): siRNA sense strand
gaccucaagcaaugauaga

SEQ ID NO: 1581373 - RNA, 19 nt, Homo sapiens
  misc_RNA (1)...(19): siRNA sense strand
acauugaaccaagcaaauu

SEQ ID NO: 1581374 - RNA, 19 nt, Homo sapiens
  misc_RNA (1)...(19): siRNA sense strand
uuucacacauugcaguugu

SEQ ID NO: 1581375 - RNA, 19 nt, Homo sapiens
  misc_RNA (1)...(19): siRNA sense strand
ucauugcacucugucuuuc

SEQ ID NO: 1581376 - RNA, 19 nt, Homo sapiens
  misc_RNA (1)...(19): siRNA sense strand
acacaaagacauuauugcu

SEQ ID NO: 1581377 - RNA, 19 nt, Homo sapiens
  misc_RNA (1)...(19): siRNA sense strand
gaaucuuaagguauacaga

SEQ ID NO: 1581378 - RNA, 19 nt, Homo sapiens
  misc_RNA (1)...(19): siRNA sense strand
guuauggugauuacauguu

SEQ ID NO: 1581379 - RNA, 19 nt, Homo sapiens
  misc_RNA (1)...(19): siRNA sense strand
guggaacaaucauuuugaa

SEQ ID NO: 1581380 - RNA, 19 nt, Homo sapiens
  misc_RNA (1)...(19): siRNA sense strand
gcccuugccauuuuaauuu

SEQ ID NO: 1581381 - RNA, 19 nt, Homo sapiens
  misc_RNA (1)...(19): siRNA sense strand
ucucaggaccucaagcaau

SEQ ID NO: 1581382 - RNA, 19 nt, Homo sapiens
  misc_RNA (1)...(19): siRNA sense strand
aaagcgacucugcugauau

SEQ ID NO: 1581383 - RNA, 19 nt, Homo sapiens
  misc_RNA (1)...(19): siRNA sense strand
gcagguugcugugaugaga

SEQ ID NO: 1581384 - RNA, 19 nt, Homo sapiens
  misc_RNA (1)...(19): siRNA sense strand
ggaacaagacuucgaaggu

SEQ ID NO: 1581385 - RNA, 19 nt, Homo sapiens
  misc_RNA (1)...(19): siRNA sense strand
gugaugagaccugaaguga

SEQ ID NO: 1581386 - RNA, 19 nt, Homo sapiens
  misc_RNA (1)...(19): siRNA sense strand
guagcaaggacacccugua

SEQ ID NO: 1581387 - RNA, 19 nt, Homo sapiens
  misc_RNA (1)...(19): siRNA sense strand
cagcagggaacaagacuuc

SEQ ID NO: 1581388 - RNA, 19 nt, Homo sapiens
  misc_RNA (1)...(19): siRNA sense strand
gcagggaacaagacuucga

SEQ ID NO: 1581389 - RNA, 19 nt, Homo sapiens
  misc_RNA (1)...(19): siRNA sense strand
ggaggaaggcgugggaaag

SEQ ID NO: 1581390 - RNA, 19 nt, Homo sapiens
  misc_RNA (1)...(19): siRNA sense strand
cagggaaagcgcugaguau

SEQ ID NO: 1581391 - RNA, 19 nt, Homo sapiens
  misc_RNA (1)...(19): siRNA sense strand
ggugcagguugcugugaug

SEQ ID NO: 1581392 - RNA, 19 nt, Homo sapiens
  misc_RNA (1)...(19): siRNA sense strand
cugcagacauucgcuuugu

SEQ ID NO: 1581393 - RNA, 19 nt, Homo sapiens
  misc_RNA (1)...(19): siRNA sense strand
gggaaagcgcugaguaucg

SEQ ID NO: 1581394 - RNA, 19 nt, Homo sapiens
  misc_RNA (1)...(19): siRNA sense strand
cagggaacaagacuucgaa

SEQ ID NO: 1581395 - RNA, 19 nt, Homo sapiens
  misc_RNA (1)...(19): siRNA sense strand
uagcaaggacacccuguag

SEQ ID NO: 1581396 - RNA, 19 nt, Homo sapiens
  misc_RNA (1)...(19): siRNA sense strand
ggagcacgaccggaugaug

SEQ ID NO: 1581397 - RNA, 19 nt, Homo sapiens
  misc_RNA (1)...(19): siRNA sense strand
gaaagcauauggaaagcaa

SEQ ID NO: 1581398 - RNA, 19 nt, Homo sapiens
  misc_RNA (1)...(19): siRNA sense strand
acacaugcauccugccaua

SEQ ID NO: 1581399 - RNA, 19 nt, Homo sapiens
  misc_RNA (1)...(19): siRNA sense strand
gugaagaggguuugaguuu

SEQ ID NO: 1581400 - RNA, 19 nt, Homo sapiens
  misc_RNA (1)...(19): siRNA sense strand
gaagaggguuugaguuucc

SEQ ID NO: 1581401 - RNA, 19 nt, Homo sapiens
  misc_RNA (1)...(19): siRNA sense strand
gcacuagacaucauaagca

SEQ ID NO: 1581402 - RNA, 19 nt, Homo sapiens
  misc_RNA (1)...(19): siRNA sense strand
gugcuguggcuguuauuua

SEQ ID NO: 1581403 - RNA, 19 nt, Homo sapiens
  misc_RNA (1)...(19): siRNA sense strand
ugaagaggguuugaguuuc

SEQ ID NO: 1581404 - RNA, 19 nt, Homo sapiens
  misc_RNA (1)...(19): siRNA sense strand
gguucauucuuucaacaaa

SEQ ID NO: 1581405 - RNA, 19 nt, Homo sapiens
  misc_RNA (1)...(19): siRNA sense strand
gcccuacgcuaacucagau

SEQ ID NO: 1581406 - RNA, 19 nt, Homo sapiens
  misc_RNA (1)...(19): siRNA sense strand
ucauggccuuccuauguuu

SEQ ID NO: 1581407 - RNA, 19 nt, Homo sapiens
  misc_RNA (1)...(19): siRNA sense strand
ggaccucaggaucaacuaa

SEQ ID NO: 1581408 - RNA, 19 nt, Homo sapiens
  misc_RNA (1)...(19): siRNA sense strand
acucauggccuuccuaugu

SEQ ID NO: 1581409 - RNA, 19 nt, Homo sapiens
  misc_RNA (1)...(19): siRNA sense strand
cuguggcuguuauuuauuu

SEQ ID NO: 1581410 - RNA, 19 nt, Homo sapiens
  misc_RNA (1)...(19): siRNA sense strand
ggguuugaguuuccacaug

SEQ ID NO: 1581411 - RNA, 19 nt, Homo sapiens
  misc_RNA (1)...(19): siRNA sense strand
caugcauccugccauauuc

SEQ ID NO: 1581412 - RNA, 19 nt, Homo sapiens
  misc_RNA (1)...(19): siRNA sense strand
ugcuguggcuguuauuuau

SEQ ID NO: 1581413 - RNA, 19 nt, Homo sapiens
  misc_RNA (1)...(19): siRNA sense strand
acauugagcaccuacuuug

SEQ ID NO: 1581414 - RNA, 19 nt, Homo sapiens
  misc_RNA (1)...(19): siRNA sense strand
cucauggccuuccuauguu

SEQ ID NO: 1581415 - RNA, 19 nt, Homo sapiens
  misc_RNA (1)...(19): siRNA sense strand
ugggaaagcauauggaaag

SEQ ID NO: 1581416 - RNA, 19 nt, Homo sapiens
  misc_RNA (1)...(19): siRNA sense strand
gcucucugccucacucaug

SEQ ID NO: 1581417 - RNA, 19 nt, Homo sapiens
  misc_RNA (1)...(19): siRNA sense strand
caggcugcguccacaguau

SEQ ID NO: 1581418 - RNA, 19 nt, Homo sapiens
  misc_RNA (1)...(19): siRNA sense strand
acaugcauccugccauauu

SEQ ID NO: 1581419 - RNA, 19 nt, Homo sapiens
  misc_RNA (1)...(19): siRNA sense strand
gaacacgaaguagcucucu

SEQ ID NO: 1581420 - RNA, 19 nt, Homo sapiens
  misc_RNA (1)...(19): siRNA sense strand
ggaaagcauauggaaagca

SEQ ID NO: 1581421 - RNA, 19 nt, Homo sapiens
  misc_RNA (1)...(19): siRNA sense strand
aauauacauugagcaccua

SEQ ID NO: 1581422 - RNA, 19 nt, Homo sapiens
  misc_RNA (1)...(19): siRNA sense strand
agucaugggugcacuagac

SEQ ID NO: 1581423 - RNA, 19 nt, Homo sapiens
  misc_RNA (1)...(19): siRNA sense strand
gggaaagcauauggaaagc

SEQ ID NO: 1581424 - RNA, 19 nt, Homo sapiens
  misc_RNA (1)...(19): siRNA sense strand
gcauccugccauauucuga

SEQ ID NO: 1581425 - RNA, 19 nt, Homo sapiens
  misc_RNA (1)...(19): siRNA sense strand
gcuguggcuguuauuuauu

SEQ ID NO: 1581426 - RNA, 19 nt, Homo sapiens
  misc_RNA (1)...(19): siRNA sense strand
gcauaaagacaaacuguua

SEQ ID NO: 1581427 - RNA, 19 nt, Homo sapiens
  misc_RNA (1)...(19): siRNA sense strand
ggaaaugguugugaaguuu

SEQ ID NO: 1581428 - RNA, 19 nt, Homo sapiens
  misc_RNA (1)...(19): siRNA sense strand
gcgaggagaucauucagua

SEQ ID NO: 1581429 - RNA, 19 nt, Homo sapiens
  misc_RNA (1)...(19): siRNA sense strand
guugugaaguuuccuauua

SEQ ID NO: 1581430 - RNA, 19 nt, Homo sapiens
  misc_RNA (1)...(19): siRNA sense strand
ugagagugcugaagagaua

SEQ ID NO: 1581431 - RNA, 19 nt, Homo sapiens
  misc_RNA (1)...(19): siRNA sense strand
gagaauauguuacugaucu

SEQ ID NO: 1581432 - RNA, 19 nt, Homo sapiens
  misc_RNA (1)...(19): siRNA sense strand
gccagaaacugcuaaagaa

SEQ ID NO: 1581433 - RNA, 19 nt, Homo sapiens
  misc_RNA (1)...(19): siRNA sense strand
cuaagaaggucaccauuga

SEQ ID NO: 1581434 - RNA, 19 nt, Homo sapiens
  misc_RNA (1)...(19): siRNA sense strand
gaaaucaggcgaccaucua

SEQ ID NO: 1581435 - RNA, 19 nt, Homo sapiens
  misc_RNA (1)...(19): siRNA sense strand
cgacacgccucucgacuuu

SEQ ID NO: 1581436 - RNA, 19 nt, Homo sapiens
  misc_RNA (1)...(19): siRNA sense strand
ggaagauccuggaagaaga

SEQ ID NO: 1581437 - RNA, 19 nt, Homo sapiens
  misc_RNA (1)...(19): siRNA sense strand
gagauacgagaauauguua

SEQ ID NO: 1581438 - RNA, 19 nt, Homo sapiens
  misc_RNA (1)...(19): siRNA sense strand
gaagaaagggagaaacaga

SEQ ID NO: 1581439 - RNA, 19 nt, Homo sapiens
  misc_RNA (1)...(19): siRNA sense strand
gaacagcaacuccguaaag

SEQ ID NO: 1581440 - RNA, 19 nt, Homo sapiens
  misc_RNA (1)...(19): siRNA sense strand
cagacuagaugagacaaua

SEQ ID NO: 1581441 - RNA, 19 nt, Homo sapiens
  misc_RNA (1)...(19): siRNA sense strand
ggagaaggcuaucaagcau

SEQ ID NO: 1581442 - RNA, 19 nt, Homo sapiens
  misc_RNA (1)...(19): siRNA sense strand
agaaggcuaucaagcauaa

SEQ ID NO: 1581443 - RNA, 19 nt, Homo sapiens
  misc_RNA (1)...(19): siRNA sense strand
gaagagauacgagaauaug

SEQ ID NO: 1581444 - RNA, 19 nt, Homo sapiens
  misc_RNA (1)...(19): siRNA sense strand
ugggaaagauguggaauuu

SEQ ID NO: 1581445 - RNA, 19 nt, Homo sapiens
  misc_RNA (1)...(19): siRNA sense strand
ugacagaacuaguauucga

SEQ ID NO: 1581446 - RNA, 19 nt, Homo sapiens
  misc_RNA (1)...(19): siRNA sense strand
agcacaagcucaucaauaa

SEQ ID NO: 1581447 - RNA, 19 nt, Homo sapiens
  misc_RNA (1)...(19): siRNA sense strand
gcaacuccguaaagaagaa

SEQ ID NO: 1581448 - RNA, 19 nt, Homo sapiens
  misc_RNA (1)...(19): siRNA sense strand
ccagggaaaugaaggcaaa

SEQ ID NO: 1581449 - RNA, 19 nt, Homo sapiens
  misc_RNA (1)...(19): siRNA sense strand
gagaacagcaacuccguaa

SEQ ID NO: 1581450 - RNA, 19 nt, Homo sapiens
  misc_RNA (1)...(19): siRNA sense strand
cagcgugacucaaacaaga

SEQ ID NO: 1581451 - RNA, 19 nt, Homo sapiens
  misc_RNA (1)...(19): siRNA sense strand
cagauuacuuugccaguga

SEQ ID NO: 1581452 - RNA, 19 nt, Homo sapiens
  misc_RNA (1)...(19): siRNA sense strand
ugacacgacugcagagguu

SEQ ID NO: 1581453 - RNA, 19 nt, Homo sapiens
  misc_RNA (1)...(19): siRNA sense strand
uaucauagcagacuagaug

SEQ ID NO: 1581454 - RNA, 19 nt, Homo sapiens
  misc_RNA (1)...(19): siRNA sense strand
cugaagagauacgagaaua

SEQ ID NO: 1581455 - RNA, 19 nt, Homo sapiens
  misc_RNA (1)...(19): siRNA sense strand
gaagagccuuugggaguuc

SEQ ID NO: 1581456 - RNA, 19 nt, Homo sapiens
  misc_RNA (1)...(19): siRNA sense strand
caaauuggauagaucuucu

SEQ ID NO: 1581457 - RNA, 19 nt, Homo sapiens
  misc_RNA (1)...(19): siRNA sense strand
gaagauccuggaagaagaa

SEQ ID NO: 1581458 - RNA, 19 nt, Homo sapiens
  misc_RNA (1)...(19): siRNA sense strand
ggagaucauucaguacguu

SEQ ID NO: 1581459 - RNA, 19 nt, Homo sapiens
  misc_RNA (1)...(19): siRNA sense strand
agacaucagucaagaaucu

SEQ ID NO: 1581460 - RNA, 19 nt, Homo sapiens
  misc_RNA (1)...(19): siRNA sense strand
gaaggacccaagucauuga

SEQ ID NO: 1581461 - RNA, 19 nt, Homo sapiens
  misc_RNA (1)...(19): siRNA sense strand
gcaaagaagggguuaauga

SEQ ID NO: 1581462 - RNA, 19 nt, Homo sapiens
  misc_RNA (1)...(19): siRNA sense strand
aaagaaugaucaggaguug

SEQ ID NO: 1581463 - RNA, 19 nt, Homo sapiens
  misc_RNA (1)...(19): siRNA sense strand
gagaggaggagcugagaga

SEQ ID NO: 1581464 - RNA, 19 nt, Homo sapiens
  misc_RNA (1)...(19): siRNA sense strand
gagaaggcuaucaagcaua

SEQ ID NO: 1581465 - RNA, 19 nt, Homo sapiens
  misc_RNA (1)...(19): siRNA sense strand
ugaagagccuuugggaguu

SEQ ID NO: 1581466 - RNA, 19 nt, Homo sapiens
  misc_RNA (1)...(19): siRNA sense strand
guaaagaagaagacaaagu

SEQ ID NO: 1581467 - RNA, 19 nt, Homo sapiens
  misc_RNA (1)...(19): siRNA sense strand
ugucaggaguggagaauuc

SEQ ID NO: 1581468 - RNA, 19 nt, Homo sapiens
  misc_RNA (1)...(19): siRNA sense strand
gguguguacucaugaggaa

SEQ ID NO: 1581469 - RNA, 19 nt, Homo sapiens
  misc_RNA (1)...(19): siRNA sense strand
aagcacaagcucaucaaua

SEQ ID NO: 1581470 - RNA, 19 nt, Homo sapiens
  misc_RNA (1)...(19): siRNA sense strand
gcagaaaucaggcgaccau

SEQ ID NO: 1581471 - RNA, 19 nt, Homo sapiens
  misc_RNA (1)...(19): siRNA sense strand
caaugguuguccaaacuug

SEQ ID NO: 1581472 - RNA, 19 nt, Homo sapiens
  misc_RNA (1)...(19): siRNA sense strand
caauaacugucugaucugu

SEQ ID NO: 1581473 - RNA, 19 nt, Homo sapiens
  misc_RNA (1)...(19): siRNA sense strand
gauuuggacuagaguucaa

SEQ ID NO: 1581474 - RNA, 19 nt, Homo sapiens
  misc_RNA (1)...(19): siRNA sense strand
ccagaaacugcuaaagaaa

SEQ ID NO: 1581475 - RNA, 19 nt, Homo sapiens
  misc_RNA (1)...(19): siRNA sense strand
aaaggucaauucauagaag

SEQ ID NO: 1581476 - RNA, 19 nt, Homo sapiens
  misc_RNA (1)...(19): siRNA sense strand
aggaaaugguugugaaguu

SEQ ID NO: 1581477 - RNA, 19 nt, Homo sapiens
  misc_RNA (1)...(19): siRNA sense strand
aaaauucacuagcagagua

SEQ ID NO: 1581478 - RNA, 19 nt, Homo sapiens
  misc_RNA (1)...(19): siRNA sense strand
caauugagagugcugaaga

SEQ ID NO: 1581479 - RNA, 19 nt, Homo sapiens
  misc_RNA (1)...(19): siRNA sense strand
gcucaggcccuugcuuauu

SEQ ID NO: 1581480 - RNA, 19 nt, Homo sapiens
  misc_RNA (1)...(19): siRNA sense strand
gguuaaugaagcagaauaa

SEQ ID NO: 1581481 - RNA, 19 nt, Homo sapiens
  misc_RNA (1)...(19): siRNA sense strand
gagggcagauccugguaca

SEQ ID NO: 1581482 - RNA, 19 nt, Homo sapiens
  misc_RNA (1)...(19): siRNA sense strand
ggaucaagaauuucaggaa

SEQ ID NO: 1581483 - RNA, 19 nt, Homo sapiens
  misc_RNA (1)...(19): siRNA sense strand
ggugcagccucacagaaga

SEQ ID NO: 1581484 - RNA, 19 nt, Homo sapiens
  misc_RNA (1)...(19): siRNA sense strand
gcacucugguguguacuca

SEQ ID NO: 1581485 - RNA, 19 nt, Homo sapiens
  misc_RNA (1)...(19): siRNA sense strand
ggaaagguggacaucucua

SEQ ID NO: 1581486 - RNA, 19 nt, Homo sapiens
  misc_RNA (1)...(19): siRNA sense strand
cagaggacgacuuuggaua

SEQ ID NO: 1581487 - RNA, 19 nt, Homo sapiens
  misc_RNA (1)...(19): siRNA sense strand
ccacagaggacgacuuugg

SEQ ID NO: 1581488 - RNA, 19 nt, Homo sapiens
  misc_RNA (1)...(19): siRNA sense strand
ugguaaaucccaacaugua

SEQ ID NO: 1581489 - RNA, 19 nt, Homo sapiens
  misc_RNA (1)...(19): siRNA sense strand
gcuaaagaaacucauguca

SEQ ID NO: 1581490 - RNA, 19 nt, Homo sapiens
  misc_RNA (1)...(19): siRNA sense strand
ccagacaucagucaagaau

SEQ ID NO: 1581491 - RNA, 19 nt, Homo sapiens
  misc_RNA (1)...(19): siRNA sense strand
cgaaggacccaagucauug

SEQ ID NO: 1581492 - RNA, 19 nt, Homo sapiens
  misc_RNA (1)...(19): siRNA sense strand
gaaagguggacaucucuac

SEQ ID NO: 1581493 - RNA, 19 nt, Homo sapiens
  misc_RNA (1)...(19): siRNA sense strand
gaguggagaauucuggaaa

SEQ ID NO: 1581494 - RNA, 19 nt, Homo sapiens
  misc_RNA (1)...(19): siRNA sense strand
ucgaaggacccaagucauu

SEQ ID NO: 1581495 - RNA, 19 nt, Homo sapiens
  misc_RNA (1)...(19): siRNA sense strand
gcaauuuaaggagcaguuu

SEQ ID NO: 1581496 - RNA, 19 nt, Homo sapiens
  misc_RNA (1)...(19): siRNA sense strand
ccaaauggcaaaagaauga

SEQ ID NO: 1581497 - RNA, 19 nt, Homo sapiens
  misc_RNA (1)...(19): siRNA sense strand
ucugguaaaucccaacaug

SEQ ID NO: 1581498 - RNA, 19 nt, Homo sapiens
  misc_RNA (1)...(19): siRNA sense strand
gaaccagccacugaccaaa

SEQ ID NO: 1581499 - RNA, 19 nt, Homo sapiens
  misc_RNA (1)...(19): siRNA sense strand
gagaucauucaguacguuu

SEQ ID NO: 1581500 - RNA, 19 nt, Homo sapiens
  misc_RNA (1)...(19): siRNA sense strand
ugaugagucagauuacuuu

SEQ ID NO: 1581501 - RNA, 19 nt, Homo sapiens
  misc_RNA (1)...(19): siRNA sense strand
caaacaagagccagaaacu

SEQ ID NO: 1581502 - RNA, 19 nt, Homo sapiens
  misc_RNA (1)...(19): siRNA sense strand
guacucaugaggaacaaga

SEQ ID NO: 1581503 - RNA, 19 nt, Homo sapiens
  misc_RNA (1)...(19): siRNA sense strand
cagcaacuccguaaagaag

SEQ ID NO: 1581504 - RNA, 19 nt, Homo sapiens
  misc_RNA (1)...(19): siRNA sense strand
gagaaacagacaggaaguu

SEQ ID NO: 1581505 - RNA, 19 nt, Homo sapiens
  misc_RNA (1)...(19): siRNA sense strand
agaaacugcuaaagaaacu

SEQ ID NO: 1581506 - RNA, 19 nt, Homo sapiens
  misc_RNA (1)...(19): siRNA sense strand
gcuggugccucucuguaca

SEQ ID NO: 1581507 - RNA, 19 nt, Homo sapiens
  misc_RNA (1)...(19): siRNA sense strand
ucacuagcagaguaucaua

SEQ ID NO: 1581508 - RNA, 19 nt, Homo sapiens
  misc_RNA (1)...(19): siRNA sense strand
ggaagaagaaaauucacua

SEQ ID NO: 1581509 - RNA, 19 nt, Homo sapiens
  misc_RNA (1)...(19): siRNA sense strand
uugaugaugagucagauua

SEQ ID NO: 1581510 - RNA, 19 nt, Homo sapiens
  misc_RNA (1)...(19): siRNA sense strand
ggagaaacagacaggaagu

SEQ ID NO: 1581511 - RNA, 19 nt, Homo sapiens
  misc_RNA (1)...(19): siRNA sense strand
ggagcaguuuccagacauc

SEQ ID NO: 1581512 - RNA, 19 nt, Homo sapiens
  misc_RNA (1)...(19): siRNA sense strand
gaacuccaggcuacauauc

SEQ ID NO: 1581513 - RNA, 19 nt, Homo sapiens
  misc_RNA (1)...(19): siRNA sense strand
ccucacagaagaaggcuuu

SEQ ID NO: 1581514 - RNA, 19 nt, Homo sapiens
  misc_RNA (1)...(19): siRNA sense strand
gaagcacaagcucaucaau

SEQ ID NO: 1581515 - RNA, 19 nt, Homo sapiens
  misc_RNA (1)...(19): siRNA sense strand
uaaugaagcagaauaaagc

SEQ ID NO: 1581516 - RNA, 19 nt, Homo sapiens
  misc_RNA (1)...(19): siRNA sense strand
agagauacgagaauauguu

SEQ ID NO: 1581517 - RNA, 19 nt, Homo sapiens
  misc_RNA (1)...(19): siRNA sense strand
ccagugauucuaaccaaug

SEQ ID NO: 1581518 - RNA, 19 nt, Homo sapiens
  misc_RNA (1)...(19): siRNA sense strand
gaugaugagucagauuacu

SEQ ID NO: 1581519 - RNA, 19 nt, Homo sapiens
  misc_RNA (1)...(19): siRNA sense strand
ggaccuucuuccucaucaa

SEQ ID NO: 1581520 - RNA, 19 nt, Homo sapiens
  misc_RNA (1)...(19): siRNA sense strand
ccguaaagaagaagacaaa

SEQ ID NO: 1581521 - RNA, 19 nt, Homo sapiens
  misc_RNA (1)...(19): siRNA sense strand
caaagaagggguuaaugaa

SEQ ID NO: 1581522 - RNA, 19 nt, Homo sapiens
  misc_RNA (1)...(19): siRNA sense strand
cagaacuccaggcuacaua

SEQ ID NO: 1581523 - RNA, 19 nt, Homo sapiens
  misc_RNA (1)...(19): siRNA sense strand
ucuaagaaggucaccauug

SEQ ID NO: 1581524 - RNA, 19 nt, Homo sapiens
  misc_RNA (1)...(19): siRNA sense strand
ggaacaagauauuuuacag

SEQ ID NO: 1581525 - RNA, 19 nt, Homo sapiens
  misc_RNA (1)...(19): siRNA sense strand
gacagaacuaguauucgaa

SEQ ID NO: 1581526 - RNA, 19 nt, Homo sapiens
  misc_RNA (1)...(19): siRNA sense strand
gaaauagugugucuucauu

SEQ ID NO: 1581527 - RNA, 19 nt, Homo sapiens
  misc_RNA (1)...(19): siRNA sense strand
gauaauggaucaacuccua

SEQ ID NO: 1581528 - RNA, 19 nt, Homo sapiens
  misc_RNA (1)...(19): siRNA sense strand
uagaggagcuacagaaaua

SEQ ID NO: 1581529 - RNA, 19 nt, Homo sapiens
  misc_RNA (1)...(19): siRNA sense strand
gaagauggaguaaucaaua

SEQ ID NO: 1581530 - RNA, 19 nt, Homo sapiens
  misc_RNA (1)...(19): siRNA sense strand
gcauaaagcugcuggacaa

SEQ ID NO: 1581531 - RNA, 19 nt, Homo sapiens
  misc_RNA (1)...(19): siRNA sense strand
ucaggaaacuuuagcauuu

SEQ ID NO: 1581532 - RNA, 19 nt, Homo sapiens
  misc_RNA (1)...(19): siRNA sense strand
gaucaacuccuaugcauaa

SEQ ID NO: 1581533 - RNA, 19 nt, Homo sapiens
  misc_RNA (1)...(19): siRNA sense strand
gcauggagcugauaucaca

SEQ ID NO: 1581534 - RNA, 19 nt, Homo sapiens
  misc_RNA (1)...(19): siRNA sense strand
ggagcagacaguaauauua

SEQ ID NO: 1581535 - RNA, 19 nt, Homo sapiens
  misc_RNA (1)...(19): siRNA sense strand
gaaaagaccuagaggauca

SEQ ID NO: 1581536 - RNA, 19 nt, Homo sapiens
  misc_RNA (1)...(19): siRNA sense strand
gaacgacuacguagagaaa

SEQ ID NO: 1581537 - RNA, 19 nt, Homo sapiens
  misc_RNA (1)...(19): siRNA sense strand
ggacuacaauggaaaccuu

SEQ ID NO: 1581538 - RNA, 19 nt, Homo sapiens
  misc_RNA (1)...(19): siRNA sense strand
gcacugaugccaaggauga

SEQ ID NO: 1581539 - RNA, 19 nt, Homo sapiens
  misc_RNA (1)...(19): siRNA sense strand
uagaagauguggacuacaa

SEQ ID NO: 1581540 - RNA, 19 nt, Homo sapiens
  misc_RNA (1)...(19): siRNA sense strand
gaaauuaguggaagaugga

SEQ ID NO: 1581541 - RNA, 19 nt, Homo sapiens
  misc_RNA (1)...(19): siRNA sense strand
uuaaugagcgugcugauaa

SEQ ID NO: 1581542 - RNA, 19 nt, Homo sapiens
  misc_RNA (1)...(19): siRNA sense strand
guacaggcucuuauaauga

SEQ ID NO: 1581543 - RNA, 19 nt, Homo sapiens
  misc_RNA (1)...(19): siRNA sense strand
gcuugcaacuucuuguuaa

SEQ ID NO: 1581544 - RNA, 19 nt, Homo sapiens
  misc_RNA (1)...(19): siRNA sense strand
caaauaaugcuccgaagug

SEQ ID NO: 1581545 - RNA, 19 nt, Homo sapiens
  misc_RNA (1)...(19): siRNA sense strand
gauguggacuacaauggaa

SEQ ID NO: 1581546 - RNA, 19 nt, Homo sapiens
  misc_RNA (1)...(19): siRNA sense strand
gcugauaucacacacguaa

SEQ ID NO: 1581547 - RNA, 19 nt, Homo sapiens
  misc_RNA (1)...(19): siRNA sense strand
ggacaaggccacauagagu

SEQ ID NO: 1581548 - RNA, 19 nt, Homo sapiens
  misc_RNA (1)...(19): siRNA sense strand
aguacgagcuggagaugua

SEQ ID NO: 1581549 - RNA, 19 nt, Homo sapiens
  misc_RNA (1)...(19): siRNA sense strand
gcagaacauuuuacaguuu

SEQ ID NO: 1581550 - RNA, 19 nt, Homo sapiens
  misc_RNA (1)...(19): siRNA sense strand
uguacaggcucuuauaaug

SEQ ID NO: 1581551 - RNA, 19 nt, Homo sapiens
  misc_RNA (1)...(19): siRNA sense strand
ggacauucuuucacuuuac

SEQ ID NO: 1581552 - RNA, 19 nt, Homo sapiens
  misc_RNA (1)...(19): siRNA sense strand
gggaugcacuccuuuacau

SEQ ID NO: 1581553 - RNA, 19 nt, Homo sapiens
  misc_RNA (1)...(19): siRNA sense strand
ucacuuagcagccauggaa

SEQ ID NO: 1581554 - RNA, 19 nt, Homo sapiens
  misc_RNA (1)...(19): siRNA sense strand
uguuugcagugguuaauua

SEQ ID NO: 1581555 - RNA, 19 nt, Homo sapiens
  misc_RNA (1)...(19): siRNA sense strand
ccaggaagaaggugcauuu

SEQ ID NO: 1581556 - RNA, 19 nt, Homo sapiens
  misc_RNA (1)...(19): siRNA sense strand
uagaggaucaggaaacuuu

SEQ ID NO: 1581557 - RNA, 19 nt, Homo sapiens
  misc_RNA (1)...(19): siRNA sense strand
uaaaacagaugccagaaga

SEQ ID NO: 1581558 - RNA, 19 nt, Homo sapiens
  misc_RNA (1)...(19): siRNA sense strand
aaagagguuugcccauuug

SEQ ID NO: 1581559 - RNA, 19 nt, Homo sapiens
  misc_RNA (1)...(19): siRNA sense strand
ggaagaaggugcauuuugg

SEQ ID NO: 1581560 - RNA, 19 nt, Homo sapiens
  misc_RNA (1)...(19): siRNA sense strand
gccagaagaccaucaaaga

SEQ ID NO: 1581561 - RNA, 19 nt, Homo sapiens
  misc_RNA (1)...(19): siRNA sense strand
ggagagacccagugaugug

SEQ ID NO: 1581562 - RNA, 19 nt, Homo sapiens
  misc_RNA (1)...(19): siRNA sense strand
gcauagaagauguggacua

SEQ ID NO: 1581563 - RNA, 19 nt, Homo sapiens
  misc_RNA (1)...(19): siRNA sense strand
uaaaugggguuguggcaua

SEQ ID NO: 1581564 - RNA, 19 nt, Homo sapiens
  misc_RNA (1)...(19): siRNA sense strand
uacaggcucuuauaaugaa

SEQ ID NO: 1581565 - RNA, 19 nt, Homo sapiens
  misc_RNA (1)...(19): siRNA sense strand
gcuggaguaugaacgacua

SEQ ID NO: 1581566 - RNA, 19 nt, Homo sapiens
  misc_RNA (1)...(19): siRNA sense strand
gagcuacagaaauaugaua

SEQ ID NO: 1581567 - RNA, 19 nt, Homo sapiens
  misc_RNA (1)...(19): siRNA sense strand
ucaaauuccuagucaguag

SEQ ID NO: 1581568 - RNA, 19 nt, Homo sapiens
  misc_RNA (1)...(19): siRNA sense strand
caccuucacuguuucaaau

SEQ ID NO: 1581569 - RNA, 19 nt, Homo sapiens
  misc_RNA (1)...(19): siRNA sense strand
gaauggagcaaaucugaca

SEQ ID NO: 1581570 - RNA, 19 nt, Homo sapiens
  misc_RNA (1)...(19): siRNA sense strand
ccagaagaccaucaaagaa

SEQ ID NO: 1581571 - RNA, 19 nt, Homo sapiens
  misc_RNA (1)...(19): siRNA sense strand
ugccaaggaugauuuaugu

SEQ ID NO: 1581572 - RNA, 19 nt, Homo sapiens
  misc_RNA (1)...(19): siRNA sense strand
caacucauggacauucuuu

SEQ ID NO: 1581573 - RNA, 19 nt, Homo sapiens
  misc_RNA (1)...(19): siRNA sense strand
gaguaugaacgacuacgua

SEQ ID NO: 1581574 - RNA, 19 nt, Homo sapiens
  misc_RNA (1)...(19): siRNA sense strand
uauaagacaugguguugag

SEQ ID NO: 1581575 - RNA, 19 nt, Homo sapiens
  misc_RNA (1)...(19): siRNA sense strand
uggacauucuuucacuuua

SEQ ID NO: 1581576 - RNA, 19 nt, Homo sapiens
  misc_RNA (1)...(19): siRNA sense strand
gaagauguggacuacaaug

SEQ ID NO: 1581577 - RNA, 19 nt, Homo sapiens
  misc_RNA (1)...(19): siRNA sense strand
ccagugauguggcaaagag

SEQ ID NO: 1581578 - RNA, 19 nt, Homo sapiens
  misc_RNA (1)...(19): siRNA sense strand
cauagaagauguggacuac

SEQ ID NO: 1581579 - RNA, 19 nt, Homo sapiens
  misc_RNA (1)...(19): siRNA sense strand
gacagcaucucacauagcu

SEQ ID NO: 1581580 - RNA, 19 nt, Homo sapiens
  misc_RNA (1)...(19): siRNA sense strand
gcaacuucuuguuaaaugg

SEQ ID NO: 1581581 - RNA, 19 nt, Homo sapiens
  misc_RNA (1)...(19): siRNA sense strand
gacauucuuucacuuuaca

SEQ ID NO: 1581582 - RNA, 19 nt, Homo sapiens
  misc_RNA (1)...(19): siRNA sense strand
ggaagauggaguaaucaau

SEQ ID NO: 1581583 - RNA, 19 nt, Homo sapiens
  misc_RNA (1)...(19): siRNA sense strand
aaaccuuccaguucacuua

SEQ ID NO: 1581584 - RNA, 19 nt, Homo sapiens
  misc_RNA (1)...(19): siRNA sense strand
gggagcagacaguaauauu

SEQ ID NO: 1581585 - RNA, 19 nt, Homo sapiens
  misc_RNA (1)...(19): siRNA sense strand
aaggaugauuuaugucuga

SEQ ID NO: 1581586 - RNA, 19 nt, Homo sapiens
  misc_RNA (1)...(19): siRNA sense strand
ucauguggcugccuuuaag

SEQ ID NO: 1581587 - RNA, 19 nt, Homo sapiens
  misc_RNA (1)...(19): siRNA sense strand
caacuccuaugcauaaagc

SEQ ID NO: 1581588 - RNA, 19 nt, Homo sapiens
  misc_RNA (1)...(19): siRNA sense strand
uaaugagcgugcugauaau

SEQ ID NO: 1581589 - RNA, 19 nt, Homo sapiens
  misc_RNA (1)...(19): siRNA sense strand
ggaucaacuccuaugcaua

SEQ ID NO: 1581590 - RNA, 19 nt, Homo sapiens
  misc_RNA (1)...(19): siRNA sense strand
aguggaagauggaguaauc

SEQ ID NO: 1581591 - RNA, 19 nt, Homo sapiens
  misc_RNA (1)...(19): siRNA sense strand
ucagaaauagugugucuuc

SEQ ID NO: 1581592 - RNA, 19 nt, Homo sapiens
  misc_RNA (1)...(19): siRNA sense strand
ggaguggaucccaguguga

SEQ ID NO: 1581593 - RNA, 19 nt, Homo sapiens
  misc_RNA (1)...(19): siRNA sense strand
gggcugaguaugaaggaaa

SEQ ID NO: 1581594 - RNA, 19 nt, Homo sapiens
  misc_RNA (1)...(19): siRNA sense strand
gggucaggaugcuugugua

SEQ ID NO: 1581595 - RNA, 19 nt, Homo sapiens
  misc_RNA (1)...(19): siRNA sense strand
agggccagcuggaguauga

SEQ ID NO: 1581596 - RNA, 19 nt, Homo sapiens
  misc_RNA (1)...(19): siRNA sense strand
ggucauguggcugccuuua

SEQ ID NO: 1581597 - RNA, 19 nt, Homo sapiens
  misc_RNA (1)...(19): siRNA sense strand
gaggagcuacagaaauaug

SEQ ID NO: 1581598 - RNA, 19 nt, Homo sapiens
  misc_RNA (1)...(19): siRNA sense strand
guuagaggagcuacagaaa

SEQ ID NO: 1581599 - RNA, 19 nt, Homo sapiens
  misc_RNA (1)...(19): siRNA sense strand
ugcaacuucuuguuaaaug

SEQ ID NO: 1581600 - RNA, 19 nt, Homo sapiens
  misc_RNA (1)...(19): siRNA sense strand
cagaagaccaucaaagaac

SEQ ID NO: 1581601 - RNA, 19 nt, Homo sapiens
  misc_RNA (1)...(19): siRNA sense strand
uagaguguuugcagugguu

SEQ ID NO: 1581602 - RNA, 19 nt, Homo sapiens
  misc_RNA (1)...(19): siRNA sense strand
ugagcgugcugauaaugga

SEQ ID NO: 1581603 - RNA, 19 nt, Homo sapiens
  misc_RNA (1)...(19): siRNA sense strand
ucaggaugcuuguguacag

SEQ ID NO: 1581604 - RNA, 19 nt, Homo sapiens
  misc_RNA (1)...(19): siRNA sense strand
ccaaggaugauuuaugucu

SEQ ID NO: 1581605 - RNA, 19 nt, Homo sapiens
  misc_RNA (1)...(19): siRNA sense strand
uuggacagcaucucacaua

SEQ ID NO: 1581606 - RNA, 19 nt, Homo sapiens
  misc_RNA (1)...(19): siRNA sense strand
gaagcacugaugccaagga

SEQ ID NO: 1581607 - RNA, 19 nt, Homo sapiens
  misc_RNA (1)...(19): siRNA sense strand
gaucaggaaacuuuagcau

SEQ ID NO: 1581608 - RNA, 19 nt, Homo sapiens
  misc_RNA (1)...(19): siRNA sense strand
agaagaccaucaaagaacu

SEQ ID NO: 1581609 - RNA, 19 nt, Homo sapiens
  misc_RNA (1)...(19): siRNA sense strand
cauacaugaugcaguacga

SEQ ID NO: 1581610 - RNA, 19 nt, Homo sapiens
  misc_RNA (1)...(19): siRNA sense strand
gagguuggacagcaucuca

SEQ ID NO: 1581611 - RNA, 19 nt, Homo sapiens
  misc_RNA (1)...(19): siRNA sense strand
aauagugugucuucauugg

SEQ ID NO: 1581612 - RNA, 19 nt, Homo sapiens
  misc_RNA (1)...(19): siRNA sense strand
caucucacauagcugcaau

SEQ ID NO: 1581613 - RNA, 19 nt, Homo sapiens
  misc_RNA (1)...(19): siRNA sense strand
ucauggacauucuuucacu

SEQ ID NO: 1581614 - RNA, 19 nt, Homo sapiens
  misc_RNA (1)...(19): siRNA sense strand
caacaaagcaggggagaga

SEQ ID NO: 1581615 - RNA, 19 nt, Homo sapiens
  misc_RNA (1)...(19): siRNA sense strand
uggaucaacuccuaugcau

SEQ ID NO: 1581616 - RNA, 19 nt, Homo sapiens
  misc_RNA (1)...(19): siRNA sense strand
cauggacauucuuucacuu

SEQ ID NO: 1581617 - RNA, 19 nt, Homo sapiens
  misc_RNA (1)...(19): siRNA sense strand
caaauuccuagucaguaga

SEQ ID NO: 1581618 - RNA, 19 nt, Homo sapiens
  misc_RNA (1)...(19): siRNA sense strand
gaagaccaucaaagaacug

SEQ ID NO: 1581619 - RNA, 19 nt, Homo sapiens
  misc_RNA (1)...(19): siRNA sense strand
auggagaccugugcauuau

SEQ ID NO: 1581620 - RNA, 19 nt, Homo sapiens
  misc_RNA (1)...(19): siRNA sense strand
cagaaauagugugucuuca

SEQ ID NO: 1581621 - RNA, 19 nt, Homo sapiens
  misc_RNA (1)...(19): siRNA sense strand
ugauaucacacacguaaca

SEQ ID NO: 1581622 - RNA, 19 nt, Homo sapiens
  misc_RNA (1)...(19): siRNA sense strand
ggggaugcuuaagaaauua

SEQ ID NO: 1581623 - RNA, 19 nt, Homo sapiens
  misc_RNA (1)...(19): siRNA sense strand
agaccuagaggaucaggaa

SEQ ID NO: 1581624 - RNA, 19 nt, Homo sapiens
  misc_RNA (1)...(19): siRNA sense strand
agaaauagugugucuucau

SEQ ID NO: 1581625 - RNA, 19 nt, Homo sapiens
  misc_RNA (1)...(19): siRNA sense strand
gcuuaagaaauuaguggaa

SEQ ID NO: 1581626 - RNA, 19 nt, Homo sapiens
  misc_RNA (1)...(19): siRNA sense strand
gagagaagccguauaagug

SEQ ID NO: 1581627 - RNA, 19 nt, Homo sapiens
  misc_RNA (1)...(19): siRNA sense strand
gaagacaaacccuauaagu

SEQ ID NO: 1581628 - RNA, 19 nt, Homo sapiens
  misc_RNA (1)...(19): siRNA sense strand
gcaguggcuucuucuauuc

SEQ ID NO: 1581629 - RNA, 19 nt, Homo sapiens
  misc_RNA (1)...(19): siRNA sense strand
acaaguacaucgugcuaaa

SEQ ID NO: 1581630 - RNA, 19 nt, Homo sapiens
  misc_RNA (1)...(19): siRNA sense strand
ggacgaagacaaacccuau

SEQ ID NO: 1581631 - RNA, 19 nt, Homo sapiens
  misc_RNA (1)...(19): siRNA sense strand
ggagagaagccguauaagu

SEQ ID NO: 1581632 - RNA, 19 nt, Homo sapiens
  misc_RNA (1)...(19): siRNA sense strand
ugaacgggcucguccacua

SEQ ID NO: 1581633 - RNA, 19 nt, Homo sapiens
  misc_RNA (1)...(19): siRNA sense strand
agacaaacccuauaagugu

SEQ ID NO: 1581634 - RNA, 19 nt, Homo sapiens
  misc_RNA (1)...(19): siRNA sense strand
caaagugcacuaccacauu

SEQ ID NO: 1581635 - RNA, 19 nt, Homo sapiens
  misc_RNA (1)...(19): siRNA sense strand
cagcagcagugaagaagga

SEQ ID NO: 1581636 - RNA, 19 nt, Homo sapiens
  misc_RNA (1)...(19): siRNA sense strand
ucucgaagcugcagucaag

SEQ ID NO: 1581637 - RNA, 19 nt, Homo sapiens
  misc_RNA (1)...(19): siRNA sense strand
aaagugcacuaccacauuc

SEQ ID NO: 1581638 - RNA, 19 nt, Homo sapiens
  misc_RNA (1)...(19): siRNA sense strand
cgggagagaagccguauaa

SEQ ID NO: 1581639 - RNA, 19 nt, Homo sapiens
  misc_RNA (1)...(19): siRNA sense strand
ugcaguggcuucuucuauu

SEQ ID NO: 1581640 - RNA, 19 nt, Homo sapiens
  misc_RNA (1)...(19): siRNA sense strand
ccaccuauuugcagaugga

SEQ ID NO: 1581641 - RNA, 19 nt, Homo sapiens
  misc_RNA (1)...(19): siRNA sense strand
ucaagacaccucuggauca

SEQ ID NO: 1581642 - RNA, 19 nt, Homo sapiens
  misc_RNA (1)...(19): siRNA sense strand
ucacaucccaggcucaaga

SEQ ID NO: 1581643 - RNA, 19 nt, Homo sapiens
  misc_RNA (1)...(19): siRNA sense strand
gacgaagacaaacccuaua

SEQ ID NO: 1581644 - RNA, 19 nt, Homo sapiens
  misc_RNA (1)...(19): siRNA sense strand
acacaaggcaguucucauc

SEQ ID NO: 1581645 - RNA, 19 nt, Homo sapiens
  misc_RNA (1)...(19): siRNA sense strand
ggucuucguuccgcuacaa

SEQ ID NO: 1581646 - RNA, 19 nt, Homo sapiens
  misc_RNA (1)...(19): siRNA sense strand
gcacacaaggcaguucuca

SEQ ID NO: 1581647 - RNA, 19 nt, Homo sapiens
  misc_RNA (1)...(19): siRNA sense strand
gagcugcuaccaacaccaa

SEQ ID NO: 1581648 - RNA, 19 nt, Homo sapiens
  misc_RNA (1)...(19): siRNA sense strand
ggcuucuucuauucaauuu

SEQ ID NO: 1581649 - RNA, 19 nt, Homo sapiens
  misc_RNA (1)...(19): siRNA sense strand
gaacgggcucguccacuac

SEQ ID NO: 1581650 - RNA, 19 nt, Homo sapiens
  misc_RNA (1)...(19): siRNA sense strand
guacaucgugcuaaacucu

SEQ ID NO: 1581651 - RNA, 19 nt, Homo sapiens
  misc_RNA (1)...(19): siRNA sense strand
gcucaagacaccucuggau

SEQ ID NO: 1581652 - RNA, 19 nt, Homo sapiens
  misc_RNA (1)...(19): siRNA sense strand
aagacaaacccuauaagug

SEQ ID NO: 1581653 - RNA, 19 nt, Homo sapiens
  misc_RNA (1)...(19): siRNA sense strand
acgaagacaaacccuauaa

SEQ ID NO: 1581654 - RNA, 19 nt, Homo sapiens
  misc_RNA (1)...(19): siRNA sense strand
cuauuggacuucauguaca

SEQ ID NO: 1581655 - RNA, 19 nt, Homo sapiens
  misc_RNA (1)...(19): siRNA sense strand
cagcagcagcagugaagaa

SEQ ID NO: 1581656 - RNA, 19 nt, Homo sapiens
  misc_RNA (1)...(19): siRNA sense strand
agacccaccuacugaaucu

SEQ ID NO: 1581657 - RNA, 19 nt, Homo sapiens
  misc_RNA (1)...(19): siRNA sense strand
acaccaaagugcacuacca

SEQ ID NO: 1581658 - RNA, 19 nt, Homo sapiens
  misc_RNA (1)...(19): siRNA sense strand
acgcacagccgcauccauu

SEQ ID NO: 1581659 - RNA, 19 nt, Homo sapiens
  misc_RNA (1)...(19): siRNA sense strand
ggacacccagacccaccua

SEQ ID NO: 1581660 - RNA, 19 nt, Homo sapiens
  misc_RNA (1)...(19): siRNA sense strand
ccaaagugcacuaccacau

SEQ ID NO: 1581661 - RNA, 19 nt, Homo sapiens
  misc_RNA (1)...(19): siRNA sense strand
gugcggcucgcgcuuugua

SEQ ID NO: 1581662 - RNA, 19 nt, Homo sapiens
  misc_RNA (1)...(19): siRNA sense strand
agagaagccguauaagugu

SEQ ID NO: 1581663 - RNA, 19 nt, Homo sapiens
  misc_RNA (1)...(19): siRNA sense strand
caagacaccucuggaucac

SEQ ID NO: 1581664 - RNA, 19 nt, Homo sapiens
  misc_RNA (1)...(19): siRNA sense strand
cagaaacacggagcugcua

SEQ ID NO: 1581665 - RNA, 19 nt, Homo sapiens
  misc_RNA (1)...(19): siRNA sense strand
cauccaggccagcuaugaa

SEQ ID NO: 1581666 - RNA, 19 nt, Homo sapiens
  misc_RNA (1)...(19): siRNA sense strand
ggguggacgugcucucucu

SEQ ID NO: 1581667 - RNA, 19 nt, Homo sapiens
  misc_RNA (1)...(19): siRNA sense strand
ccuuaccacugcucaaucu

SEQ ID NO: 1581668 - RNA, 19 nt, Homo sapiens
  misc_RNA (1)...(19): siRNA sense strand
gcacagccgcauccauucg

SEQ ID NO: 1581669 - RNA, 19 nt, Homo sapiens
  misc_RNA (1)...(19): siRNA sense strand
ccagacccaccuacugaau

SEQ ID NO: 1581670 - RNA, 19 nt, Homo sapiens
  misc_RNA (1)...(19): siRNA sense strand
acaccggagagaagccuua

SEQ ID NO: 1581671 - RNA, 19 nt, Homo sapiens
  misc_RNA (1)...(19): siRNA sense strand
cgaagacaaacccuauaag

SEQ ID NO: 1581672 - RNA, 19 nt, Homo sapiens
  misc_RNA (1)...(19): siRNA sense strand
caucggggcuggacuccuu

SEQ ID NO: 1581673 - RNA, 19 nt, Homo sapiens
  misc_RNA (1)...(19): siRNA sense strand
ggacuaagcugguucaaag

SEQ ID NO: 1581674 - RNA, 19 nt, Homo sapiens
  misc_RNA (1)...(19): siRNA sense strand
gcacacaauuggaguaagg

SEQ ID NO: 1581675 - RNA, 19 nt, Homo sapiens
  misc_RNA (1)...(19): siRNA sense strand
ggacccaaauucucauuag

SEQ ID NO: 1581676 - RNA, 19 nt, Homo sapiens
  misc_RNA (1)...(19): siRNA sense strand
cagagaguauugacuuuga

SEQ ID NO: 1581677 - RNA, 19 nt, Homo sapiens
  misc_RNA (1)...(19): siRNA sense strand
caaagcagguuuuagguuu

SEQ ID NO: 1581678 - RNA, 19 nt, Homo sapiens
  misc_RNA (1)...(19): siRNA sense strand
ucugauggcuggucuaugu

SEQ ID NO: 1581679 - RNA, 19 nt, Homo sapiens
  misc_RNA (1)...(19): siRNA sense strand
gaguauugacuuugaguuu

SEQ ID NO: 1581680 - RNA, 19 nt, Homo sapiens
  misc_RNA (1)...(19): siRNA sense strand
ccucuuaacuaccacuuca

SEQ ID NO: 1581681 - RNA, 19 nt, Homo sapiens
  misc_RNA (1)...(19): siRNA sense strand
cuucauacucaguuucuua

SEQ ID NO: 1581682 - RNA, 19 nt, Homo sapiens
  misc_RNA (1)...(19): siRNA sense strand
gaguuuauggcacacaauu

SEQ ID NO: 1581683 - RNA, 19 nt, Homo sapiens
  misc_RNA (1)...(19): siRNA sense strand
ggucauuucagcccuguga

SEQ ID NO: 1581684 - RNA, 19 nt, Homo sapiens
  misc_RNA (1)...(19): siRNA sense strand
gggacccaaauucucauua

SEQ ID NO: 1581685 - RNA, 19 nt, Homo sapiens
  misc_RNA (1)...(19): siRNA sense strand
caaauucucauuaggucau

SEQ ID NO: 1581686 - RNA, 19 nt, Homo sapiens
  misc_RNA (1)...(19): siRNA sense strand
cauuuagucuuguguuguc

SEQ ID NO: 1581687 - RNA, 19 nt, Homo sapiens
  misc_RNA (1)...(19): siRNA sense strand
uuagucuuguguugucuuu

SEQ ID NO: 1581688 - RNA, 19 nt, Homo sapiens
  misc_RNA (1)...(19): siRNA sense strand
uaacuaccacuucauacuc

SEQ ID NO: 1581689 - RNA, 19 nt, Homo sapiens
  misc_RNA (1)...(19): siRNA sense strand
gguuuuagguuuucugaug

SEQ ID NO: 1581690 - RNA, 19 nt, Homo sapiens
  misc_RNA (1)...(19): siRNA sense strand
uccagagaguauugacuuu

SEQ ID NO: 1581691 - RNA, 19 nt, Homo sapiens
  misc_RNA (1)...(19): siRNA sense strand
gaucgccuucaucuacuuu

SEQ ID NO: 1581692 - RNA, 19 nt, Homo sapiens
  misc_RNA (1)...(19): siRNA sense strand
ugagagugccaaacauuca

SEQ ID NO: 1581693 - RNA, 19 nt, Homo sapiens
  misc_RNA (1)...(19): siRNA sense strand
ucaucuacuuugggacuaa

SEQ ID NO: 1581694 - RNA, 19 nt, Homo sapiens
  misc_RNA (1)...(19): siRNA sense strand
ucuuaacuaccacuucaua

SEQ ID NO: 1581695 - RNA, 19 nt, Homo sapiens
  misc_RNA (1)...(19): siRNA sense strand
gacccaaauucucauuagg

SEQ ID NO: 1581696 - RNA, 19 nt, Homo sapiens
  misc_RNA (1)...(19): siRNA sense strand
ccagagaguauugacuuug

SEQ ID NO: 1581697 - RNA, 19 nt, Homo sapiens
  misc_RNA (1)...(19): siRNA sense strand
gcuggucuauguuuuauuc

SEQ ID NO: 1581698 - RNA, 19 nt, Homo sapiens
  misc_RNA (1)...(19): siRNA sense strand
gggacuaagcugguucaaa

SEQ ID NO: 1581699 - RNA, 19 nt, Homo sapiens
  misc_RNA (1)...(19): siRNA sense strand
uucuuggucuuucucauuu

SEQ ID NO: 1581700 - RNA, 19 nt, Homo sapiens
  misc_RNA (1)...(19): siRNA sense strand
ucuuggucuuucucauuua

SEQ ID NO: 1581701 - RNA, 19 nt, Homo sapiens
  misc_RNA (1)...(19): siRNA sense strand
ugugagagugccaaacauu

SEQ ID NO: 1581702 - RNA, 19 nt, Homo sapiens
  misc_RNA (1)...(19): siRNA sense strand
gugagagugccaaacauuc

SEQ ID NO: 1581703 - RNA, 19 nt, Homo sapiens
  misc_RNA (1)...(19): siRNA sense strand
ucuccagccucuuaacuac

SEQ ID NO: 1581704 - RNA, 19 nt, Homo sapiens
  misc_RNA (1)...(19): siRNA sense strand
gagaguauugacuuugagu

SEQ ID NO: 1581705 - RNA, 19 nt, Homo sapiens
  misc_RNA (1)...(19): siRNA sense strand
ugauggcuggucuauguuu

SEQ ID NO: 1581706 - RNA, 19 nt, Homo sapiens
  misc_RNA (1)...(19): siRNA sense strand
cuucuuggucuuucucauu

SEQ ID NO: 1581707 - RNA, 19 nt, Homo sapiens
  misc_RNA (1)...(19): siRNA sense strand
gaauauugcucaccuacua

SEQ ID NO: 1581708 - RNA, 19 nt, Homo sapiens
  misc_RNA (1)...(19): siRNA sense strand
cuacuggacugccauauua

SEQ ID NO: 1581709 - RNA, 19 nt, Homo sapiens
  misc_RNA (1)...(19): siRNA sense strand
gcacagagcugaaaacuga

SEQ ID NO: 1581710 - RNA, 19 nt, Homo sapiens
  misc_RNA (1)...(19): siRNA sense strand
gcagaaagccaaucucauu

SEQ ID NO: 1581711 - RNA, 19 nt, Homo sapiens
  misc_RNA (1)...(19): siRNA sense strand
guguagagcuggagcaauu

SEQ ID NO: 1581712 - RNA, 19 nt, Homo sapiens
  misc_RNA (1)...(19): siRNA sense strand
ggauaagccuauugagaug

SEQ ID NO: 1581713 - RNA, 19 nt, Homo sapiens
  misc_RNA (1)...(19): siRNA sense strand
cuacaaaguucgaaugcaa

SEQ ID NO: 1581714 - RNA, 19 nt, Homo sapiens
  misc_RNA (1)...(19): siRNA sense strand
ggagaauuguuaccacaga

SEQ ID NO: 1581715 - RNA, 19 nt, Homo sapiens
  misc_RNA (1)...(19): siRNA sense strand
cagaggagcuacuguauac

SEQ ID NO: 1581716 - RNA, 19 nt, Homo sapiens
  misc_RNA (1)...(19): siRNA sense strand
uaaccucacuguccuacaa

SEQ ID NO: 1581717 - RNA, 19 nt, Homo sapiens
  misc_RNA (1)...(19): siRNA sense strand
uauuaucccugccuuauug

SEQ ID NO: 1581718 - RNA, 19 nt, Homo sapiens
  misc_RNA (1)...(19): siRNA sense strand
ugcaagcacugaaauguuu

SEQ ID NO: 1581719 - RNA, 19 nt, Homo sapiens
  misc_RNA (1)...(19): siRNA sense strand
guaaagggccagaucauca

SEQ ID NO: 1581720 - RNA, 19 nt, Homo sapiens
  misc_RNA (1)...(19): siRNA sense strand
gcaauucggacagaugaua

SEQ ID NO: 1581721 - RNA, 19 nt, Homo sapiens
  misc_RNA (1)...(19): siRNA sense strand
gaccugaaguuuauugaag

SEQ ID NO: 1581722 - RNA, 19 nt, Homo sapiens
  misc_RNA (1)...(19): siRNA sense strand
gggauaagccuauugagau

SEQ ID NO: 1581723 - RNA, 19 nt, Homo sapiens
  misc_RNA (1)...(19): siRNA sense strand
uuuaggagcuguuccaaga

SEQ ID NO: 1581724 - RNA, 19 nt, Homo sapiens
  misc_RNA (1)...(19): siRNA sense strand
cgaugacccugguaaaugu

SEQ ID NO: 1581725 - RNA, 19 nt, Homo sapiens
  misc_RNA (1)...(19): siRNA sense strand
gaauuguuaccacagauuu

SEQ ID NO: 1581726 - RNA, 19 nt, Homo sapiens
  misc_RNA (1)...(19): siRNA sense strand
gagcaauucggacagauga

SEQ ID NO: 1581727 - RNA, 19 nt, Homo sapiens
  misc_RNA (1)...(19): siRNA sense strand
uaggagcuguuccaagauu

SEQ ID NO: 1581728 - RNA, 19 nt, Homo sapiens
  misc_RNA (1)...(19): siRNA sense strand
ccagaggagcuacuguaua

SEQ ID NO: 1581729 - RNA, 19 nt, Homo sapiens
  misc_RNA (1)...(19): siRNA sense strand
ccagaucaucaaacaauuu

SEQ ID NO: 1581730 - RNA, 19 nt, Homo sapiens
  misc_RNA (1)...(19): siRNA sense strand
ggaaacaacaagcagaaag

SEQ ID NO: 1581731 - RNA, 19 nt, Homo sapiens
  misc_RNA (1)...(19): siRNA sense strand
ugucagaucuucucacacu

SEQ ID NO: 1581732 - RNA, 19 nt, Homo sapiens
  misc_RNA (1)...(19): siRNA sense strand
ggccagaucaucaaacaau

SEQ ID NO: 1581733 - RNA, 19 nt, Homo sapiens
  misc_RNA (1)...(19): siRNA sense strand
gagaauuguuaccacagau

SEQ ID NO: 1581734 - RNA, 19 nt, Homo sapiens
  misc_RNA (1)...(19): siRNA sense strand
gccagaucaucaaacaauu

SEQ ID NO: 1581735 - RNA, 19 nt, Homo sapiens
  misc_RNA (1)...(19): siRNA sense strand
ucacuguccuacaaaguuc

SEQ ID NO: 1581736 - RNA, 19 nt, Homo sapiens
  misc_RNA (1)...(19): siRNA sense strand
gaaugcaagcacugaaaug

SEQ ID NO: 1581737 - RNA, 19 nt, Homo sapiens
  misc_RNA (1)...(19): siRNA sense strand
ucagaauauugcucaccua

SEQ ID NO: 1581738 - RNA, 19 nt, Homo sapiens
  misc_RNA (1)...(19): siRNA sense strand
gaaacaacaagcagaaagc

SEQ ID NO: 1581739 - RNA, 19 nt, Homo sapiens
  misc_RNA (1)...(19): siRNA sense strand
guugggaagucuugcuaug

SEQ ID NO: 1581740 - RNA, 19 nt, Homo sapiens
  misc_RNA (1)...(19): siRNA sense strand
gcagugguguugggaaguc

SEQ ID NO: 1581741 - RNA, 19 nt, Homo sapiens
  misc_RNA (1)...(19): siRNA sense strand
caauucggacagaugauaa

SEQ ID NO: 1581742 - RNA, 19 nt, Homo sapiens
  misc_RNA (1)...(19): siRNA sense strand
uaaagggccagaucaucaa

SEQ ID NO: 1581743 - RNA, 19 nt, Homo sapiens
  misc_RNA (1)...(19): siRNA sense strand
cauauuaucccugccuuau

SEQ ID NO: 1581744 - RNA, 19 nt, Homo sapiens
  misc_RNA (1)...(19): siRNA sense strand
gguugauggagaauuguua

SEQ ID NO: 1581745 - RNA, 19 nt, Homo sapiens
  misc_RNA (1)...(19): siRNA sense strand
gcagucgccacuauguuga

SEQ ID NO: 1581746 - RNA, 19 nt, Homo sapiens
  misc_RNA (1)...(19): siRNA sense strand
ggagcaauucggacagaug

SEQ ID NO: 1581747 - RNA, 19 nt, Homo sapiens
  misc_RNA (1)...(19): siRNA sense strand
guuccaagauuguuguacu

SEQ ID NO: 1581748 - RNA, 19 nt, Homo sapiens
  misc_RNA (1)...(19): siRNA sense strand
acagagggauaagccuauu

SEQ ID NO: 1581749 - RNA, 19 nt, Homo sapiens
  misc_RNA (1)...(19): siRNA sense strand
ccccagaccugaaguuuau

SEQ ID NO: 1581750 - RNA, 19 nt, Homo sapiens
  misc_RNA (1)...(19): siRNA sense strand
acggugcaguucagaauau

SEQ ID NO: 1581751 - RNA, 19 nt, Homo sapiens
  misc_RNA (1)...(19): siRNA sense strand
ccacggugcaguucagaau

SEQ ID NO: 1581752 - RNA, 19 nt, Homo sapiens
  misc_RNA (1)...(19): siRNA sense strand
uaaccacggugcaguucag

SEQ ID NO: 1581753 - RNA, 19 nt, Homo sapiens
  misc_RNA (1)...(19): siRNA sense strand
uacagaugccacagugaua

SEQ ID NO: 1581754 - RNA, 19 nt, Homo sapiens
  misc_RNA (1)...(19): siRNA sense strand
caacaagcagaaagccaau

SEQ ID NO: 1581755 - RNA, 19 nt, Homo sapiens
  misc_RNA (1)...(19): siRNA sense strand
uuugguugauggagaauug

SEQ ID NO: 1581756 - RNA, 19 nt, Homo sapiens
  misc_RNA (1)...(19): siRNA sense strand
cgaaugcaagcacugaaau

SEQ ID NO: 1581757 - RNA, 19 nt, Homo sapiens
  misc_RNA (1)...(19): siRNA sense strand
ccauauuaucccugccuua

SEQ ID NO: 1581758 - RNA, 19 nt, Homo sapiens
  misc_RNA (1)...(19): siRNA sense strand
agagggauaagccuauuga

SEQ ID NO: 1581759 - RNA, 19 nt, Homo sapiens
  misc_RNA (1)...(19): siRNA sense strand
aagcagaaagccaaucuca

SEQ ID NO: 1581760 - RNA, 19 nt, Homo sapiens
  misc_RNA (1)...(19): siRNA sense strand
uauguugacaggcuauuug

SEQ ID NO: 1581761 - RNA, 19 nt, Homo sapiens
  misc_RNA (1)...(19): siRNA sense strand
gcuauacccaggaguacau

SEQ ID NO: 1581762 - RNA, 19 nt, Homo sapiens
  misc_RNA (1)...(19): siRNA sense strand
ucgaugacccugguaaaug

SEQ ID NO: 1581763 - RNA, 19 nt, Homo sapiens
  misc_RNA (1)...(19): siRNA sense strand
ugaaaacaaugucaagucu

SEQ ID NO: 1581764 - RNA, 19 nt, Homo sapiens
  misc_RNA (1)...(19): siRNA sense strand
guaaauguuuugguugaug

SEQ ID NO: 1581765 - RNA, 19 nt, Homo sapiens
  misc_RNA (1)...(19): siRNA sense strand
gcuguaaagggccagauca

SEQ ID NO: 1581766 - RNA, 19 nt, Homo sapiens
  misc_RNA (1)...(19): siRNA sense strand
caccucauggcacugcuua

SEQ ID NO: 1581767 - RNA, 19 nt, Homo sapiens
  misc_RNA (1)...(19): siRNA sense strand
ccagaccugaaguuuauug

SEQ ID NO: 1581768 - RNA, 19 nt, Homo sapiens
  misc_RNA (1)...(19): siRNA sense strand
ugaaugugcagugguguug

SEQ ID NO: 1581769 - RNA, 19 nt, Homo sapiens
  misc_RNA (1)...(19): siRNA sense strand
guaucgaugacccugguaa

SEQ ID NO: 1581770 - RNA, 19 nt, Homo sapiens
  misc_RNA (1)...(19): siRNA sense strand
gcuagcagucgccacuaug

SEQ ID NO: 1581771 - RNA, 19 nt, Homo sapiens
  misc_RNA (1)...(19): siRNA sense strand
agaauuguuaccacagauu

SEQ ID NO: 1581772 - RNA, 19 nt, Homo sapiens
  misc_RNA (1)...(19): siRNA sense strand
ucgaaugcaagcacugaaa

SEQ ID NO: 1581773 - RNA, 19 nt, Homo sapiens
  misc_RNA (1)...(19): siRNA sense strand
ggagcuguuccaagauugu

SEQ ID NO: 1581774 - RNA, 19 nt, Homo sapiens
  misc_RNA (1)...(19): siRNA sense strand
uaucgaugacccugguaaa

SEQ ID NO: 1581775 - RNA, 19 nt, Homo sapiens
  misc_RNA (1)...(19): siRNA sense strand
agggauaagccuauugaga

SEQ ID NO: 1581776 - RNA, 19 nt, Homo sapiens
  misc_RNA (1)...(19): siRNA sense strand
gaauauugcucaccuacua

SEQ ID NO: 1581777 - RNA, 19 nt, Homo sapiens
  misc_RNA (1)...(19): siRNA sense strand
cuacuggacugccauauua

SEQ ID NO: 1581778 - RNA, 19 nt, Homo sapiens
  misc_RNA (1)...(19): siRNA sense strand
gcacagagcugaaaacuga

SEQ ID NO: 1581779 - RNA, 19 nt, Homo sapiens
  misc_RNA (1)...(19): siRNA sense strand
gcagaaagccaaucucauu

SEQ ID NO: 1581780 - RNA, 19 nt, Homo sapiens
  misc_RNA (1)...(19): siRNA sense strand
gagaaucgcuagcauaacu

SEQ ID NO: 1581781 - RNA, 19 nt, Homo sapiens
  misc_RNA (1)...(19): siRNA sense strand
guguagagcuggagcaauu

SEQ ID NO: 1581782 - RNA, 19 nt, Homo sapiens
  misc_RNA (1)...(19): siRNA sense strand
ggauaagccuauugagaug

SEQ ID NO: 1581783 - RNA, 19 nt, Homo sapiens
  misc_RNA (1)...(19): siRNA sense strand
cuacaaaguucgaaugcaa

SEQ ID NO: 1581784 - RNA, 19 nt, Homo sapiens
  misc_RNA (1)...(19): siRNA sense strand
ggagaauuguuaccacaga

SEQ ID NO: 1581785 - RNA, 19 nt, Homo sapiens
  misc_RNA (1)...(19): siRNA sense strand
cagaggagcuacuguauac

SEQ ID NO: 1581786 - RNA, 19 nt, Homo sapiens
  misc_RNA (1)...(19): siRNA sense strand
uaaccucacuguccuacaa

SEQ ID NO: 1581787 - RNA, 19 nt, Homo sapiens
  misc_RNA (1)...(19): siRNA sense strand
uauuaucccugccuuauug

SEQ ID NO: 1581788 - RNA, 19 nt, Homo sapiens
  misc_RNA (1)...(19): siRNA sense strand
ugcaagcacugaaauguuu

SEQ ID NO: 1581789 - RNA, 19 nt, Homo sapiens
  misc_RNA (1)...(19): siRNA sense strand
guaaagggccagaucauca

SEQ ID NO: 1581790 - RNA, 19 nt, Homo sapiens
  misc_RNA (1)...(19): siRNA sense strand
gcaauucggacagaugaua

SEQ ID NO: 1581791 - RNA, 19 nt, Homo sapiens
  misc_RNA (1)...(19): siRNA sense strand
gaccugaaguuuauugaag

SEQ ID NO: 1581792 - RNA, 19 nt, Homo sapiens
  misc_RNA (1)...(19): siRNA sense strand
cagagaaucgcuagcauaa

SEQ ID NO: 1581793 - RNA, 19 nt, Homo sapiens
  misc_RNA (1)...(19): siRNA sense strand
gggauaagccuauugagau

SEQ ID NO: 1581794 - RNA, 19 nt, Homo sapiens
  misc_RNA (1)...(19): siRNA sense strand
ugaaccagauguugagcua

SEQ ID NO: 1581795 - RNA, 19 nt, Homo sapiens
  misc_RNA (1)...(19): siRNA sense strand
uuuaggagcuguuccaaga

SEQ ID NO: 1581796 - RNA, 19 nt, Homo sapiens
  misc_RNA (1)...(19): siRNA sense strand
uuaaaaggcuugaucauga

SEQ ID NO: 1581797 - RNA, 19 nt, Homo sapiens
  misc_RNA (1)...(19): siRNA sense strand
cgaugacccugguaaaugu

SEQ ID NO: 1581798 - RNA, 19 nt, Homo sapiens
  misc_RNA (1)...(19): siRNA sense strand
gaauuguuaccacagauuu

SEQ ID NO: 1581799 - RNA, 19 nt, Homo sapiens
  misc_RNA (1)...(19): siRNA sense strand
gagcaauucggacagauga

SEQ ID NO: 1581800 - RNA, 19 nt, Homo sapiens
  misc_RNA (1)...(19): siRNA sense strand
uaggagcuguuccaagauu

SEQ ID NO: 1581801 - RNA, 19 nt, Homo sapiens
  misc_RNA (1)...(19): siRNA sense strand
ccagaggagcuacuguaua

SEQ ID NO: 1581802 - RNA, 19 nt, Homo sapiens
  misc_RNA (1)...(19): siRNA sense strand
ccagaucaucaaacaauuu

SEQ ID NO: 1581803 - RNA, 19 nt, Homo sapiens
  misc_RNA (1)...(19): siRNA sense strand
ggaaacaacaagcagaaag

SEQ ID NO: 1581804 - RNA, 19 nt, Homo sapiens
  misc_RNA (1)...(19): siRNA sense strand
ugucagaucuucucacacu

SEQ ID NO: 1581805 - RNA, 19 nt, Homo sapiens
  misc_RNA (1)...(19): siRNA sense strand
aaggcuugaucaugauuua

SEQ ID NO: 1581806 - RNA, 19 nt, Homo sapiens
  misc_RNA (1)...(19): siRNA sense strand
ggccagaucaucaaacaau

SEQ ID NO: 1581807 - RNA, 19 nt, Homo sapiens
  misc_RNA (1)...(19): siRNA sense strand
gagaauuguuaccacagau

SEQ ID NO: 1581808 - RNA, 19 nt, Homo sapiens
  misc_RNA (1)...(19): siRNA sense strand
gccagaucaucaaacaauu

SEQ ID NO: 1581809 - RNA, 19 nt, Homo sapiens
  misc_RNA (1)...(19): siRNA sense strand
ucacuguccuacaaaguuc

SEQ ID NO: 1581810 - RNA, 19 nt, Homo sapiens
  misc_RNA (1)...(19): siRNA sense strand
caugcuugcugauuauuuc

SEQ ID NO: 1581811 - RNA, 19 nt, Homo sapiens
  misc_RNA (1)...(19): siRNA sense strand
gaaugcaagcacugaaaug

SEQ ID NO: 1581812 - RNA, 19 nt, Homo sapiens
  misc_RNA (1)...(19): siRNA sense strand
gagcaaaugaugaagacau

SEQ ID NO: 1581813 - RNA, 19 nt, Homo sapiens
  misc_RNA (1)...(19): siRNA sense strand
acagagaaucgcuagcaua

SEQ ID NO: 1581814 - RNA, 19 nt, Homo sapiens
  misc_RNA (1)...(19): siRNA sense strand
ucagaauauugcucaccua

SEQ ID NO: 1581815 - RNA, 19 nt, Homo sapiens
  misc_RNA (1)...(19): siRNA sense strand
gauguugagcuacagagaa

SEQ ID NO: 1581816 - RNA, 19 nt, Homo sapiens
  misc_RNA (1)...(19): siRNA sense strand
guugggaagucuugcuaug

SEQ ID NO: 1581817 - RNA, 19 nt, Homo sapiens
  misc_RNA (1)...(19): siRNA sense strand
gaaacaacaagcagaaagc

SEQ ID NO: 1581818 - RNA, 19 nt, Homo sapiens
  misc_RNA (1)...(19): siRNA sense strand
gcagugguguugggaaguc

SEQ ID NO: 1581819 - RNA, 19 nt, Homo sapiens
  misc_RNA (1)...(19): siRNA sense strand
caauucggacagaugauaa

SEQ ID NO: 1581820 - RNA, 19 nt, Homo sapiens
  misc_RNA (1)...(19): siRNA sense strand
uaaagggccagaucaucaa

SEQ ID NO: 1581821 - RNA, 19 nt, Homo sapiens
  misc_RNA (1)...(19): siRNA sense strand
cauauuaucccugccuuau

SEQ ID NO: 1581822 - RNA, 19 nt, Homo sapiens
  misc_RNA (1)...(19): siRNA sense strand
gaaucgcuagcauaacuga

SEQ ID NO: 1581823 - RNA, 19 nt, Homo sapiens
  misc_RNA (1)...(19): siRNA sense strand
gguugauggagaauuguua

SEQ ID NO: 1581824 - RNA, 19 nt, Homo sapiens
  misc_RNA (1)...(19): siRNA sense strand
gcagucgccacuauguuga

SEQ ID NO: 1581825 - RNA, 19 nt, Homo sapiens
  misc_RNA (1)...(19): siRNA sense strand
ggcuugaucaugauuuaaa

SEQ ID NO: 1581826 - RNA, 19 nt, Homo sapiens
  misc_RNA (1)...(19): siRNA sense strand
gcucuaugccucucuugga

SEQ ID NO: 1581827 - RNA, 19 nt, Homo sapiens
  misc_RNA (1)...(19): siRNA sense strand
ggagcaauucggacagaug

SEQ ID NO: 1581828 - RNA, 19 nt, Homo sapiens
  misc_RNA (1)...(19): siRNA sense strand
caagcucuaugccucucuu

SEQ ID NO: 1581829 - RNA, 19 nt, Homo sapiens
  misc_RNA (1)...(19): siRNA sense strand
guuccaagauuguuguacu

SEQ ID NO: 1581830 - RNA, 19 nt, Homo sapiens
  misc_RNA (1)...(19): siRNA sense strand
acagagggauaagccuauu

SEQ ID NO: 1581831 - RNA, 19 nt, Homo sapiens
  misc_RNA (1)...(19): siRNA sense strand
ccccagaccugaaguuuau

SEQ ID NO: 1581832 - RNA, 19 nt, Homo sapiens
  misc_RNA (1)...(19): siRNA sense strand
ccgccaggcugcauucaag

SEQ ID NO: 1581833 - RNA, 19 nt, Homo sapiens
  misc_RNA (1)...(19): siRNA sense strand
aaccagauguugagcuaca

SEQ ID NO: 1581834 - RNA, 19 nt, Homo sapiens
  misc_RNA (1)...(19): siRNA sense strand
acggugcaguucagaauau

SEQ ID NO: 1581835 - RNA, 19 nt, Homo sapiens
  misc_RNA (1)...(19): siRNA sense strand
ccacggugcaguucagaau

SEQ ID NO: 1581836 - RNA, 19 nt, Homo sapiens
  misc_RNA (1)...(19): siRNA sense strand
uaaccacggugcaguucag

SEQ ID NO: 1581837 - RNA, 19 nt, Homo sapiens
  misc_RNA (1)...(19): siRNA sense strand
uacagaugccacagugaua

SEQ ID NO: 1581838 - RNA, 19 nt, Homo sapiens
  misc_RNA (1)...(19): siRNA sense strand
augaagacauccggaagaa

SEQ ID NO: 1581839 - RNA, 19 nt, Homo sapiens
  misc_RNA (1)...(19): siRNA sense strand
caacaagcagaaagccaau

SEQ ID NO: 1581840 - RNA, 19 nt, Homo sapiens
  misc_RNA (1)...(19): siRNA sense strand
uuugguugauggagaauug

SEQ ID NO: 1581841 - RNA, 19 nt, Homo sapiens
  misc_RNA (1)...(19): siRNA sense strand
cgaaugcaagcacugaaau

SEQ ID NO: 1581842 - RNA, 19 nt, Homo sapiens
  misc_RNA (1)...(19): siRNA sense strand
ccauauuaucccugccuua

SEQ ID NO: 1581843 - RNA, 19 nt, Homo sapiens
  misc_RNA (1)...(19): siRNA sense strand
ucaaguaucccagcucagu

SEQ ID NO: 1581844 - RNA, 19 nt, Homo sapiens
  misc_RNA (1)...(19): siRNA sense strand
gcugauuauuucaaguauc

SEQ ID NO: 1581845 - RNA, 19 nt, Homo sapiens
  misc_RNA (1)...(19): siRNA sense strand
agagggauaagccuauuga

SEQ ID NO: 1581846 - RNA, 19 nt, Homo sapiens
  misc_RNA (1)...(19): siRNA sense strand
uauguugacaggcuauuug

SEQ ID NO: 1581847 - RNA, 19 nt, Homo sapiens
  misc_RNA (1)...(19): siRNA sense strand
aagcagaaagccaaucuca

SEQ ID NO: 1581848 - RNA, 19 nt, Homo sapiens
  misc_RNA (1)...(19): siRNA sense strand
gcuauacccaggaguacau

SEQ ID NO: 1581849 - RNA, 19 nt, Homo sapiens
  misc_RNA (1)...(19): siRNA sense strand
ugccaugcuugcugauuau

SEQ ID NO: 1581850 - RNA, 19 nt, Homo sapiens
  misc_RNA (1)...(19): siRNA sense strand
ucgaugacccugguaaaug

SEQ ID NO: 1581851 - RNA, 19 nt, Homo sapiens
  misc_RNA (1)...(19): siRNA sense strand
ugaaaacaaugucaagucu

SEQ ID NO: 1581852 - RNA, 19 nt, Homo sapiens
  misc_RNA (1)...(19): siRNA sense strand
uaaaaggcuugaucaugau

SEQ ID NO: 1581853 - RNA, 19 nt, Homo sapiens
  misc_RNA (1)...(19): siRNA sense strand
gagauuacuagaggagaga

SEQ ID NO: 1581854 - RNA, 19 nt, Homo sapiens
  misc_RNA (1)...(19): siRNA sense strand
gugcaguaaggagagauua

SEQ ID NO: 1581855 - RNA, 19 nt, Homo sapiens
  misc_RNA (1)...(19): siRNA sense strand
guaaauguuuugguugaug

SEQ ID NO: 1581856 - RNA, 19 nt, Homo sapiens
  misc_RNA (1)...(19): siRNA sense strand
gcuguaaagggccagauca

SEQ ID NO: 1581857 - RNA, 19 nt, Homo sapiens
  misc_RNA (1)...(19): siRNA sense strand
caccucauggcacugcuua

SEQ ID NO: 1581858 - RNA, 19 nt, Homo sapiens
  misc_RNA (1)...(19): siRNA sense strand
ccagaccugaaguuuauug

SEQ ID NO: 1581859 - RNA, 19 nt, Homo sapiens
  misc_RNA (1)...(19): siRNA sense strand
ucgcuagcauaacugauca

SEQ ID NO: 1581860 - RNA, 19 nt, Homo sapiens
  misc_RNA (1)...(19): siRNA sense strand
ugaaugugcagugguguug

SEQ ID NO: 1581861 - RNA, 19 nt, Homo sapiens
  misc_RNA (1)...(19): siRNA sense strand
ccaugcuugcugauuauuu

SEQ ID NO: 1581862 - RNA, 19 nt, Homo sapiens
  misc_RNA (1)...(19): siRNA sense strand
cuacagagaaucgcuagca

SEQ ID NO: 1581863 - RNA, 19 nt, Homo sapiens
  misc_RNA (1)...(19): siRNA sense strand
guaucgaugacccugguaa

SEQ ID NO: 1581864 - RNA, 19 nt, Homo sapiens
  misc_RNA (1)...(19): siRNA sense strand
gcuagcagucgccacuaug

SEQ ID NO: 1581865 - RNA, 19 nt, Homo sapiens
  misc_RNA (1)...(19): siRNA sense strand
agaauuguuaccacagauu

SEQ ID NO: 1581866 - RNA, 19 nt, Homo sapiens
  misc_RNA (1)...(19): siRNA sense strand
ucgaaugcaagcacugaaa

SEQ ID NO: 1581867 - RNA, 19 nt, Homo sapiens
  misc_RNA (1)...(19): siRNA sense strand
ggagcuguuccaagauugu

SEQ ID NO: 1581868 - RNA, 19 nt, Homo sapiens
  misc_RNA (1)...(19): siRNA sense strand
uaucgaugacccugguaaa

SEQ ID NO: 1581869 - RNA, 19 nt, Homo sapiens
  misc_RNA (1)...(19): siRNA sense strand
gaacuccgccaggcugcau

SEQ ID NO: 1581870 - RNA, 19 nt, Homo sapiens
  misc_RNA (1)...(19): siRNA sense strand
agggauaagccuauugaga

SEQ ID NO: 1581871 - RNA, 19 nt, Homo sapiens
  misc_RNA (1)...(19): siRNA sense strand
gagcacaaaugguguuagg

SEQ ID NO: 1581872 - RNA, 19 nt, Homo sapiens
  misc_RNA (1)...(19): siRNA sense strand
gaacagcucaggcccuucu

SEQ ID NO: 1581873 - RNA, 19 nt, Homo sapiens
  misc_RNA (1)...(19): siRNA sense strand
gcucaggcccuucucacaa

SEQ ID NO: 1581874 - RNA, 19 nt, Homo sapiens
  misc_RNA (1)...(19): siRNA sense strand
ggaagcggcagcaccaucu

SEQ ID NO: 1581875 - RNA, 19 nt, Homo sapiens
  misc_RNA (1)...(19): siRNA sense strand
guggacagcuucccuuucc

SEQ ID NO: 1581876 - RNA, 19 nt, Homo sapiens
  misc_RNA (1)...(19): siRNA sense strand
gaaaguagaugucauuaug

SEQ ID NO: 1581877 - RNA, 19 nt, Homo sapiens
  misc_RNA (1)...(19): siRNA sense strand
ccacaucaauggacuguua

SEQ ID NO: 1581878 - RNA, 19 nt, Homo sapiens
  misc_RNA (1)...(19): siRNA sense strand
caaagcaucuuaaaucaga

SEQ ID NO: 1581879 - RNA, 19 nt, Homo sapiens
  misc_RNA (1)...(19): siRNA sense strand
gaaaagaaaugucagaaga

SEQ ID NO: 1581880 - RNA, 19 nt, Homo sapiens
  misc_RNA (1)...(19): siRNA sense strand
uuaagagccuugccaauaa

SEQ ID NO: 1581881 - RNA, 19 nt, Homo sapiens
  misc_RNA (1)...(19): siRNA sense strand
ggaagauggugugaaagua

SEQ ID NO: 1581882 - RNA, 19 nt, Homo sapiens
  misc_RNA (1)...(19): siRNA sense strand
caacacauaucaacuuaag

SEQ ID NO: 1581883 - RNA, 19 nt, Homo sapiens
  misc_RNA (1)...(19): siRNA sense strand
uaaacgaguuguuccacua

SEQ ID NO: 1581884 - RNA, 19 nt, Homo sapiens
  misc_RNA (1)...(19): siRNA sense strand
ggacaaagcaacacauauc

SEQ ID NO: 1581885 - RNA, 19 nt, Homo sapiens
  misc_RNA (1)...(19): siRNA sense strand
agaggaagauggugugaaa

SEQ ID NO: 1581886 - RNA, 19 nt, Homo sapiens
  misc_RNA (1)...(19): siRNA sense strand
gccaauaaaugccucauca

SEQ ID NO: 1581887 - RNA, 19 nt, Homo sapiens
  misc_RNA (1)...(19): siRNA sense strand
aagcuucccuucaguauga

SEQ ID NO: 1581888 - RNA, 19 nt, Homo sapiens
  misc_RNA (1)...(19): siRNA sense strand
aaucaacccucccuuaaug

SEQ ID NO: 1581889 - RNA, 19 nt, Homo sapiens
  misc_RNA (1)...(19): siRNA sense strand
uaagagccuugccaauaaa

SEQ ID NO: 1581890 - RNA, 19 nt, Homo sapiens
  misc_RNA (1)...(19): siRNA sense strand
cauaucaacuuaaggacuu

SEQ ID NO: 1581891 - RNA, 19 nt, Homo sapiens
  misc_RNA (1)...(19): siRNA sense strand
ccaagcaaguugugguaaa

SEQ ID NO: 1581892 - RNA, 19 nt, Homo sapiens
  misc_RNA (1)...(19): siRNA sense strand
ggaguuaauuguccaagca

SEQ ID NO: 1581893 - RNA, 19 nt, Homo sapiens
  misc_RNA (1)...(19): siRNA sense strand
ccucaucaguucaaguuaa

SEQ ID NO: 1581894 - RNA, 19 nt, Homo sapiens
  misc_RNA (1)...(19): siRNA sense strand
caauaacaauuucggacaa

SEQ ID NO: 1581895 - RNA, 19 nt, Homo sapiens
  misc_RNA (1)...(19): siRNA sense strand
auaaaugccucaucaguuc

SEQ ID NO: 1581896 - RNA, 19 nt, Homo sapiens
  misc_RNA (1)...(19): siRNA sense strand
aauagcaucuggagucauu

SEQ ID NO: 1581897 - RNA, 19 nt, Homo sapiens
  misc_RNA (1)...(19): siRNA sense strand
gaacaaagggcaguaagag

SEQ ID NO: 1581898 - RNA, 19 nt, Homo sapiens
  misc_RNA (1)...(19): siRNA sense strand
gaugacauacgccggauuu

SEQ ID NO: 1581899 - RNA, 19 nt, Homo sapiens
  misc_RNA (1)...(19): siRNA sense strand
ccacuaaacgucaacagaa

SEQ ID NO: 1581900 - RNA, 19 nt, Homo sapiens
  misc_RNA (1)...(19): siRNA sense strand
gcaagcaaccacaggugua

SEQ ID NO: 1581901 - RNA, 19 nt, Homo sapiens
  misc_RNA (1)...(19): siRNA sense strand
gaagauggugugaaaguag

SEQ ID NO: 1581902 - RNA, 19 nt, Homo sapiens
  misc_RNA (1)...(19): siRNA sense strand
ccaagaaaguacgacauug

SEQ ID NO: 1581903 - RNA, 19 nt, Homo sapiens
  misc_RNA (1)...(19): siRNA sense strand
gaaaauccaaagcaucuua

SEQ ID NO: 1581904 - RNA, 19 nt, Homo sapiens
  misc_RNA (1)...(19): siRNA sense strand
gacauacgccggauuuguu

SEQ ID NO: 1581905 - RNA, 19 nt, Homo sapiens
  misc_RNA (1)...(19): siRNA sense strand
guucuauccuggcuccuuu

SEQ ID NO: 1581906 - RNA, 19 nt, Homo sapiens
  misc_RNA (1)...(19): siRNA sense strand
ucacaagggaucugaaaga

SEQ ID NO: 1581907 - RNA, 19 nt, Homo sapiens
  misc_RNA (1)...(19): siRNA sense strand
ggauauauggaaggaauuu

SEQ ID NO: 1581908 - RNA, 19 nt, Homo sapiens
  misc_RNA (1)...(19): siRNA sense strand
gggccaccuugauuaguaa

SEQ ID NO: 1581909 - RNA, 19 nt, Homo sapiens
  misc_RNA (1)...(19): siRNA sense strand
uuuaagagccuugccaaua

SEQ ID NO: 1581910 - RNA, 19 nt, Homo sapiens
  misc_RNA (1)...(19): siRNA sense strand
uauaaaaccuggaauguuc

SEQ ID NO: 1581911 - RNA, 19 nt, Homo sapiens
  misc_RNA (1)...(19): siRNA sense strand
agcaacacauaucaacuua

SEQ ID NO: 1581912 - RNA, 19 nt, Homo sapiens
  misc_RNA (1)...(19): siRNA sense strand
ccauaggucuccugguuca

SEQ ID NO: 1581913 - RNA, 19 nt, Homo sapiens
  misc_RNA (1)...(19): siRNA sense strand
cagacugacuccagaggaa

SEQ ID NO: 1581914 - RNA, 19 nt, Homo sapiens
  misc_RNA (1)...(19): siRNA sense strand
ucaauggacuguuaguuuu

SEQ ID NO: 1581915 - RNA, 19 nt, Homo sapiens
  misc_RNA (1)...(19): siRNA sense strand
ccgcaaaucaauaacaauu

SEQ ID NO: 1581916 - RNA, 19 nt, Homo sapiens
  misc_RNA (1)...(19): siRNA sense strand
cgugguaucucauuggaau

SEQ ID NO: 1581917 - RNA, 19 nt, Homo sapiens
  misc_RNA (1)...(19): siRNA sense strand
guacgacauugcuguugug

SEQ ID NO: 1581918 - RNA, 19 nt, Homo sapiens
  misc_RNA (1)...(19): siRNA sense strand
gcaagcuucccuucaguau

SEQ ID NO: 1581919 - RNA, 19 nt, Homo sapiens
  misc_RNA (1)...(19): siRNA sense strand
acacauaucaacuuaagga

SEQ ID NO: 1581920 - RNA, 19 nt, Homo sapiens
  misc_RNA (1)...(19): siRNA sense strand
gagagacgaccgaaaauuu

SEQ ID NO: 1581921 - RNA, 19 nt, Homo sapiens
  misc_RNA (1)...(19): siRNA sense strand
aaauuugacuguccacauc

SEQ ID NO: 1581922 - RNA, 19 nt, Homo sapiens
  misc_RNA (1)...(19): siRNA sense strand
uccaaagcaucuuaaauca

SEQ ID NO: 1581923 - RNA, 19 nt, Homo sapiens
  misc_RNA (1)...(19): siRNA sense strand
gacaaagcaacacauauca

SEQ ID NO: 1581924 - RNA, 19 nt, Homo sapiens
  misc_RNA (1)...(19): siRNA sense strand
guaucucauuggaauugua

SEQ ID NO: 1581925 - RNA, 19 nt, Homo sapiens
  misc_RNA (1)...(19): siRNA sense strand
cugaagccauggaugauug

SEQ ID NO: 1581926 - RNA, 19 nt, Homo sapiens
  misc_RNA (1)...(19): siRNA sense strand
caauaaaugccucaucagu

SEQ ID NO: 1581927 - RNA, 19 nt, Homo sapiens
  misc_RNA (1)...(19): siRNA sense strand
ccggauauauggaaggaau

SEQ ID NO: 1581928 - RNA, 19 nt, Homo sapiens
  misc_RNA (1)...(19): siRNA sense strand
ccacaucacaggauuugga

SEQ ID NO: 1581929 - RNA, 19 nt, Homo sapiens
  misc_RNA (1)...(19): siRNA sense strand
gucagaagauuuauuaucc

SEQ ID NO: 1581930 - RNA, 19 nt, Homo sapiens
  misc_RNA (1)...(19): siRNA sense strand
uagauccgcaaaucaauaa

SEQ ID NO: 1581931 - RNA, 19 nt, Homo sapiens
  misc_RNA (1)...(19): siRNA sense strand
gagugaaaaucauaaguga

SEQ ID NO: 1581932 - RNA, 19 nt, Homo sapiens
  misc_RNA (1)...(19): siRNA sense strand
caagaaccaaguagucaga

SEQ ID NO: 1581933 - RNA, 19 nt, Homo sapiens
  misc_RNA (1)...(19): siRNA sense strand
gcaacacauaucaacuuaa

SEQ ID NO: 1581934 - RNA, 19 nt, Homo sapiens
  misc_RNA (1)...(19): siRNA sense strand
aauaaaugccucaucaguu

SEQ ID NO: 1581935 - RNA, 19 nt, Homo sapiens
  misc_RNA (1)...(19): siRNA sense strand
caaagggcaguaagagaga

SEQ ID NO: 1581936 - RNA, 19 nt, Homo sapiens
  misc_RNA (1)...(19): siRNA sense strand
gcucugcaccaagaaagua

SEQ ID NO: 1581937 - RNA, 19 nt, Homo sapiens
  misc_RNA (1)...(19): siRNA sense strand
uauccuggcuccuuuaaaa

SEQ ID NO: 1581938 - RNA, 19 nt, Homo sapiens
  misc_RNA (1)...(19): siRNA sense strand
cacuaaacgucaacagaau

SEQ ID NO: 1581939 - RNA, 19 nt, Homo sapiens
  misc_RNA (1)...(19): siRNA sense strand
ccacagguguauggcaaug

SEQ ID NO: 1581940 - RNA, 19 nt, Homo sapiens
  misc_RNA (1)...(19): siRNA sense strand
caaagcaacacauaucaac

SEQ ID NO: 1581941 - RNA, 19 nt, Homo sapiens
  misc_RNA (1)...(19): siRNA sense strand
cugguucacuuccuaguau

SEQ ID NO: 1581942 - RNA, 19 nt, Homo sapiens
  misc_RNA (1)...(19): siRNA sense strand
uuugguggaugagauauuu

SEQ ID NO: 1581943 - RNA, 19 nt, Homo sapiens
  misc_RNA (1)...(19): siRNA sense strand
gguguauggcaaugauaua

SEQ ID NO: 1581944 - RNA, 19 nt, Homo sapiens
  misc_RNA (1)...(19): siRNA sense strand
uuagauccgcaaaucaaua

SEQ ID NO: 1581945 - RNA, 19 nt, Homo sapiens
  misc_RNA (1)...(19): siRNA sense strand
aguaacacauggcuuguca

SEQ ID NO: 1581946 - RNA, 19 nt, Homo sapiens
  misc_RNA (1)...(19): siRNA sense strand
aaacgaguuguuccacuaa

SEQ ID NO: 1581947 - RNA, 19 nt, Homo sapiens
  misc_RNA (1)...(19): siRNA sense strand
aaucugaagccauggauga

SEQ ID NO: 1581948 - RNA, 19 nt, Homo sapiens
  misc_RNA (1)...(19): siRNA sense strand
ucauuaugguguuccaguu

SEQ ID NO: 1581949 - RNA, 19 nt, Homo sapiens
  misc_RNA (1)...(19): siRNA sense strand
gaagucagagugaaaauca

SEQ ID NO: 1581950 - RNA, 19 nt, Homo sapiens
  misc_RNA (1)...(19): siRNA sense strand
caacccucccuuaaugaaa

SEQ ID NO: 1581951 - RNA, 19 nt, Homo sapiens
  misc_RNA (1)...(19): siRNA sense strand
caagcaaguugugguaaac

SEQ ID NO: 1581952 - RNA, 19 nt, Homo sapiens
  misc_RNA (1)...(19): siRNA sense strand
aagauggugugaaaguaga

SEQ ID NO: 1581953 - RNA, 19 nt, Homo sapiens
  misc_RNA (1)...(19): siRNA sense strand
aagcaacacauaucaacuu

SEQ ID NO: 1581954 - RNA, 19 nt, Homo sapiens
  misc_RNA (1)...(19): siRNA sense strand
caagaaaguacgacauugc

SEQ ID NO: 1581955 - RNA, 19 nt, Homo sapiens
  misc_RNA (1)...(19): siRNA sense strand
ugaacaaagggcaguaaga

SEQ ID NO: 1581956 - RNA, 19 nt, Homo sapiens
  misc_RNA (1)...(19): siRNA sense strand
gugaaaguagaugucauua

SEQ ID NO: 1581957 - RNA, 19 nt, Homo sapiens
  misc_RNA (1)...(19): siRNA sense strand
aaauuugguggaugagaua

SEQ ID NO: 1581958 - RNA, 19 nt, Homo sapiens
  misc_RNA (1)...(19): siRNA sense strand
gaaaucugaagccauggau

SEQ ID NO: 1581959 - RNA, 19 nt, Homo sapiens
  misc_RNA (1)...(19): siRNA sense strand
aauguucugugccggauau

SEQ ID NO: 1581960 - RNA, 19 nt, Homo sapiens
  misc_RNA (1)...(19): siRNA sense strand
uaagugaugaugucugcaa

SEQ ID NO: 1581961 - RNA, 19 nt, Homo sapiens
  misc_RNA (1)...(19): siRNA sense strand
uuggagcacuuuacuaugg

SEQ ID NO: 1581962 - RNA, 19 nt, Homo sapiens
  misc_RNA (1)...(19): siRNA sense strand
caaauuugacuguccacau

SEQ ID NO: 1581963 - RNA, 19 nt, Homo sapiens
  misc_RNA (1)...(19): siRNA sense strand
ggauuuggcacccgaagca

SEQ ID NO: 1581964 - RNA, 19 nt, Homo sapiens
  misc_RNA (1)...(19): siRNA sense strand
guaucggacaguaggauuu

SEQ ID NO: 1581965 - RNA, 19 nt, Homo sapiens
  misc_RNA (1)...(19): siRNA sense strand
ggcaagcuucccuucagua

SEQ ID NO: 1581966 - RNA, 19 nt, Homo sapiens
  misc_RNA (1)...(19): siRNA sense strand
agaauagcaucuggaguca

SEQ ID NO: 1581967 - RNA, 19 nt, Homo sapiens
  misc_RNA (1)...(19): siRNA sense strand
gguggaugagauauuuaua

SEQ ID NO: 1581968 - RNA, 19 nt, Homo sapiens
  misc_RNA (1)...(19): siRNA sense strand
guucugugccggauauaug

SEQ ID NO: 1581969 - RNA, 19 nt, Homo sapiens
  misc_RNA (1)...(19): siRNA sense strand
gugaugaugucugcaagca

SEQ ID NO: 1581970 - RNA, 19 nt, Homo sapiens
  misc_RNA (1)...(19): siRNA sense strand
gauuuggagcacuuuacua

SEQ ID NO: 1581971 - RNA, 19 nt, Homo sapiens
  misc_RNA (1)...(19): siRNA sense strand
cacaggauuuggagcacuu

SEQ ID NO: 1581972 - RNA, 19 nt, Homo sapiens
  misc_RNA (1)...(19): siRNA sense strand
ugacauacgccggauuugu

SEQ ID NO: 1581973 - RNA, 19 nt, Homo sapiens
  misc_RNA (1)...(19): siRNA sense strand
ggggccaccuugauuagua

SEQ ID NO: 1581974 - RNA, 19 nt, Homo sapiens
  misc_RNA (1)...(19): siRNA sense strand
acuaaacgucaacagaaua

SEQ ID NO: 1581975 - RNA, 19 nt, Homo sapiens
  misc_RNA (1)...(19): siRNA sense strand
ugauugccguucucauugu

SEQ ID NO: 1581976 - RNA, 19 nt, Homo sapiens
  misc_RNA (1)...(19): siRNA sense strand
cauaaugggugugagauuu

SEQ ID NO: 1581977 - RNA, 19 nt, Homo sapiens
  misc_RNA (1)...(19): siRNA sense strand
gaggugguguuccgucuuu

SEQ ID NO: 1581978 - RNA, 19 nt, Homo sapiens
  misc_RNA (1)...(19): siRNA sense strand
aauaaugccugcugguuug

SEQ ID NO: 1581979 - RNA, 19 nt, Homo sapiens
  misc_RNA (1)...(19): siRNA sense strand
gguguuccgucuuugauug

SEQ ID NO: 1581980 - RNA, 19 nt, Homo sapiens
  misc_RNA (1)...(19): siRNA sense strand
caaacgagauguaaaagug

SEQ ID NO: 1581981 - RNA, 19 nt, Homo sapiens
  misc_RNA (1)...(19): siRNA sense strand
gauuuaagagguccaagaa

SEQ ID NO: 1581982 - RNA, 19 nt, Homo sapiens
  misc_RNA (1)...(19): siRNA sense strand
uaaugggugugagauuuaa

SEQ ID NO: 1581983 - RNA, 19 nt, Homo sapiens
  misc_RNA (1)...(19): siRNA sense strand
gagcuuaccgugucuccaa

SEQ ID NO: 1581984 - RNA, 19 nt, Homo sapiens
  misc_RNA (1)...(19): siRNA sense strand
aaauaaugccugcugguuu

SEQ ID NO: 1581985 - RNA, 19 nt, Homo sapiens
  misc_RNA (1)...(19): siRNA sense strand
auaaugggugugagauuua

SEQ ID NO: 1581986 - RNA, 19 nt, Homo sapiens
  misc_RNA (1)...(19): siRNA sense strand
augcagcccucgugacauu

SEQ ID NO: 1581987 - RNA, 19 nt, Homo sapiens
  misc_RNA (1)...(19): siRNA sense strand
caaugacaaacgagaugua

SEQ ID NO: 1581988 - RNA, 19 nt, Homo sapiens
  misc_RNA (1)...(19): siRNA sense strand
cuuccuggcuaccauaaug

SEQ ID NO: 1581989 - RNA, 19 nt, Homo sapiens
  misc_RNA (1)...(19): siRNA sense strand
ugguuugguugcagguuua

SEQ ID NO: 1581990 - RNA, 19 nt, Homo sapiens
  misc_RNA (1)...(19): siRNA sense strand
uuuaagagguccaagaaaa

SEQ ID NO: 1581991 - RNA, 19 nt, Homo sapiens
  misc_RNA (1)...(19): siRNA sense strand
cgugacauuuggaagcauu

SEQ ID NO: 1581992 - RNA, 19 nt, Homo sapiens
  misc_RNA (1)...(19): siRNA sense strand
ugacaaacgagauguaaaa

SEQ ID NO: 1581993 - RNA, 19 nt, Homo sapiens
  misc_RNA (1)...(19): siRNA sense strand
gcagguuuaagccucauga

SEQ ID NO: 1581994 - RNA, 19 nt, Homo sapiens
  misc_RNA (1)...(19): siRNA sense strand
gcagcccucgugacauuug

SEQ ID NO: 1581995 - RNA, 19 nt, Homo sapiens
  misc_RNA (1)...(19): siRNA sense strand
uaagagguccaagaaaaua

SEQ ID NO: 1581996 - RNA, 19 nt, Homo sapiens
  misc_RNA (1)...(19): siRNA sense strand
augaugauccugagacuug

SEQ ID NO: 1581997 - RNA, 19 nt, Homo sapiens
  misc_RNA (1)...(19): siRNA sense strand
aaugacaaacgagauguaa

SEQ ID NO: 1581998 - RNA, 19 nt, Homo sapiens
  misc_RNA (1)...(19): siRNA sense strand
cugguuugguugcagguuu

SEQ ID NO: 1581999 - RNA, 19 nt, Homo sapiens
  misc_RNA (1)...(19): siRNA sense strand
ggugguguuccgucuuuga

SEQ ID NO: 1582000 - RNA, 19 nt, Homo sapiens
  misc_RNA (1)...(19): siRNA sense strand
cuuaccgugucuccaauga

SEQ ID NO: 1582001 - RNA, 19 nt, Homo sapiens
  misc_RNA (1)...(19): siRNA sense strand
gagaaacccuuuaaaugua

SEQ ID NO: 1582002 - RNA, 19 nt, Homo sapiens
  misc_RNA (1)...(19): siRNA sense strand
ggagagaaauccuacaaau

SEQ ID NO: 1582003 - RNA, 19 nt, Homo sapiens
  misc_RNA (1)...(19): siRNA sense strand
gaaaggaguuaauaaugga

SEQ ID NO: 1582004 - RNA, 19 nt, Homo sapiens
  misc_RNA (1)...(19): siRNA sense strand
gagagaaacccuuuaaaug

SEQ ID NO: 1582005 - RNA, 19 nt, Homo sapiens
  misc_RNA (1)...(19): siRNA sense strand
cuacaaaugugaagaaugu

SEQ ID NO: 1582006 - RNA, 19 nt, Homo sapiens
  misc_RNA (1)...(19): siRNA sense strand
cuacaaaugugaagaaugu

SEQ ID NO: 1582007 - RNA, 19 nt, Homo sapiens
  misc_RNA (1)...(19): siRNA sense strand
cuacaaaugugaagaaugu

SEQ ID NO: 1582008 - RNA, 19 nt, Homo sapiens
  misc_RNA (1)...(19): siRNA sense strand
gagaaacccuucacaugug

SEQ ID NO: 1582009 - RNA, 19 nt, Homo sapiens
  misc_RNA (1)...(19): siRNA sense strand
aaagagcccugcaauuuga

SEQ ID NO: 1582010 - RNA, 19 nt, Homo sapiens
  misc_RNA (1)...(19): siRNA sense strand
guacacaagcgaauucaua

SEQ ID NO: 1582011 - RNA, 19 nt, Homo sapiens
  misc_RNA (1)...(19): siRNA sense strand
gagagaaacccuacaaaug

SEQ ID NO: 1582012 - RNA, 19 nt, Homo sapiens
  misc_RNA (1)...(19): siRNA sense strand
gagagaaacccuacaaaug

SEQ ID NO: 1582013 - RNA, 19 nt, Homo sapiens
  misc_RNA (1)...(19): siRNA sense strand
gagagaaacccuacaaaug

SEQ ID NO: 1582014 - RNA, 19 nt, Homo sapiens
  misc_RNA (1)...(19): siRNA sense strand
gagagaaacccuacaaaug

SEQ ID NO: 1582015 - RNA, 19 nt, Homo sapiens
  misc_RNA (1)...(19): siRNA sense strand
gagagaaacccuacaaaug

SEQ ID NO: 1582016 - RNA, 19 nt, Homo sapiens
  misc_RNA (1)...(19): siRNA sense strand
gagagaaacccuacaaaug

SEQ ID NO: 1582017 - RNA, 19 nt, Homo sapiens
  misc_RNA (1)...(19): siRNA sense strand
ccacaaacuuauacugaaa

SEQ ID NO: 1582018 - RNA, 19 nt, Homo sapiens
  misc_RNA (1)...(19): siRNA sense strand
ggagagaaacccuuuaaau

SEQ ID NO: 1582019 - RNA, 19 nt, Homo sapiens
  misc_RNA (1)...(19): siRNA sense strand
ccacaacacugaaugaaca

SEQ ID NO: 1582020 - RNA, 19 nt, Homo sapiens
  misc_RNA (1)...(19): siRNA sense strand
uggcaaagcuuucauaugg

SEQ ID NO: 1582021 - RNA, 19 nt, Homo sapiens
  misc_RNA (1)...(19): siRNA sense strand
guauagagaugugauguug

SEQ ID NO: 1582022 - RNA, 19 nt, Homo sapiens
  misc_RNA (1)...(19): siRNA sense strand
ccacaagccugaaugaaca

SEQ ID NO: 1582023 - RNA, 19 nt, Homo sapiens
  misc_RNA (1)...(19): siRNA sense strand
gcagaaaggaguuaauaau

SEQ ID NO: 1582024 - RNA, 19 nt, Homo sapiens
  misc_RNA (1)...(19): siRNA sense strand
gagaaacccuacaaaugug

SEQ ID NO: 1582025 - RNA, 19 nt, Homo sapiens
  misc_RNA (1)...(19): siRNA sense strand
gagaaacccuacaaaugug

SEQ ID NO: 1582026 - RNA, 19 nt, Homo sapiens
  misc_RNA (1)...(19): siRNA sense strand
gagaaacccuacaaaugug

SEQ ID NO: 1582027 - RNA, 19 nt, Homo sapiens
  misc_RNA (1)...(19): siRNA sense strand
ccacaucacuuaguaaaca

SEQ ID NO: 1582028 - RNA, 19 nt, Homo sapiens
  misc_RNA (1)...(19): siRNA sense strand
cgagaaacccuacaaaugu

SEQ ID NO: 1582029 - RNA, 19 nt, Homo sapiens
  misc_RNA (1)...(19): siRNA sense strand
ccacagcccugaaugaaca

SEQ ID NO: 1582030 - RNA, 19 nt, Homo sapiens
  misc_RNA (1)...(19): siRNA sense strand
gagagaaacccuacacaug

SEQ ID NO: 1582031 - RNA, 19 nt, Homo sapiens
  misc_RNA (1)...(19): siRNA sense strand
gagagaaacccuucacaug

SEQ ID NO: 1582032 - RNA, 19 nt, Homo sapiens
  misc_RNA (1)...(19): siRNA sense strand
gagaaacccuacacaugug

SEQ ID NO: 1582033 - RNA, 19 nt, Homo sapiens
  misc_RNA (1)...(19): siRNA sense strand
gagagaaacccuacacaug

SEQ ID NO: 1582034 - RNA, 19 nt, Homo sapiens
  misc_RNA (1)...(19): siRNA sense strand
gagccugaaugaacauaaa

SEQ ID NO: 1582035 - RNA, 19 nt, Homo sapiens
  misc_RNA (1)...(19): siRNA sense strand
gagaaacccuacacaugug

SEQ ID NO: 1582036 - RNA, 19 nt, Homo sapiens
  misc_RNA (1)...(19): siRNA sense strand
gagaugugauguuggagaa

SEQ ID NO: 1582037 - RNA, 19 nt, Homo sapiens
  misc_RNA (1)...(19): siRNA sense strand
caacauacaggaauucaug

SEQ ID NO: 1582038 - RNA, 19 nt, Homo sapiens
  misc_RNA (1)...(19): siRNA sense strand
ggagagaaacccuacaaau

SEQ ID NO: 1582039 - RNA, 19 nt, Homo sapiens
  misc_RNA (1)...(19): siRNA sense strand
ggagagaaacccuacaaau

SEQ ID NO: 1582040 - RNA, 19 nt, Homo sapiens
  misc_RNA (1)...(19): siRNA sense strand
gcgagaaacccuacaaaug

SEQ ID NO: 1582041 - RNA, 19 nt, Homo sapiens
  misc_RNA (1)...(19): siRNA sense strand
ccucaucccuuaauaaaca

SEQ ID NO: 1582042 - RNA, 19 nt, Homo sapiens
  misc_RNA (1)...(19): siRNA sense strand
ggagagaaacccuacaaau

SEQ ID NO: 1582043 - RNA, 19 nt, Homo sapiens
  misc_RNA (1)...(19): siRNA sense strand
ggagagaaacccuacaaau

SEQ ID NO: 1582044 - RNA, 19 nt, Homo sapiens
  misc_RNA (1)...(19): siRNA sense strand
ggagagaaacccuacaaau

SEQ ID NO: 1582045 - RNA, 19 nt, Homo sapiens
  misc_RNA (1)...(19): siRNA sense strand
ggagagaaacccuacaaau

SEQ ID NO: 1582046 - RNA, 19 nt, Homo sapiens
  misc_RNA (1)...(19): siRNA sense strand
aaccaauccucaagucuua

SEQ ID NO: 1582047 - RNA, 19 nt, Homo sapiens
  misc_RNA (1)...(19): siRNA sense strand
aaccaauccucaacucuua

SEQ ID NO: 1582048 - RNA, 19 nt, Homo sapiens
  misc_RNA (1)...(19): siRNA sense strand
aaucggcccucaacccuua

SEQ ID NO: 1582049 - RNA, 19 nt, Homo sapiens
  misc_RNA (1)...(19): siRNA sense strand
gagaaacccuacaaaugca

SEQ ID NO: 1582050 - RNA, 19 nt, Homo sapiens
  misc_RNA (1)...(19): siRNA sense strand
ccucaucccuuacuaaaca

SEQ ID NO: 1582051 - RNA, 19 nt, Homo sapiens
  misc_RNA (1)...(19): siRNA sense strand
ccucaacccuuacuaaaca

SEQ ID NO: 1582052 - RNA, 19 nt, Homo sapiens
  misc_RNA (1)...(19): siRNA sense strand
uaaaagagcccugcaauuu

SEQ ID NO: 1582053 - RNA, 19 nt, Homo sapiens
  misc_RNA (1)...(19): siRNA sense strand
gagaaauccuacaaaugug

SEQ ID NO: 1582054 - RNA, 19 nt, Homo sapiens
  misc_RNA (1)...(19): siRNA sense strand
agagaaauccuacaaaugu

SEQ ID NO: 1582055 - RNA, 19 nt, Homo sapiens
  misc_RNA (1)...(19): siRNA sense strand
ccucaacucuuauauuaca

SEQ ID NO: 1582056 - RNA, 19 nt, Homo sapiens
  misc_RNA (1)...(19): siRNA sense strand
ccucaagucuuauuauaca

SEQ ID NO: 1582057 - RNA, 19 nt, Homo sapiens
  misc_RNA (1)...(19): siRNA sense strand
agagaaacccuuuaaaugu

SEQ ID NO: 1582058 - RNA, 19 nt, Homo sapiens
  misc_RNA (1)...(19): siRNA sense strand
agaaaggaguuaauaaugg

SEQ ID NO: 1582059 - RNA, 19 nt, Homo sapiens
  misc_RNA (1)...(19): siRNA sense strand
gcaauuugaagauacauga

SEQ ID NO: 1582060 - RNA, 19 nt, Homo sapiens
  misc_RNA (1)...(19): siRNA sense strand
gaagauucauuccacaaac

SEQ ID NO: 1582061 - RNA, 19 nt, Homo sapiens
  misc_RNA (1)...(19): siRNA sense strand
gcuguaaacgugugaauga

SEQ ID NO: 1582062 - RNA, 19 nt, Homo sapiens
  misc_RNA (1)...(19): siRNA sense strand
ccucacaccuugcuaaaca

SEQ ID NO: 1582063 - RNA, 19 nt, Homo sapiens
  misc_RNA (1)...(19): siRNA sense strand
gagagaaauccuacaaaug

SEQ ID NO: 1582064 - RNA, 19 nt, Homo sapiens
  misc_RNA (1)...(19): siRNA sense strand
agagaaacccuacaaaugu

SEQ ID NO: 1582065 - RNA, 19 nt, Homo sapiens
  misc_RNA (1)...(19): siRNA sense strand
uaaagaauguggcaaagcu

SEQ ID NO: 1582066 - RNA, 19 nt, Homo sapiens
  misc_RNA (1)...(19): siRNA sense strand
agagaaacccuacaaaugu

SEQ ID NO: 1582067 - RNA, 19 nt, Homo sapiens
  misc_RNA (1)...(19): siRNA sense strand
agagaaacccuacaaaugu

SEQ ID NO: 1582068 - RNA, 19 nt, Homo sapiens
  misc_RNA (1)...(19): siRNA sense strand
agagaaacccuacaaaugu

SEQ ID NO: 1582069 - RNA, 19 nt, Homo sapiens
  misc_RNA (1)...(19): siRNA sense strand
agagaaacccuacaaaugu

SEQ ID NO: 1582070 - RNA, 19 nt, Homo sapiens
  misc_RNA (1)...(19): siRNA sense strand
gaauuuguauagagaugug

SEQ ID NO: 1582071 - RNA, 19 nt, Homo sapiens
  misc_RNA (1)...(19): siRNA sense strand
cagcagaauuuguauagag

SEQ ID NO: 1582072 - RNA, 19 nt, Homo sapiens
  misc_RNA (1)...(19): siRNA sense strand
ccucaggccuuauuauaca

SEQ ID NO: 1582073 - RNA, 19 nt, Homo sapiens
  misc_RNA (1)...(19): siRNA sense strand
acaccuaacucaacauaca

SEQ ID NO: 1582074 - RNA, 19 nt, Homo sapiens
  misc_RNA (1)...(19): siRNA sense strand
cagaaaggaguuaauaaug

SEQ ID NO: 1582075 - RNA, 19 nt, Homo sapiens
  misc_RNA (1)...(19): siRNA sense strand
ggauguggccauagaauuc

SEQ ID NO: 1582076 - RNA, 19 nt, Homo sapiens
  misc_RNA (1)...(19): siRNA sense strand
gcccugcaauuugaagaua

SEQ ID NO: 1582077 - RNA, 19 nt, Homo sapiens
  misc_RNA (1)...(19): siRNA sense strand
gugcagaaaggaguuaaua

SEQ ID NO: 1582078 - RNA, 19 nt, Homo sapiens
  misc_RNA (1)...(19): siRNA sense strand
ucagggauguggccauaga

SEQ ID NO: 1582079 - RNA, 19 nt, Homo sapiens
  misc_RNA (1)...(19): siRNA sense strand
cauaagagaauucauacug

SEQ ID NO: 1582080 - RNA, 19 nt, Homo sapiens
  misc_RNA (1)...(19): siRNA sense strand
cauaagagaauucauacug

SEQ ID NO: 1582081 - RNA, 19 nt, Homo sapiens
  misc_RNA (1)...(19): siRNA sense strand
cgaagaauguggcaaagcu

SEQ ID NO: 1582082 - RNA, 19 nt, Homo sapiens
  misc_RNA (1)...(19): siRNA sense strand
cauaagagaauucauacug

SEQ ID NO: 1582083 - RNA, 19 nt, Homo sapiens
  misc_RNA (1)...(19): siRNA sense strand
cauaagagaauucauacug

SEQ ID NO: 1582084 - RNA, 19 nt, Homo sapiens
  misc_RNA (1)...(19): siRNA sense strand
ucaccugucuggagcaaau

SEQ ID NO: 1582085 - RNA, 19 nt, Homo sapiens
  misc_RNA (1)...(19): siRNA sense strand
cuacaaaugcaaagaaugu

SEQ ID NO: 1582086 - RNA, 19 nt, Homo sapiens
  misc_RNA (1)...(19): siRNA sense strand
acaggagcauucauucuga

SEQ ID NO: 1582087 - RNA, 19 nt, Homo sapiens
  misc_RNA (1)...(19): siRNA sense strand
ccgcaagccugaaugaaca

SEQ ID NO: 1582088 - RNA, 19 nt, Homo sapiens
  misc_RNA (1)...(19): siRNA sense strand
acaggagcauucauucuga

SEQ ID NO: 1582089 - RNA, 19 nt, Homo sapiens
  misc_RNA (1)...(19): siRNA sense strand
ggacaugagaauuuacaau

SEQ ID NO: 1582090 - RNA, 19 nt, Homo sapiens
  misc_RNA (1)...(19): siRNA sense strand
gaaaagauacgagaaaugu

SEQ ID NO: 1582091 - RNA, 19 nt, Homo sapiens
  misc_RNA (1)...(19): siRNA sense strand
ggagagaaacccuacacau

SEQ ID NO: 1582092 - RNA, 19 nt, Homo sapiens
  misc_RNA (1)...(19): siRNA sense strand
ggcaaagccuucaauuggu

SEQ ID NO: 1582093 - RNA, 19 nt, Homo sapiens
  misc_RNA (1)...(19): siRNA sense strand
agagaaacccuucacaugu

SEQ ID NO: 1582094 - RNA, 19 nt, Homo sapiens
  misc_RNA (1)...(19): siRNA sense strand
ggagagaaacccuucacau

SEQ ID NO: 1582095 - RNA, 19 nt, Homo sapiens
  misc_RNA (1)...(19): siRNA sense strand
gcuauauguucuccuuuca

SEQ ID NO: 1582096 - RNA, 19 nt, Homo sapiens
  misc_RNA (1)...(19): siRNA sense strand
agagaaacccuacacaugu

SEQ ID NO: 1582097 - RNA, 19 nt, Homo sapiens
  misc_RNA (1)...(19): siRNA sense strand
ggagagaaacccuacacau

SEQ ID NO: 1582098 - RNA, 19 nt, Homo sapiens
  misc_RNA (1)...(19): siRNA sense strand
agagaaacccuacacaugu

SEQ ID NO: 1582099 - RNA, 19 nt, Homo sapiens
  misc_RNA (1)...(19): siRNA sense strand
ccagcuauauguucuccuu

SEQ ID NO: 1582100 - RNA, 19 nt, Homo sapiens
  misc_RNA (1)...(19): siRNA sense strand
gaaauccuacaaaugugaa

SEQ ID NO: 1582101 - RNA, 19 nt, Homo sapiens
  misc_RNA (1)...(19): siRNA sense strand
ggaugaugaugacauguuu

SEQ ID NO: 1582102 - RNA, 19 nt, Homo sapiens
  misc_RNA (1)...(19): siRNA sense strand
gaggauguguggagaagaa

SEQ ID NO: 1582103 - RNA, 19 nt, Homo sapiens
  misc_RNA (1)...(19): siRNA sense strand
gaaauuuggaugaugauga

SEQ ID NO: 1582104 - RNA, 19 nt, Homo sapiens
  misc_RNA (1)...(19): siRNA sense strand
gaagauuggagagaaauuu

SEQ ID NO: 1582105 - RNA, 19 nt, Homo sapiens
  misc_RNA (1)...(19): siRNA sense strand
ggagagaaauuuggaugau

SEQ ID NO: 1582106 - RNA, 19 nt, Homo sapiens
  misc_RNA (1)...(19): siRNA sense strand
agagaaauuuggaugauga

SEQ ID NO: 1582107 - RNA, 19 nt, Homo sapiens
  misc_RNA (1)...(19): siRNA sense strand
ggacuucugugagacauuc

SEQ ID NO: 1582108 - RNA, 19 nt, Homo sapiens
  misc_RNA (1)...(19): siRNA sense strand
gagagaaauuuggaugaug

SEQ ID NO: 1582109 - RNA, 19 nt, Homo sapiens
  misc_RNA (1)...(19): siRNA sense strand
gaugaaaggcagacugugu

SEQ ID NO: 1582110 - RNA, 19 nt, Homo sapiens
  misc_RNA (1)...(19): siRNA sense strand
gagaggauguguggagaag

SEQ ID NO: 1582111 - RNA, 19 nt, Homo sapiens
  misc_RNA (1)...(19): siRNA sense strand
uggagcggcuguuggguuu

SEQ ID NO: 1582112 - RNA, 19 nt, Homo sapiens
  misc_RNA (1)...(19): siRNA sense strand
ggaagauuggagagaaauu

SEQ ID NO: 1582113 - RNA, 19 nt, Homo sapiens
  misc_RNA (1)...(19): siRNA sense strand
gagcggcuguuggguuuua

SEQ ID NO: 1582114 - RNA, 19 nt, Homo sapiens
  misc_RNA (1)...(19): siRNA sense strand
caagcacacccaggaaauu

SEQ ID NO: 1582115 - RNA, 19 nt, Homo sapiens
  misc_RNA (1)...(19): siRNA sense strand
cugcgggacuucugugaga

SEQ ID NO: 1582116 - RNA, 19 nt, Homo sapiens
  misc_RNA (1)...(19): siRNA sense strand
ggagaggauguguggagaa

SEQ ID NO: 1582117 - RNA, 19 nt, Homo sapiens
  misc_RNA (1)...(19): siRNA sense strand
gaacuggaagacacaaagg

SEQ ID NO: 1582118 - RNA, 19 nt, Homo sapiens
  misc_RNA (1)...(19): siRNA sense strand
uggaagacacaaaggauga

SEQ ID NO: 1582119 - RNA, 19 nt, Homo sapiens
  misc_RNA (1)...(19): siRNA sense strand
uuacacaaccaagaugaaa

SEQ ID NO: 1582120 - RNA, 19 nt, Homo sapiens
  misc_RNA (1)...(19): siRNA sense strand
ggagaagaacuggaagaca

SEQ ID NO: 1582121 - RNA, 19 nt, Homo sapiens
  misc_RNA (1)...(19): siRNA sense strand
ccaagcacacccaggaaau

SEQ ID NO: 1582122 - RNA, 19 nt, Homo sapiens
  misc_RNA (1)...(19): siRNA sense strand
gcaccgaggcuugggaaca

SEQ ID NO: 1582123 - RNA, 19 nt, Homo sapiens
  misc_RNA (1)...(19): siRNA sense strand
gaaggaacaagcuaaaauc

SEQ ID NO: 1582124 - RNA, 19 nt, Homo sapiens
  misc_RNA (1)...(19): siRNA sense strand
aaauuuggaugaugaugac

SEQ ID NO: 1582125 - RNA, 19 nt, Homo sapiens
  misc_RNA (1)...(19): siRNA sense strand
auucucaacgccauuauuu

SEQ ID NO: 1582126 - RNA, 19 nt, Homo sapiens
  misc_RNA (1)...(19): siRNA sense strand
gauuggagagaaauuugga

SEQ ID NO: 1582127 - RNA, 19 nt, Homo sapiens
  misc_RNA (1)...(19): siRNA sense strand
ccaccaggcaagcuuacaa

SEQ ID NO: 1582128 - RNA, 19 nt, Homo sapiens
  misc_RNA (1)...(19): siRNA sense strand
gaagaacuggaagacacaa

SEQ ID NO: 1582129 - RNA, 19 nt, Homo sapiens
  misc_RNA (1)...(19): siRNA sense strand
uuggaagauuggagagaaa

SEQ ID NO: 1582130 - RNA, 19 nt, Homo sapiens
  misc_RNA (1)...(19): siRNA sense strand
cgaugccuccugccaugua

SEQ ID NO: 1582131 - RNA, 19 nt, Homo sapiens
  misc_RNA (1)...(19): siRNA sense strand
uuuggaagauuggagagaa

SEQ ID NO: 1582132 - RNA, 19 nt, Homo sapiens
  misc_RNA (1)...(19): siRNA sense strand
ggcagacuguguggugaug

SEQ ID NO: 1582133 - RNA, 19 nt, Homo sapiens
  misc_RNA (1)...(19): siRNA sense strand
gaagacacaaaggaugauc

SEQ ID NO: 1582134 - RNA, 19 nt, Homo sapiens
  misc_RNA (1)...(19): siRNA sense strand
ggaagacacaaaggaugau

SEQ ID NO: 1582135 - RNA, 19 nt, Homo sapiens
  misc_RNA (1)...(19): siRNA sense strand
gcuguuggguuuuacacaa

SEQ ID NO: 1582136 - RNA, 19 nt, Homo sapiens
  misc_RNA (1)...(19): siRNA sense strand
cagccaccaggcaagcuua

SEQ ID NO: 1582137 - RNA, 19 nt, Homo sapiens
  misc_RNA (1)...(19): siRNA sense strand
gcuaccugcugccugucuu

SEQ ID NO: 1582138 - RNA, 19 nt, Homo sapiens
  misc_RNA (1)...(19): siRNA sense strand
gcagccaccaggcaagcuu

SEQ ID NO: 1582139 - RNA, 19 nt, Homo sapiens
  misc_RNA (1)...(19): siRNA sense strand
aagauuggagagaaauuug

SEQ ID NO: 1582140 - RNA, 19 nt, Homo sapiens
  misc_RNA (1)...(19): siRNA sense strand
gaacauugcuucucaggaa

SEQ ID NO: 1582141 - RNA, 19 nt, Homo sapiens
  misc_RNA (1)...(19): siRNA sense strand
gaaccacucucuggccuuu

SEQ ID NO: 1582142 - RNA, 19 nt, Homo sapiens
  misc_RNA (1)...(19): siRNA sense strand
ggacaggacacauuuacuu

SEQ ID NO: 1582143 - RNA, 19 nt, Homo sapiens
  misc_RNA (1)...(19): siRNA sense strand
gcagugcgcucuuaaccau

SEQ ID NO: 1582144 - RNA, 19 nt, Homo sapiens
  misc_RNA (1)...(19): siRNA sense strand
ucgcauaugucuacaagaa

SEQ ID NO: 1582145 - RNA, 19 nt, Homo sapiens
  misc_RNA (1)...(19): siRNA sense strand
gccggaaacugaccaagaa

SEQ ID NO: 1582146 - RNA, 19 nt, Homo sapiens
  misc_RNA (1)...(19): siRNA sense strand
gggcgaacauugcuucuca

SEQ ID NO: 1582147 - RNA, 19 nt, Homo sapiens
  misc_RNA (1)...(19): siRNA sense strand
ccaacaaugucaacaagau

SEQ ID NO: 1582148 - RNA, 19 nt, Homo sapiens
  misc_RNA (1)...(19): siRNA sense strand
gagaggacaggacacauuu

SEQ ID NO: 1582149 - RNA, 19 nt, Homo sapiens
  misc_RNA (1)...(19): siRNA sense strand
caacaagaugcuccucaua

SEQ ID NO: 1582150 - RNA, 19 nt, Homo sapiens
  misc_RNA (1)...(19): siRNA sense strand
acaagaugcuccucauaga

SEQ ID NO: 1582151 - RNA, 19 nt, Homo sapiens
  misc_RNA (1)...(19): siRNA sense strand
gaaggagcacuaucuguca

SEQ ID NO: 1582152 - RNA, 19 nt, Homo sapiens
  misc_RNA (1)...(19): siRNA sense strand
ccaaggagcagguguauac

SEQ ID NO: 1582153 - RNA, 19 nt, Homo sapiens
  misc_RNA (1)...(19): siRNA sense strand
aagcagcggucauuuguca

SEQ ID NO: 1582154 - RNA, 19 nt, Homo sapiens
  misc_RNA (1)...(19): siRNA sense strand
acaaagcaauaucagauca

SEQ ID NO: 1582155 - RNA, 19 nt, Homo sapiens
  misc_RNA (1)...(19): siRNA sense strand
uggcaacuuugucuacuuu

SEQ ID NO: 1582156 - RNA, 19 nt, Homo sapiens
  misc_RNA (1)...(19): siRNA sense strand
ucacaaagcaauaucagau

SEQ ID NO: 1582157 - RNA, 19 nt, Homo sapiens
  misc_RNA (1)...(19): siRNA sense strand
ggcaugggcuccuccacuu

SEQ ID NO: 1582158 - RNA, 19 nt, Homo sapiens
  misc_RNA (1)...(19): siRNA sense strand
ucuacuaugucuaugguuu

SEQ ID NO: 1582159 - RNA, 19 nt, Homo sapiens
  misc_RNA (1)...(19): siRNA sense strand
ucgcguacgucuuccauga

SEQ ID NO: 1582160 - RNA, 19 nt, Homo sapiens
  misc_RNA (1)...(19): siRNA sense strand
acacagccuucaacuccua

SEQ ID NO: 1582161 - RNA, 19 nt, Homo sapiens
  misc_RNA (1)...(19): siRNA sense strand
gaugaugaccugcucuuca

SEQ ID NO: 1582162 - RNA, 19 nt, Homo sapiens
  misc_RNA (1)...(19): siRNA sense strand
gaacuggaccugccuucuc

SEQ ID NO: 1582163 - RNA, 19 nt, Homo sapiens
  misc_RNA (1)...(19): siRNA sense strand
guggcaagcugaagaaguc

SEQ ID NO: 1582164 - RNA, 19 nt, Homo sapiens
  misc_RNA (1)...(19): siRNA sense strand
ucuuaaccauugacgauaa

SEQ ID NO: 1582165 - RNA, 19 nt, Homo sapiens
  misc_RNA (1)...(19): siRNA sense strand
gacaggacacauuuacuug

SEQ ID NO: 1582166 - RNA, 19 nt, Homo sapiens
  misc_RNA (1)...(19): siRNA sense strand
gcguacgucuuccaugaug

SEQ ID NO: 1582167 - RNA, 19 nt, Homo sapiens
  misc_RNA (1)...(19): siRNA sense strand
acagcaaccuggaugacaa

SEQ ID NO: 1582168 - RNA, 19 nt, Homo sapiens
  misc_RNA (1)...(19): siRNA sense strand
cgacauggugcguggaauu

SEQ ID NO: 1582169 - RNA, 19 nt, Homo sapiens
  misc_RNA (1)...(19): siRNA sense strand
caucgcauaugucuacaag

SEQ ID NO: 1582170 - RNA, 19 nt, Homo sapiens
  misc_RNA (1)...(19): siRNA sense strand
aaagcaauaucagaucaga

SEQ ID NO: 1582171 - RNA, 19 nt, Homo sapiens
  misc_RNA (1)...(19): siRNA sense strand
cgucuuccaugaugaguuc

SEQ ID NO: 1582172 - RNA, 19 nt, Homo sapiens
  misc_RNA (1)...(19): siRNA sense strand
ugagaggacaggacacauu

SEQ ID NO: 1582173 - RNA, 19 nt, Homo sapiens
  misc_RNA (1)...(19): siRNA sense strand
cagaagcagcggucauuug

SEQ ID NO: 1582174 - RNA, 19 nt, Homo sapiens
  misc_RNA (1)...(19): siRNA sense strand
gcucuuaaccauugacgau

SEQ ID NO: 1582175 - RNA, 19 nt, Homo sapiens
  misc_RNA (1)...(19): siRNA sense strand
ucuugaagcagauaaauga

SEQ ID NO: 1582176 - RNA, 19 nt, Homo sapiens
  misc_RNA (1)...(19): siRNA sense strand
ucggacaccuucaccauca

SEQ ID NO: 1582177 - RNA, 19 nt, Homo sapiens
  misc_RNA (1)...(19): siRNA sense strand
caccaacaaugucaacaag

SEQ ID NO: 1582178 - RNA, 19 nt, Homo sapiens
  misc_RNA (1)...(19): siRNA sense strand
gcucaagucacaaagcaau

SEQ ID NO: 1582179 - RNA, 19 nt, Homo sapiens
  misc_RNA (1)...(19): siRNA sense strand
gagcagguguauacaucca

SEQ ID NO: 1582180 - RNA, 19 nt, Homo sapiens
  misc_RNA (1)...(19): siRNA sense strand
uucguggccucgaugauua

SEQ ID NO: 1582181 - RNA, 19 nt, Homo sapiens
  misc_RNA (1)...(19): siRNA sense strand
ucaacaagaugcuccucau

SEQ ID NO: 1582182 - RNA, 19 nt, Homo sapiens
  misc_RNA (1)...(19): siRNA sense strand
caacaaugucaacaagaug

SEQ ID NO: 1582183 - RNA, 19 nt, Homo sapiens
  misc_RNA (1)...(19): siRNA sense strand
augggaagcccgaguauuu

SEQ ID NO: 1582184 - RNA, 19 nt, Homo sapiens
  misc_RNA (1)...(19): siRNA sense strand
gcggucauuugucacauuc

SEQ ID NO: 1582185 - RNA, 19 nt, Homo sapiens
  misc_RNA (1)...(19): siRNA sense strand
uaucuucagugcucaaguc

SEQ ID NO: 1582186 - RNA, 19 nt, Homo sapiens
  misc_RNA (1)...(19): siRNA sense strand
uaaauguaccugggaauuc

SEQ ID NO: 1582187 - RNA, 19 nt, Homo sapiens
  misc_RNA (1)...(19): siRNA sense strand
cuucagugcucaagucaca

SEQ ID NO: 1582188 - RNA, 19 nt, Homo sapiens
  misc_RNA (1)...(19): siRNA sense strand
ugaggcggauggcauguuc

SEQ ID NO: 1582189 - RNA, 19 nt, Homo sapiens
  misc_RNA (1)...(19): siRNA sense strand
aaggagaacaggcugauug

SEQ ID NO: 1582190 - RNA, 19 nt, Homo sapiens
  misc_RNA (1)...(19): siRNA sense strand
aaauguaccugggaauucu

SEQ ID NO: 1582191 - RNA, 19 nt, Homo sapiens
  misc_RNA (1)...(19): siRNA sense strand
aggagcggcugcagucuug

SEQ ID NO: 1582192 - RNA, 19 nt, Homo sapiens
  misc_RNA (1)...(19): siRNA sense strand
gccuucaacuccuauguag

SEQ ID NO: 1582193 - RNA, 19 nt, Homo sapiens
  misc_RNA (1)...(19): siRNA sense strand
ggaaacugaccaagaacuc

SEQ ID NO: 1582194 - RNA, 19 nt, Homo sapiens
  misc_RNA (1)...(19): siRNA sense strand
gcaugggcuccuccacuuu

SEQ ID NO: 1582195 - RNA, 19 nt, Homo sapiens
  misc_RNA (1)...(19): siRNA sense strand
cuaaauguaccugggaauu

SEQ ID NO: 1582196 - RNA, 19 nt, Homo sapiens
  misc_RNA (1)...(19): siRNA sense strand
gaggacagggaccgcauga

SEQ ID NO: 1582197 - RNA, 19 nt, Homo sapiens
  misc_RNA (1)...(19): siRNA sense strand
gcaguggcaacuuugucua

SEQ ID NO: 1582198 - RNA, 19 nt, Homo sapiens
  misc_RNA (1)...(19): siRNA sense strand
agaagcagcggucauuugu

SEQ ID NO: 1582199 - RNA, 19 nt, Homo sapiens
  misc_RNA (1)...(19): siRNA sense strand
guucguggccucgaugauu

SEQ ID NO: 1582200 - RNA, 19 nt, Homo sapiens
  misc_RNA (1)...(19): siRNA sense strand
ccaccaacaaugucaacaa

SEQ ID NO: 1582201 - RNA, 19 nt, Homo sapiens
  misc_RNA (1)...(19): siRNA sense strand
gaggacaggacacauuuac

SEQ ID NO: 1582202 - RNA, 19 nt, Homo sapiens
  misc_RNA (1)...(19): siRNA sense strand
ucuguggccuggacaugaa

SEQ ID NO: 1582203 - RNA, 19 nt, Homo sapiens
  misc_RNA (1)...(19): siRNA sense strand
uaucuacuaugucuauggu

SEQ ID NO: 1582204 - RNA, 19 nt, Homo sapiens
  misc_RNA (1)...(19): siRNA sense strand
ucccugacuuugauaucua

SEQ ID NO: 1582205 - RNA, 19 nt, Homo sapiens
  misc_RNA (1)...(19): siRNA sense strand
cauugacgauaacuucugu

SEQ ID NO: 1582206 - RNA, 19 nt, Homo sapiens
  misc_RNA (1)...(19): siRNA sense strand
gcguggaauucccgucuuc

SEQ ID NO: 1582207 - RNA, 19 nt, Homo sapiens
  misc_RNA (1)...(19): siRNA sense strand
uggccucgaugauuaagau

SEQ ID NO: 1582208 - RNA, 19 nt, Homo sapiens
  misc_RNA (1)...(19): siRNA sense strand
cuuuguugcuuccuaaaug

SEQ ID NO: 1582209 - RNA, 19 nt, Homo sapiens
  misc_RNA (1)...(19): siRNA sense strand
cgucugucaucgcauaugu

SEQ ID NO: 1582210 - RNA, 19 nt, Homo sapiens
  misc_RNA (1)...(19): siRNA sense strand
uggccuggcucaaggugaa

SEQ ID NO: 1582211 - RNA, 19 nt, Homo sapiens
  misc_RNA (1)...(19): siRNA sense strand
caccaucaucccugacuuu

SEQ ID NO: 1582212 - RNA, 19 nt, Homo sapiens
  misc_RNA (1)...(19): siRNA sense strand
uaagaaggagcacuaucug

SEQ ID NO: 1582213 - RNA, 19 nt, Homo sapiens
  misc_RNA (1)...(19): siRNA sense strand
gaguccagccucugcuuug

SEQ ID NO: 1582214 - RNA, 19 nt, Homo sapiens
  misc_RNA (1)...(19): siRNA sense strand
gauaucuacuaugucuaug

SEQ ID NO: 1582215 - RNA, 19 nt, Homo sapiens
  misc_RNA (1)...(19): siRNA sense strand
cauguucgcguacgucuuc

SEQ ID NO: 1582216 - RNA, 19 nt, Homo sapiens
  misc_RNA (1)...(19): siRNA sense strand
gaaacugaccaagaacucu

SEQ ID NO: 1582217 - RNA, 19 nt, Homo sapiens
  misc_RNA (1)...(19): siRNA sense strand
guggcaacuuugucuacuu

SEQ ID NO: 1582218 - RNA, 19 nt, Homo sapiens
  misc_RNA (1)...(19): siRNA sense strand
gaugagaggacaggacaca

SEQ ID NO: 1582219 - RNA, 19 nt, Homo sapiens
  misc_RNA (1)...(19): siRNA sense strand
aggagcagguguauacauc

SEQ ID NO: 1582220 - RNA, 19 nt, Homo sapiens
  misc_RNA (1)...(19): siRNA sense strand
gaugggaagcccgaguauu

SEQ ID NO: 1582221 - RNA, 19 nt, Homo sapiens
  misc_RNA (1)...(19): siRNA sense strand
cugcuuuguugcuuccuaa

SEQ ID NO: 1582222 - RNA, 19 nt, Homo sapiens
  misc_RNA (1)...(19): siRNA sense strand
uccagccucugcuuuguug

SEQ ID NO: 1582223 - RNA, 19 nt, Homo sapiens
  misc_RNA (1)...(19): siRNA sense strand
ucaagucacaaagcaauau

SEQ ID NO: 1582224 - RNA, 19 nt, Homo sapiens
  misc_RNA (1)...(19): siRNA sense strand
gcagcggucauuugucaca

SEQ ID NO: 1582225 - RNA, 19 nt, Homo sapiens
  misc_RNA (1)...(19): siRNA sense strand
aaaguggcaagcugaagaa

SEQ ID NO: 1582226 - RNA, 19 nt, Homo sapiens
  misc_RNA (1)...(19): siRNA sense strand
agugcgcucuuaaccauug

SEQ ID NO: 1582227 - RNA, 19 nt, Homo sapiens
  misc_RNA (1)...(19): siRNA sense strand
gagcggcugcagucuuguu

SEQ ID NO: 1582228 - RNA, 19 nt, Homo sapiens
  misc_RNA (1)...(19): siRNA sense strand
ccagaagcagcggucauuu

SEQ ID NO: 1582229 - RNA, 19 nt, Homo sapiens
  misc_RNA (1)...(19): siRNA sense strand
caugggcuccuccacuuug

SEQ ID NO: 1582230 - RNA, 19 nt, Homo sapiens
  misc_RNA (1)...(19): siRNA sense strand
agaggacaggacacauuua

SEQ ID NO: 1582231 - RNA, 19 nt, Homo sapiens
  misc_RNA (1)...(19): siRNA sense strand
ucagugcucaagucacaaa

SEQ ID NO: 1582232 - RNA, 19 nt, Homo sapiens
  misc_RNA (1)...(19): siRNA sense strand
gaugcuguguguguaucuu

SEQ ID NO: 1582233 - RNA, 19 nt, Homo sapiens
  misc_RNA (1)...(19): siRNA sense strand
ugucaucgcauaugucuac

SEQ ID NO: 1582234 - RNA, 19 nt, Homo sapiens
  misc_RNA (1)...(19): siRNA sense strand
cugugcaucuucaucuuga

SEQ ID NO: 1582235 - RNA, 19 nt, Homo sapiens
  misc_RNA (1)...(19): siRNA sense strand
ggaggacacagccuucaac

SEQ ID NO: 1582236 - RNA, 19 nt, Homo sapiens
  misc_RNA (1)...(19): siRNA sense strand
agcaauaucagaucagaga

SEQ ID NO: 1582237 - RNA, 19 nt, Homo sapiens
  misc_RNA (1)...(19): siRNA sense strand
ugaccaccaccaacaaugu

SEQ ID NO: 1582238 - RNA, 19 nt, Homo sapiens
  misc_RNA (1)...(19): siRNA sense strand
gcaagcugaagaaguccuu

SEQ ID NO: 1582239 - RNA, 19 nt, Homo sapiens
  misc_RNA (1)...(19): siRNA sense strand
ggccagaagcggaaaauga

SEQ ID NO: 1582240 - RNA, 19 nt, Homo sapiens
  misc_RNA (1)...(19): siRNA sense strand
gaacaaggacucuacauuc

SEQ ID NO: 1582241 - RNA, 19 nt, Homo sapiens
  misc_RNA (1)...(19): siRNA sense strand
gcccagcgcuucuguaaga

SEQ ID NO: 1582242 - RNA, 19 nt, Homo sapiens
  misc_RNA (1)...(19): siRNA sense strand
gugagcuucuuccuuauua

SEQ ID NO: 1582243 - RNA, 19 nt, Homo sapiens
  misc_RNA (1)...(19): siRNA sense strand
gaaggcauaucgugagcuu

SEQ ID NO: 1582244 - RNA, 19 nt, Homo sapiens
  misc_RNA (1)...(19): siRNA sense strand
gaauguccaucgucacuuc

SEQ ID NO: 1582245 - RNA, 19 nt, Homo sapiens
  misc_RNA (1)...(19): siRNA sense strand
ggugaugcauggacuagaa

SEQ ID NO: 1582246 - RNA, 19 nt, Homo sapiens
  misc_RNA (1)...(19): siRNA sense strand
gaccuacccucucuucuuc

SEQ ID NO: 1582247 - RNA, 19 nt, Homo sapiens
  misc_RNA (1)...(19): siRNA sense strand
gaagaagaccaagggcaua

SEQ ID NO: 1582248 - RNA, 19 nt, Homo sapiens
  misc_RNA (1)...(19): siRNA sense strand
gcacaaccaacaacugcua

SEQ ID NO: 1582249 - RNA, 19 nt, Homo sapiens
  misc_RNA (1)...(19): siRNA sense strand
guaccagucugucaagcuu

SEQ ID NO: 1582250 - RNA, 19 nt, Homo sapiens
  misc_RNA (1)...(19): siRNA sense strand
caucgucacuucccuauac

SEQ ID NO: 1582251 - RNA, 19 nt, Homo sapiens
  misc_RNA (1)...(19): siRNA sense strand
cuacgucccugcagaaauc

SEQ ID NO: 1582252 - RNA, 19 nt, Homo sapiens
  misc_RNA (1)...(19): siRNA sense strand
ugaaagcauuggugugguu

SEQ ID NO: 1582253 - RNA, 19 nt, Homo sapiens
  misc_RNA (1)...(19): siRNA sense strand
guuaauagcacaaccaaca

SEQ ID NO: 1582254 - RNA, 19 nt, Homo sapiens
  misc_RNA (1)...(19): siRNA sense strand
gccaucaaauuggaccuua

SEQ ID NO: 1582255 - RNA, 19 nt, Homo sapiens
  misc_RNA (1)...(19): siRNA sense strand
caacugcuauuccaaugag

SEQ ID NO: 1582256 - RNA, 19 nt, Homo sapiens
  misc_RNA (1)...(19): siRNA sense strand
caacaacugcuauuccaau

SEQ ID NO: 1582257 - RNA, 19 nt, Homo sapiens
  misc_RNA (1)...(19): siRNA sense strand
ccuaugcccugcaguucua

SEQ ID NO: 1582258 - RNA, 19 nt, Homo sapiens
  misc_RNA (1)...(19): siRNA sense strand
aucgugagcuucuuccuua

SEQ ID NO: 1582259 - RNA, 19 nt, Homo sapiens
  misc_RNA (1)...(19): siRNA sense strand
gcaccuaugcccugcaguu

SEQ ID NO: 1582260 - RNA, 19 nt, Homo sapiens
  misc_RNA (1)...(19): siRNA sense strand
gggagccguugccaucaaa

SEQ ID NO: 1582261 - RNA, 19 nt, Homo sapiens
  misc_RNA (1)...(19): siRNA sense strand
ccaaugagacggugauucu

SEQ ID NO: 1582262 - RNA, 19 nt, Homo sapiens
  misc_RNA (1)...(19): siRNA sense strand
ucacuucccuauacauugg

SEQ ID NO: 1582263 - RNA, 19 nt, Homo sapiens
  misc_RNA (1)...(19): siRNA sense strand
ugucaagcuucucuacauu

SEQ ID NO: 1582264 - RNA, 19 nt, Homo sapiens
  misc_RNA (1)...(19): siRNA sense strand
ugacaucaaggccagcaua

SEQ ID NO: 1582265 - RNA, 19 nt, Homo sapiens
  misc_RNA (1)...(19): siRNA sense strand
gaagaccaagggcauaaca

SEQ ID NO: 1582266 - RNA, 19 nt, Homo sapiens
  misc_RNA (1)...(19): siRNA sense strand
guaguggaagcuguuaaua

SEQ ID NO: 1582267 - RNA, 19 nt, Homo sapiens
  misc_RNA (1)...(19): siRNA sense strand
uuaacaagcccuuuaugga

SEQ ID NO: 1582268 - RNA, 19 nt, Homo sapiens
  misc_RNA (1)...(19): siRNA sense strand
ucccagccauccugucuuu

SEQ ID NO: 1582269 - RNA, 19 nt, Homo sapiens
  misc_RNA (1)...(19): siRNA sense strand
gaaaacaagaugaagaaug

SEQ ID NO: 1582270 - RNA, 19 nt, Homo sapiens
  misc_RNA (1)...(19): siRNA sense strand
gacaucaaggccagcauaa

SEQ ID NO: 1582271 - RNA, 19 nt, Homo sapiens
  misc_RNA (1)...(19): siRNA sense strand
gcacauccuggucaagugu

SEQ ID NO: 1582272 - RNA, 19 nt, Homo sapiens
  misc_RNA (1)...(19): siRNA sense strand
cagcuuggucaucaucaua

SEQ ID NO: 1582273 - RNA, 19 nt, Homo sapiens
  misc_RNA (1)...(19): siRNA sense strand
agaacaaggacucuacauu

SEQ ID NO: 1582274 - RNA, 19 nt, Homo sapiens
  misc_RNA (1)...(19): siRNA sense strand
gccuuaaccugccuaacug

SEQ ID NO: 1582275 - RNA, 19 nt, Homo sapiens
  misc_RNA (1)...(19): siRNA sense strand
guacauuacccaggaaauc

SEQ ID NO: 1582276 - RNA, 19 nt, Homo sapiens
  misc_RNA (1)...(19): siRNA sense strand
aacaaggacucuacauucu

SEQ ID NO: 1582277 - RNA, 19 nt, Homo sapiens
  misc_RNA (1)...(19): siRNA sense strand
gaaaucaucauccccuuug

SEQ ID NO: 1582278 - RNA, 19 nt, Homo sapiens
  misc_RNA (1)...(19): siRNA sense strand
uggaagaccuacccucucu

SEQ ID NO: 1582279 - RNA, 19 nt, Homo sapiens
  misc_RNA (1)...(19): siRNA sense strand
gugcccagcgcuucuguaa

SEQ ID NO: 1582280 - RNA, 19 nt, Homo sapiens
  misc_RNA (1)...(19): siRNA sense strand
caucaaauuggaccuuaug

SEQ ID NO: 1582281 - RNA, 19 nt, Homo sapiens
  misc_RNA (1)...(19): siRNA sense strand
cauccugucuuugggaaug

SEQ ID NO: 1582282 - RNA, 19 nt, Homo sapiens
  misc_RNA (1)...(19): siRNA sense strand
cuuauuaacacccaacuug

SEQ ID NO: 1582283 - RNA, 19 nt, Homo sapiens
  misc_RNA (1)...(19): siRNA sense strand
ugagcuucuuccuuauuaa

SEQ ID NO: 1582284 - RNA, 19 nt, Homo sapiens
  misc_RNA (1)...(19): siRNA sense strand
ugaaagugccaagaaguug

SEQ ID NO: 1582285 - RNA, 19 nt, Homo sapiens
  misc_RNA (1)...(19): siRNA sense strand
gagccguugccaucaaauu

SEQ ID NO: 1582286 - RNA, 19 nt, Homo sapiens
  misc_RNA (1)...(19): siRNA sense strand
gguaguggaagcuguuaau

SEQ ID NO: 1582287 - RNA, 19 nt, Homo sapiens
  misc_RNA (1)...(19): siRNA sense strand
ucggcaggcuugaagaaga

SEQ ID NO: 1582288 - RNA, 19 nt, Homo sapiens
  misc_RNA (1)...(19): siRNA sense strand
agaagacucucaccccuuu

SEQ ID NO: 1582289 - RNA, 19 nt, Homo sapiens
  misc_RNA (1)...(19): siRNA sense strand
ccaucaaauuggaccuuau

SEQ ID NO: 1582290 - RNA, 19 nt, Homo sapiens
  misc_RNA (1)...(19): siRNA sense strand
caaccaacaacugcuauuc

SEQ ID NO: 1582291 - RNA, 19 nt, Homo sapiens
  misc_RNA (1)...(19): siRNA sense strand
acaagcccuuuauggacua

SEQ ID NO: 1582292 - RNA, 19 nt, Homo sapiens
  misc_RNA (1)...(19): siRNA sense strand
acucuacauucuuggauga

SEQ ID NO: 1582293 - RNA, 19 nt, Homo sapiens
  misc_RNA (1)...(19): siRNA sense strand
guaugcacauccuggucaa

SEQ ID NO: 1582294 - RNA, 19 nt, Homo sapiens
  misc_RNA (1)...(19): siRNA sense strand
aaaacaagaugaagaaugc

SEQ ID NO: 1582295 - RNA, 19 nt, Homo sapiens
  misc_RNA (1)...(19): siRNA sense strand
ggagaacaaggacucuaca

SEQ ID NO: 1582296 - RNA, 19 nt, Homo sapiens
  misc_RNA (1)...(19): siRNA sense strand
cuacauucuuggaugaaag

SEQ ID NO: 1582297 - RNA, 19 nt, Homo sapiens
  misc_RNA (1)...(19): siRNA sense strand
uaugucgccuccugaaagu

SEQ ID NO: 1582298 - RNA, 19 nt, Homo sapiens
  misc_RNA (1)...(19): siRNA sense strand
aagaagaccaagggcauaa

SEQ ID NO: 1582299 - RNA, 19 nt, Homo sapiens
  misc_RNA (1)...(19): siRNA sense strand
agaccuacccucucuucuu

SEQ ID NO: 1582300 - RNA, 19 nt, Homo sapiens
  misc_RNA (1)...(19): siRNA sense strand
ggacucgcgacucuacaug

SEQ ID NO: 1582301 - RNA, 19 nt, Homo sapiens
  misc_RNA (1)...(19): siRNA sense strand
aaugagacggugauucuga

SEQ ID NO: 1582302 - RNA, 19 nt, Homo sapiens
  misc_RNA (1)...(19): siRNA sense strand
aguggaagcuguuaauagc

SEQ ID NO: 1582303 - RNA, 19 nt, Homo sapiens
  misc_RNA (1)...(19): siRNA sense strand
cucaggaucuugaccaucu

SEQ ID NO: 1582304 - RNA, 19 nt, Homo sapiens
  misc_RNA (1)...(19): siRNA sense strand
gacucuacaugcucuccuu

SEQ ID NO: 1582305 - RNA, 19 nt, Homo sapiens
  misc_RNA (1)...(19): siRNA sense strand
uucauugccugccacugua

SEQ ID NO: 1582306 - RNA, 19 nt, Homo sapiens
  misc_RNA (1)...(19): siRNA sense strand
cugaaagugccaagaaguu

SEQ ID NO: 1582307 - RNA, 19 nt, Homo sapiens
  misc_RNA (1)...(19): siRNA sense strand
caucaaggccagcauaagc

SEQ ID NO: 1582308 - RNA, 19 nt, Homo sapiens
  misc_RNA (1)...(19): siRNA sense strand
cgucacuucccuauacauu

SEQ ID NO: 1582309 - RNA, 19 nt, Homo sapiens
  misc_RNA (1)...(19): siRNA sense strand
ggacucuacauucuuggau

SEQ ID NO: 1582310 - RNA, 19 nt, Homo sapiens
  misc_RNA (1)...(19): siRNA sense strand
aacaacugcuauuccaaug

SEQ ID NO: 1582311 - RNA, 19 nt, Homo sapiens
  misc_RNA (1)...(19): siRNA sense strand
gcauaucgugagcuucuuc

SEQ ID NO: 1582312 - RNA, 19 nt, Homo sapiens
  misc_RNA (1)...(19): siRNA sense strand
ucaagcuucucuacauugc

SEQ ID NO: 1582313 - RNA, 19 nt, Homo sapiens
  misc_RNA (1)...(19): siRNA sense strand
gagaacaaggacucuacau

SEQ ID NO: 1582314 - RNA, 19 nt, Homo sapiens
  misc_RNA (1)...(19): siRNA sense strand
acaaggacucuacauucuu

SEQ ID NO: 1582315 - RNA, 19 nt, Homo sapiens
  misc_RNA (1)...(19): siRNA sense strand
cuucugcuguguguacauu

SEQ ID NO: 1582316 - RNA, 19 nt, Homo sapiens
  misc_RNA (1)...(19): siRNA sense strand
gucaagcuucucuacauug

SEQ ID NO: 1582317 - RNA, 19 nt, Homo sapiens
  misc_RNA (1)...(19): siRNA sense strand
ucuacauucuuggaugaaa

SEQ ID NO: 1582318 - RNA, 19 nt, Homo sapiens
  misc_RNA (1)...(19): siRNA sense strand
gagcuucuuccuuauuaac

SEQ ID NO: 1582319 - RNA, 19 nt, Homo sapiens
  misc_RNA (1)...(19): siRNA sense strand
cugucaagcuucucuacau

SEQ ID NO: 1582320 - RNA, 19 nt, Homo sapiens
  misc_RNA (1)...(19): siRNA sense strand
uaccugcgguuuggagaug

SEQ ID NO: 1582321 - RNA, 19 nt, Homo sapiens
  misc_RNA (1)...(19): siRNA sense strand
ggaauguccaucgucacuu

SEQ ID NO: 1582322 - RNA, 19 nt, Homo sapiens
  misc_RNA (1)...(19): siRNA sense strand
gggaauguccaucgucacu

SEQ ID NO: 1582323 - RNA, 19 nt, Homo sapiens
  misc_RNA (1)...(19): siRNA sense strand
cuggucagcuuggucauca

SEQ ID NO: 1582324 - RNA, 19 nt, Homo sapiens
  misc_RNA (1)...(19): siRNA sense strand
uaguggaagcuguuaauag

SEQ ID NO: 1582325 - RNA, 19 nt, Homo sapiens
  misc_RNA (1)...(19): siRNA sense strand
acaguacauuacccaggaa

SEQ ID NO: 1582326 - RNA, 19 nt, Homo sapiens
  misc_RNA (1)...(19): siRNA sense strand
gcacugccucuggaucugu

SEQ ID NO: 1582327 - RNA, 19 nt, Homo sapiens
  misc_RNA (1)...(19): siRNA sense strand
ggcauccugugcaccuaug

SEQ ID NO: 1582328 - RNA, 19 nt, Homo sapiens
  misc_RNA (1)...(19): siRNA sense strand
gaacagauauugcaaauga

SEQ ID NO: 1582329 - RNA, 19 nt, Homo sapiens
  misc_RNA (1)...(19): siRNA sense strand
gaaagauacucauacugua

SEQ ID NO: 1582330 - RNA, 19 nt, Homo sapiens
  misc_RNA (1)...(19): siRNA sense strand
gcaggaguaugucaaauaa

SEQ ID NO: 1582331 - RNA, 19 nt, Homo sapiens
  misc_RNA (1)...(19): siRNA sense strand
gaagaacugucugcaauga

SEQ ID NO: 1582332 - RNA, 19 nt, Homo sapiens
  misc_RNA (1)...(19): siRNA sense strand
ugaauaaccugauugaaga

SEQ ID NO: 1582333 - RNA, 19 nt, Homo sapiens
  misc_RNA (1)...(19): siRNA sense strand
caucauuucuucaggauaa

SEQ ID NO: 1582334 - RNA, 19 nt, Homo sapiens
  misc_RNA (1)...(19): siRNA sense strand
gaagaaaggaacaguaaga

SEQ ID NO: 1582335 - RNA, 19 nt, Homo sapiens
  misc_RNA (1)...(19): siRNA sense strand
gcucauagccaaacugaaa

SEQ ID NO: 1582336 - RNA, 19 nt, Homo sapiens
  misc_RNA (1)...(19): siRNA sense strand
gaagcuggccuccaaauau

SEQ ID NO: 1582337 - RNA, 19 nt, Homo sapiens
  misc_RNA (1)...(19): siRNA sense strand
gaagaauccucuagacagu

SEQ ID NO: 1582338 - RNA, 19 nt, Homo sapiens
  misc_RNA (1)...(19): siRNA sense strand
gcucagacauuuaauccuu

SEQ ID NO: 1582339 - RNA, 19 nt, Homo sapiens
  misc_RNA (1)...(19): siRNA sense strand
caacagguuuaaugaaaga

SEQ ID NO: 1582340 - RNA, 19 nt, Homo sapiens
  misc_RNA (1)...(19): siRNA sense strand
gaagaagaaaggaacagua

SEQ ID NO: 1582341 - RNA, 19 nt, Homo sapiens
  misc_RNA (1)...(19): siRNA sense strand
caacagcgauuuuaggaua

SEQ ID NO: 1582342 - RNA, 19 nt, Homo sapiens
  misc_RNA (1)...(19): siRNA sense strand
gaagauuacagccauauau

SEQ ID NO: 1582343 - RNA, 19 nt, Homo sapiens
  misc_RNA (1)...(19): siRNA sense strand
gaaaggaacaguaagaaag

SEQ ID NO: 1582344 - RNA, 19 nt, Homo sapiens
  misc_RNA (1)...(19): siRNA sense strand
gagguaaaguguugagaga

SEQ ID NO: 1582345 - RNA, 19 nt, Homo sapiens
  misc_RNA (1)...(19): siRNA sense strand
caagaugaccacaauaauu

SEQ ID NO: 1582346 - RNA, 19 nt, Homo sapiens
  misc_RNA (1)...(19): siRNA sense strand
aggaacaacuuucuucuuu

SEQ ID NO: 1582347 - RNA, 19 nt, Homo sapiens
  misc_RNA (1)...(19): siRNA sense strand
guaagaaagacaacaguaa

SEQ ID NO: 1582348 - RNA, 19 nt, Homo sapiens
  misc_RNA (1)...(19): siRNA sense strand
ggauuucgaugcccuaugu

SEQ ID NO: 1582349 - RNA, 19 nt, Homo sapiens
  misc_RNA (1)...(19): siRNA sense strand
gcacaaagcaguucuacag

SEQ ID NO: 1582350 - RNA, 19 nt, Homo sapiens
  misc_RNA (1)...(19): siRNA sense strand
gaacaacuuucuucuuuug

SEQ ID NO: 1582351 - RNA, 19 nt, Homo sapiens
  misc_RNA (1)...(19): siRNA sense strand
gcucacacaugacagaguu

SEQ ID NO: 1582352 - RNA, 19 nt, Homo sapiens
  misc_RNA (1)...(19): siRNA sense strand
uggcugcauuuaugaauua

SEQ ID NO: 1582353 - RNA, 19 nt, Homo sapiens
  misc_RNA (1)...(19): siRNA sense strand
guggagagauuaaugugaa

SEQ ID NO: 1582354 - RNA, 19 nt, Homo sapiens
  misc_RNA (1)...(19): siRNA sense strand
gcaaaugaaauucuggauu

SEQ ID NO: 1582355 - RNA, 19 nt, Homo sapiens
  misc_RNA (1)...(19): siRNA sense strand
ggacaagaccaacagcuau

SEQ ID NO: 1582356 - RNA, 19 nt, Homo sapiens
  misc_RNA (1)...(19): siRNA sense strand
ucacaaauccuuggacaaa

SEQ ID NO: 1582357 - RNA, 19 nt, Homo sapiens
  misc_RNA (1)...(19): siRNA sense strand
gaggagaaccagugcauug

SEQ ID NO: 1582358 - RNA, 19 nt, Homo sapiens
  misc_RNA (1)...(19): siRNA sense strand
uuacagagguuacagucuu

SEQ ID NO: 1582359 - RNA, 19 nt, Homo sapiens
  misc_RNA (1)...(19): siRNA sense strand
caaagcaguucuacagagu

SEQ ID NO: 1582360 - RNA, 19 nt, Homo sapiens
  misc_RNA (1)...(19): siRNA sense strand
gcaaaggaagugauucaga

SEQ ID NO: 1582361 - RNA, 19 nt, Homo sapiens
  misc_RNA (1)...(19): siRNA sense strand
gggaacuucuuguuaugaa

SEQ ID NO: 1582362 - RNA, 19 nt, Homo sapiens
  misc_RNA (1)...(19): siRNA sense strand
ccauugcacugguuacuug

SEQ ID NO: 1582363 - RNA, 19 nt, Homo sapiens
  misc_RNA (1)...(19): siRNA sense strand
gaaaagcggaggagagaua

SEQ ID NO: 1582364 - RNA, 19 nt, Homo sapiens
  misc_RNA (1)...(19): siRNA sense strand
gugcauugcuccugugguu

SEQ ID NO: 1582365 - RNA, 19 nt, Homo sapiens
  misc_RNA (1)...(19): siRNA sense strand
ggaaguaauuauagaccau

SEQ ID NO: 1582366 - RNA, 19 nt, Homo sapiens
  misc_RNA (1)...(19): siRNA sense strand
ugaaagauacucauacugu

SEQ ID NO: 1582367 - RNA, 19 nt, Homo sapiens
  misc_RNA (1)...(19): siRNA sense strand
uccaacagguuuaaugaaa

SEQ ID NO: 1582368 - RNA, 19 nt, Homo sapiens
  misc_RNA (1)...(19): siRNA sense strand
gaagaaagagcacagaaaa

SEQ ID NO: 1582369 - RNA, 19 nt, Homo sapiens
  misc_RNA (1)...(19): siRNA sense strand
caaaagauguugccaaagu

SEQ ID NO: 1582370 - RNA, 19 nt, Homo sapiens
  misc_RNA (1)...(19): siRNA sense strand
aagcuggccuccaaauauu

SEQ ID NO: 1582371 - RNA, 19 nt, Homo sapiens
  misc_RNA (1)...(19): siRNA sense strand
acuguaaacugcaggagua

SEQ ID NO: 1582372 - RNA, 19 nt, Homo sapiens
  misc_RNA (1)...(19): siRNA sense strand
gaguguaccuggaaugucu

SEQ ID NO: 1582373 - RNA, 19 nt, Homo sapiens
  misc_RNA (1)...(19): siRNA sense strand
acagaacaguggagagauu

SEQ ID NO: 1582374 - RNA, 19 nt, Homo sapiens
  misc_RNA (1)...(19): siRNA sense strand
ggaagauuacagccauaua

SEQ ID NO: 1582375 - RNA, 19 nt, Homo sapiens
  misc_RNA (1)...(19): siRNA sense strand
aagcaguucuacagaguaa

SEQ ID NO: 1582376 - RNA, 19 nt, Homo sapiens
  misc_RNA (1)...(19): siRNA sense strand
gguaguauuggaacagaua

SEQ ID NO: 1582377 - RNA, 19 nt, Homo sapiens
  misc_RNA (1)...(19): siRNA sense strand
uauagaccaucauuucuuc

SEQ ID NO: 1582378 - RNA, 19 nt, Homo sapiens
  misc_RNA (1)...(19): siRNA sense strand
ucaggaaucaugacagaaa

SEQ ID NO: 1582379 - RNA, 19 nt, Homo sapiens
  misc_RNA (1)...(19): siRNA sense strand
gguuacagucuucuucaua

SEQ ID NO: 1582380 - RNA, 19 nt, Homo sapiens
  misc_RNA (1)...(19): siRNA sense strand
gauuacagccauauauugu

SEQ ID NO: 1582381 - RNA, 19 nt, Homo sapiens
  misc_RNA (1)...(19): siRNA sense strand
aagaagaaaggaacaguaa

SEQ ID NO: 1582382 - RNA, 19 nt, Homo sapiens
  misc_RNA (1)...(19): siRNA sense strand
ggaacaacuuucuucuuuu

SEQ ID NO: 1582383 - RNA, 19 nt, Homo sapiens
  misc_RNA (1)...(19): siRNA sense strand
uuacccaacucaaagaaga

SEQ ID NO: 1582384 - RNA, 19 nt, Homo sapiens
  misc_RNA (1)...(19): siRNA sense strand
cacaauaauuugacugaca

SEQ ID NO: 1582385 - RNA, 19 nt, Homo sapiens
  misc_RNA (1)...(19): siRNA sense strand
gaggagagauaaaaugaau

SEQ ID NO: 1582386 - RNA, 19 nt, Homo sapiens
  misc_RNA (1)...(19): siRNA sense strand
ggcgggagguaaaguguug

SEQ ID NO: 1582387 - RNA, 19 nt, Homo sapiens
  misc_RNA (1)...(19): siRNA sense strand
ggaacuucuuguuaugaau

SEQ ID NO: 1582388 - RNA, 19 nt, Homo sapiens
  misc_RNA (1)...(19): siRNA sense strand
uuacagccauauauuguuc

SEQ ID NO: 1582389 - RNA, 19 nt, Homo sapiens
  misc_RNA (1)...(19): siRNA sense strand
uugaagaacugucugcaau

SEQ ID NO: 1582390 - RNA, 19 nt, Homo sapiens
  misc_RNA (1)...(19): siRNA sense strand
caacacuugagaucuuuaa

SEQ ID NO: 1582391 - RNA, 19 nt, Homo sapiens
  misc_RNA (1)...(19): siRNA sense strand
ccaccaaguccuucugaaa

SEQ ID NO: 1582392 - RNA, 19 nt, Homo sapiens
  misc_RNA (1)...(19): siRNA sense strand
ggaguuguuuccaccaagu

SEQ ID NO: 1582393 - RNA, 19 nt, Homo sapiens
  misc_RNA (1)...(19): siRNA sense strand
guaaacugcaggaguaugu

SEQ ID NO: 1582394 - RNA, 19 nt, Homo sapiens
  misc_RNA (1)...(19): siRNA sense strand
ggacaaaagaacuggaaua

SEQ ID NO: 1582395 - RNA, 19 nt, Homo sapiens
  misc_RNA (1)...(19): siRNA sense strand
gggacaagaccaacagcua

SEQ ID NO: 1582396 - RNA, 19 nt, Homo sapiens
  misc_RNA (1)...(19): siRNA sense strand
cauauauuguuccacagaa

SEQ ID NO: 1582397 - RNA, 19 nt, Homo sapiens
  misc_RNA (1)...(19): siRNA sense strand
ucuuucagcucacacauga

SEQ ID NO: 1582398 - RNA, 19 nt, Homo sapiens
  misc_RNA (1)...(19): siRNA sense strand
guuugcaaguucacaguaa

SEQ ID NO: 1582399 - RNA, 19 nt, Homo sapiens
  misc_RNA (1)...(19): siRNA sense strand
gaacaccaaguuaaaauga

SEQ ID NO: 1582400 - RNA, 19 nt, Homo sapiens
  misc_RNA (1)...(19): siRNA sense strand
uggaacagauauugcaaau

SEQ ID NO: 1582401 - RNA, 19 nt, Homo sapiens
  misc_RNA (1)...(19): siRNA sense strand
gaacaguggagagauuaau

SEQ ID NO: 1582402 - RNA, 19 nt, Homo sapiens
  misc_RNA (1)...(19): siRNA sense strand
gcuaauagaugccaaaacu

SEQ ID NO: 1582403 - RNA, 19 nt, Homo sapiens
  misc_RNA (1)...(19): siRNA sense strand
aaaggaacaguaagaaaga

SEQ ID NO: 1582404 - RNA, 19 nt, Homo sapiens
  misc_RNA (1)...(19): siRNA sense strand
ccaacagguuuaaugaaag

SEQ ID NO: 1582405 - RNA, 19 nt, Homo sapiens
  misc_RNA (1)...(19): siRNA sense strand
ugugaaaccaacugaauuu

SEQ ID NO: 1582406 - RNA, 19 nt, Homo sapiens
  misc_RNA (1)...(19): siRNA sense strand
uaaaaggcuugacaaauuc

SEQ ID NO: 1582407 - RNA, 19 nt, Homo sapiens
  misc_RNA (1)...(19): siRNA sense strand
caacagcuauggggucuuu

SEQ ID NO: 1582408 - RNA, 19 nt, Homo sapiens
  misc_RNA (1)...(19): siRNA sense strand
ccuggaaugucuacuggaa

SEQ ID NO: 1582409 - RNA, 19 nt, Homo sapiens
  misc_RNA (1)...(19): siRNA sense strand
caaauauuguuggaaugga

SEQ ID NO: 1582410 - RNA, 19 nt, Homo sapiens
  misc_RNA (1)...(19): siRNA sense strand
uugagaagcuggccuccaa

SEQ ID NO: 1582411 - RNA, 19 nt, Homo sapiens
  misc_RNA (1)...(19): siRNA sense strand
uuaccuaucuucuuucaac

SEQ ID NO: 1582412 - RNA, 19 nt, Homo sapiens
  misc_RNA (1)...(19): siRNA sense strand
agaacugucugcaaugauc

SEQ ID NO: 1582413 - RNA, 19 nt, Homo sapiens
  misc_RNA (1)...(19): siRNA sense strand
acuuacagauuccuacaaa

SEQ ID NO: 1582414 - RNA, 19 nt, Homo sapiens
  misc_RNA (1)...(19): siRNA sense strand
gaugaccacaauaauuuga

SEQ ID NO: 1582415 - RNA, 19 nt, Homo sapiens
  misc_RNA (1)...(19): siRNA sense strand
uaucuucuuucaacaagga

SEQ ID NO: 1582416 - RNA, 19 nt, Homo sapiens
  misc_RNA (1)...(19): siRNA sense strand
gugaaaccaacugaauuua

SEQ ID NO: 1582417 - RNA, 19 nt, Homo sapiens
  misc_RNA (1)...(19): siRNA sense strand
cagaacaguggagagauua

SEQ ID NO: 1582418 - RNA, 19 nt, Homo sapiens
  misc_RNA (1)...(19): siRNA sense strand
gaauggaagaagaaaggaa

SEQ ID NO: 1582419 - RNA, 19 nt, Homo sapiens
  misc_RNA (1)...(19): siRNA sense strand
gaauaaccugauugaagaa

SEQ ID NO: 1582420 - RNA, 19 nt, Homo sapiens
  misc_RNA (1)...(19): siRNA sense strand
guuacagucuucuucauac

SEQ ID NO: 1582421 - RNA, 19 nt, Homo sapiens
  misc_RNA (1)...(19): siRNA sense strand
acagauuccuacaaauuca

SEQ ID NO: 1582422 - RNA, 19 nt, Homo sapiens
  misc_RNA (1)...(19): siRNA sense strand
ucaaagggcaacagcgauu

SEQ ID NO: 1582423 - RNA, 19 nt, Homo sapiens
  misc_RNA (1)...(19): siRNA sense strand
gguuugcagugaauggaaa

SEQ ID NO: 1582424 - RNA, 19 nt, Homo sapiens
  misc_RNA (1)...(19): siRNA sense strand
cguaaacuggacaaacuua

SEQ ID NO: 1582425 - RNA, 19 nt, Homo sapiens
  misc_RNA (1)...(19): siRNA sense strand
agaaaggaacaguaagaaa

SEQ ID NO: 1582426 - RNA, 19 nt, Homo sapiens
  misc_RNA (1)...(19): siRNA sense strand
uuugggaacuucuuguuau

SEQ ID NO: 1582427 - RNA, 19 nt, Homo sapiens
  misc_RNA (1)...(19): siRNA sense strand
gagauuaaugugaaaccaa

SEQ ID NO: 1582428 - RNA, 19 nt, Homo sapiens
  misc_RNA (1)...(19): siRNA sense strand
gaaauuacaggaagaagua

SEQ ID NO: 1582429 - RNA, 19 nt, Homo sapiens
  misc_RNA (1)...(19): siRNA sense strand
caucaacucuuguacauaa

SEQ ID NO: 1582430 - RNA, 19 nt, Homo sapiens
  misc_RNA (1)...(19): siRNA sense strand
gcaauagcaucaacucuug

SEQ ID NO: 1582431 - RNA, 19 nt, Homo sapiens
  misc_RNA (1)...(19): siRNA sense strand
gcagagugguccaaacuuu

SEQ ID NO: 1582432 - RNA, 19 nt, Homo sapiens
  misc_RNA (1)...(19): siRNA sense strand
caacagaacuccacguaca

SEQ ID NO: 1582433 - RNA, 19 nt, Homo sapiens
  misc_RNA (1)...(19): siRNA sense strand
gcuccaaacuucuuucaaa

SEQ ID NO: 1582434 - RNA, 19 nt, Homo sapiens
  misc_RNA (1)...(19): siRNA sense strand
gaaagcaacuccaucaacu

SEQ ID NO: 1582435 - RNA, 19 nt, Homo sapiens
  misc_RNA (1)...(19): siRNA sense strand
gcaacuccaucaacuacua

SEQ ID NO: 1582436 - RNA, 19 nt, Homo sapiens
  misc_RNA (1)...(19): siRNA sense strand
caacagaaggugucaaauu

SEQ ID NO: 1582437 - RNA, 19 nt, Homo sapiens
  misc_RNA (1)...(19): siRNA sense strand
gcaaaggaacaacuugaua

SEQ ID NO: 1582438 - RNA, 19 nt, Homo sapiens
  misc_RNA (1)...(19): siRNA sense strand
caaguaaauuccagugaaa

SEQ ID NO: 1582439 - RNA, 19 nt, Homo sapiens
  misc_RNA (1)...(19): siRNA sense strand
gagacugacugcguacuua

SEQ ID NO: 1582440 - RNA, 19 nt, Homo sapiens
  misc_RNA (1)...(19): siRNA sense strand
gcaaauccuauuccuguua

SEQ ID NO: 1582441 - RNA, 19 nt, Homo sapiens
  misc_RNA (1)...(19): siRNA sense strand
gaaacuaauugagacauug

SEQ ID NO: 1582442 - RNA, 19 nt, Homo sapiens
  misc_RNA (1)...(19): siRNA sense strand
gacaauuccugaagauuug

SEQ ID NO: 1582443 - RNA, 19 nt, Homo sapiens
  misc_RNA (1)...(19): siRNA sense strand
acacagggaucacaacaaa

SEQ ID NO: 1582444 - RNA, 19 nt, Homo sapiens
  misc_RNA (1)...(19): siRNA sense strand
ccuaugauauucagucuuu

SEQ ID NO: 1582445 - RNA, 19 nt, Homo sapiens
  misc_RNA (1)...(19): siRNA sense strand
gaaacagccugaagaaugc

SEQ ID NO: 1582446 - RNA, 19 nt, Homo sapiens
  misc_RNA (1)...(19): siRNA sense strand
cagaagcacuauggcauua

SEQ ID NO: 1582447 - RNA, 19 nt, Homo sapiens
  misc_RNA (1)...(19): siRNA sense strand
ucugagagcuaucaaacua

SEQ ID NO: 1582448 - RNA, 19 nt, Homo sapiens
  misc_RNA (1)...(19): siRNA sense strand
gcaauaaacagcaagaugu

SEQ ID NO: 1582449 - RNA, 19 nt, Homo sapiens
  misc_RNA (1)...(19): siRNA sense strand
ccaccuagaucuucaggaa

SEQ ID NO: 1582450 - RNA, 19 nt, Homo sapiens
  misc_RNA (1)...(19): siRNA sense strand
guacuuacacagaaacuaa

SEQ ID NO: 1582451 - RNA, 19 nt, Homo sapiens
  misc_RNA (1)...(19): siRNA sense strand
agugauagguaccaucuua

SEQ ID NO: 1582452 - RNA, 19 nt, Homo sapiens
  misc_RNA (1)...(19): siRNA sense strand
gauuaggagugcauacaaa

SEQ ID NO: 1582453 - RNA, 19 nt, Homo sapiens
  misc_RNA (1)...(19): siRNA sense strand
gguaaccgaugaaauuuua

SEQ ID NO: 1582454 - RNA, 19 nt, Homo sapiens
  misc_RNA (1)...(19): siRNA sense strand
guguugaucucaccuauga

SEQ ID NO: 1582455 - RNA, 19 nt, Homo sapiens
  misc_RNA (1)...(19): siRNA sense strand
gauuagcacugcagacaau

SEQ ID NO: 1582456 - RNA, 19 nt, Homo sapiens
  misc_RNA (1)...(19): siRNA sense strand
aacagaaggugucaaauug

SEQ ID NO: 1582457 - RNA, 19 nt, Homo sapiens
  misc_RNA (1)...(19): siRNA sense strand
ugaaacagccugaagaaug

SEQ ID NO: 1582458 - RNA, 19 nt, Homo sapiens
  misc_RNA (1)...(19): siRNA sense strand
gcagacaauuccugaagau

SEQ ID NO: 1582459 - RNA, 19 nt, Homo sapiens
  misc_RNA (1)...(19): siRNA sense strand
caaauccagugcuauugaa

SEQ ID NO: 1582460 - RNA, 19 nt, Homo sapiens
  misc_RNA (1)...(19): siRNA sense strand
gaugcuaacugucuugcuu

SEQ ID NO: 1582461 - RNA, 19 nt, Homo sapiens
  misc_RNA (1)...(19): siRNA sense strand
gaucucaccuaugauauuc

SEQ ID NO: 1582462 - RNA, 19 nt, Homo sapiens
  misc_RNA (1)...(19): siRNA sense strand
gugauuggguuaguguuua

SEQ ID NO: 1582463 - RNA, 19 nt, Homo sapiens
  misc_RNA (1)...(19): siRNA sense strand
ggucaugguugaggaguuu

SEQ ID NO: 1582464 - RNA, 19 nt, Homo sapiens
  misc_RNA (1)...(19): siRNA sense strand
gcaagugcaccaacagaaa

SEQ ID NO: 1582465 - RNA, 19 nt, Homo sapiens
  misc_RNA (1)...(19): siRNA sense strand
caaauccuauuccuguuau

SEQ ID NO: 1582466 - RNA, 19 nt, Homo sapiens
  misc_RNA (1)...(19): siRNA sense strand
acaaguaaauuccagugaa

SEQ ID NO: 1582467 - RNA, 19 nt, Homo sapiens
  misc_RNA (1)...(19): siRNA sense strand
caggguaaccgaugaaauu

SEQ ID NO: 1582468 - RNA, 19 nt, Homo sapiens
  misc_RNA (1)...(19): siRNA sense strand
ggacauccucaccucauaa

SEQ ID NO: 1582469 - RNA, 19 nt, Homo sapiens
  misc_RNA (1)...(19): siRNA sense strand
cauacaggcuacugaaguu

SEQ ID NO: 1582470 - RNA, 19 nt, Homo sapiens
  misc_RNA (1)...(19): siRNA sense strand
uaccaaacauugacaacuu

SEQ ID NO: 1582471 - RNA, 19 nt, Homo sapiens
  misc_RNA (1)...(19): siRNA sense strand
uuuaagagcuguugaagag

SEQ ID NO: 1582472 - RNA, 19 nt, Homo sapiens
  misc_RNA (1)...(19): siRNA sense strand
gguaccaucuuaugccuau

SEQ ID NO: 1582473 - RNA, 19 nt, Homo sapiens
  misc_RNA (1)...(19): siRNA sense strand
agacaauuccugaagauuu

SEQ ID NO: 1582474 - RNA, 19 nt, Homo sapiens
  misc_RNA (1)...(19): siRNA sense strand
agaagagagucccaagaaa

SEQ ID NO: 1582475 - RNA, 19 nt, Homo sapiens
  misc_RNA (1)...(19): siRNA sense strand
acacagaaacuaauugaga

SEQ ID NO: 1582476 - RNA, 19 nt, Homo sapiens
  misc_RNA (1)...(19): siRNA sense strand
ggcauuacuucuccuauca

SEQ ID NO: 1582477 - RNA, 19 nt, Homo sapiens
  misc_RNA (1)...(19): siRNA sense strand
caacauacaggcuacugaa

SEQ ID NO: 1582478 - RNA, 19 nt, Homo sapiens
  misc_RNA (1)...(19): siRNA sense strand
gaagaccaguccauugaac

SEQ ID NO: 1582479 - RNA, 19 nt, Homo sapiens
  misc_RNA (1)...(19): siRNA sense strand
cuaaucaugugcuucagaa

SEQ ID NO: 1582480 - RNA, 19 nt, Homo sapiens
  misc_RNA (1)...(19): siRNA sense strand
gaugaaauuuugcugagua

SEQ ID NO: 1582481 - RNA, 19 nt, Homo sapiens
  misc_RNA (1)...(19): siRNA sense strand
aaacacaaccgccacagaa

SEQ ID NO: 1582482 - RNA, 19 nt, Homo sapiens
  misc_RNA (1)...(19): siRNA sense strand
caacacggauggucauggu

SEQ ID NO: 1582483 - RNA, 19 nt, Homo sapiens
  misc_RNA (1)...(19): siRNA sense strand
aggaacaacuugauacaga

SEQ ID NO: 1582484 - RNA, 19 nt, Homo sapiens
  misc_RNA (1)...(19): siRNA sense strand
caacuacuaccuaaucaug

SEQ ID NO: 1582485 - RNA, 19 nt, Homo sapiens
  misc_RNA (1)...(19): siRNA sense strand
guuggaagcuuggagaaga

SEQ ID NO: 1582486 - RNA, 19 nt, Homo sapiens
  misc_RNA (1)...(19): siRNA sense strand
ucacagauacaguuuauag

SEQ ID NO: 1582487 - RNA, 19 nt, Homo sapiens
  misc_RNA (1)...(19): siRNA sense strand
gaagagagucccaagaaaa

SEQ ID NO: 1582488 - RNA, 19 nt, Homo sapiens
  misc_RNA (1)...(19): siRNA sense strand
gaaaucagugaaagcaaga

SEQ ID NO: 1582489 - RNA, 19 nt, Homo sapiens
  misc_RNA (1)...(19): siRNA sense strand
gaugggauagagauugaua

SEQ ID NO: 1582490 - RNA, 19 nt, Homo sapiens
  misc_RNA (1)...(19): siRNA sense strand
ugagagcuaucaaacuaug

SEQ ID NO: 1582491 - RNA, 19 nt, Homo sapiens
  misc_RNA (1)...(19): siRNA sense strand
gaacaacuugauacagaga

SEQ ID NO: 1582492 - RNA, 19 nt, Homo sapiens
  misc_RNA (1)...(19): siRNA sense strand
agaagaggaugaaacaagu

SEQ ID NO: 1582493 - RNA, 19 nt, Homo sapiens
  misc_RNA (1)...(19): siRNA sense strand
aaagaaagcaacuccauca

SEQ ID NO: 1582494 - RNA, 19 nt, Homo sapiens
  misc_RNA (1)...(19): siRNA sense strand
guugaucucaccuaugaua

SEQ ID NO: 1582495 - RNA, 19 nt, Homo sapiens
  misc_RNA (1)...(19): siRNA sense strand
cgagaugacagucugcuaa

SEQ ID NO: 1582496 - RNA, 19 nt, Homo sapiens
  misc_RNA (1)...(19): siRNA sense strand
gaaagcauuccucaaacug

SEQ ID NO: 1582497 - RNA, 19 nt, Homo sapiens
  misc_RNA (1)...(19): siRNA sense strand
gaagcuuggagaagaauga

SEQ ID NO: 1582498 - RNA, 19 nt, Homo sapiens
  misc_RNA (1)...(19): siRNA sense strand
cagcauacccacaacagaa

SEQ ID NO: 1582499 - RNA, 19 nt, Homo sapiens
  misc_RNA (1)...(19): siRNA sense strand
ccaaauccagugcuauuga

SEQ ID NO: 1582500 - RNA, 19 nt, Homo sapiens
  misc_RNA (1)...(19): siRNA sense strand
gagaugacagucugcuaaa

SEQ ID NO: 1582501 - RNA, 19 nt, Homo sapiens
  misc_RNA (1)...(19): siRNA sense strand
gcauucguaccaguuauua

SEQ ID NO: 1582502 - RNA, 19 nt, Homo sapiens
  misc_RNA (1)...(19): siRNA sense strand
gcagcaacuucaggaaaug

SEQ ID NO: 1582503 - RNA, 19 nt, Homo sapiens
  misc_RNA (1)...(19): siRNA sense strand
gaacuccacguacaaugug

SEQ ID NO: 1582504 - RNA, 19 nt, Homo sapiens
  misc_RNA (1)...(19): siRNA sense strand
gaagcacuauggcauuacu

SEQ ID NO: 1582505 - RNA, 19 nt, Homo sapiens
  misc_RNA (1)...(19): siRNA sense strand
aaguacaacucaaucagaa

SEQ ID NO: 1582506 - RNA, 19 nt, Homo sapiens
  misc_RNA (1)...(19): siRNA sense strand
caaguacaacucaaucaga

SEQ ID NO: 1582507 - RNA, 19 nt, Homo sapiens
  misc_RNA (1)...(19): siRNA sense strand
gaagcaaaggaacaacuug

SEQ ID NO: 1582508 - RNA, 19 nt, Homo sapiens
  misc_RNA (1)...(19): siRNA sense strand
gaacuugccagcuuuaucc

SEQ ID NO: 1582509 - RNA, 19 nt, Homo sapiens
  misc_RNA (1)...(19): siRNA sense strand
caaaggaacaacuugauac

SEQ ID NO: 1582510 - RNA, 19 nt, Homo sapiens
  misc_RNA (1)...(19): siRNA sense strand
aagaagagagucccaagaa

SEQ ID NO: 1582511 - RNA, 19 nt, Homo sapiens
  misc_RNA (1)...(19): siRNA sense strand
cagcaucugugaccaacau

SEQ ID NO: 1582512 - RNA, 19 nt, Homo sapiens
  misc_RNA (1)...(19): siRNA sense strand
ugauuggguuaguguuuaa

SEQ ID NO: 1582513 - RNA, 19 nt, Homo sapiens
  misc_RNA (1)...(19): siRNA sense strand
ggccaaauccagugcuauu

SEQ ID NO: 1582514 - RNA, 19 nt, Homo sapiens
  misc_RNA (1)...(19): siRNA sense strand
ccacacaaccagccauuuc

SEQ ID NO: 1582515 - RNA, 19 nt, Homo sapiens
  misc_RNA (1)...(19): siRNA sense strand
auugacaacuucagguuaa

SEQ ID NO: 1582516 - RNA, 19 nt, Homo sapiens
  misc_RNA (1)...(19): siRNA sense strand
ugaaagcauuccucaaacu

SEQ ID NO: 1582517 - RNA, 19 nt, Homo sapiens
  misc_RNA (1)...(19): siRNA sense strand
uacaaaaggugcugauauu

SEQ ID NO: 1582518 - RNA, 19 nt, Homo sapiens
  misc_RNA (1)...(19): siRNA sense strand
ccuacggucuccagaguug

SEQ ID NO: 1582519 - RNA, 19 nt, Homo sapiens
  misc_RNA (1)...(19): siRNA sense strand
agugaaagcauuccucaaa

SEQ ID NO: 1582520 - RNA, 19 nt, Homo sapiens
  misc_RNA (1)...(19): siRNA sense strand
cagcaugucugugccuuca

SEQ ID NO: 1582521 - RNA, 19 nt, Homo sapiens
  misc_RNA (1)...(19): siRNA sense strand
caucaacuacuaccuaauc

SEQ ID NO: 1582522 - RNA, 19 nt, Homo sapiens
  misc_RNA (1)...(19): siRNA sense strand
gccacaacaucuauuccaa

SEQ ID NO: 1582523 - RNA, 19 nt, Homo sapiens
  misc_RNA (1)...(19): siRNA sense strand
ccaaacgccacaacaucua

SEQ ID NO: 1582524 - RNA, 19 nt, Homo sapiens
  misc_RNA (1)...(19): siRNA sense strand
caucuaguaccaaacauug

SEQ ID NO: 1582525 - RNA, 19 nt, Homo sapiens
  misc_RNA (1)...(19): siRNA sense strand
gaagaauuucgcacgaugu

SEQ ID NO: 1582526 - RNA, 19 nt, Homo sapiens
  misc_RNA (1)...(19): siRNA sense strand
ugacagcagccucgacuug

SEQ ID NO: 1582527 - RNA, 19 nt, Homo sapiens
  misc_RNA (1)...(19): siRNA sense strand
ggugauuggguuaguguuu

SEQ ID NO: 1582528 - RNA, 19 nt, Homo sapiens
  misc_RNA (1)...(19): siRNA sense strand
ggucaacauuggacgauua

SEQ ID NO: 1582529 - RNA, 19 nt, Homo sapiens
  misc_RNA (1)...(19): siRNA sense strand
gcaaucaagcccaacagua

SEQ ID NO: 1582530 - RNA, 19 nt, Homo sapiens
  misc_RNA (1)...(19): siRNA sense strand
caaucaagcccaacaguau

SEQ ID NO: 1582531 - RNA, 19 nt, Homo sapiens
  misc_RNA (1)...(19): siRNA sense strand
gaacagugaauacgauuuu

SEQ ID NO: 1582532 - RNA, 19 nt, Homo sapiens
  misc_RNA (1)...(19): siRNA sense strand
cugaggagauucugauuca

SEQ ID NO: 1582533 - RNA, 19 nt, Homo sapiens
  misc_RNA (1)...(19): siRNA sense strand
gaggagauucugauucaug

SEQ ID NO: 1582534 - RNA, 19 nt, Homo sapiens
  misc_RNA (1)...(19): siRNA sense strand
caacgagagguucgacgua

SEQ ID NO: 1582535 - RNA, 19 nt, Homo sapiens
  misc_RNA (1)...(19): siRNA sense strand
gaccauggccauuguccaa

SEQ ID NO: 1582536 - RNA, 19 nt, Homo sapiens
  misc_RNA (1)...(19): siRNA sense strand
agacugagcggaagaagca

SEQ ID NO: 1582537 - RNA, 19 nt, Homo sapiens
  misc_RNA (1)...(19): siRNA sense strand
caacauuggacgauuagag

SEQ ID NO: 1582538 - RNA, 19 nt, Homo sapiens
  misc_RNA (1)...(19): siRNA sense strand
uuucuccucuuccuugauu

SEQ ID NO: 1582539 - RNA, 19 nt, Homo sapiens
  misc_RNA (1)...(19): siRNA sense strand
ucaggacacucccuugaac

SEQ ID NO: 1582540 - RNA, 19 nt, Homo sapiens
  misc_RNA (1)...(19): siRNA sense strand
aaucaagcccaacaguauu

SEQ ID NO: 1582541 - RNA, 19 nt, Homo sapiens
  misc_RNA (1)...(19): siRNA sense strand
aaucaggacacucccuuga

SEQ ID NO: 1582542 - RNA, 19 nt, Homo sapiens
  misc_RNA (1)...(19): siRNA sense strand
gcacggucaacgagagguu

SEQ ID NO: 1582543 - RNA, 19 nt, Homo sapiens
  misc_RNA (1)...(19): siRNA sense strand
caacaguauucggggauaa

SEQ ID NO: 1582544 - RNA, 19 nt, Homo sapiens
  misc_RNA (1)...(19): siRNA sense strand
cuugaacagugaauacgau

SEQ ID NO: 1582545 - RNA, 19 nt, Homo sapiens
  misc_RNA (1)...(19): siRNA sense strand
ggcagcuccuccagcaguu

SEQ ID NO: 1582546 - RNA, 19 nt, Homo sapiens
  misc_RNA (1)...(19): siRNA sense strand
ugaacagugaauacgauuu

SEQ ID NO: 1582547 - RNA, 19 nt, Homo sapiens
  misc_RNA (1)...(19): siRNA sense strand
cggaagacugggagacuga

SEQ ID NO: 1582548 - RNA, 19 nt, Homo sapiens
  misc_RNA (1)...(19): siRNA sense strand
guggauggcaguggaauca

SEQ ID NO: 1582549 - RNA, 19 nt, Homo sapiens
  misc_RNA (1)...(19): siRNA sense strand
ggacacucccuugaacagu

SEQ ID NO: 1582550 - RNA, 19 nt, Homo sapiens
  misc_RNA (1)...(19): siRNA sense strand
ggucaacauuggacgauua

SEQ ID NO: 1582551 - RNA, 19 nt, Homo sapiens
  misc_RNA (1)...(19): siRNA sense strand
ggacugggauuuacguuau

SEQ ID NO: 1582552 - RNA, 19 nt, Homo sapiens
  misc_RNA (1)...(19): siRNA sense strand
ccagaacacuguccagauu

SEQ ID NO: 1582553 - RNA, 19 nt, Homo sapiens
  misc_RNA (1)...(19): siRNA sense strand
gcaaucaagcccaacagua

SEQ ID NO: 1582554 - RNA, 19 nt, Homo sapiens
  misc_RNA (1)...(19): siRNA sense strand
ggauuuacguuauagcaau

SEQ ID NO: 1582555 - RNA, 19 nt, Homo sapiens
  misc_RNA (1)...(19): siRNA sense strand
gaccugcuaucuccucuga

SEQ ID NO: 1582556 - RNA, 19 nt, Homo sapiens
  misc_RNA (1)...(19): siRNA sense strand
uuauagcaaugcacagaua

SEQ ID NO: 1582557 - RNA, 19 nt, Homo sapiens
  misc_RNA (1)...(19): siRNA sense strand
caaucaagcccaacaguau

SEQ ID NO: 1582558 - RNA, 19 nt, Homo sapiens
  misc_RNA (1)...(19): siRNA sense strand
ccacauaccauucucaauc

SEQ ID NO: 1582559 - RNA, 19 nt, Homo sapiens
  misc_RNA (1)...(19): siRNA sense strand
gaggaucacuccaagaaaa

SEQ ID NO: 1582560 - RNA, 19 nt, Homo sapiens
  misc_RNA (1)...(19): siRNA sense strand
ccugcuaucuccucugaaa

SEQ ID NO: 1582561 - RNA, 19 nt, Homo sapiens
  misc_RNA (1)...(19): siRNA sense strand
gaacagugaauacgauuuu

SEQ ID NO: 1582562 - RNA, 19 nt, Homo sapiens
  misc_RNA (1)...(19): siRNA sense strand
ugaaauugcuggcauucuc

SEQ ID NO: 1582563 - RNA, 19 nt, Homo sapiens
  misc_RNA (1)...(19): siRNA sense strand
gcacagauacuacaauucc

SEQ ID NO: 1582564 - RNA, 19 nt, Homo sapiens
  misc_RNA (1)...(19): siRNA sense strand
cugaggagauucugauuca

SEQ ID NO: 1582565 - RNA, 19 nt, Homo sapiens
  misc_RNA (1)...(19): siRNA sense strand
gaggagauucugauucaug

SEQ ID NO: 1582566 - RNA, 19 nt, Homo sapiens
  misc_RNA (1)...(19): siRNA sense strand
gaaaagagauccacauacc

SEQ ID NO: 1582567 - RNA, 19 nt, Homo sapiens
  misc_RNA (1)...(19): siRNA sense strand
gacugggauuuacguuaua

SEQ ID NO: 1582568 - RNA, 19 nt, Homo sapiens
  misc_RNA (1)...(19): siRNA sense strand
caacgagagguucgacgua

SEQ ID NO: 1582569 - RNA, 19 nt, Homo sapiens
  misc_RNA (1)...(19): siRNA sense strand
gaaauugcuggcauucuca

SEQ ID NO: 1582570 - RNA, 19 nt, Homo sapiens
  misc_RNA (1)...(19): siRNA sense strand
guuaaacuccuauacacaa

SEQ ID NO: 1582571 - RNA, 19 nt, Homo sapiens
  misc_RNA (1)...(19): siRNA sense strand
uaucccaucuucaggaguu

SEQ ID NO: 1582572 - RNA, 19 nt, Homo sapiens
  misc_RNA (1)...(19): siRNA sense strand
gggacugggauuuacguua

SEQ ID NO: 1582573 - RNA, 19 nt, Homo sapiens
  misc_RNA (1)...(19): siRNA sense strand
gcaaugcacagauacuaca

SEQ ID NO: 1582574 - RNA, 19 nt, Homo sapiens
  misc_RNA (1)...(19): siRNA sense strand
gauuuacguuauagcaaug

SEQ ID NO: 1582575 - RNA, 19 nt, Homo sapiens
  misc_RNA (1)...(19): siRNA sense strand
gaccauggccauuguccaa

SEQ ID NO: 1582576 - RNA, 19 nt, Homo sapiens
  misc_RNA (1)...(19): siRNA sense strand
acccuuaccuuccugagaa

SEQ ID NO: 1582577 - RNA, 19 nt, Homo sapiens
  misc_RNA (1)...(19): siRNA sense strand
augcacagauacuacaauu

SEQ ID NO: 1582578 - RNA, 19 nt, Homo sapiens
  misc_RNA (1)...(19): siRNA sense strand
agacugagcggaagaagca

SEQ ID NO: 1582579 - RNA, 19 nt, Homo sapiens
  misc_RNA (1)...(19): siRNA sense strand
caacauuggacgauuagag

SEQ ID NO: 1582580 - RNA, 19 nt, Homo sapiens
  misc_RNA (1)...(19): siRNA sense strand
uuucuccucuuccuugauu

SEQ ID NO: 1582581 - RNA, 19 nt, Homo sapiens
  misc_RNA (1)...(19): siRNA sense strand
aaagagauccacauaccau

SEQ ID NO: 1582582 - RNA, 19 nt, Homo sapiens
  misc_RNA (1)...(19): siRNA sense strand
ucaggacacucccuugaac

SEQ ID NO: 1582583 - RNA, 19 nt, Homo sapiens
  misc_RNA (1)...(19): siRNA sense strand
aaacuccuauacacaaguc

SEQ ID NO: 1582584 - RNA, 19 nt, Homo sapiens
  misc_RNA (1)...(19): siRNA sense strand
ugucugggacugggauuua

SEQ ID NO: 1582585 - RNA, 19 nt, Homo sapiens
  misc_RNA (1)...(19): siRNA sense strand
uagcaaugcacagauacua

SEQ ID NO: 1582586 - RNA, 19 nt, Homo sapiens
  misc_RNA (1)...(19): siRNA sense strand
aaucaagcccaacaguauu

SEQ ID NO: 1582587 - RNA, 19 nt, Homo sapiens
  misc_RNA (1)...(19): siRNA sense strand
cugaggaucacuccaagaa

SEQ ID NO: 1582588 - RNA, 19 nt, Homo sapiens
  misc_RNA (1)...(19): siRNA sense strand
ucucaaucccacugaaauu

SEQ ID NO: 1582589 - RNA, 19 nt, Homo sapiens
  misc_RNA (1)...(19): siRNA sense strand
uuggggagcuugcccuuua

SEQ ID NO: 1582590 - RNA, 19 nt, Homo sapiens
  misc_RNA (1)...(19): siRNA sense strand
gcacggucaacgagagguu

SEQ ID NO: 1582591 - RNA, 19 nt, Homo sapiens
  misc_RNA (1)...(19): siRNA sense strand
aaucaggacacucccuuga

SEQ ID NO: 1582592 - RNA, 19 nt, Homo sapiens
  misc_RNA (1)...(19): siRNA sense strand
gggauuuacguuauagcaa

SEQ ID NO: 1582593 - RNA, 19 nt, Homo sapiens
  misc_RNA (1)...(19): siRNA sense strand
caacaguauucggggauaa

SEQ ID NO: 1582594 - RNA, 19 nt, Homo sapiens
  misc_RNA (1)...(19): siRNA sense strand
gagauccacauaccauucu

SEQ ID NO: 1582595 - RNA, 19 nt, Homo sapiens
  misc_RNA (1)...(19): siRNA sense strand
uuaaacuccuauacacaag

SEQ ID NO: 1582596 - RNA, 19 nt, Homo sapiens
  misc_RNA (1)...(19): siRNA sense strand
ggcagcuccuccagcaguu

SEQ ID NO: 1582597 - RNA, 19 nt, Homo sapiens
  misc_RNA (1)...(19): siRNA sense strand
ugaacagugaauacgauuu

SEQ ID NO: 1582598 - RNA, 19 nt, Homo sapiens
  misc_RNA (1)...(19): siRNA sense strand
cuugaacagugaauacgau

SEQ ID NO: 1582599 - RNA, 19 nt, Homo sapiens
  misc_RNA (1)...(19): siRNA sense strand
guggauggcaguggaauca

SEQ ID NO: 1582600 - RNA, 19 nt, Homo sapiens
  misc_RNA (1)...(19): siRNA sense strand
cacugaaauugcuggcauu

SEQ ID NO: 1582601 - RNA, 19 nt, Homo sapiens
  misc_RNA (1)...(19): siRNA sense strand
ggacacucccuugaacagu

SEQ ID NO: 1582602 - RNA, 19 nt, Homo sapiens
  misc_RNA (1)...(19): siRNA sense strand
cggaagacugggagacuga

SEQ ID NO: 1582603 - RNA, 19 nt, Homo sapiens
  misc_RNA (1)...(19): siRNA sense strand
ugaggaucacuccaagaaa

SEQ ID NO: 1582604 - RNA, 19 nt, Homo sapiens
  misc_RNA (1)...(19): siRNA sense strand
cacauaccauucucaaucc

SEQ ID NO: 1582605 - RNA, 19 nt, Homo sapiens
  misc_RNA (1)...(19): siRNA sense strand
caucaucucucaggcaaua

SEQ ID NO: 1582606 - RNA, 19 nt, Homo sapiens
  misc_RNA (1)...(19): siRNA sense strand
ggcaauaccuggacucugu

SEQ ID NO: 1582607 - RNA, 19 nt, Homo sapiens
  misc_RNA (1)...(19): siRNA sense strand
gugccgagcuagaccacaa

SEQ ID NO: 1582608 - RNA, 19 nt, Homo sapiens
  misc_RNA (1)...(19): siRNA sense strand
gcaguuggaccgccacauc

SEQ ID NO: 1582609 - RNA, 19 nt, Homo sapiens
  misc_RNA (1)...(19): siRNA sense strand
gccaggagcaacagccaaa

SEQ ID NO: 1582610 - RNA, 19 nt, Homo sapiens
  misc_RNA (1)...(19): siRNA sense strand
aaaggcuagugccgagcua

SEQ ID NO: 1582611 - RNA, 19 nt, Homo sapiens
  misc_RNA (1)...(19): siRNA sense strand
cuacagaccucccacaaau

SEQ ID NO: 1582612 - RNA, 19 nt, Homo sapiens
  misc_RNA (1)...(19): siRNA sense strand
gaaaagaccucagagaaca

SEQ ID NO: 1582613 - RNA, 19 nt, Homo sapiens
  misc_RNA (1)...(19): siRNA sense strand
acagaccucccacaaauua

SEQ ID NO: 1582614 - RNA, 19 nt, Homo sapiens
  misc_RNA (1)...(19): siRNA sense strand
gaaccuuggcguccacaaa

SEQ ID NO: 1582615 - RNA, 19 nt, Homo sapiens
  misc_RNA (1)...(19): siRNA sense strand
gaacauccgcuccgacucu

SEQ ID NO: 1582616 - RNA, 19 nt, Homo sapiens
  misc_RNA (1)...(19): siRNA sense strand
guguacaccugcagaguug

SEQ ID NO: 1582617 - RNA, 19 nt, Homo sapiens
  misc_RNA (1)...(19): siRNA sense strand
ccuaacagcucgacagaac

SEQ ID NO: 1582618 - RNA, 19 nt, Homo sapiens
  misc_RNA (1)...(19): siRNA sense strand
ggugggacauggaagaaca

SEQ ID NO: 1582619 - RNA, 19 nt, Homo sapiens
  misc_RNA (1)...(19): siRNA sense strand
cauucuggcuucuuaacuu

SEQ ID NO: 1582620 - RNA, 19 nt, Homo sapiens
  misc_RNA (1)...(19): siRNA sense strand
gcuggacacugggaaaugu

SEQ ID NO: 1582621 - RNA, 19 nt, Homo sapiens
  misc_RNA (1)...(19): siRNA sense strand
gggaaaagaccucagagaa

SEQ ID NO: 1582622 - RNA, 19 nt, Homo sapiens
  misc_RNA (1)...(19): siRNA sense strand
gcucagacaggacaacaag

SEQ ID NO: 1582623 - RNA, 19 nt, Homo sapiens
  misc_RNA (1)...(19): siRNA sense strand
gacaggacaacaagagugu

SEQ ID NO: 1582624 - RNA, 19 nt, Homo sapiens
  misc_RNA (1)...(19): siRNA sense strand
ucacccaaccuaccacuuc

SEQ ID NO: 1582625 - RNA, 19 nt, Homo sapiens
  misc_RNA (1)...(19): siRNA sense strand
cacccaaccuaccacuuca

SEQ ID NO: 1582626 - RNA, 19 nt, Homo sapiens
  misc_RNA (1)...(19): siRNA sense strand
ggacuugaggugggacaug

SEQ ID NO: 1582627 - RNA, 19 nt, Homo sapiens
  misc_RNA (1)...(19): siRNA sense strand
ccuacagaccucccacaaa

SEQ ID NO: 1582628 - RNA, 19 nt, Homo sapiens
  misc_RNA (1)...(19): siRNA sense strand
ggaaaagaccucagagaac

SEQ ID NO: 1582629 - RNA, 19 nt, Homo sapiens
  misc_RNA (1)...(19): siRNA sense strand
gaggugggacauggaagaa

SEQ ID NO: 1582630 - RNA, 19 nt, Homo sapiens
  misc_RNA (1)...(19): siRNA sense strand
ccacuucagagccgggaaa

SEQ ID NO: 1582631 - RNA, 19 nt, Homo sapiens
  misc_RNA (1)...(19): siRNA sense strand
ccugcagaguuguaacaug

SEQ ID NO: 1582632 - RNA, 19 nt, Homo sapiens
  misc_RNA (1)...(19): siRNA sense strand
ucagacaggacaacaagag

SEQ ID NO: 1582633 - RNA, 19 nt, Homo sapiens
  misc_RNA (1)...(19): siRNA sense strand
ugaggugggacauggaaga

SEQ ID NO: 1582634 - RNA, 19 nt, Homo sapiens
  misc_RNA (1)...(19): siRNA sense strand
ggacgaggcuuuaaugaua

SEQ ID NO: 1582635 - RNA, 19 nt, Homo sapiens
  misc_RNA (1)...(19): siRNA sense strand
ggagagaagccuuauauuu

SEQ ID NO: 1582636 - RNA, 19 nt, Homo sapiens
  misc_RNA (1)...(19): siRNA sense strand
ggagacagcuuuggcagua

SEQ ID NO: 1582637 - RNA, 19 nt, Homo sapiens
  misc_RNA (1)...(19): siRNA sense strand
gcagaagccuaaccuguuu

SEQ ID NO: 1582638 - RNA, 19 nt, Homo sapiens
  misc_RNA (1)...(19): siRNA sense strand
gagagaagccuuauauuug

SEQ ID NO: 1582639 - RNA, 19 nt, Homo sapiens
  misc_RNA (1)...(19): siRNA sense strand
ggacgaggcuuuacuugga

SEQ ID NO: 1582640 - RNA, 19 nt, Homo sapiens
  misc_RNA (1)...(19): siRNA sense strand
gagagaagccuuacauuug

SEQ ID NO: 1582641 - RNA, 19 nt, Homo sapiens
  misc_RNA (1)...(19): siRNA sense strand
ggaaacagacaaaguauug

SEQ ID NO: 1582642 - RNA, 19 nt, Homo sapiens
  misc_RNA (1)...(19): siRNA sense strand
ggagagaagccuuacauuu

SEQ ID NO: 1582643 - RNA, 19 nt, Homo sapiens
  misc_RNA (1)...(19): siRNA sense strand
gaaauuccaucuucuaaac

SEQ ID NO: 1582644 - RNA, 19 nt, Homo sapiens
  misc_RNA (1)...(19): siRNA sense strand
ggagacaccuuacauguac

SEQ ID NO: 1582645 - RNA, 19 nt, Homo sapiens
  misc_RNA (1)...(19): siRNA sense strand
gagaagccauuuguaugua

SEQ ID NO: 1582646 - RNA, 19 nt, Homo sapiens
  misc_RNA (1)...(19): siRNA sense strand
ggagagaagccuuauguau

SEQ ID NO: 1582647 - RNA, 19 nt, Homo sapiens
  misc_RNA (1)...(19): siRNA sense strand
gaagucaaaccuuaacaaa

SEQ ID NO: 1582648 - RNA, 19 nt, Homo sapiens
  misc_RNA (1)...(19): siRNA sense strand
gagagaagccuuauguaug

SEQ ID NO: 1582649 - RNA, 19 nt, Homo sapiens
  misc_RNA (1)...(19): siRNA sense strand
caggauccauucugcuuua

SEQ ID NO: 1582650 - RNA, 19 nt, Homo sapiens
  misc_RNA (1)...(19): siRNA sense strand
gacaaaguauugcaugguu

SEQ ID NO: 1582651 - RNA, 19 nt, Homo sapiens
  misc_RNA (1)...(19): siRNA sense strand
ggagaagccuuauguuugc

SEQ ID NO: 1582652 - RNA, 19 nt, Homo sapiens
  misc_RNA (1)...(19): siRNA sense strand
caaaguauugcaugguuua

SEQ ID NO: 1582653 - RNA, 19 nt, Homo sapiens
  misc_RNA (1)...(19): siRNA sense strand
gggagaagccuuauguuug

SEQ ID NO: 1582654 - RNA, 19 nt, Homo sapiens
  misc_RNA (1)...(19): siRNA sense strand
gacgaggcuuuaaugauaa

SEQ ID NO: 1582655 - RNA, 19 nt, Homo sapiens
  misc_RNA (1)...(19): siRNA sense strand
agucaaaccuuaacaaaca

SEQ ID NO: 1582656 - RNA, 19 nt, Homo sapiens
  misc_RNA (1)...(19): siRNA sense strand
cuacaaugcucccuacaug

SEQ ID NO: 1582657 - RNA, 19 nt, Homo sapiens
  misc_RNA (1)...(19): siRNA sense strand
gagggcagaucuagaggaa

SEQ ID NO: 1582658 - RNA, 19 nt, Homo sapiens
  misc_RNA (1)...(19): siRNA sense strand
ggagaagccauuuguaugu

SEQ ID NO: 1582659 - RNA, 19 nt, Homo sapiens
  misc_RNA (1)...(19): siRNA sense strand
ggagaagccauuuguaugu

SEQ ID NO: 1582660 - RNA, 19 nt, Homo sapiens
  misc_RNA (1)...(19): siRNA sense strand
caucuggucucacuggaaa

SEQ ID NO: 1582661 - RNA, 19 nt, Homo sapiens
  misc_RNA (1)...(19): siRNA sense strand
gaaugugggcagagcuuua

SEQ ID NO: 1582662 - RNA, 19 nt, Homo sapiens
  misc_RNA (1)...(19): siRNA sense strand
caccuuacauguacacuga

SEQ ID NO: 1582663 - RNA, 19 nt, Homo sapiens
  misc_RNA (1)...(19): siRNA sense strand
gcuuuagccugaagucaaa

SEQ ID NO: 1582664 - RNA, 19 nt, Homo sapiens
  misc_RNA (1)...(19): siRNA sense strand
gauaaguccacccucauuu

SEQ ID NO: 1582665 - RNA, 19 nt, Homo sapiens
  misc_RNA (1)...(19): siRNA sense strand
ggauguggcuguguacuuc

SEQ ID NO: 1582666 - RNA, 19 nt, Homo sapiens
  misc_RNA (1)...(19): siRNA sense strand
gcuuuagccugaagucaaa

SEQ ID NO: 1582667 - RNA, 19 nt, Homo sapiens
  misc_RNA (1)...(19): siRNA sense strand
gggagacaccuuacaugua

SEQ ID NO: 1582668 - RNA, 19 nt, Homo sapiens
  misc_RNA (1)...(19): siRNA sense strand
gcagaagguuucggcagaa

SEQ ID NO: 1582669 - RNA, 19 nt, Homo sapiens
  misc_RNA (1)...(19): siRNA sense strand
gcuaaguuaacucucauua

SEQ ID NO: 1582670 - RNA, 19 nt, Homo sapiens
  misc_RNA (1)...(19): siRNA sense strand
gauccauucugcuuuagug

SEQ ID NO: 1582671 - RNA, 19 nt, Homo sapiens
  misc_RNA (1)...(19): siRNA sense strand
agucggaaguccaaccuua

SEQ ID NO: 1582672 - RNA, 19 nt, Homo sapiens
  misc_RNA (1)...(19): siRNA sense strand
gaagucacaccucaucaga

SEQ ID NO: 1582673 - RNA, 19 nt, Homo sapiens
  misc_RNA (1)...(19): siRNA sense strand
ggagaaaucaaauaugaag

SEQ ID NO: 1582674 - RNA, 19 nt, Homo sapiens
  misc_RNA (1)...(19): siRNA sense strand
ucagggauguggcugugua

SEQ ID NO: 1582675 - RNA, 19 nt, Homo sapiens
  misc_RNA (1)...(19): siRNA sense strand
gggcaaggcuuuugugcua

SEQ ID NO: 1582676 - RNA, 19 nt, Homo sapiens
  misc_RNA (1)...(19): siRNA sense strand
gggcagaucuagaggaaac

SEQ ID NO: 1582677 - RNA, 19 nt, Homo sapiens
  misc_RNA (1)...(19): siRNA sense strand
agaggaaacagacaaagua

SEQ ID NO: 1582678 - RNA, 19 nt, Homo sapiens
  misc_RNA (1)...(19): siRNA sense strand
gagaagccauuuguaugug

SEQ ID NO: 1582679 - RNA, 19 nt, Homo sapiens
  misc_RNA (1)...(19): siRNA sense strand
gaaugugggcgaggcuuua

SEQ ID NO: 1582680 - RNA, 19 nt, Homo sapiens
  misc_RNA (1)...(19): siRNA sense strand
caacacagugguggauaua

SEQ ID NO: 1582681 - RNA, 19 nt, Homo sapiens
  misc_RNA (1)...(19): siRNA sense strand
agucaaaccugaucacaca

SEQ ID NO: 1582682 - RNA, 19 nt, Homo sapiens
  misc_RNA (1)...(19): siRNA sense strand
caggagagaagccuuauau

SEQ ID NO: 1582683 - RNA, 19 nt, Homo sapiens
  misc_RNA (1)...(19): siRNA sense strand
gaacggagggcagaucuag

SEQ ID NO: 1582684 - RNA, 19 nt, Homo sapiens
  misc_RNA (1)...(19): siRNA sense strand
guuuagaagucucaggauu

SEQ ID NO: 1582685 - RNA, 19 nt, Homo sapiens
  misc_RNA (1)...(19): siRNA sense strand
uuagaagucucaggauuug

SEQ ID NO: 1582686 - RNA, 19 nt, Homo sapiens
  misc_RNA (1)...(19): siRNA sense strand
gggagaagccauuuguaug

SEQ ID NO: 1582687 - RNA, 19 nt, Homo sapiens
  misc_RNA (1)...(19): siRNA sense strand
gggagaagccauuuguaug

SEQ ID NO: 1582688 - RNA, 19 nt, Homo sapiens
  misc_RNA (1)...(19): siRNA sense strand
cacuuuagcuggaaaucaa

SEQ ID NO: 1582689 - RNA, 19 nt, Homo sapiens
  misc_RNA (1)...(19): siRNA sense strand
agagaagccuuauguaugc

SEQ ID NO: 1582690 - RNA, 19 nt, Homo sapiens
  misc_RNA (1)...(19): siRNA sense strand
acaaaguauugcaugguuu

SEQ ID NO: 1582691 - RNA, 19 nt, Homo sapiens
  misc_RNA (1)...(19): siRNA sense strand
gaaguccaaccuuaucaga

SEQ ID NO: 1582692 - RNA, 19 nt, Homo sapiens
  misc_RNA (1)...(19): siRNA sense strand
agccugaagucaaaccuua

SEQ ID NO: 1582693 - RNA, 19 nt, Homo sapiens
  misc_RNA (1)...(19): siRNA sense strand
cagaagaucagaaacaaca

SEQ ID NO: 1582694 - RNA, 19 nt, Homo sapiens
  misc_RNA (1)...(19): siRNA sense strand
gcacaagagggcacacuca

SEQ ID NO: 1582695 - RNA, 19 nt, Homo sapiens
  misc_RNA (1)...(19): siRNA sense strand
uggcaaagcagaauggauu

SEQ ID NO: 1582696 - RNA, 19 nt, Homo sapiens
  misc_RNA (1)...(19): siRNA sense strand
gcagucacaccucauuaga

SEQ ID NO: 1582697 - RNA, 19 nt, Homo sapiens
  misc_RNA (1)...(19): siRNA sense strand
ggcagaagccuaaccuguu

SEQ ID NO: 1582698 - RNA, 19 nt, Homo sapiens
  misc_RNA (1)...(19): siRNA sense strand
cagcccaccugaagaacaa

SEQ ID NO: 1582699 - RNA, 19 nt, Homo sapiens
  misc_RNA (1)...(19): siRNA sense strand
ggaaaacacuauccagaag

SEQ ID NO: 1582700 - RNA, 19 nt, Homo sapiens
  misc_RNA (1)...(19): siRNA sense strand
agagaagccuuauauuugc

SEQ ID NO: 1582701 - RNA, 19 nt, Homo sapiens
  misc_RNA (1)...(19): siRNA sense strand
gacgaggcuuuacuuggaa

SEQ ID NO: 1582702 - RNA, 19 nt, Homo sapiens
  misc_RNA (1)...(19): siRNA sense strand
gaggaaacagacaaaguau

SEQ ID NO: 1582703 - RNA, 19 nt, Homo sapiens
  misc_RNA (1)...(19): siRNA sense strand
ggaaugugggcgaggcuuu

SEQ ID NO: 1582704 - RNA, 19 nt, Homo sapiens
  misc_RNA (1)...(19): siRNA sense strand
acacucaggugccuuugug

SEQ ID NO: 1582705 - RNA, 19 nt, Homo sapiens
  misc_RNA (1)...(19): siRNA sense strand
ggaaugugggcguggcuuu

SEQ ID NO: 1582706 - RNA, 19 nt, Homo sapiens
  misc_RNA (1)...(19): siRNA sense strand
gcuggagacuuauaaccau

SEQ ID NO: 1582707 - RNA, 19 nt, Homo sapiens
  misc_RNA (1)...(19): siRNA sense strand
gaacaacagccagcacagu

SEQ ID NO: 1582708 - RNA, 19 nt, Homo sapiens
  misc_RNA (1)...(19): siRNA sense strand
gagaagccuuauauuugca

SEQ ID NO: 1582709 - RNA, 19 nt, Homo sapiens
  misc_RNA (1)...(19): siRNA sense strand
guucacagacaaaccauga

SEQ ID NO: 1582710 - RNA, 19 nt, Homo sapiens
  misc_RNA (1)...(19): siRNA sense strand
acacaggagagaagccuua

SEQ ID NO: 1582711 - RNA, 19 nt, Homo sapiens
  misc_RNA (1)...(19): siRNA sense strand
agucgaaccucuuuacaca

SEQ ID NO: 1582712 - RNA, 19 nt, Homo sapiens
  misc_RNA (1)...(19): siRNA sense strand
ggaagucgaaccucuuuac

SEQ ID NO: 1582713 - RNA, 19 nt, Homo sapiens
  misc_RNA (1)...(19): siRNA sense strand
aguauugcaugguuuagaa

SEQ ID NO: 1582714 - RNA, 19 nt, Homo sapiens
  misc_RNA (1)...(19): siRNA sense strand
ggccaggcuuuaucaagga

SEQ ID NO: 1582715 - RNA, 19 nt, Homo sapiens
  misc_RNA (1)...(19): siRNA sense strand
caggagagaagccuuaugu

SEQ ID NO: 1582716 - RNA, 19 nt, Homo sapiens
  misc_RNA (1)...(19): siRNA sense strand
agagaagccuuacauuugc

SEQ ID NO: 1582717 - RNA, 19 nt, Homo sapiens
  misc_RNA (1)...(19): siRNA sense strand
gccagaaauucaacuuagu

SEQ ID NO: 1582718 - RNA, 19 nt, Homo sapiens
  misc_RNA (1)...(19): siRNA sense strand
agucacaccucauuagaca

SEQ ID NO: 1582719 - RNA, 19 nt, Homo sapiens
  misc_RNA (1)...(19): siRNA sense strand
gcagagcuuuagccugaag

SEQ ID NO: 1582720 - RNA, 19 nt, Homo sapiens
  misc_RNA (1)...(19): siRNA sense strand
aggugaugcuggagacuua

SEQ ID NO: 1582721 - RNA, 19 nt, Homo sapiens
  misc_RNA (1)...(19): siRNA sense strand
acaacacagugguggauau

SEQ ID NO: 1582722 - RNA, 19 nt, Homo sapiens
  misc_RNA (1)...(19): siRNA sense strand
gcucucagccaacaugugu

SEQ ID NO: 1582723 - RNA, 19 nt, Homo sapiens
  misc_RNA (1)...(19): siRNA sense strand
gagaagccuuacauuugca

SEQ ID NO: 1582724 - RNA, 19 nt, Homo sapiens
  misc_RNA (1)...(19): siRNA sense strand
guaugucaguccucaucaa

SEQ ID NO: 1582725 - RNA, 19 nt, Homo sapiens
  misc_RNA (1)...(19): siRNA sense strand
aaucgaagccagaaauuca

SEQ ID NO: 1582726 - RNA, 19 nt, Homo sapiens
  misc_RNA (1)...(19): siRNA sense strand
gaagccagaaauucaacuu

SEQ ID NO: 1582727 - RNA, 19 nt, Homo sapiens
  misc_RNA (1)...(19): siRNA sense strand
gaaaucaaaccucaaaaca

SEQ ID NO: 1582728 - RNA, 19 nt, Homo sapiens
  misc_RNA (1)...(19): siRNA sense strand
ggagugugagcaaggcuuu

SEQ ID NO: 1582729 - RNA, 19 nt, Homo sapiens
  misc_RNA (1)...(19): siRNA sense strand
gauuguggacgaggcuuua

SEQ ID NO: 1582730 - RNA, 19 nt, Homo sapiens
  misc_RNA (1)...(19): siRNA sense strand
gaggacacacucaggauag

SEQ ID NO: 1582731 - RNA, 19 nt, Homo sapiens
  misc_RNA (1)...(19): siRNA sense strand
agucacaccucaucagaca

SEQ ID NO: 1582732 - RNA, 19 nt, Homo sapiens
  misc_RNA (1)...(19): siRNA sense strand
ucgaaccucuuuacacauc

SEQ ID NO: 1582733 - RNA, 19 nt, Homo sapiens
  misc_RNA (1)...(19): siRNA sense strand
gaagucgaaccucuuuaca

SEQ ID NO: 1582734 - RNA, 19 nt, Homo sapiens
  misc_RNA (1)...(19): siRNA sense strand
ggacgaagacgcggaagaa

SEQ ID NO: 1582735 - RNA, 19 nt, Homo sapiens
  misc_RNA (1)...(19): siRNA sense strand
ccgggaaacagaauaauuu

SEQ ID NO: 1582736 - RNA, 19 nt, Homo sapiens
  misc_RNA (1)...(19): siRNA sense strand
ggacugcgaggacgacgaa

SEQ ID NO: 1582737 - RNA, 19 nt, Homo sapiens
  misc_RNA (1)...(19): siRNA sense strand
gcgaggacgacgaagauga

SEQ ID NO: 1582738 - RNA, 19 nt, Homo sapiens
  misc_RNA (1)...(19): siRNA sense strand
cgaagacgcggaagaagag

SEQ ID NO: 1582739 - RNA, 19 nt, Homo sapiens
  misc_RNA (1)...(19): siRNA sense strand
ggacugggagaucgauguc

SEQ ID NO: 1582740 - RNA, 19 nt, Homo sapiens
  misc_RNA (1)...(19): siRNA sense strand
acgaagacgcggaagaaga

SEQ ID NO: 1582741 - RNA, 19 nt, Homo sapiens
  misc_RNA (1)...(19): siRNA sense strand
gaauaauuucgagcgcaaa

SEQ ID NO: 1582742 - RNA, 19 nt, Homo sapiens
  misc_RNA (1)...(19): siRNA sense strand
guaccagaggcaagucaga

SEQ ID NO: 1582743 - RNA, 19 nt, Homo sapiens
  misc_RNA (1)...(19): siRNA sense strand
gaagagccuuugcugauaa

SEQ ID NO: 1582744 - RNA, 19 nt, Homo sapiens
  misc_RNA (1)...(19): siRNA sense strand
gcaaggacuucuguaauuu

SEQ ID NO: 1582745 - RNA, 19 nt, Homo sapiens
  misc_RNA (1)...(19): siRNA sense strand
ggagagagaauauaaagaa

SEQ ID NO: 1582746 - RNA, 19 nt, Homo sapiens
  misc_RNA (1)...(19): siRNA sense strand
gaauuucucucccauuguu

SEQ ID NO: 1582747 - RNA, 19 nt, Homo sapiens
  misc_RNA (1)...(19): siRNA sense strand
uaacgaagaucagcaaaga

SEQ ID NO: 1582748 - RNA, 19 nt, Homo sapiens
  misc_RNA (1)...(19): siRNA sense strand
gaacaaaacucucggugaa

SEQ ID NO: 1582749 - RNA, 19 nt, Homo sapiens
  misc_RNA (1)...(19): siRNA sense strand
gcaaacacuuacugacaaa

SEQ ID NO: 1582750 - RNA, 19 nt, Homo sapiens
  misc_RNA (1)...(19): siRNA sense strand
caaaucggguccugaguug

SEQ ID NO: 1582751 - RNA, 19 nt, Homo sapiens
  misc_RNA (1)...(19): siRNA sense strand
cacagagaguguuuaguua

SEQ ID NO: 1582752 - RNA, 19 nt, Homo sapiens
  misc_RNA (1)...(19): siRNA sense strand
ugacuacaauuccuacaaa

SEQ ID NO: 1582753 - RNA, 19 nt, Homo sapiens
  misc_RNA (1)...(19): siRNA sense strand
aaccagaaguacacauuua

SEQ ID NO: 1582754 - RNA, 19 nt, Homo sapiens
  misc_RNA (1)...(19): siRNA sense strand
gggaauauggaacuaauuu

SEQ ID NO: 1582755 - RNA, 19 nt, Homo sapiens
  misc_RNA (1)...(19): siRNA sense strand
agaagagccuuugcugaua

SEQ ID NO: 1582756 - RNA, 19 nt, Homo sapiens
  misc_RNA (1)...(19): siRNA sense strand
ucaagcugcugcucuguuu

SEQ ID NO: 1582757 - RNA, 19 nt, Homo sapiens
  misc_RNA (1)...(19): siRNA sense strand
gagagaauauaaagaaagg

SEQ ID NO: 1582758 - RNA, 19 nt, Homo sapiens
  misc_RNA (1)...(19): siRNA sense strand
ggacgaagacgcggaagaa

SEQ ID NO: 1582759 - RNA, 19 nt, Homo sapiens
  misc_RNA (1)...(19): siRNA sense strand
ucuguugagucuauucuua

SEQ ID NO: 1582760 - RNA, 19 nt, Homo sapiens
  misc_RNA (1)...(19): siRNA sense strand
gaaagggagauguuggaaa

SEQ ID NO: 1582761 - RNA, 19 nt, Homo sapiens
  misc_RNA (1)...(19): siRNA sense strand
caagcaaggacuucuguaa

SEQ ID NO: 1582762 - RNA, 19 nt, Homo sapiens
  misc_RNA (1)...(19): siRNA sense strand
gauaaagaguuggagaaca

SEQ ID NO: 1582763 - RNA, 19 nt, Homo sapiens
  misc_RNA (1)...(19): siRNA sense strand
agcaaggacuucuguaauu

SEQ ID NO: 1582764 - RNA, 19 nt, Homo sapiens
  misc_RNA (1)...(19): siRNA sense strand
cggaauuucucucccauug

SEQ ID NO: 1582765 - RNA, 19 nt, Homo sapiens
  misc_RNA (1)...(19): siRNA sense strand
caaacaaguuggaacaaaa

SEQ ID NO: 1582766 - RNA, 19 nt, Homo sapiens
  misc_RNA (1)...(19): siRNA sense strand
gagaguguuuaguuaagga

SEQ ID NO: 1582767 - RNA, 19 nt, Homo sapiens
  misc_RNA (1)...(19): siRNA sense strand
ccgggaaacagaauaauuu

SEQ ID NO: 1582768 - RNA, 19 nt, Homo sapiens
  misc_RNA (1)...(19): siRNA sense strand
aaagggagauguuggaaac

SEQ ID NO: 1582769 - RNA, 19 nt, Homo sapiens
  misc_RNA (1)...(19): siRNA sense strand
auaaagaguuggagaacau

SEQ ID NO: 1582770 - RNA, 19 nt, Homo sapiens
  misc_RNA (1)...(19): siRNA sense strand
caaccagaaguacacauuu

SEQ ID NO: 1582771 - RNA, 19 nt, Homo sapiens
  misc_RNA (1)...(19): siRNA sense strand
gcacaacuuauagacagua

SEQ ID NO: 1582772 - RNA, 19 nt, Homo sapiens
  misc_RNA (1)...(19): siRNA sense strand
ggacugcgaggacgacgaa

SEQ ID NO: 1582773 - RNA, 19 nt, Homo sapiens
  misc_RNA (1)...(19): siRNA sense strand
gauuuaaccaugcaguauu

SEQ ID NO: 1582774 - RNA, 19 nt, Homo sapiens
  misc_RNA (1)...(19): siRNA sense strand
uuaaggacaaccagaagua

SEQ ID NO: 1582775 - RNA, 19 nt, Homo sapiens
  misc_RNA (1)...(19): siRNA sense strand
gcccaccugccuugauuua

SEQ ID NO: 1582776 - RNA, 19 nt, Homo sapiens
  misc_RNA (1)...(19): siRNA sense strand
acagagaguguuuaguuaa

SEQ ID NO: 1582777 - RNA, 19 nt, Homo sapiens
  misc_RNA (1)...(19): siRNA sense strand
gggagauguuggaaacuuc

SEQ ID NO: 1582778 - RNA, 19 nt, Homo sapiens
  misc_RNA (1)...(19): siRNA sense strand
cagagaguguuuaguuaag

SEQ ID NO: 1582779 - RNA, 19 nt, Homo sapiens
  misc_RNA (1)...(19): siRNA sense strand
cagcaaacacuuacugaca

SEQ ID NO: 1582780 - RNA, 19 nt, Homo sapiens
  misc_RNA (1)...(19): siRNA sense strand
uaaagaaagggagauguug

SEQ ID NO: 1582781 - RNA, 19 nt, Homo sapiens
  misc_RNA (1)...(19): siRNA sense strand
acgaagaucagcaaagaaa

SEQ ID NO: 1582782 - RNA, 19 nt, Homo sapiens
  misc_RNA (1)...(19): siRNA sense strand
ccaccugccuugauuuaac

SEQ ID NO: 1582783 - RNA, 19 nt, Homo sapiens
  misc_RNA (1)...(19): siRNA sense strand
gccuggaccugacuacaau

SEQ ID NO: 1582784 - RNA, 19 nt, Homo sapiens
  misc_RNA (1)...(19): siRNA sense strand
guuggaaacuucucaagcu

SEQ ID NO: 1582785 - RNA, 19 nt, Homo sapiens
  misc_RNA (1)...(19): siRNA sense strand
aagaagagccuuugcugau

SEQ ID NO: 1582786 - RNA, 19 nt, Homo sapiens
  misc_RNA (1)...(19): siRNA sense strand
gugcagagcaggacaugau

SEQ ID NO: 1582787 - RNA, 19 nt, Homo sapiens
  misc_RNA (1)...(19): siRNA sense strand
ggaauauggaacuaauuuc

SEQ ID NO: 1582788 - RNA, 19 nt, Homo sapiens
  misc_RNA (1)...(19): siRNA sense strand
acauuaugcuggagagaga

SEQ ID NO: 1582789 - RNA, 19 nt, Homo sapiens
  misc_RNA (1)...(19): siRNA sense strand
gcgaggacgacgaagauga

SEQ ID NO: 1582790 - RNA, 19 nt, Homo sapiens
  misc_RNA (1)...(19): siRNA sense strand
ccucugccacuuagacaua

SEQ ID NO: 1582791 - RNA, 19 nt, Homo sapiens
  misc_RNA (1)...(19): siRNA sense strand
cauaauccauuccacucau

SEQ ID NO: 1582792 - RNA, 19 nt, Homo sapiens
  misc_RNA (1)...(19): siRNA sense strand
aaagaguuggagaacauua

SEQ ID NO: 1582793 - RNA, 19 nt, Homo sapiens
  misc_RNA (1)...(19): siRNA sense strand
ccacuuagacauaauccau

SEQ ID NO: 1582794 - RNA, 19 nt, Homo sapiens
  misc_RNA (1)...(19): siRNA sense strand
caguaucccuuguccucaa

SEQ ID NO: 1582795 - RNA, 19 nt, Homo sapiens
  misc_RNA (1)...(19): siRNA sense strand
cagaaguacacauuuacaa

SEQ ID NO: 1582796 - RNA, 19 nt, Homo sapiens
  misc_RNA (1)...(19): siRNA sense strand
gaagagaccccuaagaaac

SEQ ID NO: 1582797 - RNA, 19 nt, Homo sapiens
  misc_RNA (1)...(19): siRNA sense strand
agcaaacacuuacugacaa

SEQ ID NO: 1582798 - RNA, 19 nt, Homo sapiens
  misc_RNA (1)...(19): siRNA sense strand
gcucaagggcaugucuuaa

SEQ ID NO: 1582799 - RNA, 19 nt, Homo sapiens
  misc_RNA (1)...(19): siRNA sense strand
cgaagacgcggaagaagag

SEQ ID NO: 1582800 - RNA, 19 nt, Homo sapiens
  misc_RNA (1)...(19): siRNA sense strand
acaaaucggguccugaguu

SEQ ID NO: 1582801 - RNA, 19 nt, Homo sapiens
  misc_RNA (1)...(19): siRNA sense strand
ccagagagguccgcguucu

SEQ ID NO: 1582802 - RNA, 19 nt, Homo sapiens
  misc_RNA (1)...(19): siRNA sense strand
auaaagaaagggagauguu

SEQ ID NO: 1582803 - RNA, 19 nt, Homo sapiens
  misc_RNA (1)...(19): siRNA sense strand
gaccugacuacaauuccua

SEQ ID NO: 1582804 - RNA, 19 nt, Homo sapiens
  misc_RNA (1)...(19): siRNA sense strand
ccauuccagcggagacuua

SEQ ID NO: 1582805 - RNA, 19 nt, Homo sapiens
  misc_RNA (1)...(19): siRNA sense strand
ucaagggcaugucuuaacg

SEQ ID NO: 1582806 - RNA, 19 nt, Homo sapiens
  misc_RNA (1)...(19): siRNA sense strand
ggaauuucucucccauugu

SEQ ID NO: 1582807 - RNA, 19 nt, Homo sapiens
  misc_RNA (1)...(19): siRNA sense strand
gcgacacccuccucuacca

SEQ ID NO: 1582808 - RNA, 19 nt, Homo sapiens
  misc_RNA (1)...(19): siRNA sense strand
gaacauuaugcuggagaga

SEQ ID NO: 1582809 - RNA, 19 nt, Homo sapiens
  misc_RNA (1)...(19): siRNA sense strand
aagggcaugucuuaacgaa

SEQ ID NO: 1582810 - RNA, 19 nt, Homo sapiens
  misc_RNA (1)...(19): siRNA sense strand
ccaguuagugacaggauga

SEQ ID NO: 1582811 - RNA, 19 nt, Homo sapiens
  misc_RNA (1)...(19): siRNA sense strand
ggaccugacuacaauuccu

SEQ ID NO: 1582812 - RNA, 19 nt, Homo sapiens
  misc_RNA (1)...(19): siRNA sense strand
gcuggagagagaauauaaa

SEQ ID NO: 1582813 - RNA, 19 nt, Homo sapiens
  misc_RNA (1)...(19): siRNA sense strand
uaaaugccaccaccucagu

SEQ ID NO: 1582814 - RNA, 19 nt, Homo sapiens
  misc_RNA (1)...(19): siRNA sense strand
auaauccauuccacucauu

SEQ ID NO: 1582815 - RNA, 19 nt, Homo sapiens
  misc_RNA (1)...(19): siRNA sense strand
aagcaaggacuucuguaau

SEQ ID NO: 1582816 - RNA, 19 nt, Homo sapiens
  misc_RNA (1)...(19): siRNA sense strand
acaaccagaaguacacauu

SEQ ID NO: 1582817 - RNA, 19 nt, Homo sapiens
  misc_RNA (1)...(19): siRNA sense strand
aaacacuuacugacaaauc

SEQ ID NO: 1582818 - RNA, 19 nt, Homo sapiens
  misc_RNA (1)...(19): siRNA sense strand
aagagccuuugcugauaaa

SEQ ID NO: 1582819 - RNA, 19 nt, Homo sapiens
  misc_RNA (1)...(19): siRNA sense strand
uauagacaguaucccuugu

SEQ ID NO: 1582820 - RNA, 19 nt, Homo sapiens
  misc_RNA (1)...(19): siRNA sense strand
ugccaucacucgugucucu

SEQ ID NO: 1582821 - RNA, 19 nt, Homo sapiens
  misc_RNA (1)...(19): siRNA sense strand
aaucggguccugaguugaa

SEQ ID NO: 1582822 - RNA, 19 nt, Homo sapiens
  misc_RNA (1)...(19): siRNA sense strand
uugcccaccugccuugauu

SEQ ID NO: 1582823 - RNA, 19 nt, Homo sapiens
  misc_RNA (1)...(19): siRNA sense strand
ccacugucauuuucuguug

SEQ ID NO: 1582824 - RNA, 19 nt, Homo sapiens
  misc_RNA (1)...(19): siRNA sense strand
ccagaaguacacauuuaca

SEQ ID NO: 1582825 - RNA, 19 nt, Homo sapiens
  misc_RNA (1)...(19): siRNA sense strand
acuuagacauaauccauuc

SEQ ID NO: 1582826 - RNA, 19 nt, Homo sapiens
  misc_RNA (1)...(19): siRNA sense strand
caacuuauagacaguaucc

SEQ ID NO: 1582827 - RNA, 19 nt, Homo sapiens
  misc_RNA (1)...(19): siRNA sense strand
cacaacuuauagacaguau

SEQ ID NO: 1582828 - RNA, 19 nt, Homo sapiens
  misc_RNA (1)...(19): siRNA sense strand
cugggaauauggaacuaau

SEQ ID NO: 1582829 - RNA, 19 nt, Homo sapiens
  misc_RNA (1)...(19): siRNA sense strand
ggacugggagaucgauguc

SEQ ID NO: 1582830 - RNA, 19 nt, Homo sapiens
  misc_RNA (1)...(19): siRNA sense strand
caauagauagaugugcaaa

SEQ ID NO: 1582831 - RNA, 19 nt, Homo sapiens
  misc_RNA (1)...(19): siRNA sense strand
ccaagcaaggacuucugua

SEQ ID NO: 1582832 - RNA, 19 nt, Homo sapiens
  misc_RNA (1)...(19): siRNA sense strand
agggagauguuggaaacuu

SEQ ID NO: 1582833 - RNA, 19 nt, Homo sapiens
  misc_RNA (1)...(19): siRNA sense strand
acgaagacgcggaagaaga

SEQ ID NO: 1582834 - RNA, 19 nt, Homo sapiens
  misc_RNA (1)...(19): siRNA sense strand
uaaagaguuggagaacauu

SEQ ID NO: 1582835 - RNA, 19 nt, Homo sapiens
  misc_RNA (1)...(19): siRNA sense strand
ucagcgugggcacaacuua

SEQ ID NO: 1582836 - RNA, 19 nt, Homo sapiens
  misc_RNA (1)...(19): siRNA sense strand
gaauaauuucgagcgcaaa

SEQ ID NO: 1582837 - RNA, 19 nt, Homo sapiens
  misc_RNA (1)...(19): siRNA sense strand
ugauuuaaccaugcaguau

SEQ ID NO: 1582838 - RNA, 19 nt, Homo sapiens
  misc_RNA (1)...(19): siRNA sense strand
cuuaagaggccuucaucug

SEQ ID NO: 1582839 - RNA, 19 nt, Homo sapiens
  misc_RNA (1)...(19): siRNA sense strand
acaaaacucucggugaaug

SEQ ID NO: 1582840 - RNA, 19 nt, Homo sapiens
  misc_RNA (1)...(19): siRNA sense strand
guaccagaggcaagucaga

SEQ ID NO: 1582841 - RNA, 19 nt, Homo sapiens
  misc_RNA (1)...(19): siRNA sense strand
ugaagagaccccuaagaaa

SEQ ID NO: 1582842 - RNA, 19 nt, Homo sapiens
  misc_RNA (1)...(19): siRNA sense strand
gagauccagaccacgagaa

SEQ ID NO: 1582843 - RNA, 19 nt, Homo sapiens
  misc_RNA (1)...(19): siRNA sense strand
gcacaggaccagacaacaa

SEQ ID NO: 1582844 - RNA, 19 nt, Homo sapiens
  misc_RNA (1)...(19): siRNA sense strand
gaagcagccagaauaaaga

SEQ ID NO: 1582845 - RNA, 19 nt, Homo sapiens
  misc_RNA (1)...(19): siRNA sense strand
gcagccagaauaaagauaa

SEQ ID NO: 1582846 - RNA, 19 nt, Homo sapiens
  misc_RNA (1)...(19): siRNA sense strand
gaaacuggucccuaggaaa

SEQ ID NO: 1582847 - RNA, 19 nt, Homo sapiens
  misc_RNA (1)...(19): siRNA sense strand
gaaaauagaagagcuaaug

SEQ ID NO: 1582848 - RNA, 19 nt, Homo sapiens
  misc_RNA (1)...(19): siRNA sense strand
uagaaaaugugccauauug

SEQ ID NO: 1582849 - RNA, 19 nt, Homo sapiens
  misc_RNA (1)...(19): siRNA sense strand
ggacgggcagucaagguuu

SEQ ID NO: 1582850 - RNA, 19 nt, Homo sapiens
  misc_RNA (1)...(19): siRNA sense strand
ugaaacuggucccuaggaa

SEQ ID NO: 1582851 - RNA, 19 nt, Homo sapiens
  misc_RNA (1)...(19): siRNA sense strand
uacaagguauucacacaga

SEQ ID NO: 1582852 - RNA, 19 nt, Homo sapiens
  misc_RNA (1)...(19): siRNA sense strand
cagccagaauaaagauaaa

SEQ ID NO: 1582853 - RNA, 19 nt, Homo sapiens
  misc_RNA (1)...(19): siRNA sense strand
ucacacagaccacaauaca

SEQ ID NO: 1582854 - RNA, 19 nt, Homo sapiens
  misc_RNA (1)...(19): siRNA sense strand
auuagaagcagccagaaua

SEQ ID NO: 1582855 - RNA, 19 nt, Homo sapiens
  misc_RNA (1)...(19): siRNA sense strand
uuagaagcagccagaauaa

SEQ ID NO: 1582856 - RNA, 19 nt, Homo sapiens
  misc_RNA (1)...(19): siRNA sense strand
gaaaaugugccauauugug

SEQ ID NO: 1582857 - RNA, 19 nt, Homo sapiens
  misc_RNA (1)...(19): siRNA sense strand
agaccacaauacacugaaa

SEQ ID NO: 1582858 - RNA, 19 nt, Homo sapiens
  misc_RNA (1)...(19): siRNA sense strand
agaagcagccagaauaaag

SEQ ID NO: 1582859 - RNA, 19 nt, Homo sapiens
  misc_RNA (1)...(19): siRNA sense strand
aaacuggucccuaggaaag

SEQ ID NO: 1582860 - RNA, 19 nt, Homo sapiens
  misc_RNA (1)...(19): siRNA sense strand
gaagagcuaaugaaaauag

SEQ ID NO: 1582861 - RNA, 19 nt, Homo sapiens
  misc_RNA (1)...(19): siRNA sense strand
gccagaauaaagauaaaug

SEQ ID NO: 1582862 - RNA, 19 nt, Homo sapiens
  misc_RNA (1)...(19): siRNA sense strand
acacagaccacaauacacu

SEQ ID NO: 1582863 - RNA, 19 nt, Homo sapiens
  misc_RNA (1)...(19): siRNA sense strand
caccaacucagaagcaaug

SEQ ID NO: 1582864 - RNA, 19 nt, Homo sapiens
  misc_RNA (1)...(19): siRNA sense strand
uagaagcagccagaauaaa

SEQ ID NO: 1582865 - RNA, 19 nt, Homo sapiens
  misc_RNA (1)...(19): siRNA sense strand
gggacgggcagucaagguu

SEQ ID NO: 1582866 - RNA, 19 nt, Homo sapiens
  misc_RNA (1)...(19): siRNA sense strand
gugaugcaccaacucagaa

SEQ ID NO: 1582867 - RNA, 19 nt, Homo sapiens
  misc_RNA (1)...(19): siRNA sense strand
ugccagagcauuagaagca

SEQ ID NO: 1582868 - RNA, 19 nt, Homo sapiens
  misc_RNA (1)...(19): siRNA sense strand
gcaccaacucagaagcaau

SEQ ID NO: 1582869 - RNA, 19 nt, Homo sapiens
  misc_RNA (1)...(19): siRNA sense strand
aaugugccauauugugaug

SEQ ID NO: 1582870 - RNA, 19 nt, Homo sapiens
  misc_RNA (1)...(19): siRNA sense strand
gaugagaacuacuuuguga

SEQ ID NO: 1582871 - RNA, 19 nt, Homo sapiens
  misc_RNA (1)...(19): siRNA sense strand
ggaaagaugccauauauuc

SEQ ID NO: 1582872 - RNA, 19 nt, Homo sapiens
  misc_RNA (1)...(19): siRNA sense strand
ccaacgcagucauuuauua

SEQ ID NO: 1582873 - RNA, 19 nt, Homo sapiens
  misc_RNA (1)...(19): siRNA sense strand
gauaauguguggacagaga

SEQ ID NO: 1582874 - RNA, 19 nt, Homo sapiens
  misc_RNA (1)...(19): siRNA sense strand
gggaaagagucaucucgua

SEQ ID NO: 1582875 - RNA, 19 nt, Homo sapiens
  misc_RNA (1)...(19): siRNA sense strand
gcaagacacugcaagauac

SEQ ID NO: 1582876 - RNA, 19 nt, Homo sapiens
  misc_RNA (1)...(19): siRNA sense strand
ggacaagcuugaaggaaau

SEQ ID NO: 1582877 - RNA, 19 nt, Homo sapiens
  misc_RNA (1)...(19): siRNA sense strand
gcauaaagaucugguguuc

SEQ ID NO: 1582878 - RNA, 19 nt, Homo sapiens
  misc_RNA (1)...(19): siRNA sense strand
cgggaaagaugccauauau

SEQ ID NO: 1582879 - RNA, 19 nt, Homo sapiens
  misc_RNA (1)...(19): siRNA sense strand
gaaagaugccauauauuca

SEQ ID NO: 1582880 - RNA, 19 nt, Homo sapiens
  misc_RNA (1)...(19): siRNA sense strand
gaaacugccuucaggugau

SEQ ID NO: 1582881 - RNA, 19 nt, Homo sapiens
  misc_RNA (1)...(19): siRNA sense strand
ggaguuccguguucucaga

SEQ ID NO: 1582882 - RNA, 19 nt, Homo sapiens
  misc_RNA (1)...(19): siRNA sense strand
gaucuggacuucuuuacca

SEQ ID NO: 1582883 - RNA, 19 nt, Homo sapiens
  misc_RNA (1)...(19): siRNA sense strand
ggcaagacacugcaagaua

SEQ ID NO: 1582884 - RNA, 19 nt, Homo sapiens
  misc_RNA (1)...(19): siRNA sense strand
ggaaauuuaugagguguca

SEQ ID NO: 1582885 - RNA, 19 nt, Homo sapiens
  misc_RNA (1)...(19): siRNA sense strand
cagcugacaucucucuuug

SEQ ID NO: 1582886 - RNA, 19 nt, Homo sapiens
  misc_RNA (1)...(19): siRNA sense strand
gaggagcucuuugcugaug

SEQ ID NO: 1582887 - RNA, 19 nt, Homo sapiens
  misc_RNA (1)...(19): siRNA sense strand
gaacccaacagaggcaaua

SEQ ID NO: 1582888 - RNA, 19 nt, Homo sapiens
  misc_RNA (1)...(19): siRNA sense strand
ucaaagaucggucacauuc

SEQ ID NO: 1582889 - RNA, 19 nt, Homo sapiens
  misc_RNA (1)...(19): siRNA sense strand
acagacaaaugccauguga

SEQ ID NO: 1582890 - RNA, 19 nt, Homo sapiens
  misc_RNA (1)...(19): siRNA sense strand
ggagaaugaucuggacuuc

SEQ ID NO: 1582891 - RNA, 19 nt, Homo sapiens
  misc_RNA (1)...(19): siRNA sense strand
gggaucaucuacuuacuag

SEQ ID NO: 1582892 - RNA, 19 nt, Homo sapiens
  misc_RNA (1)...(19): siRNA sense strand
agaacuacuuugugaacua

SEQ ID NO: 1582893 - RNA, 19 nt, Homo sapiens
  misc_RNA (1)...(19): siRNA sense strand
caacgggaucaucuacuua

SEQ ID NO: 1582894 - RNA, 19 nt, Homo sapiens
  misc_RNA (1)...(19): siRNA sense strand
gcagaauacagaggaauuu

SEQ ID NO: 1582895 - RNA, 19 nt, Homo sapiens
  misc_RNA (1)...(19): siRNA sense strand
gaacuacuuugugaacuac

SEQ ID NO: 1582896 - RNA, 19 nt, Homo sapiens
  misc_RNA (1)...(19): siRNA sense strand
auaaagaucugguguucau

SEQ ID NO: 1582897 - RNA, 19 nt, Homo sapiens
  misc_RNA (1)...(19): siRNA sense strand
gcugaggaguugcaggaaa

SEQ ID NO: 1582898 - RNA, 19 nt, Homo sapiens
  misc_RNA (1)...(19): siRNA sense strand
aagccuggaucaacuuuaa

SEQ ID NO: 1582899 - RNA, 19 nt, Homo sapiens
  misc_RNA (1)...(19): siRNA sense strand
ucaacgggaucaucuacuu

SEQ ID NO: 1582900 - RNA, 19 nt, Homo sapiens
  misc_RNA (1)...(19): siRNA sense strand
acacagagacagacaaaug

SEQ ID NO: 1582901 - RNA, 19 nt, Homo sapiens
  misc_RNA (1)...(19): siRNA sense strand
gaugucagcgagucuguuu

SEQ ID NO: 1582902 - RNA, 19 nt, Homo sapiens
  misc_RNA (1)...(19): siRNA sense strand
aggacaagcuugaaggaaa

SEQ ID NO: 1582903 - RNA, 19 nt, Homo sapiens
  misc_RNA (1)...(19): siRNA sense strand
agccauaacugucacaaga

SEQ ID NO: 1582904 - RNA, 19 nt, Homo sapiens
  misc_RNA (1)...(19): siRNA sense strand
gcugacaucucucuuugag

SEQ ID NO: 1582905 - RNA, 19 nt, Homo sapiens
  misc_RNA (1)...(19): siRNA sense strand
agaggaauuucuccacuug

SEQ ID NO: 1582906 - RNA, 19 nt, Homo sapiens
  misc_RNA (1)...(19): siRNA sense strand
caacgcagucauuuauuau

SEQ ID NO: 1582907 - RNA, 19 nt, Homo sapiens
  misc_RNA (1)...(19): siRNA sense strand
gaggaaugcucucgguuuu

SEQ ID NO: 1582908 - RNA, 19 nt, Homo sapiens
  misc_RNA (1)...(19): siRNA sense strand
ggaguugcaggaaauuuau

SEQ ID NO: 1582909 - RNA, 19 nt, Homo sapiens
  misc_RNA (1)...(19): siRNA sense strand
cagaggaauuucuccacuu

SEQ ID NO: 1582910 - RNA, 19 nt, Homo sapiens
  misc_RNA (1)...(19): siRNA sense strand
uacaaucccuugcuagaca

SEQ ID NO: 1582911 - RNA, 19 nt, Homo sapiens
  misc_RNA (1)...(19): siRNA sense strand
ucgcguaggugauaaugug

SEQ ID NO: 1582912 - RNA, 19 nt, Homo sapiens
  misc_RNA (1)...(19): siRNA sense strand
gcaauagaagccuggauca

SEQ ID NO: 1582913 - RNA, 19 nt, Homo sapiens
  misc_RNA (1)...(19): siRNA sense strand
uguaucagcugacaucucu

SEQ ID NO: 1582914 - RNA, 19 nt, Homo sapiens
  misc_RNA (1)...(19): siRNA sense strand
gugauaauguguggacaga

SEQ ID NO: 1582915 - RNA, 19 nt, Homo sapiens
  misc_RNA (1)...(19): siRNA sense strand
gugcacauuuaccugauug

SEQ ID NO: 1582916 - RNA, 19 nt, Homo sapiens
  misc_RNA (1)...(19): siRNA sense strand
gaagccuggaucaacuuua

SEQ ID NO: 1582917 - RNA, 19 nt, Homo sapiens
  misc_RNA (1)...(19): siRNA sense strand
ggaagauugccagcuguaa

SEQ ID NO: 1582918 - RNA, 19 nt, Homo sapiens
  misc_RNA (1)...(19): siRNA sense strand
acgcagcugugcauaaaga

SEQ ID NO: 1582919 - RNA, 19 nt, Homo sapiens
  misc_RNA (1)...(19): siRNA sense strand
caaggcaucaugaaacugu

SEQ ID NO: 1582920 - RNA, 19 nt, Homo sapiens
  misc_RNA (1)...(19): siRNA sense strand
gcuacaaucccuugcuaga

SEQ ID NO: 1582921 - RNA, 19 nt, Homo sapiens
  misc_RNA (1)...(19): siRNA sense strand
ugacacagagacagacaaa

SEQ ID NO: 1582922 - RNA, 19 nt, Homo sapiens
  misc_RNA (1)...(19): siRNA sense strand
aaagaucggucacauucag

SEQ ID NO: 1582923 - RNA, 19 nt, Homo sapiens
  misc_RNA (1)...(19): siRNA sense strand
ugaggaaugcucucgguuu

SEQ ID NO: 1582924 - RNA, 19 nt, Homo sapiens
  misc_RNA (1)...(19): siRNA sense strand
gcuccugguugauuauauc

SEQ ID NO: 1582925 - RNA, 19 nt, Homo sapiens
  misc_RNA (1)...(19): siRNA sense strand
gcuuaccaauuugcaguuu

SEQ ID NO: 1582926 - RNA, 19 nt, Homo sapiens
  misc_RNA (1)...(19): siRNA sense strand
ucaugaaacugugucuaga

SEQ ID NO: 1582927 - RNA, 19 nt, Homo sapiens
  misc_RNA (1)...(19): siRNA sense strand
gccuggaucaacuuuaaua

SEQ ID NO: 1582928 - RNA, 19 nt, Homo sapiens
  misc_RNA (1)...(19): siRNA sense strand
gauccauguucacuuccaa

SEQ ID NO: 1582929 - RNA, 19 nt, Homo sapiens
  misc_RNA (1)...(19): siRNA sense strand
gggaaagaugccauauauu

SEQ ID NO: 1582930 - RNA, 19 nt, Homo sapiens
  misc_RNA (1)...(19): siRNA sense strand
gcucaaggcaucaugaaac

SEQ ID NO: 1582931 - RNA, 19 nt, Homo sapiens
  misc_RNA (1)...(19): siRNA sense strand
gaauacagaggaauuucuc

SEQ ID NO: 1582932 - RNA, 19 nt, Homo sapiens
  misc_RNA (1)...(19): siRNA sense strand
ugauugugcugcaggaugu

SEQ ID NO: 1582933 - RNA, 19 nt, Homo sapiens
  misc_RNA (1)...(19): siRNA sense strand
uggcagaucggcacaguga

SEQ ID NO: 1582934 - RNA, 19 nt, Homo sapiens
  misc_RNA (1)...(19): siRNA sense strand
ccaauuugcaguuuguguu

SEQ ID NO: 1582935 - RNA, 19 nt, Homo sapiens
  misc_RNA (1)...(19): siRNA sense strand
guaacgggagcaucuaugu

SEQ ID NO: 1582936 - RNA, 19 nt, Homo sapiens
  misc_RNA (1)...(19): siRNA sense strand
agacaaaugccaugugaag

SEQ ID NO: 1582937 - RNA, 19 nt, Homo sapiens
  misc_RNA (1)...(19): siRNA sense strand
cgacucauccagugcuuug

SEQ ID NO: 1582938 - RNA, 19 nt, Homo sapiens
  misc_RNA (1)...(19): siRNA sense strand
ccaugggacugugaaacuu

SEQ ID NO: 1582939 - RNA, 19 nt, Homo sapiens
  misc_RNA (1)...(19): siRNA sense strand
uuaccaauuugcaguuugu

SEQ ID NO: 1582940 - RNA, 19 nt, Homo sapiens
  misc_RNA (1)...(19): siRNA sense strand
ccacuucagccauaacugu

SEQ ID NO: 1582941 - RNA, 19 nt, Homo sapiens
  misc_RNA (1)...(19): siRNA sense strand
gaagauugccagcuguaac

SEQ ID NO: 1582942 - RNA, 19 nt, Homo sapiens
  misc_RNA (1)...(19): siRNA sense strand
acagugauccugagcucua

SEQ ID NO: 1582943 - RNA, 19 nt, Homo sapiens
  misc_RNA (1)...(19): siRNA sense strand
aggaguugcaggaaauuua

SEQ ID NO: 1582944 - RNA, 19 nt, Homo sapiens
  misc_RNA (1)...(19): siRNA sense strand
cugaggaguugcaggaaau

SEQ ID NO: 1582945 - RNA, 19 nt, Homo sapiens
  misc_RNA (1)...(19): siRNA sense strand
ccaucccucuggaagauug

SEQ ID NO: 1582946 - RNA, 19 nt, Homo sapiens
  misc_RNA (1)...(19): siRNA sense strand
agacauguaucagcugaca

SEQ ID NO: 1582947 - RNA, 19 nt, Homo sapiens
  misc_RNA (1)...(19): siRNA sense strand
caauuugcaguuuguguug

SEQ ID NO: 1582948 - RNA, 19 nt, Homo sapiens
  misc_RNA (1)...(19): siRNA sense strand
gcuugacccugccacuuca

SEQ ID NO: 1582949 - RNA, 19 nt, Homo sapiens
  misc_RNA (1)...(19): siRNA sense strand
uugcugaugucaccauuuc

SEQ ID NO: 1582950 - RNA, 19 nt, Homo sapiens
  misc_RNA (1)...(19): siRNA sense strand
gaaugaucuggacuucuuu

SEQ ID NO: 1582951 - RNA, 19 nt, Homo sapiens
  misc_RNA (1)...(19): siRNA sense strand
uggcccagcugcagaauac

SEQ ID NO: 1582952 - RNA, 19 nt, Homo sapiens
  misc_RNA (1)...(19): siRNA sense strand
gagaacuacuuugugaacu

SEQ ID NO: 1582953 - RNA, 19 nt, Homo sapiens
  misc_RNA (1)...(19): siRNA sense strand
ucacucaggacaagcuuga

SEQ ID NO: 1582954 - RNA, 19 nt, Homo sapiens
  misc_RNA (1)...(19): siRNA sense strand
ucagcugacaucucucuuu

SEQ ID NO: 1582955 - RNA, 19 nt, Homo sapiens
  misc_RNA (1)...(19): siRNA sense strand
agagacaacucagcuagag

SEQ ID NO: 1582956 - RNA, 19 nt, Homo sapiens
  misc_RNA (1)...(19): siRNA sense strand
ggaugagaacuacuuugug

SEQ ID NO: 1582957 - RNA, 19 nt, Homo sapiens
  misc_RNA (1)...(19): siRNA sense strand
ggacuucuuuaccaaaccu

SEQ ID NO: 1582958 - RNA, 19 nt, Homo sapiens
  misc_RNA (1)...(19): siRNA sense strand
gaggaguugcaggaaauuu

SEQ ID NO: 1582959 - RNA, 19 nt, Homo sapiens
  misc_RNA (1)...(19): siRNA sense strand
gacagagacaacucagcua

SEQ ID NO: 1582960 - RNA, 19 nt, Homo sapiens
  misc_RNA (1)...(19): siRNA sense strand
ucuccaacgcagucauuua

SEQ ID NO: 1582961 - RNA, 19 nt, Homo sapiens
  misc_RNA (1)...(19): siRNA sense strand
ccgggaaagaugccauaua

SEQ ID NO: 1582962 - RNA, 19 nt, Homo sapiens
  misc_RNA (1)...(19): siRNA sense strand
aaacugccuucaggugaug

SEQ ID NO: 1582963 - RNA, 19 nt, Homo sapiens
  misc_RNA (1)...(19): siRNA sense strand
ccacuugccccaccgcuua

SEQ ID NO: 1582964 - RNA, 19 nt, Homo sapiens
  misc_RNA (1)...(19): siRNA sense strand
aggugcugcuuaccaauuu

SEQ ID NO: 1582965 - RNA, 19 nt, Homo sapiens
  misc_RNA (1)...(19): siRNA sense strand
gcccacaaccgggugauug

SEQ ID NO: 1582966 - RNA, 19 nt, Homo sapiens
  misc_RNA (1)...(19): siRNA sense strand
gaaggaaauuggggagaau

SEQ ID NO: 1582967 - RNA, 19 nt, Homo sapiens
  misc_RNA (1)...(19): siRNA sense strand
auagaagccuggaucaacu

SEQ ID NO: 1582968 - RNA, 19 nt, Homo sapiens
  misc_RNA (1)...(19): siRNA sense strand
caauagaagccuggaucaa

SEQ ID NO: 1582969 - RNA, 19 nt, Homo sapiens
  misc_RNA (1)...(19): siRNA sense strand
ggauggaguuccguguucu

SEQ ID NO: 1582970 - RNA, 19 nt, Homo sapiens
  misc_RNA (1)...(19): siRNA sense strand
gaugagaacuacuuuguga

SEQ ID NO: 1582971 - RNA, 19 nt, Homo sapiens
  misc_RNA (1)...(19): siRNA sense strand
ggaaagaugccauauauuc

SEQ ID NO: 1582972 - RNA, 19 nt, Homo sapiens
  misc_RNA (1)...(19): siRNA sense strand
ccaacgcagucauuuauua

SEQ ID NO: 1582973 - RNA, 19 nt, Homo sapiens
  misc_RNA (1)...(19): siRNA sense strand
gauaauguguggacagaga

SEQ ID NO: 1582974 - RNA, 19 nt, Homo sapiens
  misc_RNA (1)...(19): siRNA sense strand
gggaaagagucaucucgua

SEQ ID NO: 1582975 - RNA, 19 nt, Homo sapiens
  misc_RNA (1)...(19): siRNA sense strand
gcaagacacugcaagauac

SEQ ID NO: 1582976 - RNA, 19 nt, Homo sapiens
  misc_RNA (1)...(19): siRNA sense strand
ggacaagcuugaaggaaau

SEQ ID NO: 1582977 - RNA, 19 nt, Homo sapiens
  misc_RNA (1)...(19): siRNA sense strand
gcauaaagaucugguguuc

SEQ ID NO: 1582978 - RNA, 19 nt, Homo sapiens
  misc_RNA (1)...(19): siRNA sense strand
cgggaaagaugccauauau

SEQ ID NO: 1582979 - RNA, 19 nt, Homo sapiens
  misc_RNA (1)...(19): siRNA sense strand
gaaagaugccauauauuca

SEQ ID NO: 1582980 - RNA, 19 nt, Homo sapiens
  misc_RNA (1)...(19): siRNA sense strand
gaaacugccuucaggugau

SEQ ID NO: 1582981 - RNA, 19 nt, Homo sapiens
  misc_RNA (1)...(19): siRNA sense strand
ggaguuccguguucucaga

SEQ ID NO: 1582982 - RNA, 19 nt, Homo sapiens
  misc_RNA (1)...(19): siRNA sense strand
gaucuggacuucuuuacca

SEQ ID NO: 1582983 - RNA, 19 nt, Homo sapiens
  misc_RNA (1)...(19): siRNA sense strand
ggcaagacacugcaagaua

SEQ ID NO: 1582984 - RNA, 19 nt, Homo sapiens
  misc_RNA (1)...(19): siRNA sense strand
ggaaauuuaugagguguca

SEQ ID NO: 1582985 - RNA, 19 nt, Homo sapiens
  misc_RNA (1)...(19): siRNA sense strand
cagcugacaucucucuuug

SEQ ID NO: 1582986 - RNA, 19 nt, Homo sapiens
  misc_RNA (1)...(19): siRNA sense strand
gaggagcucuuugcugaug

SEQ ID NO: 1582987 - RNA, 19 nt, Homo sapiens
  misc_RNA (1)...(19): siRNA sense strand
gaacccaacagaggcaaua

SEQ ID NO: 1582988 - RNA, 19 nt, Homo sapiens
  misc_RNA (1)...(19): siRNA sense strand
ucaaagaucggucacauuc

SEQ ID NO: 1582989 - RNA, 19 nt, Homo sapiens
  misc_RNA (1)...(19): siRNA sense strand
acagacaaaugccauguga

SEQ ID NO: 1582990 - RNA, 19 nt, Homo sapiens
  misc_RNA (1)...(19): siRNA sense strand
ggagaaugaucuggacuuc

SEQ ID NO: 1582991 - RNA, 19 nt, Homo sapiens
  misc_RNA (1)...(19): siRNA sense strand
gggaucaucuacuuacuag

SEQ ID NO: 1582992 - RNA, 19 nt, Homo sapiens
  misc_RNA (1)...(19): siRNA sense strand
agaacuacuuugugaacua

SEQ ID NO: 1582993 - RNA, 19 nt, Homo sapiens
  misc_RNA (1)...(19): siRNA sense strand
caacgggaucaucuacuua

SEQ ID NO: 1582994 - RNA, 19 nt, Homo sapiens
  misc_RNA (1)...(19): siRNA sense strand
gcagaauacagaggaauuu

SEQ ID NO: 1582995 - RNA, 19 nt, Homo sapiens
  misc_RNA (1)...(19): siRNA sense strand
gaacuacuuugugaacuac

SEQ ID NO: 1582996 - RNA, 19 nt, Homo sapiens
  misc_RNA (1)...(19): siRNA sense strand
auaaagaucugguguucau

SEQ ID NO: 1582997 - RNA, 19 nt, Homo sapiens
  misc_RNA (1)...(19): siRNA sense strand
gcugaggaguugcaggaaa

SEQ ID NO: 1582998 - RNA, 19 nt, Homo sapiens
  misc_RNA (1)...(19): siRNA sense strand
aagccuggaucaacuuuaa

SEQ ID NO: 1582999 - RNA, 19 nt, Homo sapiens
  misc_RNA (1)...(19): siRNA sense strand
ucaacgggaucaucuacuu

SEQ ID NO: 1583000 - RNA, 19 nt, Homo sapiens
  misc_RNA (1)...(19): siRNA sense strand
acacagagacagacaaaug

SEQ ID NO: 1583001 - RNA, 19 nt, Homo sapiens
  misc_RNA (1)...(19): siRNA sense strand
gaugucagcgagucuguuu

SEQ ID NO: 1583002 - RNA, 19 nt, Homo sapiens
  misc_RNA (1)...(19): siRNA sense strand
aggacaagcuugaaggaaa

SEQ ID NO: 1583003 - RNA, 19 nt, Homo sapiens
  misc_RNA (1)...(19): siRNA sense strand
agccauaacugucacaaga

SEQ ID NO: 1583004 - RNA, 19 nt, Homo sapiens
  misc_RNA (1)...(19): siRNA sense strand
gcugacaucucucuuugag

SEQ ID NO: 1583005 - RNA, 19 nt, Homo sapiens
  misc_RNA (1)...(19): siRNA sense strand
agaggaauuucuccacuug

SEQ ID NO: 1583006 - RNA, 19 nt, Homo sapiens
  misc_RNA (1)...(19): siRNA sense strand
caacgcagucauuuauuau

SEQ ID NO: 1583007 - RNA, 19 nt, Homo sapiens
  misc_RNA (1)...(19): siRNA sense strand
gaggaaugcucucgguuuu

SEQ ID NO: 1583008 - RNA, 19 nt, Homo sapiens
  misc_RNA (1)...(19): siRNA sense strand
ggaguugcaggaaauuuau

SEQ ID NO: 1583009 - RNA, 19 nt, Homo sapiens
  misc_RNA (1)...(19): siRNA sense strand
cagaggaauuucuccacuu

SEQ ID NO: 1583010 - RNA, 19 nt, Homo sapiens
  misc_RNA (1)...(19): siRNA sense strand
uacaaucccuugcuagaca

SEQ ID NO: 1583011 - RNA, 19 nt, Homo sapiens
  misc_RNA (1)...(19): siRNA sense strand
ucgcguaggugauaaugug

SEQ ID NO: 1583012 - RNA, 19 nt, Homo sapiens
  misc_RNA (1)...(19): siRNA sense strand
gcaauagaagccuggauca

SEQ ID NO: 1583013 - RNA, 19 nt, Homo sapiens
  misc_RNA (1)...(19): siRNA sense strand
uguaucagcugacaucucu

SEQ ID NO: 1583014 - RNA, 19 nt, Homo sapiens
  misc_RNA (1)...(19): siRNA sense strand
gugauaauguguggacaga

SEQ ID NO: 1583015 - RNA, 19 nt, Homo sapiens
  misc_RNA (1)...(19): siRNA sense strand
gugcacauuuaccugauug

SEQ ID NO: 1583016 - RNA, 19 nt, Homo sapiens
  misc_RNA (1)...(19): siRNA sense strand
gaagccuggaucaacuuua

SEQ ID NO: 1583017 - RNA, 19 nt, Homo sapiens
  misc_RNA (1)...(19): siRNA sense strand
ggaagauugccagcuguaa

SEQ ID NO: 1583018 - RNA, 19 nt, Homo sapiens
  misc_RNA (1)...(19): siRNA sense strand
acgcagcugugcauaaaga

SEQ ID NO: 1583019 - RNA, 19 nt, Homo sapiens
  misc_RNA (1)...(19): siRNA sense strand
caaggcaucaugaaacugu

SEQ ID NO: 1583020 - RNA, 19 nt, Homo sapiens
  misc_RNA (1)...(19): siRNA sense strand
gcuacaaucccuugcuaga

SEQ ID NO: 1583021 - RNA, 19 nt, Homo sapiens
  misc_RNA (1)...(19): siRNA sense strand
ugacacagagacagacaaa

SEQ ID NO: 1583022 - RNA, 19 nt, Homo sapiens
  misc_RNA (1)...(19): siRNA sense strand
aaagaucggucacauucag

SEQ ID NO: 1583023 - RNA, 19 nt, Homo sapiens
  misc_RNA (1)...(19): siRNA sense strand
ugaggaaugcucucgguuu

SEQ ID NO: 1583024 - RNA, 19 nt, Homo sapiens
  misc_RNA (1)...(19): siRNA sense strand
gcuccugguugauuauauc

SEQ ID NO: 1583025 - RNA, 19 nt, Homo sapiens
  misc_RNA (1)...(19): siRNA sense strand
gcuuaccaauuugcaguuu

SEQ ID NO: 1583026 - RNA, 19 nt, Homo sapiens
  misc_RNA (1)...(19): siRNA sense strand
ucaugaaacugugucuaga

SEQ ID NO: 1583027 - RNA, 19 nt, Homo sapiens
  misc_RNA (1)...(19): siRNA sense strand
gccuggaucaacuuuaaua

SEQ ID NO: 1583028 - RNA, 19 nt, Homo sapiens
  misc_RNA (1)...(19): siRNA sense strand
gauccauguucacuuccaa

SEQ ID NO: 1583029 - RNA, 19 nt, Homo sapiens
  misc_RNA (1)...(19): siRNA sense strand
gggaaagaugccauauauu

SEQ ID NO: 1583030 - RNA, 19 nt, Homo sapiens
  misc_RNA (1)...(19): siRNA sense strand
gcucaaggcaucaugaaac

SEQ ID NO: 1583031 - RNA, 19 nt, Homo sapiens
  misc_RNA (1)...(19): siRNA sense strand
gaauacagaggaauuucuc

SEQ ID NO: 1583032 - RNA, 19 nt, Homo sapiens
  misc_RNA (1)...(19): siRNA sense strand
ugauugugcugcaggaugu

SEQ ID NO: 1583033 - RNA, 19 nt, Homo sapiens
  misc_RNA (1)...(19): siRNA sense strand
uggcagaucggcacaguga

SEQ ID NO: 1583034 - RNA, 19 nt, Homo sapiens
  misc_RNA (1)...(19): siRNA sense strand
ccaauuugcaguuuguguu

SEQ ID NO: 1583035 - RNA, 19 nt, Homo sapiens
  misc_RNA (1)...(19): siRNA sense strand
guaacgggagcaucuaugu

SEQ ID NO: 1583036 - RNA, 19 nt, Homo sapiens
  misc_RNA (1)...(19): siRNA sense strand
agacaaaugccaugugaag

SEQ ID NO: 1583037 - RNA, 19 nt, Homo sapiens
  misc_RNA (1)...(19): siRNA sense strand
cgacucauccagugcuuug

SEQ ID NO: 1583038 - RNA, 19 nt, Homo sapiens
  misc_RNA (1)...(19): siRNA sense strand
ccaugggacugugaaacuu

SEQ ID NO: 1583039 - RNA, 19 nt, Homo sapiens
  misc_RNA (1)...(19): siRNA sense strand
uuaccaauuugcaguuugu

SEQ ID NO: 1583040 - RNA, 19 nt, Homo sapiens
  misc_RNA (1)...(19): siRNA sense strand
ccacuucagccauaacugu

SEQ ID NO: 1583041 - RNA, 19 nt, Homo sapiens
  misc_RNA (1)...(19): siRNA sense strand
gaagauugccagcuguaac

SEQ ID NO: 1583042 - RNA, 19 nt, Homo sapiens
  misc_RNA (1)...(19): siRNA sense strand
acagugauccugagcucua

SEQ ID NO: 1583043 - RNA, 19 nt, Homo sapiens
  misc_RNA (1)...(19): siRNA sense strand
aggaguugcaggaaauuua

SEQ ID NO: 1583044 - RNA, 19 nt, Homo sapiens
  misc_RNA (1)...(19): siRNA sense strand
cugaggaguugcaggaaau

SEQ ID NO: 1583045 - RNA, 19 nt, Homo sapiens
  misc_RNA (1)...(19): siRNA sense strand
ccaucccucuggaagauug

SEQ ID NO: 1583046 - RNA, 19 nt, Homo sapiens
  misc_RNA (1)...(19): siRNA sense strand
agacauguaucagcugaca

SEQ ID NO: 1583047 - RNA, 19 nt, Homo sapiens
  misc_RNA (1)...(19): siRNA sense strand
caauuugcaguuuguguug

SEQ ID NO: 1583048 - RNA, 19 nt, Homo sapiens
  misc_RNA (1)...(19): siRNA sense strand
gcuugacccugccacuuca

SEQ ID NO: 1583049 - RNA, 19 nt, Homo sapiens
  misc_RNA (1)...(19): siRNA sense strand
uugcugaugucaccauuuc

SEQ ID NO: 1583050 - RNA, 19 nt, Homo sapiens
  misc_RNA (1)...(19): siRNA sense strand
gaaugaucuggacuucuuu

SEQ ID NO: 1583051 - RNA, 19 nt, Homo sapiens
  misc_RNA (1)...(19): siRNA sense strand
uggcccagcugcagaauac

SEQ ID NO: 1583052 - RNA, 19 nt, Homo sapiens
  misc_RNA (1)...(19): siRNA sense strand
gagaacuacuuugugaacu

SEQ ID NO: 1583053 - RNA, 19 nt, Homo sapiens
  misc_RNA (1)...(19): siRNA sense strand
ucacucaggacaagcuuga

SEQ ID NO: 1583054 - RNA, 19 nt, Homo sapiens
  misc_RNA (1)...(19): siRNA sense strand
ucagcugacaucucucuuu

SEQ ID NO: 1583055 - RNA, 19 nt, Homo sapiens
  misc_RNA (1)...(19): siRNA sense strand
agagacaacucagcuagag

SEQ ID NO: 1583056 - RNA, 19 nt, Homo sapiens
  misc_RNA (1)...(19): siRNA sense strand
ggaugagaacuacuuugug

SEQ ID NO: 1583057 - RNA, 19 nt, Homo sapiens
  misc_RNA (1)...(19): siRNA sense strand
ggacuucuuuaccaaaccu

SEQ ID NO: 1583058 - RNA, 19 nt, Homo sapiens
  misc_RNA (1)...(19): siRNA sense strand
gaggaguugcaggaaauuu

SEQ ID NO: 1583059 - RNA, 19 nt, Homo sapiens
  misc_RNA (1)...(19): siRNA sense strand
gacagagacaacucagcua

SEQ ID NO: 1583060 - RNA, 19 nt, Homo sapiens
  misc_RNA (1)...(19): siRNA sense strand
ucuccaacgcagucauuua

SEQ ID NO: 1583061 - RNA, 19 nt, Homo sapiens
  misc_RNA (1)...(19): siRNA sense strand
ccgggaaagaugccauaua

SEQ ID NO: 1583062 - RNA, 19 nt, Homo sapiens
  misc_RNA (1)...(19): siRNA sense strand
aaacugccuucaggugaug

SEQ ID NO: 1583063 - RNA, 19 nt, Homo sapiens
  misc_RNA (1)...(19): siRNA sense strand
ccacuugccccaccgcuua

SEQ ID NO: 1583064 - RNA, 19 nt, Homo sapiens
  misc_RNA (1)...(19): siRNA sense strand
aggugcugcuuaccaauuu

SEQ ID NO: 1583065 - RNA, 19 nt, Homo sapiens
  misc_RNA (1)...(19): siRNA sense strand
gcccacaaccgggugauug

SEQ ID NO: 1583066 - RNA, 19 nt, Homo sapiens
  misc_RNA (1)...(19): siRNA sense strand
gaaggaaauuggggagaau

SEQ ID NO: 1583067 - RNA, 19 nt, Homo sapiens
  misc_RNA (1)...(19): siRNA sense strand
auagaagccuggaucaacu

SEQ ID NO: 1583068 - RNA, 19 nt, Homo sapiens
  misc_RNA (1)...(19): siRNA sense strand
caauagaagccuggaucaa

SEQ ID NO: 1583069 - RNA, 19 nt, Homo sapiens
  misc_RNA (1)...(19): siRNA sense strand
ggauggaguuccguguucu

SEQ ID NO: 1583070 - RNA, 19 nt, Homo sapiens
  misc_RNA (1)...(19): siRNA sense strand
ggagagagaugcagagaaa

SEQ ID NO: 1583071 - RNA, 19 nt, Homo sapiens
  misc_RNA (1)...(19): siRNA sense strand
ggacagggagcccaaauaa

SEQ ID NO: 1583072 - RNA, 19 nt, Homo sapiens
  misc_RNA (1)...(19): siRNA sense strand
gcacugauuuagagaaaga

SEQ ID NO: 1583073 - RNA, 19 nt, Homo sapiens
  misc_RNA (1)...(19): siRNA sense strand
ggacaaaguuaaaggaaag

SEQ ID NO: 1583074 - RNA, 19 nt, Homo sapiens
  misc_RNA (1)...(19): siRNA sense strand
ggaccagaaucccaaguaa

SEQ ID NO: 1583075 - RNA, 19 nt, Homo sapiens
  misc_RNA (1)...(19): siRNA sense strand
gaauggaggucaagguaga

SEQ ID NO: 1583076 - RNA, 19 nt, Homo sapiens
  misc_RNA (1)...(19): siRNA sense strand
ggaaagagagaaucagaaa

SEQ ID NO: 1583077 - RNA, 19 nt, Homo sapiens
  misc_RNA (1)...(19): siRNA sense strand
gaaaucagcacacauaaag

SEQ ID NO: 1583078 - RNA, 19 nt, Homo sapiens
  misc_RNA (1)...(19): siRNA sense strand
gcagagaaagauccaaaua

SEQ ID NO: 1583079 - RNA, 19 nt, Homo sapiens
  misc_RNA (1)...(19): siRNA sense strand
gaagagggagucaguugua

SEQ ID NO: 1583080 - RNA, 19 nt, Homo sapiens
  misc_RNA (1)...(19): siRNA sense strand
gaaauaacuuuggcuguca

SEQ ID NO: 1583081 - RNA, 19 nt, Homo sapiens
  misc_RNA (1)...(19): siRNA sense strand
acaaacaacugaagaacuu

SEQ ID NO: 1583082 - RNA, 19 nt, Homo sapiens
  misc_RNA (1)...(19): siRNA sense strand
gaacaagagguccaagaaa

SEQ ID NO: 1583083 - RNA, 19 nt, Homo sapiens
  misc_RNA (1)...(19): siRNA sense strand
agacaggaaucccaaguaa

SEQ ID NO: 1583084 - RNA, 19 nt, Homo sapiens
  misc_RNA (1)...(19): siRNA sense strand
gaucaaguauugguaguau

SEQ ID NO: 1583085 - RNA, 19 nt, Homo sapiens
  misc_RNA (1)...(19): siRNA sense strand
ggacaagaagcccaaguaa

SEQ ID NO: 1583086 - RNA, 19 nt, Homo sapiens
  misc_RNA (1)...(19): siRNA sense strand
acagagaaccgcaagaaua

SEQ ID NO: 1583087 - RNA, 19 nt, Homo sapiens
  misc_RNA (1)...(19): siRNA sense strand
gcaagaauaccucaaguuc

SEQ ID NO: 1583088 - RNA, 19 nt, Homo sapiens
  misc_RNA (1)...(19): siRNA sense strand
gaacuuccuuccagaacug

SEQ ID NO: 1583089 - RNA, 19 nt, Homo sapiens
  misc_RNA (1)...(19): siRNA sense strand
uuacauggaugaagaacuu

SEQ ID NO: 1583090 - RNA, 19 nt, Homo sapiens
  misc_RNA (1)...(19): siRNA sense strand
uaaaggagccagaaagaga

SEQ ID NO: 1583091 - RNA, 19 nt, Homo sapiens
  misc_RNA (1)...(19): siRNA sense strand
cagaauagccgagaagaaa

SEQ ID NO: 1583092 - RNA, 19 nt, Homo sapiens
  misc_RNA (1)...(19): siRNA sense strand
caaggaagcacuaaagaau

SEQ ID NO: 1583093 - RNA, 19 nt, Homo sapiens
  misc_RNA (1)...(19): siRNA sense strand
acacuggaaucccaaguaa

SEQ ID NO: 1583094 - RNA, 19 nt, Homo sapiens
  misc_RNA (1)...(19): siRNA sense strand
ggaacaagagguccaagaa

SEQ ID NO: 1583095 - RNA, 19 nt, Homo sapiens
  misc_RNA (1)...(19): siRNA sense strand
gaggauaaaggaaauaaug

SEQ ID NO: 1583096 - RNA, 19 nt, Homo sapiens
  misc_RNA (1)...(19): siRNA sense strand
gagagaaucagaaaucaau

SEQ ID NO: 1583097 - RNA, 19 nt, Homo sapiens
  misc_RNA (1)...(19): siRNA sense strand
caaaggaaaggacaaaguu

SEQ ID NO: 1583098 - RNA, 19 nt, Homo sapiens
  misc_RNA (1)...(19): siRNA sense strand
gugcuagacuucuggacua

SEQ ID NO: 1583099 - RNA, 19 nt, Homo sapiens
  misc_RNA (1)...(19): siRNA sense strand
cagagaaagauccaaauaa

SEQ ID NO: 1583100 - RNA, 19 nt, Homo sapiens
  misc_RNA (1)...(19): siRNA sense strand
ugaggcagguguacugaaa

SEQ ID NO: 1583101 - RNA, 19 nt, Homo sapiens
  misc_RNA (1)...(19): siRNA sense strand
gguagaggaucccgacaug

SEQ ID NO: 1583102 - RNA, 19 nt, Homo sapiens
  misc_RNA (1)...(19): siRNA sense strand
ggacaggaagcccaagaaa

SEQ ID NO: 1583103 - RNA, 19 nt, Homo sapiens
  misc_RNA (1)...(19): siRNA sense strand
ggacaaacagaacucauuc

SEQ ID NO: 1583104 - RNA, 19 nt, Homo sapiens
  misc_RNA (1)...(19): siRNA sense strand
gcaaauacaggaaggaagu

SEQ ID NO: 1583105 - RNA, 19 nt, Homo sapiens
  misc_RNA (1)...(19): siRNA sense strand
aggaagcacuaaagaauga

SEQ ID NO: 1583106 - RNA, 19 nt, Homo sapiens
  misc_RNA (1)...(19): siRNA sense strand
ggaaggaaguacaacaaaa

SEQ ID NO: 1583107 - RNA, 19 nt, Homo sapiens
  misc_RNA (1)...(19): siRNA sense strand
ggacaggaagcccagguaa

SEQ ID NO: 1583108 - RNA, 19 nt, Homo sapiens
  misc_RNA (1)...(19): siRNA sense strand
ccaacucucuagugucuau

SEQ ID NO: 1583109 - RNA, 19 nt, Homo sapiens
  misc_RNA (1)...(19): siRNA sense strand
gaagagugagucaggugua

SEQ ID NO: 1583110 - RNA, 19 nt, Homo sapiens
  misc_RNA (1)...(19): siRNA sense strand
caggagccaugaugcaauu

SEQ ID NO: 1583111 - RNA, 19 nt, Homo sapiens
  misc_RNA (1)...(19): siRNA sense strand
cagguuacauggaugaaga

SEQ ID NO: 1583112 - RNA, 19 nt, Homo sapiens
  misc_RNA (1)...(19): siRNA sense strand
cuagacuucuggacuauga

SEQ ID NO: 1583113 - RNA, 19 nt, Homo sapiens
  misc_RNA (1)...(19): siRNA sense strand
ucaaccaacucucuagugu

SEQ ID NO: 1583114 - RNA, 19 nt, Homo sapiens
  misc_RNA (1)...(19): siRNA sense strand
aaagagagaaucagaaauc

SEQ ID NO: 1583115 - RNA, 19 nt, Homo sapiens
  misc_RNA (1)...(19): siRNA sense strand
gaagagugaggcaggugua

SEQ ID NO: 1583116 - RNA, 19 nt, Homo sapiens
  misc_RNA (1)...(19): siRNA sense strand
ugacuccugugguuauauu

SEQ ID NO: 1583117 - RNA, 19 nt, Homo sapiens
  misc_RNA (1)...(19): siRNA sense strand
gaagagugaguugaaggua

SEQ ID NO: 1583118 - RNA, 19 nt, Homo sapiens
  misc_RNA (1)...(19): siRNA sense strand
aaaggaaaggacaaaguua

SEQ ID NO: 1583119 - RNA, 19 nt, Homo sapiens
  misc_RNA (1)...(19): siRNA sense strand
gcacugucucgaucaagua

SEQ ID NO: 1583120 - RNA, 19 nt, Homo sapiens
  misc_RNA (1)...(19): siRNA sense strand
cgacguaagcaaagugaaa

SEQ ID NO: 1583121 - RNA, 19 nt, Homo sapiens
  misc_RNA (1)...(19): siRNA sense strand
gaaaggacaaaguuaaagg

SEQ ID NO: 1583122 - RNA, 19 nt, Homo sapiens
  misc_RNA (1)...(19): siRNA sense strand
acugcaaggucucagaaua

SEQ ID NO: 1583123 - RNA, 19 nt, Homo sapiens
  misc_RNA (1)...(19): siRNA sense strand
gaaagagagaaucagaaau

SEQ ID NO: 1583124 - RNA, 19 nt, Homo sapiens
  misc_RNA (1)...(19): siRNA sense strand
ggacaagaaggccaaguag

SEQ ID NO: 1583125 - RNA, 19 nt, Homo sapiens
  misc_RNA (1)...(19): siRNA sense strand
cauccuggcuauuuuguua

SEQ ID NO: 1583126 - RNA, 19 nt, Homo sapiens
  misc_RNA (1)...(19): siRNA sense strand
agacagugacgcuggaaua

SEQ ID NO: 1583127 - RNA, 19 nt, Homo sapiens
  misc_RNA (1)...(19): siRNA sense strand
cauaaaggagccagaaaga

SEQ ID NO: 1583128 - RNA, 19 nt, Homo sapiens
  misc_RNA (1)...(19): siRNA sense strand
gggacaaacagaacucauu

SEQ ID NO: 1583129 - RNA, 19 nt, Homo sapiens
  misc_RNA (1)...(19): siRNA sense strand
gaagaguggguugguugua

SEQ ID NO: 1583130 - RNA, 19 nt, Homo sapiens
  misc_RNA (1)...(19): siRNA sense strand
gacaggaaacccaacuaaa

SEQ ID NO: 1583131 - RNA, 19 nt, Homo sapiens
  misc_RNA (1)...(19): siRNA sense strand
gaaaaggcacugauuuaga

SEQ ID NO: 1583132 - RNA, 19 nt, Homo sapiens
  misc_RNA (1)...(19): siRNA sense strand
uaaaggaaagagagaauca

SEQ ID NO: 1583133 - RNA, 19 nt, Homo sapiens
  misc_RNA (1)...(19): siRNA sense strand
gaccagaaucccaaguaaa

SEQ ID NO: 1583134 - RNA, 19 nt, Homo sapiens
  misc_RNA (1)...(19): siRNA sense strand
gaggaucccgacaugcaua

SEQ ID NO: 1583135 - RNA, 19 nt, Homo sapiens
  misc_RNA (1)...(19): siRNA sense strand
gaggugaguguaccagaaa

SEQ ID NO: 1583136 - RNA, 19 nt, Homo sapiens
  misc_RNA (1)...(19): siRNA sense strand
ugaaaucagcacacauaaa

SEQ ID NO: 1583137 - RNA, 19 nt, Homo sapiens
  misc_RNA (1)...(19): siRNA sense strand
cuugaaaucagcacacaua

SEQ ID NO: 1583138 - RNA, 19 nt, Homo sapiens
  misc_RNA (1)...(19): siRNA sense strand
caagaauaccucaaguuca

SEQ ID NO: 1583139 - RNA, 19 nt, Homo sapiens
  misc_RNA (1)...(19): siRNA sense strand
ugaggugaguguaccagaa

SEQ ID NO: 1583140 - RNA, 19 nt, Homo sapiens
  misc_RNA (1)...(19): siRNA sense strand
guacugaaaggaccagaau

SEQ ID NO: 1583141 - RNA, 19 nt, Homo sapiens
  misc_RNA (1)...(19): siRNA sense strand
caagaaggccaaguagaga

SEQ ID NO: 1583142 - RNA, 19 nt, Homo sapiens
  misc_RNA (1)...(19): siRNA sense strand
uaaagaagagggagucagu

SEQ ID NO: 1583143 - RNA, 19 nt, Homo sapiens
  misc_RNA (1)...(19): siRNA sense strand
ugagaugggugugccaaga

SEQ ID NO: 1583144 - RNA, 19 nt, Homo sapiens
  misc_RNA (1)...(19): siRNA sense strand
gacaggagucccaaguaaa

SEQ ID NO: 1583145 - RNA, 19 nt, Homo sapiens
  misc_RNA (1)...(19): siRNA sense strand
acagggagcccaaauaaag

SEQ ID NO: 1583146 - RNA, 19 nt, Homo sapiens
  misc_RNA (1)...(19): siRNA sense strand
aaacaaggaagcacuaaag

SEQ ID NO: 1583147 - RNA, 19 nt, Homo sapiens
  misc_RNA (1)...(19): siRNA sense strand
gcacugcaaggucucagaa

SEQ ID NO: 1583148 - RNA, 19 nt, Homo sapiens
  misc_RNA (1)...(19): siRNA sense strand
aaagugaaaugcauaucuc

SEQ ID NO: 1583149 - RNA, 19 nt, Homo sapiens
  misc_RNA (1)...(19): siRNA sense strand
aaagaacacugaggugagu

SEQ ID NO: 1583150 - RNA, 19 nt, Homo sapiens
  misc_RNA (1)...(19): siRNA sense strand
guagaauccuugaaaucag

SEQ ID NO: 1583151 - RNA, 19 nt, Homo sapiens
  misc_RNA (1)...(19): siRNA sense strand
ucacagagaaccgcaagaa

SEQ ID NO: 1583152 - RNA, 19 nt, Homo sapiens
  misc_RNA (1)...(19): siRNA sense strand
uaagcaaagugaaaugcau

SEQ ID NO: 1583153 - RNA, 19 nt, Homo sapiens
  misc_RNA (1)...(19): siRNA sense strand
uagugucuauggcaucuaa

SEQ ID NO: 1583154 - RNA, 19 nt, Homo sapiens
  misc_RNA (1)...(19): siRNA sense strand
caaacuccaggaccuauug

SEQ ID NO: 1583155 - RNA, 19 nt, Homo sapiens
  misc_RNA (1)...(19): siRNA sense strand
ggaaaggacaaaguuaaag

SEQ ID NO: 1583156 - RNA, 19 nt, Homo sapiens
  misc_RNA (1)...(19): siRNA sense strand
aaggaaaggacaaaguuaa

SEQ ID NO: 1583157 - RNA, 19 nt, Homo sapiens
  misc_RNA (1)...(19): siRNA sense strand
cagaaucccaaguaaagaa

SEQ ID NO: 1583158 - RNA, 19 nt, Homo sapiens
  misc_RNA (1)...(19): siRNA sense strand
gagucagucuggugucuca

SEQ ID NO: 1583159 - RNA, 19 nt, Homo sapiens
  misc_RNA (1)...(19): siRNA sense strand
gaagacaggaaucccaagu

SEQ ID NO: 1583160 - RNA, 19 nt, Homo sapiens
  misc_RNA (1)...(19): siRNA sense strand
agacaggaaacccaacuaa

SEQ ID NO: 1583161 - RNA, 19 nt, Homo sapiens
  misc_RNA (1)...(19): siRNA sense strand
gcaaacuccaggaccuauu

SEQ ID NO: 1583162 - RNA, 19 nt, Homo sapiens
  misc_RNA (1)...(19): siRNA sense strand
ugagucagguguacuaaaa

SEQ ID NO: 1583163 - RNA, 19 nt, Homo sapiens
  misc_RNA (1)...(19): siRNA sense strand
caaagugaaaugcauaucu

SEQ ID NO: 1583164 - RNA, 19 nt, Homo sapiens
  misc_RNA (1)...(19): siRNA sense strand
gacaggaagcccagguaaa

SEQ ID NO: 1583165 - RNA, 19 nt, Homo sapiens
  misc_RNA (1)...(19): siRNA sense strand
ugagaugaguauaccacaa

SEQ ID NO: 1583166 - RNA, 19 nt, Homo sapiens
  misc_RNA (1)...(19): siRNA sense strand
ggagcuacaggaccuauca

SEQ ID NO: 1583167 - RNA, 19 nt, Homo sapiens
  misc_RNA (1)...(19): siRNA sense strand
gagaugggugugccaagaa

SEQ ID NO: 1583168 - RNA, 19 nt, Homo sapiens
  misc_RNA (1)...(19): siRNA sense strand
gacagggagcccaaauaaa

SEQ ID NO: 1583169 - RNA, 19 nt, Homo sapiens
  misc_RNA (1)...(19): siRNA sense strand
uaccucaaguucacacuau

SEQ ID NO: 1583170 - RNA, 19 nt, Homo sapiens
  misc_RNA (1)...(19): siRNA sense strand
gaaggaagaugcaaacugu

SEQ ID NO: 1583171 - RNA, 19 nt, Homo sapiens
  misc_RNA (1)...(19): siRNA sense strand
guacccagauguaucauua

SEQ ID NO: 1583172 - RNA, 19 nt, Homo sapiens
  misc_RNA (1)...(19): siRNA sense strand
caaaugcugugaagagaaa

SEQ ID NO: 1583173 - RNA, 19 nt, Homo sapiens
  misc_RNA (1)...(19): siRNA sense strand
ugaccaagcuccugaaaga

SEQ ID NO: 1583174 - RNA, 19 nt, Homo sapiens
  misc_RNA (1)...(19): siRNA sense strand
gccgacagcuuucaggauu

SEQ ID NO: 1583175 - RNA, 19 nt, Homo sapiens
  misc_RNA (1)...(19): siRNA sense strand
ggauuucagucacaucuuc

SEQ ID NO: 1583176 - RNA, 19 nt, Homo sapiens
  misc_RNA (1)...(19): siRNA sense strand
gaaauguacccagauguau

SEQ ID NO: 1583177 - RNA, 19 nt, Homo sapiens
  misc_RNA (1)...(19): siRNA sense strand
agucacaucuuccugcuuu

SEQ ID NO: 1583178 - RNA, 19 nt, Homo sapiens
  misc_RNA (1)...(19): siRNA sense strand
agaaauguacccagaugua

SEQ ID NO: 1583179 - RNA, 19 nt, Homo sapiens
  misc_RNA (1)...(19): siRNA sense strand
agagaaauguacccagaug

SEQ ID NO: 1583180 - RNA, 19 nt, Homo sapiens
  misc_RNA (1)...(19): siRNA sense strand
gaucgaaggaagaugcaaa

SEQ ID NO: 1583181 - RNA, 19 nt, Homo sapiens
  misc_RNA (1)...(19): siRNA sense strand
gauguaucauuauccuugu

SEQ ID NO: 1583182 - RNA, 19 nt, Homo sapiens
  misc_RNA (1)...(19): siRNA sense strand
cgacagcuuucaggauuuc

SEQ ID NO: 1583183 - RNA, 19 nt, Homo sapiens
  misc_RNA (1)...(19): siRNA sense strand
uaucaaaugcugugaagag

SEQ ID NO: 1583184 - RNA, 19 nt, Homo sapiens
  misc_RNA (1)...(19): siRNA sense strand
ugcaggagccgacagcuuu

SEQ ID NO: 1583185 - RNA, 19 nt, Homo sapiens
  misc_RNA (1)...(19): siRNA sense strand
ccgacagcuuucaggauuu

SEQ ID NO: 1583186 - RNA, 19 nt, Homo sapiens
  misc_RNA (1)...(19): siRNA sense strand
cgaaggaagaugcaaacug

SEQ ID NO: 1583187 - RNA, 19 nt, Homo sapiens
  misc_RNA (1)...(19): siRNA sense strand
gagaaauguacccagaugu

SEQ ID NO: 1583188 - RNA, 19 nt, Homo sapiens
  misc_RNA (1)...(19): siRNA sense strand
ugaaagaucgaaggaagau

SEQ ID NO: 1583189 - RNA, 19 nt, Homo sapiens
  misc_RNA (1)...(19): siRNA sense strand
ccagauguaucauuauccu

SEQ ID NO: 1583190 - RNA, 19 nt, Homo sapiens
  misc_RNA (1)...(19): siRNA sense strand
ucaaaugcugugaagagaa

SEQ ID NO: 1583191 - RNA, 19 nt, Homo sapiens
  misc_RNA (1)...(19): siRNA sense strand
gagguuggagccugaagau

SEQ ID NO: 1583192 - RNA, 19 nt, Homo sapiens
  misc_RNA (1)...(19): siRNA sense strand
ggagguuggagccugaaga

SEQ ID NO: 1583193 - RNA, 19 nt, Homo sapiens
  misc_RNA (1)...(19): siRNA sense strand
gcacuuuggagccacuauc

SEQ ID NO: 1583194 - RNA, 19 nt, Homo sapiens
  misc_RNA (1)...(19): siRNA sense strand
acuaucaaaugcugugaag

SEQ ID NO: 1583195 - RNA, 19 nt, Homo sapiens
  misc_RNA (1)...(19): siRNA sense strand
gcaggagccgacagcuuuc

SEQ ID NO: 1583196 - RNA, 19 nt, Homo sapiens
  misc_RNA (1)...(19): siRNA sense strand
acccagauguaucauuauc

SEQ ID NO: 1583197 - RNA, 19 nt, Homo sapiens
  misc_RNA (1)...(19): siRNA sense strand
gcugugaagagaaauguac

SEQ ID NO: 1583198 - RNA, 19 nt, Homo sapiens
  misc_RNA (1)...(19): siRNA sense strand
gcucaaggcugauggcaau

SEQ ID NO: 1583199 - RNA, 19 nt, Homo sapiens
  misc_RNA (1)...(19): siRNA sense strand
ccacauguaugacagagaa

SEQ ID NO: 1583200 - RNA, 19 nt, Homo sapiens
  misc_RNA (1)...(19): siRNA sense strand
gaagugcccagaugaauga

SEQ ID NO: 1583201 - RNA, 19 nt, Homo sapiens
  misc_RNA (1)...(19): siRNA sense strand
gaaagaagaggacgagaag

SEQ ID NO: 1583202 - RNA, 19 nt, Homo sapiens
  misc_RNA (1)...(19): siRNA sense strand
gaaagcacccugggaauca

SEQ ID NO: 1583203 - RNA, 19 nt, Homo sapiens
  misc_RNA (1)...(19): siRNA sense strand
gaaucaaucuuccuaagcu

SEQ ID NO: 1583204 - RNA, 19 nt, Homo sapiens
  misc_RNA (1)...(19): siRNA sense strand
caaagacgcuggccuucag

SEQ ID NO: 1583205 - RNA, 19 nt, Homo sapiens
  misc_RNA (1)...(19): siRNA sense strand
caucugcgcuauguggaua

SEQ ID NO: 1583206 - RNA, 19 nt, Homo sapiens
  misc_RNA (1)...(19): siRNA sense strand
ccagauuacugacacugaa

SEQ ID NO: 1583207 - RNA, 19 nt, Homo sapiens
  misc_RNA (1)...(19): siRNA sense strand
ggcuuucucugcucuguaa

SEQ ID NO: 1583208 - RNA, 19 nt, Homo sapiens
  misc_RNA (1)...(19): siRNA sense strand
gcagccaccacauguauga

SEQ ID NO: 1583209 - RNA, 19 nt, Homo sapiens
  misc_RNA (1)...(19): siRNA sense strand
cggaggacaugaugaagga

SEQ ID NO: 1583210 - RNA, 19 nt, Homo sapiens
  misc_RNA (1)...(19): siRNA sense strand
ugacagacaucuacuugcu

SEQ ID NO: 1583211 - RNA, 19 nt, Homo sapiens
  misc_RNA (1)...(19): siRNA sense strand
ggaaagcacccugggaauc

SEQ ID NO: 1583212 - RNA, 19 nt, Homo sapiens
  misc_RNA (1)...(19): siRNA sense strand
ugaaugaacugcccuaccu

SEQ ID NO: 1583213 - RNA, 19 nt, Homo sapiens
  misc_RNA (1)...(19): siRNA sense strand
ggaacagcauccacauggu

SEQ ID NO: 1583214 - RNA, 19 nt, Homo sapiens
  misc_RNA (1)...(19): siRNA sense strand
ucacggaggacaugaugaa

SEQ ID NO: 1583215 - RNA, 19 nt, Homo sapiens
  misc_RNA (1)...(19): siRNA sense strand
gagagggaccugacagaca

SEQ ID NO: 1583216 - RNA, 19 nt, Homo sapiens
  misc_RNA (1)...(19): siRNA sense strand
gggcagccaccacauguau

SEQ ID NO: 1583217 - RNA, 19 nt, Homo sapiens
  misc_RNA (1)...(19): siRNA sense strand
agaaagaagaggacgagaa

SEQ ID NO: 1583218 - RNA, 19 nt, Homo sapiens
  misc_RNA (1)...(19): siRNA sense strand
cuuauaaccagauuacuga

SEQ ID NO: 1583219 - RNA, 19 nt, Homo sapiens
  misc_RNA (1)...(19): siRNA sense strand
agagggaccugacagacau

SEQ ID NO: 1583220 - RNA, 19 nt, Homo sapiens
  misc_RNA (1)...(19): siRNA sense strand
gcugcgaagugcccagaug

SEQ ID NO: 1583221 - RNA, 19 nt, Homo sapiens
  misc_RNA (1)...(19): siRNA sense strand
gcuauguggauauuucuga

SEQ ID NO: 1583222 - RNA, 19 nt, Homo sapiens
  misc_RNA (1)...(19): siRNA sense strand
cuacauccaucugcgcuau

SEQ ID NO: 1583223 - RNA, 19 nt, Homo sapiens
  misc_RNA (1)...(19): siRNA sense strand
cgaagugcccagaugaaug

SEQ ID NO: 1583224 - RNA, 19 nt, Homo sapiens
  misc_RNA (1)...(19): siRNA sense strand
gcuuauaaccagauuacug

SEQ ID NO: 1583225 - RNA, 19 nt, Homo sapiens
  misc_RNA (1)...(19): siRNA sense strand
ccccaaagcuggaaauuca

SEQ ID NO: 1583226 - RNA, 19 nt, Homo sapiens
  misc_RNA (1)...(19): siRNA sense strand
aagaagaggacgagaagga

SEQ ID NO: 1583227 - RNA, 19 nt, Homo sapiens
  misc_RNA (1)...(19): siRNA sense strand
ggcaaucggcugcgaagug

SEQ ID NO: 1583228 - RNA, 19 nt, Homo sapiens
  misc_RNA (1)...(19): siRNA sense strand
gcuggaaauucaucacaac

SEQ ID NO: 1583229 - RNA, 19 nt, Homo sapiens
  misc_RNA (1)...(19): siRNA sense strand
uggaggaucugagcaaucu

SEQ ID NO: 1583230 - RNA, 19 nt, Homo sapiens
  misc_RNA (1)...(19): siRNA sense strand
ggaccugacagacaucuac

SEQ ID NO: 1583231 - RNA, 19 nt, Homo sapiens
  misc_RNA (1)...(19): siRNA sense strand
cuugaaacccugaaucuca

SEQ ID NO: 1583232 - RNA, 19 nt, Homo sapiens
  misc_RNA (1)...(19): siRNA sense strand
cgagacaaccagauugaca

SEQ ID NO: 1583233 - RNA, 19 nt, Homo sapiens
  misc_RNA (1)...(19): siRNA sense strand
gcgaagugcccagaugaau

SEQ ID NO: 1583234 - RNA, 19 nt, Homo sapiens
  misc_RNA (1)...(19): siRNA sense strand
ugaaaucauugcaguaccu

SEQ ID NO: 1583235 - RNA, 19 nt, Homo sapiens
  misc_RNA (1)...(19): siRNA sense strand
augucaagcuggagguuaa

SEQ ID NO: 1583236 - RNA, 19 nt, Homo sapiens
  misc_RNA (1)...(19): siRNA sense strand
cccaaaacaugcugaagaa

SEQ ID NO: 1583237 - RNA, 19 nt, Homo sapiens
  misc_RNA (1)...(19): siRNA sense strand
ugggcuggcucaugcuuau

SEQ ID NO: 1583238 - RNA, 19 nt, Homo sapiens
  misc_RNA (1)...(19): siRNA sense strand
ccugacagacaucuacuug

SEQ ID NO: 1583239 - RNA, 19 nt, Homo sapiens
  misc_RNA (1)...(19): siRNA sense strand
acacugaaggcaucucuca

SEQ ID NO: 1583240 - RNA, 19 nt, Homo sapiens
  misc_RNA (1)...(19): siRNA sense strand
aaagcacccugggaaucaa

SEQ ID NO: 1583241 - RNA, 19 nt, Homo sapiens
  misc_RNA (1)...(19): siRNA sense strand
ccaaagcuggaaauucauc

SEQ ID NO: 1583242 - RNA, 19 nt, Homo sapiens
  misc_RNA (1)...(19): siRNA sense strand
ucaaagacgcuggccuuca

SEQ ID NO: 1583243 - RNA, 19 nt, Homo sapiens
  misc_RNA (1)...(19): siRNA sense strand
uaaagagagggaccugaca

SEQ ID NO: 1583244 - RNA, 19 nt, Homo sapiens
  misc_RNA (1)...(19): siRNA sense strand
gagccagaccaggaugauu

SEQ ID NO: 1583245 - RNA, 19 nt, Homo sapiens
  misc_RNA (1)...(19): siRNA sense strand
accugcagauugcuaguuu

SEQ ID NO: 1583246 - RNA, 19 nt, Homo sapiens
  misc_RNA (1)...(19): siRNA sense strand
gugcccagaugaaugaacu

SEQ ID NO: 1583247 - RNA, 19 nt, Homo sapiens
  misc_RNA (1)...(19): siRNA sense strand
ucucauccucgucuugaaa

SEQ ID NO: 1583248 - RNA, 19 nt, Homo sapiens
  misc_RNA (1)...(19): siRNA sense strand
ugaaggaagggcuuucucu

SEQ ID NO: 1583249 - RNA, 19 nt, Homo sapiens
  misc_RNA (1)...(19): siRNA sense strand
gcucaaggcugauggcaau

SEQ ID NO: 1583250 - RNA, 19 nt, Homo sapiens
  misc_RNA (1)...(19): siRNA sense strand
gaagugcccagaugaauga

SEQ ID NO: 1583251 - RNA, 19 nt, Homo sapiens
  misc_RNA (1)...(19): siRNA sense strand
gaaagaagaggacgagaag

SEQ ID NO: 1583252 - RNA, 19 nt, Homo sapiens
  misc_RNA (1)...(19): siRNA sense strand
gaaagcacccugggaauca

SEQ ID NO: 1583253 - RNA, 19 nt, Homo sapiens
  misc_RNA (1)...(19): siRNA sense strand
gaaucaaucuuccuaagcu

SEQ ID NO: 1583254 - RNA, 19 nt, Homo sapiens
  misc_RNA (1)...(19): siRNA sense strand
caucugcgcuauguggaua

SEQ ID NO: 1583255 - RNA, 19 nt, Homo sapiens
  misc_RNA (1)...(19): siRNA sense strand
ccagauuacugacacugaa

SEQ ID NO: 1583256 - RNA, 19 nt, Homo sapiens
  misc_RNA (1)...(19): siRNA sense strand
ggcuuucucugcucuguaa

SEQ ID NO: 1583257 - RNA, 19 nt, Homo sapiens
  misc_RNA (1)...(19): siRNA sense strand
cggaggacaugaugaagga

SEQ ID NO: 1583258 - RNA, 19 nt, Homo sapiens
  misc_RNA (1)...(19): siRNA sense strand
ugacagacaucuacuugcu

SEQ ID NO: 1583259 - RNA, 19 nt, Homo sapiens
  misc_RNA (1)...(19): siRNA sense strand
ggaaagcacccugggaauc

SEQ ID NO: 1583260 - RNA, 19 nt, Homo sapiens
  misc_RNA (1)...(19): siRNA sense strand
ugaaugaacugcccuaccu

SEQ ID NO: 1583261 - RNA, 19 nt, Homo sapiens
  misc_RNA (1)...(19): siRNA sense strand
ggaacagcauccacauggu

SEQ ID NO: 1583262 - RNA, 19 nt, Homo sapiens
  misc_RNA (1)...(19): siRNA sense strand
ucacggaggacaugaugaa

SEQ ID NO: 1583263 - RNA, 19 nt, Homo sapiens
  misc_RNA (1)...(19): siRNA sense strand
gagagggaccugacagaca

SEQ ID NO: 1583264 - RNA, 19 nt, Homo sapiens
  misc_RNA (1)...(19): siRNA sense strand
agaaagaagaggacgagaa

SEQ ID NO: 1583265 - RNA, 19 nt, Homo sapiens
  misc_RNA (1)...(19): siRNA sense strand
cuuauaaccagauuacuga

SEQ ID NO: 1583266 - RNA, 19 nt, Homo sapiens
  misc_RNA (1)...(19): siRNA sense strand
agagggaccugacagacau

SEQ ID NO: 1583267 - RNA, 19 nt, Homo sapiens
  misc_RNA (1)...(19): siRNA sense strand
gcugcgaagugcccagaug

SEQ ID NO: 1583268 - RNA, 19 nt, Homo sapiens
  misc_RNA (1)...(19): siRNA sense strand
gcuauguggauauuucuga

SEQ ID NO: 1583269 - RNA, 19 nt, Homo sapiens
  misc_RNA (1)...(19): siRNA sense strand
cuacauccaucugcgcuau

SEQ ID NO: 1583270 - RNA, 19 nt, Homo sapiens
  misc_RNA (1)...(19): siRNA sense strand
cgaagugcccagaugaaug

SEQ ID NO: 1583271 - RNA, 19 nt, Homo sapiens
  misc_RNA (1)...(19): siRNA sense strand
gcuuauaaccagauuacug

SEQ ID NO: 1583272 - RNA, 19 nt, Homo sapiens
  misc_RNA (1)...(19): siRNA sense strand
aagaagaggacgagaagga

SEQ ID NO: 1583273 - RNA, 19 nt, Homo sapiens
  misc_RNA (1)...(19): siRNA sense strand
ggcaaucggcugcgaagug

SEQ ID NO: 1583274 - RNA, 19 nt, Homo sapiens
  misc_RNA (1)...(19): siRNA sense strand
uggaggaucugagcaaucu

SEQ ID NO: 1583275 - RNA, 19 nt, Homo sapiens
  misc_RNA (1)...(19): siRNA sense strand
ggaccugacagacaucuac

SEQ ID NO: 1583276 - RNA, 19 nt, Homo sapiens
  misc_RNA (1)...(19): siRNA sense strand
cuugaaacccugaaucuca

SEQ ID NO: 1583277 - RNA, 19 nt, Homo sapiens
  misc_RNA (1)...(19): siRNA sense strand
cgagacaaccagauugaca

SEQ ID NO: 1583278 - RNA, 19 nt, Homo sapiens
  misc_RNA (1)...(19): siRNA sense strand
gcgaagugcccagaugaau

SEQ ID NO: 1583279 - RNA, 19 nt, Homo sapiens
  misc_RNA (1)...(19): siRNA sense strand
ugaaaucauugcaguaccu

SEQ ID NO: 1583280 - RNA, 19 nt, Homo sapiens
  misc_RNA (1)...(19): siRNA sense strand
ugggcuggcucaugcuuau

SEQ ID NO: 1583281 - RNA, 19 nt, Homo sapiens
  misc_RNA (1)...(19): siRNA sense strand
cccaaaacaugcugaagaa

SEQ ID NO: 1583282 - RNA, 19 nt, Homo sapiens
  misc_RNA (1)...(19): siRNA sense strand
augucaagcuggagguuaa

SEQ ID NO: 1583283 - RNA, 19 nt, Homo sapiens
  misc_RNA (1)...(19): siRNA sense strand
ccugacagacaucuacuug

SEQ ID NO: 1583284 - RNA, 19 nt, Homo sapiens
  misc_RNA (1)...(19): siRNA sense strand
acacugaaggcaucucuca

SEQ ID NO: 1583285 - RNA, 19 nt, Homo sapiens
  misc_RNA (1)...(19): siRNA sense strand
aaagcacccugggaaucaa

SEQ ID NO: 1583286 - RNA, 19 nt, Homo sapiens
  misc_RNA (1)...(19): siRNA sense strand
uaaagagagggaccugaca

SEQ ID NO: 1583287 - RNA, 19 nt, Homo sapiens
  misc_RNA (1)...(19): siRNA sense strand
gagccagaccaggaugauu

SEQ ID NO: 1583288 - RNA, 19 nt, Homo sapiens
  misc_RNA (1)...(19): siRNA sense strand
accugcagauugcuaguuu

SEQ ID NO: 1583289 - RNA, 19 nt, Homo sapiens
  misc_RNA (1)...(19): siRNA sense strand
gugcccagaugaaugaacu

SEQ ID NO: 1583290 - RNA, 19 nt, Homo sapiens
  misc_RNA (1)...(19): siRNA sense strand
ucucauccucgucuugaaa

SEQ ID NO: 1583291 - RNA, 19 nt, Homo sapiens
  misc_RNA (1)...(19): siRNA sense strand
ugaaggaagggcuuucucu

SEQ ID NO: 1583292 - RNA, 19 nt, Homo sapiens
  misc_RNA (1)...(19): siRNA sense strand
gaccaaagcugaccgauug

SEQ ID NO: 1583293 - RNA, 19 nt, Homo sapiens
  misc_RNA (1)...(19): siRNA sense strand
gagcauauguucuucauug

SEQ ID NO: 1583294 - RNA, 19 nt, Homo sapiens
  misc_RNA (1)...(19): siRNA sense strand
caacagaccugcagaccaa

SEQ ID NO: 1583295 - RNA, 19 nt, Homo sapiens
  misc_RNA (1)...(19): siRNA sense strand
guacagugcuauuaaagaa

SEQ ID NO: 1583296 - RNA, 19 nt, Homo sapiens
  misc_RNA (1)...(19): siRNA sense strand
gcaguacagugcuauuaaa

SEQ ID NO: 1583297 - RNA, 19 nt, Homo sapiens
  misc_RNA (1)...(19): siRNA sense strand
ggaaacacauuaucacaac

SEQ ID NO: 1583298 - RNA, 19 nt, Homo sapiens
  misc_RNA (1)...(19): siRNA sense strand
gcacagaugagcauauguu

SEQ ID NO: 1583299 - RNA, 19 nt, Homo sapiens
  misc_RNA (1)...(19): siRNA sense strand
aagaggaucugccuucuga

SEQ ID NO: 1583300 - RNA, 19 nt, Homo sapiens
  misc_RNA (1)...(19): siRNA sense strand
gaaggagaccuggguauug

SEQ ID NO: 1583301 - RNA, 19 nt, Homo sapiens
  misc_RNA (1)...(19): siRNA sense strand
gggaagaaauacugaagca

SEQ ID NO: 1583302 - RNA, 19 nt, Homo sapiens
  misc_RNA (1)...(19): siRNA sense strand
uggaauugcuuaugaagga

SEQ ID NO: 1583303 - RNA, 19 nt, Homo sapiens
  misc_RNA (1)...(19): siRNA sense strand
ggagcaggaaauaagauua

SEQ ID NO: 1583304 - RNA, 19 nt, Homo sapiens
  misc_RNA (1)...(19): siRNA sense strand
ggagaagaccugugcaaca

SEQ ID NO: 1583305 - RNA, 19 nt, Homo sapiens
  misc_RNA (1)...(19): siRNA sense strand
ggaucugccuucugaggaa

SEQ ID NO: 1583306 - RNA, 19 nt, Homo sapiens
  misc_RNA (1)...(19): siRNA sense strand
gacaauguaacaguucuua

SEQ ID NO: 1583307 - RNA, 19 nt, Homo sapiens
  misc_RNA (1)...(19): siRNA sense strand
caaggaauauaccgaaggu

SEQ ID NO: 1583308 - RNA, 19 nt, Homo sapiens
  misc_RNA (1)...(19): siRNA sense strand
ccagccauauuacaacuau

SEQ ID NO: 1583309 - RNA, 19 nt, Homo sapiens
  misc_RNA (1)...(19): siRNA sense strand
cagaugagcauauguucuu

SEQ ID NO: 1583310 - RNA, 19 nt, Homo sapiens
  misc_RNA (1)...(19): siRNA sense strand
caaguugguuacugacugu

SEQ ID NO: 1583311 - RNA, 19 nt, Homo sapiens
  misc_RNA (1)...(19): siRNA sense strand
guugguagccuccgcauau

SEQ ID NO: 1583312 - RNA, 19 nt, Homo sapiens
  misc_RNA (1)...(19): siRNA sense strand
ggaauugcuuaugaaggaa

SEQ ID NO: 1583313 - RNA, 19 nt, Homo sapiens
  misc_RNA (1)...(19): siRNA sense strand
acagugcuauuaaagaaga

SEQ ID NO: 1583314 - RNA, 19 nt, Homo sapiens
  misc_RNA (1)...(19): siRNA sense strand
gauagucagacguguuauu

SEQ ID NO: 1583315 - RNA, 19 nt, Homo sapiens
  misc_RNA (1)...(19): siRNA sense strand
gggaaacacauuaucacaa

SEQ ID NO: 1583316 - RNA, 19 nt, Homo sapiens
  misc_RNA (1)...(19): siRNA sense strand
gauggaaccaaggaauaua

SEQ ID NO: 1583317 - RNA, 19 nt, Homo sapiens
  misc_RNA (1)...(19): siRNA sense strand
gacagucagugggaagaaa

SEQ ID NO: 1583318 - RNA, 19 nt, Homo sapiens
  misc_RNA (1)...(19): siRNA sense strand
ggauggaaccaaggaauau

SEQ ID NO: 1583319 - RNA, 19 nt, Homo sapiens
  misc_RNA (1)...(19): siRNA sense strand
ggaggagcaggaaauaaga

SEQ ID NO: 1583320 - RNA, 19 nt, Homo sapiens
  misc_RNA (1)...(19): siRNA sense strand
guaggaggagcaggaaaua

SEQ ID NO: 1583321 - RNA, 19 nt, Homo sapiens
  misc_RNA (1)...(19): siRNA sense strand
ucaaaaggcaggaaugaua

SEQ ID NO: 1583322 - RNA, 19 nt, Homo sapiens
  misc_RNA (1)...(19): siRNA sense strand
gcaaguccugguuguaaga

SEQ ID NO: 1583323 - RNA, 19 nt, Homo sapiens
  misc_RNA (1)...(19): siRNA sense strand
uguaacaguucuuauugga

SEQ ID NO: 1583324 - RNA, 19 nt, Homo sapiens
  misc_RNA (1)...(19): siRNA sense strand
ggaauauaccgaaggucuu

SEQ ID NO: 1583325 - RNA, 19 nt, Homo sapiens
  misc_RNA (1)...(19): siRNA sense strand
ggauacuugugcuccagaa

SEQ ID NO: 1583326 - RNA, 19 nt, Homo sapiens
  misc_RNA (1)...(19): siRNA sense strand
gaaacacauuaucacaacu

SEQ ID NO: 1583327 - RNA, 19 nt, Homo sapiens
  misc_RNA (1)...(19): siRNA sense strand
cugaggaaguggaucaaga

SEQ ID NO: 1583328 - RNA, 19 nt, Homo sapiens
  misc_RNA (1)...(19): siRNA sense strand
agccucugcuuauguauuu

SEQ ID NO: 1583329 - RNA, 19 nt, Homo sapiens
  misc_RNA (1)...(19): siRNA sense strand
aaggagaccuggguauugu

SEQ ID NO: 1583330 - RNA, 19 nt, Homo sapiens
  misc_RNA (1)...(19): siRNA sense strand
gccauagcaggaguuauua

SEQ ID NO: 1583331 - RNA, 19 nt, Homo sapiens
  misc_RNA (1)...(19): siRNA sense strand
caacuacucgaucccauag

SEQ ID NO: 1583332 - RNA, 19 nt, Homo sapiens
  misc_RNA (1)...(19): siRNA sense strand
gaauugcuuaugaaggaaa

SEQ ID NO: 1583333 - RNA, 19 nt, Homo sapiens
  misc_RNA (1)...(19): siRNA sense strand
ugaaggagaccuggguauu

SEQ ID NO: 1583334 - RNA, 19 nt, Homo sapiens
  misc_RNA (1)...(19): siRNA sense strand
gcugggaaacacauuauca

SEQ ID NO: 1583335 - RNA, 19 nt, Homo sapiens
  misc_RNA (1)...(19): siRNA sense strand
gcugaccgauuggcacaga

SEQ ID NO: 1583336 - RNA, 19 nt, Homo sapiens
  misc_RNA (1)...(19): siRNA sense strand
gaucccauagcaacaaguu

SEQ ID NO: 1583337 - RNA, 19 nt, Homo sapiens
  misc_RNA (1)...(19): siRNA sense strand
agccauagcaggaguuauu

SEQ ID NO: 1583338 - RNA, 19 nt, Homo sapiens
  misc_RNA (1)...(19): siRNA sense strand
uggcacagaugagcauaug

SEQ ID NO: 1583339 - RNA, 19 nt, Homo sapiens
  misc_RNA (1)...(19): siRNA sense strand
uggauggaaccaaggaaua

SEQ ID NO: 1583340 - RNA, 19 nt, Homo sapiens
  misc_RNA (1)...(19): siRNA sense strand
guaacaguucuuauuggaa

SEQ ID NO: 1583341 - RNA, 19 nt, Homo sapiens
  misc_RNA (1)...(19): siRNA sense strand
ggaagaaauacugaagcaa

SEQ ID NO: 1583342 - RNA, 19 nt, Homo sapiens
  misc_RNA (1)...(19): siRNA sense strand
ugacuguguugcugcuaug

SEQ ID NO: 1583343 - RNA, 19 nt, Homo sapiens
  misc_RNA (1)...(19): siRNA sense strand
gaaauacugaagcaaccau

SEQ ID NO: 1583344 - RNA, 19 nt, Homo sapiens
  misc_RNA (1)...(19): siRNA sense strand
ucgcaguacagugcuauua

SEQ ID NO: 1583345 - RNA, 19 nt, Homo sapiens
  misc_RNA (1)...(19): siRNA sense strand
guugguuacugacuguguu

SEQ ID NO: 1583346 - RNA, 19 nt, Homo sapiens
  misc_RNA (1)...(19): siRNA sense strand
acaacuacucgaucccaua

SEQ ID NO: 1583347 - RNA, 19 nt, Homo sapiens
  misc_RNA (1)...(19): siRNA sense strand
cccaaacucacaauuauag

SEQ ID NO: 1583348 - RNA, 19 nt, Homo sapiens
  misc_RNA (1)...(19): siRNA sense strand
gcuuauguauuugcaaguc

SEQ ID NO: 1583349 - RNA, 19 nt, Homo sapiens
  misc_RNA (1)...(19): siRNA sense strand
uuuaggcgccuuuggguuu

SEQ ID NO: 1583350 - RNA, 19 nt, Homo sapiens
  misc_RNA (1)...(19): siRNA sense strand
gacaaucuggggaguuuua

SEQ ID NO: 1583351 - RNA, 19 nt, Homo sapiens
  misc_RNA (1)...(19): siRNA sense strand
aggaccagaugcuguguug

SEQ ID NO: 1583352 - RNA, 19 nt, Homo sapiens
  misc_RNA (1)...(19): siRNA sense strand
uuaaccagccauauuacaa

SEQ ID NO: 1583353 - RNA, 19 nt, Homo sapiens
  misc_RNA (1)...(19): siRNA sense strand
ccauagcaggaguuauuaa

SEQ ID NO: 1583354 - RNA, 19 nt, Homo sapiens
  misc_RNA (1)...(19): siRNA sense strand
cgcaguacagugcuauuaa

SEQ ID NO: 1583355 - RNA, 19 nt, Homo sapiens
  misc_RNA (1)...(19): siRNA sense strand
ggucuucuugacaauguaa

SEQ ID NO: 1583356 - RNA, 19 nt, Homo sapiens
  misc_RNA (1)...(19): siRNA sense strand
augauagucagacguguua

SEQ ID NO: 1583357 - RNA, 19 nt, Homo sapiens
  misc_RNA (1)...(19): siRNA sense strand
gaaauuccccaaacucaca

SEQ ID NO: 1583358 - RNA, 19 nt, Homo sapiens
  misc_RNA (1)...(19): siRNA sense strand
ucagcugauugaaggcaaa

SEQ ID NO: 1583359 - RNA, 19 nt, Homo sapiens
  misc_RNA (1)...(19): siRNA sense strand
agaccaaagcugaccgauu

SEQ ID NO: 1583360 - RNA, 19 nt, Homo sapiens
  misc_RNA (1)...(19): siRNA sense strand
aaggucuucuugacaaugu

SEQ ID NO: 1583361 - RNA, 19 nt, Homo sapiens
  misc_RNA (1)...(19): siRNA sense strand
uugcaaguccugguuguaa

SEQ ID NO: 1583362 - RNA, 19 nt, Homo sapiens
  misc_RNA (1)...(19): siRNA sense strand
gaggagcaggaaauaagau

SEQ ID NO: 1583363 - RNA, 19 nt, Homo sapiens
  misc_RNA (1)...(19): siRNA sense strand
gaugagcauauguucuuca

SEQ ID NO: 1583364 - RNA, 19 nt, Homo sapiens
  misc_RNA (1)...(19): siRNA sense strand
ucuugacaauguaacaguu

SEQ ID NO: 1583365 - RNA, 19 nt, Homo sapiens
  misc_RNA (1)...(19): siRNA sense strand
aaccaugcccaucgcagua

SEQ ID NO: 1583366 - RNA, 19 nt, Homo sapiens
  misc_RNA (1)...(19): siRNA sense strand
gguuguaagaagugggaua

SEQ ID NO: 1583367 - RNA, 19 nt, Homo sapiens
  misc_RNA (1)...(19): siRNA sense strand
aagauuauucagcugauug

SEQ ID NO: 1583368 - RNA, 19 nt, Homo sapiens
  misc_RNA (1)...(19): siRNA sense strand
cacauuaucacaacuacuc

SEQ ID NO: 1583369 - RNA, 19 nt, Homo sapiens
  misc_RNA (1)...(19): siRNA sense strand
agucagacguguuauugcu

SEQ ID NO: 1583370 - RNA, 19 nt, Homo sapiens
  misc_RNA (1)...(19): siRNA sense strand
cagaagaaauccagaaaua

SEQ ID NO: 1583371 - RNA, 19 nt, Homo sapiens
  misc_RNA (1)...(19): siRNA sense strand
ggaaagaccugcugaaagg

SEQ ID NO: 1583372 - RNA, 19 nt, Homo sapiens
  misc_RNA (1)...(19): siRNA sense strand
gaaaggaagaucaguauau

SEQ ID NO: 1583373 - RNA, 19 nt, Homo sapiens
  misc_RNA (1)...(19): siRNA sense strand
ccagaaauauugcuguuca

SEQ ID NO: 1583374 - RNA, 19 nt, Homo sapiens
  misc_RNA (1)...(19): siRNA sense strand
gaagaaaaguccacuguca

SEQ ID NO: 1583375 - RNA, 19 nt, Homo sapiens
  misc_RNA (1)...(19): siRNA sense strand
ggagcuggcugagcagaaa

SEQ ID NO: 1583376 - RNA, 19 nt, Homo sapiens
  misc_RNA (1)...(19): siRNA sense strand
aaauauugcuguucaagga

SEQ ID NO: 1583377 - RNA, 19 nt, Homo sapiens
  misc_RNA (1)...(19): siRNA sense strand
gaaagggucgcuccucuuc

SEQ ID NO: 1583378 - RNA, 19 nt, Homo sapiens
  misc_RNA (1)...(19): siRNA sense strand
aaaggaagaucaguauaug

SEQ ID NO: 1583379 - RNA, 19 nt, Homo sapiens
  misc_RNA (1)...(19): siRNA sense strand
gccuauaucugcagugaga

SEQ ID NO: 1583380 - RNA, 19 nt, Homo sapiens
  misc_RNA (1)...(19): siRNA sense strand
cgaaacagauauuuaagcu

SEQ ID NO: 1583381 - RNA, 19 nt, Homo sapiens
  misc_RNA (1)...(19): siRNA sense strand
gcacgaggagcauguugaa

SEQ ID NO: 1583382 - RNA, 19 nt, Homo sapiens
  misc_RNA (1)...(19): siRNA sense strand
gagaaugugccaaauguag

SEQ ID NO: 1583383 - RNA, 19 nt, Homo sapiens
  misc_RNA (1)...(19): siRNA sense strand
gcagauuucuuuggaggau

SEQ ID NO: 1583384 - RNA, 19 nt, Homo sapiens
  misc_RNA (1)...(19): siRNA sense strand
ggagcauguugaacucuug

SEQ ID NO: 1583385 - RNA, 19 nt, Homo sapiens
  misc_RNA (1)...(19): siRNA sense strand
ggaagaucaguauaugaaa

SEQ ID NO: 1583386 - RNA, 19 nt, Homo sapiens
  misc_RNA (1)...(19): siRNA sense strand
gcgaaaggaagaucaguau

SEQ ID NO: 1583387 - RNA, 19 nt, Homo sapiens
  misc_RNA (1)...(19): siRNA sense strand
uggagaaugugccaaaugu

SEQ ID NO: 1583388 - RNA, 19 nt, Homo sapiens
  misc_RNA (1)...(19): siRNA sense strand
ccaaauguaggagugaaua

SEQ ID NO: 1583389 - RNA, 19 nt, Homo sapiens
  misc_RNA (1)...(19): siRNA sense strand
ggagaaugugccaaaugua

SEQ ID NO: 1583390 - RNA, 19 nt, Homo sapiens
  misc_RNA (1)...(19): siRNA sense strand
gcagaagaaauccagaaau

SEQ ID NO: 1583391 - RNA, 19 nt, Homo sapiens
  misc_RNA (1)...(19): siRNA sense strand
caaauguaggagugaauaa

SEQ ID NO: 1583392 - RNA, 19 nt, Homo sapiens
  misc_RNA (1)...(19): siRNA sense strand
ggaacuggcugcugaaaag

SEQ ID NO: 1583393 - RNA, 19 nt, Homo sapiens
  misc_RNA (1)...(19): siRNA sense strand
cgaaaggaagaucaguaua

SEQ ID NO: 1583394 - RNA, 19 nt, Homo sapiens
  misc_RNA (1)...(19): siRNA sense strand
gcacguccuuguggaauac

SEQ ID NO: 1583395 - RNA, 19 nt, Homo sapiens
  misc_RNA (1)...(19): siRNA sense strand
gaguccagcagauuucuuu

SEQ ID NO: 1583396 - RNA, 19 nt, Homo sapiens
  misc_RNA (1)...(19): siRNA sense strand
gggaaagaccugcugaaag

SEQ ID NO: 1583397 - RNA, 19 nt, Homo sapiens
  misc_RNA (1)...(19): siRNA sense strand
ggagcuuucucuugugucu

SEQ ID NO: 1583398 - RNA, 19 nt, Homo sapiens
  misc_RNA (1)...(19): siRNA sense strand
gaaugugccaaauguagga

SEQ ID NO: 1583399 - RNA, 19 nt, Homo sapiens
  misc_RNA (1)...(19): siRNA sense strand
ggagugaauaagaacauau

SEQ ID NO: 1583400 - RNA, 19 nt, Homo sapiens
  misc_RNA (1)...(19): siRNA sense strand
uggcuggucucccucuuug

SEQ ID NO: 1583401 - RNA, 19 nt, Homo sapiens
  misc_RNA (1)...(19): siRNA sense strand
gaaggaacuggcugcugaa

SEQ ID NO: 1583402 - RNA, 19 nt, Homo sapiens
  misc_RNA (1)...(19): siRNA sense strand
aggaagaucaguauaugaa

SEQ ID NO: 1583403 - RNA, 19 nt, Homo sapiens
  misc_RNA (1)...(19): siRNA sense strand
cagaaauauugcuguucaa

SEQ ID NO: 1583404 - RNA, 19 nt, Homo sapiens
  misc_RNA (1)...(19): siRNA sense strand
uggcugagcagaaaggaaa

SEQ ID NO: 1583405 - RNA, 19 nt, Homo sapiens
  misc_RNA (1)...(19): siRNA sense strand
ugucauggauugaagaaaa

SEQ ID NO: 1583406 - RNA, 19 nt, Homo sapiens
  misc_RNA (1)...(19): siRNA sense strand
ccacugucauggauugaag

SEQ ID NO: 1583407 - RNA, 19 nt, Homo sapiens
  misc_RNA (1)...(19): siRNA sense strand
uggaagagcgaaaggaaga

SEQ ID NO: 1583408 - RNA, 19 nt, Homo sapiens
  misc_RNA (1)...(19): siRNA sense strand
gcagaaaggaaaagucuug

SEQ ID NO: 1583409 - RNA, 19 nt, Homo sapiens
  misc_RNA (1)...(19): siRNA sense strand
agguggaggucgccuauau

SEQ ID NO: 1583410 - RNA, 19 nt, Homo sapiens
  misc_RNA (1)...(19): siRNA sense strand
ucaggcaguuccuuaaugc

SEQ ID NO: 1583411 - RNA, 19 nt, Homo sapiens
  misc_RNA (1)...(19): siRNA sense strand
cgaggagcauguugaacuc

SEQ ID NO: 1583412 - RNA, 19 nt, Homo sapiens
  misc_RNA (1)...(19): siRNA sense strand
uacaucaggcaguuccuua

SEQ ID NO: 1583413 - RNA, 19 nt, Homo sapiens
  misc_RNA (1)...(19): siRNA sense strand
cagcuggcccguuggaaga

SEQ ID NO: 1583414 - RNA, 19 nt, Homo sapiens
  misc_RNA (1)...(19): siRNA sense strand
gaagagcgaaaggaagauc

SEQ ID NO: 1583415 - RNA, 19 nt, Homo sapiens
  misc_RNA (1)...(19): siRNA sense strand
augcagagcccgagaggaa

SEQ ID NO: 1583416 - RNA, 19 nt, Homo sapiens
  misc_RNA (1)...(19): siRNA sense strand
gagcauguugaacucuuga

SEQ ID NO: 1583417 - RNA, 19 nt, Homo sapiens
  misc_RNA (1)...(19): siRNA sense strand
aggagugaauaagaacaua

SEQ ID NO: 1583418 - RNA, 19 nt, Homo sapiens
  misc_RNA (1)...(19): siRNA sense strand
aagcuuccauuucaagucu

SEQ ID NO: 1583419 - RNA, 19 nt, Homo sapiens
  misc_RNA (1)...(19): siRNA sense strand
gauggaggaauucgcuuuc

SEQ ID NO: 1583420 - RNA, 19 nt, Homo sapiens
  misc_RNA (1)...(19): siRNA sense strand
gcagagcccgagaggaagu

SEQ ID NO: 1583421 - RNA, 19 nt, Homo sapiens
  misc_RNA (1)...(19): siRNA sense strand
caucaggcaguuccuuaau

SEQ ID NO: 1583422 - RNA, 19 nt, Homo sapiens
  misc_RNA (1)...(19): siRNA sense strand
ucgccuauaucugcaguga

SEQ ID NO: 1583423 - RNA, 19 nt, Homo sapiens
  misc_RNA (1)...(19): siRNA sense strand
gcauguugaacucuugaug

SEQ ID NO: 1583424 - RNA, 19 nt, Homo sapiens
  misc_RNA (1)...(19): siRNA sense strand
gcuccagccaugaggacua

SEQ ID NO: 1583425 - RNA, 19 nt, Homo sapiens
  misc_RNA (1)...(19): siRNA sense strand
ucuugugucugccacuuug

SEQ ID NO: 1583426 - RNA, 19 nt, Homo sapiens
  misc_RNA (1)...(19): siRNA sense strand
gaugagggacuugcggaau

SEQ ID NO: 1583427 - RNA, 19 nt, Homo sapiens
  misc_RNA (1)...(19): siRNA sense strand
gguuuggcuucccugcauu

SEQ ID NO: 1583428 - RNA, 19 nt, Homo sapiens
  misc_RNA (1)...(19): siRNA sense strand
aauguaggagugaauaaga

SEQ ID NO: 1583429 - RNA, 19 nt, Homo sapiens
  misc_RNA (1)...(19): siRNA sense strand
ugauggaggaauucgcuuu

SEQ ID NO: 1583430 - RNA, 19 nt, Homo sapiens
  misc_RNA (1)...(19): siRNA sense strand
ugaaagggucgcuccucuu

SEQ ID NO: 1583431 - RNA, 19 nt, Homo sapiens
  misc_RNA (1)...(19): siRNA sense strand
agcacguccuuguggaaua

SEQ ID NO: 1583432 - RNA, 19 nt, Homo sapiens
  misc_RNA (1)...(19): siRNA sense strand
gagaagaaaaguccacugu

SEQ ID NO: 1583433 - RNA, 19 nt, Homo sapiens
  misc_RNA (1)...(19): siRNA sense strand
auguaggagugaauaagaa

SEQ ID NO: 1583434 - RNA, 19 nt, Homo sapiens
  misc_RNA (1)...(19): siRNA sense strand
gcuuugagauccagacuua

SEQ ID NO: 1583435 - RNA, 19 nt, Homo sapiens
  misc_RNA (1)...(19): siRNA sense strand
ggaaagugcugacguugga

SEQ ID NO: 1583436 - RNA, 19 nt, Homo sapiens
  misc_RNA (1)...(19): siRNA sense strand
gagauuguggacaucauua

SEQ ID NO: 1583437 - RNA, 19 nt, Homo sapiens
  misc_RNA (1)...(19): siRNA sense strand
gaguacaggucccuaaugg

SEQ ID NO: 1583438 - RNA, 19 nt, Homo sapiens
  misc_RNA (1)...(19): siRNA sense strand
ugaagcaaacccuguauga

SEQ ID NO: 1583439 - RNA, 19 nt, Homo sapiens
  misc_RNA (1)...(19): siRNA sense strand
ggagaguacaggucccuaa

SEQ ID NO: 1583440 - RNA, 19 nt, Homo sapiens
  misc_RNA (1)...(19): siRNA sense strand
aagcaaacccuguaugaga

SEQ ID NO: 1583441 - RNA, 19 nt, Homo sapiens
  misc_RNA (1)...(19): siRNA sense strand
uaaccagaccuucggcuuu

SEQ ID NO: 1583442 - RNA, 19 nt, Homo sapiens
  misc_RNA (1)...(19): siRNA sense strand
gaaauggugaccuuugucu

SEQ ID NO: 1583443 - RNA, 19 nt, Homo sapiens
  misc_RNA (1)...(19): siRNA sense strand
ggagcagcguguggaaaug

SEQ ID NO: 1583444 - RNA, 19 nt, Homo sapiens
  misc_RNA (1)...(19): siRNA sense strand
cauccggcaucgagagauu

SEQ ID NO: 1583445 - RNA, 19 nt, Homo sapiens
  misc_RNA (1)...(19): siRNA sense strand
cagcgucaauggccugaau

SEQ ID NO: 1583446 - RNA, 19 nt, Homo sapiens
  misc_RNA (1)...(19): siRNA sense strand
cgaaagggcucaggauucc

SEQ ID NO: 1583447 - RNA, 19 nt, Homo sapiens
  misc_RNA (1)...(19): siRNA sense strand
agcaaacccuguaugagaa

SEQ ID NO: 1583448 - RNA, 19 nt, Homo sapiens
  misc_RNA (1)...(19): siRNA sense strand
aaccagaccuucggcuuug

SEQ ID NO: 1583449 - RNA, 19 nt, Homo sapiens
  misc_RNA (1)...(19): siRNA sense strand
uggaaauggugaccuuugu

SEQ ID NO: 1583450 - RNA, 19 nt, Homo sapiens
  misc_RNA (1)...(19): siRNA sense strand
gagagauuguggacaucau

SEQ ID NO: 1583451 - RNA, 19 nt, Homo sapiens
  misc_RNA (1)...(19): siRNA sense strand
gaaacucuauaugggacau

SEQ ID NO: 1583452 - RNA, 19 nt, Homo sapiens
  misc_RNA (1)...(19): siRNA sense strand
gucaggcaauguucucaga

SEQ ID NO: 1583453 - RNA, 19 nt, Homo sapiens
  misc_RNA (1)...(19): siRNA sense strand
gagaguacaggucccuaau

SEQ ID NO: 1583454 - RNA, 19 nt, Homo sapiens
  misc_RNA (1)...(19): siRNA sense strand
gaagcaaacccuguaugag

SEQ ID NO: 1583455 - RNA, 19 nt, Homo sapiens
  misc_RNA (1)...(19): siRNA sense strand
gaccuucggcuuugagauc

SEQ ID NO: 1583456 - RNA, 19 nt, Homo sapiens
  misc_RNA (1)...(19): siRNA sense strand
ccgaaagggcucaggauuc

SEQ ID NO: 1583457 - RNA, 19 nt, Homo sapiens
  misc_RNA (1)...(19): siRNA sense strand
gccgaaagggcucaggauu

SEQ ID NO: 1583458 - RNA, 19 nt, Homo sapiens
  misc_RNA (1)...(19): siRNA sense strand
ggaggagcagcguguggaa

SEQ ID NO: 1583459 - RNA, 19 nt, Homo sapiens
  misc_RNA (1)...(19): siRNA sense strand
cuauaugggacaucaauuc

SEQ ID NO: 1583460 - RNA, 19 nt, Homo sapiens
  misc_RNA (1)...(19): siRNA sense strand
ggaaauggugaccuuuguc

SEQ ID NO: 1583461 - RNA, 19 nt, Homo sapiens
  misc_RNA (1)...(19): siRNA sense strand
guguggaaauggugaccuu

SEQ ID NO: 1583462 - RNA, 19 nt, Homo sapiens
  misc_RNA (1)...(19): siRNA sense strand
cguuggagaaggaggauaa

SEQ ID NO: 1583463 - RNA, 19 nt, Homo sapiens
  misc_RNA (1)...(19): siRNA sense strand
ugcaguaccugaagcaaac

SEQ ID NO: 1583464 - RNA, 19 nt, Homo sapiens
  misc_RNA (1)...(19): siRNA sense strand
caccaucgccagcgucaau

SEQ ID NO: 1583465 - RNA, 19 nt, Homo sapiens
  misc_RNA (1)...(19): siRNA sense strand
guggaaauggugaccuuug

SEQ ID NO: 1583466 - RNA, 19 nt, Homo sapiens
  misc_RNA (1)...(19): siRNA sense strand
gacuggaaacucuauaugg

SEQ ID NO: 1583467 - RNA, 19 nt, Homo sapiens
  misc_RNA (1)...(19): siRNA sense strand
gaggagcagcguguggaaa

SEQ ID NO: 1583468 - RNA, 19 nt, Homo sapiens
  misc_RNA (1)...(19): siRNA sense strand
gcaaacccuguaugagaag

SEQ ID NO: 1583469 - RNA, 19 nt, Homo sapiens
  misc_RNA (1)...(19): siRNA sense strand
cagacuggaaacucuauau

SEQ ID NO: 1583470 - RNA, 19 nt, Homo sapiens
  misc_RNA (1)...(19): siRNA sense strand
uaaggcgucaggcaauguu

SEQ ID NO: 1583471 - RNA, 19 nt, Homo sapiens
  misc_RNA (1)...(19): siRNA sense strand
agacuggaaacucuauaug

SEQ ID NO: 1583472 - RNA, 19 nt, Homo sapiens
  misc_RNA (1)...(19): siRNA sense strand
ugcauggccugguggugaa

SEQ ID NO: 1583473 - RNA, 19 nt, Homo sapiens
  misc_RNA (1)...(19): siRNA sense strand
uggaggcucgucugcagua

SEQ ID NO: 1583474 - RNA, 19 nt, Homo sapiens
  misc_RNA (1)...(19): siRNA sense strand
gaacuagaaugcccuguga

SEQ ID NO: 1583475 - RNA, 19 nt, Homo sapiens
  misc_RNA (1)...(19): siRNA sense strand
gaagauagacaaacaaguu

SEQ ID NO: 1583476 - RNA, 19 nt, Homo sapiens
  misc_RNA (1)...(19): siRNA sense strand
gaacauccaugggaaagaa

SEQ ID NO: 1583477 - RNA, 19 nt, Homo sapiens
  misc_RNA (1)...(19): siRNA sense strand
ggaagggucugaaguuugu

SEQ ID NO: 1583478 - RNA, 19 nt, Homo sapiens
  misc_RNA (1)...(19): siRNA sense strand
gcuuggaacugggaaauua

SEQ ID NO: 1583479 - RNA, 19 nt, Homo sapiens
  misc_RNA (1)...(19): siRNA sense strand
gaaccaaugcuuccuaaug

SEQ ID NO: 1583480 - RNA, 19 nt, Homo sapiens
  misc_RNA (1)...(19): siRNA sense strand
ggucugaaguuuguucuaa

SEQ ID NO: 1583481 - RNA, 19 nt, Homo sapiens
  misc_RNA (1)...(19): siRNA sense strand
uagaaugcccugugaaaua

SEQ ID NO: 1583482 - RNA, 19 nt, Homo sapiens
  misc_RNA (1)...(19): siRNA sense strand
gaagcuggaauuuaugaua

SEQ ID NO: 1583483 - RNA, 19 nt, Homo sapiens
  misc_RNA (1)...(19): siRNA sense strand
gaaagccacucaacaacuc

SEQ ID NO: 1583484 - RNA, 19 nt, Homo sapiens
  misc_RNA (1)...(19): siRNA sense strand
ggagaucccuuugaacuag

SEQ ID NO: 1583485 - RNA, 19 nt, Homo sapiens
  misc_RNA (1)...(19): siRNA sense strand
gaaccauucugucauugga

SEQ ID NO: 1583486 - RNA, 19 nt, Homo sapiens
  misc_RNA (1)...(19): siRNA sense strand
caugugauguacagcuuua

SEQ ID NO: 1583487 - RNA, 19 nt, Homo sapiens
  misc_RNA (1)...(19): siRNA sense strand
gaagcaagcaccaggcaaa

SEQ ID NO: 1583488 - RNA, 19 nt, Homo sapiens
  misc_RNA (1)...(19): siRNA sense strand
aaccaaugcuuccuaauga

SEQ ID NO: 1583489 - RNA, 19 nt, Homo sapiens
  misc_RNA (1)...(19): siRNA sense strand
ccauaugugugaggaguua

SEQ ID NO: 1583490 - RNA, 19 nt, Homo sapiens
  misc_RNA (1)...(19): siRNA sense strand
gacccuggcuccuguauag

SEQ ID NO: 1583491 - RNA, 19 nt, Homo sapiens
  misc_RNA (1)...(19): siRNA sense strand
gcaggaagggucugaaguu

SEQ ID NO: 1583492 - RNA, 19 nt, Homo sapiens
  misc_RNA (1)...(19): siRNA sense strand
uaacaggccucaugugacu

SEQ ID NO: 1583493 - RNA, 19 nt, Homo sapiens
  misc_RNA (1)...(19): siRNA sense strand
gauaaugacccugaccuuu

SEQ ID NO: 1583494 - RNA, 19 nt, Homo sapiens
  misc_RNA (1)...(19): siRNA sense strand
gcuaacaggccucauguga

SEQ ID NO: 1583495 - RNA, 19 nt, Homo sapiens
  misc_RNA (1)...(19): siRNA sense strand
uaucagaagcuggaauuua

SEQ ID NO: 1583496 - RNA, 19 nt, Homo sapiens
  misc_RNA (1)...(19): siRNA sense strand
gaaauuaaucugguugaug

SEQ ID NO: 1583497 - RNA, 19 nt, Homo sapiens
  misc_RNA (1)...(19): siRNA sense strand
gggauugccucuacucauc

SEQ ID NO: 1583498 - RNA, 19 nt, Homo sapiens
  misc_RNA (1)...(19): siRNA sense strand
acucaagacuggcaagaaa

SEQ ID NO: 1583499 - RNA, 19 nt, Homo sapiens
  misc_RNA (1)...(19): siRNA sense strand
caggaagggucugaaguuu

SEQ ID NO: 1583500 - RNA, 19 nt, Homo sapiens
  misc_RNA (1)...(19): siRNA sense strand
gacauugccugccaugcuu

SEQ ID NO: 1583501 - RNA, 19 nt, Homo sapiens
  misc_RNA (1)...(19): siRNA sense strand
gaaggaagagaagaacauu

SEQ ID NO: 1583502 - RNA, 19 nt, Homo sapiens
  misc_RNA (1)...(19): siRNA sense strand
gaaguuuguucuaauccau

SEQ ID NO: 1583503 - RNA, 19 nt, Homo sapiens
  misc_RNA (1)...(19): siRNA sense strand
ggaaauuaaucugguugau

SEQ ID NO: 1583504 - RNA, 19 nt, Homo sapiens
  misc_RNA (1)...(19): siRNA sense strand
uaaugacccugaccuuugu

SEQ ID NO: 1583505 - RNA, 19 nt, Homo sapiens
  misc_RNA (1)...(19): siRNA sense strand
gcaggaagggaaauuaauc

SEQ ID NO: 1583506 - RNA, 19 nt, Homo sapiens
  misc_RNA (1)...(19): siRNA sense strand
ggcaagaaauguaaaagaa

SEQ ID NO: 1583507 - RNA, 19 nt, Homo sapiens
  misc_RNA (1)...(19): siRNA sense strand
ccugaaccauucugucauu

SEQ ID NO: 1583508 - RNA, 19 nt, Homo sapiens
  misc_RNA (1)...(19): siRNA sense strand
aagaagcaccaacagaaua

SEQ ID NO: 1583509 - RNA, 19 nt, Homo sapiens
  misc_RNA (1)...(19): siRNA sense strand
ggaaggaagagaagaacau

SEQ ID NO: 1583510 - RNA, 19 nt, Homo sapiens
  misc_RNA (1)...(19): siRNA sense strand
aucagaagcuggaauuuau

SEQ ID NO: 1583511 - RNA, 19 nt, Homo sapiens
  misc_RNA (1)...(19): siRNA sense strand
agucuaaucucauugaaag

SEQ ID NO: 1583512 - RNA, 19 nt, Homo sapiens
  misc_RNA (1)...(19): siRNA sense strand
acaaacaaguuggaaggaa

SEQ ID NO: 1583513 - RNA, 19 nt, Homo sapiens
  misc_RNA (1)...(19): siRNA sense strand
ucauaccgcuguucugcaa

SEQ ID NO: 1583514 - RNA, 19 nt, Homo sapiens
  misc_RNA (1)...(19): siRNA sense strand
gcuaucagaagcuggaauu

SEQ ID NO: 1583515 - RNA, 19 nt, Homo sapiens
  misc_RNA (1)...(19): siRNA sense strand
uaagagcgagcaaacagaa

SEQ ID NO: 1583516 - RNA, 19 nt, Homo sapiens
  misc_RNA (1)...(19): siRNA sense strand
cagcaggaagggaaauuaa

SEQ ID NO: 1583517 - RNA, 19 nt, Homo sapiens
  misc_RNA (1)...(19): siRNA sense strand
caacauguguaaaacuuga

SEQ ID NO: 1583518 - RNA, 19 nt, Homo sapiens
  misc_RNA (1)...(19): siRNA sense strand
ugagaaggcaccaaggaaa

SEQ ID NO: 1583519 - RNA, 19 nt, Homo sapiens
  misc_RNA (1)...(19): siRNA sense strand
gaagagaagaacauuucau

SEQ ID NO: 1583520 - RNA, 19 nt, Homo sapiens
  misc_RNA (1)...(19): siRNA sense strand
caagcucaauggaacaaca

SEQ ID NO: 1583521 - RNA, 19 nt, Homo sapiens
  misc_RNA (1)...(19): siRNA sense strand
caaguuggaaggaagagaa

SEQ ID NO: 1583522 - RNA, 19 nt, Homo sapiens
  misc_RNA (1)...(19): siRNA sense strand
gagaucccuuugaacuaga

SEQ ID NO: 1583523 - RNA, 19 nt, Homo sapiens
  misc_RNA (1)...(19): siRNA sense strand
caauggaacaacaugugua

SEQ ID NO: 1583524 - RNA, 19 nt, Homo sapiens
  misc_RNA (1)...(19): siRNA sense strand
gugaaauacugugcuaaca

SEQ ID NO: 1583525 - RNA, 19 nt, Homo sapiens
  misc_RNA (1)...(19): siRNA sense strand
agaaugcccugugaaauac

SEQ ID NO: 1583526 - RNA, 19 nt, Homo sapiens
  misc_RNA (1)...(19): siRNA sense strand
ggaagagaagaacauuuca

SEQ ID NO: 1583527 - RNA, 19 nt, Homo sapiens
  misc_RNA (1)...(19): siRNA sense strand
gaacucaagacuggcaaga

SEQ ID NO: 1583528 - RNA, 19 nt, Homo sapiens
  misc_RNA (1)...(19): siRNA sense strand
gcuccuguauaguuuacuu

SEQ ID NO: 1583529 - RNA, 19 nt, Homo sapiens
  misc_RNA (1)...(19): siRNA sense strand
ucaacaacucuuuauguga

SEQ ID NO: 1583530 - RNA, 19 nt, Homo sapiens
  misc_RNA (1)...(19): siRNA sense strand
ccugugaaauacugugcua

SEQ ID NO: 1583531 - RNA, 19 nt, Homo sapiens
  misc_RNA (1)...(19): siRNA sense strand
auaaugacccugaccuuug

SEQ ID NO: 1583532 - RNA, 19 nt, Homo sapiens
  misc_RNA (1)...(19): siRNA sense strand
cagaagcuggaauuuauga

SEQ ID NO: 1583533 - RNA, 19 nt, Homo sapiens
  misc_RNA (1)...(19): siRNA sense strand
gagaaggcaccaaggaaag

SEQ ID NO: 1583534 - RNA, 19 nt, Homo sapiens
  misc_RNA (1)...(19): siRNA sense strand
ccacucaacaacucuuuau

SEQ ID NO: 1583535 - RNA, 19 nt, Homo sapiens
  misc_RNA (1)...(19): siRNA sense strand
ucccauaucuggacaucug

SEQ ID NO: 1583536 - RNA, 19 nt, Homo sapiens
  misc_RNA (1)...(19): siRNA sense strand
cccaaguacugcuaucaga

SEQ ID NO: 1583537 - RNA, 19 nt, Homo sapiens
  misc_RNA (1)...(19): siRNA sense strand
gcaagcaccaggcaaaauu

SEQ ID NO: 1583538 - RNA, 19 nt, Homo sapiens
  misc_RNA (1)...(19): siRNA sense strand
cucaacaacucuuuaugug

SEQ ID NO: 1583539 - RNA, 19 nt, Homo sapiens
  misc_RNA (1)...(19): siRNA sense strand
agacuggcaagaaauguaa

SEQ ID NO: 1583540 - RNA, 19 nt, Homo sapiens
  misc_RNA (1)...(19): siRNA sense strand
ucauuggacugaacucaag

SEQ ID NO: 1583541 - RNA, 19 nt, Homo sapiens
  misc_RNA (1)...(19): siRNA sense strand
ucugaacacuccaucuuag

SEQ ID NO: 1583542 - RNA, 19 nt, Homo sapiens
  misc_RNA (1)...(19): siRNA sense strand
agcaggagaucccuuugaa

SEQ ID NO: 1583543 - RNA, 19 nt, Homo sapiens
  misc_RNA (1)...(19): siRNA sense strand
caacagaauaugcauccau

SEQ ID NO: 1583544 - RNA, 19 nt, Homo sapiens
  misc_RNA (1)...(19): siRNA sense strand
aaagaagcaccaacagaau

SEQ ID NO: 1583545 - RNA, 19 nt, Homo sapiens
  misc_RNA (1)...(19): siRNA sense strand
gaaaacaaaccaggcauug

SEQ ID NO: 1583546 - RNA, 19 nt, Homo sapiens
  misc_RNA (1)...(19): siRNA sense strand
ccaaguacugcuaucagaa

SEQ ID NO: 1583547 - RNA, 19 nt, Homo sapiens
  misc_RNA (1)...(19): siRNA sense strand
gauagacaaacaaguugga

SEQ ID NO: 1583548 - RNA, 19 nt, Homo sapiens
  misc_RNA (1)...(19): siRNA sense strand
uugaaccaaugcuuccuaa

SEQ ID NO: 1583549 - RNA, 19 nt, Homo sapiens
  misc_RNA (1)...(19): siRNA sense strand
gguugaugcucaccuuaag

SEQ ID NO: 1583550 - RNA, 19 nt, Homo sapiens
  misc_RNA (1)...(19): siRNA sense strand
ccuggcuccuguauaguuu

SEQ ID NO: 1583551 - RNA, 19 nt, Homo sapiens
  misc_RNA (1)...(19): siRNA sense strand
uguaaaaggugccucagaa

SEQ ID NO: 1583552 - RNA, 19 nt, Homo sapiens
  misc_RNA (1)...(19): siRNA sense strand
uaaagagacaaucugaaca

SEQ ID NO: 1583553 - RNA, 19 nt, Homo sapiens
  misc_RNA (1)...(19): siRNA sense strand
agaagcaccaacagaauau

SEQ ID NO: 1583554 - RNA, 19 nt, Homo sapiens
  misc_RNA (1)...(19): siRNA sense strand
ucaagacuggcaagaaaug

SEQ ID NO: 1583555 - RNA, 19 nt, Homo sapiens
  misc_RNA (1)...(19): siRNA sense strand
gacccugaccuuuguuuca

SEQ ID NO: 1583556 - RNA, 19 nt, Homo sapiens
  misc_RNA (1)...(19): siRNA sense strand
cagaacgacccuccaagga

SEQ ID NO: 1583557 - RNA, 19 nt, Homo sapiens
  misc_RNA (1)...(19): siRNA sense strand
gugauguacagcuuuauau

SEQ ID NO: 1583558 - RNA, 19 nt, Homo sapiens
  misc_RNA (1)...(19): siRNA sense strand
aauggaacaacauguguaa

SEQ ID NO: 1583559 - RNA, 19 nt, Homo sapiens
  misc_RNA (1)...(19): siRNA sense strand
aaaagaagcaccaacagaa

SEQ ID NO: 1583560 - RNA, 19 nt, Homo sapiens
  misc_RNA (1)...(19): siRNA sense strand
ucugaaguuuguucuaauc

SEQ ID NO: 1583561 - RNA, 19 nt, Homo sapiens
  misc_RNA (1)...(19): siRNA sense strand
caaguacugcuaucagaag

SEQ ID NO: 1583562 - RNA, 19 nt, Homo sapiens
  misc_RNA (1)...(19): siRNA sense strand
aaacaaguuggaaggaaga

SEQ ID NO: 1583563 - RNA, 19 nt, Homo sapiens
  misc_RNA (1)...(19): siRNA sense strand
guguaaaacuugaagauag

SEQ ID NO: 1583564 - RNA, 19 nt, Homo sapiens
  misc_RNA (1)...(19): siRNA sense strand
caggagaucccuuugaacu

SEQ ID NO: 1583565 - RNA, 19 nt, Homo sapiens
  misc_RNA (1)...(19): siRNA sense strand
cuguauaguuuacuuccuu

SEQ ID NO: 1583566 - RNA, 19 nt, Homo sapiens
  misc_RNA (1)...(19): siRNA sense strand
cugcaaauuuucagucuaa

SEQ ID NO: 1583567 - RNA, 19 nt, Homo sapiens
  misc_RNA (1)...(19): siRNA sense strand
aggaagagaagaacauuuc

SEQ ID NO: 1583568 - RNA, 19 nt, Homo sapiens
  misc_RNA (1)...(19): siRNA sense strand
ucagucuaaucucauugaa

SEQ ID NO: 1583569 - RNA, 19 nt, Homo sapiens
  misc_RNA (1)...(19): siRNA sense strand
caggcaaaauucccaagua

SEQ ID NO: 1583570 - RNA, 19 nt, Homo sapiens
  misc_RNA (1)...(19): siRNA sense strand
gggaaauuaaucugguuga

SEQ ID NO: 1583571 - RNA, 19 nt, Homo sapiens
  misc_RNA (1)...(19): siRNA sense strand
ugugauguacagcuuuaua

SEQ ID NO: 1583572 - RNA, 19 nt, Homo sapiens
  misc_RNA (1)...(19): siRNA sense strand
uagcaggagaucccuuuga

SEQ ID NO: 1583573 - RNA, 19 nt, Homo sapiens
  misc_RNA (1)...(19): siRNA sense strand
acuagaaugcccugugaaa

SEQ ID NO: 1583574 - RNA, 19 nt, Homo sapiens
  misc_RNA (1)...(19): siRNA sense strand
gaaggaagaugcaaacugu

SEQ ID NO: 1583575 - RNA, 19 nt, Homo sapiens
  misc_RNA (1)...(19): siRNA sense strand
guacccagauguaucauua

SEQ ID NO: 1583576 - RNA, 19 nt, Homo sapiens
  misc_RNA (1)...(19): siRNA sense strand
caaaugcugugaagagaaa

SEQ ID NO: 1583577 - RNA, 19 nt, Homo sapiens
  misc_RNA (1)...(19): siRNA sense strand
ugaccaagcuccugaaaga

SEQ ID NO: 1583578 - RNA, 19 nt, Homo sapiens
  misc_RNA (1)...(19): siRNA sense strand
ggauuucagucacaucuuc

SEQ ID NO: 1583579 - RNA, 19 nt, Homo sapiens
  misc_RNA (1)...(19): siRNA sense strand
gaaauguacccagauguau

SEQ ID NO: 1583580 - RNA, 19 nt, Homo sapiens
  misc_RNA (1)...(19): siRNA sense strand
agucacaucuuccugcuuu

SEQ ID NO: 1583581 - RNA, 19 nt, Homo sapiens
  misc_RNA (1)...(19): siRNA sense strand
gccgacaccuuucaggauu

SEQ ID NO: 1583582 - RNA, 19 nt, Homo sapiens
  misc_RNA (1)...(19): siRNA sense strand
agaaauguacccagaugua

SEQ ID NO: 1583583 - RNA, 19 nt, Homo sapiens
  misc_RNA (1)...(19): siRNA sense strand
agagaaauguacccagaug

SEQ ID NO: 1583584 - RNA, 19 nt, Homo sapiens
  misc_RNA (1)...(19): siRNA sense strand
gaucgaaggaagaugcaaa

SEQ ID NO: 1583585 - RNA, 19 nt, Homo sapiens
  misc_RNA (1)...(19): siRNA sense strand
gauguaucauuauccuugu

SEQ ID NO: 1583586 - RNA, 19 nt, Homo sapiens
  misc_RNA (1)...(19): siRNA sense strand
cagcccaggagaccucuua

SEQ ID NO: 1583587 - RNA, 19 nt, Homo sapiens
  misc_RNA (1)...(19): siRNA sense strand
uaucaaaugcugugaagag

SEQ ID NO: 1583588 - RNA, 19 nt, Homo sapiens
  misc_RNA (1)...(19): siRNA sense strand
ugcaggagccgacaccuuu

SEQ ID NO: 1583589 - RNA, 19 nt, Homo sapiens
  misc_RNA (1)...(19): siRNA sense strand
ccgacaccuuucaggauuu

SEQ ID NO: 1583590 - RNA, 19 nt, Homo sapiens
  misc_RNA (1)...(19): siRNA sense strand
cgaaggaagaugcaaacug

SEQ ID NO: 1583591 - RNA, 19 nt, Homo sapiens
  misc_RNA (1)...(19): siRNA sense strand
cgacaccuuucaggauuuc

SEQ ID NO: 1583592 - RNA, 19 nt, Homo sapiens
  misc_RNA (1)...(19): siRNA sense strand
gagaaauguacccagaugu

SEQ ID NO: 1583593 - RNA, 19 nt, Homo sapiens
  misc_RNA (1)...(19): siRNA sense strand
ugaaagaucgaaggaagau

SEQ ID NO: 1583594 - RNA, 19 nt, Homo sapiens
  misc_RNA (1)...(19): siRNA sense strand
ccagauguaucauuauccu

SEQ ID NO: 1583595 - RNA, 19 nt, Homo sapiens
  misc_RNA (1)...(19): siRNA sense strand
ucaaaugcugugaagagaa

SEQ ID NO: 1583596 - RNA, 19 nt, Homo sapiens
  misc_RNA (1)...(19): siRNA sense strand
gagguuggagccugaagau

SEQ ID NO: 1583597 - RNA, 19 nt, Homo sapiens
  misc_RNA (1)...(19): siRNA sense strand
ggagguuggagccugaaga

SEQ ID NO: 1583598 - RNA, 19 nt, Homo sapiens
  misc_RNA (1)...(19): siRNA sense strand
gcacuuuggagccacuauc

SEQ ID NO: 1583599 - RNA, 19 nt, Homo sapiens
  misc_RNA (1)...(19): siRNA sense strand
acuaucaaaugcugugaag

SEQ ID NO: 1583600 - RNA, 19 nt, Homo sapiens
  misc_RNA (1)...(19): siRNA sense strand
gcaggagccgacaccuuuc

SEQ ID NO: 1583601 - RNA, 19 nt, Homo sapiens
  misc_RNA (1)...(19): siRNA sense strand
acccagauguaucauuauc

SEQ ID NO: 1583602 - RNA, 19 nt, Homo sapiens
  misc_RNA (1)...(19): siRNA sense strand
gcugugaagagaaauguac

SEQ ID NO: 1583603 - RNA, 19 nt, Homo sapiens
  misc_RNA (1)...(19): siRNA sense strand
gaauguagcuugaguaaau

SEQ ID NO: 1583604 - RNA, 19 nt, Homo sapiens
  misc_RNA (1)...(19): siRNA sense strand
gaacuugcuuugauguaua

SEQ ID NO: 1583605 - RNA, 19 nt, Homo sapiens
  misc_RNA (1)...(19): siRNA sense strand
ggaaccaggugucugaaua

SEQ ID NO: 1583606 - RNA, 19 nt, Homo sapiens
  misc_RNA (1)...(19): siRNA sense strand
gaaagagaccuccuaaaga

SEQ ID NO: 1583607 - RNA, 19 nt, Homo sapiens
  misc_RNA (1)...(19): siRNA sense strand
caacugauaugucuaaaca

SEQ ID NO: 1583608 - RNA, 19 nt, Homo sapiens
  misc_RNA (1)...(19): siRNA sense strand
caaaggcgaugucgagaaa

SEQ ID NO: 1583609 - RNA, 19 nt, Homo sapiens
  misc_RNA (1)...(19): siRNA sense strand
gaagaaaguuacaaguuca

SEQ ID NO: 1583610 - RNA, 19 nt, Homo sapiens
  misc_RNA (1)...(19): siRNA sense strand
caacacaaauucagaacuu

SEQ ID NO: 1583611 - RNA, 19 nt, Homo sapiens
  misc_RNA (1)...(19): siRNA sense strand
ggaauuagacugguguuua

SEQ ID NO: 1583612 - RNA, 19 nt, Homo sapiens
  misc_RNA (1)...(19): siRNA sense strand
uaaccuacaugaugacuuu

SEQ ID NO: 1583613 - RNA, 19 nt, Homo sapiens
  misc_RNA (1)...(19): siRNA sense strand
ucagugagauggcuucuaa

SEQ ID NO: 1583614 - RNA, 19 nt, Homo sapiens
  misc_RNA (1)...(19): siRNA sense strand
ggaaagagaccuccuaaag

SEQ ID NO: 1583615 - RNA, 19 nt, Homo sapiens
  misc_RNA (1)...(19): siRNA sense strand
gaagaugguuauugacaug

SEQ ID NO: 1583616 - RNA, 19 nt, Homo sapiens
  misc_RNA (1)...(19): siRNA sense strand
gaauuagacugguguuuag

SEQ ID NO: 1583617 - RNA, 19 nt, Homo sapiens
  misc_RNA (1)...(19): siRNA sense strand
ucaggaagaugguuauuga

SEQ ID NO: 1583618 - RNA, 19 nt, Homo sapiens
  misc_RNA (1)...(19): siRNA sense strand
cgaagaaaguuacaaguuc

SEQ ID NO: 1583619 - RNA, 19 nt, Homo sapiens
  misc_RNA (1)...(19): siRNA sense strand
ggcgaugacuugauuguaa

SEQ ID NO: 1583620 - RNA, 19 nt, Homo sapiens
  misc_RNA (1)...(19): siRNA sense strand
ggugauggcugaugauaau

SEQ ID NO: 1583621 - RNA, 19 nt, Homo sapiens
  misc_RNA (1)...(19): siRNA sense strand
uaaguggagugaagaaauu

SEQ ID NO: 1583622 - RNA, 19 nt, Homo sapiens
  misc_RNA (1)...(19): siRNA sense strand
gagaaacaacuucacuaua

SEQ ID NO: 1583623 - RNA, 19 nt, Homo sapiens
  misc_RNA (1)...(19): siRNA sense strand
caucauguaugcuauauuc

SEQ ID NO: 1583624 - RNA, 19 nt, Homo sapiens
  misc_RNA (1)...(19): siRNA sense strand
uggaagaccugaacaaaug

SEQ ID NO: 1583625 - RNA, 19 nt, Homo sapiens
  misc_RNA (1)...(19): siRNA sense strand
ccaggugucugaauacauu

SEQ ID NO: 1583626 - RNA, 19 nt, Homo sapiens
  misc_RNA (1)...(19): siRNA sense strand
agaaacaacuucacuauac

SEQ ID NO: 1583627 - RNA, 19 nt, Homo sapiens
  misc_RNA (1)...(19): siRNA sense strand
gaagaacacugugacaucu

SEQ ID NO: 1583628 - RNA, 19 nt, Homo sapiens
  misc_RNA (1)...(19): siRNA sense strand
gaucagacagcgacuauga

SEQ ID NO: 1583629 - RNA, 19 nt, Homo sapiens
  misc_RNA (1)...(19): siRNA sense strand
aaucucaucugacacauuu

SEQ ID NO: 1583630 - RNA, 19 nt, Homo sapiens
  misc_RNA (1)...(19): siRNA sense strand
uggaaacgcuggaggaauu

SEQ ID NO: 1583631 - RNA, 19 nt, Homo sapiens
  misc_RNA (1)...(19): siRNA sense strand
guagaaacgaagaaaguua

SEQ ID NO: 1583632 - RNA, 19 nt, Homo sapiens
  misc_RNA (1)...(19): siRNA sense strand
ucaugaaucucaccaagaa

SEQ ID NO: 1583633 - RNA, 19 nt, Homo sapiens
  misc_RNA (1)...(19): siRNA sense strand
ugaggaagauucugaagga

SEQ ID NO: 1583634 - RNA, 19 nt, Homo sapiens
  misc_RNA (1)...(19): siRNA sense strand
caacuucacuauacugaca

SEQ ID NO: 1583635 - RNA, 19 nt, Homo sapiens
  misc_RNA (1)...(19): siRNA sense strand
ugagauggcuucuaacaag

SEQ ID NO: 1583636 - RNA, 19 nt, Homo sapiens
  misc_RNA (1)...(19): siRNA sense strand
ggacagaccgcaucaugga

SEQ ID NO: 1583637 - RNA, 19 nt, Homo sapiens
  misc_RNA (1)...(19): siRNA sense strand
ggacauucucgauaccuua

SEQ ID NO: 1583638 - RNA, 19 nt, Homo sapiens
  misc_RNA (1)...(19): siRNA sense strand
gaaacaacuucacuauacu

SEQ ID NO: 1583639 - RNA, 19 nt, Homo sapiens
  misc_RNA (1)...(19): siRNA sense strand
ucaaacugcugcaagaaga

SEQ ID NO: 1583640 - RNA, 19 nt, Homo sapiens
  misc_RNA (1)...(19): siRNA sense strand
acacggcgaugacuugauu

SEQ ID NO: 1583641 - RNA, 19 nt, Homo sapiens
  misc_RNA (1)...(19): siRNA sense strand
aaagagaccuccuaaagac

SEQ ID NO: 1583642 - RNA, 19 nt, Homo sapiens
  misc_RNA (1)...(19): siRNA sense strand
ggaagaugguuauugacau

SEQ ID NO: 1583643 - RNA, 19 nt, Homo sapiens
  misc_RNA (1)...(19): siRNA sense strand
gcauugcuauuacaacugu

SEQ ID NO: 1583644 - RNA, 19 nt, Homo sapiens
  misc_RNA (1)...(19): siRNA sense strand
uggcagaccugaagacaau

SEQ ID NO: 1583645 - RNA, 19 nt, Homo sapiens
  misc_RNA (1)...(19): siRNA sense strand
ccagauaaguggagugaag

SEQ ID NO: 1583646 - RNA, 19 nt, Homo sapiens
  misc_RNA (1)...(19): siRNA sense strand
ggagugcuuugauguggaa

SEQ ID NO: 1583647 - RNA, 19 nt, Homo sapiens
  misc_RNA (1)...(19): siRNA sense strand
gcucaggacauucucgaua

SEQ ID NO: 1583648 - RNA, 19 nt, Homo sapiens
  misc_RNA (1)...(19): siRNA sense strand
ccaaucaguuucucaucaa

SEQ ID NO: 1583649 - RNA, 19 nt, Homo sapiens
  misc_RNA (1)...(19): siRNA sense strand
caugguacaucuaacaaga

SEQ ID NO: 1583650 - RNA, 19 nt, Homo sapiens
  misc_RNA (1)...(19): siRNA sense strand
gacaugggcagauuuggua

SEQ ID NO: 1583651 - RNA, 19 nt, Homo sapiens
  misc_RNA (1)...(19): siRNA sense strand
guucaagccuaaacaauac

SEQ ID NO: 1583652 - RNA, 19 nt, Homo sapiens
  misc_RNA (1)...(19): siRNA sense strand
gaauggaaauuagcccaau

SEQ ID NO: 1583653 - RNA, 19 nt, Homo sapiens
  misc_RNA (1)...(19): siRNA sense strand
gcaacacggcgaugacuug

SEQ ID NO: 1583654 - RNA, 19 nt, Homo sapiens
  misc_RNA (1)...(19): siRNA sense strand
uaauguggcuggauauucu

SEQ ID NO: 1583655 - RNA, 19 nt, Homo sapiens
  misc_RNA (1)...(19): siRNA sense strand
ugacggugauggcugauga

SEQ ID NO: 1583656 - RNA, 19 nt, Homo sapiens
  misc_RNA (1)...(19): siRNA sense strand
acauagacauugcaacaga

SEQ ID NO: 1583657 - RNA, 19 nt, Homo sapiens
  misc_RNA (1)...(19): siRNA sense strand
ggaaacgcuggaggaauua

SEQ ID NO: 1583658 - RNA, 19 nt, Homo sapiens
  misc_RNA (1)...(19): siRNA sense strand
gagagggacacagcuauuu

SEQ ID NO: 1583659 - RNA, 19 nt, Homo sapiens
  misc_RNA (1)...(19): siRNA sense strand
gccagggucugauggagaa

SEQ ID NO: 1583660 - RNA, 19 nt, Homo sapiens
  misc_RNA (1)...(19): siRNA sense strand
agacagcgacuaugacuug

SEQ ID NO: 1583661 - RNA, 19 nt, Homo sapiens
  misc_RNA (1)...(19): siRNA sense strand
aacaggaacugguaucaga

SEQ ID NO: 1583662 - RNA, 19 nt, Homo sapiens
  misc_RNA (1)...(19): siRNA sense strand
ggaaauuagcccaaugugu

SEQ ID NO: 1583663 - RNA, 19 nt, Homo sapiens
  misc_RNA (1)...(19): siRNA sense strand
gcagaaugauguggagauc

SEQ ID NO: 1583664 - RNA, 19 nt, Homo sapiens
  misc_RNA (1)...(19): siRNA sense strand
ggagagggacacagcuauu

SEQ ID NO: 1583665 - RNA, 19 nt, Homo sapiens
  misc_RNA (1)...(19): siRNA sense strand
cucgauaccuuagaagaua

SEQ ID NO: 1583666 - RNA, 19 nt, Homo sapiens
  misc_RNA (1)...(19): siRNA sense strand
ggagacaugggcagauuug

SEQ ID NO: 1583667 - RNA, 19 nt, Homo sapiens
  misc_RNA (1)...(19): siRNA sense strand
caacuauaccgaucgcauu

SEQ ID NO: 1583668 - RNA, 19 nt, Homo sapiens
  misc_RNA (1)...(19): siRNA sense strand
guuagcaacugauaugucu

SEQ ID NO: 1583669 - RNA, 19 nt, Homo sapiens
  misc_RNA (1)...(19): siRNA sense strand
augcauaguucaagccuaa

SEQ ID NO: 1583670 - RNA, 19 nt, Homo sapiens
  misc_RNA (1)...(19): siRNA sense strand
uagaagaccauuaccauuc

SEQ ID NO: 1583671 - RNA, 19 nt, Homo sapiens
  misc_RNA (1)...(19): siRNA sense strand
caugaugacuuuagaagac

SEQ ID NO: 1583672 - RNA, 19 nt, Homo sapiens
  misc_RNA (1)...(19): siRNA sense strand
gauggcugaugauaauguu

SEQ ID NO: 1583673 - RNA, 19 nt, Homo sapiens
  misc_RNA (1)...(19): siRNA sense strand
ugacauagacauugcaaca

SEQ ID NO: 1583674 - RNA, 19 nt, Homo sapiens
  misc_RNA (1)...(19): siRNA sense strand
agacaaugguagaaacgaa

SEQ ID NO: 1583675 - RNA, 19 nt, Homo sapiens
  misc_RNA (1)...(19): siRNA sense strand
ugaugaaucuguguuggaa

SEQ ID NO: 1583676 - RNA, 19 nt, Homo sapiens
  misc_RNA (1)...(19): siRNA sense strand
gagauggcuucuaacaagu

SEQ ID NO: 1583677 - RNA, 19 nt, Homo sapiens
  misc_RNA (1)...(19): siRNA sense strand
ccugcacgcugcugaugua

SEQ ID NO: 1583678 - RNA, 19 nt, Homo sapiens
  misc_RNA (1)...(19): siRNA sense strand
cauagacauugcaacagaa

SEQ ID NO: 1583679 - RNA, 19 nt, Homo sapiens
  misc_RNA (1)...(19): siRNA sense strand
gggagagacugacauagac

SEQ ID NO: 1583680 - RNA, 19 nt, Homo sapiens
  misc_RNA (1)...(19): siRNA sense strand
gcuuugauguauaaugaug

SEQ ID NO: 1583681 - RNA, 19 nt, Homo sapiens
  misc_RNA (1)...(19): siRNA sense strand
ugagaaacaacuucacuau

SEQ ID NO: 1583682 - RNA, 19 nt, Homo sapiens
  misc_RNA (1)...(19): siRNA sense strand
gcuuuggagucaacacuga

SEQ ID NO: 1583683 - RNA, 19 nt, Homo sapiens
  misc_RNA (1)...(19): siRNA sense strand
ucucaaagacagagugaaa

SEQ ID NO: 1583684 - RNA, 19 nt, Homo sapiens
  misc_RNA (1)...(19): siRNA sense strand
uagcaacugauaugucuaa

SEQ ID NO: 1583685 - RNA, 19 nt, Homo sapiens
  misc_RNA (1)...(19): siRNA sense strand
caaauucagaacuugcuuu

SEQ ID NO: 1583686 - RNA, 19 nt, Homo sapiens
  misc_RNA (1)...(19): siRNA sense strand
aagaucaccuggccaagga

SEQ ID NO: 1583687 - RNA, 19 nt, Homo sapiens
  misc_RNA (1)...(19): siRNA sense strand
ccgcugggcugguacuuca

SEQ ID NO: 1583688 - RNA, 19 nt, Homo sapiens
  misc_RNA (1)...(19): siRNA sense strand
ugugacaucuucaugaauc

SEQ ID NO: 1583689 - RNA, 19 nt, Homo sapiens
  misc_RNA (1)...(19): siRNA sense strand
auucagaacuugcuuugau

SEQ ID NO: 1583690 - RNA, 19 nt, Homo sapiens
  misc_RNA (1)...(19): siRNA sense strand
gaguaaauccuacaguucu

SEQ ID NO: 1583691 - RNA, 19 nt, Homo sapiens
  misc_RNA (1)...(19): siRNA sense strand
ggagugugaugacggugau

SEQ ID NO: 1583692 - RNA, 19 nt, Homo sapiens
  misc_RNA (1)...(19): siRNA sense strand
ucuuuaauguggcuggaua

SEQ ID NO: 1583693 - RNA, 19 nt, Homo sapiens
  misc_RNA (1)...(19): siRNA sense strand
ccagaaagacagggagaaa

SEQ ID NO: 1583694 - RNA, 19 nt, Homo sapiens
  misc_RNA (1)...(19): siRNA sense strand
uugaguaaauccuacaguu

SEQ ID NO: 1583695 - RNA, 19 nt, Homo sapiens
  misc_RNA (1)...(19): siRNA sense strand
gguguuagcaacugauaug

SEQ ID NO: 1583696 - RNA, 19 nt, Homo sapiens
  misc_RNA (1)...(19): siRNA sense strand
agaacuugcuuugauguau

SEQ ID NO: 1583697 - RNA, 19 nt, Homo sapiens
  misc_RNA (1)...(19): siRNA sense strand
gaagaccauuaccauucug

SEQ ID NO: 1583698 - RNA, 19 nt, Homo sapiens
  misc_RNA (1)...(19): siRNA sense strand
gagaccuccuaaagacauu

SEQ ID NO: 1583699 - RNA, 19 nt, Homo sapiens
  misc_RNA (1)...(19): siRNA sense strand
caaauggggucuuaacauc

SEQ ID NO: 1583700 - RNA, 19 nt, Homo sapiens
  misc_RNA (1)...(19): siRNA sense strand
gaaccaggugucugaauac

SEQ ID NO: 1583701 - RNA, 19 nt, Homo sapiens
  misc_RNA (1)...(19): siRNA sense strand
ugaagacaaugguagaaac

SEQ ID NO: 1583702 - RNA, 19 nt, Homo sapiens
  misc_RNA (1)...(19): siRNA sense strand
gcuggaagaccugaacaaa

SEQ ID NO: 1583703 - RNA, 19 nt, Homo sapiens
  misc_RNA (1)...(19): siRNA sense strand
gcacagaaccugcagagua

SEQ ID NO: 1583704 - RNA, 19 nt, Homo sapiens
  misc_RNA (1)...(19): siRNA sense strand
gaacaaagaccauggaaau

SEQ ID NO: 1583705 - RNA, 19 nt, Homo sapiens
  misc_RNA (1)...(19): siRNA sense strand
gaggagauauuucaucaaa

SEQ ID NO: 1583706 - RNA, 19 nt, Homo sapiens
  misc_RNA (1)...(19): siRNA sense strand
gcaaaugugauuagacuua

SEQ ID NO: 1583707 - RNA, 19 nt, Homo sapiens
  misc_RNA (1)...(19): siRNA sense strand
caaauguucugcaucagua

SEQ ID NO: 1583708 - RNA, 19 nt, Homo sapiens
  misc_RNA (1)...(19): siRNA sense strand
gauaaggaaucaaauguuc

SEQ ID NO: 1583709 - RNA, 19 nt, Homo sapiens
  misc_RNA (1)...(19): siRNA sense strand
ggagaaggcauauaaagaa

SEQ ID NO: 1583710 - RNA, 19 nt, Homo sapiens
  misc_RNA (1)...(19): siRNA sense strand
ccaagacucuccuuccuaa

SEQ ID NO: 1583711 - RNA, 19 nt, Homo sapiens
  misc_RNA (1)...(19): siRNA sense strand
gagaaggcauauaaagaaa

SEQ ID NO: 1583712 - RNA, 19 nt, Homo sapiens
  misc_RNA (1)...(19): siRNA sense strand
cuaaagagguuaacacuac

SEQ ID NO: 1583713 - RNA, 19 nt, Homo sapiens
  misc_RNA (1)...(19): siRNA sense strand
gagcaaaugugauuagacu

SEQ ID NO: 1583714 - RNA, 19 nt, Homo sapiens
  misc_RNA (1)...(19): siRNA sense strand
gaaaggaacugauuuuguc

SEQ ID NO: 1583715 - RNA, 19 nt, Homo sapiens
  misc_RNA (1)...(19): siRNA sense strand
ucagcgaguuauucacuua

SEQ ID NO: 1583716 - RNA, 19 nt, Homo sapiens
  misc_RNA (1)...(19): siRNA sense strand
gccacaagcuguucaagga

SEQ ID NO: 1583717 - RNA, 19 nt, Homo sapiens
  misc_RNA (1)...(19): siRNA sense strand
gcgaguuauucacuuauuu

SEQ ID NO: 1583718 - RNA, 19 nt, Homo sapiens
  misc_RNA (1)...(19): siRNA sense strand
ggaaucaaauguucugcau

SEQ ID NO: 1583719 - RNA, 19 nt, Homo sapiens
  misc_RNA (1)...(19): siRNA sense strand
cacaaagacuaaacagauu

SEQ ID NO: 1583720 - RNA, 19 nt, Homo sapiens
  misc_RNA (1)...(19): siRNA sense strand
cacagaaccugcagaguau

SEQ ID NO: 1583721 - RNA, 19 nt, Homo sapiens
  misc_RNA (1)...(19): siRNA sense strand
gcaccgagcaaaugugauu

SEQ ID NO: 1583722 - RNA, 19 nt, Homo sapiens
  misc_RNA (1)...(19): siRNA sense strand
aaucaaauguucugcauca

SEQ ID NO: 1583723 - RNA, 19 nt, Homo sapiens
  misc_RNA (1)...(19): siRNA sense strand
caaagaccauggaaaugau

SEQ ID NO: 1583724 - RNA, 19 nt, Homo sapiens
  misc_RNA (1)...(19): siRNA sense strand
ugauuagacuuauggauga

SEQ ID NO: 1583725 - RNA, 19 nt, Homo sapiens
  misc_RNA (1)...(19): siRNA sense strand
gaaggcauauaaagaaacu

SEQ ID NO: 1583726 - RNA, 19 nt, Homo sapiens
  misc_RNA (1)...(19): siRNA sense strand
caucaaauacuccagacua

SEQ ID NO: 1583727 - RNA, 19 nt, Homo sapiens
  misc_RNA (1)...(19): siRNA sense strand
ccauggaaaugauaaggaa

SEQ ID NO: 1583728 - RNA, 19 nt, Homo sapiens
  misc_RNA (1)...(19): siRNA sense strand
gaccaacccugagaaagga

SEQ ID NO: 1583729 - RNA, 19 nt, Homo sapiens
  misc_RNA (1)...(19): siRNA sense strand
gaugagaagggcaaugauu

SEQ ID NO: 1583730 - RNA, 19 nt, Homo sapiens
  misc_RNA (1)...(19): siRNA sense strand
gcaaugauuugggaaacau

SEQ ID NO: 1583731 - RNA, 19 nt, Homo sapiens
  misc_RNA (1)...(19): siRNA sense strand
gaacugauuuugucuucaa

SEQ ID NO: 1583732 - RNA, 19 nt, Homo sapiens
  misc_RNA (1)...(19): siRNA sense strand
aaacaccuaguccagauua

SEQ ID NO: 1583733 - RNA, 19 nt, Homo sapiens
  misc_RNA (1)...(19): siRNA sense strand
gaagacacccagaaugaag

SEQ ID NO: 1583734 - RNA, 19 nt, Homo sapiens
  misc_RNA (1)...(19): siRNA sense strand
guaaacacauccugcaaaa

SEQ ID NO: 1583735 - RNA, 19 nt, Homo sapiens
  misc_RNA (1)...(19): siRNA sense strand
acacaaagacuaaacagau

SEQ ID NO: 1583736 - RNA, 19 nt, Homo sapiens
  misc_RNA (1)...(19): siRNA sense strand
acaaagaccauggaaauga

SEQ ID NO: 1583737 - RNA, 19 nt, Homo sapiens
  misc_RNA (1)...(19): siRNA sense strand
ucacuuauuugaugagaag

SEQ ID NO: 1583738 - RNA, 19 nt, Homo sapiens
  misc_RNA (1)...(19): siRNA sense strand
caacaugauuuggacacaa

SEQ ID NO: 1583739 - RNA, 19 nt, Homo sapiens
  misc_RNA (1)...(19): siRNA sense strand
gguaaacacauccugcaaa

SEQ ID NO: 1583740 - RNA, 19 nt, Homo sapiens
  misc_RNA (1)...(19): siRNA sense strand
gguuaacacuacaaacugu

SEQ ID NO: 1583741 - RNA, 19 nt, Homo sapiens
  misc_RNA (1)...(19): siRNA sense strand
ggaccaacccugagaaagg

SEQ ID NO: 1583742 - RNA, 19 nt, Homo sapiens
  misc_RNA (1)...(19): siRNA sense strand
gcacaguuguccccuauug

SEQ ID NO: 1583743 - RNA, 19 nt, Homo sapiens
  misc_RNA (1)...(19): siRNA sense strand
uggaggagauauuucauca

SEQ ID NO: 1583744 - RNA, 19 nt, Homo sapiens
  misc_RNA (1)...(19): siRNA sense strand
cagauucagcaguggauua

SEQ ID NO: 1583745 - RNA, 19 nt, Homo sapiens
  misc_RNA (1)...(19): siRNA sense strand
gaaaagcuuuaaugugugu

SEQ ID NO: 1583746 - RNA, 19 nt, Homo sapiens
  misc_RNA (1)...(19): siRNA sense strand
gaggagaaggcauauaaag

SEQ ID NO: 1583747 - RNA, 19 nt, Homo sapiens
  misc_RNA (1)...(19): siRNA sense strand
uuaguaacguuggaagaaa

SEQ ID NO: 1583748 - RNA, 19 nt, Homo sapiens
  misc_RNA (1)...(19): siRNA sense strand
ccagauuaccauaaagaaa

SEQ ID NO: 1583749 - RNA, 19 nt, Homo sapiens
  misc_RNA (1)...(19): siRNA sense strand
agacucuccuuccuaauuc

SEQ ID NO: 1583750 - RNA, 19 nt, Homo sapiens
  misc_RNA (1)...(19): siRNA sense strand
uaaagagguuaacacuaca

SEQ ID NO: 1583751 - RNA, 19 nt, Homo sapiens
  misc_RNA (1)...(19): siRNA sense strand
ggaaacaugcaccgagcaa

SEQ ID NO: 1583752 - RNA, 19 nt, Homo sapiens
  misc_RNA (1)...(19): siRNA sense strand
cugaagacacccagaauga

SEQ ID NO: 1583753 - RNA, 19 nt, Homo sapiens
  misc_RNA (1)...(19): siRNA sense strand
ucaaauauuggacaacaug

SEQ ID NO: 1583754 - RNA, 19 nt, Homo sapiens
  misc_RNA (1)...(19): siRNA sense strand
gagguuaacacuacaaacu

SEQ ID NO: 1583755 - RNA, 19 nt, Homo sapiens
  misc_RNA (1)...(19): siRNA sense strand
aggaaaagcuuuaaugugu

SEQ ID NO: 1583756 - RNA, 19 nt, Homo sapiens
  misc_RNA (1)...(19): siRNA sense strand
caaauacuccagacuaugc

SEQ ID NO: 1583757 - RNA, 19 nt, Homo sapiens
  misc_RNA (1)...(19): siRNA sense strand
aaacaugcaccgagcaaau

SEQ ID NO: 1583758 - RNA, 19 nt, Homo sapiens
  misc_RNA (1)...(19): siRNA sense strand
ugagaagggcaaugauuug

SEQ ID NO: 1583759 - RNA, 19 nt, Homo sapiens
  misc_RNA (1)...(19): siRNA sense strand
cagauuaccauaaagaaag

SEQ ID NO: 1583760 - RNA, 19 nt, Homo sapiens
  misc_RNA (1)...(19): siRNA sense strand
gcuuuaauguguguucuuc

SEQ ID NO: 1583761 - RNA, 19 nt, Homo sapiens
  misc_RNA (1)...(19): siRNA sense strand
gaaacaugcaccgagcaaa

SEQ ID NO: 1583762 - RNA, 19 nt, Homo sapiens
  misc_RNA (1)...(19): siRNA sense strand
auagcuacauucucaucua

SEQ ID NO: 1583763 - RNA, 19 nt, Homo sapiens
  misc_RNA (1)...(19): siRNA sense strand
aaaauuagucagcgaguua

SEQ ID NO: 1583764 - RNA, 19 nt, Homo sapiens
  misc_RNA (1)...(19): siRNA sense strand
gacagcaccagcacaguug

SEQ ID NO: 1583765 - RNA, 19 nt, Homo sapiens
  misc_RNA (1)...(19): siRNA sense strand
uaguccagauuaccauaaa

SEQ ID NO: 1583766 - RNA, 19 nt, Homo sapiens
  misc_RNA (1)...(19): siRNA sense strand
auucagcaguggauuaaga

SEQ ID NO: 1583767 - RNA, 19 nt, Homo sapiens
  misc_RNA (1)...(19): siRNA sense strand
cgaguuauucacuuauuug

SEQ ID NO: 1583768 - RNA, 19 nt, Homo sapiens
  misc_RNA (1)...(19): siRNA sense strand
aaacacauccugcaaaaga

SEQ ID NO: 1583769 - RNA, 19 nt, Homo sapiens
  misc_RNA (1)...(19): siRNA sense strand
ucaagagacccaggaaaga

SEQ ID NO: 1583770 - RNA, 19 nt, Homo sapiens
  misc_RNA (1)...(19): siRNA sense strand
gcugaagacacccagaaug

SEQ ID NO: 1583771 - RNA, 19 nt, Homo sapiens
  misc_RNA (1)...(19): siRNA sense strand
gcauauaaagaaacucaag

SEQ ID NO: 1583772 - RNA, 19 nt, Homo sapiens
  misc_RNA (1)...(19): siRNA sense strand
uagcuacauucucaucuag

SEQ ID NO: 1583773 - RNA, 19 nt, Homo sapiens
  misc_RNA (1)...(19): siRNA sense strand
aagacucuccuuccuaauu

SEQ ID NO: 1583774 - RNA, 19 nt, Homo sapiens
  misc_RNA (1)...(19): siRNA sense strand
caaagacuaaacagauuca

SEQ ID NO: 1583775 - RNA, 19 nt, Homo sapiens
  misc_RNA (1)...(19): siRNA sense strand
cuucaaauauuggacaaca

SEQ ID NO: 1583776 - RNA, 19 nt, Homo sapiens
  misc_RNA (1)...(19): siRNA sense strand
caaacuguaaagucugaaa

SEQ ID NO: 1583777 - RNA, 19 nt, Homo sapiens
  misc_RNA (1)...(19): siRNA sense strand
caaauauuggacaacauga

SEQ ID NO: 1583778 - RNA, 19 nt, Homo sapiens
  misc_RNA (1)...(19): siRNA sense strand
gaccugcgacugguucaaa

SEQ ID NO: 1583779 - RNA, 19 nt, Homo sapiens
  misc_RNA (1)...(19): siRNA sense strand
aaagaccauggaaaugaua

SEQ ID NO: 1583780 - RNA, 19 nt, Homo sapiens
  misc_RNA (1)...(19): siRNA sense strand
augaggagaaggcauauaa

SEQ ID NO: 1583781 - RNA, 19 nt, Homo sapiens
  misc_RNA (1)...(19): siRNA sense strand
ugcauuagauguuuuggua

SEQ ID NO: 1583782 - RNA, 19 nt, Homo sapiens
  misc_RNA (1)...(19): siRNA sense strand
ugaagacacccagaaugaa

SEQ ID NO: 1583783 - RNA, 19 nt, Homo sapiens
  misc_RNA (1)...(19): siRNA sense strand
aaaaugaaauggaggagau

SEQ ID NO: 1583784 - RNA, 19 nt, Homo sapiens
  misc_RNA (1)...(19): siRNA sense strand
gacacaaagacuaaacaga

SEQ ID NO: 1583785 - RNA, 19 nt, Homo sapiens
  misc_RNA (1)...(19): siRNA sense strand
agacagcaccagcacaguu

SEQ ID NO: 1583786 - RNA, 19 nt, Homo sapiens
  misc_RNA (1)...(19): siRNA sense strand
ccugagaaaggaacugauu

SEQ ID NO: 1583787 - RNA, 19 nt, Homo sapiens
  misc_RNA (1)...(19): siRNA sense strand
ggcagaggcugagggagau

SEQ ID NO: 1583788 - RNA, 19 nt, Homo sapiens
  misc_RNA (1)...(19): siRNA sense strand
ggcaaugauuugggaaaca

SEQ ID NO: 1583789 - RNA, 19 nt, Homo sapiens
  misc_RNA (1)...(19): siRNA sense strand
caagagacccaggaaagag

SEQ ID NO: 1583790 - RNA, 19 nt, Homo sapiens
  misc_RNA (1)...(19): siRNA sense strand
aaaaugaggagaaggcaua

SEQ ID NO: 1583791 - RNA, 19 nt, Homo sapiens
  misc_RNA (1)...(19): siRNA sense strand
gcagaguaucagcucauga

SEQ ID NO: 1583792 - RNA, 19 nt, Homo sapiens
  misc_RNA (1)...(19): siRNA sense strand
ggacacaaagacuaaacag

SEQ ID NO: 1583793 - RNA, 19 nt, Homo sapiens
  misc_RNA (1)...(19): siRNA sense strand
ugaacaaagaccauggaaa

SEQ ID NO: 1583794 - RNA, 19 nt, Homo sapiens
  misc_RNA (1)...(19): siRNA sense strand
aggagaaggcauauaaaga

SEQ ID NO: 1583795 - RNA, 19 nt, Homo sapiens
  misc_RNA (1)...(19): siRNA sense strand
gagaagggcaaugauuugg

SEQ ID NO: 1583796 - RNA, 19 nt, Homo sapiens
  misc_RNA (1)...(19): siRNA sense strand
uaaggaaucaaauguucug

SEQ ID NO: 1583797 - RNA, 19 nt, Homo sapiens
  misc_RNA (1)...(19): siRNA sense strand
ccgagcaaaugugauuaga

SEQ ID NO: 1583798 - RNA, 19 nt, Homo sapiens
  misc_RNA (1)...(19): siRNA sense strand
gggcaaugauuugggaaac

SEQ ID NO: 1583799 - RNA, 19 nt, Homo sapiens
  misc_RNA (1)...(19): siRNA sense strand
guccagauuaccauaaaga

SEQ ID NO: 1583800 - RNA, 19 nt, Homo sapiens
  misc_RNA (1)...(19): siRNA sense strand
ugaggagaaggcauauaaa

SEQ ID NO: 1583801 - RNA, 19 nt, Homo sapiens
  misc_RNA (1)...(19): siRNA sense strand
aaauguagacgugucagaa

SEQ ID NO: 1583802 - RNA, 19 nt, Homo sapiens
  misc_RNA (1)...(19): siRNA sense strand
ucaaauguucugcaucagu

SEQ ID NO: 1583803 - RNA, 19 nt, Homo sapiens
  misc_RNA (1)...(19): siRNA sense strand
gaagaaaguucaguaauuc

SEQ ID NO: 1583804 - RNA, 19 nt, Homo sapiens
  misc_RNA (1)...(19): siRNA sense strand
gaacugauaucugaagaga

SEQ ID NO: 1583805 - RNA, 19 nt, Homo sapiens
  misc_RNA (1)...(19): siRNA sense strand
ggccugaacugauaucuga

SEQ ID NO: 1583806 - RNA, 19 nt, Homo sapiens
  misc_RNA (1)...(19): siRNA sense strand
gagcgagguuucagacauu

SEQ ID NO: 1583807 - RNA, 19 nt, Homo sapiens
  misc_RNA (1)...(19): siRNA sense strand
ggucgaaugucaucaggaa

SEQ ID NO: 1583808 - RNA, 19 nt, Homo sapiens
  misc_RNA (1)...(19): siRNA sense strand
gcacucgggucgaauguca

SEQ ID NO: 1583809 - RNA, 19 nt, Homo sapiens
  misc_RNA (1)...(19): siRNA sense strand
gaagucaaaccucccgaua

SEQ ID NO: 1583810 - RNA, 19 nt, Homo sapiens
  misc_RNA (1)...(19): siRNA sense strand
agucaaaccucccgauauu

SEQ ID NO: 1583811 - RNA, 19 nt, Homo sapiens
  misc_RNA (1)...(19): siRNA sense strand
cagcaugucuuggaaguug

SEQ ID NO: 1583812 - RNA, 19 nt, Homo sapiens
  misc_RNA (1)...(19): siRNA sense strand
caacagggacaaaucaguu

SEQ ID NO: 1583813 - RNA, 19 nt, Homo sapiens
  misc_RNA (1)...(19): siRNA sense strand
acugauaucugaagagaga

SEQ ID NO: 1583814 - RNA, 19 nt, Homo sapiens
  misc_RNA (1)...(19): siRNA sense strand
cacagucccucacagauga

SEQ ID NO: 1583815 - RNA, 19 nt, Homo sapiens
  misc_RNA (1)...(19): siRNA sense strand
uuuccaagcucacugauga

SEQ ID NO: 1583816 - RNA, 19 nt, Homo sapiens
  misc_RNA (1)...(19): siRNA sense strand
gcugugcccuaucuucuga

SEQ ID NO: 1583817 - RNA, 19 nt, Homo sapiens
  misc_RNA (1)...(19): siRNA sense strand
uggaaugccugcugaccua

SEQ ID NO: 1583818 - RNA, 19 nt, Homo sapiens
  misc_RNA (1)...(19): siRNA sense strand
gagaagaaaguucaguaau

SEQ ID NO: 1583819 - RNA, 19 nt, Homo sapiens
  misc_RNA (1)...(19): siRNA sense strand
gaagagagaaguggagaca

SEQ ID NO: 1583820 - RNA, 19 nt, Homo sapiens
  misc_RNA (1)...(19): siRNA sense strand
caagcucacugaugaagag

SEQ ID NO: 1583821 - RNA, 19 nt, Homo sapiens
  misc_RNA (1)...(19): siRNA sense strand
guaauucccugaaaaguca

SEQ ID NO: 1583822 - RNA, 19 nt, Homo sapiens
  misc_RNA (1)...(19): siRNA sense strand
ggaggaagccaaggacgaa

SEQ ID NO: 1583823 - RNA, 19 nt, Homo sapiens
  misc_RNA (1)...(19): siRNA sense strand
ugagaagaaaguucaguaa

SEQ ID NO: 1583824 - RNA, 19 nt, Homo sapiens
  misc_RNA (1)...(19): siRNA sense strand
guacuaugagcaugugaaa

SEQ ID NO: 1583825 - RNA, 19 nt, Homo sapiens
  misc_RNA (1)...(19): siRNA sense strand
gaagaggcccagcaugucu

SEQ ID NO: 1583826 - RNA, 19 nt, Homo sapiens
  misc_RNA (1)...(19): siRNA sense strand
caagugaggccaaggcaau

SEQ ID NO: 1583827 - RNA, 19 nt, Homo sapiens
  misc_RNA (1)...(19): siRNA sense strand
gcguugaagggcaagauua

SEQ ID NO: 1583828 - RNA, 19 nt, Homo sapiens
  misc_RNA (1)...(19): siRNA sense strand
ccagacagaugaggaugga

SEQ ID NO: 1583829 - RNA, 19 nt, Homo sapiens
  misc_RNA (1)...(19): siRNA sense strand
ucuuugagcugaauaagca

SEQ ID NO: 1583830 - RNA, 19 nt, Homo sapiens
  misc_RNA (1)...(19): siRNA sense strand
ucaaaccucccgauauuuc

SEQ ID NO: 1583831 - RNA, 19 nt, Homo sapiens
  misc_RNA (1)...(19): siRNA sense strand
caaaccaacagacaggaaa

SEQ ID NO: 1583832 - RNA, 19 nt, Homo sapiens
  misc_RNA (1)...(19): siRNA sense strand
ccuaccagcugcuugugaa

SEQ ID NO: 1583833 - RNA, 19 nt, Homo sapiens
  misc_RNA (1)...(19): siRNA sense strand
gagcugggccugaacugau

SEQ ID NO: 1583834 - RNA, 19 nt, Homo sapiens
  misc_RNA (1)...(19): siRNA sense strand
ccacagucccucacagaug

SEQ ID NO: 1583835 - RNA, 19 nt, Homo sapiens
  misc_RNA (1)...(19): siRNA sense strand
caauggcugugcccuaucu

SEQ ID NO: 1583836 - RNA, 19 nt, Homo sapiens
  misc_RNA (1)...(19): siRNA sense strand
gcauauuucagcuguggaa

SEQ ID NO: 1583837 - RNA, 19 nt, Homo sapiens
  misc_RNA (1)...(19): siRNA sense strand
cagaugaggagcugucaga

SEQ ID NO: 1583838 - RNA, 19 nt, Homo sapiens
  misc_RNA (1)...(19): siRNA sense strand
ugaagggcaagauuaagaa

SEQ ID NO: 1583839 - RNA, 19 nt, Homo sapiens
  misc_RNA (1)...(19): siRNA sense strand
gaccagaggacccaaaugc

SEQ ID NO: 1583840 - RNA, 19 nt, Homo sapiens
  misc_RNA (1)...(19): siRNA sense strand
caacaggaccacagaugag

SEQ ID NO: 1583841 - RNA, 19 nt, Homo sapiens
  misc_RNA (1)...(19): siRNA sense strand
ccuggaauguggccucuuc

SEQ ID NO: 1583842 - RNA, 19 nt, Homo sapiens
  misc_RNA (1)...(19): siRNA sense strand
gauguggacaccucugaug

SEQ ID NO: 1583843 - RNA, 19 nt, Homo sapiens
  misc_RNA (1)...(19): siRNA sense strand
aaagucaagguaaagauga

SEQ ID NO: 1583844 - RNA, 19 nt, Homo sapiens
  misc_RNA (1)...(19): siRNA sense strand
ucgaguggcugggaaacuu

SEQ ID NO: 1583845 - RNA, 19 nt, Homo sapiens
  misc_RNA (1)...(19): siRNA sense strand
ugaccuaccuggagaacac

SEQ ID NO: 1583846 - RNA, 19 nt, Homo sapiens
  misc_RNA (1)...(19): siRNA sense strand
gggcaagauuaagaaggaa

SEQ ID NO: 1583847 - RNA, 19 nt, Homo sapiens
  misc_RNA (1)...(19): siRNA sense strand
augcagacccuucaaguga

SEQ ID NO: 1583848 - RNA, 19 nt, Homo sapiens
  misc_RNA (1)...(19): siRNA sense strand
cgacuucgagggagacuca

SEQ ID NO: 1583849 - RNA, 19 nt, Homo sapiens
  misc_RNA (1)...(19): siRNA sense strand
gaggacagaguggcaguga

SEQ ID NO: 1583850 - RNA, 19 nt, Homo sapiens
  misc_RNA (1)...(19): siRNA sense strand
acaacaggaccacagauga

SEQ ID NO: 1583851 - RNA, 19 nt, Homo sapiens
  misc_RNA (1)...(19): siRNA sense strand
agggcaagauuaagaagga

SEQ ID NO: 1583852 - RNA, 19 nt, Homo sapiens
  misc_RNA (1)...(19): siRNA sense strand
agguaaagaugaugauucu

SEQ ID NO: 1583853 - RNA, 19 nt, Homo sapiens
  misc_RNA (1)...(19): siRNA sense strand
caagguaaagaugaugauu

SEQ ID NO: 1583854 - RNA, 19 nt, Homo sapiens
  misc_RNA (1)...(19): siRNA sense strand
ggagcugggccugaacuga

SEQ ID NO: 1583855 - RNA, 19 nt, Homo sapiens
  misc_RNA (1)...(19): siRNA sense strand
ggcccagcaugucuuggaa

SEQ ID NO: 1583856 - RNA, 19 nt, Homo sapiens
  misc_RNA (1)...(19): siRNA sense strand
cguugaagggcaagauuaa

SEQ ID NO: 1583857 - RNA, 19 nt, Homo sapiens
  misc_RNA (1)...(19): siRNA sense strand
gagggagacucagaugacu

SEQ ID NO: 1583858 - RNA, 19 nt, Homo sapiens
  misc_RNA (1)...(19): siRNA sense strand
ggagugguacuaugagcau

SEQ ID NO: 1583859 - RNA, 19 nt, Homo sapiens
  misc_RNA (1)...(19): siRNA sense strand
gcaagauuaagaaggaaag

SEQ ID NO: 1583860 - RNA, 19 nt, Homo sapiens
  misc_RNA (1)...(19): siRNA sense strand
agagcgagguuucagacau

SEQ ID NO: 1583861 - RNA, 19 nt, Homo sapiens
  misc_RNA (1)...(19): siRNA sense strand
gcagugacggccucagaag

SEQ ID NO: 1583862 - RNA, 19 nt, Homo sapiens
  misc_RNA (1)...(19): siRNA sense strand
gaagggcaagauuaagaag

SEQ ID NO: 1583863 - RNA, 19 nt, Homo sapiens
  misc_RNA (1)...(19): siRNA sense strand
gcccaacagggacaaauca

SEQ ID NO: 1583864 - RNA, 19 nt, Homo sapiens
  misc_RNA (1)...(19): siRNA sense strand
caaaugcagacccuucaag

SEQ ID NO: 1583865 - RNA, 19 nt, Homo sapiens
  misc_RNA (1)...(19): siRNA sense strand
gagaccagaggacccaaau

SEQ ID NO: 1583866 - RNA, 19 nt, Homo sapiens
  misc_RNA (1)...(19): siRNA sense strand
gcaggcagagagcgagguu

SEQ ID NO: 1583867 - RNA, 19 nt, Homo sapiens
  misc_RNA (1)...(19): siRNA sense strand
gcacggcugcccaucaaac

SEQ ID NO: 1583868 - RNA, 19 nt, Homo sapiens
  misc_RNA (1)...(19): siRNA sense strand
ucgaaugucaucaggaaug

SEQ ID NO: 1583869 - RNA, 19 nt, Homo sapiens
  misc_RNA (1)...(19): siRNA sense strand
gcccacagucccucacaga

SEQ ID NO: 1583870 - RNA, 19 nt, Homo sapiens
  misc_RNA (1)...(19): siRNA sense strand
gaugaugauucuuuugauc

SEQ ID NO: 1583871 - RNA, 19 nt, Homo sapiens
  misc_RNA (1)...(19): siRNA sense strand
ccugaaaagucaagguaaa

SEQ ID NO: 1583872 - RNA, 19 nt, Homo sapiens
  misc_RNA (1)...(19): siRNA sense strand
ccaagagggagcugcuuuc

SEQ ID NO: 1583873 - RNA, 19 nt, Homo sapiens
  misc_RNA (1)...(19): siRNA sense strand
uaccagcugcuugugaaua

SEQ ID NO: 1583874 - RNA, 19 nt, Homo sapiens
  misc_RNA (1)...(19): siRNA sense strand
gcaucucaccuuccagaca

SEQ ID NO: 1583875 - RNA, 19 nt, Homo sapiens
  misc_RNA (1)...(19): siRNA sense strand
uucaagagguucggaagug

SEQ ID NO: 1583876 - RNA, 19 nt, Homo sapiens
  misc_RNA (1)...(19): siRNA sense strand
cagccacaccuucgcgaaa

SEQ ID NO: 1583877 - RNA, 19 nt, Homo sapiens
  misc_RNA (1)...(19): siRNA sense strand
uugaagggcaagauuaaga

SEQ ID NO: 1583878 - RNA, 19 nt, Homo sapiens
  misc_RNA (1)...(19): siRNA sense strand
cggugaagcccucgggaaa

SEQ ID NO: 1583879 - RNA, 19 nt, Homo sapiens
  misc_RNA (1)...(19): siRNA sense strand
gaaggcagccccucacaag

SEQ ID NO: 1583880 - RNA, 19 nt, Homo sapiens
  misc_RNA (1)...(19): siRNA sense strand
acagcgaccagacagauga

SEQ ID NO: 1583881 - RNA, 19 nt, Homo sapiens
  misc_RNA (1)...(19): siRNA sense strand
gguacuaugagcaugugaa

SEQ ID NO: 1583882 - RNA, 19 nt, Homo sapiens
  misc_RNA (1)...(19): siRNA sense strand
gaaaagucaagguaaagau

SEQ ID NO: 1583883 - RNA, 19 nt, Homo sapiens
  misc_RNA (1)...(19): siRNA sense strand
ucaaaccaacagacaggaa

SEQ ID NO: 1583884 - RNA, 19 nt, Homo sapiens
  misc_RNA (1)...(19): siRNA sense strand
gacagaugaggauggagaa

SEQ ID NO: 1583885 - RNA, 19 nt, Homo sapiens
  misc_RNA (1)...(19): siRNA sense strand
agcugggccugaacugaua

SEQ ID NO: 1583886 - RNA, 19 nt, Homo sapiens
  misc_RNA (1)...(19): siRNA sense strand
guacaacaggaccacagau

SEQ ID NO: 1583887 - RNA, 19 nt, Homo sapiens
  misc_RNA (1)...(19): siRNA sense strand
ggcaagauuaagaaggaaa

SEQ ID NO: 1583888 - RNA, 19 nt, Homo sapiens
  misc_RNA (1)...(19): siRNA sense strand
gugaagcccucgggaaagc

SEQ ID NO: 1583889 - RNA, 19 nt, Homo sapiens
  misc_RNA (1)...(19): siRNA sense strand
ugacuccacucagccucaa

SEQ ID NO: 1583890 - RNA, 19 nt, Homo sapiens
  misc_RNA (1)...(19): siRNA sense strand
ccaaaugcagacccuucaa

SEQ ID NO: 1583891 - RNA, 19 nt, Homo sapiens
  misc_RNA (1)...(19): siRNA sense strand
gucaaaccucccgauauuu

SEQ ID NO: 1583892 - RNA, 19 nt, Homo sapiens
  misc_RNA (1)...(19): siRNA sense strand
gcagagagcgagguuucag

SEQ ID NO: 1583893 - RNA, 19 nt, Homo sapiens
  misc_RNA (1)...(19): siRNA sense strand
uauuucagcuguggaaugc

SEQ ID NO: 1583894 - RNA, 19 nt, Homo sapiens
  misc_RNA (1)...(19): siRNA sense strand
gagcagccgaccagcaucu

SEQ ID NO: 1583895 - RNA, 19 nt, Homo sapiens
  misc_RNA (1)...(19): siRNA sense strand
ggaaagaacuccagaaagu

SEQ ID NO: 1583896 - RNA, 19 nt, Homo sapiens
  misc_RNA (1)...(19): siRNA sense strand
caagggagaugagagauua

SEQ ID NO: 1583897 - RNA, 19 nt, Homo sapiens
  misc_RNA (1)...(19): siRNA sense strand
gaagacaucugcaguaucu

SEQ ID NO: 1583898 - RNA, 19 nt, Homo sapiens
  misc_RNA (1)...(19): siRNA sense strand
gaagagauccgagaagaua

SEQ ID NO: 1583899 - RNA, 19 nt, Homo sapiens
  misc_RNA (1)...(19): siRNA sense strand
cgaaguagcuauccugaaa

SEQ ID NO: 1583900 - RNA, 19 nt, Homo sapiens
  misc_RNA (1)...(19): siRNA sense strand
ggaccgagaugcugauaaa

SEQ ID NO: 1583901 - RNA, 19 nt, Homo sapiens
  misc_RNA (1)...(19): siRNA sense strand
gaaagaggaugauguugga

SEQ ID NO: 1583902 - RNA, 19 nt, Homo sapiens
  misc_RNA (1)...(19): siRNA sense strand
ccacagagaugacagagaa

SEQ ID NO: 1583903 - RNA, 19 nt, Homo sapiens
  misc_RNA (1)...(19): siRNA sense strand
gacacuaacuccaccuuua

SEQ ID NO: 1583904 - RNA, 19 nt, Homo sapiens
  misc_RNA (1)...(19): siRNA sense strand
caacagggaucgagauaga

SEQ ID NO: 1583905 - RNA, 19 nt, Homo sapiens
  misc_RNA (1)...(19): siRNA sense strand
caaagaagcgcuauagaaa

SEQ ID NO: 1583906 - RNA, 19 nt, Homo sapiens
  misc_RNA (1)...(19): siRNA sense strand
gaagaugccagaucccuua

SEQ ID NO: 1583907 - RNA, 19 nt, Homo sapiens
  misc_RNA (1)...(19): siRNA sense strand
ggaaagagagagacuaauu

SEQ ID NO: 1583908 - RNA, 19 nt, Homo sapiens
  misc_RNA (1)...(19): siRNA sense strand
gaaagagagagacuaauuu

SEQ ID NO: 1583909 - RNA, 19 nt, Homo sapiens
  misc_RNA (1)...(19): siRNA sense strand
gagaaagaaugaagaacaa

SEQ ID NO: 1583910 - RNA, 19 nt, Homo sapiens
  misc_RNA (1)...(19): siRNA sense strand
ggaaagaggaggaucguaa

SEQ ID NO: 1583911 - RNA, 19 nt, Homo sapiens
  misc_RNA (1)...(19): siRNA sense strand
uaaugaagcuggaacaaga

SEQ ID NO: 1583912 - RNA, 19 nt, Homo sapiens
  misc_RNA (1)...(19): siRNA sense strand
gagagagacuaauuucuga

SEQ ID NO: 1583913 - RNA, 19 nt, Homo sapiens
  misc_RNA (1)...(19): siRNA sense strand
gauagucacaguaguaaua

SEQ ID NO: 1583914 - RNA, 19 nt, Homo sapiens
  misc_RNA (1)...(19): siRNA sense strand
gagaagagagaagaaauua

SEQ ID NO: 1583915 - RNA, 19 nt, Homo sapiens
  misc_RNA (1)...(19): siRNA sense strand
gagaagagauccgagaaga

SEQ ID NO: 1583916 - RNA, 19 nt, Homo sapiens
  misc_RNA (1)...(19): siRNA sense strand
caaaggugauucugauauu

SEQ ID NO: 1583917 - RNA, 19 nt, Homo sapiens
  misc_RNA (1)...(19): siRNA sense strand
gaaaugaagcgucagaaga

SEQ ID NO: 1583918 - RNA, 19 nt, Homo sapiens
  misc_RNA (1)...(19): siRNA sense strand
ugaagauggucaaguauuu

SEQ ID NO: 1583919 - RNA, 19 nt, Homo sapiens
  misc_RNA (1)...(19): siRNA sense strand
gaagauacagagggaauua

SEQ ID NO: 1583920 - RNA, 19 nt, Homo sapiens
  misc_RNA (1)...(19): siRNA sense strand
gcaacugccucuauggaaa

SEQ ID NO: 1583921 - RNA, 19 nt, Homo sapiens
  misc_RNA (1)...(19): siRNA sense strand
cacaguggcucaagagaua

SEQ ID NO: 1583922 - RNA, 19 nt, Homo sapiens
  misc_RNA (1)...(19): siRNA sense strand
gagaagaacgagaauauga

SEQ ID NO: 1583923 - RNA, 19 nt, Homo sapiens
  misc_RNA (1)...(19): siRNA sense strand
gaacuucacagucucauga

SEQ ID NO: 1583924 - RNA, 19 nt, Homo sapiens
  misc_RNA (1)...(19): siRNA sense strand
gcaaaucuccgaagcgaaa

SEQ ID NO: 1583925 - RNA, 19 nt, Homo sapiens
  misc_RNA (1)...(19): siRNA sense strand
uauagaaggucaccagaaa

SEQ ID NO: 1583926 - RNA, 19 nt, Homo sapiens
  misc_RNA (1)...(19): siRNA sense strand
gaagagagaagaaauuauc

SEQ ID NO: 1583927 - RNA, 19 nt, Homo sapiens
  misc_RNA (1)...(19): siRNA sense strand
gaucaucuauucaaagaca

SEQ ID NO: 1583928 - RNA, 19 nt, Homo sapiens
  misc_RNA (1)...(19): siRNA sense strand
aaacacauguagauucgua

SEQ ID NO: 1583929 - RNA, 19 nt, Homo sapiens
  misc_RNA (1)...(19): siRNA sense strand
guugaaaugugcaauggua

SEQ ID NO: 1583930 - RNA, 19 nt, Homo sapiens
  misc_RNA (1)...(19): siRNA sense strand
agaccaagcucaccaauuc

SEQ ID NO: 1583931 - RNA, 19 nt, Homo sapiens
  misc_RNA (1)...(19): siRNA sense strand
ucaagagguucucaaauug

SEQ ID NO: 1583932 - RNA, 19 nt, Homo sapiens
  misc_RNA (1)...(19): siRNA sense strand
ggagaacccagucgaagua

SEQ ID NO: 1583933 - RNA, 19 nt, Homo sapiens
  misc_RNA (1)...(19): siRNA sense strand
ugaaagggcuagagagaga

SEQ ID NO: 1583934 - RNA, 19 nt, Homo sapiens
  misc_RNA (1)...(19): siRNA sense strand
gaaaugagucucgaaguga

SEQ ID NO: 1583935 - RNA, 19 nt, Homo sapiens
  misc_RNA (1)...(19): siRNA sense strand
ggacagagacagagacaga

SEQ ID NO: 1583936 - RNA, 19 nt, Homo sapiens
  misc_RNA (1)...(19): siRNA sense strand
guacggaaauaaggaauga

SEQ ID NO: 1583937 - RNA, 19 nt, Homo sapiens
  misc_RNA (1)...(19): siRNA sense strand
ggaaugaguccagaaauga

SEQ ID NO: 1583938 - RNA, 19 nt, Homo sapiens
  misc_RNA (1)...(19): siRNA sense strand
ggucuggucuuaugccaaa

SEQ ID NO: 1583939 - RNA, 19 nt, Homo sapiens
  misc_RNA (1)...(19): siRNA sense strand
gugcagggauuugaagaua

SEQ ID NO: 1583940 - RNA, 19 nt, Homo sapiens
  misc_RNA (1)...(19): siRNA sense strand
ucaaauagagucugugaaa

SEQ ID NO: 1583941 - RNA, 19 nt, Homo sapiens
  misc_RNA (1)...(19): siRNA sense strand
gaaagaggaggaucguaaa

SEQ ID NO: 1583942 - RNA, 19 nt, Homo sapiens
  misc_RNA (1)...(19): siRNA sense strand
caaagaaacaugucagaga

SEQ ID NO: 1583943 - RNA, 19 nt, Homo sapiens
  misc_RNA (1)...(19): siRNA sense strand
caaguuagaugaugcacau

SEQ ID NO: 1583944 - RNA, 19 nt, Homo sapiens
  misc_RNA (1)...(19): siRNA sense strand
ccacagaacacgaguagaa

SEQ ID NO: 1583945 - RNA, 19 nt, Homo sapiens
  misc_RNA (1)...(19): siRNA sense strand
ggaaacacauguagauucg

SEQ ID NO: 1583946 - RNA, 19 nt, Homo sapiens
  misc_RNA (1)...(19): siRNA sense strand
ggauuggucuggucuuaug

SEQ ID NO: 1583947 - RNA, 19 nt, Homo sapiens
  misc_RNA (1)...(19): siRNA sense strand
ggaaaucacaggagagaga

SEQ ID NO: 1583948 - RNA, 19 nt, Homo sapiens
  misc_RNA (1)...(19): siRNA sense strand
gcacaucugccaucacuau

SEQ ID NO: 1583949 - RNA, 19 nt, Homo sapiens
  misc_RNA (1)...(19): siRNA sense strand
aagaagcgcuauagaaaug

SEQ ID NO: 1583950 - RNA, 19 nt, Homo sapiens
  misc_RNA (1)...(19): siRNA sense strand
gccaagacguggacacuga

SEQ ID NO: 1583951 - RNA, 19 nt, Homo sapiens
  misc_RNA (1)...(19): siRNA sense strand
cucaagagguucucaaauu

SEQ ID NO: 1583952 - RNA, 19 nt, Homo sapiens
  misc_RNA (1)...(19): siRNA sense strand
ccaaaguggucgaaagaga

SEQ ID NO: 1583953 - RNA, 19 nt, Homo sapiens
  misc_RNA (1)...(19): siRNA sense strand
ggagaagagagaagaaauu

SEQ ID NO: 1583954 - RNA, 19 nt, Homo sapiens
  misc_RNA (1)...(19): siRNA sense strand
ccagaucccuuagauguga

SEQ ID NO: 1583955 - RNA, 19 nt, Homo sapiens
  misc_RNA (1)...(19): siRNA sense strand
gauaaagagagaauggaua

SEQ ID NO: 1583956 - RNA, 19 nt, Homo sapiens
  misc_RNA (1)...(19): siRNA sense strand
ucaaagaagcgcuauagaa

SEQ ID NO: 1583957 - RNA, 19 nt, Homo sapiens
  misc_RNA (1)...(19): siRNA sense strand
agagagaacuagaaagaga

SEQ ID NO: 1583958 - RNA, 19 nt, Homo sapiens
  misc_RNA (1)...(19): siRNA sense strand
gaaaaggacucaagagaag

SEQ ID NO: 1583959 - RNA, 19 nt, Homo sapiens
  misc_RNA (1)...(19): siRNA sense strand
cuaagaaagucuagcaaau

SEQ ID NO: 1583960 - RNA, 19 nt, Homo sapiens
  misc_RNA (1)...(19): siRNA sense strand
gauacgagccaaucaguga

SEQ ID NO: 1583961 - RNA, 19 nt, Homo sapiens
  misc_RNA (1)...(19): siRNA sense strand
gagaauggauaaagaucug

SEQ ID NO: 1583962 - RNA, 19 nt, Homo sapiens
  misc_RNA (1)...(19): siRNA sense strand
ccaccaauaccaccaauaa

SEQ ID NO: 1583963 - RNA, 19 nt, Homo sapiens
  misc_RNA (1)...(19): siRNA sense strand
gaaaggagggaagauacua

SEQ ID NO: 1583964 - RNA, 19 nt, Homo sapiens
  misc_RNA (1)...(19): siRNA sense strand
cagcaucauucuccuauau

SEQ ID NO: 1583965 - RNA, 19 nt, Homo sapiens
  misc_RNA (1)...(19): siRNA sense strand
gaacuccuucaccaucuua

SEQ ID NO: 1583966 - RNA, 19 nt, Homo sapiens
  misc_RNA (1)...(19): siRNA sense strand
gcagggauuugaagauaca

SEQ ID NO: 1583967 - RNA, 19 nt, Homo sapiens
  misc_RNA (1)...(19): siRNA sense strand
cgagauagauugcgagaac

SEQ ID NO: 1583968 - RNA, 19 nt, Homo sapiens
  misc_RNA (1)...(19): siRNA sense strand
gauaugaacacgacagaga

SEQ ID NO: 1583969 - RNA, 19 nt, Homo sapiens
  misc_RNA (1)...(19): siRNA sense strand
agaacgagaucgauaugaa

SEQ ID NO: 1583970 - RNA, 19 nt, Homo sapiens
  misc_RNA (1)...(19): siRNA sense strand
gaagaaucccggaguuaug

SEQ ID NO: 1583971 - RNA, 19 nt, Homo sapiens
  misc_RNA (1)...(19): siRNA sense strand
agacaucgcucuccaaugc

SEQ ID NO: 1583972 - RNA, 19 nt, Homo sapiens
  misc_RNA (1)...(19): siRNA sense strand
caagaaagauaggaagaca

SEQ ID NO: 1583973 - RNA, 19 nt, Homo sapiens
  misc_RNA (1)...(19): siRNA sense strand
cgaacuagaugaaauucug

SEQ ID NO: 1583974 - RNA, 19 nt, Homo sapiens
  misc_RNA (1)...(19): siRNA sense strand
acaaauaaauccgagagaa

SEQ ID NO: 1583975 - RNA, 19 nt, Homo sapiens
  misc_RNA (1)...(19): siRNA sense strand
cggaguaaccguagucaua

SEQ ID NO: 1583976 - RNA, 19 nt, Homo sapiens
  misc_RNA (1)...(19): siRNA sense strand
gaagcagcccagcaaagua

SEQ ID NO: 1583977 - RNA, 19 nt, Homo sapiens
  misc_RNA (1)...(19): siRNA sense strand
gaagcgcuauagaaaugaa

SEQ ID NO: 1583978 - RNA, 19 nt, Homo sapiens
  misc_RNA (1)...(19): siRNA sense strand
gagagaaagggauaaagaa

SEQ ID NO: 1583979 - RNA, 19 nt, Homo sapiens
  misc_RNA (1)...(19): siRNA sense strand
ccgaagacccaguguauuu

SEQ ID NO: 1583980 - RNA, 19 nt, Homo sapiens
  misc_RNA (1)...(19): siRNA sense strand
caaucaggaucaucuauuc

SEQ ID NO: 1583981 - RNA, 19 nt, Homo sapiens
  misc_RNA (1)...(19): siRNA sense strand
ucacucaucuuccucacaa

SEQ ID NO: 1583982 - RNA, 19 nt, Homo sapiens
  misc_RNA (1)...(19): siRNA sense strand
gagucauccucaccuguua

SEQ ID NO: 1583983 - RNA, 19 nt, Homo sapiens
  misc_RNA (1)...(19): siRNA sense strand
ggacagugaugccuacaac

SEQ ID NO: 1583984 - RNA, 19 nt, Homo sapiens
  misc_RNA (1)...(19): siRNA sense strand
cgagaaagagcgagagaaa

SEQ ID NO: 1583985 - RNA, 19 nt, Homo sapiens
  misc_RNA (1)...(19): siRNA sense strand
agaggaugauguuggaaua

SEQ ID NO: 1583986 - RNA, 19 nt, Homo sapiens
  misc_RNA (1)...(19): siRNA sense strand
ucaaagacauucuccuucu

SEQ ID NO: 1583987 - RNA, 19 nt, Homo sapiens
  misc_RNA (1)...(19): siRNA sense strand
ggacagggacagagacaga

SEQ ID NO: 1583988 - RNA, 19 nt, Homo sapiens
  misc_RNA (1)...(19): siRNA sense strand
gaaguucuccagagucaga

SEQ ID NO: 1583989 - RNA, 19 nt, Homo sapiens
  misc_RNA (1)...(19): siRNA sense strand
agacagaaauccuggaaag

SEQ ID NO: 1583990 - RNA, 19 nt, Homo sapiens
  misc_RNA (1)...(19): siRNA sense strand
gaugaaagggcuagagaga

SEQ ID NO: 1583991 - RNA, 19 nt, Homo sapiens
  misc_RNA (1)...(19): siRNA sense strand
gaaggaaugacgagcuuga

SEQ ID NO: 1583992 - RNA, 19 nt, Homo sapiens
  misc_RNA (1)...(19): siRNA sense strand
agaaaugagucucgaagug

SEQ ID NO: 1583993 - RNA, 19 nt, Homo sapiens
  misc_RNA (1)...(19): siRNA sense strand
caacaguggagaugauaaa

SEQ ID NO: 1583994 - RNA, 19 nt, Homo sapiens
  misc_RNA (1)...(19): siRNA sense strand
aaagaggaauugguugaaa

SEQ ID NO: 1583995 - RNA, 19 nt, Homo sapiens
  misc_RNA (1)...(19): siRNA sense strand
gaaagaagcugacaaagaa

SEQ ID NO: 1583996 - RNA, 19 nt, Homo sapiens
  misc_RNA (1)...(19): siRNA sense strand
caaaguagaugaccaaauu

SEQ ID NO: 1583997 - RNA, 19 nt, Homo sapiens
  misc_RNA (1)...(19): siRNA sense strand
ggacaaagaaggagagaaa

SEQ ID NO: 1583998 - RNA, 19 nt, Homo sapiens
  misc_RNA (1)...(19): siRNA sense strand
ggaaagaagcugacaaaga

SEQ ID NO: 1583999 - RNA, 19 nt, Homo sapiens
  misc_RNA (1)...(19): siRNA sense strand
cagaagaacucaagucaga

SEQ ID NO: 1584000 - RNA, 19 nt, Homo sapiens
  misc_RNA (1)...(19): siRNA sense strand
gaagagaacaccaagaaug

SEQ ID NO: 1584001 - RNA, 19 nt, Homo sapiens
  misc_RNA (1)...(19): siRNA sense strand
gcaacgauccugacauuga

SEQ ID NO: 1584002 - RNA, 19 nt, Homo sapiens
  misc_RNA (1)...(19): siRNA sense strand
ccauucugcuugaaguuua

SEQ ID NO: 1584003 - RNA, 19 nt, Homo sapiens
  misc_RNA (1)...(19): siRNA sense strand
uuaaugggauuguugaaga

SEQ ID NO: 1584004 - RNA, 19 nt, Homo sapiens
  misc_RNA (1)...(19): siRNA sense strand
ggagagaaaggagcugaua

SEQ ID NO: 1584005 - RNA, 19 nt, Homo sapiens
  misc_RNA (1)...(19): siRNA sense strand
gaaaggagucaacaaugga

SEQ ID NO: 1584006 - RNA, 19 nt, Homo sapiens
  misc_RNA (1)...(19): siRNA sense strand
uggcaacgauccugacauu

SEQ ID NO: 1584007 - RNA, 19 nt, Homo sapiens
  misc_RNA (1)...(19): siRNA sense strand
gagaaaggagucaacaaug

SEQ ID NO: 1584008 - RNA, 19 nt, Homo sapiens
  misc_RNA (1)...(19): siRNA sense strand
gaagaacucaagucagaau

SEQ ID NO: 1584009 - RNA, 19 nt, Homo sapiens
  misc_RNA (1)...(19): siRNA sense strand
gaaacucaccaaaguagau

SEQ ID NO: 1584010 - RNA, 19 nt, Homo sapiens
  misc_RNA (1)...(19): siRNA sense strand
gaaguuuaaugggauuguu

SEQ ID NO: 1584011 - RNA, 19 nt, Homo sapiens
  misc_RNA (1)...(19): siRNA sense strand
gaacugaugagccgguuuc

SEQ ID NO: 1584012 - RNA, 19 nt, Homo sapiens
  misc_RNA (1)...(19): siRNA sense strand
agaaaggagucaacaaugg

SEQ ID NO: 1584013 - RNA, 19 nt, Homo sapiens
  misc_RNA (1)...(19): siRNA sense strand
agacaaaacugacaaagga

SEQ ID NO: 1584014 - RNA, 19 nt, Homo sapiens
  misc_RNA (1)...(19): siRNA sense strand
guacuuugcugcgacuaga

SEQ ID NO: 1584015 - RNA, 19 nt, Homo sapiens
  misc_RNA (1)...(19): siRNA sense strand
gagaagaagagaacaccaa

SEQ ID NO: 1584016 - RNA, 19 nt, Homo sapiens
  misc_RNA (1)...(19): siRNA sense strand
ggaaggaaucaacagagaa

SEQ ID NO: 1584017 - RNA, 19 nt, Homo sapiens
  misc_RNA (1)...(19): siRNA sense strand
gaaggaaucaacagagaag

SEQ ID NO: 1584018 - RNA, 19 nt, Homo sapiens
  misc_RNA (1)...(19): siRNA sense strand
caacgauccugacauugag

SEQ ID NO: 1584019 - RNA, 19 nt, Homo sapiens
  misc_RNA (1)...(19): siRNA sense strand
ggaaggcuauaacaaagcu

SEQ ID NO: 1584020 - RNA, 19 nt, Homo sapiens
  misc_RNA (1)...(19): siRNA sense strand
aagaagagaacaccaagaa

SEQ ID NO: 1584021 - RNA, 19 nt, Homo sapiens
  misc_RNA (1)...(19): siRNA sense strand
gaagaagagaacaccaaga

SEQ ID NO: 1584022 - RNA, 19 nt, Homo sapiens
  misc_RNA (1)...(19): siRNA sense strand
caaagaaggagagaaagga

SEQ ID NO: 1584023 - RNA, 19 nt, Homo sapiens
  misc_RNA (1)...(19): siRNA sense strand
gaacucaagucagaaucag

SEQ ID NO: 1584024 - RNA, 19 nt, Homo sapiens
  misc_RNA (1)...(19): siRNA sense strand
caagaauggaggagagaaa

SEQ ID NO: 1584025 - RNA, 19 nt, Homo sapiens
  misc_RNA (1)...(19): siRNA sense strand
gauacaauucuuugccauu

SEQ ID NO: 1584026 - RNA, 19 nt, Homo sapiens
  misc_RNA (1)...(19): siRNA sense strand
caagucagaaucagccaaa

SEQ ID NO: 1584027 - RNA, 19 nt, Homo sapiens
  misc_RNA (1)...(19): siRNA sense strand
caaagcuguuuauaucagu

SEQ ID NO: 1584028 - RNA, 19 nt, Homo sapiens
  misc_RNA (1)...(19): siRNA sense strand
cuucaacuaugguacuuug

SEQ ID NO: 1584029 - RNA, 19 nt, Homo sapiens
  misc_RNA (1)...(19): siRNA sense strand
cagaaucagccaaagagaa

SEQ ID NO: 1584030 - RNA, 19 nt, Homo sapiens
  misc_RNA (1)...(19): siRNA sense strand
gaauggaggagagaaagga

SEQ ID NO: 1584031 - RNA, 19 nt, Homo sapiens
  misc_RNA (1)...(19): siRNA sense strand
cgggaaggcuauaacaaag

SEQ ID NO: 1584032 - RNA, 19 nt, Homo sapiens
  misc_RNA (1)...(19): siRNA sense strand
ccgggaaggcuauaacaaa

SEQ ID NO: 1584033 - RNA, 19 nt, Homo sapiens
  misc_RNA (1)...(19): siRNA sense strand
aggaaggaaucaacagaga

SEQ ID NO: 1584034 - RNA, 19 nt, Homo sapiens
  misc_RNA (1)...(19): siRNA sense strand
gagaaaggagcugauagug

SEQ ID NO: 1584035 - RNA, 19 nt, Homo sapiens
  misc_RNA (1)...(19): siRNA sense strand
agucaacaauggaggagaa

SEQ ID NO: 1584036 - RNA, 19 nt, Homo sapiens
  misc_RNA (1)...(19): siRNA sense strand
gagagaaaggagucaacaa

SEQ ID NO: 1584037 - RNA, 19 nt, Homo sapiens
  misc_RNA (1)...(19): siRNA sense strand
auuacaagcugauuucauc

SEQ ID NO: 1584038 - RNA, 19 nt, Homo sapiens
  misc_RNA (1)...(19): siRNA sense strand
agagaaaggagucaacaau

SEQ ID NO: 1584039 - RNA, 19 nt, Homo sapiens
  misc_RNA (1)...(19): siRNA sense strand
acaaagcuguuuauaucag

SEQ ID NO: 1584040 - RNA, 19 nt, Homo sapiens
  misc_RNA (1)...(19): siRNA sense strand
ggaaucaacagagaagaca

SEQ ID NO: 1584041 - RNA, 19 nt, Homo sapiens
  misc_RNA (1)...(19): siRNA sense strand
uaucaguguucaggacaaa

SEQ ID NO: 1584042 - RNA, 19 nt, Homo sapiens
  misc_RNA (1)...(19): siRNA sense strand
augcugaagucuauuacaa

SEQ ID NO: 1584043 - RNA, 19 nt, Homo sapiens
  misc_RNA (1)...(19): siRNA sense strand
ggagagaaaggagucaaca

SEQ ID NO: 1584044 - RNA, 19 nt, Homo sapiens
  misc_RNA (1)...(19): siRNA sense strand
gcugauaguggagaagaaa

SEQ ID NO: 1584045 - RNA, 19 nt, Homo sapiens
  misc_RNA (1)...(19): siRNA sense strand
guagaugaccaaauuuacu

SEQ ID NO: 1584046 - RNA, 19 nt, Homo sapiens
  misc_RNA (1)...(19): siRNA sense strand
gaagcugacaaagaaauca

SEQ ID NO: 1584047 - RNA, 19 nt, Homo sapiens
  misc_RNA (1)...(19): siRNA sense strand
gagcugauaguggagaaga

SEQ ID NO: 1584048 - RNA, 19 nt, Homo sapiens
  misc_RNA (1)...(19): siRNA sense strand
gagagaaaggagcugauag

SEQ ID NO: 1584049 - RNA, 19 nt, Homo sapiens
  misc_RNA (1)...(19): siRNA sense strand
cauucugcuugaaguuuaa

SEQ ID NO: 1584050 - RNA, 19 nt, Homo sapiens
  misc_RNA (1)...(19): siRNA sense strand
ccugaaacucaccaaagua

SEQ ID NO: 1584051 - RNA, 19 nt, Homo sapiens
  misc_RNA (1)...(19): siRNA sense strand
ggacccagaagaacucaag

SEQ ID NO: 1584052 - RNA, 19 nt, Homo sapiens
  misc_RNA (1)...(19): siRNA sense strand
aaucaacagagaagacaaa

SEQ ID NO: 1584053 - RNA, 19 nt, Homo sapiens
  misc_RNA (1)...(19): siRNA sense strand
gaaccgggaaggcuauaac

SEQ ID NO: 1584054 - RNA, 19 nt, Homo sapiens
  misc_RNA (1)...(19): siRNA sense strand
uggaggccauucugcuuga

SEQ ID NO: 1584055 - RNA, 19 nt, Homo sapiens
  misc_RNA (1)...(19): siRNA sense strand
gagcugacaguggagaaga

SEQ ID NO: 1584056 - RNA, 19 nt, Homo sapiens
  misc_RNA (1)...(19): siRNA sense strand
agaaucagccaaagagaag

SEQ ID NO: 1584057 - RNA, 19 nt, Homo sapiens
  misc_RNA (1)...(19): siRNA sense strand
gaggaaaacaccaucuuug

SEQ ID NO: 1584058 - RNA, 19 nt, Homo sapiens
  misc_RNA (1)...(19): siRNA sense strand
ggaggccauucugcuugaa

SEQ ID NO: 1584059 - RNA, 19 nt, Homo sapiens
  misc_RNA (1)...(19): siRNA sense strand
gccauucugcuugaaguuu

SEQ ID NO: 1584060 - RNA, 19 nt, Homo sapiens
  misc_RNA (1)...(19): siRNA sense strand
agggaaagaagcugacaaa

SEQ ID NO: 1584061 - RNA, 19 nt, Homo sapiens
  misc_RNA (1)...(19): siRNA sense strand
caacagagaagacaaaacu

SEQ ID NO: 1584062 - RNA, 19 nt, Homo sapiens
  misc_RNA (1)...(19): siRNA sense strand
ccaaaguagaugaccaaau

SEQ ID NO: 1584063 - RNA, 19 nt, Homo sapiens
  misc_RNA (1)...(19): siRNA sense strand
agagaaaggagcugauagu

SEQ ID NO: 1584064 - RNA, 19 nt, Homo sapiens
  misc_RNA (1)...(19): siRNA sense strand
gacuucaacuaugguacuu

SEQ ID NO: 1584065 - RNA, 19 nt, Homo sapiens
  misc_RNA (1)...(19): siRNA sense strand
ggaaccgggaaggcuauaa

SEQ ID NO: 1584066 - RNA, 19 nt, Homo sapiens
  misc_RNA (1)...(19): siRNA sense strand
aagagaacaccaagaaugg

SEQ ID NO: 1584067 - RNA, 19 nt, Homo sapiens
  misc_RNA (1)...(19): siRNA sense strand
gaaucaacagagaagacaa

SEQ ID NO: 1584068 - RNA, 19 nt, Homo sapiens
  misc_RNA (1)...(19): siRNA sense strand
caccaaaguagaugaccaa

SEQ ID NO: 1584069 - RNA, 19 nt, Homo sapiens
  misc_RNA (1)...(19): siRNA sense strand
uccugaaacucaccaaagu

SEQ ID NO: 1584070 - RNA, 19 nt, Homo sapiens
  misc_RNA (1)...(19): siRNA sense strand
uuugagacccuuaggauag

SEQ ID NO: 1584071 - RNA, 19 nt, Homo sapiens
  misc_RNA (1)...(19): siRNA sense strand
aaagaggaaggaaucaaca

SEQ ID NO: 1584072 - RNA, 19 nt, Homo sapiens
  misc_RNA (1)...(19): siRNA sense strand
ucaguguucaggacaaaga

SEQ ID NO: 1584073 - RNA, 19 nt, Homo sapiens
  misc_RNA (1)...(19): siRNA sense strand
augaccaaauuuacucuga

SEQ ID NO: 1584074 - RNA, 19 nt, Homo sapiens
  misc_RNA (1)...(19): siRNA sense strand
aaagaagcugacaaagaaa

SEQ ID NO: 1584075 - RNA, 19 nt, Homo sapiens
  misc_RNA (1)...(19): siRNA sense strand
ucuauuacaagcugauuuc

SEQ ID NO: 1584076 - RNA, 19 nt, Homo sapiens
  misc_RNA (1)...(19): siRNA sense strand
gacccacaguuccugaaac

SEQ ID NO: 1584077 - RNA, 19 nt, Homo sapiens
  misc_RNA (1)...(19): siRNA sense strand
uguguuggacccagaagaa

SEQ ID NO: 1584078 - RNA, 19 nt, Homo sapiens
  misc_RNA (1)...(19): siRNA sense strand
agaggaaggaaucaacaga

SEQ ID NO: 1584079 - RNA, 19 nt, Homo sapiens
  misc_RNA (1)...(19): siRNA sense strand
uugagacccuuaggauaga

SEQ ID NO: 1584080 - RNA, 19 nt, Homo sapiens
  misc_RNA (1)...(19): siRNA sense strand
ggacaggccacauuucaug

SEQ ID NO: 1584081 - RNA, 19 nt, Homo sapiens
  misc_RNA (1)...(19): siRNA sense strand
gagcuggaguuccgcaaga

SEQ ID NO: 1584082 - RNA, 19 nt, Homo sapiens
  misc_RNA (1)...(19): siRNA sense strand
caacauggacuacuucaag

SEQ ID NO: 1584083 - RNA, 19 nt, Homo sapiens
  misc_RNA (1)...(19): siRNA sense strand
caaauggugucugcaagug

SEQ ID NO: 1584084 - RNA, 19 nt, Homo sapiens
  misc_RNA (1)...(19): siRNA sense strand
gcccaugccuccucuucuu

SEQ ID NO: 1584085 - RNA, 19 nt, Homo sapiens
  misc_RNA (1)...(19): siRNA sense strand
gagaagcagcggacacuca

SEQ ID NO: 1584086 - RNA, 19 nt, Homo sapiens
  misc_RNA (1)...(19): siRNA sense strand
gcaaauggugucugcaagu

SEQ ID NO: 1584087 - RNA, 19 nt, Homo sapiens
  misc_RNA (1)...(19): siRNA sense strand
gaagggcagggcacaaugu

SEQ ID NO: 1584088 - RNA, 19 nt, Homo sapiens
  misc_RNA (1)...(19): siRNA sense strand
cuggagggcugcacccaaa

SEQ ID NO: 1584089 - RNA, 19 nt, Homo sapiens
  misc_RNA (1)...(19): siRNA sense strand
ggagagcccagccaugauc

SEQ ID NO: 1584090 - RNA, 19 nt, Homo sapiens
  misc_RNA (1)...(19): siRNA sense strand
gcucugcaccuucccaaau

SEQ ID NO: 1584091 - RNA, 19 nt, Homo sapiens
  misc_RNA (1)...(19): siRNA sense strand
gagaagggcagggcacaau

SEQ ID NO: 1584092 - RNA, 19 nt, Homo sapiens
  misc_RNA (1)...(19): siRNA sense strand
ugaccaaggcuucaucugu

SEQ ID NO: 1584093 - RNA, 19 nt, Homo sapiens
  misc_RNA (1)...(19): siRNA sense strand
cagaguuccuccacaacau

SEQ ID NO: 1584094 - RNA, 19 nt, Homo sapiens
  misc_RNA (1)...(19): siRNA sense strand
caggacaggccacauuuca

SEQ ID NO: 1584095 - RNA, 19 nt, Homo sapiens
  misc_RNA (1)...(19): siRNA sense strand
cauguuugccuucuucaga

SEQ ID NO: 1584096 - RNA, 19 nt, Homo sapiens
  misc_RNA (1)...(19): siRNA sense strand
ucgaagagccagaggacuu

SEQ ID NO: 1584097 - RNA, 19 nt, Homo sapiens
  misc_RNA (1)...(19): siRNA sense strand
ucccagaguuccuccacaa

SEQ ID NO: 1584098 - RNA, 19 nt, Homo sapiens
  misc_RNA (1)...(19): siRNA sense strand
cuucaucuguggcaucauc

SEQ ID NO: 1584099 - RNA, 19 nt, Homo sapiens
  misc_RNA (1)...(19): siRNA sense strand
ccacaacauggacuacuuc

SEQ ID NO: 1584100 - RNA, 19 nt, Homo sapiens
  misc_RNA (1)...(19): siRNA sense strand
caaccugagucugcacaag

SEQ ID NO: 1584101 - RNA, 19 nt, Homo sapiens
  misc_RNA (1)...(19): siRNA sense strand
gggcuccugcugcaucgua

SEQ ID NO: 1584102 - RNA, 19 nt, Homo sapiens
  misc_RNA (1)...(19): siRNA sense strand
ccagaguuccuccacaaca

SEQ ID NO: 1584103 - RNA, 19 nt, Homo sapiens
  misc_RNA (1)...(19): siRNA sense strand
ccuacccacugcuggcaaa

SEQ ID NO: 1584104 - RNA, 19 nt, Homo sapiens
  misc_RNA (1)...(19): siRNA sense strand
acgcauguuugccuucuuc

SEQ ID NO: 1584105 - RNA, 19 nt, Homo sapiens
  misc_RNA (1)...(19): siRNA sense strand
cagcacauucccagaguuc

SEQ ID NO: 1584106 - RNA, 19 nt, Homo sapiens
  misc_RNA (1)...(19): siRNA sense strand
ccaccuggcugggaaaaug

SEQ ID NO: 1584107 - RNA, 19 nt, Homo sapiens
  misc_RNA (1)...(19): siRNA sense strand
gcuggaguuccgcaagaaa

SEQ ID NO: 1584108 - RNA, 19 nt, Homo sapiens
  misc_RNA (1)...(19): siRNA sense strand
agaagcagcggacacucaa

SEQ ID NO: 1584109 - RNA, 19 nt, Homo sapiens
  misc_RNA (1)...(19): siRNA sense strand
gaaacuggccacacuauuu

SEQ ID NO: 1584110 - RNA, 19 nt, Homo sapiens
  misc_RNA (1)...(19): siRNA sense strand
gaacgugacuguuggaucu

SEQ ID NO: 1584111 - RNA, 19 nt, Homo sapiens
  misc_RNA (1)...(19): siRNA sense strand
gguaaugcaucuaucacua

SEQ ID NO: 1584112 - RNA, 19 nt, Homo sapiens
  misc_RNA (1)...(19): siRNA sense strand
gagaacagcuuuccaucca

SEQ ID NO: 1584113 - RNA, 19 nt, Homo sapiens
  misc_RNA (1)...(19): siRNA sense strand
caacagacuuggcaauagu

SEQ ID NO: 1584114 - RNA, 19 nt, Homo sapiens
  misc_RNA (1)...(19): siRNA sense strand
gaaguuggaaucauuguug

SEQ ID NO: 1584115 - RNA, 19 nt, Homo sapiens
  misc_RNA (1)...(19): siRNA sense strand
agaagacgcuacccaacua

SEQ ID NO: 1584116 - RNA, 19 nt, Homo sapiens
  misc_RNA (1)...(19): siRNA sense strand
ggcaauaguuccugcgaaa

SEQ ID NO: 1584117 - RNA, 19 nt, Homo sapiens
  misc_RNA (1)...(19): siRNA sense strand
gcgaagcaaugccaagaga

SEQ ID NO: 1584118 - RNA, 19 nt, Homo sapiens
  misc_RNA (1)...(19): siRNA sense strand
agaaguaacucuaccaucu

SEQ ID NO: 1584119 - RNA, 19 nt, Homo sapiens
  misc_RNA (1)...(19): siRNA sense strand
cgaaaucgaucucacuucu

SEQ ID NO: 1584120 - RNA, 19 nt, Homo sapiens
  misc_RNA (1)...(19): siRNA sense strand
gaacuugagccaaugacaa

SEQ ID NO: 1584121 - RNA, 19 nt, Homo sapiens
  misc_RNA (1)...(19): siRNA sense strand
gcccuuaagugaagaugaa

SEQ ID NO: 1584122 - RNA, 19 nt, Homo sapiens
  misc_RNA (1)...(19): siRNA sense strand
gaaggucuuucugauccua

SEQ ID NO: 1584123 - RNA, 19 nt, Homo sapiens
  misc_RNA (1)...(19): siRNA sense strand
gaucuaaugucacucucau

SEQ ID NO: 1584124 - RNA, 19 nt, Homo sapiens
  misc_RNA (1)...(19): siRNA sense strand
gagccaaugacaaagauaa

SEQ ID NO: 1584125 - RNA, 19 nt, Homo sapiens
  misc_RNA (1)...(19): siRNA sense strand
uggagccaauuucuauuua

SEQ ID NO: 1584126 - RNA, 19 nt, Homo sapiens
  misc_RNA (1)...(19): siRNA sense strand
agaaggagauggagccaau

SEQ ID NO: 1584127 - RNA, 19 nt, Homo sapiens
  misc_RNA (1)...(19): siRNA sense strand
cagaaacgcagucggaauu

SEQ ID NO: 1584128 - RNA, 19 nt, Homo sapiens
  misc_RNA (1)...(19): siRNA sense strand
gcauaaacuugagggaaga

SEQ ID NO: 1584129 - RNA, 19 nt, Homo sapiens
  misc_RNA (1)...(19): siRNA sense strand
gaaguaacucuaccaucuu

SEQ ID NO: 1584130 - RNA, 19 nt, Homo sapiens
  misc_RNA (1)...(19): siRNA sense strand
caacgucaguguguuagug

SEQ ID NO: 1584131 - RNA, 19 nt, Homo sapiens
  misc_RNA (1)...(19): siRNA sense strand
aaaucgaucucacuucuuc

SEQ ID NO: 1584132 - RNA, 19 nt, Homo sapiens
  misc_RNA (1)...(19): siRNA sense strand
guagccaucgggcaauuua

SEQ ID NO: 1584133 - RNA, 19 nt, Homo sapiens
  misc_RNA (1)...(19): siRNA sense strand
gguuguaguugagcccuua

SEQ ID NO: 1584134 - RNA, 19 nt, Homo sapiens
  misc_RNA (1)...(19): siRNA sense strand
cagcagacaguggaauuua

SEQ ID NO: 1584135 - RNA, 19 nt, Homo sapiens
  misc_RNA (1)...(19): siRNA sense strand
gagauggagccaauuucua

SEQ ID NO: 1584136 - RNA, 19 nt, Homo sapiens
  misc_RNA (1)...(19): siRNA sense strand
gaucucacuucuucacauc

SEQ ID NO: 1584137 - RNA, 19 nt, Homo sapiens
  misc_RNA (1)...(19): siRNA sense strand
guaaugcaucuaucacuau

SEQ ID NO: 1584138 - RNA, 19 nt, Homo sapiens
  misc_RNA (1)...(19): siRNA sense strand
uaguugagcccuuaaguga

SEQ ID NO: 1584139 - RNA, 19 nt, Homo sapiens
  misc_RNA (1)...(19): siRNA sense strand
guugagcccuuaagugaag

SEQ ID NO: 1584140 - RNA, 19 nt, Homo sapiens
  misc_RNA (1)...(19): siRNA sense strand
ccaguggucuuucuuccau

SEQ ID NO: 1584141 - RNA, 19 nt, Homo sapiens
  misc_RNA (1)...(19): siRNA sense strand
gaaacgcagucggaauugg

SEQ ID NO: 1584142 - RNA, 19 nt, Homo sapiens
  misc_RNA (1)...(19): siRNA sense strand
gaagcaaugccaagagaag

SEQ ID NO: 1584143 - RNA, 19 nt, Homo sapiens
  misc_RNA (1)...(19): siRNA sense strand
ucaacagacuuggcaauag

SEQ ID NO: 1584144 - RNA, 19 nt, Homo sapiens
  misc_RNA (1)...(19): siRNA sense strand
gagccaauuucuauuuacu

SEQ ID NO: 1584145 - RNA, 19 nt, Homo sapiens
  misc_RNA (1)...(19): siRNA sense strand
gggagaaagcgaagcaaug

SEQ ID NO: 1584146 - RNA, 19 nt, Homo sapiens
  misc_RNA (1)...(19): siRNA sense strand
guacugccaucaacagacu

SEQ ID NO: 1584147 - RNA, 19 nt, Homo sapiens
  misc_RNA (1)...(19): siRNA sense strand
guucaaggaagaccagaaa

SEQ ID NO: 1584148 - RNA, 19 nt, Homo sapiens
  misc_RNA (1)...(19): siRNA sense strand
ccucaacgucaguguguua

SEQ ID NO: 1584149 - RNA, 19 nt, Homo sapiens
  misc_RNA (1)...(19): siRNA sense strand
ggagauggagccaauuucu

SEQ ID NO: 1584150 - RNA, 19 nt, Homo sapiens
  misc_RNA (1)...(19): siRNA sense strand
ggagccaauuucuauuuac

SEQ ID NO: 1584151 - RNA, 19 nt, Homo sapiens
  misc_RNA (1)...(19): siRNA sense strand
ucgcggaacuugagccaau

SEQ ID NO: 1584152 - RNA, 19 nt, Homo sapiens
  misc_RNA (1)...(19): siRNA sense strand
gaaaucgaucucacuucuu

SEQ ID NO: 1584153 - RNA, 19 nt, Homo sapiens
  misc_RNA (1)...(19): siRNA sense strand
guccaacgauccagguaau

SEQ ID NO: 1584154 - RNA, 19 nt, Homo sapiens
  misc_RNA (1)...(19): siRNA sense strand
uccaagaaccagacuauga

SEQ ID NO: 1584155 - RNA, 19 nt, Homo sapiens
  misc_RNA (1)...(19): siRNA sense strand
gagaagacgcuacccaacu

SEQ ID NO: 1584156 - RNA, 19 nt, Homo sapiens
  misc_RNA (1)...(19): siRNA sense strand
ggaauaaggcaaaagcaaa

SEQ ID NO: 1584157 - RNA, 19 nt, Homo sapiens
  misc_RNA (1)...(19): siRNA sense strand
guacuacuggcauaaacuu

SEQ ID NO: 1584158 - RNA, 19 nt, Homo sapiens
  misc_RNA (1)...(19): siRNA sense strand
gcagacaguggaauuuaca

SEQ ID NO: 1584159 - RNA, 19 nt, Homo sapiens
  misc_RNA (1)...(19): siRNA sense strand
ggagaaagcgaagcaaugc

SEQ ID NO: 1584160 - RNA, 19 nt, Homo sapiens
  misc_RNA (1)...(19): siRNA sense strand
aaacuggccacacuauuuc

SEQ ID NO: 1584161 - RNA, 19 nt, Homo sapiens
  misc_RNA (1)...(19): siRNA sense strand
caauaguuccugcgaaauc

SEQ ID NO: 1584162 - RNA, 19 nt, Homo sapiens
  misc_RNA (1)...(19): siRNA sense strand
agauggagccaauuucuau

SEQ ID NO: 1584163 - RNA, 19 nt, Homo sapiens
  misc_RNA (1)...(19): siRNA sense strand
caagguuauuaccagugua

SEQ ID NO: 1584164 - RNA, 19 nt, Homo sapiens
  misc_RNA (1)...(19): siRNA sense strand
caaggaagaccagaaacug

SEQ ID NO: 1584165 - RNA, 19 nt, Homo sapiens
  misc_RNA (1)...(19): siRNA sense strand
uaaugcaucuaucacuauc

SEQ ID NO: 1584166 - RNA, 19 nt, Homo sapiens
  misc_RNA (1)...(19): siRNA sense strand
acaagguuauuaccagugu

SEQ ID NO: 1584167 - RNA, 19 nt, Homo sapiens
  misc_RNA (1)...(19): siRNA sense strand
caugagacuggcccugaua

SEQ ID NO: 1584168 - RNA, 19 nt, Homo sapiens
  misc_RNA (1)...(19): siRNA sense strand
gccaucaucaucucuguug

SEQ ID NO: 1584169 - RNA, 19 nt, Homo sapiens
  misc_RNA (1)...(19): siRNA sense strand
agggagugguuaaggcaua

SEQ ID NO: 1584170 - RNA, 19 nt, Homo sapiens
  misc_RNA (1)...(19): siRNA sense strand
guaguugagcccuuaagug

SEQ ID NO: 1584171 - RNA, 19 nt, Homo sapiens
  misc_RNA (1)...(19): siRNA sense strand
cauccaagaaccagacuau

SEQ ID NO: 1584172 - RNA, 19 nt, Homo sapiens
  misc_RNA (1)...(19): siRNA sense strand
agagacaucgugccaguga

SEQ ID NO: 1584173 - RNA, 19 nt, Homo sapiens
  misc_RNA (1)...(19): siRNA sense strand
ccaagaaccagacuaugag

SEQ ID NO: 1584174 - RNA, 19 nt, Homo sapiens
  misc_RNA (1)...(19): siRNA sense strand
gcccugauaccauccaaga

SEQ ID NO: 1584175 - RNA, 19 nt, Homo sapiens
  misc_RNA (1)...(19): siRNA sense strand
gauggagccaauuucuauu

SEQ ID NO: 1584176 - RNA, 19 nt, Homo sapiens
  misc_RNA (1)...(19): siRNA sense strand
acuguuggaucuaauguca

SEQ ID NO: 1584177 - RNA, 19 nt, Homo sapiens
  misc_RNA (1)...(19): siRNA sense strand
agacaucgugccagugaaa

SEQ ID NO: 1584178 - RNA, 19 nt, Homo sapiens
  misc_RNA (1)...(19): siRNA sense strand
gguccaacgauccagguaa

SEQ ID NO: 1584179 - RNA, 19 nt, Homo sapiens
  misc_RNA (1)...(19): siRNA sense strand
aaguaacucuaccaucuuc

SEQ ID NO: 1584180 - RNA, 19 nt, Homo sapiens
  misc_RNA (1)...(19): siRNA sense strand
ccagaaguuggaaucauug

SEQ ID NO: 1584181 - RNA, 19 nt, Homo sapiens
  misc_RNA (1)...(19): siRNA sense strand
caacccaaccaccgggauu

SEQ ID NO: 1584182 - RNA, 19 nt, Homo sapiens
  misc_RNA (1)...(19): siRNA sense strand
gagacaucgugccagugaa

SEQ ID NO: 1584183 - RNA, 19 nt, Homo sapiens
  misc_RNA (1)...(19): siRNA sense strand
ccuguguacuacuggcaua

SEQ ID NO: 1584184 - RNA, 19 nt, Homo sapiens
  misc_RNA (1)...(19): siRNA sense strand
cagaaacuggccacacuau

SEQ ID NO: 1584185 - RNA, 19 nt, Homo sapiens
  misc_RNA (1)...(19): siRNA sense strand
ccagguaaugcaucuauca

SEQ ID NO: 1584186 - RNA, 19 nt, Homo sapiens
  misc_RNA (1)...(19): siRNA sense strand
cuauuucccuuuccugucu

SEQ ID NO: 1584187 - RNA, 19 nt, Homo sapiens
  misc_RNA (1)...(19): siRNA sense strand
gaccaucgcggaacuugag

SEQ ID NO: 1584188 - RNA, 19 nt, Homo sapiens
  misc_RNA (1)...(19): siRNA sense strand
guaggugccgccaucauca

SEQ ID NO: 1584189 - RNA, 19 nt, Homo sapiens
  misc_RNA (1)...(19): siRNA sense strand
gaccaucccagacgguuuc

SEQ ID NO: 1584190 - RNA, 19 nt, Homo sapiens
  misc_RNA (1)...(19): siRNA sense strand
cauuggaaaucugacaaau

SEQ ID NO: 1584191 - RNA, 19 nt, Homo sapiens
  misc_RNA (1)...(19): siRNA sense strand
gaauuacaggguccaacga

SEQ ID NO: 1584192 - RNA, 19 nt, Homo sapiens
  misc_RNA (1)...(19): siRNA sense strand
gcaucuacaccaccacugu

SEQ ID NO: 1584193 - RNA, 19 nt, Homo sapiens
  misc_RNA (1)...(19): siRNA sense strand
acucuaccaucuuccauuc

SEQ ID NO: 1584194 - RNA, 19 nt, Homo sapiens
  misc_RNA (1)...(19): siRNA sense strand
gcaauaguuccugcgaaau

SEQ ID NO: 1584195 - RNA, 19 nt, Homo sapiens
  misc_RNA (1)...(19): siRNA sense strand
aaggagauggagccaauuu

SEQ ID NO: 1584196 - RNA, 19 nt, Homo sapiens
  misc_RNA (1)...(19): siRNA sense strand
aguggucuuucuuccauaa

SEQ ID NO: 1584197 - RNA, 19 nt, Homo sapiens
  misc_RNA (1)...(19): siRNA sense strand
acaguggaauuuacaucug

SEQ ID NO: 1584198 - RNA, 19 nt, Homo sapiens
  misc_RNA (1)...(19): siRNA sense strand
gaaggagauggagccaauu

SEQ ID NO: 1584199 - RNA, 19 nt, Homo sapiens
  misc_RNA (1)...(19): siRNA sense strand
caaaagcaaaggcaaaaga

SEQ ID NO: 1584200 - RNA, 19 nt, Homo sapiens
  misc_RNA (1)...(19): siRNA sense strand
ggauuuuggucauuggaaa

SEQ ID NO: 1584201 - RNA, 19 nt, Homo sapiens
  misc_RNA (1)...(19): siRNA sense strand
ccagcagacaguggaauuu

SEQ ID NO: 1584202 - RNA, 19 nt, Homo sapiens
  misc_RNA (1)...(19): siRNA sense strand
aaacgcagucggaauugga

SEQ ID NO: 1584203 - RNA, 19 nt, Homo sapiens
  misc_RNA (1)...(19): siRNA sense strand
ugccugaccuugacaucga

SEQ ID NO: 1584204 - RNA, 19 nt, Homo sapiens
  misc_RNA (1)...(19): siRNA sense strand
gaagacgcuacccaacuag

SEQ ID NO: 1584205 - RNA, 19 nt, Homo sapiens
  misc_RNA (1)...(19): siRNA sense strand
guugugugcuucgcaagga

SEQ ID NO: 1584206 - RNA, 19 nt, Homo sapiens
  misc_RNA (1)...(19): siRNA sense strand
gguaggugccgccaucauc

SEQ ID NO: 1584207 - RNA, 19 nt, Homo sapiens
  misc_RNA (1)...(19): siRNA sense strand
gccacacuauuucccuuuc

SEQ ID NO: 1584208 - RNA, 19 nt, Homo sapiens
  misc_RNA (1)...(19): siRNA sense strand
gacaguggaauuuacaucu

SEQ ID NO: 1584209 - RNA, 19 nt, Homo sapiens
  misc_RNA (1)...(19): siRNA sense strand
ggacacggcccucauguug

SEQ ID NO: 1584210 - RNA, 19 nt, Homo sapiens
  misc_RNA (1)...(19): siRNA sense strand
ggagacggcuggacauguc

SEQ ID NO: 1584211 - RNA, 19 nt, Homo sapiens
  misc_RNA (1)...(19): siRNA sense strand
gcaagacggcccuggaaug

SEQ ID NO: 1584212 - RNA, 19 nt, Homo sapiens
  misc_RNA (1)...(19): siRNA sense strand
ccacgugccucuagugagu

SEQ ID NO: 1584213 - RNA, 19 nt, Homo sapiens
  misc_RNA (1)...(19): siRNA sense strand
ccagaauggcacagaaaua

SEQ ID NO: 1584214 - RNA, 19 nt, Homo sapiens
  misc_RNA (1)...(19): siRNA sense strand
ccucauagauacccuacga

SEQ ID NO: 1584215 - RNA, 19 nt, Homo sapiens
  misc_RNA (1)...(19): siRNA sense strand
ccaagauccuccucuccaa

SEQ ID NO: 1584216 - RNA, 19 nt, Homo sapiens
  misc_RNA (1)...(19): siRNA sense strand
aggaagagcuggcauugca

SEQ ID NO: 1584217 - RNA, 19 nt, Homo sapiens
  misc_RNA (1)...(19): siRNA sense strand
gaaaguccagccaucuguu

SEQ ID NO: 1584218 - RNA, 19 nt, Homo sapiens
  misc_RNA (1)...(19): siRNA sense strand
ccacuguccuuuccuugau

SEQ ID NO: 1584219 - RNA, 19 nt, Homo sapiens
  misc_RNA (1)...(19): siRNA sense strand
guugacugccucauagaua

SEQ ID NO: 1584220 - RNA, 19 nt, Homo sapiens
  misc_RNA (1)...(19): siRNA sense strand
aaaguccagccaucuguua

SEQ ID NO: 1584221 - RNA, 19 nt, Homo sapiens
  misc_RNA (1)...(19): siRNA sense strand
gaaccagcaggacaaagga

SEQ ID NO: 1584222 - RNA, 19 nt, Homo sapiens
  misc_RNA (1)...(19): siRNA sense strand
ggauagagaagaggaaaca

SEQ ID NO: 1584223 - RNA, 19 nt, Homo sapiens
  misc_RNA (1)...(19): siRNA sense strand
cagaauggcacagaaauag

SEQ ID NO: 1584224 - RNA, 19 nt, Homo sapiens
  misc_RNA (1)...(19): siRNA sense strand
cagcuuagccggcacuaca

SEQ ID NO: 1584225 - RNA, 19 nt, Homo sapiens
  misc_RNA (1)...(19): siRNA sense strand
ggaggaggaggccagaaug

SEQ ID NO: 1584226 - RNA, 19 nt, Homo sapiens
  misc_RNA (1)...(19): siRNA sense strand
gggcucacggcguuaauga

SEQ ID NO: 1584227 - RNA, 19 nt, Homo sapiens
  misc_RNA (1)...(19): siRNA sense strand
ccagagcuguuagguacug

SEQ ID NO: 1584228 - RNA, 19 nt, Homo sapiens
  misc_RNA (1)...(19): siRNA sense strand
gcucacggcguuaaugaag

SEQ ID NO: 1584229 - RNA, 19 nt, Homo sapiens
  misc_RNA (1)...(19): siRNA sense strand
gcucagccacuguccuuuc

SEQ ID NO: 1584230 - RNA, 19 nt, Homo sapiens
  misc_RNA (1)...(19): siRNA sense strand
gagcucaggauagagaaga

SEQ ID NO: 1584231 - RNA, 19 nt, Homo sapiens
  misc_RNA (1)...(19): siRNA sense strand
guucuggaccaccuuguga

SEQ ID NO: 1584232 - RNA, 19 nt, Homo sapiens
  misc_RNA (1)...(19): siRNA sense strand
caagacggcccuggaaugg

SEQ ID NO: 1584233 - RNA, 19 nt, Homo sapiens
  misc_RNA (1)...(19): siRNA sense strand
ccgcugugcugaccugaca

SEQ ID NO: 1584234 - RNA, 19 nt, Homo sapiens
  misc_RNA (1)...(19): siRNA sense strand
guccuuuccuugaugugaa

SEQ ID NO: 1584235 - RNA, 19 nt, Homo sapiens
  misc_RNA (1)...(19): siRNA sense strand
accaggagcucaggauaga

SEQ ID NO: 1584236 - RNA, 19 nt, Homo sapiens
  misc_RNA (1)...(19): siRNA sense strand
cagggcauauugagcaagu

SEQ ID NO: 1584237 - RNA, 19 nt, Homo sapiens
  misc_RNA (1)...(19): siRNA sense strand
ccgcguugacugccucaua

SEQ ID NO: 1584238 - RNA, 19 nt, Homo sapiens
  misc_RNA (1)...(19): siRNA sense strand
caggagcucaggauagaga

SEQ ID NO: 1584239 - RNA, 19 nt, Homo sapiens
  misc_RNA (1)...(19): siRNA sense strand
cagccacuguccuuuccuu

SEQ ID NO: 1584240 - RNA, 19 nt, Homo sapiens
  misc_RNA (1)...(19): siRNA sense strand
gccacuguccuuuccuuga

SEQ ID NO: 1584241 - RNA, 19 nt, Homo sapiens
  misc_RNA (1)...(19): siRNA sense strand
ucuguuaccugcguugcuu

SEQ ID NO: 1584242 - RNA, 19 nt, Homo sapiens
  misc_RNA (1)...(19): siRNA sense strand
gggacacggcccucauguu

SEQ ID NO: 1584243 - RNA, 19 nt, Homo sapiens
  misc_RNA (1)...(19): siRNA sense strand
cgcguugacugccucauag

SEQ ID NO: 1584244 - RNA, 19 nt, Homo sapiens
  misc_RNA (1)...(19): siRNA sense strand
gaggaggaggccagaaugg

SEQ ID NO: 1584245 - RNA, 19 nt, Homo sapiens
  misc_RNA (1)...(19): siRNA sense strand
ggccacgugccucuaguga

SEQ ID NO: 1584246 - RNA, 19 nt, Homo sapiens
  misc_RNA (1)...(19): siRNA sense strand
gugccagagcuguuaggua

SEQ ID NO: 1584247 - RNA, 19 nt, Homo sapiens
  misc_RNA (1)...(19): siRNA sense strand
uggcuacaacccagggaua

SEQ ID NO: 1584248 - RNA, 19 nt, Homo sapiens
  misc_RNA (1)...(19): siRNA sense strand
auucggagacccagugauu

SEQ ID NO: 1584249 - RNA, 19 nt, Homo sapiens
  misc_RNA (1)...(19): siRNA sense strand
gaaaugaugucugaaguua

SEQ ID NO: 1584250 - RNA, 19 nt, Homo sapiens
  misc_RNA (1)...(19): siRNA sense strand
gcuguaaggucuucuuuaa

SEQ ID NO: 1584251 - RNA, 19 nt, Homo sapiens
  misc_RNA (1)...(19): siRNA sense strand
caaguggucuaaaucauug

SEQ ID NO: 1584252 - RNA, 19 nt, Homo sapiens
  misc_RNA (1)...(19): siRNA sense strand
caucuguacugcuugaaua

SEQ ID NO: 1584253 - RNA, 19 nt, Homo sapiens
  misc_RNA (1)...(19): siRNA sense strand
gaacagcggaugaaagaau

SEQ ID NO: 1584254 - RNA, 19 nt, Homo sapiens
  misc_RNA (1)...(19): siRNA sense strand
gagaugaggucaagcuaca

SEQ ID NO: 1584255 - RNA, 19 nt, Homo sapiens
  misc_RNA (1)...(19): siRNA sense strand
cagcguuucuaucaacuua

SEQ ID NO: 1584256 - RNA, 19 nt, Homo sapiens
  misc_RNA (1)...(19): siRNA sense strand
agauaacucucauucagua

SEQ ID NO: 1584257 - RNA, 19 nt, Homo sapiens
  misc_RNA (1)...(19): siRNA sense strand
gcaucaggcugucauuaug

SEQ ID NO: 1584258 - RNA, 19 nt, Homo sapiens
  misc_RNA (1)...(19): siRNA sense strand
gugggcagaugcuguauuu

SEQ ID NO: 1584259 - RNA, 19 nt, Homo sapiens
  misc_RNA (1)...(19): siRNA sense strand
guagucaaguggucuaaau

SEQ ID NO: 1584260 - RNA, 19 nt, Homo sapiens
  misc_RNA (1)...(19): siRNA sense strand
cuacuuaugugcuggaaga

SEQ ID NO: 1584261 - RNA, 19 nt, Homo sapiens
  misc_RNA (1)...(19): siRNA sense strand
gcucacagcguuucuauca

SEQ ID NO: 1584262 - RNA, 19 nt, Homo sapiens
  misc_RNA (1)...(19): siRNA sense strand
gaagggcuacgaagucaaa

SEQ ID NO: 1584263 - RNA, 19 nt, Homo sapiens
  misc_RNA (1)...(19): siRNA sense strand
ugacaagucuuaaucaacu

SEQ ID NO: 1584264 - RNA, 19 nt, Homo sapiens
  misc_RNA (1)...(19): siRNA sense strand
gaggcaacuucuuucagua

SEQ ID NO: 1584265 - RNA, 19 nt, Homo sapiens
  misc_RNA (1)...(19): siRNA sense strand
gaaaugacugcaucguuga

SEQ ID NO: 1584266 - RNA, 19 nt, Homo sapiens
  misc_RNA (1)...(19): siRNA sense strand
gcacaauuacccaagauau

SEQ ID NO: 1584267 - RNA, 19 nt, Homo sapiens
  misc_RNA (1)...(19): siRNA sense strand
cuaaaucauugccagguuu

SEQ ID NO: 1584268 - RNA, 19 nt, Homo sapiens
  misc_RNA (1)...(19): siRNA sense strand
acauauugaugaccagaua

SEQ ID NO: 1584269 - RNA, 19 nt, Homo sapiens
  misc_RNA (1)...(19): siRNA sense strand
caccugaucuaauacuaaa

SEQ ID NO: 1584270 - RNA, 19 nt, Homo sapiens
  misc_RNA (1)...(19): siRNA sense strand
ccagauaacucucauucag

SEQ ID NO: 1584271 - RNA, 19 nt, Homo sapiens
  misc_RNA (1)...(19): siRNA sense strand
gcaccugaucuaauacuaa

SEQ ID NO: 1584272 - RNA, 19 nt, Homo sapiens
  misc_RNA (1)...(19): siRNA sense strand
gcugacaagucuuaaucaa

SEQ ID NO: 1584273 - RNA, 19 nt, Homo sapiens
  misc_RNA (1)...(19): siRNA sense strand
gucauuaccucagaagauu

SEQ ID NO: 1584274 - RNA, 19 nt, Homo sapiens
  misc_RNA (1)...(19): siRNA sense strand
ccucagaagauuuguuuaa

SEQ ID NO: 1584275 - RNA, 19 nt, Homo sapiens
  misc_RNA (1)...(19): siRNA sense strand
gcagaucccacaggaguuu

SEQ ID NO: 1584276 - RNA, 19 nt, Homo sapiens
  misc_RNA (1)...(19): siRNA sense strand
uaacucucauucaguauuc

SEQ ID NO: 1584277 - RNA, 19 nt, Homo sapiens
  misc_RNA (1)...(19): siRNA sense strand
ccacugaucaaccuguuaa

SEQ ID NO: 1584278 - RNA, 19 nt, Homo sapiens
  misc_RNA (1)...(19): siRNA sense strand
uaacuugcaugaucuuguc

SEQ ID NO: 1584279 - RNA, 19 nt, Homo sapiens
  misc_RNA (1)...(19): siRNA sense strand
gacaagucuuaaucaacua

SEQ ID NO: 1584280 - RNA, 19 nt, Homo sapiens
  misc_RNA (1)...(19): siRNA sense strand
cuugauaacuugcaugauc

SEQ ID NO: 1584281 - RNA, 19 nt, Homo sapiens
  misc_RNA (1)...(19): siRNA sense strand
ggacguggagggcgcauau

SEQ ID NO: 1584282 - RNA, 19 nt, Homo sapiens
  misc_RNA (1)...(19): siRNA sense strand
caacuucuuucaguaguca

SEQ ID NO: 1584283 - RNA, 19 nt, Homo sapiens
  misc_RNA (1)...(19): siRNA sense strand
ugcaugaucuugucaaaca

SEQ ID NO: 1584284 - RNA, 19 nt, Homo sapiens
  misc_RNA (1)...(19): siRNA sense strand
ucaaguggucuaaaucauu

SEQ ID NO: 1584285 - RNA, 19 nt, Homo sapiens
  misc_RNA (1)...(19): siRNA sense strand
ucaauaaagucagaguugu

SEQ ID NO: 1584286 - RNA, 19 nt, Homo sapiens
  misc_RNA (1)...(19): siRNA sense strand
gaccagauaacucucauuc

SEQ ID NO: 1584287 - RNA, 19 nt, Homo sapiens
  misc_RNA (1)...(19): siRNA sense strand
ggcgagaggcaacuucuuu

SEQ ID NO: 1584288 - RNA, 19 nt, Homo sapiens
  misc_RNA (1)...(19): siRNA sense strand
ucacagcguuucuaucaac

SEQ ID NO: 1584289 - RNA, 19 nt, Homo sapiens
  misc_RNA (1)...(19): siRNA sense strand
gaugaggucaagcuacauu

SEQ ID NO: 1584290 - RNA, 19 nt, Homo sapiens
  misc_RNA (1)...(19): siRNA sense strand
cauuaugccuuaccaugug

SEQ ID NO: 1584291 - RNA, 19 nt, Homo sapiens
  misc_RNA (1)...(19): siRNA sense strand
uaaaugaacagcggaugaa

SEQ ID NO: 1584292 - RNA, 19 nt, Homo sapiens
  misc_RNA (1)...(19): siRNA sense strand
ggaggcagcaguucuaguc

SEQ ID NO: 1584293 - RNA, 19 nt, Homo sapiens
  misc_RNA (1)...(19): siRNA sense strand
ccgcagccuucccggauuu

SEQ ID NO: 1584294 - RNA, 19 nt, Homo sapiens
  misc_RNA (1)...(19): siRNA sense strand
guucuuugcugacaagucu

SEQ ID NO: 1584295 - RNA, 19 nt, Homo sapiens
  misc_RNA (1)...(19): siRNA sense strand
caagacauacaguugauuc

SEQ ID NO: 1584296 - RNA, 19 nt, Homo sapiens
  misc_RNA (1)...(19): siRNA sense strand
gcagcacaacuacuuaugu

SEQ ID NO: 1584297 - RNA, 19 nt, Homo sapiens
  misc_RNA (1)...(19): siRNA sense strand
caauacagcuucgagucau

SEQ ID NO: 1584298 - RNA, 19 nt, Homo sapiens
  misc_RNA (1)...(19): siRNA sense strand
caucaaggcaauugguuug

SEQ ID NO: 1584299 - RNA, 19 nt, Homo sapiens
  misc_RNA (1)...(19): siRNA sense strand
agaggcaacuucuuucagu

SEQ ID NO: 1584300 - RNA, 19 nt, Homo sapiens
  misc_RNA (1)...(19): siRNA sense strand
cugaucaaccuguuaauga

SEQ ID NO: 1584301 - RNA, 19 nt, Homo sapiens
  misc_RNA (1)...(19): siRNA sense strand
gcccuaagccagagauuca

SEQ ID NO: 1584302 - RNA, 19 nt, Homo sapiens
  misc_RNA (1)...(19): siRNA sense strand
gauaaaggaggaggaggaa

SEQ ID NO: 1584303 - RNA, 19 nt, Homo sapiens
  misc_RNA (1)...(19): siRNA sense strand
ggugaaaccccuucucuuu

SEQ ID NO: 1584304 - RNA, 19 nt, Homo sapiens
  misc_RNA (1)...(19): siRNA sense strand
cacaauuacccaagauauu

SEQ ID NO: 1584305 - RNA, 19 nt, Homo sapiens
  misc_RNA (1)...(19): siRNA sense strand
ccugacaccuccaguucuu

SEQ ID NO: 1584306 - RNA, 19 nt, Homo sapiens
  misc_RNA (1)...(19): siRNA sense strand
uggaagggcagcacaacua

SEQ ID NO: 1584307 - RNA, 19 nt, Homo sapiens
  misc_RNA (1)...(19): siRNA sense strand
gagcuguaaggucuucuuu

SEQ ID NO: 1584308 - RNA, 19 nt, Homo sapiens
  misc_RNA (1)...(19): siRNA sense strand
ggucgacccuggagugcau

SEQ ID NO: 1584309 - RNA, 19 nt, Homo sapiens
  misc_RNA (1)...(19): siRNA sense strand
cuuaugugcuggaagaaau

SEQ ID NO: 1584310 - RNA, 19 nt, Homo sapiens
  misc_RNA (1)...(19): siRNA sense strand
gagcucacagcguuucuau

SEQ ID NO: 1584311 - RNA, 19 nt, Homo sapiens
  misc_RNA (1)...(19): siRNA sense strand
gaggucaagcuacauuaga

SEQ ID NO: 1584312 - RNA, 19 nt, Homo sapiens
  misc_RNA (1)...(19): siRNA sense strand
gaguuccucuguaugaaag

SEQ ID NO: 1584313 - RNA, 19 nt, Homo sapiens
  misc_RNA (1)...(19): siRNA sense strand
uaaagucagaguugugaga

SEQ ID NO: 1584314 - RNA, 19 nt, Homo sapiens
  misc_RNA (1)...(19): siRNA sense strand
gcugcacaauuacccaaga

SEQ ID NO: 1584315 - RNA, 19 nt, Homo sapiens
  misc_RNA (1)...(19): siRNA sense strand
guacugcuugaauacauuu

SEQ ID NO: 1584316 - RNA, 19 nt, Homo sapiens
  misc_RNA (1)...(19): siRNA sense strand
caaguuagccaagaagagu

SEQ ID NO: 1584317 - RNA, 19 nt, Homo sapiens
  misc_RNA (1)...(19): siRNA sense strand
ggacaccuugccugaaguu

SEQ ID NO: 1584318 - RNA, 19 nt, Homo sapiens
  misc_RNA (1)...(19): siRNA sense strand
gcaacuucuuucaguaguc

SEQ ID NO: 1584319 - RNA, 19 nt, Homo sapiens
  misc_RNA (1)...(19): siRNA sense strand
gaaguuucggccauaccua

SEQ ID NO: 1584320 - RNA, 19 nt, Homo sapiens
  misc_RNA (1)...(19): siRNA sense strand
cuaaaugaacagcggauga

SEQ ID NO: 1584321 - RNA, 19 nt, Homo sapiens
  misc_RNA (1)...(19): siRNA sense strand
ccacggugauggauuucau

SEQ ID NO: 1584322 - RNA, 19 nt, Homo sapiens
  misc_RNA (1)...(19): siRNA sense strand
gcuucaaguuagccaagaa

SEQ ID NO: 1584323 - RNA, 19 nt, Homo sapiens
  misc_RNA (1)...(19): siRNA sense strand
caauaaagucagaguugug

SEQ ID NO: 1584324 - RNA, 19 nt, Homo sapiens
  misc_RNA (1)...(19): siRNA sense strand
ucagugggcagaugcugua

SEQ ID NO: 1584325 - RNA, 19 nt, Homo sapiens
  misc_RNA (1)...(19): siRNA sense strand
ugacugcaucguugauaaa

SEQ ID NO: 1584326 - RNA, 19 nt, Homo sapiens
  misc_RNA (1)...(19): siRNA sense strand
gagcucaucaaggcaauug

SEQ ID NO: 1584327 - RNA, 19 nt, Homo sapiens
  misc_RNA (1)...(19): siRNA sense strand
ucuaaaucauugccagguu

SEQ ID NO: 1584328 - RNA, 19 nt, Homo sapiens
  misc_RNA (1)...(19): siRNA sense strand
uaccucagaagauuuguuu

SEQ ID NO: 1584329 - RNA, 19 nt, Homo sapiens
  misc_RNA (1)...(19): siRNA sense strand
gcguuucuaucaacuuaca

SEQ ID NO: 1584330 - RNA, 19 nt, Homo sapiens
  misc_RNA (1)...(19): siRNA sense strand
uggagugcauccuguacaa

SEQ ID NO: 1584331 - RNA, 19 nt, Homo sapiens
  misc_RNA (1)...(19): siRNA sense strand
uggaagggcuacgaaguca

SEQ ID NO: 1584332 - RNA, 19 nt, Homo sapiens
  misc_RNA (1)...(19): siRNA sense strand
guuccucuguaugaaagua

SEQ ID NO: 1584333 - RNA, 19 nt, Homo sapiens
  misc_RNA (1)...(19): siRNA sense strand
gcauugaaccagaugugau

SEQ ID NO: 1584334 - RNA, 19 nt, Homo sapiens
  misc_RNA (1)...(19): siRNA sense strand
gagcauugaaccagaugug

SEQ ID NO: 1584335 - RNA, 19 nt, Homo sapiens
  misc_RNA (1)...(19): siRNA sense strand
ugaucaaccuguuaaugag

SEQ ID NO: 1584336 - RNA, 19 nt, Homo sapiens
  misc_RNA (1)...(19): siRNA sense strand
aaugaaagccaagcccuaa

SEQ ID NO: 1584337 - RNA, 19 nt, Homo sapiens
  misc_RNA (1)...(19): siRNA sense strand
ccuuggaggucgaaaauuu

SEQ ID NO: 1584338 - RNA, 19 nt, Homo sapiens
  misc_RNA (1)...(19): siRNA sense strand
ccagccagagcccacaaua

SEQ ID NO: 1584339 - RNA, 19 nt, Homo sapiens
  misc_RNA (1)...(19): siRNA sense strand
gggcagcacaacuacuuau

SEQ ID NO: 1584340 - RNA, 19 nt, Homo sapiens
  misc_RNA (1)...(19): siRNA sense strand
agaaaugaugucugaaguu

SEQ ID NO: 1584341 - RNA, 19 nt, Homo sapiens
  misc_RNA (1)...(19): siRNA sense strand
ggaugagcuuaaugguguu

SEQ ID NO: 1584342 - RNA, 19 nt, Homo sapiens
  misc_RNA (1)...(19): siRNA sense strand
uaagccagagauucacuuu

SEQ ID NO: 1584343 - RNA, 19 nt, Homo sapiens
  misc_RNA (1)...(19): siRNA sense strand
gccucucaaucacgccuua

SEQ ID NO: 1584344 - RNA, 19 nt, Homo sapiens
  misc_RNA (1)...(19): siRNA sense strand
ugacaccuccaguucuuug

SEQ ID NO: 1584345 - RNA, 19 nt, Homo sapiens
  misc_RNA (1)...(19): siRNA sense strand
cuucaucuguacugcuuga

SEQ ID NO: 1584346 - RNA, 19 nt, Homo sapiens
  misc_RNA (1)...(19): siRNA sense strand
gccugaaguuucggccaua

SEQ ID NO: 1584347 - RNA, 19 nt, Homo sapiens
  misc_RNA (1)...(19): siRNA sense strand
gagagcucaucaaggcaau

SEQ ID NO: 1584348 - RNA, 19 nt, Homo sapiens
  misc_RNA (1)...(19): siRNA sense strand
ccaguucuuugcugacaag

SEQ ID NO: 1584349 - RNA, 19 nt, Homo sapiens
  misc_RNA (1)...(19): siRNA sense strand
acaaauacgugaaguguuu

SEQ ID NO: 1584350 - RNA, 19 nt, Homo sapiens
  misc_RNA (1)...(19): siRNA sense strand
ggacagagaccuuacaaau

SEQ ID NO: 1584351 - RNA, 19 nt, Homo sapiens
  misc_RNA (1)...(19): siRNA sense strand
gagaaaccauaucaaugua

SEQ ID NO: 1584352 - RNA, 19 nt, Homo sapiens
  misc_RNA (1)...(19): siRNA sense strand
agagaaaccuuacaaaugu

SEQ ID NO: 1584353 - RNA, 19 nt, Homo sapiens
  misc_RNA (1)...(19): siRNA sense strand
agagaaaccuuacaaaugu

SEQ ID NO: 1584354 - RNA, 19 nt, Homo sapiens
  misc_RNA (1)...(19): siRNA sense strand
agagaaaccuuacaaaugu

SEQ ID NO: 1584355 - RNA, 19 nt, Homo sapiens
  misc_RNA (1)...(19): siRNA sense strand
agagaaaccuuacaaaugu

SEQ ID NO: 1584356 - RNA, 19 nt, Homo sapiens
  misc_RNA (1)...(19): siRNA sense strand
uaacaucccuccagaagau

SEQ ID NO: 1584357 - RNA, 19 nt, Homo sapiens
  misc_RNA (1)...(19): siRNA sense strand
gagagaaaccuuacaaaug

SEQ ID NO: 1584358 - RNA, 19 nt, Homo sapiens
  misc_RNA (1)...(19): siRNA sense strand
gagagaaaccuuacaaaug

SEQ ID NO: 1584359 - RNA, 19 nt, Homo sapiens
  misc_RNA (1)...(19): siRNA sense strand
gagagaaaccuuacaaaug

SEQ ID NO: 1584360 - RNA, 19 nt, Homo sapiens
  misc_RNA (1)...(19): siRNA sense strand
gagagaaaccuuacaaaug

SEQ ID NO: 1584361 - RNA, 19 nt, Homo sapiens
  misc_RNA (1)...(19): siRNA sense strand
caacauaagagaauccaua

SEQ ID NO: 1584362 - RNA, 19 nt, Homo sapiens
  misc_RNA (1)...(19): siRNA sense strand
gagagaagccuuacauaug

SEQ ID NO: 1584363 - RNA, 19 nt, Homo sapiens
  misc_RNA (1)...(19): siRNA sense strand
acagagaccuuacaaaugu

SEQ ID NO: 1584364 - RNA, 19 nt, Homo sapiens
  misc_RNA (1)...(19): siRNA sense strand
gcagaguguuucuauaaga

SEQ ID NO: 1584365 - RNA, 19 nt, Homo sapiens
  misc_RNA (1)...(19): siRNA sense strand
cuacagagauuucaaacug

SEQ ID NO: 1584366 - RNA, 19 nt, Homo sapiens
  misc_RNA (1)...(19): siRNA sense strand
guucgaaccucacuaauca

SEQ ID NO: 1584367 - RNA, 19 nt, Homo sapiens
  misc_RNA (1)...(19): siRNA sense strand
ggcaaggucuguagucaaa

SEQ ID NO: 1584368 - RNA, 19 nt, Homo sapiens
  misc_RNA (1)...(19): siRNA sense strand
ggagagaagccuuacauau

SEQ ID NO: 1584369 - RNA, 19 nt, Homo sapiens
  misc_RNA (1)...(19): siRNA sense strand
gaacuacagagauuucaaa

SEQ ID NO: 1584370 - RNA, 19 nt, Homo sapiens
  misc_RNA (1)...(19): siRNA sense strand
ggaaugccuuugaccugua

SEQ ID NO: 1584371 - RNA, 19 nt, Homo sapiens
  misc_RNA (1)...(19): siRNA sense strand
gacaagccauuuauaagga

SEQ ID NO: 1584372 - RNA, 19 nt, Homo sapiens
  misc_RNA (1)...(19): siRNA sense strand
gccauggcaucaacaauuu

SEQ ID NO: 1584373 - RNA, 19 nt, Homo sapiens
  misc_RNA (1)...(19): siRNA sense strand
ggagagaaaccauaucaau

SEQ ID NO: 1584374 - RNA, 19 nt, Homo sapiens
  misc_RNA (1)...(19): siRNA sense strand
ggagagaaaccuuacaaau

SEQ ID NO: 1584375 - RNA, 19 nt, Homo sapiens
  misc_RNA (1)...(19): siRNA sense strand
ggagagaaaccuuacaaau

SEQ ID NO: 1584376 - RNA, 19 nt, Homo sapiens
  misc_RNA (1)...(19): siRNA sense strand
ggagagaaaccuuacaaau

SEQ ID NO: 1584377 - RNA, 19 nt, Homo sapiens
  misc_RNA (1)...(19): siRNA sense strand
ggagagaaaccuuacaaau

SEQ ID NO: 1584378 - RNA, 19 nt, Homo sapiens
  misc_RNA (1)...(19): siRNA sense strand
agagaagccuuacauaugu

SEQ ID NO: 1584379 - RNA, 19 nt, Homo sapiens
  misc_RNA (1)...(19): siRNA sense strand
gagagaaaccacacaaaug

SEQ ID NO: 1584380 - RNA, 19 nt, Homo sapiens
  misc_RNA (1)...(19): siRNA sense strand
gguaaugcuuuauuccaaa

SEQ ID NO: 1584381 - RNA, 19 nt, Homo sapiens
  misc_RNA (1)...(19): siRNA sense strand
ggagagaaaccacacaaau

SEQ ID NO: 1584382 - RNA, 19 nt, Homo sapiens
  misc_RNA (1)...(19): siRNA sense strand
ggaaagccauggcaucaac

SEQ ID NO: 1584383 - RNA, 19 nt, Homo sapiens
  misc_RNA (1)...(19): siRNA sense strand
guucaaaccuuggagauca

SEQ ID NO: 1584384 - RNA, 19 nt, Homo sapiens
  misc_RNA (1)...(19): siRNA sense strand
gagagaaaccauaucaaug

SEQ ID NO: 1584385 - RNA, 19 nt, Homo sapiens
  misc_RNA (1)...(19): siRNA sense strand
ucaaggauguggccauaga

SEQ ID NO: 1584386 - RNA, 19 nt, Homo sapiens
  misc_RNA (1)...(19): siRNA sense strand
gaacacacauuagagaaaa

SEQ ID NO: 1584387 - RNA, 19 nt, Homo sapiens
  misc_RNA (1)...(19): siRNA sense strand
gaaugccuuugaccuguaa

SEQ ID NO: 1584388 - RNA, 19 nt, Homo sapiens
  misc_RNA (1)...(19): siRNA sense strand
gaagaugauauuucuguug

SEQ ID NO: 1584389 - RNA, 19 nt, Homo sapiens
  misc_RNA (1)...(19): siRNA sense strand
ggagaacacacauuagaga

SEQ ID NO: 1584390 - RNA, 19 nt, Homo sapiens
  misc_RNA (1)...(19): siRNA sense strand
gaaaauaugccuaaguuug

SEQ ID NO: 1584391 - RNA, 19 nt, Homo sapiens
  misc_RNA (1)...(19): siRNA sense strand
gaacaucagagaauucaca

SEQ ID NO: 1584392 - RNA, 19 nt, Homo sapiens
  misc_RNA (1)...(19): siRNA sense strand
gcaagggauuaucaccaaa

SEQ ID NO: 1584393 - RNA, 19 nt, Homo sapiens
  misc_RNA (1)...(19): siRNA sense strand
uaucaaacguucacaccuu

SEQ ID NO: 1584394 - RNA, 19 nt, Homo sapiens
  misc_RNA (1)...(19): siRNA sense strand
gagaaaccacacaaaugua

SEQ ID NO: 1584395 - RNA, 19 nt, Homo sapiens
  misc_RNA (1)...(19): siRNA sense strand
ucacuaggcaucagaauau

SEQ ID NO: 1584396 - RNA, 19 nt, Homo sapiens
  misc_RNA (1)...(19): siRNA sense strand
caugacaagccauuuauaa

SEQ ID NO: 1584397 - RNA, 19 nt, Homo sapiens
  misc_RNA (1)...(19): siRNA sense strand
ccauagaauucucucaaga

SEQ ID NO: 1584398 - RNA, 19 nt, Homo sapiens
  misc_RNA (1)...(19): siRNA sense strand
gggaaaauaugccuaaguu

SEQ ID NO: 1584399 - RNA, 19 nt, Homo sapiens
  misc_RNA (1)...(19): siRNA sense strand
ggucaucagagaacucaua

SEQ ID NO: 1584400 - RNA, 19 nt, Homo sapiens
  misc_RNA (1)...(19): siRNA sense strand
guucaagccuuacccaaca

SEQ ID NO: 1584401 - RNA, 19 nt, Homo sapiens
  misc_RNA (1)...(19): siRNA sense strand
aagcagaguguuucuauaa

SEQ ID NO: 1584402 - RNA, 19 nt, Homo sapiens
  misc_RNA (1)...(19): siRNA sense strand
aaagcagaguguuucuaua

SEQ ID NO: 1584403 - RNA, 19 nt, Homo sapiens
  misc_RNA (1)...(19): siRNA sense strand
gcaaagcuuuuacccaauu

SEQ ID NO: 1584404 - RNA, 19 nt, Homo sapiens
  misc_RNA (1)...(19): siRNA sense strand
gaugcauacuggagagaaa

SEQ ID NO: 1584405 - RNA, 19 nt, Homo sapiens
  misc_RNA (1)...(19): siRNA sense strand
gacagagaccuuacaaaug

SEQ ID NO: 1584406 - RNA, 19 nt, Homo sapiens
  misc_RNA (1)...(19): siRNA sense strand
uaugggagaacacacauua

SEQ ID NO: 1584407 - RNA, 19 nt, Homo sapiens
  misc_RNA (1)...(19): siRNA sense strand
uaaagcagaguguuucuau

SEQ ID NO: 1584408 - RNA, 19 nt, Homo sapiens
  misc_RNA (1)...(19): siRNA sense strand
gauaacaucccuccagaag

SEQ ID NO: 1584409 - RNA, 19 nt, Homo sapiens
  misc_RNA (1)...(19): siRNA sense strand
auucaaaucuugcaaguca

SEQ ID NO: 1584410 - RNA, 19 nt, Homo sapiens
  misc_RNA (1)...(19): siRNA sense strand
guaugaauguaauccaguu

SEQ ID NO: 1584411 - RNA, 19 nt, Homo sapiens
  misc_RNA (1)...(19): siRNA sense strand
uggcugaacuacagagauu

SEQ ID NO: 1584412 - RNA, 19 nt, Homo sapiens
  misc_RNA (1)...(19): siRNA sense strand
ggaaacaaauacgugaagu

SEQ ID NO: 1584413 - RNA, 19 nt, Homo sapiens
  misc_RNA (1)...(19): siRNA sense strand
gggauuaucaccaaaggaa

SEQ ID NO: 1584414 - RNA, 19 nt, Homo sapiens
  misc_RNA (1)...(19): siRNA sense strand
gaacucauacuggagagaa

SEQ ID NO: 1584415 - RNA, 19 nt, Homo sapiens
  misc_RNA (1)...(19): siRNA sense strand
gaaccugcuuucucucgau

SEQ ID NO: 1584416 - RNA, 19 nt, Homo sapiens
  misc_RNA (1)...(19): siRNA sense strand
ggauguggccauagaauuc

SEQ ID NO: 1584417 - RNA, 19 nt, Homo sapiens
  misc_RNA (1)...(19): siRNA sense strand
gaaccucacuaaucaucag

SEQ ID NO: 1584418 - RNA, 19 nt, Homo sapiens
  misc_RNA (1)...(19): siRNA sense strand
gaaacaaauacgugaagug

SEQ ID NO: 1584419 - RNA, 19 nt, Homo sapiens
  misc_RNA (1)...(19): siRNA sense strand
guacagggacgugauguug

SEQ ID NO: 1584420 - RNA, 19 nt, Homo sapiens
  misc_RNA (1)...(19): siRNA sense strand
agagaaaccauaucaaugu

SEQ ID NO: 1584421 - RNA, 19 nt, Homo sapiens
  misc_RNA (1)...(19): siRNA sense strand
gaugauauuucuguuggau

SEQ ID NO: 1584422 - RNA, 19 nt, Homo sapiens
  misc_RNA (1)...(19): siRNA sense strand
agaaaccacacaaauguaa

SEQ ID NO: 1584423 - RNA, 19 nt, Homo sapiens
  misc_RNA (1)...(19): siRNA sense strand
ucacuaaucaucagagaau

SEQ ID NO: 1584424 - RNA, 19 nt, Homo sapiens
  misc_RNA (1)...(19): siRNA sense strand
gagaacacacauuagagaa

SEQ ID NO: 1584425 - RNA, 19 nt, Homo sapiens
  misc_RNA (1)...(19): siRNA sense strand
guaauccaguugagaaguc

SEQ ID NO: 1584426 - RNA, 19 nt, Homo sapiens
  misc_RNA (1)...(19): siRNA sense strand
caaaucuuacucagcauaa

SEQ ID NO: 1584427 - RNA, 19 nt, Homo sapiens
  misc_RNA (1)...(19): siRNA sense strand
agagaaaccacacaaaugu

SEQ ID NO: 1584428 - RNA, 19 nt, Homo sapiens
  misc_RNA (1)...(19): siRNA sense strand
uaucaauaguuccucaguu

SEQ ID NO: 1584429 - RNA, 19 nt, Homo sapiens
  misc_RNA (1)...(19): siRNA sense strand
uugcaaaccucacuagaca

SEQ ID NO: 1584430 - RNA, 19 nt, Homo sapiens
  misc_RNA (1)...(19): siRNA sense strand
cauaagagaauccauacug

SEQ ID NO: 1584431 - RNA, 19 nt, Homo sapiens
  misc_RNA (1)...(19): siRNA sense strand
aaaguucgaaccucacuaa

SEQ ID NO: 1584432 - RNA, 19 nt, Homo sapiens
  misc_RNA (1)...(19): siRNA sense strand
aucaauaguuccucaguuu

SEQ ID NO: 1584433 - RNA, 19 nt, Homo sapiens
  misc_RNA (1)...(19): siRNA sense strand
gagauagugcacaccagua

SEQ ID NO: 1584434 - RNA, 19 nt, Homo sapiens
  misc_RNA (1)...(19): siRNA sense strand
gguaugccggaaacaaaua

SEQ ID NO: 1584435 - RNA, 19 nt, Homo sapiens
  misc_RNA (1)...(19): siRNA sense strand
aaacaaauacgugaagugu

SEQ ID NO: 1584436 - RNA, 19 nt, Homo sapiens
  misc_RNA (1)...(19): siRNA sense strand
cagaaaagaucaacaacau

SEQ ID NO: 1584437 - RNA, 19 nt, Homo sapiens
  misc_RNA (1)...(19): siRNA sense strand
caucagagaacucauacug

SEQ ID NO: 1584438 - RNA, 19 nt, Homo sapiens
  misc_RNA (1)...(19): siRNA sense strand
uauacauccuggagagaaa

SEQ ID NO: 1584439 - RNA, 19 nt, Homo sapiens
  misc_RNA (1)...(19): siRNA sense strand
ucaaaucuuacucagcaua

SEQ ID NO: 1584440 - RNA, 19 nt, Homo sapiens
  misc_RNA (1)...(19): siRNA sense strand
ccucaauacauuucucuuu

SEQ ID NO: 1584441 - RNA, 19 nt, Homo sapiens
  misc_RNA (1)...(19): siRNA sense strand
cagggacuguuuacauuca

SEQ ID NO: 1584442 - RNA, 19 nt, Homo sapiens
  misc_RNA (1)...(19): siRNA sense strand
gggagaaaauguaugaaug

SEQ ID NO: 1584443 - RNA, 19 nt, Homo sapiens
  misc_RNA (1)...(19): siRNA sense strand
caauaguuccucaguuuca

SEQ ID NO: 1584444 - RNA, 19 nt, Homo sapiens
  misc_RNA (1)...(19): siRNA sense strand
gaaaccacacaaauguaau

SEQ ID NO: 1584445 - RNA, 19 nt, Homo sapiens
  misc_RNA (1)...(19): siRNA sense strand
gggacgugauguuggagaa

SEQ ID NO: 1584446 - RNA, 19 nt, Homo sapiens
  misc_RNA (1)...(19): siRNA sense strand
cucagggacuguuuacauu

SEQ ID NO: 1584447 - RNA, 19 nt, Homo sapiens
  misc_RNA (1)...(19): siRNA sense strand
acagggacgugauguugga

SEQ ID NO: 1584448 - RNA, 19 nt, Homo sapiens
  misc_RNA (1)...(19): siRNA sense strand
gccauagaauucucucaag

SEQ ID NO: 1584449 - RNA, 19 nt, Homo sapiens
  misc_RNA (1)...(19): siRNA sense strand
ggacagaaauggaaaugua

SEQ ID NO: 1584450 - RNA, 19 nt, Homo sapiens
  misc_RNA (1)...(19): siRNA sense strand
ggaaguauguucuacaaga

SEQ ID NO: 1584451 - RNA, 19 nt, Homo sapiens
  misc_RNA (1)...(19): siRNA sense strand
ucagaaaccuucagggaaa

SEQ ID NO: 1584452 - RNA, 19 nt, Homo sapiens
  misc_RNA (1)...(19): siRNA sense strand
acacaaauauggcaaaugu

SEQ ID NO: 1584453 - RNA, 19 nt, Homo sapiens
  misc_RNA (1)...(19): siRNA sense strand
cagaaggaaugaaaugauu

SEQ ID NO: 1584454 - RNA, 19 nt, Homo sapiens
  misc_RNA (1)...(19): siRNA sense strand
ccacuacccugaaagcaaa

SEQ ID NO: 1584455 - RNA, 19 nt, Homo sapiens
  misc_RNA (1)...(19): siRNA sense strand
uggagaaacuuugccauua

SEQ ID NO: 1584456 - RNA, 19 nt, Homo sapiens
  misc_RNA (1)...(19): siRNA sense strand
gaagucaagugaaacgaau

SEQ ID NO: 1584457 - RNA, 19 nt, Homo sapiens
  misc_RNA (1)...(19): siRNA sense strand
ccuaauuccuggagugaua

SEQ ID NO: 1584458 - RNA, 19 nt, Homo sapiens
  misc_RNA (1)...(19): siRNA sense strand
gaaauggaaauguaugcua

SEQ ID NO: 1584459 - RNA, 19 nt, Homo sapiens
  misc_RNA (1)...(19): siRNA sense strand
ggagaaacuuugccauuac

SEQ ID NO: 1584460 - RNA, 19 nt, Homo sapiens
  misc_RNA (1)...(19): siRNA sense strand
agacuaugcucagguauuu

SEQ ID NO: 1584461 - RNA, 19 nt, Homo sapiens
  misc_RNA (1)...(19): siRNA sense strand
gcucagguauuuaaagauc

SEQ ID NO: 1584462 - RNA, 19 nt, Homo sapiens
  misc_RNA (1)...(19): siRNA sense strand
caauuuggauccucuguuc

SEQ ID NO: 1584463 - RNA, 19 nt, Homo sapiens
  misc_RNA (1)...(19): siRNA sense strand
caacagggcagcagacaau

SEQ ID NO: 1584464 - RNA, 19 nt, Homo sapiens
  misc_RNA (1)...(19): siRNA sense strand
gcugugaacccuuuauuga

SEQ ID NO: 1584465 - RNA, 19 nt, Homo sapiens
  misc_RNA (1)...(19): siRNA sense strand
gauccucuguucuaccaaa

SEQ ID NO: 1584466 - RNA, 19 nt, Homo sapiens
  misc_RNA (1)...(19): siRNA sense strand
ggaauugagcgagguagua

SEQ ID NO: 1584467 - RNA, 19 nt, Homo sapiens
  misc_RNA (1)...(19): siRNA sense strand
ucacaccacuacccugaaa

SEQ ID NO: 1584468 - RNA, 19 nt, Homo sapiens
  misc_RNA (1)...(19): siRNA sense strand
gggauacccuuccucuaug

SEQ ID NO: 1584469 - RNA, 19 nt, Homo sapiens
  misc_RNA (1)...(19): siRNA sense strand
aaccagaagucaagugaaa

SEQ ID NO: 1584470 - RNA, 19 nt, Homo sapiens
  misc_RNA (1)...(19): siRNA sense strand
caacugcaccacacuuuga

SEQ ID NO: 1584471 - RNA, 19 nt, Homo sapiens
  misc_RNA (1)...(19): siRNA sense strand
gcaaccagaagucaaguga

SEQ ID NO: 1584472 - RNA, 19 nt, Homo sapiens
  misc_RNA (1)...(19): siRNA sense strand
cagcaaaggagaauggaaa

SEQ ID NO: 1584473 - RNA, 19 nt, Homo sapiens
  misc_RNA (1)...(19): siRNA sense strand
ugaagaggaucauuaugca

SEQ ID NO: 1584474 - RNA, 19 nt, Homo sapiens
  misc_RNA (1)...(19): siRNA sense strand
gcagauacauccccucuuc

SEQ ID NO: 1584475 - RNA, 19 nt, Homo sapiens
  misc_RNA (1)...(19): siRNA sense strand
cacaugcacugguuacaau

SEQ ID NO: 1584476 - RNA, 19 nt, Homo sapiens
  misc_RNA (1)...(19): siRNA sense strand
gaauugagcgagguaguau

SEQ ID NO: 1584477 - RNA, 19 nt, Homo sapiens
  misc_RNA (1)...(19): siRNA sense strand
gagaaacuuugccauuacu

SEQ ID NO: 1584478 - RNA, 19 nt, Homo sapiens
  misc_RNA (1)...(19): siRNA sense strand
cgacagcucuugccaacac

SEQ ID NO: 1584479 - RNA, 19 nt, Homo sapiens
  misc_RNA (1)...(19): siRNA sense strand
gaaucuuucuuuggaugaa

SEQ ID NO: 1584480 - RNA, 19 nt, Homo sapiens
  misc_RNA (1)...(19): siRNA sense strand
uaaaggcaguggccagaag

SEQ ID NO: 1584481 - RNA, 19 nt, Homo sapiens
  misc_RNA (1)...(19): siRNA sense strand
caaaagacccagacauuga

SEQ ID NO: 1584482 - RNA, 19 nt, Homo sapiens
  misc_RNA (1)...(19): siRNA sense strand
ggaacacaugcacugguua

SEQ ID NO: 1584483 - RNA, 19 nt, Homo sapiens
  misc_RNA (1)...(19): siRNA sense strand
gaaacuuugccauuacuca

SEQ ID NO: 1584484 - RNA, 19 nt, Homo sapiens
  misc_RNA (1)...(19): siRNA sense strand
ucgaggcacuaugggauua

SEQ ID NO: 1584485 - RNA, 19 nt, Homo sapiens
  misc_RNA (1)...(19): siRNA sense strand
gaagaggaucauuaugcaa

SEQ ID NO: 1584486 - RNA, 19 nt, Homo sapiens
  misc_RNA (1)...(19): siRNA sense strand
ugagcgagguaguaugaga

SEQ ID NO: 1584487 - RNA, 19 nt, Homo sapiens
  misc_RNA (1)...(19): siRNA sense strand
caauugauggagaaacuuu

SEQ ID NO: 1584488 - RNA, 19 nt, Homo sapiens
  misc_RNA (1)...(19): siRNA sense strand
uugcguuccuucccaauuu

SEQ ID NO: 1584489 - RNA, 19 nt, Homo sapiens
  misc_RNA (1)...(19): siRNA sense strand
cagcagacaaucccacuga

SEQ ID NO: 1584490 - RNA, 19 nt, Homo sapiens
  misc_RNA (1)...(19): siRNA sense strand
gaacacaugcacugguuac

SEQ ID NO: 1584491 - RNA, 19 nt, Homo sapiens
  misc_RNA (1)...(19): siRNA sense strand
ugugaacccuuuauugaca

SEQ ID NO: 1584492 - RNA, 19 nt, Homo sapiens
  misc_RNA (1)...(19): siRNA sense strand
gcaguggccagaaggaaug

SEQ ID NO: 1584493 - RNA, 19 nt, Homo sapiens
  misc_RNA (1)...(19): siRNA sense strand
acaaauauggcaaaugugu

SEQ ID NO: 1584494 - RNA, 19 nt, Homo sapiens
  misc_RNA (1)...(19): siRNA sense strand
aaauauggcaaauguguug

SEQ ID NO: 1584495 - RNA, 19 nt, Homo sapiens
  misc_RNA (1)...(19): siRNA sense strand
ggagugauacaaugaacau

SEQ ID NO: 1584496 - RNA, 19 nt, Homo sapiens
  misc_RNA (1)...(19): siRNA sense strand
gcaacugcaccacacuuug

SEQ ID NO: 1584497 - RNA, 19 nt, Homo sapiens
  misc_RNA (1)...(19): siRNA sense strand
uuuaccaccugaauccaua

SEQ ID NO: 1584498 - RNA, 19 nt, Homo sapiens
  misc_RNA (1)...(19): siRNA sense strand
gaggcacuaugggauuaaa

SEQ ID NO: 1584499 - RNA, 19 nt, Homo sapiens
  misc_RNA (1)...(19): siRNA sense strand
agaaguggaccguggauga

SEQ ID NO: 1584500 - RNA, 19 nt, Homo sapiens
  misc_RNA (1)...(19): siRNA sense strand
agacagugaugcugagagu

SEQ ID NO: 1584501 - RNA, 19 nt, Homo sapiens
  misc_RNA (1)...(19): siRNA sense strand
gacagaaauggaaauguau

SEQ ID NO: 1584502 - RNA, 19 nt, Homo sapiens
  misc_RNA (1)...(19): siRNA sense strand
ugggaaguauguucuacaa

SEQ ID NO: 1584503 - RNA, 19 nt, Homo sapiens
  misc_RNA (1)...(19): siRNA sense strand
ucaagugaaacgaaugaaa

SEQ ID NO: 1584504 - RNA, 19 nt, Homo sapiens
  misc_RNA (1)...(19): siRNA sense strand
ccaccugaauccauaaagg

SEQ ID NO: 1584505 - RNA, 19 nt, Homo sapiens
  misc_RNA (1)...(19): siRNA sense strand
uaagacaagcauuugauca

SEQ ID NO: 1584506 - RNA, 19 nt, Homo sapiens
  misc_RNA (1)...(19): siRNA sense strand
guucuaccaaacacaaaua

SEQ ID NO: 1584507 - RNA, 19 nt, Homo sapiens
  misc_RNA (1)...(19): siRNA sense strand
gaugugcacagcuucauuc

SEQ ID NO: 1584508 - RNA, 19 nt, Homo sapiens
  misc_RNA (1)...(19): siRNA sense strand
aagaggaucauuaugcaaa

SEQ ID NO: 1584509 - RNA, 19 nt, Homo sapiens
  misc_RNA (1)...(19): siRNA sense strand
caaacacaaauauggcaaa

SEQ ID NO: 1584510 - RNA, 19 nt, Homo sapiens
  misc_RNA (1)...(19): siRNA sense strand
cacagaagcacccucagaa

SEQ ID NO: 1584511 - RNA, 19 nt, Homo sapiens
  misc_RNA (1)...(19): siRNA sense strand
ucacagaagcacccucaga

SEQ ID NO: 1584512 - RNA, 19 nt, Homo sapiens
  misc_RNA (1)...(19): siRNA sense strand
ggauacccuuccucuaugg

SEQ ID NO: 1584513 - RNA, 19 nt, Homo sapiens
  misc_RNA (1)...(19): siRNA sense strand
ggaaucuuucuuuggauga

SEQ ID NO: 1584514 - RNA, 19 nt, Homo sapiens
  misc_RNA (1)...(19): siRNA sense strand
acagguaucucagcaugug

SEQ ID NO: 1584515 - RNA, 19 nt, Homo sapiens
  misc_RNA (1)...(19): siRNA sense strand
gaaguggaccguggaugau

SEQ ID NO: 1584516 - RNA, 19 nt, Homo sapiens
  misc_RNA (1)...(19): siRNA sense strand
caaauauggcaaauguguu

SEQ ID NO: 1584517 - RNA, 19 nt, Homo sapiens
  misc_RNA (1)...(19): siRNA sense strand
gagcgagguaguaugagaa

SEQ ID NO: 1584518 - RNA, 19 nt, Homo sapiens
  misc_RNA (1)...(19): siRNA sense strand
uggaugaugugcacagcuu

SEQ ID NO: 1584519 - RNA, 19 nt, Homo sapiens
  misc_RNA (1)...(19): siRNA sense strand
gagcucgagcccacccaua

SEQ ID NO: 1584520 - RNA, 19 nt, Homo sapiens
  misc_RNA (1)...(19): siRNA sense strand
gcaaaagacccagacauug

SEQ ID NO: 1584521 - RNA, 19 nt, Homo sapiens
  misc_RNA (1)...(19): siRNA sense strand
agucggaucuacccagguu

SEQ ID NO: 1584522 - RNA, 19 nt, Homo sapiens
  misc_RNA (1)...(19): siRNA sense strand
gcagacaaucccacugauc

SEQ ID NO: 1584523 - RNA, 19 nt, Homo sapiens
  misc_RNA (1)...(19): siRNA sense strand
aggaacacaugcacugguu

SEQ ID NO: 1584524 - RNA, 19 nt, Homo sapiens
  misc_RNA (1)...(19): siRNA sense strand
caagugaaacgaaugaaaa

SEQ ID NO: 1584525 - RNA, 19 nt, Homo sapiens
  misc_RNA (1)...(19): siRNA sense strand
ccagaaggaaugaaaugau

SEQ ID NO: 1584526 - RNA, 19 nt, Homo sapiens
  misc_RNA (1)...(19): siRNA sense strand
ugccauuacucacagaaga

SEQ ID NO: 1584527 - RNA, 19 nt, Homo sapiens
  misc_RNA (1)...(19): siRNA sense strand
acagaagcacccucagaaa

SEQ ID NO: 1584528 - RNA, 19 nt, Homo sapiens
  misc_RNA (1)...(19): siRNA sense strand
cuaccaaacacaaauaugg

SEQ ID NO: 1584529 - RNA, 19 nt, Homo sapiens
  misc_RNA (1)...(19): siRNA sense strand
ggcaacugcaccacacuuu

SEQ ID NO: 1584530 - RNA, 19 nt, Homo sapiens
  misc_RNA (1)...(19): siRNA sense strand
ggccagaaggaaugaaaug

SEQ ID NO: 1584531 - RNA, 19 nt, Homo sapiens
  misc_RNA (1)...(19): siRNA sense strand
cagcaugugggaaguaugu

SEQ ID NO: 1584532 - RNA, 19 nt, Homo sapiens
  misc_RNA (1)...(19): siRNA sense strand
acuaugcucagguauuuaa

SEQ ID NO: 1584533 - RNA, 19 nt, Homo sapiens
  misc_RNA (1)...(19): siRNA sense strand
gaagcacccucagaaaccu

SEQ ID NO: 1584534 - RNA, 19 nt, Homo sapiens
  misc_RNA (1)...(19): siRNA sense strand
ucaugcaauugauggagaa

SEQ ID NO: 1584535 - RNA, 19 nt, Homo sapiens
  misc_RNA (1)...(19): siRNA sense strand
augcucagguauuuaaaga

SEQ ID NO: 1584536 - RNA, 19 nt, Homo sapiens
  misc_RNA (1)...(19): siRNA sense strand
cagacuaugcucagguauu

SEQ ID NO: 1584537 - RNA, 19 nt, Homo sapiens
  misc_RNA (1)...(19): siRNA sense strand
gagcaucuucgaggcacua

SEQ ID NO: 1584538 - RNA, 19 nt, Homo sapiens
  misc_RNA (1)...(19): siRNA sense strand
gcuauuuaccagcaaagga

SEQ ID NO: 1584539 - RNA, 19 nt, Homo sapiens
  misc_RNA (1)...(19): siRNA sense strand
aagacaagcauuugaucaa

SEQ ID NO: 1584540 - RNA, 19 nt, Homo sapiens
  misc_RNA (1)...(19): siRNA sense strand
aaaauucagucacagguau

SEQ ID NO: 1584541 - RNA, 19 nt, Homo sapiens
  misc_RNA (1)...(19): siRNA sense strand
gcacccagcaaccagaagu

SEQ ID NO: 1584542 - RNA, 19 nt, Homo sapiens
  misc_RNA (1)...(19): siRNA sense strand
gccagaaggaaugaaauga

SEQ ID NO: 1584543 - RNA, 19 nt, Homo sapiens
  misc_RNA (1)...(19): siRNA sense strand
acagugaugcugagaguuc

SEQ ID NO: 1584544 - RNA, 19 nt, Homo sapiens
  misc_RNA (1)...(19): siRNA sense strand
agacaagcauuugaucaac

SEQ ID NO: 1584545 - RNA, 19 nt, Homo sapiens
  misc_RNA (1)...(19): siRNA sense strand
cauacugccaggacagaaa

SEQ ID NO: 1584546 - RNA, 19 nt, Homo sapiens
  misc_RNA (1)...(19): siRNA sense strand
ccuauaagacaagcauuug

SEQ ID NO: 1584547 - RNA, 19 nt, Homo sapiens
  misc_RNA (1)...(19): siRNA sense strand
gcaauugauggagaaacuu

SEQ ID NO: 1584548 - RNA, 19 nt, Homo sapiens
  misc_RNA (1)...(19): siRNA sense strand
gcugagaguuccaaaaguc

SEQ ID NO: 1584549 - RNA, 19 nt, Homo sapiens
  misc_RNA (1)...(19): siRNA sense strand
ggaaguacgugaaaccaaa

SEQ ID NO: 1584550 - RNA, 19 nt, Homo sapiens
  misc_RNA (1)...(19): siRNA sense strand
ccaagaacauugaaauuga

SEQ ID NO: 1584551 - RNA, 19 nt, Homo sapiens
  misc_RNA (1)...(19): siRNA sense strand
gaagacccauuacaucguu

SEQ ID NO: 1584552 - RNA, 19 nt, Homo sapiens
  misc_RNA (1)...(19): siRNA sense strand
gaagguagccugcaucaca

SEQ ID NO: 1584553 - RNA, 19 nt, Homo sapiens
  misc_RNA (1)...(19): siRNA sense strand
ucaaggagcuggugcugaa

SEQ ID NO: 1584554 - RNA, 19 nt, Homo sapiens
  misc_RNA (1)...(19): siRNA sense strand
ggaagaaaauguggacuua

SEQ ID NO: 1584555 - RNA, 19 nt, Homo sapiens
  misc_RNA (1)...(19): siRNA sense strand
gcuacaaccucccaagcua

SEQ ID NO: 1584556 - RNA, 19 nt, Homo sapiens
  misc_RNA (1)...(19): siRNA sense strand
cugaggaccuacuggauua

SEQ ID NO: 1584557 - RNA, 19 nt, Homo sapiens
  misc_RNA (1)...(19): siRNA sense strand
gcuaugaguaccucuauaa

SEQ ID NO: 1584558 - RNA, 19 nt, Homo sapiens
  misc_RNA (1)...(19): siRNA sense strand
agaagagccuggagacuga

SEQ ID NO: 1584559 - RNA, 19 nt, Homo sapiens
  misc_RNA (1)...(19): siRNA sense strand
uaauauugcuguggaagaa

SEQ ID NO: 1584560 - RNA, 19 nt, Homo sapiens
  misc_RNA (1)...(19): siRNA sense strand
uaauuugggugaccaguau

SEQ ID NO: 1584561 - RNA, 19 nt, Homo sapiens
  misc_RNA (1)...(19): siRNA sense strand
gagaagaugaggaagagaa

SEQ ID NO: 1584562 - RNA, 19 nt, Homo sapiens
  misc_RNA (1)...(19): siRNA sense strand
agaaagacacguacauuga

SEQ ID NO: 1584563 - RNA, 19 nt, Homo sapiens
  misc_RNA (1)...(19): siRNA sense strand
agagaacaauuuggaagua

SEQ ID NO: 1584564 - RNA, 19 nt, Homo sapiens
  misc_RNA (1)...(19): siRNA sense strand
gaaccauuauuucuacucu

SEQ ID NO: 1584565 - RNA, 19 nt, Homo sapiens
  misc_RNA (1)...(19): siRNA sense strand
gcacugaagaugagguuug

SEQ ID NO: 1584566 - RNA, 19 nt, Homo sapiens
  misc_RNA (1)...(19): siRNA sense strand
gcacuacaccuaucuggau

SEQ ID NO: 1584567 - RNA, 19 nt, Homo sapiens
  misc_RNA (1)...(19): siRNA sense strand
caagaaagacacguacauu

SEQ ID NO: 1584568 - RNA, 19 nt, Homo sapiens
  misc_RNA (1)...(19): siRNA sense strand
gggagauucuucacaguca

SEQ ID NO: 1584569 - RNA, 19 nt, Homo sapiens
  misc_RNA (1)...(19): siRNA sense strand
gaaggagccaagaacauug

SEQ ID NO: 1584570 - RNA, 19 nt, Homo sapiens
  misc_RNA (1)...(19): siRNA sense strand
ggccaagauuucagucauu

SEQ ID NO: 1584571 - RNA, 19 nt, Homo sapiens
  misc_RNA (1)...(19): siRNA sense strand
aagcuugccucucgaaaug

SEQ ID NO: 1584572 - RNA, 19 nt, Homo sapiens
  misc_RNA (1)...(19): siRNA sense strand
uagauucucugacugugaa

SEQ ID NO: 1584573 - RNA, 19 nt, Homo sapiens
  misc_RNA (1)...(19): siRNA sense strand
gagaugugccugccuauag

SEQ ID NO: 1584574 - RNA, 19 nt, Homo sapiens
  misc_RNA (1)...(19): siRNA sense strand
ggaagagaacaauuuggaa

SEQ ID NO: 1584575 - RNA, 19 nt, Homo sapiens
  misc_RNA (1)...(19): siRNA sense strand
gaaagacacguacauugag

SEQ ID NO: 1584576 - RNA, 19 nt, Homo sapiens
  misc_RNA (1)...(19): siRNA sense strand
cagaugagcugcacuacac

SEQ ID NO: 1584577 - RNA, 19 nt, Homo sapiens
  misc_RNA (1)...(19): siRNA sense strand
gccaagaacauugaaauug

SEQ ID NO: 1584578 - RNA, 19 nt, Homo sapiens
  misc_RNA (1)...(19): siRNA sense strand
gaugaacaagugauagauu

SEQ ID NO: 1584579 - RNA, 19 nt, Homo sapiens
  misc_RNA (1)...(19): siRNA sense strand
gccaagauuucagucauug

SEQ ID NO: 1584580 - RNA, 19 nt, Homo sapiens
  misc_RNA (1)...(19): siRNA sense strand
aaagacacguacauugaga

SEQ ID NO: 1584581 - RNA, 19 nt, Homo sapiens
  misc_RNA (1)...(19): siRNA sense strand
gaagcuugccucucgaaau

SEQ ID NO: 1584582 - RNA, 19 nt, Homo sapiens
  misc_RNA (1)...(19): siRNA sense strand
cuggcaagcucaagaaaga

SEQ ID NO: 1584583 - RNA, 19 nt, Homo sapiens
  misc_RNA (1)...(19): siRNA sense strand
ugaaggagccaagaacauu

SEQ ID NO: 1584584 - RNA, 19 nt, Homo sapiens
  misc_RNA (1)...(19): siRNA sense strand
gucaauagguacaagcaau

SEQ ID NO: 1584585 - RNA, 19 nt, Homo sapiens
  misc_RNA (1)...(19): siRNA sense strand
gggagaagaugaggaagag

SEQ ID NO: 1584586 - RNA, 19 nt, Homo sapiens
  misc_RNA (1)...(19): siRNA sense strand
gagcugcacuacaccuauc

SEQ ID NO: 1584587 - RNA, 19 nt, Homo sapiens
  misc_RNA (1)...(19): siRNA sense strand
uaccagagacagccagaua

SEQ ID NO: 1584588 - RNA, 19 nt, Homo sapiens
  misc_RNA (1)...(19): siRNA sense strand
gagccaagaacauugaaau

SEQ ID NO: 1584589 - RNA, 19 nt, Homo sapiens
  misc_RNA (1)...(19): siRNA sense strand
acagccagauaguggaaua

SEQ ID NO: 1584590 - RNA, 19 nt, Homo sapiens
  misc_RNA (1)...(19): siRNA sense strand
caagugauagauucucuga

SEQ ID NO: 1584591 - RNA, 19 nt, Homo sapiens
  misc_RNA (1)...(19): siRNA sense strand
gagaacaauuuggaaguac

SEQ ID NO: 1584592 - RNA, 19 nt, Homo sapiens
  misc_RNA (1)...(19): siRNA sense strand
acaagagaauaggccuuua

SEQ ID NO: 1584593 - RNA, 19 nt, Homo sapiens
  misc_RNA (1)...(19): siRNA sense strand
ggaugaagguagccugcau

SEQ ID NO: 1584594 - RNA, 19 nt, Homo sapiens
  misc_RNA (1)...(19): siRNA sense strand
gcagguaaagggagaagau

SEQ ID NO: 1584595 - RNA, 19 nt, Homo sapiens
  misc_RNA (1)...(19): siRNA sense strand
guacgugaaaccaaaauua

SEQ ID NO: 1584596 - RNA, 19 nt, Homo sapiens
  misc_RNA (1)...(19): siRNA sense strand
ucaccaagaucgaccacau

SEQ ID NO: 1584597 - RNA, 19 nt, Homo sapiens
  misc_RNA (1)...(19): siRNA sense strand
ccucuuuccugcuggcuuu

SEQ ID NO: 1584598 - RNA, 19 nt, Homo sapiens
  misc_RNA (1)...(19): siRNA sense strand
ggagauucuucacagucaa

SEQ ID NO: 1584599 - RNA, 19 nt, Homo sapiens
  misc_RNA (1)...(19): siRNA sense strand
cgacagagugagcgaaaug

SEQ ID NO: 1584600 - RNA, 19 nt, Homo sapiens
  misc_RNA (1)...(19): siRNA sense strand
ccuauagucaggauacuuu

SEQ ID NO: 1584601 - RNA, 19 nt, Homo sapiens
  misc_RNA (1)...(19): siRNA sense strand
caacgaagacacaaaccau

SEQ ID NO: 1584602 - RNA, 19 nt, Homo sapiens
  misc_RNA (1)...(19): siRNA sense strand
gaucacccagucagagaaa

SEQ ID NO: 1584603 - RNA, 19 nt, Homo sapiens
  misc_RNA (1)...(19): siRNA sense strand
gggccaagauuucagucau

SEQ ID NO: 1584604 - RNA, 19 nt, Homo sapiens
  misc_RNA (1)...(19): siRNA sense strand
aaagggagaagaugaggaa

SEQ ID NO: 1584605 - RNA, 19 nt, Homo sapiens
  misc_RNA (1)...(19): siRNA sense strand
ggacaucuccacccucaac

SEQ ID NO: 1584606 - RNA, 19 nt, Homo sapiens
  misc_RNA (1)...(19): siRNA sense strand
gaguaccucuauaauuugg

SEQ ID NO: 1584607 - RNA, 19 nt, Homo sapiens
  misc_RNA (1)...(19): siRNA sense strand
aagaaagacacguacauug

SEQ ID NO: 1584608 - RNA, 19 nt, Homo sapiens
  misc_RNA (1)...(19): siRNA sense strand
guaauauugcuguggaaga

SEQ ID NO: 1584609 - RNA, 19 nt, Homo sapiens
  misc_RNA (1)...(19): siRNA sense strand
acgagaccgucaauaggua

SEQ ID NO: 1584610 - RNA, 19 nt, Homo sapiens
  misc_RNA (1)...(19): siRNA sense strand
gaugaggaagagaacaauu

SEQ ID NO: 1584611 - RNA, 19 nt, Homo sapiens
  misc_RNA (1)...(19): siRNA sense strand
ugaggaagagaacaauuug

SEQ ID NO: 1584612 - RNA, 19 nt, Homo sapiens
  misc_RNA (1)...(19): siRNA sense strand
caagauuucagucauugug

SEQ ID NO: 1584613 - RNA, 19 nt, Homo sapiens
  misc_RNA (1)...(19): siRNA sense strand
gguggaagacccauuacau

SEQ ID NO: 1584614 - RNA, 19 nt, Homo sapiens
  misc_RNA (1)...(19): siRNA sense strand
ccucaacaguggcaagaag

SEQ ID NO: 1584615 - RNA, 19 nt, Homo sapiens
  misc_RNA (1)...(19): siRNA sense strand
aguccaggcugaagacaga

SEQ ID NO: 1584616 - RNA, 19 nt, Homo sapiens
  misc_RNA (1)...(19): siRNA sense strand
uggaccauguguuugauga

SEQ ID NO: 1584617 - RNA, 19 nt, Homo sapiens
  misc_RNA (1)...(19): siRNA sense strand
ucacagagcaggucuugac

SEQ ID NO: 1584618 - RNA, 19 nt, Homo sapiens
  misc_RNA (1)...(19): siRNA sense strand
ucaacaaggugcucaugcu

SEQ ID NO: 1584619 - RNA, 19 nt, Homo sapiens
  misc_RNA (1)...(19): siRNA sense strand
cucgaaauguggagagcua

SEQ ID NO: 1584620 - RNA, 19 nt, Homo sapiens
  misc_RNA (1)...(19): siRNA sense strand
gaagaucauccugccugaa

SEQ ID NO: 1584621 - RNA, 19 nt, Homo sapiens
  misc_RNA (1)...(19): siRNA sense strand
agugauagauucucugacu

SEQ ID NO: 1584622 - RNA, 19 nt, Homo sapiens
  misc_RNA (1)...(19): siRNA sense strand
augaacaagugauagauuc

SEQ ID NO: 1584623 - RNA, 19 nt, Homo sapiens
  misc_RNA (1)...(19): siRNA sense strand
gaccauguguuugaugaac

SEQ ID NO: 1584624 - RNA, 19 nt, Homo sapiens
  misc_RNA (1)...(19): siRNA sense strand
ccagccaccuccuuauuuu

SEQ ID NO: 1584625 - RNA, 19 nt, Homo sapiens
  misc_RNA (1)...(19): siRNA sense strand
cugcccaggauguuuauua

SEQ ID NO: 1584626 - RNA, 19 nt, Homo sapiens
  misc_RNA (1)...(19): siRNA sense strand
uauccuccauccguucuuu

SEQ ID NO: 1584627 - RNA, 19 nt, Homo sapiens
  misc_RNA (1)...(19): siRNA sense strand
ggaagacccauuacaucgu

SEQ ID NO: 1584628 - RNA, 19 nt, Homo sapiens
  misc_RNA (1)...(19): siRNA sense strand
ccacuacacguucaacaag

SEQ ID NO: 1584629 - RNA, 19 nt, Homo sapiens
  misc_RNA (1)...(19): siRNA sense strand
gaacaagugauagauucuc

SEQ ID NO: 1584630 - RNA, 19 nt, Homo sapiens
  misc_RNA (1)...(19): siRNA sense strand
guuuguggaccauguguuu

SEQ ID NO: 1584631 - RNA, 19 nt, Homo sapiens
  misc_RNA (1)...(19): siRNA sense strand
gcucccaguugcucuugau

SEQ ID NO: 1584632 - RNA, 19 nt, Homo sapiens
  misc_RNA (1)...(19): siRNA sense strand
caagagaauaggccuuuac

SEQ ID NO: 1584633 - RNA, 19 nt, Homo sapiens
  misc_RNA (1)...(19): siRNA sense strand
gucccgagcuaccucuuuc

SEQ ID NO: 1584634 - RNA, 19 nt, Homo sapiens
  misc_RNA (1)...(19): siRNA sense strand
gggccuuucucacgcuaug

SEQ ID NO: 1584635 - RNA, 19 nt, Homo sapiens
  misc_RNA (1)...(19): siRNA sense strand
gaucaaugaggacgugaag

SEQ ID NO: 1584636 - RNA, 19 nt, Homo sapiens
  misc_RNA (1)...(19): siRNA sense strand
gaacaauuuggaaguacgu

SEQ ID NO: 1584637 - RNA, 19 nt, Homo sapiens
  misc_RNA (1)...(19): siRNA sense strand
ggccuugaccagugagauu

SEQ ID NO: 1584638 - RNA, 19 nt, Homo sapiens
  misc_RNA (1)...(19): siRNA sense strand
ccuggagacugaacacaag

SEQ ID NO: 1584639 - RNA, 19 nt, Homo sapiens
  misc_RNA (1)...(19): siRNA sense strand
gaagcgcacaguggaccua

SEQ ID NO: 1584640 - RNA, 19 nt, Homo sapiens
  misc_RNA (1)...(19): siRNA sense strand
ugaguaccucuauaauuug

SEQ ID NO: 1584641 - RNA, 19 nt, Homo sapiens
  misc_RNA (1)...(19): siRNA sense strand
caagcuaugaguaccucua

SEQ ID NO: 1584642 - RNA, 19 nt, Homo sapiens
  misc_RNA (1)...(19): siRNA sense strand
gcuuguuucugcuccuguu

SEQ ID NO: 1584643 - RNA, 19 nt, Homo sapiens
  misc_RNA (1)...(19): siRNA sense strand
guggaagacccauuacauc

SEQ ID NO: 1584644 - RNA, 19 nt, Homo sapiens
  misc_RNA (1)...(19): siRNA sense strand
ucuaccagccaccuccuua

SEQ ID NO: 1584645 - RNA, 19 nt, Homo sapiens
  misc_RNA (1)...(19): siRNA sense strand
caauuuggaaguacgugaa

SEQ ID NO: 1584646 - RNA, 19 nt, Homo sapiens
  misc_RNA (1)...(19): siRNA sense strand
caucacagagcaggucuug

SEQ ID NO: 1584647 - RNA, 19 nt, Homo sapiens
  misc_RNA (1)...(19): siRNA sense strand
ucaagaaagacacguacau

SEQ ID NO: 1584648 - RNA, 19 nt, Homo sapiens
  misc_RNA (1)...(19): siRNA sense strand
gccuuuaccgucacuuuga

SEQ ID NO: 1584649 - RNA, 19 nt, Homo sapiens
  misc_RNA (1)...(19): siRNA sense strand
gaagacauaugcaucauug

SEQ ID NO: 1584650 - RNA, 19 nt, Homo sapiens
  misc_RNA (1)...(19): siRNA sense strand
ccucuagucuuucagauua

SEQ ID NO: 1584651 - RNA, 19 nt, Homo sapiens
  misc_RNA (1)...(19): siRNA sense strand
agacgcugcuucaagguua

SEQ ID NO: 1584652 - RNA, 19 nt, Homo sapiens
  misc_RNA (1)...(19): siRNA sense strand
gguuaaacaugaugcuuug

SEQ ID NO: 1584653 - RNA, 19 nt, Homo sapiens
  misc_RNA (1)...(19): siRNA sense strand
ggucauagaaaucauagaa

SEQ ID NO: 1584654 - RNA, 19 nt, Homo sapiens
  misc_RNA (1)...(19): siRNA sense strand
gcuucaagguuaaacauga

SEQ ID NO: 1584655 - RNA, 19 nt, Homo sapiens
  misc_RNA (1)...(19): siRNA sense strand
ggcgauuccucuagucuuu

SEQ ID NO: 1584656 - RNA, 19 nt, Homo sapiens
  misc_RNA (1)...(19): siRNA sense strand
ucuauaccauuaugcagua

SEQ ID NO: 1584657 - RNA, 19 nt, Homo sapiens
  misc_RNA (1)...(19): siRNA sense strand
gaugcuuuguauucagaua

SEQ ID NO: 1584658 - RNA, 19 nt, Homo sapiens
  misc_RNA (1)...(19): siRNA sense strand
ugucuacuguuguuacuga

SEQ ID NO: 1584659 - RNA, 19 nt, Homo sapiens
  misc_RNA (1)...(19): siRNA sense strand
ugaagagacacuugagaaa

SEQ ID NO: 1584660 - RNA, 19 nt, Homo sapiens
  misc_RNA (1)...(19): siRNA sense strand
uggcauaguuugugguguu

SEQ ID NO: 1584661 - RNA, 19 nt, Homo sapiens
  misc_RNA (1)...(19): siRNA sense strand
uaaacaugaugcuuugaag

SEQ ID NO: 1584662 - RNA, 19 nt, Homo sapiens
  misc_RNA (1)...(19): siRNA sense strand
aacaacagcugguuucucu

SEQ ID NO: 1584663 - RNA, 19 nt, Homo sapiens
  misc_RNA (1)...(19): siRNA sense strand
ucacugauuggcauaguuu

SEQ ID NO: 1584664 - RNA, 19 nt, Homo sapiens
  misc_RNA (1)...(19): siRNA sense strand
cagauaauauaagcaagga

SEQ ID NO: 1584665 - RNA, 19 nt, Homo sapiens
  misc_RNA (1)...(19): siRNA sense strand
gcugguuucucuggaauau

SEQ ID NO: 1584666 - RNA, 19 nt, Homo sapiens
  misc_RNA (1)...(19): siRNA sense strand
gaagagacacuugagaaaa

SEQ ID NO: 1584667 - RNA, 19 nt, Homo sapiens
  misc_RNA (1)...(19): siRNA sense strand
ggaaggguuuuaauccauu

SEQ ID NO: 1584668 - RNA, 19 nt, Homo sapiens
  misc_RNA (1)...(19): siRNA sense strand
ucucuggaauauucucaaa

SEQ ID NO: 1584669 - RNA, 19 nt, Homo sapiens
  misc_RNA (1)...(19): siRNA sense strand
ugguuucucuggaauauuc

SEQ ID NO: 1584670 - RNA, 19 nt, Homo sapiens
  misc_RNA (1)...(19): siRNA sense strand
ggcauaguuugugguguuu

SEQ ID NO: 1584671 - RNA, 19 nt, Homo sapiens
  misc_RNA (1)...(19): siRNA sense strand
ccaauggucauagaaauca

SEQ ID NO: 1584672 - RNA, 19 nt, Homo sapiens
  misc_RNA (1)...(19): siRNA sense strand
uaauggcgauuccucuagu

SEQ ID NO: 1584673 - RNA, 19 nt, Homo sapiens
  misc_RNA (1)...(19): siRNA sense strand
gaacaacagcugguuucuc

SEQ ID NO: 1584674 - RNA, 19 nt, Homo sapiens
  misc_RNA (1)...(19): siRNA sense strand
aaacaugaugcuuugaaga

SEQ ID NO: 1584675 - RNA, 19 nt, Homo sapiens
  misc_RNA (1)...(19): siRNA sense strand
aaacucagaagaccaaugg

SEQ ID NO: 1584676 - RNA, 19 nt, Homo sapiens
  misc_RNA (1)...(19): siRNA sense strand
gacgcugcuucaagguuaa

SEQ ID NO: 1584677 - RNA, 19 nt, Homo sapiens
  misc_RNA (1)...(19): siRNA sense strand
augaugcuuugaagacaua

SEQ ID NO: 1584678 - RNA, 19 nt, Homo sapiens
  misc_RNA (1)...(19): siRNA sense strand
uggaauauucucaaacuuc

SEQ ID NO: 1584679 - RNA, 19 nt, Homo sapiens
  misc_RNA (1)...(19): siRNA sense strand
cgauuccucuagucuuuca

SEQ ID NO: 1584680 - RNA, 19 nt, Homo sapiens
  misc_RNA (1)...(19): siRNA sense strand
gcaaaacucagaagaccaa

SEQ ID NO: 1584681 - RNA, 19 nt, Homo sapiens
  misc_RNA (1)...(19): siRNA sense strand
ucuggaauauucucaaacu

SEQ ID NO: 1584682 - RNA, 19 nt, Homo sapiens
  misc_RNA (1)...(19): siRNA sense strand
guucagacgcugcuucaag

SEQ ID NO: 1584683 - RNA, 19 nt, Homo sapiens
  misc_RNA (1)...(19): siRNA sense strand
cagcugguuucucuggaau

SEQ ID NO: 1584684 - RNA, 19 nt, Homo sapiens
  misc_RNA (1)...(19): siRNA sense strand
ccauuaugcaguauuugaa

SEQ ID NO: 1584685 - RNA, 19 nt, Homo sapiens
  misc_RNA (1)...(19): siRNA sense strand
ugaagacauaugcaucauu

SEQ ID NO: 1584686 - RNA, 19 nt, Homo sapiens
  misc_RNA (1)...(19): siRNA sense strand
ggcgacauuuggaacaaca

SEQ ID NO: 1584687 - RNA, 19 nt, Homo sapiens
  misc_RNA (1)...(19): siRNA sense strand
caugaugcuuugaagacau

SEQ ID NO: 1584688 - RNA, 19 nt, Homo sapiens
  misc_RNA (1)...(19): siRNA sense strand
acagcugguuucucuggaa

SEQ ID NO: 1584689 - RNA, 19 nt, Homo sapiens
  misc_RNA (1)...(19): siRNA sense strand
ugaaauuaauggcgauucc

SEQ ID NO: 1584690 - RNA, 19 nt, Homo sapiens
  misc_RNA (1)...(19): siRNA sense strand
uugaagagacacuugagaa

SEQ ID NO: 1584691 - RNA, 19 nt, Homo sapiens
  misc_RNA (1)...(19): siRNA sense strand
cuucaagguuaaacaugau

SEQ ID NO: 1584692 - RNA, 19 nt, Homo sapiens
  misc_RNA (1)...(19): siRNA sense strand
gaaggguuuuaauccauug

SEQ ID NO: 1584693 - RNA, 19 nt, Homo sapiens
  misc_RNA (1)...(19): siRNA sense strand
gcucacugauuggcauagu

SEQ ID NO: 1584694 - RNA, 19 nt, Homo sapiens
  misc_RNA (1)...(19): siRNA sense strand
uugaugcuuuguauucaga

SEQ ID NO: 1584695 - RNA, 19 nt, Homo sapiens
  misc_RNA (1)...(19): siRNA sense strand
ucuuucagauuauguuugg

SEQ ID NO: 1584696 - RNA, 19 nt, Homo sapiens
  misc_RNA (1)...(19): siRNA sense strand
ugcaguauuugaagagaca

SEQ ID NO: 1584697 - RNA, 19 nt, Homo sapiens
  misc_RNA (1)...(19): siRNA sense strand
ccaaauggcugugauagua

SEQ ID NO: 1584698 - RNA, 19 nt, Homo sapiens
  misc_RNA (1)...(19): siRNA sense strand
caacaaagcucaguguaga

SEQ ID NO: 1584699 - RNA, 19 nt, Homo sapiens
  misc_RNA (1)...(19): siRNA sense strand
gaaggagugucaauaaaga

SEQ ID NO: 1584700 - RNA, 19 nt, Homo sapiens
  misc_RNA (1)...(19): siRNA sense strand
gcacaacaguaacuuuaaa

SEQ ID NO: 1584701 - RNA, 19 nt, Homo sapiens
  misc_RNA (1)...(19): siRNA sense strand
gagaaggagugucaauaaa

SEQ ID NO: 1584702 - RNA, 19 nt, Homo sapiens
  misc_RNA (1)...(19): siRNA sense strand
gagcacaacaguaacuuua

SEQ ID NO: 1584703 - RNA, 19 nt, Homo sapiens
  misc_RNA (1)...(19): siRNA sense strand
gauccacccucuuuauaaa

SEQ ID NO: 1584704 - RNA, 19 nt, Homo sapiens
  misc_RNA (1)...(19): siRNA sense strand
gaagguguauucauuaugg

SEQ ID NO: 1584705 - RNA, 19 nt, Homo sapiens
  misc_RNA (1)...(19): siRNA sense strand
gaacaugggcugccaaauc

SEQ ID NO: 1584706 - RNA, 19 nt, Homo sapiens
  misc_RNA (1)...(19): siRNA sense strand
ugagaaggcuguugagaga

SEQ ID NO: 1584707 - RNA, 19 nt, Homo sapiens
  misc_RNA (1)...(19): siRNA sense strand
ggaggaaggcgaaaugaaa

SEQ ID NO: 1584708 - RNA, 19 nt, Homo sapiens
  misc_RNA (1)...(19): siRNA sense strand
gugauuauccucuuguuua

SEQ ID NO: 1584709 - RNA, 19 nt, Homo sapiens
  misc_RNA (1)...(19): siRNA sense strand
ucacaugggugguaauaug

SEQ ID NO: 1584710 - RNA, 19 nt, Homo sapiens
  misc_RNA (1)...(19): siRNA sense strand
gaaaguggccugcuucgau

SEQ ID NO: 1584711 - RNA, 19 nt, Homo sapiens
  misc_RNA (1)...(19): siRNA sense strand
auaaagagcacaacaguaa

SEQ ID NO: 1584712 - RNA, 19 nt, Homo sapiens
  misc_RNA (1)...(19): siRNA sense strand
ggagugauccacccucuuu

SEQ ID NO: 1584713 - RNA, 19 nt, Homo sapiens
  misc_RNA (1)...(19): siRNA sense strand
cuuuaaagcuggauacauu

SEQ ID NO: 1584714 - RNA, 19 nt, Homo sapiens
  misc_RNA (1)...(19): siRNA sense strand
gugguaauauggaguuaaa

SEQ ID NO: 1584715 - RNA, 19 nt, Homo sapiens
  misc_RNA (1)...(19): siRNA sense strand
gagagaaggagugucaaua

SEQ ID NO: 1584716 - RNA, 19 nt, Homo sapiens
  misc_RNA (1)...(19): siRNA sense strand
ccaaugguccuguaaagaa

SEQ ID NO: 1584717 - RNA, 19 nt, Homo sapiens
  misc_RNA (1)...(19): siRNA sense strand
caaaaggcaucuacugaaa

SEQ ID NO: 1584718 - RNA, 19 nt, Homo sapiens
  misc_RNA (1)...(19): siRNA sense strand
gaaaggauuaccagcaaug

SEQ ID NO: 1584719 - RNA, 19 nt, Homo sapiens
  misc_RNA (1)...(19): siRNA sense strand
aaaguggccugcuucgauu

SEQ ID NO: 1584720 - RNA, 19 nt, Homo sapiens
  misc_RNA (1)...(19): siRNA sense strand
gcaaugcuaccagugauuu

SEQ ID NO: 1584721 - RNA, 19 nt, Homo sapiens
  misc_RNA (1)...(19): siRNA sense strand
gcacagacuaugaaacuca

SEQ ID NO: 1584722 - RNA, 19 nt, Homo sapiens
  misc_RNA (1)...(19): siRNA sense strand
ggaagaaagggcaauuuag

SEQ ID NO: 1584723 - RNA, 19 nt, Homo sapiens
  misc_RNA (1)...(19): siRNA sense strand
ggaccaaauggcugugaua

SEQ ID NO: 1584724 - RNA, 19 nt, Homo sapiens
  misc_RNA (1)...(19): siRNA sense strand
ggucaucacuggcaacaac

SEQ ID NO: 1584725 - RNA, 19 nt, Homo sapiens
  misc_RNA (1)...(19): siRNA sense strand
gauuuaagcaaguaucuga

SEQ ID NO: 1584726 - RNA, 19 nt, Homo sapiens
  misc_RNA (1)...(19): siRNA sense strand
agagaaggagugucaauaa

SEQ ID NO: 1584727 - RNA, 19 nt, Homo sapiens
  misc_RNA (1)...(19): siRNA sense strand
gaagaaagggcaauuuagc

SEQ ID NO: 1584728 - RNA, 19 nt, Homo sapiens
  misc_RNA (1)...(19): siRNA sense strand
gcguggaaaugaaggugua

SEQ ID NO: 1584729 - RNA, 19 nt, Homo sapiens
  misc_RNA (1)...(19): siRNA sense strand
gcuacaagcucugcaugug

SEQ ID NO: 1584730 - RNA, 19 nt, Homo sapiens
  misc_RNA (1)...(19): siRNA sense strand
ggaaaacaguaucauccua

SEQ ID NO: 1584731 - RNA, 19 nt, Homo sapiens
  misc_RNA (1)...(19): siRNA sense strand
uauccuggcugucaucaau

SEQ ID NO: 1584732 - RNA, 19 nt, Homo sapiens
  misc_RNA (1)...(19): siRNA sense strand
gggcaaaaccauugaauuu

SEQ ID NO: 1584733 - RNA, 19 nt, Homo sapiens
  misc_RNA (1)...(19): siRNA sense strand
ggacaacaaagcucagugu

SEQ ID NO: 1584734 - RNA, 19 nt, Homo sapiens
  misc_RNA (1)...(19): siRNA sense strand
cuggauacauuccgauuga

SEQ ID NO: 1584735 - RNA, 19 nt, Homo sapiens
  misc_RNA (1)...(19): siRNA sense strand
uuagccaucugugugauua

SEQ ID NO: 1584736 - RNA, 19 nt, Homo sapiens
  misc_RNA (1)...(19): siRNA sense strand
ugaagaucgucuccacaaa

SEQ ID NO: 1584737 - RNA, 19 nt, Homo sapiens
  misc_RNA (1)...(19): siRNA sense strand
gugauaguauggaguuuca

SEQ ID NO: 1584738 - RNA, 19 nt, Homo sapiens
  misc_RNA (1)...(19): siRNA sense strand
gaaaacaguaucauccuaa

SEQ ID NO: 1584739 - RNA, 19 nt, Homo sapiens
  misc_RNA (1)...(19): siRNA sense strand
gauacauuccgauugauga

SEQ ID NO: 1584740 - RNA, 19 nt, Homo sapiens
  misc_RNA (1)...(19): siRNA sense strand
caaguggagugaaaaguuu

SEQ ID NO: 1584741 - RNA, 19 nt, Homo sapiens
  misc_RNA (1)...(19): siRNA sense strand
aggaagaaagggcaauuua

SEQ ID NO: 1584742 - RNA, 19 nt, Homo sapiens
  misc_RNA (1)...(19): siRNA sense strand
gaauuucacauggguggua

SEQ ID NO: 1584743 - RNA, 19 nt, Homo sapiens
  misc_RNA (1)...(19): siRNA sense strand
gugauccacccucuuuaua

SEQ ID NO: 1584744 - RNA, 19 nt, Homo sapiens
  misc_RNA (1)...(19): siRNA sense strand
gcaaguaaccagccagaac

SEQ ID NO: 1584745 - RNA, 19 nt, Homo sapiens
  misc_RNA (1)...(19): siRNA sense strand
ggcaacaaccagccuauug

SEQ ID NO: 1584746 - RNA, 19 nt, Homo sapiens
  misc_RNA (1)...(19): siRNA sense strand
caauaaagagcacaacagu

SEQ ID NO: 1584747 - RNA, 19 nt, Homo sapiens
  misc_RNA (1)...(19): siRNA sense strand
gaggaagaaagggcaauuu

SEQ ID NO: 1584748 - RNA, 19 nt, Homo sapiens
  misc_RNA (1)...(19): siRNA sense strand
caaguaaccagccagaaca

SEQ ID NO: 1584749 - RNA, 19 nt, Homo sapiens
  misc_RNA (1)...(19): siRNA sense strand
ggagaccaguuggguagug

SEQ ID NO: 1584750 - RNA, 19 nt, Homo sapiens
  misc_RNA (1)...(19): siRNA sense strand
cugaaaggauuaccagcaa

SEQ ID NO: 1584751 - RNA, 19 nt, Homo sapiens
  misc_RNA (1)...(19): siRNA sense strand
gaagaucgucuccacaaaa

SEQ ID NO: 1584752 - RNA, 19 nt, Homo sapiens
  misc_RNA (1)...(19): siRNA sense strand
gauaguauggaguuucaug

SEQ ID NO: 1584753 - RNA, 19 nt, Homo sapiens
  misc_RNA (1)...(19): siRNA sense strand
gcaauuuagccaucugugu

SEQ ID NO: 1584754 - RNA, 19 nt, Homo sapiens
  misc_RNA (1)...(19): siRNA sense strand
ugauccacccucuuuauaa

SEQ ID NO: 1584755 - RNA, 19 nt, Homo sapiens
  misc_RNA (1)...(19): siRNA sense strand
gugaaaaguuugaauguuc

SEQ ID NO: 1584756 - RNA, 19 nt, Homo sapiens
  misc_RNA (1)...(19): siRNA sense strand
gacaacaaagcucagugua

SEQ ID NO: 1584757 - RNA, 19 nt, Homo sapiens
  misc_RNA (1)...(19): siRNA sense strand
gcuaccagugauuuaaaua

SEQ ID NO: 1584758 - RNA, 19 nt, Homo sapiens
  misc_RNA (1)...(19): siRNA sense strand
caaugguccuguaaagaag

SEQ ID NO: 1584759 - RNA, 19 nt, Homo sapiens
  misc_RNA (1)...(19): siRNA sense strand
caaauggcugugauaguau

SEQ ID NO: 1584760 - RNA, 19 nt, Homo sapiens
  misc_RNA (1)...(19): siRNA sense strand
aacaugggcugccaaaucu

SEQ ID NO: 1584761 - RNA, 19 nt, Homo sapiens
  misc_RNA (1)...(19): siRNA sense strand
gcaucuacugaaaggauua

SEQ ID NO: 1584762 - RNA, 19 nt, Homo sapiens
  misc_RNA (1)...(19): siRNA sense strand
aaaggcaucuacugaaagg

SEQ ID NO: 1584763 - RNA, 19 nt, Homo sapiens
  misc_RNA (1)...(19): siRNA sense strand
gaguuucauuugccaagug

SEQ ID NO: 1584764 - RNA, 19 nt, Homo sapiens
  misc_RNA (1)...(19): siRNA sense strand
guaggaggaaggcgaaaug

SEQ ID NO: 1584765 - RNA, 19 nt, Homo sapiens
  misc_RNA (1)...(19): siRNA sense strand
ggauacauuccgauugaug

SEQ ID NO: 1584766 - RNA, 19 nt, Homo sapiens
  misc_RNA (1)...(19): siRNA sense strand
ugacaucggcaugcaguuu

SEQ ID NO: 1584767 - RNA, 19 nt, Homo sapiens
  misc_RNA (1)...(19): siRNA sense strand
ggcaucuacugaaaggauu

SEQ ID NO: 1584768 - RNA, 19 nt, Homo sapiens
  misc_RNA (1)...(19): siRNA sense strand
caaugcuaccagugauuua

SEQ ID NO: 1584769 - RNA, 19 nt, Homo sapiens
  misc_RNA (1)...(19): siRNA sense strand
ucaugaaaguggccugcuu

SEQ ID NO: 1584770 - RNA, 19 nt, Homo sapiens
  misc_RNA (1)...(19): siRNA sense strand
ugaaaggauuaccagcaau

SEQ ID NO: 1584771 - RNA, 19 nt, Homo sapiens
  misc_RNA (1)...(19): siRNA sense strand
cagcacagacuaugaaacu

SEQ ID NO: 1584772 - RNA, 19 nt, Homo sapiens
  misc_RNA (1)...(19): siRNA sense strand
caagugacaucggcaugca

SEQ ID NO: 1584773 - RNA, 19 nt, Homo sapiens
  misc_RNA (1)...(19): siRNA sense strand
acaaagcucaguguagaaa

SEQ ID NO: 1584774 - RNA, 19 nt, Homo sapiens
  misc_RNA (1)...(19): siRNA sense strand
agaaggcuguugagagaag

SEQ ID NO: 1584775 - RNA, 19 nt, Homo sapiens
  misc_RNA (1)...(19): siRNA sense strand
guugagagaaggaguguca

SEQ ID NO: 1584776 - RNA, 19 nt, Homo sapiens
  misc_RNA (1)...(19): siRNA sense strand
aauaaagagcacaacagua

SEQ ID NO: 1584777 - RNA, 19 nt, Homo sapiens
  misc_RNA (1)...(19): siRNA sense strand
aaauggcugugauaguaug

SEQ ID NO: 1584778 - RNA, 19 nt, Homo sapiens
  misc_RNA (1)...(19): siRNA sense strand
caacaguaacuuuaaagcu

SEQ ID NO: 1584779 - RNA, 19 nt, Homo sapiens
  misc_RNA (1)...(19): siRNA sense strand
aacaguaucauccuaaaug

SEQ ID NO: 1584780 - RNA, 19 nt, Homo sapiens
  misc_RNA (1)...(19): siRNA sense strand
gagugauccacccucuuua

SEQ ID NO: 1584781 - RNA, 19 nt, Homo sapiens
  misc_RNA (1)...(19): siRNA sense strand
gcugugauaguauggaguu

SEQ ID NO: 1584782 - RNA, 19 nt, Homo sapiens
  misc_RNA (1)...(19): siRNA sense strand
acauuccgauugaugaaga

SEQ ID NO: 1584783 - RNA, 19 nt, Homo sapiens
  misc_RNA (1)...(19): siRNA sense strand
agaaguccaugcgugagaa

SEQ ID NO: 1584784 - RNA, 19 nt, Homo sapiens
  misc_RNA (1)...(19): siRNA sense strand
gguaauauggaguuaaagg

SEQ ID NO: 1584785 - RNA, 19 nt, Homo sapiens
  misc_RNA (1)...(19): siRNA sense strand
gcucuucaaggugcaagua

SEQ ID NO: 1584786 - RNA, 19 nt, Homo sapiens
  misc_RNA (1)...(19): siRNA sense strand
ccuguggaaacacucauua

SEQ ID NO: 1584787 - RNA, 19 nt, Homo sapiens
  misc_RNA (1)...(19): siRNA sense strand
gcugccaaaucucagacaa

SEQ ID NO: 1584788 - RNA, 19 nt, Homo sapiens
  misc_RNA (1)...(19): siRNA sense strand
guugaugggcgugcuauug

SEQ ID NO: 1584789 - RNA, 19 nt, Homo sapiens
  misc_RNA (1)...(19): siRNA sense strand
agaaggagugucaauaaag

SEQ ID NO: 1584790 - RNA, 19 nt, Homo sapiens
  misc_RNA (1)...(19): siRNA sense strand
uaagcaaguaucugacaug

SEQ ID NO: 1584791 - RNA, 19 nt, Homo sapiens
  misc_RNA (1)...(19): siRNA sense strand
uauugugcguggaaaugaa

SEQ ID NO: 1584792 - RNA, 19 nt, Homo sapiens
  misc_RNA (1)...(19): siRNA sense strand
gcuauugugcguggaaaug

SEQ ID NO: 1584793 - RNA, 19 nt, Homo sapiens
  misc_RNA (1)...(19): siRNA sense strand
acaguaucauccuaaaugg

SEQ ID NO: 1584794 - RNA, 19 nt, Homo sapiens
  misc_RNA (1)...(19): siRNA sense strand
gggugguaauauggaguua

SEQ ID NO: 1584795 - RNA, 19 nt, Homo sapiens
  misc_RNA (1)...(19): siRNA sense strand
gacccgaggacucaaaaua

SEQ ID NO: 1584796 - RNA, 19 nt, Homo sapiens
  misc_RNA (1)...(19): siRNA sense strand
cagaacaugggcugccaaa

SEQ ID NO: 1584797 - RNA, 19 nt, Homo sapiens
  misc_RNA (1)...(19): siRNA sense strand
gauggaauguugaguauuu

SEQ ID NO: 1584798 - RNA, 19 nt, Homo sapiens
  misc_RNA (1)...(19): siRNA sense strand
ugaaggagaccaucaguua

SEQ ID NO: 1584799 - RNA, 19 nt, Homo sapiens
  misc_RNA (1)...(19): siRNA sense strand
gcagaagcaauuuauguua

SEQ ID NO: 1584800 - RNA, 19 nt, Homo sapiens
  misc_RNA (1)...(19): siRNA sense strand
ggaaauuuaugcgaaguuu

SEQ ID NO: 1584801 - RNA, 19 nt, Homo sapiens
  misc_RNA (1)...(19): siRNA sense strand
gaauugaaaucacaagcuu

SEQ ID NO: 1584802 - RNA, 19 nt, Homo sapiens
  misc_RNA (1)...(19): siRNA sense strand
gcuguaaccuuucuucgaa

SEQ ID NO: 1584803 - RNA, 19 nt, Homo sapiens
  misc_RNA (1)...(19): siRNA sense strand
ggacucugauggaggguuu

SEQ ID NO: 1584804 - RNA, 19 nt, Homo sapiens
  misc_RNA (1)...(19): siRNA sense strand
caagauggaauguugagua

SEQ ID NO: 1584805 - RNA, 19 nt, Homo sapiens
  misc_RNA (1)...(19): siRNA sense strand
guacagguguugugugcaa

SEQ ID NO: 1584806 - RNA, 19 nt, Homo sapiens
  misc_RNA (1)...(19): siRNA sense strand
ccagaaaucguuacaguug

SEQ ID NO: 1584807 - RNA, 19 nt, Homo sapiens
  misc_RNA (1)...(19): siRNA sense strand
ccacuccacuguguugaua

SEQ ID NO: 1584808 - RNA, 19 nt, Homo sapiens
  misc_RNA (1)...(19): siRNA sense strand
ucgaauaaaucucuucaga

SEQ ID NO: 1584809 - RNA, 19 nt, Homo sapiens
  misc_RNA (1)...(19): siRNA sense strand
caacaacccagaaaucguu

SEQ ID NO: 1584810 - RNA, 19 nt, Homo sapiens
  misc_RNA (1)...(19): siRNA sense strand
uggagaggauggucgaaua

SEQ ID NO: 1584811 - RNA, 19 nt, Homo sapiens
  misc_RNA (1)...(19): siRNA sense strand
guaggucucugucugugaa

SEQ ID NO: 1584812 - RNA, 19 nt, Homo sapiens
  misc_RNA (1)...(19): siRNA sense strand
gaaaucacaagcuuacuuc

SEQ ID NO: 1584813 - RNA, 19 nt, Homo sapiens
  misc_RNA (1)...(19): siRNA sense strand
ggagaggauggucgaauaa

SEQ ID NO: 1584814 - RNA, 19 nt, Homo sapiens
  misc_RNA (1)...(19): siRNA sense strand
gcaaaagaccgaauugaaa

SEQ ID NO: 1584815 - RNA, 19 nt, Homo sapiens
  misc_RNA (1)...(19): siRNA sense strand
ggaggaagaagcaguacuu

SEQ ID NO: 1584816 - RNA, 19 nt, Homo sapiens
  misc_RNA (1)...(19): siRNA sense strand
guucaccagucugucauua

SEQ ID NO: 1584817 - RNA, 19 nt, Homo sapiens
  misc_RNA (1)...(19): siRNA sense strand
gaaggagaccaucaguuau

SEQ ID NO: 1584818 - RNA, 19 nt, Homo sapiens
  misc_RNA (1)...(19): siRNA sense strand
guuauugugugauaucaga

SEQ ID NO: 1584819 - RNA, 19 nt, Homo sapiens
  misc_RNA (1)...(19): siRNA sense strand
gcugaaggcucaugaagcu

SEQ ID NO: 1584820 - RNA, 19 nt, Homo sapiens
  misc_RNA (1)...(19): siRNA sense strand
gcacugauccugcaaaaga

SEQ ID NO: 1584821 - RNA, 19 nt, Homo sapiens
  misc_RNA (1)...(19): siRNA sense strand
gcugaaaugugggaaguuc

SEQ ID NO: 1584822 - RNA, 19 nt, Homo sapiens
  misc_RNA (1)...(19): siRNA sense strand
ucacaaggaagcuguaaga

SEQ ID NO: 1584823 - RNA, 19 nt, Homo sapiens
  misc_RNA (1)...(19): siRNA sense strand
caaggaggaagaagcagua

SEQ ID NO: 1584824 - RNA, 19 nt, Homo sapiens
  misc_RNA (1)...(19): siRNA sense strand
uggccaagauggaauguug

SEQ ID NO: 1584825 - RNA, 19 nt, Homo sapiens
  misc_RNA (1)...(19): siRNA sense strand
ugauagacaucccaaccaa

SEQ ID NO: 1584826 - RNA, 19 nt, Homo sapiens
  misc_RNA (1)...(19): siRNA sense strand
cagaagcaauuuauguuac

SEQ ID NO: 1584827 - RNA, 19 nt, Homo sapiens
  misc_RNA (1)...(19): siRNA sense strand
guaagaaccauagacaaug

SEQ ID NO: 1584828 - RNA, 19 nt, Homo sapiens
  misc_RNA (1)...(19): siRNA sense strand
gauguuagacaagguacua

SEQ ID NO: 1584829 - RNA, 19 nt, Homo sapiens
  misc_RNA (1)...(19): siRNA sense strand
aagauggaauguugaguau

SEQ ID NO: 1584830 - RNA, 19 nt, Homo sapiens
  misc_RNA (1)...(19): siRNA sense strand
cgaaguuugugucccagaa

SEQ ID NO: 1584831 - RNA, 19 nt, Homo sapiens
  misc_RNA (1)...(19): siRNA sense strand
aauaugggauuucagacaa

SEQ ID NO: 1584832 - RNA, 19 nt, Homo sapiens
  misc_RNA (1)...(19): siRNA sense strand
gacaaugcagauaguagua

SEQ ID NO: 1584833 - RNA, 19 nt, Homo sapiens
  misc_RNA (1)...(19): siRNA sense strand
gaggauggucgaauaaauc

SEQ ID NO: 1584834 - RNA, 19 nt, Homo sapiens
  misc_RNA (1)...(19): siRNA sense strand
ccacagauguaccugaaaa

SEQ ID NO: 1584835 - RNA, 19 nt, Homo sapiens
  misc_RNA (1)...(19): siRNA sense strand
uaagaaccauagacaaugc

SEQ ID NO: 1584836 - RNA, 19 nt, Homo sapiens
  misc_RNA (1)...(19): siRNA sense strand
gaaggcucaugaagcugaa

SEQ ID NO: 1584837 - RNA, 19 nt, Homo sapiens
  misc_RNA (1)...(19): siRNA sense strand
gaaguuugugucccagaaa

SEQ ID NO: 1584838 - RNA, 19 nt, Homo sapiens
  misc_RNA (1)...(19): siRNA sense strand
uaaccaagcuaauguucac

SEQ ID NO: 1584839 - RNA, 19 nt, Homo sapiens
  misc_RNA (1)...(19): siRNA sense strand
agaaaucguuacaguugga

SEQ ID NO: 1584840 - RNA, 19 nt, Homo sapiens
  misc_RNA (1)...(19): siRNA sense strand
cauagacaaugcagauagu

SEQ ID NO: 1584841 - RNA, 19 nt, Homo sapiens
  misc_RNA (1)...(19): siRNA sense strand
gaaauuuaugcgaaguuug

SEQ ID NO: 1584842 - RNA, 19 nt, Homo sapiens
  misc_RNA (1)...(19): siRNA sense strand
gaaccgaugcagaagcaau

SEQ ID NO: 1584843 - RNA, 19 nt, Homo sapiens
  misc_RNA (1)...(19): siRNA sense strand
uuagguccuugucuuguuu

SEQ ID NO: 1584844 - RNA, 19 nt, Homo sapiens
  misc_RNA (1)...(19): siRNA sense strand
guacuaugccuguaucucu

SEQ ID NO: 1584845 - RNA, 19 nt, Homo sapiens
  misc_RNA (1)...(19): siRNA sense strand
uugaguauuugggauguua

SEQ ID NO: 1584846 - RNA, 19 nt, Homo sapiens
  misc_RNA (1)...(19): siRNA sense strand
agaggauggucgaauaaau

SEQ ID NO: 1584847 - RNA, 19 nt, Homo sapiens
  misc_RNA (1)...(19): siRNA sense strand
aacaggauguguaacaguu

SEQ ID NO: 1584848 - RNA, 19 nt, Homo sapiens
  misc_RNA (1)...(19): siRNA sense strand
gagaggauggucgaauaaa

SEQ ID NO: 1584849 - RNA, 19 nt, Homo sapiens
  misc_RNA (1)...(19): siRNA sense strand
aaacuuggacucugaugga

SEQ ID NO: 1584850 - RNA, 19 nt, Homo sapiens
  misc_RNA (1)...(19): siRNA sense strand
gacguucgcuacaggaucu

SEQ ID NO: 1584851 - RNA, 19 nt, Homo sapiens
  misc_RNA (1)...(19): siRNA sense strand
ugaaaucacaagcuuacuu

SEQ ID NO: 1584852 - RNA, 19 nt, Homo sapiens
  misc_RNA (1)...(19): siRNA sense strand
aaggagaccaucaguuauu

SEQ ID NO: 1584853 - RNA, 19 nt, Homo sapiens
  misc_RNA (1)...(19): siRNA sense strand
aauugucgcugcuucauca

SEQ ID NO: 1584854 - RNA, 19 nt, Homo sapiens
  misc_RNA (1)...(19): siRNA sense strand
uguaagaaccauagacaau

SEQ ID NO: 1584855 - RNA, 19 nt, Homo sapiens
  misc_RNA (1)...(19): siRNA sense strand
gaggaagaagcaguacuuu

SEQ ID NO: 1584856 - RNA, 19 nt, Homo sapiens
  misc_RNA (1)...(19): siRNA sense strand
cuccugagauucuuacugu

SEQ ID NO: 1584857 - RNA, 19 nt, Homo sapiens
  misc_RNA (1)...(19): siRNA sense strand
caaugcagauaguaguaca

SEQ ID NO: 1584858 - RNA, 19 nt, Homo sapiens
  misc_RNA (1)...(19): siRNA sense strand
gaaagaauugucgcugcuu

SEQ ID NO: 1584859 - RNA, 19 nt, Homo sapiens
  misc_RNA (1)...(19): siRNA sense strand
caagguacuaugccuguau

SEQ ID NO: 1584860 - RNA, 19 nt, Homo sapiens
  misc_RNA (1)...(19): siRNA sense strand
uacaggaucuugggacaau

SEQ ID NO: 1584861 - RNA, 19 nt, Homo sapiens
  misc_RNA (1)...(19): siRNA sense strand
gaucacaaggaagcuguaa

SEQ ID NO: 1584862 - RNA, 19 nt, Homo sapiens
  misc_RNA (1)...(19): siRNA sense strand
ggacuacagcucacuacca

SEQ ID NO: 1584863 - RNA, 19 nt, Homo sapiens
  misc_RNA (1)...(19): siRNA sense strand
uaccugcucugaagaugga

SEQ ID NO: 1584864 - RNA, 19 nt, Homo sapiens
  misc_RNA (1)...(19): siRNA sense strand
gaggaaauuuaugcgaagu

SEQ ID NO: 1584865 - RNA, 19 nt, Homo sapiens
  misc_RNA (1)...(19): siRNA sense strand
cagagcugaucacaaggaa

SEQ ID NO: 1584866 - RNA, 19 nt, Homo sapiens
  misc_RNA (1)...(19): siRNA sense strand
gaagcuguaagaaccauag

SEQ ID NO: 1584867 - RNA, 19 nt, Homo sapiens
  misc_RNA (1)...(19): siRNA sense strand
uauuugggauguuagacaa

SEQ ID NO: 1584868 - RNA, 19 nt, Homo sapiens
  misc_RNA (1)...(19): siRNA sense strand
ucuucgaacuccugagauu

SEQ ID NO: 1584869 - RNA, 19 nt, Homo sapiens
  misc_RNA (1)...(19): siRNA sense strand
acuccaugcuguaaccuuu

SEQ ID NO: 1584870 - RNA, 19 nt, Homo sapiens
  misc_RNA (1)...(19): siRNA sense strand
uuggaaacuuggacucuga

SEQ ID NO: 1584871 - RNA, 19 nt, Homo sapiens
  misc_RNA (1)...(19): siRNA sense strand
agaccgaauugaaaucaca

SEQ ID NO: 1584872 - RNA, 19 nt, Homo sapiens
  misc_RNA (1)...(19): siRNA sense strand
cuauagcagugcaccaugu

SEQ ID NO: 1584873 - RNA, 19 nt, Homo sapiens
  misc_RNA (1)...(19): siRNA sense strand
gggacaaugaggaaaauua

SEQ ID NO: 1584874 - RNA, 19 nt, Homo sapiens
  misc_RNA (1)...(19): siRNA sense strand
caaaagaccgaauugaaau

SEQ ID NO: 1584875 - RNA, 19 nt, Homo sapiens
  misc_RNA (1)...(19): siRNA sense strand
gcuguaagaaccauagaca

SEQ ID NO: 1584876 - RNA, 19 nt, Homo sapiens
  misc_RNA (1)...(19): siRNA sense strand
gagaccaucaguuauugug

SEQ ID NO: 1584877 - RNA, 19 nt, Homo sapiens
  misc_RNA (1)...(19): siRNA sense strand
ccacuguguugauagacau

SEQ ID NO: 1584878 - RNA, 19 nt, Homo sapiens
  misc_RNA (1)...(19): siRNA sense strand
gauuucagacaacaaggaa

SEQ ID NO: 1584879 - RNA, 19 nt, Homo sapiens
  misc_RNA (1)...(19): siRNA sense strand
ggacaaugaggaaaauuau

SEQ ID NO: 1584880 - RNA, 19 nt, Homo sapiens
  misc_RNA (1)...(19): siRNA sense strand
gugcaacaacccagaaauc

SEQ ID NO: 1584881 - RNA, 19 nt, Homo sapiens
  misc_RNA (1)...(19): siRNA sense strand
caacaggauguguaacagu

SEQ ID NO: 1584882 - RNA, 19 nt, Homo sapiens
  misc_RNA (1)...(19): siRNA sense strand
guaaccaagcuaauguuca

SEQ ID NO: 1584883 - RNA, 19 nt, Homo sapiens
  misc_RNA (1)...(19): siRNA sense strand
ggauuucagacaacaagga

SEQ ID NO: 1584884 - RNA, 19 nt, Homo sapiens
  misc_RNA (1)...(19): siRNA sense strand
gcaacaacccagaaaucgu

SEQ ID NO: 1584885 - RNA, 19 nt, Homo sapiens
  misc_RNA (1)...(19): siRNA sense strand
auggugauguaauggauuu

SEQ ID NO: 1584886 - RNA, 19 nt, Homo sapiens
  misc_RNA (1)...(19): siRNA sense strand
ucagacaacaaggaaauga

SEQ ID NO: 1584887 - RNA, 19 nt, Homo sapiens
  misc_RNA (1)...(19): siRNA sense strand
ccauagacaaugcagauag

SEQ ID NO: 1584888 - RNA, 19 nt, Homo sapiens
  misc_RNA (1)...(19): siRNA sense strand
gauggucgaauaaaucucu

SEQ ID NO: 1584889 - RNA, 19 nt, Homo sapiens
  misc_RNA (1)...(19): siRNA sense strand
uguggucuauuggagauuu

SEQ ID NO: 1584890 - RNA, 19 nt, Homo sapiens
  misc_RNA (1)...(19): siRNA sense strand
aggagaccaucaguuauug

SEQ ID NO: 1584891 - RNA, 19 nt, Homo sapiens
  misc_RNA (1)...(19): siRNA sense strand
cgaugcagaagcaauuuau

SEQ ID NO: 1584892 - RNA, 19 nt, Homo sapiens
  misc_RNA (1)...(19): siRNA sense strand
uggaaccgaugcagaagca

SEQ ID NO: 1584893 - RNA, 19 nt, Homo sapiens
  misc_RNA (1)...(19): siRNA sense strand
ugucucauagcauuaguaa

SEQ ID NO: 1584894 - RNA, 19 nt, Homo sapiens
  misc_RNA (1)...(19): siRNA sense strand
gaacuccugagauucuuac

SEQ ID NO: 1584895 - RNA, 19 nt, Homo sapiens
  misc_RNA (1)...(19): siRNA sense strand
cgaacuccugagauucuua

SEQ ID NO: 1584896 - RNA, 19 nt, Homo sapiens
  misc_RNA (1)...(19): siRNA sense strand
ccgaugcagaagcaauuua

SEQ ID NO: 1584897 - RNA, 19 nt, Homo sapiens
  misc_RNA (1)...(19): siRNA sense strand
gauggaauguugaguauuu

SEQ ID NO: 1584898 - RNA, 19 nt, Homo sapiens
  misc_RNA (1)...(19): siRNA sense strand
ugaaggagaccaucaguua

SEQ ID NO: 1584899 - RNA, 19 nt, Homo sapiens
  misc_RNA (1)...(19): siRNA sense strand
gcagaagcaauuuauguua

SEQ ID NO: 1584900 - RNA, 19 nt, Homo sapiens
  misc_RNA (1)...(19): siRNA sense strand
ggaaauuuaugcgaaguuu

SEQ ID NO: 1584901 - RNA, 19 nt, Homo sapiens
  misc_RNA (1)...(19): siRNA sense strand
gaauugaaaucacaagcuu

SEQ ID NO: 1584902 - RNA, 19 nt, Homo sapiens
  misc_RNA (1)...(19): siRNA sense strand
gcuguaaccuuucuucgaa

SEQ ID NO: 1584903 - RNA, 19 nt, Homo sapiens
  misc_RNA (1)...(19): siRNA sense strand
ggacucugauggaggguuu

SEQ ID NO: 1584904 - RNA, 19 nt, Homo sapiens
  misc_RNA (1)...(19): siRNA sense strand
caagauggaauguugagua

SEQ ID NO: 1584905 - RNA, 19 nt, Homo sapiens
  misc_RNA (1)...(19): siRNA sense strand
guacagguguugugugcaa

SEQ ID NO: 1584906 - RNA, 19 nt, Homo sapiens
  misc_RNA (1)...(19): siRNA sense strand
ccagaaaucguuacaguug

SEQ ID NO: 1584907 - RNA, 19 nt, Homo sapiens
  misc_RNA (1)...(19): siRNA sense strand
ccacuccacuguguugaua

SEQ ID NO: 1584908 - RNA, 19 nt, Homo sapiens
  misc_RNA (1)...(19): siRNA sense strand
ucgaauaaaucucuucaga

SEQ ID NO: 1584909 - RNA, 19 nt, Homo sapiens
  misc_RNA (1)...(19): siRNA sense strand
caacaacccagaaaucguu

SEQ ID NO: 1584910 - RNA, 19 nt, Homo sapiens
  misc_RNA (1)...(19): siRNA sense strand
uggagaggauggucgaaua

SEQ ID NO: 1584911 - RNA, 19 nt, Homo sapiens
  misc_RNA (1)...(19): siRNA sense strand
guaggucucugucugugaa

SEQ ID NO: 1584912 - RNA, 19 nt, Homo sapiens
  misc_RNA (1)...(19): siRNA sense strand
gaaaucacaagcuuacuuc

SEQ ID NO: 1584913 - RNA, 19 nt, Homo sapiens
  misc_RNA (1)...(19): siRNA sense strand
ggagaggauggucgaauaa

SEQ ID NO: 1584914 - RNA, 19 nt, Homo sapiens
  misc_RNA (1)...(19): siRNA sense strand
gcaaaagaccgaauugaaa

SEQ ID NO: 1584915 - RNA, 19 nt, Homo sapiens
  misc_RNA (1)...(19): siRNA sense strand
ggaggaagaagcaguacuu

SEQ ID NO: 1584916 - RNA, 19 nt, Homo sapiens
  misc_RNA (1)...(19): siRNA sense strand
guucaccagucugucauua

SEQ ID NO: 1584917 - RNA, 19 nt, Homo sapiens
  misc_RNA (1)...(19): siRNA sense strand
gaaggagaccaucaguuau

SEQ ID NO: 1584918 - RNA, 19 nt, Homo sapiens
  misc_RNA (1)...(19): siRNA sense strand
guuauugugugauaucaga

SEQ ID NO: 1584919 - RNA, 19 nt, Homo sapiens
  misc_RNA (1)...(19): siRNA sense strand
gcugaaggcucaugaagcu

SEQ ID NO: 1584920 - RNA, 19 nt, Homo sapiens
  misc_RNA (1)...(19): siRNA sense strand
gcacugauccugcaaaaga

SEQ ID NO: 1584921 - RNA, 19 nt, Homo sapiens
  misc_RNA (1)...(19): siRNA sense strand
gcugaaaugugggaaguuc

SEQ ID NO: 1584922 - RNA, 19 nt, Homo sapiens
  misc_RNA (1)...(19): siRNA sense strand
ucacaaggaagcuguaaga

SEQ ID NO: 1584923 - RNA, 19 nt, Homo sapiens
  misc_RNA (1)...(19): siRNA sense strand
caaggaggaagaagcagua

SEQ ID NO: 1584924 - RNA, 19 nt, Homo sapiens
  misc_RNA (1)...(19): siRNA sense strand
uggccaagauggaauguug

SEQ ID NO: 1584925 - RNA, 19 nt, Homo sapiens
  misc_RNA (1)...(19): siRNA sense strand
ugauagacaucccaaccaa

SEQ ID NO: 1584926 - RNA, 19 nt, Homo sapiens
  misc_RNA (1)...(19): siRNA sense strand
cagaagcaauuuauguuac

SEQ ID NO: 1584927 - RNA, 19 nt, Homo sapiens
  misc_RNA (1)...(19): siRNA sense strand
guaagaaccauagacaaug

SEQ ID NO: 1584928 - RNA, 19 nt, Homo sapiens
  misc_RNA (1)...(19): siRNA sense strand
gauguuagacaagguacua

SEQ ID NO: 1584929 - RNA, 19 nt, Homo sapiens
  misc_RNA (1)...(19): siRNA sense strand
aagauggaauguugaguau

SEQ ID NO: 1584930 - RNA, 19 nt, Homo sapiens
  misc_RNA (1)...(19): siRNA sense strand
cgaaguuugugucccagaa

SEQ ID NO: 1584931 - RNA, 19 nt, Homo sapiens
  misc_RNA (1)...(19): siRNA sense strand
aauaugggauuucagacaa

SEQ ID NO: 1584932 - RNA, 19 nt, Homo sapiens
  misc_RNA (1)...(19): siRNA sense strand
gacaaugcagauaguagua

SEQ ID NO: 1584933 - RNA, 19 nt, Homo sapiens
  misc_RNA (1)...(19): siRNA sense strand
gaggauggucgaauaaauc

SEQ ID NO: 1584934 - RNA, 19 nt, Homo sapiens
  misc_RNA (1)...(19): siRNA sense strand
ccacagauguaccugaaaa

SEQ ID NO: 1584935 - RNA, 19 nt, Homo sapiens
  misc_RNA (1)...(19): siRNA sense strand
uaagaaccauagacaaugc

SEQ ID NO: 1584936 - RNA, 19 nt, Homo sapiens
  misc_RNA (1)...(19): siRNA sense strand
gaaggcucaugaagcugaa

SEQ ID NO: 1584937 - RNA, 19 nt, Homo sapiens
  misc_RNA (1)...(19): siRNA sense strand
gaaguuugugucccagaaa

SEQ ID NO: 1584938 - RNA, 19 nt, Homo sapiens
  misc_RNA (1)...(19): siRNA sense strand
uaaccaagcuaauguucac

SEQ ID NO: 1584939 - RNA, 19 nt, Homo sapiens
  misc_RNA (1)...(19): siRNA sense strand
agaaaucguuacaguugga

SEQ ID NO: 1584940 - RNA, 19 nt, Homo sapiens
  misc_RNA (1)...(19): siRNA sense strand
cauagacaaugcagauagu

SEQ ID NO: 1584941 - RNA, 19 nt, Homo sapiens
  misc_RNA (1)...(19): siRNA sense strand
gaaauuuaugcgaaguuug

SEQ ID NO: 1584942 - RNA, 19 nt, Homo sapiens
  misc_RNA (1)...(19): siRNA sense strand
gaaccgaugcagaagcaau

SEQ ID NO: 1584943 - RNA, 19 nt, Homo sapiens
  misc_RNA (1)...(19): siRNA sense strand
uuagguccuugucuuguuu

SEQ ID NO: 1584944 - RNA, 19 nt, Homo sapiens
  misc_RNA (1)...(19): siRNA sense strand
guacuaugccuguaucucu

SEQ ID NO: 1584945 - RNA, 19 nt, Homo sapiens
  misc_RNA (1)...(19): siRNA sense strand
uugaguauuugggauguua

SEQ ID NO: 1584946 - RNA, 19 nt, Homo sapiens
  misc_RNA (1)...(19): siRNA sense strand
agaggauggucgaauaaau

SEQ ID NO: 1584947 - RNA, 19 nt, Homo sapiens
  misc_RNA (1)...(19): siRNA sense strand
aacaggauguguaacaguu

SEQ ID NO: 1584948 - RNA, 19 nt, Homo sapiens
  misc_RNA (1)...(19): siRNA sense strand
gagaggauggucgaauaaa

SEQ ID NO: 1584949 - RNA, 19 nt, Homo sapiens
  misc_RNA (1)...(19): siRNA sense strand
aaacuuggacucugaugga

SEQ ID NO: 1584950 - RNA, 19 nt, Homo sapiens
  misc_RNA (1)...(19): siRNA sense strand
gacguucgcuacaggaucu

SEQ ID NO: 1584951 - RNA, 19 nt, Homo sapiens
  misc_RNA (1)...(19): siRNA sense strand
ugaaaucacaagcuuacuu

SEQ ID NO: 1584952 - RNA, 19 nt, Homo sapiens
  misc_RNA (1)...(19): siRNA sense strand
aaggagaccaucaguuauu

SEQ ID NO: 1584953 - RNA, 19 nt, Homo sapiens
  misc_RNA (1)...(19): siRNA sense strand
aauugucgcugcuucauca

SEQ ID NO: 1584954 - RNA, 19 nt, Homo sapiens
  misc_RNA (1)...(19): siRNA sense strand
uguaagaaccauagacaau

SEQ ID NO: 1584955 - RNA, 19 nt, Homo sapiens
  misc_RNA (1)...(19): siRNA sense strand
gaggaagaagcaguacuuu

SEQ ID NO: 1584956 - RNA, 19 nt, Homo sapiens
  misc_RNA (1)...(19): siRNA sense strand
cuccugagauucuuacugu

SEQ ID NO: 1584957 - RNA, 19 nt, Homo sapiens
  misc_RNA (1)...(19): siRNA sense strand
caaugcagauaguaguaca

SEQ ID NO: 1584958 - RNA, 19 nt, Homo sapiens
  misc_RNA (1)...(19): siRNA sense strand
gaaagaauugucgcugcuu

SEQ ID NO: 1584959 - RNA, 19 nt, Homo sapiens
  misc_RNA (1)...(19): siRNA sense strand
caagguacuaugccuguau

SEQ ID NO: 1584960 - RNA, 19 nt, Homo sapiens
  misc_RNA (1)...(19): siRNA sense strand
uacaggaucuugggacaau

SEQ ID NO: 1584961 - RNA, 19 nt, Homo sapiens
  misc_RNA (1)...(19): siRNA sense strand
gaucacaaggaagcuguaa

SEQ ID NO: 1584962 - RNA, 19 nt, Homo sapiens
  misc_RNA (1)...(19): siRNA sense strand
ggacuacagcucacuacca

SEQ ID NO: 1584963 - RNA, 19 nt, Homo sapiens
  misc_RNA (1)...(19): siRNA sense strand
uaccugcucugaagaugga

SEQ ID NO: 1584964 - RNA, 19 nt, Homo sapiens
  misc_RNA (1)...(19): siRNA sense strand
gaggaaauuuaugcgaagu

SEQ ID NO: 1584965 - RNA, 19 nt, Homo sapiens
  misc_RNA (1)...(19): siRNA sense strand
cagagcugaucacaaggaa

SEQ ID NO: 1584966 - RNA, 19 nt, Homo sapiens
  misc_RNA (1)...(19): siRNA sense strand
gaagcuguaagaaccauag

SEQ ID NO: 1584967 - RNA, 19 nt, Homo sapiens
  misc_RNA (1)...(19): siRNA sense strand
uauuugggauguuagacaa

SEQ ID NO: 1584968 - RNA, 19 nt, Homo sapiens
  misc_RNA (1)...(19): siRNA sense strand
ucuucgaacuccugagauu

SEQ ID NO: 1584969 - RNA, 19 nt, Homo sapiens
  misc_RNA (1)...(19): siRNA sense strand
acuccaugcuguaaccuuu

SEQ ID NO: 1584970 - RNA, 19 nt, Homo sapiens
  misc_RNA (1)...(19): siRNA sense strand
uuggaaacuuggacucuga

SEQ ID NO: 1584971 - RNA, 19 nt, Homo sapiens
  misc_RNA (1)...(19): siRNA sense strand
agaccgaauugaaaucaca

SEQ ID NO: 1584972 - RNA, 19 nt, Homo sapiens
  misc_RNA (1)...(19): siRNA sense strand
cuauagcagugcaccaugu

SEQ ID NO: 1584973 - RNA, 19 nt, Homo sapiens
  misc_RNA (1)...(19): siRNA sense strand
gggacaaugaggaaaauua

SEQ ID NO: 1584974 - RNA, 19 nt, Homo sapiens
  misc_RNA (1)...(19): siRNA sense strand
caaaagaccgaauugaaau

SEQ ID NO: 1584975 - RNA, 19 nt, Homo sapiens
  misc_RNA (1)...(19): siRNA sense strand
gcuguaagaaccauagaca

SEQ ID NO: 1584976 - RNA, 19 nt, Homo sapiens
  misc_RNA (1)...(19): siRNA sense strand
gagaccaucaguuauugug

SEQ ID NO: 1584977 - RNA, 19 nt, Homo sapiens
  misc_RNA (1)...(19): siRNA sense strand
ccacuguguugauagacau

SEQ ID NO: 1584978 - RNA, 19 nt, Homo sapiens
  misc_RNA (1)...(19): siRNA sense strand
gauuucagacaacaaggaa

SEQ ID NO: 1584979 - RNA, 19 nt, Homo sapiens
  misc_RNA (1)...(19): siRNA sense strand
ggacaaugaggaaaauuau

SEQ ID NO: 1584980 - RNA, 19 nt, Homo sapiens
  misc_RNA (1)...(19): siRNA sense strand
gugcaacaacccagaaauc

SEQ ID NO: 1584981 - RNA, 19 nt, Homo sapiens
  misc_RNA (1)...(19): siRNA sense strand
caacaggauguguaacagu

SEQ ID NO: 1584982 - RNA, 19 nt, Homo sapiens
  misc_RNA (1)...(19): siRNA sense strand
guaaccaagcuaauguuca

SEQ ID NO: 1584983 - RNA, 19 nt, Homo sapiens
  misc_RNA (1)...(19): siRNA sense strand
ggauuucagacaacaagga

SEQ ID NO: 1584984 - RNA, 19 nt, Homo sapiens
  misc_RNA (1)...(19): siRNA sense strand
gcaacaacccagaaaucgu

SEQ ID NO: 1584985 - RNA, 19 nt, Homo sapiens
  misc_RNA (1)...(19): siRNA sense strand
auggugauguaauggauuu

SEQ ID NO: 1584986 - RNA, 19 nt, Homo sapiens
  misc_RNA (1)...(19): siRNA sense strand
ucagacaacaaggaaauga

SEQ ID NO: 1584987 - RNA, 19 nt, Homo sapiens
  misc_RNA (1)...(19): siRNA sense strand
ccauagacaaugcagauag

SEQ ID NO: 1584988 - RNA, 19 nt, Homo sapiens
  misc_RNA (1)...(19): siRNA sense strand
gauggucgaauaaaucucu

SEQ ID NO: 1584989 - RNA, 19 nt, Homo sapiens
  misc_RNA (1)...(19): siRNA sense strand
uguggucuauuggagauuu

SEQ ID NO: 1584990 - RNA, 19 nt, Homo sapiens
  misc_RNA (1)...(19): siRNA sense strand
aggagaccaucaguuauug

SEQ ID NO: 1584991 - RNA, 19 nt, Homo sapiens
  misc_RNA (1)...(19): siRNA sense strand
cgaugcagaagcaauuuau

SEQ ID NO: 1584992 - RNA, 19 nt, Homo sapiens
  misc_RNA (1)...(19): siRNA sense strand
uggaaccgaugcagaagca

SEQ ID NO: 1584993 - RNA, 19 nt, Homo sapiens
  misc_RNA (1)...(19): siRNA sense strand
ugucucauagcauuaguaa

SEQ ID NO: 1584994 - RNA, 19 nt, Homo sapiens
  misc_RNA (1)...(19): siRNA sense strand
gaacuccugagauucuuac

SEQ ID NO: 1584995 - RNA, 19 nt, Homo sapiens
  misc_RNA (1)...(19): siRNA sense strand
cgaacuccugagauucuua

SEQ ID NO: 1584996 - RNA, 19 nt, Homo sapiens
  misc_RNA (1)...(19): siRNA sense strand
ccgaugcagaagcaauuua

SEQ ID NO: 1584997 - RNA, 19 nt, Homo sapiens
  misc_RNA (1)...(19): siRNA sense strand
ugauuuaucucugcaucga

SEQ ID NO: 1584998 - RNA, 19 nt, Homo sapiens
  misc_RNA (1)...(19): siRNA sense strand
cuacaggggugaagaccaa

SEQ ID NO: 1584999 - RNA, 19 nt, Homo sapiens
  misc_RNA (1)...(19): siRNA sense strand
gcgugucggucugcuuuua

SEQ ID NO: 1585000 - RNA, 19 nt, Homo sapiens
  misc_RNA (1)...(19): siRNA sense strand
gaaccacaguccacaagaa

SEQ ID NO: 1585001 - RNA, 19 nt, Homo sapiens
  misc_RNA (1)...(19): siRNA sense strand
gcaaugcacuuccucuuuc

SEQ ID NO: 1585002 - RNA, 19 nt, Homo sapiens
  misc_RNA (1)...(19): siRNA sense strand
ccaaugagguggcaugugu

SEQ ID NO: 1585003 - RNA, 19 nt, Homo sapiens
  misc_RNA (1)...(19): siRNA sense strand
gcaaaucuaugaaguacag

SEQ ID NO: 1585004 - RNA, 19 nt, Homo sapiens
  misc_RNA (1)...(19): siRNA sense strand
gcugaggacucugucauuu

SEQ ID NO: 1585005 - RNA, 19 nt, Homo sapiens
  misc_RNA (1)...(19): siRNA sense strand
gagcagcgguggacagauc

SEQ ID NO: 1585006 - RNA, 19 nt, Homo sapiens
  misc_RNA (1)...(19): siRNA sense strand
caaacagggugcagagguu

SEQ ID NO: 1585007 - RNA, 19 nt, Homo sapiens
  misc_RNA (1)...(19): siRNA sense strand
gcaccucaaugaccucaga

SEQ ID NO: 1585008 - RNA, 19 nt, Homo sapiens
  misc_RNA (1)...(19): siRNA sense strand
gugcagagguuccuaagca

SEQ ID NO: 1585009 - RNA, 19 nt, Homo sapiens
  misc_RNA (1)...(19): siRNA sense strand
ggacagaucaggagucucu

SEQ ID NO: 1585010 - RNA, 19 nt, Homo sapiens
  misc_RNA (1)...(19): siRNA sense strand
gaggauggcugagaagaag

SEQ ID NO: 1585011 - RNA, 19 nt, Homo sapiens
  misc_RNA (1)...(19): siRNA sense strand
ugaggacucugucauuugu

SEQ ID NO: 1585012 - RNA, 19 nt, Homo sapiens
  misc_RNA (1)...(19): siRNA sense strand
gagcacagccugccuuucu

SEQ ID NO: 1585013 - RNA, 19 nt, Homo sapiens
  misc_RNA (1)...(19): siRNA sense strand
caucaucuccucugaagug

SEQ ID NO: 1585014 - RNA, 19 nt, Homo sapiens
  misc_RNA (1)...(19): siRNA sense strand
gcagcaguuuggccacuug

SEQ ID NO: 1585015 - RNA, 19 nt, Homo sapiens
  misc_RNA (1)...(19): siRNA sense strand
caacguggccaugaccuuu

SEQ ID NO: 1585016 - RNA, 19 nt, Homo sapiens
  misc_RNA (1)...(19): siRNA sense strand
gccaaggcguuguaucugu

SEQ ID NO: 1585017 - RNA, 19 nt, Homo sapiens
  misc_RNA (1)...(19): siRNA sense strand
gauguuaucagccgaguca

SEQ ID NO: 1585018 - RNA, 19 nt, Homo sapiens
  misc_RNA (1)...(19): siRNA sense strand
gagccaaggcguuguaucu

SEQ ID NO: 1585019 - RNA, 19 nt, Homo sapiens
  misc_RNA (1)...(19): siRNA sense strand
gccaucaucuccucugaag

SEQ ID NO: 1585020 - RNA, 19 nt, Homo sapiens
  misc_RNA (1)...(19): siRNA sense strand
gcggcaaccucaccgacuu

SEQ ID NO: 1585021 - RNA, 19 nt, Homo sapiens
  misc_RNA (1)...(19): siRNA sense strand
gcugcaaaucuaugaagua

SEQ ID NO: 1585022 - RNA, 19 nt, Homo sapiens
  misc_RNA (1)...(19): siRNA sense strand
cauccuggcccguguggua

SEQ ID NO: 1585023 - RNA, 19 nt, Homo sapiens
  misc_RNA (1)...(19): siRNA sense strand
cuguacaucuuccugguuu

SEQ ID NO: 1585024 - RNA, 19 nt, Homo sapiens
  misc_RNA (1)...(19): siRNA sense strand
guacaucuuccugguuuau

SEQ ID NO: 1585025 - RNA, 19 nt, Homo sapiens
  misc_RNA (1)...(19): siRNA sense strand
gguuuaugcugccugcaau

SEQ ID NO: 1585026 - RNA, 19 nt, Homo sapiens
  misc_RNA (1)...(19): siRNA sense strand
ucaaugccuuggccaacga

SEQ ID NO: 1585027 - RNA, 19 nt, Homo sapiens
  misc_RNA (1)...(19): siRNA sense strand
ggacccagagcuguuguug

SEQ ID NO: 1585028 - RNA, 19 nt, Homo sapiens
  misc_RNA (1)...(19): siRNA sense strand
cgcaaugcacuuccucuuu

SEQ ID NO: 1585029 - RNA, 19 nt, Homo sapiens
  misc_RNA (1)...(19): siRNA sense strand
guuaucagccgagucaaug

SEQ ID NO: 1585030 - RNA, 19 nt, Homo sapiens
  misc_RNA (1)...(19): siRNA sense strand
ccauccugcugcaaaucua

SEQ ID NO: 1585031 - RNA, 19 nt, Homo sapiens
  misc_RNA (1)...(19): siRNA sense strand
caaccacagcaccagcuuu

SEQ ID NO: 1585032 - RNA, 19 nt, Homo sapiens
  misc_RNA (1)...(19): siRNA sense strand
cagccaucaucuccucuga

SEQ ID NO: 1585033 - RNA, 19 nt, Homo sapiens
  misc_RNA (1)...(19): siRNA sense strand
gcucagaggaggcaaacag

SEQ ID NO: 1585034 - RNA, 19 nt, Homo sapiens
  misc_RNA (1)...(19): siRNA sense strand
gcugagccaaggcguugua

SEQ ID NO: 1585035 - RNA, 19 nt, Homo sapiens
  misc_RNA (1)...(19): siRNA sense strand
cugcaaaucuaugaaguac

SEQ ID NO: 1585036 - RNA, 19 nt, Homo sapiens
  misc_RNA (1)...(19): siRNA sense strand
ugcagaggauggcugagaa

SEQ ID NO: 1585037 - RNA, 19 nt, Homo sapiens
  misc_RNA (1)...(19): siRNA sense strand
caaugcacuuccucuuucu

SEQ ID NO: 1585038 - RNA, 19 nt, Homo sapiens
  misc_RNA (1)...(19): siRNA sense strand
acccagagcuguuguugac

SEQ ID NO: 1585039 - RNA, 19 nt, Homo sapiens
  misc_RNA (1)...(19): siRNA sense strand
ccgcacugcuggcuguugu

SEQ ID NO: 1585040 - RNA, 19 nt, Homo sapiens
  misc_RNA (1)...(19): siRNA sense strand
gcacagccugccuuucucu

SEQ ID NO: 1585041 - RNA, 19 nt, Homo sapiens
  misc_RNA (1)...(19): siRNA sense strand
gaggucaacguggccauga

SEQ ID NO: 1585042 - RNA, 19 nt, Homo sapiens
  misc_RNA (1)...(19): siRNA sense strand
ggucugggugggccaaaga

SEQ ID NO: 1585043 - RNA, 19 nt, Homo sapiens
  misc_RNA (1)...(19): siRNA sense strand
uguacaucuuccugguuua

SEQ ID NO: 1585044 - RNA, 19 nt, Homo sapiens
  misc_RNA (1)...(19): siRNA sense strand
gcuggccucucuggaguca

SEQ ID NO: 1585045 - RNA, 19 nt, Homo sapiens
  misc_RNA (1)...(19): siRNA sense strand
gauaugggccacggugaag

SEQ ID NO: 1585046 - RNA, 19 nt, Homo sapiens
  misc_RNA (1)...(19): siRNA sense strand
gcuguggcguguccuucug

SEQ ID NO: 1585047 - RNA, 19 nt, Homo sapiens
  misc_RNA (1)...(19): siRNA sense strand
guggacagaucaggagucu

SEQ ID NO: 1585048 - RNA, 19 nt, Homo sapiens
  misc_RNA (1)...(19): siRNA sense strand
gcaaccacagcaccagcuu

SEQ ID NO: 1585049 - RNA, 19 nt, Homo sapiens
  misc_RNA (1)...(19): siRNA sense strand
gacccagagcuguuguuga

SEQ ID NO: 1585050 - RNA, 19 nt, Homo sapiens
  misc_RNA (1)...(19): siRNA sense strand
agaggauggcugagaagaa

SEQ ID NO: 1585051 - RNA, 19 nt, Homo sapiens
  misc_RNA (1)...(19): siRNA sense strand
ccaccaccuucuugcucuu

SEQ ID NO: 1585052 - RNA, 19 nt, Homo sapiens
  misc_RNA (1)...(19): siRNA sense strand
aaccacagcaccagcuuug

SEQ ID NO: 1585053 - RNA, 19 nt, Homo sapiens
  misc_RNA (1)...(19): siRNA sense strand
ggaaagaacugcacagcuu

SEQ ID NO: 1585054 - RNA, 19 nt, Homo sapiens
  misc_RNA (1)...(19): siRNA sense strand
gagaggagcugcaccuucu

SEQ ID NO: 1585055 - RNA, 19 nt, Homo sapiens
  misc_RNA (1)...(19): siRNA sense strand
gcagagccaucaccacaga

SEQ ID NO: 1585056 - RNA, 19 nt, Homo sapiens
  misc_RNA (1)...(19): siRNA sense strand
gaagagaaccugaggaaaa

SEQ ID NO: 1585057 - RNA, 19 nt, Homo sapiens
  misc_RNA (1)...(19): siRNA sense strand
cauaucaccucuccuacaa

SEQ ID NO: 1585058 - RNA, 19 nt, Homo sapiens
  misc_RNA (1)...(19): siRNA sense strand
uaucaccucuccuacaauu

SEQ ID NO: 1585059 - RNA, 19 nt, Homo sapiens
  misc_RNA (1)...(19): siRNA sense strand
gagcugcaccuucuucauu

SEQ ID NO: 1585060 - RNA, 19 nt, Homo sapiens
  misc_RNA (1)...(19): siRNA sense strand
gaaguucggguuguucuug

SEQ ID NO: 1585061 - RNA, 19 nt, Homo sapiens
  misc_RNA (1)...(19): siRNA sense strand
cagaagagaaccugaggaa

SEQ ID NO: 1585062 - RNA, 19 nt, Homo sapiens
  misc_RNA (1)...(19): siRNA sense strand
ugaggccgauccacagaga

SEQ ID NO: 1585063 - RNA, 19 nt, Homo sapiens
  misc_RNA (1)...(19): siRNA sense strand
acgcaggacuucacaccuu

SEQ ID NO: 1585064 - RNA, 19 nt, Homo sapiens
  misc_RNA (1)...(19): siRNA sense strand
ucaccucuccuacaauuca

SEQ ID NO: 1585065 - RNA, 19 nt, Homo sapiens
  misc_RNA (1)...(19): siRNA sense strand
cugccuggaugcugaaguu

SEQ ID NO: 1585066 - RNA, 19 nt, Homo sapiens
  misc_RNA (1)...(19): siRNA sense strand
cagaccugcucccugagaa

SEQ ID NO: 1585067 - RNA, 19 nt, Homo sapiens
  misc_RNA (1)...(19): siRNA sense strand
cgaaagcgucugccuggau

SEQ ID NO: 1585068 - RNA, 19 nt, Homo sapiens
  misc_RNA (1)...(19): siRNA sense strand
gaggagcugcaccuucuuc

SEQ ID NO: 1585069 - RNA, 19 nt, Homo sapiens
  misc_RNA (1)...(19): siRNA sense strand
gcugcaccuucuucauuuc

SEQ ID NO: 1585070 - RNA, 19 nt, Homo sapiens
  misc_RNA (1)...(19): siRNA sense strand
agcugcaccuucuucauuu

SEQ ID NO: 1585071 - RNA, 19 nt, Homo sapiens
  misc_RNA (1)...(19): siRNA sense strand
ccauaucaccucuccuaca

SEQ ID NO: 1585072 - RNA, 19 nt, Homo sapiens
  misc_RNA (1)...(19): siRNA sense strand
gaucacgcaggacuucaca

SEQ ID NO: 1585073 - RNA, 19 nt, Homo sapiens
  misc_RNA (1)...(19): siRNA sense strand
gcucgcaccacuucgaaag

SEQ ID NO: 1585074 - RNA, 19 nt, Homo sapiens
  misc_RNA (1)...(19): siRNA sense strand
cgaagagccuugaacauaa

SEQ ID NO: 1585075 - RNA, 19 nt, Homo sapiens
  misc_RNA (1)...(19): siRNA sense strand
gaagagccuugaacauaaa

SEQ ID NO: 1585076 - RNA, 19 nt, Homo sapiens
  misc_RNA (1)...(19): siRNA sense strand
gaaccagaguuuacuucuu

SEQ ID NO: 1585077 - RNA, 19 nt, Homo sapiens
  misc_RNA (1)...(19): siRNA sense strand
uuagugaccuggaaauuug

SEQ ID NO: 1585078 - RNA, 19 nt, Homo sapiens
  misc_RNA (1)...(19): siRNA sense strand
ucgaagagccuugaacaua

SEQ ID NO: 1585079 - RNA, 19 nt, Homo sapiens
  misc_RNA (1)...(19): siRNA sense strand
aaacacagucuuuccaauu

SEQ ID NO: 1585080 - RNA, 19 nt, Homo sapiens
  misc_RNA (1)...(19): siRNA sense strand
gugaugaagagaagaguua

SEQ ID NO: 1585081 - RNA, 19 nt, Homo sapiens
  misc_RNA (1)...(19): siRNA sense strand
ggaaauuugugcugaugag

SEQ ID NO: 1585082 - RNA, 19 nt, Homo sapiens
  misc_RNA (1)...(19): siRNA sense strand
gaaaauuagugaccuggaa

SEQ ID NO: 1585083 - RNA, 19 nt, Homo sapiens
  misc_RNA (1)...(19): siRNA sense strand
aacacagucuuuccaauuu

SEQ ID NO: 1585084 - RNA, 19 nt, Homo sapiens
  misc_RNA (1)...(19): siRNA sense strand
uggcucagcuucgguuuaa

SEQ ID NO: 1585085 - RNA, 19 nt, Homo sapiens
  misc_RNA (1)...(19): siRNA sense strand
cagcacagguguucuucga

SEQ ID NO: 1585086 - RNA, 19 nt, Homo sapiens
  misc_RNA (1)...(19): siRNA sense strand
aaccagaguuuacuucuuc

SEQ ID NO: 1585087 - RNA, 19 nt, Homo sapiens
  misc_RNA (1)...(19): siRNA sense strand
ggugauggaaccagaguuu

SEQ ID NO: 1585088 - RNA, 19 nt, Homo sapiens
  misc_RNA (1)...(19): siRNA sense strand
aauuugugcugaugaguuu

SEQ ID NO: 1585089 - RNA, 19 nt, Homo sapiens
  misc_RNA (1)...(19): siRNA sense strand
gcugaugaguuuccuggau

SEQ ID NO: 1585090 - RNA, 19 nt, Homo sapiens
  misc_RNA (1)...(19): siRNA sense strand
acccgggacucuuuguuua

SEQ ID NO: 1585091 - RNA, 19 nt, Homo sapiens
  misc_RNA (1)...(19): siRNA sense strand
gaguuuacuucuucacaca

SEQ ID NO: 1585092 - RNA, 19 nt, Homo sapiens
  misc_RNA (1)...(19): siRNA sense strand
gacccgggacucuuuguuu

SEQ ID NO: 1585093 - RNA, 19 nt, Homo sapiens
  misc_RNA (1)...(19): siRNA sense strand
caaugacccgggacucuuu

SEQ ID NO: 1585094 - RNA, 19 nt, Homo sapiens
  misc_RNA (1)...(19): siRNA sense strand
gugucuaucuggaaauuuc

SEQ ID NO: 1585095 - RNA, 19 nt, Homo sapiens
  misc_RNA (1)...(19): siRNA sense strand
gaggagaauguaacucaga

SEQ ID NO: 1585096 - RNA, 19 nt, Homo sapiens
  misc_RNA (1)...(19): siRNA sense strand
ggguuuggauucagugcaa

SEQ ID NO: 1585097 - RNA, 19 nt, Homo sapiens
  misc_RNA (1)...(19): siRNA sense strand
gucagugucuaucuggaaa

SEQ ID NO: 1585098 - RNA, 19 nt, Homo sapiens
  misc_RNA (1)...(19): siRNA sense strand
caccacugcuggacuggaa

SEQ ID NO: 1585099 - RNA, 19 nt, Homo sapiens
  misc_RNA (1)...(19): siRNA sense strand
ccgggacucuuuguuuauu

SEQ ID NO: 1585100 - RNA, 19 nt, Homo sapiens
  misc_RNA (1)...(19): siRNA sense strand
ggagaauguaacucagaaa

SEQ ID NO: 1585101 - RNA, 19 nt, Homo sapiens
  misc_RNA (1)...(19): siRNA sense strand
cgaccugugugaugaagag

SEQ ID NO: 1585102 - RNA, 19 nt, Homo sapiens
  misc_RNA (1)...(19): siRNA sense strand
aggagaauguaacucagaa

SEQ ID NO: 1585103 - RNA, 19 nt, Homo sapiens
  misc_RNA (1)...(19): siRNA sense strand
cagugucuaucuggaaauu

SEQ ID NO: 1585104 - RNA, 19 nt, Homo sapiens
  misc_RNA (1)...(19): siRNA sense strand
aaaggucagugucuaucug

SEQ ID NO: 1585105 - RNA, 19 nt, Homo sapiens
  misc_RNA (1)...(19): siRNA sense strand
ggucagugucuaucuggaa

SEQ ID NO: 1585106 - RNA, 19 nt, Homo sapiens
  misc_RNA (1)...(19): siRNA sense strand
gcugagcaggcuucugaaa

SEQ ID NO: 1585107 - RNA, 19 nt, Homo sapiens
  misc_RNA (1)...(19): siRNA sense strand
caauguaccggguuuggau

SEQ ID NO: 1585108 - RNA, 19 nt, Homo sapiens
  misc_RNA (1)...(19): siRNA sense strand
gaacuggacacgcuuuuca

SEQ ID NO: 1585109 - RNA, 19 nt, Homo sapiens
  misc_RNA (1)...(19): siRNA sense strand
cacagucuuuccaauuuua

SEQ ID NO: 1585110 - RNA, 19 nt, Homo sapiens
  misc_RNA (1)...(19): siRNA sense strand
gugauggaaccagaguuua

SEQ ID NO: 1585111 - RNA, 19 nt, Homo sapiens
  misc_RNA (1)...(19): siRNA sense strand
aggcugagcaggcuucuga

SEQ ID NO: 1585112 - RNA, 19 nt, Homo sapiens
  misc_RNA (1)...(19): siRNA sense strand
aagggcagucuugauauua

SEQ ID NO: 1585113 - RNA, 19 nt, Homo sapiens
  misc_RNA (1)...(19): siRNA sense strand
gaggaacuggacacgcuuu

SEQ ID NO: 1585114 - RNA, 19 nt, Homo sapiens
  misc_RNA (1)...(19): siRNA sense strand
ggaaccagaguuuacuucu

SEQ ID NO: 1585115 - RNA, 19 nt, Homo sapiens
  misc_RNA (1)...(19): siRNA sense strand
gagaauguaacucagaaaa

SEQ ID NO: 1585116 - RNA, 19 nt, Homo sapiens
  misc_RNA (1)...(19): siRNA sense strand
uaugauccuucucgguguu

SEQ ID NO: 1585117 - RNA, 19 nt, Homo sapiens
  misc_RNA (1)...(19): siRNA sense strand
agggcagucuugauauuau

SEQ ID NO: 1585118 - RNA, 19 nt, Homo sapiens
  misc_RNA (1)...(19): siRNA sense strand
ucagccaccuaccgaauac

SEQ ID NO: 1585119 - RNA, 19 nt, Homo sapiens
  misc_RNA (1)...(19): siRNA sense strand
uggaggagaauguaacuca

SEQ ID NO: 1585120 - RNA, 19 nt, Homo sapiens
  misc_RNA (1)...(19): siRNA sense strand
cugacaauguaccggguuu

SEQ ID NO: 1585121 - RNA, 19 nt, Homo sapiens
  misc_RNA (1)...(19): siRNA sense strand
uuccacagcuauagaacug

SEQ ID NO: 1585122 - RNA, 19 nt, Homo sapiens
  misc_RNA (1)...(19): siRNA sense strand
cgggacucuuuguuuauug

SEQ ID NO: 1585123 - RNA, 19 nt, Homo sapiens
  misc_RNA (1)...(19): siRNA sense strand
aaauuugugcugaugaguu

SEQ ID NO: 1585124 - RNA, 19 nt, Homo sapiens
  misc_RNA (1)...(19): siRNA sense strand
acaagaugcagaaggcuau

SEQ ID NO: 1585125 - RNA, 19 nt, Homo sapiens
  misc_RNA (1)...(19): siRNA sense strand
ugagcaggcuucugaaacc

SEQ ID NO: 1585126 - RNA, 19 nt, Homo sapiens
  misc_RNA (1)...(19): siRNA sense strand
gaaauuugugcugaugagu

SEQ ID NO: 1585127 - RNA, 19 nt, Homo sapiens
  misc_RNA (1)...(19): siRNA sense strand
acacagucuuuccaauuuu

SEQ ID NO: 1585128 - RNA, 19 nt, Homo sapiens
  misc_RNA (1)...(19): siRNA sense strand
gggacucuuuguuuauugc

SEQ ID NO: 1585129 - RNA, 19 nt, Homo sapiens
  misc_RNA (1)...(19): siRNA sense strand
auuagugaccuggaaauuu

SEQ ID NO: 1585130 - RNA, 19 nt, Homo sapiens
  misc_RNA (1)...(19): siRNA sense strand
gguccagacaaauucagaa

SEQ ID NO: 1585131 - RNA, 19 nt, Homo sapiens
  misc_RNA (1)...(19): siRNA sense strand
gaaaagaucugcauguuga

SEQ ID NO: 1585132 - RNA, 19 nt, Homo sapiens
  misc_RNA (1)...(19): siRNA sense strand
ggaaacagcucaguucuca

SEQ ID NO: 1585133 - RNA, 19 nt, Homo sapiens
  misc_RNA (1)...(19): siRNA sense strand
gcagaucacuugcagguau

SEQ ID NO: 1585134 - RNA, 19 nt, Homo sapiens
  misc_RNA (1)...(19): siRNA sense strand
ggaagcaaaugucuuuauc

SEQ ID NO: 1585135 - RNA, 19 nt, Homo sapiens
  misc_RNA (1)...(19): siRNA sense strand
gcaaucacacguacuguuu

SEQ ID NO: 1585136 - RNA, 19 nt, Homo sapiens
  misc_RNA (1)...(19): siRNA sense strand
ggaacucggugcagauaug

SEQ ID NO: 1585137 - RNA, 19 nt, Homo sapiens
  misc_RNA (1)...(19): siRNA sense strand
gagaggagauuugggauuc

SEQ ID NO: 1585138 - RNA, 19 nt, Homo sapiens
  misc_RNA (1)...(19): siRNA sense strand
ggaaucaucagaacccuaa

SEQ ID NO: 1585139 - RNA, 19 nt, Homo sapiens
  misc_RNA (1)...(19): siRNA sense strand
gguggaagaucagaauaaa

SEQ ID NO: 1585140 - RNA, 19 nt, Homo sapiens
  misc_RNA (1)...(19): siRNA sense strand
ggaggugugugaaaucugu

SEQ ID NO: 1585141 - RNA, 19 nt, Homo sapiens
  misc_RNA (1)...(19): siRNA sense strand
ggaagucagugccuauucu

SEQ ID NO: 1585142 - RNA, 19 nt, Homo sapiens
  misc_RNA (1)...(19): siRNA sense strand
gcaccuuucuggaguggaa

SEQ ID NO: 1585143 - RNA, 19 nt, Homo sapiens
  misc_RNA (1)...(19): siRNA sense strand
gcacugugagguucuuuaa

SEQ ID NO: 1585144 - RNA, 19 nt, Homo sapiens
  misc_RNA (1)...(19): siRNA sense strand
acugugagguucuuuaauu

SEQ ID NO: 1585145 - RNA, 19 nt, Homo sapiens
  misc_RNA (1)...(19): siRNA sense strand
cgaggucacugcauccauu

SEQ ID NO: 1585146 - RNA, 19 nt, Homo sapiens
  misc_RNA (1)...(19): siRNA sense strand
gacaaagugugcaguaucu

SEQ ID NO: 1585147 - RNA, 19 nt, Homo sapiens
  misc_RNA (1)...(19): siRNA sense strand
ucacaugacuuggcaaaca

SEQ ID NO: 1585148 - RNA, 19 nt, Homo sapiens
  misc_RNA (1)...(19): siRNA sense strand
cauuaagucuuguccagaa

SEQ ID NO: 1585149 - RNA, 19 nt, Homo sapiens
  misc_RNA (1)...(19): siRNA sense strand
gaaggaagucagugccuau

SEQ ID NO: 1585150 - RNA, 19 nt, Homo sapiens
  misc_RNA (1)...(19): siRNA sense strand
gggauucucuccaauugca

SEQ ID NO: 1585151 - RNA, 19 nt, Homo sapiens
  misc_RNA (1)...(19): siRNA sense strand
ggacaaagugugcaguauc

SEQ ID NO: 1585152 - RNA, 19 nt, Homo sapiens
  misc_RNA (1)...(19): siRNA sense strand
gaagggcuacugugccuau

SEQ ID NO: 1585153 - RNA, 19 nt, Homo sapiens
  misc_RNA (1)...(19): siRNA sense strand
ggaguggaaucaucagaac

SEQ ID NO: 1585154 - RNA, 19 nt, Homo sapiens
  misc_RNA (1)...(19): siRNA sense strand
gaggaaggcucacgaaaag

SEQ ID NO: 1585155 - RNA, 19 nt, Homo sapiens
  misc_RNA (1)...(19): siRNA sense strand
gaacucggugcagauauga

SEQ ID NO: 1585156 - RNA, 19 nt, Homo sapiens
  misc_RNA (1)...(19): siRNA sense strand
uguauuggguggaagauca

SEQ ID NO: 1585157 - RNA, 19 nt, Homo sapiens
  misc_RNA (1)...(19): siRNA sense strand
ccaauugcaaucacacgua

SEQ ID NO: 1585158 - RNA, 19 nt, Homo sapiens
  misc_RNA (1)...(19): siRNA sense strand
gggcuacugugccuaugga

SEQ ID NO: 1585159 - RNA, 19 nt, Homo sapiens
  misc_RNA (1)...(19): siRNA sense strand
agaugaagccgcauuccua

SEQ ID NO: 1585160 - RNA, 19 nt, Homo sapiens
  misc_RNA (1)...(19): siRNA sense strand
ggguggaagaucagaauaa

SEQ ID NO: 1585161 - RNA, 19 nt, Homo sapiens
  misc_RNA (1)...(19): siRNA sense strand
uaucagaguuuguaauucc

SEQ ID NO: 1585162 - RNA, 19 nt, Homo sapiens
  misc_RNA (1)...(19): siRNA sense strand
gcagaggaaggcucacgaa

SEQ ID NO: 1585163 - RNA, 19 nt, Homo sapiens
  misc_RNA (1)...(19): siRNA sense strand
ugagaaaccucggaaacag

SEQ ID NO: 1585164 - RNA, 19 nt, Homo sapiens
  misc_RNA (1)...(19): siRNA sense strand
gcuagcagagccugagaaa

SEQ ID NO: 1585165 - RNA, 19 nt, Homo sapiens
  misc_RNA (1)...(19): siRNA sense strand
cagaucacuugcagguauu

SEQ ID NO: 1585166 - RNA, 19 nt, Homo sapiens
  misc_RNA (1)...(19): siRNA sense strand
uggaagugauccuggagaa

SEQ ID NO: 1585167 - RNA, 19 nt, Homo sapiens
  misc_RNA (1)...(19): siRNA sense strand
agaaugccgugugauauca

SEQ ID NO: 1585168 - RNA, 19 nt, Homo sapiens
  misc_RNA (1)...(19): siRNA sense strand
ugacuuggcaaacagcaaa

SEQ ID NO: 1585169 - RNA, 19 nt, Homo sapiens
  misc_RNA (1)...(19): siRNA sense strand
aaacagcucaguucucaag

SEQ ID NO: 1585170 - RNA, 19 nt, Homo sapiens
  misc_RNA (1)...(19): siRNA sense strand
cgaguugauugaagcuuuc

SEQ ID NO: 1585171 - RNA, 19 nt, Homo sapiens
  misc_RNA (1)...(19): siRNA sense strand
acgaguugauugaagcuuu

SEQ ID NO: 1585172 - RNA, 19 nt, Homo sapiens
  misc_RNA (1)...(19): siRNA sense strand
gaacccggaaagcgugaaa

SEQ ID NO: 1585173 - RNA, 19 nt, Homo sapiens
  misc_RNA (1)...(19): siRNA sense strand
ccagaaugccgugugauau

SEQ ID NO: 1585174 - RNA, 19 nt, Homo sapiens
  misc_RNA (1)...(19): siRNA sense strand
aaucacacguacuguuugu

SEQ ID NO: 1585175 - RNA, 19 nt, Homo sapiens
  misc_RNA (1)...(19): siRNA sense strand
ccuauucucacaugacuug

SEQ ID NO: 1585176 - RNA, 19 nt, Homo sapiens
  misc_RNA (1)...(19): siRNA sense strand
gugcggcucugggauuuca

SEQ ID NO: 1585177 - RNA, 19 nt, Homo sapiens
  misc_RNA (1)...(19): siRNA sense strand
cagugcggcucugggauuu

SEQ ID NO: 1585178 - RNA, 19 nt, Homo sapiens
  misc_RNA (1)...(19): siRNA sense strand
ugaaaucuguaggcugcaa

SEQ ID NO: 1585179 - RNA, 19 nt, Homo sapiens
  misc_RNA (1)...(19): siRNA sense strand
cagaaugccgugugauauc

SEQ ID NO: 1585180 - RNA, 19 nt, Homo sapiens
  misc_RNA (1)...(19): siRNA sense strand
caggacaaagugugcagua

SEQ ID NO: 1585181 - RNA, 19 nt, Homo sapiens
  misc_RNA (1)...(19): siRNA sense strand
cagccgagcauggugagua

SEQ ID NO: 1585182 - RNA, 19 nt, Homo sapiens
  misc_RNA (1)...(19): siRNA sense strand
uagcagagccugagaaacc

SEQ ID NO: 1585183 - RNA, 19 nt, Homo sapiens
  misc_RNA (1)...(19): siRNA sense strand
gucuuuaucgccaugcuua

SEQ ID NO: 1585184 - RNA, 19 nt, Homo sapiens
  misc_RNA (1)...(19): siRNA sense strand
gaagcaaaugucuuuaucg

SEQ ID NO: 1585185 - RNA, 19 nt, Homo sapiens
  misc_RNA (1)...(19): siRNA sense strand
ugugauaucagaguuugua

SEQ ID NO: 1585186 - RNA, 19 nt, Homo sapiens
  misc_RNA (1)...(19): siRNA sense strand
cgugugauaucagaguuug

SEQ ID NO: 1585187 - RNA, 19 nt, Homo sapiens
  misc_RNA (1)...(19): siRNA sense strand
uccagaaugccgugugaua

SEQ ID NO: 1585188 - RNA, 19 nt, Homo sapiens
  misc_RNA (1)...(19): siRNA sense strand
ucuguaggcugcaagucuu

SEQ ID NO: 1585189 - RNA, 19 nt, Homo sapiens
  misc_RNA (1)...(19): siRNA sense strand
ggaagacccagccgagcau

SEQ ID NO: 1585190 - RNA, 19 nt, Homo sapiens
  misc_RNA (1)...(19): siRNA sense strand
ucugggauuucaucgagaa

SEQ ID NO: 1585191 - RNA, 19 nt, Homo sapiens
  misc_RNA (1)...(19): siRNA sense strand
aaagaacgaguugauugaa

SEQ ID NO: 1585192 - RNA, 19 nt, Homo sapiens
  misc_RNA (1)...(19): siRNA sense strand
cagaggaaggcucacgaaa

SEQ ID NO: 1585193 - RNA, 19 nt, Homo sapiens
  misc_RNA (1)...(19): siRNA sense strand
aagaacgaguugauugaag

SEQ ID NO: 1585194 - RNA, 19 nt, Homo sapiens
  misc_RNA (1)...(19): siRNA sense strand
gcaccauggcccacagugu

SEQ ID NO: 1585195 - RNA, 19 nt, Homo sapiens
  misc_RNA (1)...(19): siRNA sense strand
guucuuagagaccgaaauc

SEQ ID NO: 1585196 - RNA, 19 nt, Homo sapiens
  misc_RNA (1)...(19): siRNA sense strand
guaauuccaaguguguauu

SEQ ID NO: 1585197 - RNA, 19 nt, Homo sapiens
  misc_RNA (1)...(19): siRNA sense strand
uguccagaaugccguguga

SEQ ID NO: 1585198 - RNA, 19 nt, Homo sapiens
  misc_RNA (1)...(19): siRNA sense strand
agccgagcauggugaguaa

SEQ ID NO: 1585199 - RNA, 19 nt, Homo sapiens
  misc_RNA (1)...(19): siRNA sense strand
gaaaacuaacucacaugaa

SEQ ID NO: 1585200 - RNA, 19 nt, Homo sapiens
  misc_RNA (1)...(19): siRNA sense strand
ucagugcggcucugggauu

SEQ ID NO: 1585201 - RNA, 19 nt, Homo sapiens
  misc_RNA (1)...(19): siRNA sense strand
caaggggaccugcccauuu

SEQ ID NO: 1585202 - RNA, 19 nt, Homo sapiens
  misc_RNA (1)...(19): siRNA sense strand
gucagugccuauucucaca

SEQ ID NO: 1585203 - RNA, 19 nt, Homo sapiens
  misc_RNA (1)...(19): siRNA sense strand
aaaacuaacucacaugaac

SEQ ID NO: 1585204 - RNA, 19 nt, Homo sapiens
  misc_RNA (1)...(19): siRNA sense strand
uaauuccaaguguguauug

SEQ ID NO: 1585205 - RNA, 19 nt, Homo sapiens
  misc_RNA (1)...(19): siRNA sense strand
acccaaucauuaagucuug

SEQ ID NO: 1585206 - RNA, 19 nt, Homo sapiens
  misc_RNA (1)...(19): siRNA sense strand
gaaaacccaaucauuaagu

SEQ ID NO: 1585207 - RNA, 19 nt, Homo sapiens
  misc_RNA (1)...(19): siRNA sense strand
ugagaggagauuugggauu

SEQ ID NO: 1585208 - RNA, 19 nt, Homo sapiens
  misc_RNA (1)...(19): siRNA sense strand
caaucacacguacuguuug

SEQ ID NO: 1585209 - RNA, 19 nt, Homo sapiens
  misc_RNA (1)...(19): siRNA sense strand
gugagguucuuuaauucag

SEQ ID NO: 1585210 - RNA, 19 nt, Homo sapiens
  misc_RNA (1)...(19): siRNA sense strand
gaagucagugccuauucuc

SEQ ID NO: 1585211 - RNA, 19 nt, Homo sapiens
  misc_RNA (1)...(19): siRNA sense strand
gccgugugauaucagaguu

SEQ ID NO: 1585212 - RNA, 19 nt, Homo sapiens
  misc_RNA (1)...(19): siRNA sense strand
ggcacugugagguucuuua

SEQ ID NO: 1585213 - RNA, 19 nt, Homo sapiens
  misc_RNA (1)...(19): siRNA sense strand
uggaagcaaaugucuuuau

SEQ ID NO: 1585214 - RNA, 19 nt, Homo sapiens
  misc_RNA (1)...(19): siRNA sense strand
gaggucacugcauccauug

SEQ ID NO: 1585215 - RNA, 19 nt, Homo sapiens
  misc_RNA (1)...(19): siRNA sense strand
cugugagguucuuuaauuc

SEQ ID NO: 1585216 - RNA, 19 nt, Homo sapiens
  misc_RNA (1)...(19): siRNA sense strand
gaaacagcucaguucucaa

SEQ ID NO: 1585217 - RNA, 19 nt, Homo sapiens
  misc_RNA (1)...(19): siRNA sense strand
ggucacugcauccauugug

SEQ ID NO: 1585218 - RNA, 19 nt, Homo sapiens
  misc_RNA (1)...(19): siRNA sense strand
gaguuuguaauuccaagug

SEQ ID NO: 1585219 - RNA, 19 nt, Homo sapiens
  misc_RNA (1)...(19): siRNA sense strand
gacguucgaacacgagaug

SEQ ID NO: 1585220 - RNA, 19 nt, Homo sapiens
  misc_RNA (1)...(19): siRNA sense strand
ggaaggcucacgaaaagau

SEQ ID NO: 1585221 - RNA, 19 nt, Homo sapiens
  misc_RNA (1)...(19): siRNA sense strand
cacaugacuuggcaaacag

SEQ ID NO: 1585222 - RNA, 19 nt, Homo sapiens
  misc_RNA (1)...(19): siRNA sense strand
uaagucuuguccagaaugc

SEQ ID NO: 1585223 - RNA, 19 nt, Homo sapiens
  misc_RNA (1)...(19): siRNA sense strand
guucgaacacgagauggaa

SEQ ID NO: 1585224 - RNA, 19 nt, Homo sapiens
  misc_RNA (1)...(19): siRNA sense strand
gaaaagaaauggcgaccaa

SEQ ID NO: 1585225 - RNA, 19 nt, Homo sapiens
  misc_RNA (1)...(19): siRNA sense strand
ccaacaaggucgauuugau

SEQ ID NO: 1585226 - RNA, 19 nt, Homo sapiens
  misc_RNA (1)...(19): siRNA sense strand
caacaaggucgauuugaug

SEQ ID NO: 1585227 - RNA, 19 nt, Homo sapiens
  misc_RNA (1)...(19): siRNA sense strand
guaauuaggcaacagauuc

SEQ ID NO: 1585228 - RNA, 19 nt, Homo sapiens
  misc_RNA (1)...(19): siRNA sense strand
ggacccaccucucaauguc

SEQ ID NO: 1585229 - RNA, 19 nt, Homo sapiens
  misc_RNA (1)...(19): siRNA sense strand
ugaagacuccuaccugaaa

SEQ ID NO: 1585230 - RNA, 19 nt, Homo sapiens
  misc_RNA (1)...(19): siRNA sense strand
ugaaacauacggagauuga

SEQ ID NO: 1585231 - RNA, 19 nt, Homo sapiens
  misc_RNA (1)...(19): siRNA sense strand
ucaaagacagggagucauu

SEQ ID NO: 1585232 - RNA, 19 nt, Homo sapiens
  misc_RNA (1)...(19): siRNA sense strand
cgacaaagccuuccaugac

SEQ ID NO: 1585233 - RNA, 19 nt, Homo sapiens
  misc_RNA (1)...(19): siRNA sense strand
ugaccucguuagaguaauu

SEQ ID NO: 1585234 - RNA, 19 nt, Homo sapiens
  misc_RNA (1)...(19): siRNA sense strand
gccagaagaagaagaagaa

SEQ ID NO: 1585235 - RNA, 19 nt, Homo sapiens
  misc_RNA (1)...(19): siRNA sense strand
gaaauggcgaccaaacaca

SEQ ID NO: 1585236 - RNA, 19 nt, Homo sapiens
  misc_RNA (1)...(19): siRNA sense strand
acacaauauuccguacaua

SEQ ID NO: 1585237 - RNA, 19 nt, Homo sapiens
  misc_RNA (1)...(19): siRNA sense strand
caauauuccguacauagaa

SEQ ID NO: 1585238 - RNA, 19 nt, Homo sapiens
  misc_RNA (1)...(19): siRNA sense strand
gaagacuccuaccugaaac

SEQ ID NO: 1585239 - RNA, 19 nt, Homo sapiens
  misc_RNA (1)...(19): siRNA sense strand
cagcugggcaggaggaauu

SEQ ID NO: 1585240 - RNA, 19 nt, Homo sapiens
  misc_RNA (1)...(19): siRNA sense strand
gaagaucaccagggagcaa

SEQ ID NO: 1585241 - RNA, 19 nt, Homo sapiens
  misc_RNA (1)...(19): siRNA sense strand
caugaccucguuagaguaa

SEQ ID NO: 1585242 - RNA, 19 nt, Homo sapiens
  misc_RNA (1)...(19): siRNA sense strand
gugacaaccuccccacaua

SEQ ID NO: 1585243 - RNA, 19 nt, Homo sapiens
  misc_RNA (1)...(19): siRNA sense strand
uugaugcacuugaggaaga

SEQ ID NO: 1585244 - RNA, 19 nt, Homo sapiens
  misc_RNA (1)...(19): siRNA sense strand
ccugaaacauacggagauu

SEQ ID NO: 1585245 - RNA, 19 nt, Homo sapiens
  misc_RNA (1)...(19): siRNA sense strand
gcaaugugugaucuuguga

SEQ ID NO: 1585246 - RNA, 19 nt, Homo sapiens
  misc_RNA (1)...(19): siRNA sense strand
gccaaggacccaccucuca

SEQ ID NO: 1585247 - RNA, 19 nt, Homo sapiens
  misc_RNA (1)...(19): siRNA sense strand
gcgccaugcgggagcaaua

SEQ ID NO: 1585248 - RNA, 19 nt, Homo sapiens
  misc_RNA (1)...(19): siRNA sense strand
uccaugaccucguuagagu

SEQ ID NO: 1585249 - RNA, 19 nt, Homo sapiens
  misc_RNA (1)...(19): siRNA sense strand
caaggacccaccucucaau

SEQ ID NO: 1585250 - RNA, 19 nt, Homo sapiens
  misc_RNA (1)...(19): siRNA sense strand
acaauauuccguacauaga

SEQ ID NO: 1585251 - RNA, 19 nt, Homo sapiens
  misc_RNA (1)...(19): siRNA sense strand
aaacugcaaugugugaucu

SEQ ID NO: 1585252 - RNA, 19 nt, Homo sapiens
  misc_RNA (1)...(19): siRNA sense strand
aaacauacggagauugaca

SEQ ID NO: 1585253 - RNA, 19 nt, Homo sapiens
  misc_RNA (1)...(19): siRNA sense strand
acuccuaccugaaacauac

SEQ ID NO: 1585254 - RNA, 19 nt, Homo sapiens
  misc_RNA (1)...(19): siRNA sense strand
ggccacaggcacccacaaa

SEQ ID NO: 1585255 - RNA, 19 nt, Homo sapiens
  misc_RNA (1)...(19): siRNA sense strand
aaagugcccucaccaucca

SEQ ID NO: 1585256 - RNA, 19 nt, Homo sapiens
  misc_RNA (1)...(19): siRNA sense strand
ccaaggacccaccucucaa

SEQ ID NO: 1585257 - RNA, 19 nt, Homo sapiens
  misc_RNA (1)...(19): siRNA sense strand
cacaauauuccguacauag

SEQ ID NO: 1585258 - RNA, 19 nt, Homo sapiens
  misc_RNA (1)...(19): siRNA sense strand
ugacaaggccagcuuugag

SEQ ID NO: 1585259 - RNA, 19 nt, Homo sapiens
  misc_RNA (1)...(19): siRNA sense strand
gaucuuugugccugacuau

SEQ ID NO: 1585260 - RNA, 19 nt, Homo sapiens
  misc_RNA (1)...(19): siRNA sense strand
ggccaacaaggucgauuug

SEQ ID NO: 1585261 - RNA, 19 nt, Homo sapiens
  misc_RNA (1)...(19): siRNA sense strand
aaagccagaagaagaagaa

SEQ ID NO: 1585262 - RNA, 19 nt, Homo sapiens
  misc_RNA (1)...(19): siRNA sense strand
gaccucguuagaguaauua

SEQ ID NO: 1585263 - RNA, 19 nt, Homo sapiens
  misc_RNA (1)...(19): siRNA sense strand
ccacaggcacccacaaacu

SEQ ID NO: 1585264 - RNA, 19 nt, Homo sapiens
  misc_RNA (1)...(19): siRNA sense strand
ugcaaugugugaucuugug

SEQ ID NO: 1585265 - RNA, 19 nt, Homo sapiens
  misc_RNA (1)...(19): siRNA sense strand
gaccgcuuccaccagcuua

SEQ ID NO: 1585266 - RNA, 19 nt, Homo sapiens
  misc_RNA (1)...(19): siRNA sense strand
gcgaccaaacacaauauuc

SEQ ID NO: 1585267 - RNA, 19 nt, Homo sapiens
  misc_RNA (1)...(19): siRNA sense strand
caaagacagggagucauuc

SEQ ID NO: 1585268 - RNA, 19 nt, Homo sapiens
  misc_RNA (1)...(19): siRNA sense strand
gaagaagaagaaaaccaaa

SEQ ID NO: 1585269 - RNA, 19 nt, Homo sapiens
  misc_RNA (1)...(19): siRNA sense strand
caaacugcaaugugugauc

SEQ ID NO: 1585270 - RNA, 19 nt, Homo sapiens
  misc_RNA (1)...(19): siRNA sense strand
ucacugacaaggccagcuu

SEQ ID NO: 1585271 - RNA, 19 nt, Homo sapiens
  misc_RNA (1)...(19): siRNA sense strand
ccaugaccucguuagagua

SEQ ID NO: 1585272 - RNA, 19 nt, Homo sapiens
  misc_RNA (1)...(19): siRNA sense strand
uagaaaccagugccaagga

SEQ ID NO: 1585273 - RNA, 19 nt, Homo sapiens
  misc_RNA (1)...(19): siRNA sense strand
aacacaauauuccguacau

SEQ ID NO: 1585274 - RNA, 19 nt, Homo sapiens
  misc_RNA (1)...(19): siRNA sense strand
aaagaaauggcgaccaaac

SEQ ID NO: 1585275 - RNA, 19 nt, Homo sapiens
  misc_RNA (1)...(19): siRNA sense strand
gcacccacaaacugcaaug

SEQ ID NO: 1585276 - RNA, 19 nt, Homo sapiens
  misc_RNA (1)...(19): siRNA sense strand
ucgacaaagccuuccauga

SEQ ID NO: 1585277 - RNA, 19 nt, Homo sapiens
  misc_RNA (1)...(19): siRNA sense strand
aaauggcgaccaaacacaa

SEQ ID NO: 1585278 - RNA, 19 nt, Homo sapiens
  misc_RNA (1)...(19): siRNA sense strand
aagaaauggcgaccaaaca

SEQ ID NO: 1585279 - RNA, 19 nt, Homo sapiens
  misc_RNA (1)...(19): siRNA sense strand
caagacaguuguuacauuu

SEQ ID NO: 1585280 - RNA, 19 nt, Homo sapiens
  misc_RNA (1)...(19): siRNA sense strand
ccaagaagccaucaaagua

SEQ ID NO: 1585281 - RNA, 19 nt, Homo sapiens
  misc_RNA (1)...(19): siRNA sense strand
caagacaggugaauggaaa

SEQ ID NO: 1585282 - RNA, 19 nt, Homo sapiens
  misc_RNA (1)...(19): siRNA sense strand
ccaaucaccuuauaaugaa

SEQ ID NO: 1585283 - RNA, 19 nt, Homo sapiens
  misc_RNA (1)...(19): siRNA sense strand
ggacagaccaagaugauga

SEQ ID NO: 1585284 - RNA, 19 nt, Homo sapiens
  misc_RNA (1)...(19): siRNA sense strand
ccaagacaguuguuacauu

SEQ ID NO: 1585285 - RNA, 19 nt, Homo sapiens
  misc_RNA (1)...(19): siRNA sense strand
ggaaggaacacuaugcaaa

SEQ ID NO: 1585286 - RNA, 19 nt, Homo sapiens
  misc_RNA (1)...(19): siRNA sense strand
aaacagcuaucccauacaa

SEQ ID NO: 1585287 - RNA, 19 nt, Homo sapiens
  misc_RNA (1)...(19): siRNA sense strand
ggaaaggcccagaugauau

SEQ ID NO: 1585288 - RNA, 19 nt, Homo sapiens
  misc_RNA (1)...(19): siRNA sense strand
gcauagaggaugucagaaa

SEQ ID NO: 1585289 - RNA, 19 nt, Homo sapiens
  misc_RNA (1)...(19): siRNA sense strand
gacaugauaagcauacaua

SEQ ID NO: 1585290 - RNA, 19 nt, Homo sapiens
  misc_RNA (1)...(19): siRNA sense strand
cauagaggaugucagaaau

SEQ ID NO: 1585291 - RNA, 19 nt, Homo sapiens
  misc_RNA (1)...(19): siRNA sense strand
caucaaaguagaaagcaua

SEQ ID NO: 1585292 - RNA, 19 nt, Homo sapiens
  misc_RNA (1)...(19): siRNA sense strand
gaaaaugaauauccuguuc

SEQ ID NO: 1585293 - RNA, 19 nt, Homo sapiens
  misc_RNA (1)...(19): siRNA sense strand
gagcggacaugauaagcau

SEQ ID NO: 1585294 - RNA, 19 nt, Homo sapiens
  misc_RNA (1)...(19): siRNA sense strand
caagugguuugauaauuca

SEQ ID NO: 1585295 - RNA, 19 nt, Homo sapiens
  misc_RNA (1)...(19): siRNA sense strand
gaaaggcccagaugauauc

SEQ ID NO: 1585296 - RNA, 19 nt, Homo sapiens
  misc_RNA (1)...(19): siRNA sense strand
acacagaugaugcgaguuu

SEQ ID NO: 1585297 - RNA, 19 nt, Homo sapiens
  misc_RNA (1)...(19): siRNA sense strand
cccaaucaccuuauaauga

SEQ ID NO: 1585298 - RNA, 19 nt, Homo sapiens
  misc_RNA (1)...(19): siRNA sense strand
gaauauccuguucaauuug

SEQ ID NO: 1585299 - RNA, 19 nt, Homo sapiens
  misc_RNA (1)...(19): siRNA sense strand
caagaagccaucaaaguag

SEQ ID NO: 1585300 - RNA, 19 nt, Homo sapiens
  misc_RNA (1)...(19): siRNA sense strand
uagaggaugucagaaauca

SEQ ID NO: 1585301 - RNA, 19 nt, Homo sapiens
  misc_RNA (1)...(19): siRNA sense strand
ccaagaugaugaugaggau

SEQ ID NO: 1585302 - RNA, 19 nt, Homo sapiens
  misc_RNA (1)...(19): siRNA sense strand
gaaggaacacuaugcaaaa

SEQ ID NO: 1585303 - RNA, 19 nt, Homo sapiens
  misc_RNA (1)...(19): siRNA sense strand
caaaacagcuaucccauac

SEQ ID NO: 1585304 - RNA, 19 nt, Homo sapiens
  misc_RNA (1)...(19): siRNA sense strand
gcaaaacagcuaucccaua

SEQ ID NO: 1585305 - RNA, 19 nt, Homo sapiens
  misc_RNA (1)...(19): siRNA sense strand
gcauacauaaugaagaaga

SEQ ID NO: 1585306 - RNA, 19 nt, Homo sapiens
  misc_RNA (1)...(19): siRNA sense strand
uggaaaggcccagaugaua

SEQ ID NO: 1585307 - RNA, 19 nt, Homo sapiens
  misc_RNA (1)...(19): siRNA sense strand
caaaguagaaagcauagag

SEQ ID NO: 1585308 - RNA, 19 nt, Homo sapiens
  misc_RNA (1)...(19): siRNA sense strand
aagaagccaucaaaguaga

SEQ ID NO: 1585309 - RNA, 19 nt, Homo sapiens
  misc_RNA (1)...(19): siRNA sense strand
uagaaagcauagaggaugu

SEQ ID NO: 1585310 - RNA, 19 nt, Homo sapiens
  misc_RNA (1)...(19): siRNA sense strand
agaugaugaugaggauuua

SEQ ID NO: 1585311 - RNA, 19 nt, Homo sapiens
  misc_RNA (1)...(19): siRNA sense strand
agaccaagaugaugaugag

SEQ ID NO: 1585312 - RNA, 19 nt, Homo sapiens
  misc_RNA (1)...(19): siRNA sense strand
aagcauagaggaugucaga

SEQ ID NO: 1585313 - RNA, 19 nt, Homo sapiens
  misc_RNA (1)...(19): siRNA sense strand
gcaccccaaucaccuuaua

SEQ ID NO: 1585314 - RNA, 19 nt, Homo sapiens
  misc_RNA (1)...(19): siRNA sense strand
ucauuugguuccuguacaa

SEQ ID NO: 1585315 - RNA, 19 nt, Homo sapiens
  misc_RNA (1)...(19): siRNA sense strand
gaugaugaggauuuaguug

SEQ ID NO: 1585316 - RNA, 19 nt, Homo sapiens
  misc_RNA (1)...(19): siRNA sense strand
aagaugaugaugaggauuu

SEQ ID NO: 1585317 - RNA, 19 nt, Homo sapiens
  misc_RNA (1)...(19): siRNA sense strand
gaggaugucagaaaucagu

SEQ ID NO: 1585318 - RNA, 19 nt, Homo sapiens
  misc_RNA (1)...(19): siRNA sense strand
gaugaggauuuaguugaca

SEQ ID NO: 1585319 - RNA, 19 nt, Homo sapiens
  misc_RNA (1)...(19): siRNA sense strand
ugaagacuguguuuuggua

SEQ ID NO: 1585320 - RNA, 19 nt, Homo sapiens
  misc_RNA (1)...(19): siRNA sense strand
gcacaucaagacaggugaa

SEQ ID NO: 1585321 - RNA, 19 nt, Homo sapiens
  misc_RNA (1)...(19): siRNA sense strand
uuugguaguuggagaagaa

SEQ ID NO: 1585322 - RNA, 19 nt, Homo sapiens
  misc_RNA (1)...(19): siRNA sense strand
gaugucagaaaucagugua

SEQ ID NO: 1585323 - RNA, 19 nt, Homo sapiens
  misc_RNA (1)...(19): siRNA sense strand
ugggagcaaucauuugguu

SEQ ID NO: 1585324 - RNA, 19 nt, Homo sapiens
  misc_RNA (1)...(19): siRNA sense strand
caucaagacaggugaaugg

SEQ ID NO: 1585325 - RNA, 19 nt, Homo sapiens
  misc_RNA (1)...(19): siRNA sense strand
gaagccaucaaaguagaaa

SEQ ID NO: 1585326 - RNA, 19 nt, Homo sapiens
  misc_RNA (1)...(19): siRNA sense strand
uaaguggacagaccaagau

SEQ ID NO: 1585327 - RNA, 19 nt, Homo sapiens
  misc_RNA (1)...(19): siRNA sense strand
gcaauggaaaggcccagau

SEQ ID NO: 1585328 - RNA, 19 nt, Homo sapiens
  misc_RNA (1)...(19): siRNA sense strand
gaaagcauagaggauguca

SEQ ID NO: 1585329 - RNA, 19 nt, Homo sapiens
  misc_RNA (1)...(19): siRNA sense strand
aggcccagaugauauccua

SEQ ID NO: 1585330 - RNA, 19 nt, Homo sapiens
  misc_RNA (1)...(19): siRNA sense strand
cccagaugauauccuacua

SEQ ID NO: 1585331 - RNA, 19 nt, Homo sapiens
  misc_RNA (1)...(19): siRNA sense strand
ggacaugauaagcauacau

SEQ ID NO: 1585332 - RNA, 19 nt, Homo sapiens
  misc_RNA (1)...(19): siRNA sense strand
caauggaaaggcccagaug

SEQ ID NO: 1585333 - RNA, 19 nt, Homo sapiens
  misc_RNA (1)...(19): siRNA sense strand
ucaagacaggugaauggaa

SEQ ID NO: 1585334 - RNA, 19 nt, Homo sapiens
  misc_RNA (1)...(19): siRNA sense strand
gacuguccuucaucuacuu

SEQ ID NO: 1585335 - RNA, 19 nt, Homo sapiens
  misc_RNA (1)...(19): siRNA sense strand
gaugaugcgaguuucaagu

SEQ ID NO: 1585336 - RNA, 19 nt, Homo sapiens
  misc_RNA (1)...(19): siRNA sense strand
ggagcggacaugauaagca

SEQ ID NO: 1585337 - RNA, 19 nt, Homo sapiens
  misc_RNA (1)...(19): siRNA sense strand
uaaugaagacuguguuuug

SEQ ID NO: 1585338 - RNA, 19 nt, Homo sapiens
  misc_RNA (1)...(19): siRNA sense strand
ucuccaagaagccaucaaa

SEQ ID NO: 1585339 - RNA, 19 nt, Homo sapiens
  misc_RNA (1)...(19): siRNA sense strand
gcacgguaauuuugacagu

SEQ ID NO: 1585340 - RNA, 19 nt, Homo sapiens
  misc_RNA (1)...(19): siRNA sense strand
ugaugaggauuuaguugac

SEQ ID NO: 1585341 - RNA, 19 nt, Homo sapiens
  misc_RNA (1)...(19): siRNA sense strand
guggacagaccaagaugau

SEQ ID NO: 1585342 - RNA, 19 nt, Homo sapiens
  misc_RNA (1)...(19): siRNA sense strand
gaauaugguugcagaauug

SEQ ID NO: 1585343 - RNA, 19 nt, Homo sapiens
  misc_RNA (1)...(19): siRNA sense strand
ggacaaagaguaugugaaa

SEQ ID NO: 1585344 - RNA, 19 nt, Homo sapiens
  misc_RNA (1)...(19): siRNA sense strand
gaacaugucauuccugaaa

SEQ ID NO: 1585345 - RNA, 19 nt, Homo sapiens
  misc_RNA (1)...(19): siRNA sense strand
gaucaaaacuccagaaauu

SEQ ID NO: 1585346 - RNA, 19 nt, Homo sapiens
  misc_RNA (1)...(19): siRNA sense strand
gaagagcuaucuccaggaa

SEQ ID NO: 1585347 - RNA, 19 nt, Homo sapiens
  misc_RNA (1)...(19): siRNA sense strand
ggaauaugguugcagaauu

SEQ ID NO: 1585348 - RNA, 19 nt, Homo sapiens
  misc_RNA (1)...(19): siRNA sense strand
caagauagaggcagaaauu

SEQ ID NO: 1585349 - RNA, 19 nt, Homo sapiens
  misc_RNA (1)...(19): siRNA sense strand
caagacaaguugaacaaga

SEQ ID NO: 1585350 - RNA, 19 nt, Homo sapiens
  misc_RNA (1)...(19): siRNA sense strand
gagaaucugucacucaaau

SEQ ID NO: 1585351 - RNA, 19 nt, Homo sapiens
  misc_RNA (1)...(19): siRNA sense strand
ccaggaagaugcccauuau

SEQ ID NO: 1585352 - RNA, 19 nt, Homo sapiens
  misc_RNA (1)...(19): siRNA sense strand
uggagaaacuuaaggagua

SEQ ID NO: 1585353 - RNA, 19 nt, Homo sapiens
  misc_RNA (1)...(19): siRNA sense strand
gaaaguggacaaagaguau

SEQ ID NO: 1585354 - RNA, 19 nt, Homo sapiens
  misc_RNA (1)...(19): siRNA sense strand
gcucaucauugguguugua

SEQ ID NO: 1585355 - RNA, 19 nt, Homo sapiens
  misc_RNA (1)...(19): siRNA sense strand
ucacucaaaucaugaagaa

SEQ ID NO: 1585356 - RNA, 19 nt, Homo sapiens
  misc_RNA (1)...(19): siRNA sense strand
caagcuggcugucaaauac

SEQ ID NO: 1585357 - RNA, 19 nt, Homo sapiens
  misc_RNA (1)...(19): siRNA sense strand
gcucugggaucccgugauu

SEQ ID NO: 1585358 - RNA, 19 nt, Homo sapiens
  misc_RNA (1)...(19): siRNA sense strand
ccacaaaagccaagaauua

SEQ ID NO: 1585359 - RNA, 19 nt, Homo sapiens
  misc_RNA (1)...(19): siRNA sense strand
caucauugguguuguauag

SEQ ID NO: 1585360 - RNA, 19 nt, Homo sapiens
  misc_RNA (1)...(19): siRNA sense strand
gaacggcuauguugaagcu

SEQ ID NO: 1585361 - RNA, 19 nt, Homo sapiens
  misc_RNA (1)...(19): siRNA sense strand
gauauuagcaagaacaugu

SEQ ID NO: 1585362 - RNA, 19 nt, Homo sapiens
  misc_RNA (1)...(19): siRNA sense strand
gaacagaaagcauacugau

SEQ ID NO: 1585363 - RNA, 19 nt, Homo sapiens
  misc_RNA (1)...(19): siRNA sense strand
aagaguaugugaaagcuuu

SEQ ID NO: 1585364 - RNA, 19 nt, Homo sapiens
  misc_RNA (1)...(19): siRNA sense strand
gaaacgaguagcuauacaa

SEQ ID NO: 1585365 - RNA, 19 nt, Homo sapiens
  misc_RNA (1)...(19): siRNA sense strand
acgaguagcuauacaauuc

SEQ ID NO: 1585366 - RNA, 19 nt, Homo sapiens
  misc_RNA (1)...(19): siRNA sense strand
ccagagaguuuauggucaa

SEQ ID NO: 1585367 - RNA, 19 nt, Homo sapiens
  misc_RNA (1)...(19): siRNA sense strand
uaugagcccuggcagcuaa

SEQ ID NO: 1585368 - RNA, 19 nt, Homo sapiens
  misc_RNA (1)...(19): siRNA sense strand
gauaugaguuugucuucca

SEQ ID NO: 1585369 - RNA, 19 nt, Homo sapiens
  misc_RNA (1)...(19): siRNA sense strand
cagcugacacccauaagua

SEQ ID NO: 1585370 - RNA, 19 nt, Homo sapiens
  misc_RNA (1)...(19): siRNA sense strand
ggaaacgaguagcuauaca

SEQ ID NO: 1585371 - RNA, 19 nt, Homo sapiens
  misc_RNA (1)...(19): siRNA sense strand
ggacauugcaccaaguaug

SEQ ID NO: 1585372 - RNA, 19 nt, Homo sapiens
  misc_RNA (1)...(19): siRNA sense strand
caaaccugaugacugcuaa

SEQ ID NO: 1585373 - RNA, 19 nt, Homo sapiens
  misc_RNA (1)...(19): siRNA sense strand
gcaagaacaugucauuccu

SEQ ID NO: 1585374 - RNA, 19 nt, Homo sapiens
  misc_RNA (1)...(19): siRNA sense strand
ggugagaacggcuauguug

SEQ ID NO: 1585375 - RNA, 19 nt, Homo sapiens
  misc_RNA (1)...(19): siRNA sense strand
ggaagaugcccauuauugg

SEQ ID NO: 1585376 - RNA, 19 nt, Homo sapiens
  misc_RNA (1)...(19): siRNA sense strand
gaaauugugaggauagcuu

SEQ ID NO: 1585377 - RNA, 19 nt, Homo sapiens
  misc_RNA (1)...(19): siRNA sense strand
ugaacaagaccaaggauga

SEQ ID NO: 1585378 - RNA, 19 nt, Homo sapiens
  misc_RNA (1)...(19): siRNA sense strand
gacauugcaccaaguauga

SEQ ID NO: 1585379 - RNA, 19 nt, Homo sapiens
  misc_RNA (1)...(19): siRNA sense strand
gcuauacaauuccuaaagg

SEQ ID NO: 1585380 - RNA, 19 nt, Homo sapiens
  misc_RNA (1)...(19): siRNA sense strand
gauagaggcagaaauugug

SEQ ID NO: 1585381 - RNA, 19 nt, Homo sapiens
  misc_RNA (1)...(19): siRNA sense strand
cauuauuggucguaagauu

SEQ ID NO: 1585382 - RNA, 19 nt, Homo sapiens
  misc_RNA (1)...(19): siRNA sense strand
gagcucaucugcuguuuug

SEQ ID NO: 1585383 - RNA, 19 nt, Homo sapiens
  misc_RNA (1)...(19): siRNA sense strand
gaagaugcccauuauuggu

SEQ ID NO: 1585384 - RNA, 19 nt, Homo sapiens
  misc_RNA (1)...(19): siRNA sense strand
gcagaauuguccucagucu

SEQ ID NO: 1585385 - RNA, 19 nt, Homo sapiens
  misc_RNA (1)...(19): siRNA sense strand
ccaagcuggcugucaaaua

SEQ ID NO: 1585386 - RNA, 19 nt, Homo sapiens
  misc_RNA (1)...(19): siRNA sense strand
gaccaaggaugauauuagc

SEQ ID NO: 1585387 - RNA, 19 nt, Homo sapiens
  misc_RNA (1)...(19): siRNA sense strand
gaacaagaccaaggaugau

SEQ ID NO: 1585388 - RNA, 19 nt, Homo sapiens
  misc_RNA (1)...(19): siRNA sense strand
gggaggagaagcucacuga

SEQ ID NO: 1585389 - RNA, 19 nt, Homo sapiens
  misc_RNA (1)...(19): siRNA sense strand
ugacaucuaccgacuauca

SEQ ID NO: 1585390 - RNA, 19 nt, Homo sapiens
  misc_RNA (1)...(19): siRNA sense strand
gaagcuaccaaacagauca

SEQ ID NO: 1585391 - RNA, 19 nt, Homo sapiens
  misc_RNA (1)...(19): siRNA sense strand
gcagaaauugugaggauag

SEQ ID NO: 1585392 - RNA, 19 nt, Homo sapiens
  misc_RNA (1)...(19): siRNA sense strand
gaaucugucacucaaauca

SEQ ID NO: 1585393 - RNA, 19 nt, Homo sapiens
  misc_RNA (1)...(19): siRNA sense strand
ggaaguauacuccacaaaa

SEQ ID NO: 1585394 - RNA, 19 nt, Homo sapiens
  misc_RNA (1)...(19): siRNA sense strand
gagaacggcuauguugaag

SEQ ID NO: 1585395 - RNA, 19 nt, Homo sapiens
  misc_RNA (1)...(19): siRNA sense strand
gcaaugagaagagcuaucu

SEQ ID NO: 1585396 - RNA, 19 nt, Homo sapiens
  misc_RNA (1)...(19): siRNA sense strand
ugugaaggcuuauggagau

SEQ ID NO: 1585397 - RNA, 19 nt, Homo sapiens
  misc_RNA (1)...(19): siRNA sense strand
ggaacagaaagcauacuga

SEQ ID NO: 1585398 - RNA, 19 nt, Homo sapiens
  misc_RNA (1)...(19): siRNA sense strand
ggcagaaauugugaggaua

SEQ ID NO: 1585399 - RNA, 19 nt, Homo sapiens
  misc_RNA (1)...(19): siRNA sense strand
gucguaagauucaagacaa

SEQ ID NO: 1585400 - RNA, 19 nt, Homo sapiens
  misc_RNA (1)...(19): siRNA sense strand
gacaagaaguacaggaacu

SEQ ID NO: 1585401 - RNA, 19 nt, Homo sapiens
  misc_RNA (1)...(19): siRNA sense strand
ugaaaguggacaaagagua

SEQ ID NO: 1585402 - RNA, 19 nt, Homo sapiens
  misc_RNA (1)...(19): siRNA sense strand
gccaagaauuauguaaaug

SEQ ID NO: 1585403 - RNA, 19 nt, Homo sapiens
  misc_RNA (1)...(19): siRNA sense strand
gaaguauacuccacaaaag

SEQ ID NO: 1585404 - RNA, 19 nt, Homo sapiens
  misc_RNA (1)...(19): siRNA sense strand
ucgagaaucugucacucaa

SEQ ID NO: 1585405 - RNA, 19 nt, Homo sapiens
  misc_RNA (1)...(19): siRNA sense strand
gcaguucccacccaguauu

SEQ ID NO: 1585406 - RNA, 19 nt, Homo sapiens
  misc_RNA (1)...(19): siRNA sense strand
agucagaacuggaaaauau

SEQ ID NO: 1585407 - RNA, 19 nt, Homo sapiens
  misc_RNA (1)...(19): siRNA sense strand
ugagaacggcuauguugaa

SEQ ID NO: 1585408 - RNA, 19 nt, Homo sapiens
  misc_RNA (1)...(19): siRNA sense strand
gagcccuacuuagagauuu

SEQ ID NO: 1585409 - RNA, 19 nt, Homo sapiens
  misc_RNA (1)...(19): siRNA sense strand
gagaguuuauggucaaggu

SEQ ID NO: 1585410 - RNA, 19 nt, Homo sapiens
  misc_RNA (1)...(19): siRNA sense strand
ggagaaacuuaaggaguac

SEQ ID NO: 1585411 - RNA, 19 nt, Homo sapiens
  misc_RNA (1)...(19): siRNA sense strand
gaugaaugguucuccaaaa

SEQ ID NO: 1585412 - RNA, 19 nt, Homo sapiens
  misc_RNA (1)...(19): siRNA sense strand
acaguuuccucauggugua

SEQ ID NO: 1585413 - RNA, 19 nt, Homo sapiens
  misc_RNA (1)...(19): siRNA sense strand
aggaagaugcccauuauug

SEQ ID NO: 1585414 - RNA, 19 nt, Homo sapiens
  misc_RNA (1)...(19): siRNA sense strand
guagcuauacaauuccuaa

SEQ ID NO: 1585415 - RNA, 19 nt, Homo sapiens
  misc_RNA (1)...(19): siRNA sense strand
gaguuuauggucaagguuu

SEQ ID NO: 1585416 - RNA, 19 nt, Homo sapiens
  misc_RNA (1)...(19): siRNA sense strand
caaaucaugaagaauccua

SEQ ID NO: 1585417 - RNA, 19 nt, Homo sapiens
  misc_RNA (1)...(19): siRNA sense strand
gcauacugauggccugcaa

SEQ ID NO: 1585418 - RNA, 19 nt, Homo sapiens
  misc_RNA (1)...(19): siRNA sense strand
ggaccagauucguguggau

SEQ ID NO: 1585419 - RNA, 19 nt, Homo sapiens
  misc_RNA (1)...(19): siRNA sense strand
gauagcuuguucccuguuc

SEQ ID NO: 1585420 - RNA, 19 nt, Homo sapiens
  misc_RNA (1)...(19): siRNA sense strand
caagaccaaggaugauauu

SEQ ID NO: 1585421 - RNA, 19 nt, Homo sapiens
  misc_RNA (1)...(19): siRNA sense strand
agaauuguccucagucuuc

SEQ ID NO: 1585422 - RNA, 19 nt, Homo sapiens
  misc_RNA (1)...(19): siRNA sense strand
gcuaagggguggaacuuga

SEQ ID NO: 1585423 - RNA, 19 nt, Homo sapiens
  misc_RNA (1)...(19): siRNA sense strand
ccaaacagaucaucaaaac

SEQ ID NO: 1585424 - RNA, 19 nt, Homo sapiens
  misc_RNA (1)...(19): siRNA sense strand
agagcuaucuccaggaaca

SEQ ID NO: 1585425 - RNA, 19 nt, Homo sapiens
  misc_RNA (1)...(19): siRNA sense strand
ccaguuacuuugggaugaa

SEQ ID NO: 1585426 - RNA, 19 nt, Homo sapiens
  misc_RNA (1)...(19): siRNA sense strand
ccaaggaugauauuagcaa

SEQ ID NO: 1585427 - RNA, 19 nt, Homo sapiens
  misc_RNA (1)...(19): siRNA sense strand
aggaugauauuagcaagaa

SEQ ID NO: 1585428 - RNA, 19 nt, Homo sapiens
  misc_RNA (1)...(19): siRNA sense strand
agaaguacaggaacuauca

SEQ ID NO: 1585429 - RNA, 19 nt, Homo sapiens
  misc_RNA (1)...(19): siRNA sense strand
ucauugguguuguauagug

SEQ ID NO: 1585430 - RNA, 19 nt, Homo sapiens
  misc_RNA (1)...(19): siRNA sense strand
gaaggcuuauggagauuuu

SEQ ID NO: 1585431 - RNA, 19 nt, Homo sapiens
  misc_RNA (1)...(19): siRNA sense strand
caaagaguaugugaaagcu

SEQ ID NO: 1585432 - RNA, 19 nt, Homo sapiens
  misc_RNA (1)...(19): siRNA sense strand
guaagauucaagacaaguu

SEQ ID NO: 1585433 - RNA, 19 nt, Homo sapiens
  misc_RNA (1)...(19): siRNA sense strand
gccaguuacuuugggauga

SEQ ID NO: 1585434 - RNA, 19 nt, Homo sapiens
  misc_RNA (1)...(19): siRNA sense strand
caaagcauaucgggaucug

SEQ ID NO: 1585435 - RNA, 19 nt, Homo sapiens
  misc_RNA (1)...(19): siRNA sense strand
aggcagaaauugugaggau

SEQ ID NO: 1585436 - RNA, 19 nt, Homo sapiens
  misc_RNA (1)...(19): siRNA sense strand
ccaagaauuauguaaaugg

SEQ ID NO: 1585437 - RNA, 19 nt, Homo sapiens
  misc_RNA (1)...(19): siRNA sense strand
ucauuucugcaucacauua

SEQ ID NO: 1585438 - RNA, 19 nt, Homo sapiens
  misc_RNA (1)...(19): siRNA sense strand
ggagcacccauuugauuuc

SEQ ID NO: 1585439 - RNA, 19 nt, Homo sapiens
  misc_RNA (1)...(19): siRNA sense strand
gaugauauuagcaagaaca

SEQ ID NO: 1585440 - RNA, 19 nt, Homo sapiens
  misc_RNA (1)...(19): siRNA sense strand
ggccuuugagcccuacuua

SEQ ID NO: 1585441 - RNA, 19 nt, Homo sapiens
  misc_RNA (1)...(19): siRNA sense strand
aaagguguaaccagcauuu

SEQ ID NO: 1585442 - RNA, 19 nt, Homo sapiens
  misc_RNA (1)...(19): siRNA sense strand
gagaagagcugcagaauga

SEQ ID NO: 1585443 - RNA, 19 nt, Homo sapiens
  misc_RNA (1)...(19): siRNA sense strand
ggugagagcugaagcagua

SEQ ID NO: 1585444 - RNA, 19 nt, Homo sapiens
  misc_RNA (1)...(19): siRNA sense strand
gagagaagcugaaggugaa

SEQ ID NO: 1585445 - RNA, 19 nt, Homo sapiens
  misc_RNA (1)...(19): siRNA sense strand
acgaguggcugaauaauuu

SEQ ID NO: 1585446 - RNA, 19 nt, Homo sapiens
  misc_RNA (1)...(19): siRNA sense strand
aaacacgaguggcugaaua

SEQ ID NO: 1585447 - RNA, 19 nt, Homo sapiens
  misc_RNA (1)...(19): siRNA sense strand
guacaagccucgagagaag

SEQ ID NO: 1585448 - RNA, 19 nt, Homo sapiens
  misc_RNA (1)...(19): siRNA sense strand
gaauaaagagcgaguggaa

SEQ ID NO: 1585449 - RNA, 19 nt, Homo sapiens
  misc_RNA (1)...(19): siRNA sense strand
cagaagucgucaauuauga

SEQ ID NO: 1585450 - RNA, 19 nt, Homo sapiens
  misc_RNA (1)...(19): siRNA sense strand
ggacagggccaucgcuuug

SEQ ID NO: 1585451 - RNA, 19 nt, Homo sapiens
  misc_RNA (1)...(19): siRNA sense strand
ggacaucaaauuaagauca

SEQ ID NO: 1585452 - RNA, 19 nt, Homo sapiens
  misc_RNA (1)...(19): siRNA sense strand
gccaacagguuaaggaaau

SEQ ID NO: 1585453 - RNA, 19 nt, Homo sapiens
  misc_RNA (1)...(19): siRNA sense strand
aagaagaugucacagagaa

SEQ ID NO: 1585454 - RNA, 19 nt, Homo sapiens
  misc_RNA (1)...(19): siRNA sense strand
gaaauacauagcucaaaga

SEQ ID NO: 1585455 - RNA, 19 nt, Homo sapiens
  misc_RNA (1)...(19): siRNA sense strand
acacaaagcugaacaugcu

SEQ ID NO: 1585456 - RNA, 19 nt, Homo sapiens
  misc_RNA (1)...(19): siRNA sense strand
gaucacagaugagaaguac

SEQ ID NO: 1585457 - RNA, 19 nt, Homo sapiens
  misc_RNA (1)...(19): siRNA sense strand
agacaggacaucaaauuaa

SEQ ID NO: 1585458 - RNA, 19 nt, Homo sapiens
  misc_RNA (1)...(19): siRNA sense strand
gacaggacaucaaauuaag

SEQ ID NO: 1585459 - RNA, 19 nt, Homo sapiens
  misc_RNA (1)...(19): siRNA sense strand
gccaagaucaucaaaguga

SEQ ID NO: 1585460 - RNA, 19 nt, Homo sapiens
  misc_RNA (1)...(19): siRNA sense strand
gcagcgugguucuggauga

SEQ ID NO: 1585461 - RNA, 19 nt, Homo sapiens
  misc_RNA (1)...(19): siRNA sense strand
cagacaggacaucaaauua

SEQ ID NO: 1585462 - RNA, 19 nt, Homo sapiens
  misc_RNA (1)...(19): siRNA sense strand
gagaaacaccuccaaggau

SEQ ID NO: 1585463 - RNA, 19 nt, Homo sapiens
  misc_RNA (1)...(19): siRNA sense strand
ugaacaugcugaacgagaa

SEQ ID NO: 1585464 - RNA, 19 nt, Homo sapiens
  misc_RNA (1)...(19): siRNA sense strand
gggaggacgugaagaacga

SEQ ID NO: 1585465 - RNA, 19 nt, Homo sapiens
  misc_RNA (1)...(19): siRNA sense strand
ggacugagcccggagaaca

SEQ ID NO: 1585466 - RNA, 19 nt, Homo sapiens
  misc_RNA (1)...(19): siRNA sense strand
ccaguggguugcagucuga

SEQ ID NO: 1585467 - RNA, 19 nt, Homo sapiens
  misc_RNA (1)...(19): siRNA sense strand
agaaauacauagcucaaag

SEQ ID NO: 1585468 - RNA, 19 nt, Homo sapiens
  misc_RNA (1)...(19): siRNA sense strand
ucagacaggacaucaaauu

SEQ ID NO: 1585469 - RNA, 19 nt, Homo sapiens
  misc_RNA (1)...(19): siRNA sense strand
ugacagcccugaggagaau

SEQ ID NO: 1585470 - RNA, 19 nt, Homo sapiens
  misc_RNA (1)...(19): siRNA sense strand
ggaggaggccaaggacuuu

SEQ ID NO: 1585471 - RNA, 19 nt, Homo sapiens
  misc_RNA (1)...(19): siRNA sense strand
augcagagaccaugaauuu

SEQ ID NO: 1585472 - RNA, 19 nt, Homo sapiens
  misc_RNA (1)...(19): siRNA sense strand
agucgucaauuaugaguuu

SEQ ID NO: 1585473 - RNA, 19 nt, Homo sapiens
  misc_RNA (1)...(19): siRNA sense strand
gcacccuugucauggagua

SEQ ID NO: 1585474 - RNA, 19 nt, Homo sapiens
  misc_RNA (1)...(19): siRNA sense strand
gaagaacgagaucaacauc

SEQ ID NO: 1585475 - RNA, 19 nt, Homo sapiens
  misc_RNA (1)...(19): siRNA sense strand
ccccagaagucgucaauua

SEQ ID NO: 1585476 - RNA, 19 nt, Homo sapiens
  misc_RNA (1)...(19): siRNA sense strand
gcagaaauacauagcucaa

SEQ ID NO: 1585477 - RNA, 19 nt, Homo sapiens
  misc_RNA (1)...(19): siRNA sense strand
gacccacccucaccacaga

SEQ ID NO: 1585478 - RNA, 19 nt, Homo sapiens
  misc_RNA (1)...(19): siRNA sense strand
agaaguaccaccugacuga

SEQ ID NO: 1585479 - RNA, 19 nt, Homo sapiens
  misc_RNA (1)...(19): siRNA sense strand
gaacgagaucaacaucaug

SEQ ID NO: 1585480 - RNA, 19 nt, Homo sapiens
  misc_RNA (1)...(19): siRNA sense strand
ccaagaucaucaaagugaa

SEQ ID NO: 1585481 - RNA, 19 nt, Homo sapiens
  misc_RNA (1)...(19): siRNA sense strand
guccacaggugcacagaga

SEQ ID NO: 1585482 - RNA, 19 nt, Homo sapiens
  misc_RNA (1)...(19): siRNA sense strand
ccagaagucgucaauuaug

SEQ ID NO: 1585483 - RNA, 19 nt, Homo sapiens
  misc_RNA (1)...(19): siRNA sense strand
gcccugaggagaauaaaga

SEQ ID NO: 1585484 - RNA, 19 nt, Homo sapiens
  misc_RNA (1)...(19): siRNA sense strand
gaagaugucacagagaagu

SEQ ID NO: 1585485 - RNA, 19 nt, Homo sapiens
  misc_RNA (1)...(19): siRNA sense strand
ggccaggagugacgacaau

SEQ ID NO: 1585486 - RNA, 19 nt, Homo sapiens
  misc_RNA (1)...(19): siRNA sense strand
ggaagaagagggaggaaaa

SEQ ID NO: 1585487 - RNA, 19 nt, Homo sapiens
  misc_RNA (1)...(19): siRNA sense strand
ccaacagguuaaggaaauu

SEQ ID NO: 1585488 - RNA, 19 nt, Homo sapiens
  misc_RNA (1)...(19): siRNA sense strand
gaagagcugcagaaugagu

SEQ ID NO: 1585489 - RNA, 19 nt, Homo sapiens
  misc_RNA (1)...(19): siRNA sense strand
agaacgagaucaacaucau

SEQ ID NO: 1585490 - RNA, 19 nt, Homo sapiens
  misc_RNA (1)...(19): siRNA sense strand
cagagaaguugcagagcau

SEQ ID NO: 1585491 - RNA, 19 nt, Homo sapiens
  misc_RNA (1)...(19): siRNA sense strand
caacagguuaaggaaauuu

SEQ ID NO: 1585492 - RNA, 19 nt, Homo sapiens
  misc_RNA (1)...(19): siRNA sense strand
ucugugagggugugcauua

SEQ ID NO: 1585493 - RNA, 19 nt, Homo sapiens
  misc_RNA (1)...(19): siRNA sense strand
cgacaaugaccacgagguu

SEQ ID NO: 1585494 - RNA, 19 nt, Homo sapiens
  misc_RNA (1)...(19): siRNA sense strand
gguacaagccucgagagaa

SEQ ID NO: 1585495 - RNA, 19 nt, Homo sapiens
  misc_RNA (1)...(19): siRNA sense strand
gguggcggauuuccucaug

SEQ ID NO: 1585496 - RNA, 19 nt, Homo sapiens
  misc_RNA (1)...(19): siRNA sense strand
ggacacaaagcugaacaug

SEQ ID NO: 1585497 - RNA, 19 nt, Homo sapiens
  misc_RNA (1)...(19): siRNA sense strand
ccacguuccagaaaucaaa

SEQ ID NO: 1585498 - RNA, 19 nt, Homo sapiens
  misc_RNA (1)...(19): siRNA sense strand
ucucaaaucccaacuacug

SEQ ID NO: 1585499 - RNA, 19 nt, Homo sapiens
  misc_RNA (1)...(19): siRNA sense strand
aaagagaagagcugcagaa

SEQ ID NO: 1585500 - RNA, 19 nt, Homo sapiens
  misc_RNA (1)...(19): siRNA sense strand
aaucagacaggacaucaaa

SEQ ID NO: 1585501 - RNA, 19 nt, Homo sapiens
  misc_RNA (1)...(19): siRNA sense strand
auaaagagcgaguggaaga

SEQ ID NO: 1585502 - RNA, 19 nt, Homo sapiens
  misc_RNA (1)...(19): siRNA sense strand
gggccacguuccagaaauc

SEQ ID NO: 1585503 - RNA, 19 nt, Homo sapiens
  misc_RNA (1)...(19): siRNA sense strand
caaagaaaauggaagaaac

SEQ ID NO: 1585504 - RNA, 19 nt, Homo sapiens
  misc_RNA (1)...(19): siRNA sense strand
cugccaagaucaucaaagu

SEQ ID NO: 1585505 - RNA, 19 nt, Homo sapiens
  misc_RNA (1)...(19): siRNA sense strand
ggaucacagaugagaagua

SEQ ID NO: 1585506 - RNA, 19 nt, Homo sapiens
  misc_RNA (1)...(19): siRNA sense strand
gcugcacccuugucaugga

SEQ ID NO: 1585507 - RNA, 19 nt, Homo sapiens
  misc_RNA (1)...(19): siRNA sense strand
gaaacacgaguggcugaau

SEQ ID NO: 1585508 - RNA, 19 nt, Homo sapiens
  misc_RNA (1)...(19): siRNA sense strand
cagagcaugugccgagaca

SEQ ID NO: 1585509 - RNA, 19 nt, Homo sapiens
  misc_RNA (1)...(19): siRNA sense strand
ccacacagugccugaaaca

SEQ ID NO: 1585510 - RNA, 19 nt, Homo sapiens
  misc_RNA (1)...(19): siRNA sense strand
agucaucaccuacaugcua

SEQ ID NO: 1585511 - RNA, 19 nt, Homo sapiens
  misc_RNA (1)...(19): siRNA sense strand
caagaagaugucacagaga

SEQ ID NO: 1585512 - RNA, 19 nt, Homo sapiens
  misc_RNA (1)...(19): siRNA sense strand
cagcugcacccuugucaug

SEQ ID NO: 1585513 - RNA, 19 nt, Homo sapiens
  misc_RNA (1)...(19): siRNA sense strand
gccugacccugagcccuua

SEQ ID NO: 1585514 - RNA, 19 nt, Homo sapiens
  misc_RNA (1)...(19): siRNA sense strand
gaacaugcugaacgagaag

SEQ ID NO: 1585515 - RNA, 19 nt, Homo sapiens
  misc_RNA (1)...(19): siRNA sense strand
ccaggagugacgacaauga

SEQ ID NO: 1585516 - RNA, 19 nt, Homo sapiens
  misc_RNA (1)...(19): siRNA sense strand
gaaccugauccagcucuau

SEQ ID NO: 1585517 - RNA, 19 nt, Homo sapiens
  misc_RNA (1)...(19): siRNA sense strand
gcagaaugagugccacaca

SEQ ID NO: 1585518 - RNA, 19 nt, Homo sapiens
  misc_RNA (1)...(19): siRNA sense strand
gaagucgucaauuaugagu

SEQ ID NO: 1585519 - RNA, 19 nt, Homo sapiens
  misc_RNA (1)...(19): siRNA sense strand
ccucaagccggagaacaua

SEQ ID NO: 1585520 - RNA, 19 nt, Homo sapiens
  misc_RNA (1)...(19): siRNA sense strand
gaaggcggacgugcuggaa

SEQ ID NO: 1585521 - RNA, 19 nt, Homo sapiens
  misc_RNA (1)...(19): siRNA sense strand
cacgaguggcugaauaauu

SEQ ID NO: 1585522 - RNA, 19 nt, Homo sapiens
  misc_RNA (1)...(19): siRNA sense strand
cccgguugcuggucaaaga

SEQ ID NO: 1585523 - RNA, 19 nt, Homo sapiens
  misc_RNA (1)...(19): siRNA sense strand
gugaagaacgagaucaaca

SEQ ID NO: 1585524 - RNA, 19 nt, Homo sapiens
  misc_RNA (1)...(19): siRNA sense strand
gaaacaccuccaaggaucu

SEQ ID NO: 1585525 - RNA, 19 nt, Homo sapiens
  misc_RNA (1)...(19): siRNA sense strand
ccagggagaugguguuccu

SEQ ID NO: 1585526 - RNA, 19 nt, Homo sapiens
  misc_RNA (1)...(19): siRNA sense strand
cgucucaaaucccaacuac

SEQ ID NO: 1585527 - RNA, 19 nt, Homo sapiens
  misc_RNA (1)...(19): siRNA sense strand
gcuccugcacuuccaagaa

SEQ ID NO: 1585528 - RNA, 19 nt, Homo sapiens
  misc_RNA (1)...(19): siRNA sense strand
ucaagccggagaacauauu

SEQ ID NO: 1585529 - RNA, 19 nt, Homo sapiens
  misc_RNA (1)...(19): siRNA sense strand
gaccggaucacagaugaga

SEQ ID NO: 1585530 - RNA, 19 nt, Homo sapiens
  misc_RNA (1)...(19): siRNA sense strand
uggaccagcuccugcacuu

SEQ ID NO: 1585531 - RNA, 19 nt, Homo sapiens
  misc_RNA (1)...(19): siRNA sense strand
gagccuggcacgagaccaa

SEQ ID NO: 1585532 - RNA, 19 nt, Homo sapiens
  misc_RNA (1)...(19): siRNA sense strand
gaaggcagaggaggagcaa

SEQ ID NO: 1585533 - RNA, 19 nt, Homo sapiens
  misc_RNA (1)...(19): siRNA sense strand
ugacugcugccaacagguu

SEQ ID NO: 1585534 - RNA, 19 nt, Homo sapiens
  misc_RNA (1)...(19): siRNA sense strand
cagaaauacauagcucaaa

SEQ ID NO: 1585535 - RNA, 19 nt, Homo sapiens
  misc_RNA (1)...(19): siRNA sense strand
ccaccugacugagcuggau

SEQ ID NO: 1585536 - RNA, 19 nt, Homo sapiens
  misc_RNA (1)...(19): siRNA sense strand
ucacagaugagaaguacca

SEQ ID NO: 1585537 - RNA, 19 nt, Homo sapiens
  misc_RNA (1)...(19): siRNA sense strand
gcacagcugcacccuuguc

SEQ ID NO: 1585538 - RNA, 19 nt, Homo sapiens
  misc_RNA (1)...(19): siRNA sense strand
gaucuccauccacauacaa

SEQ ID NO: 1585539 - RNA, 19 nt, Homo sapiens
  misc_RNA (1)...(19): siRNA sense strand
aaacagaugcagagaccau

SEQ ID NO: 1585540 - RNA, 19 nt, Homo sapiens
  misc_RNA (1)...(19): siRNA sense strand
ugaagaacgagaucaacau

SEQ ID NO: 1585541 - RNA, 19 nt, Homo sapiens
  misc_RNA (1)...(19): siRNA sense strand
uaaacuguagcugggauuu

SEQ ID NO: 1585542 - RNA, 19 nt, Homo sapiens
  misc_RNA (1)...(19): siRNA sense strand
gaacuggccuugggugcuu

SEQ ID NO: 1585543 - RNA, 19 nt, Homo sapiens
  misc_RNA (1)...(19): siRNA sense strand
cagagcuucucaucaguaa

SEQ ID NO: 1585544 - RNA, 19 nt, Homo sapiens
  misc_RNA (1)...(19): siRNA sense strand
ccucagagcuucucaucag

SEQ ID NO: 1585545 - RNA, 19 nt, Homo sapiens
  misc_RNA (1)...(19): siRNA sense strand
gcacucaccaggacaguca

SEQ ID NO: 1585546 - RNA, 19 nt, Homo sapiens
  misc_RNA (1)...(19): siRNA sense strand
ucagagcuucucaucagua

SEQ ID NO: 1585547 - RNA, 19 nt, Homo sapiens
  misc_RNA (1)...(19): siRNA sense strand
caccaggacagucauagaa

SEQ ID NO: 1585548 - RNA, 19 nt, Homo sapiens
  misc_RNA (1)...(19): siRNA sense strand
ucacaauggugucccuuuu

SEQ ID NO: 1585549 - RNA, 19 nt, Homo sapiens
  misc_RNA (1)...(19): siRNA sense strand
caaaggcccagcucgagau

SEQ ID NO: 1585550 - RNA, 19 nt, Homo sapiens
  misc_RNA (1)...(19): siRNA sense strand
ccaggacagucauagaacu

SEQ ID NO: 1585551 - RNA, 19 nt, Homo sapiens
  misc_RNA (1)...(19): siRNA sense strand
ggccucagccucagagcuu

SEQ ID NO: 1585552 - RNA, 19 nt, Homo sapiens
  misc_RNA (1)...(19): siRNA sense strand
cacuguaucugugccaaga

SEQ ID NO: 1585553 - RNA, 19 nt, Homo sapiens
  misc_RNA (1)...(19): siRNA sense strand
aggcccagcucgagauuag

SEQ ID NO: 1585554 - RNA, 19 nt, Homo sapiens
  misc_RNA (1)...(19): siRNA sense strand
gauuagcccaggccacugu

SEQ ID NO: 1585555 - RNA, 19 nt, Homo sapiens
  misc_RNA (1)...(19): siRNA sense strand
guacaaaccuucaggaaau

SEQ ID NO: 1585556 - RNA, 19 nt, Homo sapiens
  misc_RNA (1)...(19): siRNA sense strand
caacaggcaucuaucauuu

SEQ ID NO: 1585557 - RNA, 19 nt, Homo sapiens
  misc_RNA (1)...(19): siRNA sense strand
gaaauuaaccaguugauug

SEQ ID NO: 1585558 - RNA, 19 nt, Homo sapiens
  misc_RNA (1)...(19): siRNA sense strand
caaagcaacuuguggauau

SEQ ID NO: 1585559 - RNA, 19 nt, Homo sapiens
  misc_RNA (1)...(19): siRNA sense strand
uaagagaguugaacauuug

SEQ ID NO: 1585560 - RNA, 19 nt, Homo sapiens
  misc_RNA (1)...(19): siRNA sense strand
ccacagauaugaguacuuu

SEQ ID NO: 1585561 - RNA, 19 nt, Homo sapiens
  misc_RNA (1)...(19): siRNA sense strand
ggaaguaaaccuguaauuu

SEQ ID NO: 1585562 - RNA, 19 nt, Homo sapiens
  misc_RNA (1)...(19): siRNA sense strand
ggcaaacucucacuguaua

SEQ ID NO: 1585563 - RNA, 19 nt, Homo sapiens
  misc_RNA (1)...(19): siRNA sense strand
gcagaaauaagaaaggaua

SEQ ID NO: 1585564 - RNA, 19 nt, Homo sapiens
  misc_RNA (1)...(19): siRNA sense strand
gaaaggauaucagugcaau

SEQ ID NO: 1585565 - RNA, 19 nt, Homo sapiens
  misc_RNA (1)...(19): siRNA sense strand
acacagaaauuaaccaguu

SEQ ID NO: 1585566 - RNA, 19 nt, Homo sapiens
  misc_RNA (1)...(19): siRNA sense strand
ggaaaugccacagauauga

SEQ ID NO: 1585567 - RNA, 19 nt, Homo sapiens
  misc_RNA (1)...(19): siRNA sense strand
ggauaucagugcaauggaa

SEQ ID NO: 1585568 - RNA, 19 nt, Homo sapiens
  misc_RNA (1)...(19): siRNA sense strand
gaaaucagacccgugaauu

SEQ ID NO: 1585569 - RNA, 19 nt, Homo sapiens
  misc_RNA (1)...(19): siRNA sense strand
ugcaaagccugaaaguuua

SEQ ID NO: 1585570 - RNA, 19 nt, Homo sapiens
  misc_RNA (1)...(19): siRNA sense strand
gcaacaggcaucuaucauu

SEQ ID NO: 1585571 - RNA, 19 nt, Homo sapiens
  misc_RNA (1)...(19): siRNA sense strand
gagagaagcaucaguaaag

SEQ ID NO: 1585572 - RNA, 19 nt, Homo sapiens
  misc_RNA (1)...(19): siRNA sense strand
gcagacagccaaacgaaug

SEQ ID NO: 1585573 - RNA, 19 nt, Homo sapiens
  misc_RNA (1)...(19): siRNA sense strand
gaaguuagccagccuagag

SEQ ID NO: 1585574 - RNA, 19 nt, Homo sapiens
  misc_RNA (1)...(19): siRNA sense strand
ccaauaaacaguaugaaga

SEQ ID NO: 1585575 - RNA, 19 nt, Homo sapiens
  misc_RNA (1)...(19): siRNA sense strand
ccugaaaguuuaaugaaga

SEQ ID NO: 1585576 - RNA, 19 nt, Homo sapiens
  misc_RNA (1)...(19): siRNA sense strand
ggacuaaugaacugaagaa

SEQ ID NO: 1585577 - RNA, 19 nt, Homo sapiens
  misc_RNA (1)...(19): siRNA sense strand
gauuggaaguaaaccugua

SEQ ID NO: 1585578 - RNA, 19 nt, Homo sapiens
  misc_RNA (1)...(19): siRNA sense strand
gugaguuucuucaggauga

SEQ ID NO: 1585579 - RNA, 19 nt, Homo sapiens
  misc_RNA (1)...(19): siRNA sense strand
gcaaagccugaaaguuuaa

SEQ ID NO: 1585580 - RNA, 19 nt, Homo sapiens
  misc_RNA (1)...(19): siRNA sense strand
augcaaagccugaaaguuu

SEQ ID NO: 1585581 - RNA, 19 nt, Homo sapiens
  misc_RNA (1)...(19): siRNA sense strand
caacagaaacaggaacaaa

SEQ ID NO: 1585582 - RNA, 19 nt, Homo sapiens
  misc_RNA (1)...(19): siRNA sense strand
gaguugaacauuugaagaa

SEQ ID NO: 1585583 - RNA, 19 nt, Homo sapiens
  misc_RNA (1)...(19): siRNA sense strand
uggcugagauugacccaaa

SEQ ID NO: 1585584 - RNA, 19 nt, Homo sapiens
  misc_RNA (1)...(19): siRNA sense strand
gagagagaagcaucaguaa

SEQ ID NO: 1585585 - RNA, 19 nt, Homo sapiens
  misc_RNA (1)...(19): siRNA sense strand
caagauaucuggauuuucu

SEQ ID NO: 1585586 - RNA, 19 nt, Homo sapiens
  misc_RNA (1)...(19): siRNA sense strand
gagcagacagccaaacgaa

SEQ ID NO: 1585587 - RNA, 19 nt, Homo sapiens
  misc_RNA (1)...(19): siRNA sense strand
ggagccaaugcaacuauua

SEQ ID NO: 1585588 - RNA, 19 nt, Homo sapiens
  misc_RNA (1)...(19): siRNA sense strand
gaaaagagcauauuuagcu

SEQ ID NO: 1585589 - RNA, 19 nt, Homo sapiens
  misc_RNA (1)...(19): siRNA sense strand
ugaauuugaugguacugaa

SEQ ID NO: 1585590 - RNA, 19 nt, Homo sapiens
  misc_RNA (1)...(19): siRNA sense strand
gaaggcaaacucucacugu

SEQ ID NO: 1585591 - RNA, 19 nt, Homo sapiens
  misc_RNA (1)...(19): siRNA sense strand
gaaaaggaucagcucauua

SEQ ID NO: 1585592 - RNA, 19 nt, Homo sapiens
  misc_RNA (1)...(19): siRNA sense strand
ugacaccaauaaacaguau

SEQ ID NO: 1585593 - RNA, 19 nt, Homo sapiens
  misc_RNA (1)...(19): siRNA sense strand
caucuaucauuucccguaa

SEQ ID NO: 1585594 - RNA, 19 nt, Homo sapiens
  misc_RNA (1)...(19): siRNA sense strand
agagagagaagcaucagua

SEQ ID NO: 1585595 - RNA, 19 nt, Homo sapiens
  misc_RNA (1)...(19): siRNA sense strand
cagcagaaauaagaaagga

SEQ ID NO: 1585596 - RNA, 19 nt, Homo sapiens
  misc_RNA (1)...(19): siRNA sense strand
aagcaucaguaaagagaaa

SEQ ID NO: 1585597 - RNA, 19 nt, Homo sapiens
  misc_RNA (1)...(19): siRNA sense strand
caaugcaacuauuacaagu

SEQ ID NO: 1585598 - RNA, 19 nt, Homo sapiens
  misc_RNA (1)...(19): siRNA sense strand
uauuacaaguucucaguga

SEQ ID NO: 1585599 - RNA, 19 nt, Homo sapiens
  misc_RNA (1)...(19): siRNA sense strand
ucagaggacuaaugaacug

SEQ ID NO: 1585600 - RNA, 19 nt, Homo sapiens
  misc_RNA (1)...(19): siRNA sense strand
ccaaagcaacuuguggaua

SEQ ID NO: 1585601 - RNA, 19 nt, Homo sapiens
  misc_RNA (1)...(19): siRNA sense strand
ucagugcaauggaagaaga

SEQ ID NO: 1585602 - RNA, 19 nt, Homo sapiens
  misc_RNA (1)...(19): siRNA sense strand
guaugaagaguuaauggaa

SEQ ID NO: 1585603 - RNA, 19 nt, Homo sapiens
  misc_RNA (1)...(19): siRNA sense strand
caggaaaugccacagauau

SEQ ID NO: 1585604 - RNA, 19 nt, Homo sapiens
  misc_RNA (1)...(19): siRNA sense strand
aaggcaaacucucacugua

SEQ ID NO: 1585605 - RNA, 19 nt, Homo sapiens
  misc_RNA (1)...(19): siRNA sense strand
guacaaaaccagcugaaaa

SEQ ID NO: 1585606 - RNA, 19 nt, Homo sapiens
  misc_RNA (1)...(19): siRNA sense strand
gcucaagauaucuggauuu

SEQ ID NO: 1585607 - RNA, 19 nt, Homo sapiens
  misc_RNA (1)...(19): siRNA sense strand
agagaagcaucaguaaaga

SEQ ID NO: 1585608 - RNA, 19 nt, Homo sapiens
  misc_RNA (1)...(19): siRNA sense strand
cuaaugaacugaagaaaag

SEQ ID NO: 1585609 - RNA, 19 nt, Homo sapiens
  misc_RNA (1)...(19): siRNA sense strand
ugagguaccaagugaguuu

SEQ ID NO: 1585610 - RNA, 19 nt, Homo sapiens
  misc_RNA (1)...(19): siRNA sense strand
cacagaaauuaaccaguug

SEQ ID NO: 1585611 - RNA, 19 nt, Homo sapiens
  misc_RNA (1)...(19): siRNA sense strand
gcagaugcaaagccugaaa

SEQ ID NO: 1585612 - RNA, 19 nt, Homo sapiens
  misc_RNA (1)...(19): siRNA sense strand
gaauaucuugcacaacaga

SEQ ID NO: 1585613 - RNA, 19 nt, Homo sapiens
  misc_RNA (1)...(19): siRNA sense strand
aggaucagcucauuaagag

SEQ ID NO: 1585614 - RNA, 19 nt, Homo sapiens
  misc_RNA (1)...(19): siRNA sense strand
aaucagacccgugaauuug

SEQ ID NO: 1585615 - RNA, 19 nt, Homo sapiens
  misc_RNA (1)...(19): siRNA sense strand
agccaaagcugaggaacuu

SEQ ID NO: 1585616 - RNA, 19 nt, Homo sapiens
  misc_RNA (1)...(19): siRNA sense strand
gugcuccacuggcuucuuc

SEQ ID NO: 1585617 - RNA, 19 nt, Homo sapiens
  misc_RNA (1)...(19): siRNA sense strand
gaaaugccacagauaugag

SEQ ID NO: 1585618 - RNA, 19 nt, Homo sapiens
  misc_RNA (1)...(19): siRNA sense strand
uggacagucucaauaagga

SEQ ID NO: 1585619 - RNA, 19 nt, Homo sapiens
  misc_RNA (1)...(19): siRNA sense strand
agacagcucagaaucauca

SEQ ID NO: 1585620 - RNA, 19 nt, Homo sapiens
  misc_RNA (1)...(19): siRNA sense strand
aaaaggaucagcucauuaa

SEQ ID NO: 1585621 - RNA, 19 nt, Homo sapiens
  misc_RNA (1)...(19): siRNA sense strand
caauaaacaguaugaagag

SEQ ID NO: 1585622 - RNA, 19 nt, Homo sapiens
  misc_RNA (1)...(19): siRNA sense strand
cgucaggguuuggugauug

SEQ ID NO: 1585623 - RNA, 19 nt, Homo sapiens
  misc_RNA (1)...(19): siRNA sense strand
guugagccuucuugguauu

SEQ ID NO: 1585624 - RNA, 19 nt, Homo sapiens
  misc_RNA (1)...(19): siRNA sense strand
gaggcuagaggaggagaua

SEQ ID NO: 1585625 - RNA, 19 nt, Homo sapiens
  misc_RNA (1)...(19): siRNA sense strand
gaacaaaagaaucagcuau

SEQ ID NO: 1585626 - RNA, 19 nt, Homo sapiens
  misc_RNA (1)...(19): siRNA sense strand
ucaggaaaugccacagaua

SEQ ID NO: 1585627 - RNA, 19 nt, Homo sapiens
  misc_RNA (1)...(19): siRNA sense strand
gggccauucugaucuucuu

SEQ ID NO: 1585628 - RNA, 19 nt, Homo sapiens
  misc_RNA (1)...(19): siRNA sense strand
ccaaugcaacuauuacaag

SEQ ID NO: 1585629 - RNA, 19 nt, Homo sapiens
  misc_RNA (1)...(19): siRNA sense strand
ucaguaaagagaaaucaga

SEQ ID NO: 1585630 - RNA, 19 nt, Homo sapiens
  misc_RNA (1)...(19): siRNA sense strand
agaagcaucaguaaagaga

SEQ ID NO: 1585631 - RNA, 19 nt, Homo sapiens
  misc_RNA (1)...(19): siRNA sense strand
ggaggccaaggagaaguua

SEQ ID NO: 1585632 - RNA, 19 nt, Homo sapiens
  misc_RNA (1)...(19): siRNA sense strand
gaggacuaaugaacugaag

SEQ ID NO: 1585633 - RNA, 19 nt, Homo sapiens
  misc_RNA (1)...(19): siRNA sense strand
ugaugguacugaaguuuua

SEQ ID NO: 1585634 - RNA, 19 nt, Homo sapiens
  misc_RNA (1)...(19): siRNA sense strand
cuacagcagaaauaagaaa

SEQ ID NO: 1585635 - RNA, 19 nt, Homo sapiens
  misc_RNA (1)...(19): siRNA sense strand
gugauguucuggcugagau

SEQ ID NO: 1585636 - RNA, 19 nt, Homo sapiens
  misc_RNA (1)...(19): siRNA sense strand
ucagacccgugaauuugau

SEQ ID NO: 1585637 - RNA, 19 nt, Homo sapiens
  misc_RNA (1)...(19): siRNA sense strand
ccauucugaucuucuugaa

SEQ ID NO: 1585638 - RNA, 19 nt, Homo sapiens
  misc_RNA (1)...(19): siRNA sense strand
gccugaaaguuuaaugaag

SEQ ID NO: 1585639 - RNA, 19 nt, Homo sapiens
  misc_RNA (1)...(19): siRNA sense strand
aagaaucagcuauuucaug

SEQ ID NO: 1585640 - RNA, 19 nt, Homo sapiens
  misc_RNA (1)...(19): siRNA sense strand
cagcucagaaucaucaaug

SEQ ID NO: 1585641 - RNA, 19 nt, Homo sapiens
  misc_RNA (1)...(19): siRNA sense strand
agagagaagcaucaguaaa

SEQ ID NO: 1585642 - RNA, 19 nt, Homo sapiens
  misc_RNA (1)...(19): siRNA sense strand
ggcuagaggaggagauaaa

SEQ ID NO: 1585643 - RNA, 19 nt, Homo sapiens
  misc_RNA (1)...(19): siRNA sense strand
ccuuuaggaagaacuauaa

SEQ ID NO: 1585644 - RNA, 19 nt, Homo sapiens
  misc_RNA (1)...(19): siRNA sense strand
gcucagaaucaucaaugga

SEQ ID NO: 1585645 - RNA, 19 nt, Homo sapiens
  misc_RNA (1)...(19): siRNA sense strand
gaugcaaagccugaaaguu

SEQ ID NO: 1585646 - RNA, 19 nt, Homo sapiens
  misc_RNA (1)...(19): siRNA sense strand
gaagcaucaguaaagagaa

SEQ ID NO: 1585647 - RNA, 19 nt, Homo sapiens
  misc_RNA (1)...(19): siRNA sense strand
gccaaugcaacuauuacaa

SEQ ID NO: 1585648 - RNA, 19 nt, Homo sapiens
  misc_RNA (1)...(19): siRNA sense strand
acaccaauaaacaguauga

SEQ ID NO: 1585649 - RNA, 19 nt, Homo sapiens
  misc_RNA (1)...(19): siRNA sense strand
uagccagccuagagagaga

SEQ ID NO: 1585650 - RNA, 19 nt, Homo sapiens
  misc_RNA (1)...(19): siRNA sense strand
ccaaagcugaggaacuuca

SEQ ID NO: 1585651 - RNA, 19 nt, Homo sapiens
  misc_RNA (1)...(19): siRNA sense strand
agaaaaggaucagcucauu

SEQ ID NO: 1585652 - RNA, 19 nt, Homo sapiens
  misc_RNA (1)...(19): siRNA sense strand
caaguucucagugauguuc

SEQ ID NO: 1585653 - RNA, 19 nt, Homo sapiens
  misc_RNA (1)...(19): siRNA sense strand
aaggaucagcucauuaaga

SEQ ID NO: 1585654 - RNA, 19 nt, Homo sapiens
  misc_RNA (1)...(19): siRNA sense strand
gaagaaaaggguugagaca

SEQ ID NO: 1585655 - RNA, 19 nt, Homo sapiens
  misc_RNA (1)...(19): siRNA sense strand
guacaaaccuucaggaaau

SEQ ID NO: 1585656 - RNA, 19 nt, Homo sapiens
  misc_RNA (1)...(19): siRNA sense strand
caacaggcaucuaucauuu

SEQ ID NO: 1585657 - RNA, 19 nt, Homo sapiens
  misc_RNA (1)...(19): siRNA sense strand
gaaauuaaccaguugauug

SEQ ID NO: 1585658 - RNA, 19 nt, Homo sapiens
  misc_RNA (1)...(19): siRNA sense strand
caaagcaacuuguggauau

SEQ ID NO: 1585659 - RNA, 19 nt, Homo sapiens
  misc_RNA (1)...(19): siRNA sense strand
uaagagaguugaacauuug

SEQ ID NO: 1585660 - RNA, 19 nt, Homo sapiens
  misc_RNA (1)...(19): siRNA sense strand
ccacagauaugaguacuuu

SEQ ID NO: 1585661 - RNA, 19 nt, Homo sapiens
  misc_RNA (1)...(19): siRNA sense strand
ggaaguaaaccuguaauuu

SEQ ID NO: 1585662 - RNA, 19 nt, Homo sapiens
  misc_RNA (1)...(19): siRNA sense strand
ggcaaacucucacuguaua

SEQ ID NO: 1585663 - RNA, 19 nt, Homo sapiens
  misc_RNA (1)...(19): siRNA sense strand
gcagaaauaagaaaggaua

SEQ ID NO: 1585664 - RNA, 19 nt, Homo sapiens
  misc_RNA (1)...(19): siRNA sense strand
gaaaggauaucagugcaau

SEQ ID NO: 1585665 - RNA, 19 nt, Homo sapiens
  misc_RNA (1)...(19): siRNA sense strand
acacagaaauuaaccaguu

SEQ ID NO: 1585666 - RNA, 19 nt, Homo sapiens
  misc_RNA (1)...(19): siRNA sense strand
ggaaaugccacagauauga

SEQ ID NO: 1585667 - RNA, 19 nt, Homo sapiens
  misc_RNA (1)...(19): siRNA sense strand
ggauaucagugcaauggaa

SEQ ID NO: 1585668 - RNA, 19 nt, Homo sapiens
  misc_RNA (1)...(19): siRNA sense strand
gaaaucagacccgugaauu

SEQ ID NO: 1585669 - RNA, 19 nt, Homo sapiens
  misc_RNA (1)...(19): siRNA sense strand
ugcaaagccugaaaguuua

SEQ ID NO: 1585670 - RNA, 19 nt, Homo sapiens
  misc_RNA (1)...(19): siRNA sense strand
gcaacaggcaucuaucauu

SEQ ID NO: 1585671 - RNA, 19 nt, Homo sapiens
  misc_RNA (1)...(19): siRNA sense strand
gagagaagcaucaguaaag

SEQ ID NO: 1585672 - RNA, 19 nt, Homo sapiens
  misc_RNA (1)...(19): siRNA sense strand
gcagacagccaaacgaaug

SEQ ID NO: 1585673 - RNA, 19 nt, Homo sapiens
  misc_RNA (1)...(19): siRNA sense strand
gaaguuagccagccuagag

SEQ ID NO: 1585674 - RNA, 19 nt, Homo sapiens
  misc_RNA (1)...(19): siRNA sense strand
ccaauaaacaguaugaaga

SEQ ID NO: 1585675 - RNA, 19 nt, Homo sapiens
  misc_RNA (1)...(19): siRNA sense strand
ccugaaaguuuaaugaaga

SEQ ID NO: 1585676 - RNA, 19 nt, Homo sapiens
  misc_RNA (1)...(19): siRNA sense strand
ggacuaaugaacugaagaa

SEQ ID NO: 1585677 - RNA, 19 nt, Homo sapiens
  misc_RNA (1)...(19): siRNA sense strand
gauuggaaguaaaccugua

SEQ ID NO: 1585678 - RNA, 19 nt, Homo sapiens
  misc_RNA (1)...(19): siRNA sense strand
gugaguuucuucaggauga

SEQ ID NO: 1585679 - RNA, 19 nt, Homo sapiens
  misc_RNA (1)...(19): siRNA sense strand
gcaaagccugaaaguuuaa

SEQ ID NO: 1585680 - RNA, 19 nt, Homo sapiens
  misc_RNA (1)...(19): siRNA sense strand
augcaaagccugaaaguuu

SEQ ID NO: 1585681 - RNA, 19 nt, Homo sapiens
  misc_RNA (1)...(19): siRNA sense strand
caacagaaacaggaacaaa

SEQ ID NO: 1585682 - RNA, 19 nt, Homo sapiens
  misc_RNA (1)...(19): siRNA sense strand
gaguugaacauuugaagaa

SEQ ID NO: 1585683 - RNA, 19 nt, Homo sapiens
  misc_RNA (1)...(19): siRNA sense strand
uggcugagauugacccaaa

SEQ ID NO: 1585684 - RNA, 19 nt, Homo sapiens
  misc_RNA (1)...(19): siRNA sense strand
gagagagaagcaucaguaa

SEQ ID NO: 1585685 - RNA, 19 nt, Homo sapiens
  misc_RNA (1)...(19): siRNA sense strand
caagauaucuggauuuucu

SEQ ID NO: 1585686 - RNA, 19 nt, Homo sapiens
  misc_RNA (1)...(19): siRNA sense strand
gagcagacagccaaacgaa

SEQ ID NO: 1585687 - RNA, 19 nt, Homo sapiens
  misc_RNA (1)...(19): siRNA sense strand
ggagccaaugcaacuauua

SEQ ID NO: 1585688 - RNA, 19 nt, Homo sapiens
  misc_RNA (1)...(19): siRNA sense strand
gaaaagagcauauuuagcu

SEQ ID NO: 1585689 - RNA, 19 nt, Homo sapiens
  misc_RNA (1)...(19): siRNA sense strand
ugaauuugaugguacugaa

SEQ ID NO: 1585690 - RNA, 19 nt, Homo sapiens
  misc_RNA (1)...(19): siRNA sense strand
gaaggcaaacucucacugu

SEQ ID NO: 1585691 - RNA, 19 nt, Homo sapiens
  misc_RNA (1)...(19): siRNA sense strand
gaaaaggaucagcucauua

SEQ ID NO: 1585692 - RNA, 19 nt, Homo sapiens
  misc_RNA (1)...(19): siRNA sense strand
ugacaccaauaaacaguau

SEQ ID NO: 1585693 - RNA, 19 nt, Homo sapiens
  misc_RNA (1)...(19): siRNA sense strand
caucuaucauuucccguaa

SEQ ID NO: 1585694 - RNA, 19 nt, Homo sapiens
  misc_RNA (1)...(19): siRNA sense strand
agagagagaagcaucagua

SEQ ID NO: 1585695 - RNA, 19 nt, Homo sapiens
  misc_RNA (1)...(19): siRNA sense strand
cagcagaaauaagaaagga

SEQ ID NO: 1585696 - RNA, 19 nt, Homo sapiens
  misc_RNA (1)...(19): siRNA sense strand
aagcaucaguaaagagaaa

SEQ ID NO: 1585697 - RNA, 19 nt, Homo sapiens
  misc_RNA (1)...(19): siRNA sense strand
caaugcaacuauuacaagu

SEQ ID NO: 1585698 - RNA, 19 nt, Homo sapiens
  misc_RNA (1)...(19): siRNA sense strand
uauuacaaguucucaguga

SEQ ID NO: 1585699 - RNA, 19 nt, Homo sapiens
  misc_RNA (1)...(19): siRNA sense strand
ucagaggacuaaugaacug

SEQ ID NO: 1585700 - RNA, 19 nt, Homo sapiens
  misc_RNA (1)...(19): siRNA sense strand
ccaaagcaacuuguggaua

SEQ ID NO: 1585701 - RNA, 19 nt, Homo sapiens
  misc_RNA (1)...(19): siRNA sense strand
ucagugcaauggaagaaga

SEQ ID NO: 1585702 - RNA, 19 nt, Homo sapiens
  misc_RNA (1)...(19): siRNA sense strand
guaugaagaguuaauggaa

SEQ ID NO: 1585703 - RNA, 19 nt, Homo sapiens
  misc_RNA (1)...(19): siRNA sense strand
caggaaaugccacagauau

SEQ ID NO: 1585704 - RNA, 19 nt, Homo sapiens
  misc_RNA (1)...(19): siRNA sense strand
aaggcaaacucucacugua

SEQ ID NO: 1585705 - RNA, 19 nt, Homo sapiens
  misc_RNA (1)...(19): siRNA sense strand
guacaaaaccagcugaaaa

SEQ ID NO: 1585706 - RNA, 19 nt, Homo sapiens
  misc_RNA (1)...(19): siRNA sense strand
gcucaagauaucuggauuu

SEQ ID NO: 1585707 - RNA, 19 nt, Homo sapiens
  misc_RNA (1)...(19): siRNA sense strand
agagaagcaucaguaaaga

SEQ ID NO: 1585708 - RNA, 19 nt, Homo sapiens
  misc_RNA (1)...(19): siRNA sense strand
cuaaugaacugaagaaaag

SEQ ID NO: 1585709 - RNA, 19 nt, Homo sapiens
  misc_RNA (1)...(19): siRNA sense strand
ugagguaccaagugaguuu

SEQ ID NO: 1585710 - RNA, 19 nt, Homo sapiens
  misc_RNA (1)...(19): siRNA sense strand
cacagaaauuaaccaguug

SEQ ID NO: 1585711 - RNA, 19 nt, Homo sapiens
  misc_RNA (1)...(19): siRNA sense strand
gcagaugcaaagccugaaa

SEQ ID NO: 1585712 - RNA, 19 nt, Homo sapiens
  misc_RNA (1)...(19): siRNA sense strand
gaauaucuugcacaacaga

SEQ ID NO: 1585713 - RNA, 19 nt, Homo sapiens
  misc_RNA (1)...(19): siRNA sense strand
aggaucagcucauuaagag

SEQ ID NO: 1585714 - RNA, 19 nt, Homo sapiens
  misc_RNA (1)...(19): siRNA sense strand
aaucagacccgugaauuug

SEQ ID NO: 1585715 - RNA, 19 nt, Homo sapiens
  misc_RNA (1)...(19): siRNA sense strand
agccaaagcugaggaacuu

SEQ ID NO: 1585716 - RNA, 19 nt, Homo sapiens
  misc_RNA (1)...(19): siRNA sense strand
gugcuccacuggcuucuuc

SEQ ID NO: 1585717 - RNA, 19 nt, Homo sapiens
  misc_RNA (1)...(19): siRNA sense strand
gaaaugccacagauaugag

SEQ ID NO: 1585718 - RNA, 19 nt, Homo sapiens
  misc_RNA (1)...(19): siRNA sense strand
uggacagucucaauaagga

SEQ ID NO: 1585719 - RNA, 19 nt, Homo sapiens
  misc_RNA (1)...(19): siRNA sense strand
agacagcucagaaucauca

SEQ ID NO: 1585720 - RNA, 19 nt, Homo sapiens
  misc_RNA (1)...(19): siRNA sense strand
aaaaggaucagcucauuaa

SEQ ID NO: 1585721 - RNA, 19 nt, Homo sapiens
  misc_RNA (1)...(19): siRNA sense strand
caauaaacaguaugaagag

SEQ ID NO: 1585722 - RNA, 19 nt, Homo sapiens
  misc_RNA (1)...(19): siRNA sense strand
cgucaggguuuggugauug

SEQ ID NO: 1585723 - RNA, 19 nt, Homo sapiens
  misc_RNA (1)...(19): siRNA sense strand
guugagccuucuugguauu

SEQ ID NO: 1585724 - RNA, 19 nt, Homo sapiens
  misc_RNA (1)...(19): siRNA sense strand
gaggcuagaggaggagaua

SEQ ID NO: 1585725 - RNA, 19 nt, Homo sapiens
  misc_RNA (1)...(19): siRNA sense strand
gaacaaaagaaucagcuau

SEQ ID NO: 1585726 - RNA, 19 nt, Homo sapiens
  misc_RNA (1)...(19): siRNA sense strand
ucaggaaaugccacagaua

SEQ ID NO: 1585727 - RNA, 19 nt, Homo sapiens
  misc_RNA (1)...(19): siRNA sense strand
gggccauucugaucuucuu

SEQ ID NO: 1585728 - RNA, 19 nt, Homo sapiens
  misc_RNA (1)...(19): siRNA sense strand
ccaaugcaacuauuacaag

SEQ ID NO: 1585729 - RNA, 19 nt, Homo sapiens
  misc_RNA (1)...(19): siRNA sense strand
ucaguaaagagaaaucaga

SEQ ID NO: 1585730 - RNA, 19 nt, Homo sapiens
  misc_RNA (1)...(19): siRNA sense strand
agaagcaucaguaaagaga

SEQ ID NO: 1585731 - RNA, 19 nt, Homo sapiens
  misc_RNA (1)...(19): siRNA sense strand
ggaggccaaggagaaguua

SEQ ID NO: 1585732 - RNA, 19 nt, Homo sapiens
  misc_RNA (1)...(19): siRNA sense strand
gaggacuaaugaacugaag

SEQ ID NO: 1585733 - RNA, 19 nt, Homo sapiens
  misc_RNA (1)...(19): siRNA sense strand
ugaugguacugaaguuuua

SEQ ID NO: 1585734 - RNA, 19 nt, Homo sapiens
  misc_RNA (1)...(19): siRNA sense strand
cuacagcagaaauaagaaa

SEQ ID NO: 1585735 - RNA, 19 nt, Homo sapiens
  misc_RNA (1)...(19): siRNA sense strand
gugauguucuggcugagau

SEQ ID NO: 1585736 - RNA, 19 nt, Homo sapiens
  misc_RNA (1)...(19): siRNA sense strand
ucagacccgugaauuugau

SEQ ID NO: 1585737 - RNA, 19 nt, Homo sapiens
  misc_RNA (1)...(19): siRNA sense strand
ccauucugaucuucuugaa

SEQ ID NO: 1585738 - RNA, 19 nt, Homo sapiens
  misc_RNA (1)...(19): siRNA sense strand
gccugaaaguuuaaugaag

SEQ ID NO: 1585739 - RNA, 19 nt, Homo sapiens
  misc_RNA (1)...(19): siRNA sense strand
aagaaucagcuauuucaug

SEQ ID NO: 1585740 - RNA, 19 nt, Homo sapiens
  misc_RNA (1)...(19): siRNA sense strand
cagcucagaaucaucaaug

SEQ ID NO: 1585741 - RNA, 19 nt, Homo sapiens
  misc_RNA (1)...(19): siRNA sense strand
agagagaagcaucaguaaa

SEQ ID NO: 1585742 - RNA, 19 nt, Homo sapiens
  misc_RNA (1)...(19): siRNA sense strand
ggcuagaggaggagauaaa

SEQ ID NO: 1585743 - RNA, 19 nt, Homo sapiens
  misc_RNA (1)...(19): siRNA sense strand
ccuuuaggaagaacuauaa

SEQ ID NO: 1585744 - RNA, 19 nt, Homo sapiens
  misc_RNA (1)...(19): siRNA sense strand
gcucagaaucaucaaugga

SEQ ID NO: 1585745 - RNA, 19 nt, Homo sapiens
  misc_RNA (1)...(19): siRNA sense strand
gaugcaaagccugaaaguu

SEQ ID NO: 1585746 - RNA, 19 nt, Homo sapiens
  misc_RNA (1)...(19): siRNA sense strand
gaagcaucaguaaagagaa

SEQ ID NO: 1585747 - RNA, 19 nt, Homo sapiens
  misc_RNA (1)...(19): siRNA sense strand
gccaaugcaacuauuacaa

SEQ ID NO: 1585748 - RNA, 19 nt, Homo sapiens
  misc_RNA (1)...(19): siRNA sense strand
acaccaauaaacaguauga

SEQ ID NO: 1585749 - RNA, 19 nt, Homo sapiens
  misc_RNA (1)...(19): siRNA sense strand
uagccagccuagagagaga

SEQ ID NO: 1585750 - RNA, 19 nt, Homo sapiens
  misc_RNA (1)...(19): siRNA sense strand
ccaaagcugaggaacuuca

SEQ ID NO: 1585751 - RNA, 19 nt, Homo sapiens
  misc_RNA (1)...(19): siRNA sense strand
agaaaaggaucagcucauu

SEQ ID NO: 1585752 - RNA, 19 nt, Homo sapiens
  misc_RNA (1)...(19): siRNA sense strand
caaguucucagugauguuc

SEQ ID NO: 1585753 - RNA, 19 nt, Homo sapiens
  misc_RNA (1)...(19): siRNA sense strand
aaggaucagcucauuaaga

SEQ ID NO: 1585754 - RNA, 19 nt, Homo sapiens
  misc_RNA (1)...(19): siRNA sense strand
gaagaaaaggguugagaca

SEQ ID NO: 1585755 - RNA, 19 nt, Homo sapiens
  misc_RNA (1)...(19): siRNA sense strand
gaucuaccauaccaacuau

SEQ ID NO: 1585756 - RNA, 19 nt, Homo sapiens
  misc_RNA (1)...(19): siRNA sense strand
uauaagaucugugcaugga

SEQ ID NO: 1585757 - RNA, 19 nt, Homo sapiens
  misc_RNA (1)...(19): siRNA sense strand
caacacggccacagucuau

SEQ ID NO: 1585758 - RNA, 19 nt, Homo sapiens
  misc_RNA (1)...(19): siRNA sense strand
ccacaggccuaaugauugg

SEQ ID NO: 1585759 - RNA, 19 nt, Homo sapiens
  misc_RNA (1)...(19): siRNA sense strand
ggucauggcccucuucauc

SEQ ID NO: 1585760 - RNA, 19 nt, Homo sapiens
  misc_RNA (1)...(19): siRNA sense strand
gccaagaucuaccauacca

SEQ ID NO: 1585761 - RNA, 19 nt, Homo sapiens
  misc_RNA (1)...(19): siRNA sense strand
ccuccgagcucaucugcaa

SEQ ID NO: 1585762 - RNA, 19 nt, Homo sapiens
  misc_RNA (1)...(19): siRNA sense strand
cuucaagacugccauguuc

SEQ ID NO: 1585763 - RNA, 19 nt, Homo sapiens
  misc_RNA (1)...(19): siRNA sense strand
cagccaagaucuaccauac

SEQ ID NO: 1585764 - RNA, 19 nt, Homo sapiens
  misc_RNA (1)...(19): siRNA sense strand
agacugccauguucuuugu

SEQ ID NO: 1585765 - RNA, 19 nt, Homo sapiens
  misc_RNA (1)...(19): siRNA sense strand
gcaacacggccacagucua

SEQ ID NO: 1585766 - RNA, 19 nt, Homo sapiens
  misc_RNA (1)...(19): siRNA sense strand
gcauguuccucaucauugg

SEQ ID NO: 1585767 - RNA, 19 nt, Homo sapiens
  misc_RNA (1)...(19): siRNA sense strand
gggcauguuccucaucauu

SEQ ID NO: 1585768 - RNA, 19 nt, Homo sapiens
  misc_RNA (1)...(19): siRNA sense strand
gccacaggccuaaugauug

SEQ ID NO: 1585769 - RNA, 19 nt, Homo sapiens
  misc_RNA (1)...(19): siRNA sense strand
gggagcagacgggcaagua

SEQ ID NO: 1585770 - RNA, 19 nt, Homo sapiens
  misc_RNA (1)...(19): siRNA sense strand
cuacaaggcagauggaaca

SEQ ID NO: 1585771 - RNA, 19 nt, Homo sapiens
  misc_RNA (1)...(19): siRNA sense strand
gcagccaagaucuaccaua

SEQ ID NO: 1585772 - RNA, 19 nt, Homo sapiens
  misc_RNA (1)...(19): siRNA sense strand
gcuccucccugacgacuac

SEQ ID NO: 1585773 - RNA, 19 nt, Homo sapiens
  misc_RNA (1)...(19): siRNA sense strand
acacggccacagucuauaa

SEQ ID NO: 1585774 - RNA, 19 nt, Homo sapiens
  misc_RNA (1)...(19): siRNA sense strand
gagcagacgggcaaguaca

SEQ ID NO: 1585775 - RNA, 19 nt, Homo sapiens
  misc_RNA (1)...(19): siRNA sense strand
ggcauguuccucaucauug

SEQ ID NO: 1585776 - RNA, 19 nt, Homo sapiens
  misc_RNA (1)...(19): siRNA sense strand
ccaacuaugugcggaacuc

SEQ ID NO: 1585777 - RNA, 19 nt, Homo sapiens
  misc_RNA (1)...(19): siRNA sense strand
gccacagucuauaagaucu

SEQ ID NO: 1585778 - RNA, 19 nt, Homo sapiens
  misc_RNA (1)...(19): siRNA sense strand
ggccacagucuauaagauc

SEQ ID NO: 1585779 - RNA, 19 nt, Homo sapiens
  misc_RNA (1)...(19): siRNA sense strand
caucauuggcuccaucauc

SEQ ID NO: 1585780 - RNA, 19 nt, Homo sapiens
  misc_RNA (1)...(19): siRNA sense strand
ggaggcagccaagaucuac

SEQ ID NO: 1585781 - RNA, 19 nt, Homo sapiens
  misc_RNA (1)...(19): siRNA sense strand
agaucuaccauaccaacua

SEQ ID NO: 1585782 - RNA, 19 nt, Homo sapiens
  misc_RNA (1)...(19): siRNA sense strand
ccaggaggcagccaagauc

SEQ ID NO: 1585783 - RNA, 19 nt, Homo sapiens
  misc_RNA (1)...(19): siRNA sense strand
cggccacagucuauaagau

SEQ ID NO: 1585784 - RNA, 19 nt, Homo sapiens
  misc_RNA (1)...(19): siRNA sense strand
cgacuacaaggcagaugga

SEQ ID NO: 1585785 - RNA, 19 nt, Homo sapiens
  misc_RNA (1)...(19): siRNA sense strand
ggacagacggcuuuaauug

SEQ ID NO: 1585786 - RNA, 19 nt, Homo sapiens
  misc_RNA (1)...(19): siRNA sense strand
ggaaauccacuaagacuag

SEQ ID NO: 1585787 - RNA, 19 nt, Homo sapiens
  misc_RNA (1)...(19): siRNA sense strand
gaaauccacuaagacuaga

SEQ ID NO: 1585788 - RNA, 19 nt, Homo sapiens
  misc_RNA (1)...(19): siRNA sense strand
gcaacagauuugggaauga

SEQ ID NO: 1585789 - RNA, 19 nt, Homo sapiens
  misc_RNA (1)...(19): siRNA sense strand
gacagacggcuuuaauuga

SEQ ID NO: 1585790 - RNA, 19 nt, Homo sapiens
  misc_RNA (1)...(19): siRNA sense strand
gacacauucugcuggauug

SEQ ID NO: 1585791 - RNA, 19 nt, Homo sapiens
  misc_RNA (1)...(19): siRNA sense strand
ccugggaaauccacuaaga

SEQ ID NO: 1585792 - RNA, 19 nt, Homo sapiens
  misc_RNA (1)...(19): siRNA sense strand
ccacuaagacuagaggaaa

SEQ ID NO: 1585793 - RNA, 19 nt, Homo sapiens
  misc_RNA (1)...(19): siRNA sense strand
uuacuuaccucugaaacga

SEQ ID NO: 1585794 - RNA, 19 nt, Homo sapiens
  misc_RNA (1)...(19): siRNA sense strand
caacagauuugggaaugag

SEQ ID NO: 1585795 - RNA, 19 nt, Homo sapiens
  misc_RNA (1)...(19): siRNA sense strand
acuauuuacuuaccucuga

SEQ ID NO: 1585796 - RNA, 19 nt, Homo sapiens
  misc_RNA (1)...(19): siRNA sense strand
aagaauugcuuggaggauu

SEQ ID NO: 1585797 - RNA, 19 nt, Homo sapiens
  misc_RNA (1)...(19): siRNA sense strand
gggaaauccacuaagacua

SEQ ID NO: 1585798 - RNA, 19 nt, Homo sapiens
  misc_RNA (1)...(19): siRNA sense strand
acagacggcuuuaauugag

SEQ ID NO: 1585799 - RNA, 19 nt, Homo sapiens
  misc_RNA (1)...(19): siRNA sense strand
augcuccacuauuuacuua

SEQ ID NO: 1585800 - RNA, 19 nt, Homo sapiens
  misc_RNA (1)...(19): siRNA sense strand
guuguucucugaccugcuu

SEQ ID NO: 1585801 - RNA, 19 nt, Homo sapiens
  misc_RNA (1)...(19): siRNA sense strand
acgaagggcugacccagau

SEQ ID NO: 1585802 - RNA, 19 nt, Homo sapiens
  misc_RNA (1)...(19): siRNA sense strand
cuucaugcuccacuauuua

SEQ ID NO: 1585803 - RNA, 19 nt, Homo sapiens
  misc_RNA (1)...(19): siRNA sense strand
gaagggcugacccagauca

SEQ ID NO: 1585804 - RNA, 19 nt, Homo sapiens
  misc_RNA (1)...(19): siRNA sense strand
gagagcucguagacacauu

SEQ ID NO: 1585805 - RNA, 19 nt, Homo sapiens
  misc_RNA (1)...(19): siRNA sense strand
gccagcagacgacauguga

SEQ ID NO: 1585806 - RNA, 19 nt, Homo sapiens
  misc_RNA (1)...(19): siRNA sense strand
gaggaaagaauugcuugga

SEQ ID NO: 1585807 - RNA, 19 nt, Homo sapiens
  misc_RNA (1)...(19): siRNA sense strand
ugacccagaucaguuguuc

SEQ ID NO: 1585808 - RNA, 19 nt, Homo sapiens
  misc_RNA (1)...(19): siRNA sense strand
gagcaacagauuugggaau

SEQ ID NO: 1585809 - RNA, 19 nt, Homo sapiens
  misc_RNA (1)...(19): siRNA sense strand
gacacuucaugcuccacua

SEQ ID NO: 1585810 - RNA, 19 nt, Homo sapiens
  misc_RNA (1)...(19): siRNA sense strand
cagaggcuguggagcaaca

SEQ ID NO: 1585811 - RNA, 19 nt, Homo sapiens
  misc_RNA (1)...(19): siRNA sense strand
cagacggcuuuaauugaga

SEQ ID NO: 1585812 - RNA, 19 nt, Homo sapiens
  misc_RNA (1)...(19): siRNA sense strand
agacggcuuuaauugagaa

SEQ ID NO: 1585813 - RNA, 19 nt, Homo sapiens
  misc_RNA (1)...(19): siRNA sense strand
acuucaugcuccacuauuu

SEQ ID NO: 1585814 - RNA, 19 nt, Homo sapiens
  misc_RNA (1)...(19): siRNA sense strand
gcagaaaauugaggaagau

SEQ ID NO: 1585815 - RNA, 19 nt, Homo sapiens
  misc_RNA (1)...(19): siRNA sense strand
aagacuagaggaaagaauu

SEQ ID NO: 1585816 - RNA, 19 nt, Homo sapiens
  misc_RNA (1)...(19): siRNA sense strand
guggacagacggcuuuaau

SEQ ID NO: 1585817 - RNA, 19 nt, Homo sapiens
  misc_RNA (1)...(19): siRNA sense strand
agacacauucugcuggauu

SEQ ID NO: 1585818 - RNA, 19 nt, Homo sapiens
  misc_RNA (1)...(19): siRNA sense strand
gaaaauugaggaagaugug

SEQ ID NO: 1585819 - RNA, 19 nt, Homo sapiens
  misc_RNA (1)...(19): siRNA sense strand
agacuagaggaaagaauug

SEQ ID NO: 1585820 - RNA, 19 nt, Homo sapiens
  misc_RNA (1)...(19): siRNA sense strand
cagcagacgacaugugaca

SEQ ID NO: 1585821 - RNA, 19 nt, Homo sapiens
  misc_RNA (1)...(19): siRNA sense strand
gaaggcuggguuccuguuc

SEQ ID NO: 1585822 - RNA, 19 nt, Homo sapiens
  misc_RNA (1)...(19): siRNA sense strand
cgacaugugacaggugcua

SEQ ID NO: 1585823 - RNA, 19 nt, Homo sapiens
  misc_RNA (1)...(19): siRNA sense strand
agaguggacagacggcuuu

SEQ ID NO: 1585824 - RNA, 19 nt, Homo sapiens
  misc_RNA (1)...(19): siRNA sense strand
cuauuuacuuaccucugaa

SEQ ID NO: 1585825 - RNA, 19 nt, Homo sapiens
  misc_RNA (1)...(19): siRNA sense strand
agcaacagauuugggaaug

SEQ ID NO: 1585826 - RNA, 19 nt, Homo sapiens
  misc_RNA (1)...(19): siRNA sense strand
cacuaagacuagaggaaag

SEQ ID NO: 1585827 - RNA, 19 nt, Homo sapiens
  misc_RNA (1)...(19): siRNA sense strand
uggacagacggcuuuaauu

SEQ ID NO: 1585828 - RNA, 19 nt, Homo sapiens
  misc_RNA (1)...(19): siRNA sense strand
gaacagaucugagcaauau

SEQ ID NO: 1585829 - RNA, 19 nt, Homo sapiens
  misc_RNA (1)...(19): siRNA sense strand
ggagagagcuuacugauga

SEQ ID NO: 1585830 - RNA, 19 nt, Homo sapiens
  misc_RNA (1)...(19): siRNA sense strand
gaaguuaacucaaacaagu

SEQ ID NO: 1585831 - RNA, 19 nt, Homo sapiens
  misc_RNA (1)...(19): siRNA sense strand
gaucacagcugcaaauuuc

SEQ ID NO: 1585832 - RNA, 19 nt, Homo sapiens
  misc_RNA (1)...(19): siRNA sense strand
gcacaauguuucuauguaa

SEQ ID NO: 1585833 - RNA, 19 nt, Homo sapiens
  misc_RNA (1)...(19): siRNA sense strand
gaagacagauaacacagaa

SEQ ID NO: 1585834 - RNA, 19 nt, Homo sapiens
  misc_RNA (1)...(19): siRNA sense strand
gaaacaagaugugucuaaa

SEQ ID NO: 1585835 - RNA, 19 nt, Homo sapiens
  misc_RNA (1)...(19): siRNA sense strand
gaaauaccuuugagucuug

SEQ ID NO: 1585836 - RNA, 19 nt, Homo sapiens
  misc_RNA (1)...(19): siRNA sense strand
caauauacccggacuguua

SEQ ID NO: 1585837 - RNA, 19 nt, Homo sapiens
  misc_RNA (1)...(19): siRNA sense strand
caaaggagguggugauguu

SEQ ID NO: 1585838 - RNA, 19 nt, Homo sapiens
  misc_RNA (1)...(19): siRNA sense strand
gagaaugccuuugcuguuu

SEQ ID NO: 1585839 - RNA, 19 nt, Homo sapiens
  misc_RNA (1)...(19): siRNA sense strand
gaaauacaauacugaagga

SEQ ID NO: 1585840 - RNA, 19 nt, Homo sapiens
  misc_RNA (1)...(19): siRNA sense strand
ucaaaugacuccagaauca

SEQ ID NO: 1585841 - RNA, 19 nt, Homo sapiens
  misc_RNA (1)...(19): siRNA sense strand
ugaagagacugaauuagaa

SEQ ID NO: 1585842 - RNA, 19 nt, Homo sapiens
  misc_RNA (1)...(19): siRNA sense strand
caacugagcagcuuaaugu

SEQ ID NO: 1585843 - RNA, 19 nt, Homo sapiens
  misc_RNA (1)...(19): siRNA sense strand
guauauagguuuccaguag

SEQ ID NO: 1585844 - RNA, 19 nt, Homo sapiens
  misc_RNA (1)...(19): siRNA sense strand
gaacacugcauacaaaguu

SEQ ID NO: 1585845 - RNA, 19 nt, Homo sapiens
  misc_RNA (1)...(19): siRNA sense strand
gaaccuggauacuggagaa

SEQ ID NO: 1585846 - RNA, 19 nt, Homo sapiens
  misc_RNA (1)...(19): siRNA sense strand
gaacaaggaagcaguggaa

SEQ ID NO: 1585847 - RNA, 19 nt, Homo sapiens
  misc_RNA (1)...(19): siRNA sense strand
ugauauagauguucccaaa

SEQ ID NO: 1585848 - RNA, 19 nt, Homo sapiens
  misc_RNA (1)...(19): siRNA sense strand
gaaaguacgguuaaggauu

SEQ ID NO: 1585849 - RNA, 19 nt, Homo sapiens
  misc_RNA (1)...(19): siRNA sense strand
aaacagagaacacugcaua

SEQ ID NO: 1585850 - RNA, 19 nt, Homo sapiens
  misc_RNA (1)...(19): siRNA sense strand
gugagaauauggcuuuaaa

SEQ ID NO: 1585851 - RNA, 19 nt, Homo sapiens
  misc_RNA (1)...(19): siRNA sense strand
gaugaaaccacgaaguuaa

SEQ ID NO: 1585852 - RNA, 19 nt, Homo sapiens
  misc_RNA (1)...(19): siRNA sense strand
guacaagaauugaaacaag

SEQ ID NO: 1585853 - RNA, 19 nt, Homo sapiens
  misc_RNA (1)...(19): siRNA sense strand
agagaacacugcauacaaa

SEQ ID NO: 1585854 - RNA, 19 nt, Homo sapiens
  misc_RNA (1)...(19): siRNA sense strand
gcaccuugcugaggaauau

SEQ ID NO: 1585855 - RNA, 19 nt, Homo sapiens
  misc_RNA (1)...(19): siRNA sense strand
gggauagucuuguuucuag

SEQ ID NO: 1585856 - RNA, 19 nt, Homo sapiens
  misc_RNA (1)...(19): siRNA sense strand
gcagauguauuuucuauga

SEQ ID NO: 1585857 - RNA, 19 nt, Homo sapiens
  misc_RNA (1)...(19): siRNA sense strand
gcagugagaauauggcuuu

SEQ ID NO: 1585858 - RNA, 19 nt, Homo sapiens
  misc_RNA (1)...(19): siRNA sense strand
uuaaugugcuugaaacuga

SEQ ID NO: 1585859 - RNA, 19 nt, Homo sapiens
  misc_RNA (1)...(19): siRNA sense strand
caacaaccauauguaaaug

SEQ ID NO: 1585860 - RNA, 19 nt, Homo sapiens
  misc_RNA (1)...(19): siRNA sense strand
ugaaguagauggucagaca

SEQ ID NO: 1585861 - RNA, 19 nt, Homo sapiens
  misc_RNA (1)...(19): siRNA sense strand
gcuugaaacugaaacagaa

SEQ ID NO: 1585862 - RNA, 19 nt, Homo sapiens
  misc_RNA (1)...(19): siRNA sense strand
uguuagagaugaaguguuu

SEQ ID NO: 1585863 - RNA, 19 nt, Homo sapiens
  misc_RNA (1)...(19): siRNA sense strand
ggucaacaaccauauguaa

SEQ ID NO: 1585864 - RNA, 19 nt, Homo sapiens
  misc_RNA (1)...(19): siRNA sense strand
gaaaagaacccucugauca

SEQ ID NO: 1585865 - RNA, 19 nt, Homo sapiens
  misc_RNA (1)...(19): siRNA sense strand
ggucuaaauugugggcuua

SEQ ID NO: 1585866 - RNA, 19 nt, Homo sapiens
  misc_RNA (1)...(19): siRNA sense strand
ggagagaucguaaugacuu

SEQ ID NO: 1585867 - RNA, 19 nt, Homo sapiens
  misc_RNA (1)...(19): siRNA sense strand
guauaaggguuacgucaau

SEQ ID NO: 1585868 - RNA, 19 nt, Homo sapiens
  misc_RNA (1)...(19): siRNA sense strand
uggcaaauaugcagugauu

SEQ ID NO: 1585869 - RNA, 19 nt, Homo sapiens
  misc_RNA (1)...(19): siRNA sense strand
cagaauacauuugaagaga

SEQ ID NO: 1585870 - RNA, 19 nt, Homo sapiens
  misc_RNA (1)...(19): siRNA sense strand
gaaaacgacucaacuaaag

SEQ ID NO: 1585871 - RNA, 19 nt, Homo sapiens
  misc_RNA (1)...(19): siRNA sense strand
aagagaauauuacgucuga

SEQ ID NO: 1585872 - RNA, 19 nt, Homo sapiens
  misc_RNA (1)...(19): siRNA sense strand
gaaggaaugccauacacaa

SEQ ID NO: 1585873 - RNA, 19 nt, Homo sapiens
  misc_RNA (1)...(19): siRNA sense strand
gcacaaguuucugcaugaa

SEQ ID NO: 1585874 - RNA, 19 nt, Homo sapiens
  misc_RNA (1)...(19): siRNA sense strand
gauguuaucuuuggaugug

SEQ ID NO: 1585875 - RNA, 19 nt, Homo sapiens
  misc_RNA (1)...(19): siRNA sense strand
uaugauggcagauguauuu

SEQ ID NO: 1585876 - RNA, 19 nt, Homo sapiens
  misc_RNA (1)...(19): siRNA sense strand
agccauagaucaaguacua

SEQ ID NO: 1585877 - RNA, 19 nt, Homo sapiens
  misc_RNA (1)...(19): siRNA sense strand
aaaggaauauggcuagaau

SEQ ID NO: 1585878 - RNA, 19 nt, Homo sapiens
  misc_RNA (1)...(19): siRNA sense strand
cgaaugaaauacaauacug

SEQ ID NO: 1585879 - RNA, 19 nt, Homo sapiens
  misc_RNA (1)...(19): siRNA sense strand
gagaagaaauaccuuugag

SEQ ID NO: 1585880 - RNA, 19 nt, Homo sapiens
  misc_RNA (1)...(19): siRNA sense strand
aaaguacgguuaaggauuc

SEQ ID NO: 1585881 - RNA, 19 nt, Homo sapiens
  misc_RNA (1)...(19): siRNA sense strand
gagaauauuacgucugauu

SEQ ID NO: 1585882 - RNA, 19 nt, Homo sapiens
  misc_RNA (1)...(19): siRNA sense strand
caagagaugacagguauuu

SEQ ID NO: 1585883 - RNA, 19 nt, Homo sapiens
  misc_RNA (1)...(19): siRNA sense strand
ggauaaaacagucagauua

SEQ ID NO: 1585884 - RNA, 19 nt, Homo sapiens
  misc_RNA (1)...(19): siRNA sense strand
ggagaagaaauaccuuuga

SEQ ID NO: 1585885 - RNA, 19 nt, Homo sapiens
  misc_RNA (1)...(19): siRNA sense strand
cagacuauaugauuugaga

SEQ ID NO: 1585886 - RNA, 19 nt, Homo sapiens
  misc_RNA (1)...(19): siRNA sense strand
caagaccaguuaaauucaa

SEQ ID NO: 1585887 - RNA, 19 nt, Homo sapiens
  misc_RNA (1)...(19): siRNA sense strand
gaagagaaacuaccaacag

SEQ ID NO: 1585888 - RNA, 19 nt, Homo sapiens
  misc_RNA (1)...(19): siRNA sense strand
cauacaaaguuggaaauga

SEQ ID NO: 1585889 - RNA, 19 nt, Homo sapiens
  misc_RNA (1)...(19): siRNA sense strand
gaauagcauugccaaacau

SEQ ID NO: 1585890 - RNA, 19 nt, Homo sapiens
  misc_RNA (1)...(19): siRNA sense strand
cacuauccaugaaguauaa

SEQ ID NO: 1585891 - RNA, 19 nt, Homo sapiens
  misc_RNA (1)...(19): siRNA sense strand
acaaauacauguccgaucu

SEQ ID NO: 1585892 - RNA, 19 nt, Homo sapiens
  misc_RNA (1)...(19): siRNA sense strand
ggugaacgugcuauaaaua

SEQ ID NO: 1585893 - RNA, 19 nt, Homo sapiens
  misc_RNA (1)...(19): siRNA sense strand
gaaacuaccaacaggcauu

SEQ ID NO: 1585894 - RNA, 19 nt, Homo sapiens
  misc_RNA (1)...(19): siRNA sense strand
gaugaaaccugugagaaac

SEQ ID NO: 1585895 - RNA, 19 nt, Homo sapiens
  misc_RNA (1)...(19): siRNA sense strand
acacaagaccaguuaaauu

SEQ ID NO: 1585896 - RNA, 19 nt, Homo sapiens
  misc_RNA (1)...(19): siRNA sense strand
ggaaagcgacaccgaggaa

SEQ ID NO: 1585897 - RNA, 19 nt, Homo sapiens
  misc_RNA (1)...(19): siRNA sense strand
ucagacuccuuaucuacua

SEQ ID NO: 1585898 - RNA, 19 nt, Homo sapiens
  misc_RNA (1)...(19): siRNA sense strand
uacuacagcuugaagauga

SEQ ID NO: 1585899 - RNA, 19 nt, Homo sapiens
  misc_RNA (1)...(19): siRNA sense strand
gagaggcaguguuaaugau

SEQ ID NO: 1585900 - RNA, 19 nt, Homo sapiens
  misc_RNA (1)...(19): siRNA sense strand
ugacuucacuggagcaauc

SEQ ID NO: 1585901 - RNA, 19 nt, Homo sapiens
  misc_RNA (1)...(19): siRNA sense strand
gcaaauaugcagugauugg

SEQ ID NO: 1585902 - RNA, 19 nt, Homo sapiens
  misc_RNA (1)...(19): siRNA sense strand
gaugacagguauuuucuaa

SEQ ID NO: 1585903 - RNA, 19 nt, Homo sapiens
  misc_RNA (1)...(19): siRNA sense strand
gaaagucuaaguucaucaa

SEQ ID NO: 1585904 - RNA, 19 nt, Homo sapiens
  misc_RNA (1)...(19): siRNA sense strand
gaucuuaguggugaacaua

SEQ ID NO: 1585905 - RNA, 19 nt, Homo sapiens
  misc_RNA (1)...(19): siRNA sense strand
agaaauaccuuugagucuu

SEQ ID NO: 1585906 - RNA, 19 nt, Homo sapiens
  misc_RNA (1)...(19): siRNA sense strand
ugaaacaagaugugucuaa

SEQ ID NO: 1585907 - RNA, 19 nt, Homo sapiens
  misc_RNA (1)...(19): siRNA sense strand
ggaagcaguggaagucaaa

SEQ ID NO: 1585908 - RNA, 19 nt, Homo sapiens
  misc_RNA (1)...(19): siRNA sense strand
gaaaggaauauggcuagaa

SEQ ID NO: 1585909 - RNA, 19 nt, Homo sapiens
  misc_RNA (1)...(19): siRNA sense strand
gguauuaugaagacagaua

SEQ ID NO: 1585910 - RNA, 19 nt, Homo sapiens
  misc_RNA (1)...(19): siRNA sense strand
caaugcaguuguuacauca

SEQ ID NO: 1585911 - RNA, 19 nt, Homo sapiens
  misc_RNA (1)...(19): siRNA sense strand
guuagugguucagaagaua

SEQ ID NO: 1585912 - RNA, 19 nt, Homo sapiens
  misc_RNA (1)...(19): siRNA sense strand
gcaaguuucagccaugauu

SEQ ID NO: 1585913 - RNA, 19 nt, Homo sapiens
  misc_RNA (1)...(19): siRNA sense strand
uggagacccugaugauaaa

SEQ ID NO: 1585914 - RNA, 19 nt, Homo sapiens
  misc_RNA (1)...(19): siRNA sense strand
gaaaacuccugauauagau

SEQ ID NO: 1585915 - RNA, 19 nt, Homo sapiens
  misc_RNA (1)...(19): siRNA sense strand
gaauacauuugaagagacu

SEQ ID NO: 1585916 - RNA, 19 nt, Homo sapiens
  misc_RNA (1)...(19): siRNA sense strand
gauagaguagaaaggaaua

SEQ ID NO: 1585917 - RNA, 19 nt, Homo sapiens
  misc_RNA (1)...(19): siRNA sense strand
gugaacgugcuauaaauaa

SEQ ID NO: 1585918 - RNA, 19 nt, Homo sapiens
  misc_RNA (1)...(19): siRNA sense strand
gaagugaugggcccucaga

SEQ ID NO: 1585919 - RNA, 19 nt, Homo sapiens
  misc_RNA (1)...(19): siRNA sense strand
ggagcacaauguuucuaug

SEQ ID NO: 1585920 - RNA, 19 nt, Homo sapiens
  misc_RNA (1)...(19): siRNA sense strand
uauaaggguuacgucaaua

SEQ ID NO: 1585921 - RNA, 19 nt, Homo sapiens
  misc_RNA (1)...(19): siRNA sense strand
ucaggaaagucuaaguuca

SEQ ID NO: 1585922 - RNA, 19 nt, Homo sapiens
  misc_RNA (1)...(19): siRNA sense strand
ggagcuguuuggaccauga

SEQ ID NO: 1585923 - RNA, 19 nt, Homo sapiens
  misc_RNA (1)...(19): siRNA sense strand
cacaagaccaguuaaauuc

SEQ ID NO: 1585924 - RNA, 19 nt, Homo sapiens
  misc_RNA (1)...(19): siRNA sense strand
ggauacuggagaagaaaua

SEQ ID NO: 1585925 - RNA, 19 nt, Homo sapiens
  misc_RNA (1)...(19): siRNA sense strand
auacauguccgaucuacua

SEQ ID NO: 1585926 - RNA, 19 nt, Homo sapiens
  misc_RNA (1)...(19): siRNA sense strand
ugccaaacauuaggcuuua

SEQ ID NO: 1585927 - RNA, 19 nt, Homo sapiens
  misc_RNA (1)...(19): siRNA sense strand
uuacuggcauugagccuuu

SEQ ID NO: 1585928 - RNA, 19 nt, Homo sapiens
  misc_RNA (1)...(19): siRNA sense strand
gggcuuagcuugcagagaa

SEQ ID NO: 1585929 - RNA, 19 nt, Homo sapiens
  misc_RNA (1)...(19): siRNA sense strand
gacgaugucugaacaauug

SEQ ID NO: 1585930 - RNA, 19 nt, Homo sapiens
  misc_RNA (1)...(19): siRNA sense strand
gcugaauccuacccaauua

SEQ ID NO: 1585931 - RNA, 19 nt, Homo sapiens
  misc_RNA (1)...(19): siRNA sense strand
ucagagaaguuguugauga

SEQ ID NO: 1585932 - RNA, 19 nt, Homo sapiens
  misc_RNA (1)...(19): siRNA sense strand
acacuaaucuuuggaauga

SEQ ID NO: 1585933 - RNA, 19 nt, Homo sapiens
  misc_RNA (1)...(19): siRNA sense strand
agaacucagugaagaauua

SEQ ID NO: 1585934 - RNA, 19 nt, Homo sapiens
  misc_RNA (1)...(19): siRNA sense strand
gggaugaccuugugagaga

SEQ ID NO: 1585935 - RNA, 19 nt, Homo sapiens
  misc_RNA (1)...(19): siRNA sense strand
ggacugaccacgacccaua

SEQ ID NO: 1585936 - RNA, 19 nt, Homo sapiens
  misc_RNA (1)...(19): siRNA sense strand
caaccugacucaucauuuc

SEQ ID NO: 1585937 - RNA, 19 nt, Homo sapiens
  misc_RNA (1)...(19): siRNA sense strand
uaacaaaacuucaggcaaa

SEQ ID NO: 1585938 - RNA, 19 nt, Homo sapiens
  misc_RNA (1)...(19): siRNA sense strand
gcaaggcguugacuuaucu

SEQ ID NO: 1585939 - RNA, 19 nt, Homo sapiens
  misc_RNA (1)...(19): siRNA sense strand
acucaggacucgucucaua

SEQ ID NO: 1585940 - RNA, 19 nt, Homo sapiens
  misc_RNA (1)...(19): siRNA sense strand
gaagaauuacgaguuagua

SEQ ID NO: 1585941 - RNA, 19 nt, Homo sapiens
  misc_RNA (1)...(19): siRNA sense strand
gaucauaaauaccauaucc

SEQ ID NO: 1585942 - RNA, 19 nt, Homo sapiens
  misc_RNA (1)...(19): siRNA sense strand
agugaagaauuacgaguua

SEQ ID NO: 1585943 - RNA, 19 nt, Homo sapiens
  misc_RNA (1)...(19): siRNA sense strand
gaacucaggacucgucuca

SEQ ID NO: 1585944 - RNA, 19 nt, Homo sapiens
  misc_RNA (1)...(19): siRNA sense strand
uaaauaccauauccgaaug

SEQ ID NO: 1585945 - RNA, 19 nt, Homo sapiens
  misc_RNA (1)...(19): siRNA sense strand
uaaucaaccugacucauca

SEQ ID NO: 1585946 - RNA, 19 nt, Homo sapiens
  misc_RNA (1)...(19): siRNA sense strand
ccuaugauguagauguuaa

SEQ ID NO: 1585947 - RNA, 19 nt, Homo sapiens
  misc_RNA (1)...(19): siRNA sense strand
cagaggauccugagcauug

SEQ ID NO: 1585948 - RNA, 19 nt, Homo sapiens
  misc_RNA (1)...(19): siRNA sense strand
guuaauggacgaugucuga

SEQ ID NO: 1585949 - RNA, 19 nt, Homo sapiens
  misc_RNA (1)...(19): siRNA sense strand
caacaacaguccacuucuc

SEQ ID NO: 1585950 - RNA, 19 nt, Homo sapiens
  misc_RNA (1)...(19): siRNA sense strand
gaacuaccuccuggucuuu

SEQ ID NO: 1585951 - RNA, 19 nt, Homo sapiens
  misc_RNA (1)...(19): siRNA sense strand
ucaaagggguugccuguaa

SEQ ID NO: 1585952 - RNA, 19 nt, Homo sapiens
  misc_RNA (1)...(19): siRNA sense strand
gagcauggugaaaggguua

SEQ ID NO: 1585953 - RNA, 19 nt, Homo sapiens
  misc_RNA (1)...(19): siRNA sense strand
gagcuccuaugauguagau

SEQ ID NO: 1585954 - RNA, 19 nt, Homo sapiens
  misc_RNA (1)...(19): siRNA sense strand
ggacgaugucugaacaauu

SEQ ID NO: 1585955 - RNA, 19 nt, Homo sapiens
  misc_RNA (1)...(19): siRNA sense strand
guugagcuccuaugaugua

SEQ ID NO: 1585956 - RNA, 19 nt, Homo sapiens
  misc_RNA (1)...(19): siRNA sense strand
cauccuuguuugauaguaa

SEQ ID NO: 1585957 - RNA, 19 nt, Homo sapiens
  misc_RNA (1)...(19): siRNA sense strand
gaccauauuuguacuuucg

SEQ ID NO: 1585958 - RNA, 19 nt, Homo sapiens
  misc_RNA (1)...(19): siRNA sense strand
gcucaugucggcaauccua

SEQ ID NO: 1585959 - RNA, 19 nt, Homo sapiens
  misc_RNA (1)...(19): siRNA sense strand
cuacgaggcugagcacgaa

SEQ ID NO: 1585960 - RNA, 19 nt, Homo sapiens
  misc_RNA (1)...(19): siRNA sense strand
guacugcccgagcauguaa

SEQ ID NO: 1585961 - RNA, 19 nt, Homo sapiens
  misc_RNA (1)...(19): siRNA sense strand
uuuaaagccuauucucuug

SEQ ID NO: 1585962 - RNA, 19 nt, Homo sapiens
  misc_RNA (1)...(19): siRNA sense strand
uaaccgagccagggacuuu

SEQ ID NO: 1585963 - RNA, 19 nt, Homo sapiens
  misc_RNA (1)...(19): siRNA sense strand
ggugaucugucgucuccaa

SEQ ID NO: 1585964 - RNA, 19 nt, Homo sapiens
  misc_RNA (1)...(19): siRNA sense strand
gagcuaaaacagcaaaaua

SEQ ID NO: 1585965 - RNA, 19 nt, Homo sapiens
  misc_RNA (1)...(19): siRNA sense strand
caacaguccacuucucaga

SEQ ID NO: 1585966 - RNA, 19 nt, Homo sapiens
  misc_RNA (1)...(19): siRNA sense strand
gaucuucugaccauaauca

SEQ ID NO: 1585967 - RNA, 19 nt, Homo sapiens
  misc_RNA (1)...(19): siRNA sense strand
ccuauucucuugccuugga

SEQ ID NO: 1585968 - RNA, 19 nt, Homo sapiens
  misc_RNA (1)...(19): siRNA sense strand
guggcauccuuguuugaua

SEQ ID NO: 1585969 - RNA, 19 nt, Homo sapiens
  misc_RNA (1)...(19): siRNA sense strand
uggaaugaauacagaauca

SEQ ID NO: 1585970 - RNA, 19 nt, Homo sapiens
  misc_RNA (1)...(19): siRNA sense strand
uauuugauccugauaggua

SEQ ID NO: 1585971 - RNA, 19 nt, Homo sapiens
  misc_RNA (1)...(19): siRNA sense strand
ugaccacgacccauacuuu

SEQ ID NO: 1585972 - RNA, 19 nt, Homo sapiens
  misc_RNA (1)...(19): siRNA sense strand
cagagaaguuguugaugag

SEQ ID NO: 1585973 - RNA, 19 nt, Homo sapiens
  misc_RNA (1)...(19): siRNA sense strand
ccacuucucagacaaacaa

SEQ ID NO: 1585974 - RNA, 19 nt, Homo sapiens
  misc_RNA (1)...(19): siRNA sense strand
cgacgaggcucuaguuuuc

SEQ ID NO: 1585975 - RNA, 19 nt, Homo sapiens
  misc_RNA (1)...(19): siRNA sense strand
caggauuucuucacuugga

SEQ ID NO: 1585976 - RNA, 19 nt, Homo sapiens
  misc_RNA (1)...(19): siRNA sense strand
ccugcaaggcguugacuua

SEQ ID NO: 1585977 - RNA, 19 nt, Homo sapiens
  misc_RNA (1)...(19): siRNA sense strand
agaaguuguugaugagcua

SEQ ID NO: 1585978 - RNA, 19 nt, Homo sapiens
  misc_RNA (1)...(19): siRNA sense strand
agaacuaccuccuggucuu

SEQ ID NO: 1585979 - RNA, 19 nt, Homo sapiens
  misc_RNA (1)...(19): siRNA sense strand
gaauacagaaucaaagacu

SEQ ID NO: 1585980 - RNA, 19 nt, Homo sapiens
  misc_RNA (1)...(19): siRNA sense strand
caggcaaacacuaaucuuu

SEQ ID NO: 1585981 - RNA, 19 nt, Homo sapiens
  misc_RNA (1)...(19): siRNA sense strand
agacuuuccugcccucaga

SEQ ID NO: 1585982 - RNA, 19 nt, Homo sapiens
  misc_RNA (1)...(19): siRNA sense strand
gcugcugccuuugaccaua

SEQ ID NO: 1585983 - RNA, 19 nt, Homo sapiens
  misc_RNA (1)...(19): siRNA sense strand
cagcagggcuuagcuugca

SEQ ID NO: 1585984 - RNA, 19 nt, Homo sapiens
  misc_RNA (1)...(19): siRNA sense strand
cuguugagcuccuaugaug

SEQ ID NO: 1585985 - RNA, 19 nt, Homo sapiens
  misc_RNA (1)...(19): siRNA sense strand
gaccacgacccauacuuug

SEQ ID NO: 1585986 - RNA, 19 nt, Homo sapiens
  misc_RNA (1)...(19): siRNA sense strand
gaaaccaacacacuuugag

SEQ ID NO: 1585987 - RNA, 19 nt, Homo sapiens
  misc_RNA (1)...(19): siRNA sense strand
ggaagucgacgaggcucua

SEQ ID NO: 1585988 - RNA, 19 nt, Homo sapiens
  misc_RNA (1)...(19): siRNA sense strand
ugucugaacaauuggcuua

SEQ ID NO: 1585989 - RNA, 19 nt, Homo sapiens
  misc_RNA (1)...(19): siRNA sense strand
acucaucauuucaguguug

SEQ ID NO: 1585990 - RNA, 19 nt, Homo sapiens
  misc_RNA (1)...(19): siRNA sense strand
gaguggacccagcguuauu

SEQ ID NO: 1585991 - RNA, 19 nt, Homo sapiens
  misc_RNA (1)...(19): siRNA sense strand
ccgaguggacccagcguua

SEQ ID NO: 1585992 - RNA, 19 nt, Homo sapiens
  misc_RNA (1)...(19): siRNA sense strand
aggcugagcacgaauacua

SEQ ID NO: 1585993 - RNA, 19 nt, Homo sapiens
  misc_RNA (1)...(19): siRNA sense strand
ugagucagccauuaacaga

SEQ ID NO: 1585994 - RNA, 19 nt, Homo sapiens
  misc_RNA (1)...(19): siRNA sense strand
gagagaaagaaaugaaucu

SEQ ID NO: 1585995 - RNA, 19 nt, Homo sapiens
  misc_RNA (1)...(19): siRNA sense strand
agucagccauuaacagaug

SEQ ID NO: 1585996 - RNA, 19 nt, Homo sapiens
  misc_RNA (1)...(19): siRNA sense strand
ugacucaucauuucagugu

SEQ ID NO: 1585997 - RNA, 19 nt, Homo sapiens
  misc_RNA (1)...(19): siRNA sense strand
cgaaaccaacacacuuuga

SEQ ID NO: 1585998 - RNA, 19 nt, Homo sapiens
  misc_RNA (1)...(19): siRNA sense strand
cgaaguuaagcugaauuua

SEQ ID NO: 1585999 - RNA, 19 nt, Homo sapiens
  misc_RNA (1)...(19): siRNA sense strand
ggaacaccuucgagaacuc

SEQ ID NO: 1586000 - RNA, 19 nt, Homo sapiens
  misc_RNA (1)...(19): siRNA sense strand
gcauguaagcguccugcaa

SEQ ID NO: 1586001 - RNA, 19 nt, Homo sapiens
  misc_RNA (1)...(19): siRNA sense strand
gaggaugauuggugagaac

SEQ ID NO: 1586002 - RNA, 19 nt, Homo sapiens
  misc_RNA (1)...(19): siRNA sense strand
acccauacuuugaggauga

SEQ ID NO: 1586003 - RNA, 19 nt, Homo sapiens
  misc_RNA (1)...(19): siRNA sense strand
ggacccagcguuauuuggu

SEQ ID NO: 1586004 - RNA, 19 nt, Homo sapiens
  misc_RNA (1)...(19): siRNA sense strand
aaacuucaggcaaacacua

SEQ ID NO: 1586005 - RNA, 19 nt, Homo sapiens
  misc_RNA (1)...(19): siRNA sense strand
ccauauuuguacuuucgaa

SEQ ID NO: 1586006 - RNA, 19 nt, Homo sapiens
  misc_RNA (1)...(19): siRNA sense strand
gaacaccuucgagaacuca

SEQ ID NO: 1586007 - RNA, 19 nt, Homo sapiens
  misc_RNA (1)...(19): siRNA sense strand
ucagacaaacaauggcuuu

SEQ ID NO: 1586008 - RNA, 19 nt, Homo sapiens
  misc_RNA (1)...(19): siRNA sense strand
gaacuguugagcuccuaug

SEQ ID NO: 1586009 - RNA, 19 nt, Homo sapiens
  misc_RNA (1)...(19): siRNA sense strand
gaauccuacccaauuauca

SEQ ID NO: 1586010 - RNA, 19 nt, Homo sapiens
  misc_RNA (1)...(19): siRNA sense strand
ggaaugaauacagaaucaa

SEQ ID NO: 1586011 - RNA, 19 nt, Homo sapiens
  misc_RNA (1)...(19): siRNA sense strand
cuuuaaaccugaauaugca

SEQ ID NO: 1586012 - RNA, 19 nt, Homo sapiens
  misc_RNA (1)...(19): siRNA sense strand
gagaacucagugaagaauu

SEQ ID NO: 1586013 - RNA, 19 nt, Homo sapiens
  misc_RNA (1)...(19): siRNA sense strand
uggaagcguucuugguuuc

SEQ ID NO: 1586014 - RNA, 19 nt, Homo sapiens
  misc_RNA (1)...(19): siRNA sense strand
agacuuuacuaacggaauc

SEQ ID NO: 1586015 - RNA, 19 nt, Homo sapiens
  misc_RNA (1)...(19): siRNA sense strand
ggaugaccuugugagagaa

SEQ ID NO: 1586016 - RNA, 19 nt, Homo sapiens
  misc_RNA (1)...(19): siRNA sense strand
cacuuugagucagccauua

SEQ ID NO: 1586017 - RNA, 19 nt, Homo sapiens
  misc_RNA (1)...(19): siRNA sense strand
gcaguuuuaugcuggauug

SEQ ID NO: 1586018 - RNA, 19 nt, Homo sapiens
  misc_RNA (1)...(19): siRNA sense strand
ggcaacaacaguccacuuc

SEQ ID NO: 1586019 - RNA, 19 nt, Homo sapiens
  misc_RNA (1)...(19): siRNA sense strand
aauggaagcguucuugguu

SEQ ID NO: 1586020 - RNA, 19 nt, Homo sapiens
  misc_RNA (1)...(19): siRNA sense strand
cugaacaauuggcuuagga

SEQ ID NO: 1586021 - RNA, 19 nt, Homo sapiens
  misc_RNA (1)...(19): siRNA sense strand
gcauccuuguuugauagua

SEQ ID NO: 1586022 - RNA, 19 nt, Homo sapiens
  misc_RNA (1)...(19): siRNA sense strand
uggcauccuuguuugauag

SEQ ID NO: 1586023 - RNA, 19 nt, Homo sapiens
  misc_RNA (1)...(19): siRNA sense strand
aauggacgaugucugaaca

SEQ ID NO: 1586024 - RNA, 19 nt, Homo sapiens
  misc_RNA (1)...(19): siRNA sense strand
ccucagagaaguuguugau

SEQ ID NO: 1586025 - RNA, 19 nt, Homo sapiens
  misc_RNA (1)...(19): siRNA sense strand
gagcauugacaggaaucua

SEQ ID NO: 1586026 - RNA, 19 nt, Homo sapiens
  misc_RNA (1)...(19): siRNA sense strand
ggcagaggauccugagcau

SEQ ID NO: 1586027 - RNA, 19 nt, Homo sapiens
  misc_RNA (1)...(19): siRNA sense strand
auauuugacucgaaaccaa

SEQ ID NO: 1586028 - RNA, 19 nt, Homo sapiens
  misc_RNA (1)...(19): siRNA sense strand
acagggacgugauguuaga

SEQ ID NO: 1586029 - RNA, 19 nt, Homo sapiens
  misc_RNA (1)...(19): siRNA sense strand
gaaccuggucucccuagga

SEQ ID NO: 1586030 - RNA, 19 nt, Homo sapiens
  misc_RNA (1)...(19): siRNA sense strand
auacagggacgugauguua

SEQ ID NO: 1586031 - RNA, 19 nt, Homo sapiens
  misc_RNA (1)...(19): siRNA sense strand
gggacgugauguuagagaa

SEQ ID NO: 1586032 - RNA, 19 nt, Homo sapiens
  misc_RNA (1)...(19): siRNA sense strand
ucagcgauguggccauaga

SEQ ID NO: 1586033 - RNA, 19 nt, Homo sapiens
  misc_RNA (1)...(19): siRNA sense strand
gggcagaaagcuuuauaca

SEQ ID NO: 1586034 - RNA, 19 nt, Homo sapiens
  misc_RNA (1)...(19): siRNA sense strand
gcgauguggccauagaauu

SEQ ID NO: 1586035 - RNA, 19 nt, Homo sapiens
  misc_RNA (1)...(19): siRNA sense strand
cgauguggccauagaauuc

SEQ ID NO: 1586036 - RNA, 19 nt, Homo sapiens
  misc_RNA (1)...(19): siRNA sense strand
cuuccugaccugaguguua

SEQ ID NO: 1586037 - RNA, 19 nt, Homo sapiens
  misc_RNA (1)...(19): siRNA sense strand
aaccuggucucccuaggaa

SEQ ID NO: 1586038 - RNA, 19 nt, Homo sapiens
  misc_RNA (1)...(19): siRNA sense strand
gcagggagugcaucaaagg

SEQ ID NO: 1586039 - RNA, 19 nt, Homo sapiens
  misc_RNA (1)...(19): siRNA sense strand
auucagcgauguggccaua

SEQ ID NO: 1586040 - RNA, 19 nt, Homo sapiens
  misc_RNA (1)...(19): siRNA sense strand
uuccugaccugaguguuaa

SEQ ID NO: 1586041 - RNA, 19 nt, Homo sapiens
  misc_RNA (1)...(19): siRNA sense strand
gcucugcuaccauuuccuu

SEQ ID NO: 1586042 - RNA, 19 nt, Homo sapiens
  misc_RNA (1)...(19): siRNA sense strand
ggcagggagugcaucaaag

SEQ ID NO: 1586043 - RNA, 19 nt, Homo sapiens
  misc_RNA (1)...(19): siRNA sense strand
ccuggacccugggcagaaa

SEQ ID NO: 1586044 - RNA, 19 nt, Homo sapiens
  misc_RNA (1)...(19): siRNA sense strand
uggcagggagugcaucaaa

SEQ ID NO: 1586045 - RNA, 19 nt, Homo sapiens
  misc_RNA (1)...(19): siRNA sense strand
gcagagugaagugaaaaua

SEQ ID NO: 1586046 - RNA, 19 nt, Homo sapiens
  misc_RNA (1)...(19): siRNA sense strand
gacgugauguuagagaacu

SEQ ID NO: 1586047 - RNA, 19 nt, Homo sapiens
  misc_RNA (1)...(19): siRNA sense strand
ucugcagagugaagugaaa

SEQ ID NO: 1586048 - RNA, 19 nt, Homo sapiens
  misc_RNA (1)...(19): siRNA sense strand
ggcagaaagcuuuauacag

SEQ ID NO: 1586049 - RNA, 19 nt, Homo sapiens
  misc_RNA (1)...(19): siRNA sense strand
gagaaggcauuguauaugg

SEQ ID NO: 1586050 - RNA, 19 nt, Homo sapiens
  misc_RNA (1)...(19): siRNA sense strand
ccgagaagaugcuccagua

SEQ ID NO: 1586051 - RNA, 19 nt, Homo sapiens
  misc_RNA (1)...(19): siRNA sense strand
gaggagaaggcauuguaua

SEQ ID NO: 1586052 - RNA, 19 nt, Homo sapiens
  misc_RNA (1)...(19): siRNA sense strand
ggagaaggcauuguauaug

SEQ ID NO: 1586053 - RNA, 19 nt, Homo sapiens
  misc_RNA (1)...(19): siRNA sense strand
guaccgaggagaaggcauu

SEQ ID NO: 1586054 - RNA, 19 nt, Homo sapiens
  misc_RNA (1)...(19): siRNA sense strand
guuggaggccuacgaguga

SEQ ID NO: 1586055 - RNA, 19 nt, Homo sapiens
  misc_RNA (1)...(19): siRNA sense strand
ccgaggagaaggcauugua

SEQ ID NO: 1586056 - RNA, 19 nt, Homo sapiens
  misc_RNA (1)...(19): siRNA sense strand
cauuguauaugggacacua

SEQ ID NO: 1586057 - RNA, 19 nt, Homo sapiens
  misc_RNA (1)...(19): siRNA sense strand
aggagaaggcauuguauau

SEQ ID NO: 1586058 - RNA, 19 nt, Homo sapiens
  misc_RNA (1)...(19): siRNA sense strand
cgaggagaaggcauuguau

SEQ ID NO: 1586059 - RNA, 19 nt, Homo sapiens
  misc_RNA (1)...(19): siRNA sense strand
gaaauuauccaaagcauca

SEQ ID NO: 1586060 - RNA, 19 nt, Homo sapiens
  misc_RNA (1)...(19): siRNA sense strand
gagaaggcauuguauaugg

SEQ ID NO: 1586061 - RNA, 19 nt, Homo sapiens
  misc_RNA (1)...(19): siRNA sense strand
ccgagaagaugcuccagua

SEQ ID NO: 1586062 - RNA, 19 nt, Homo sapiens
  misc_RNA (1)...(19): siRNA sense strand
agaaagcagugaagcaauu

SEQ ID NO: 1586063 - RNA, 19 nt, Homo sapiens
  misc_RNA (1)...(19): siRNA sense strand
gaagcaauuccaugaguaa

SEQ ID NO: 1586064 - RNA, 19 nt, Homo sapiens
  misc_RNA (1)...(19): siRNA sense strand
gcgguuaccucccacagaa

SEQ ID NO: 1586065 - RNA, 19 nt, Homo sapiens
  misc_RNA (1)...(19): siRNA sense strand
gaagugggaugagaaugug

SEQ ID NO: 1586066 - RNA, 19 nt, Homo sapiens
  misc_RNA (1)...(19): siRNA sense strand
gaggagaaggcauuguaua

SEQ ID NO: 1586067 - RNA, 19 nt, Homo sapiens
  misc_RNA (1)...(19): siRNA sense strand
ugaagcaauuccaugagua

SEQ ID NO: 1586068 - RNA, 19 nt, Homo sapiens
  misc_RNA (1)...(19): siRNA sense strand
ggagaaggcauuguauaug

SEQ ID NO: 1586069 - RNA, 19 nt, Homo sapiens
  misc_RNA (1)...(19): siRNA sense strand
gugaagcaauuccaugagu

SEQ ID NO: 1586070 - RNA, 19 nt, Homo sapiens
  misc_RNA (1)...(19): siRNA sense strand
cgagugaagugggaugaga

SEQ ID NO: 1586071 - RNA, 19 nt, Homo sapiens
  misc_RNA (1)...(19): siRNA sense strand
gaagccagguuuugugaga

SEQ ID NO: 1586072 - RNA, 19 nt, Homo sapiens
  misc_RNA (1)...(19): siRNA sense strand
guaccgaggagaaggcauu

SEQ ID NO: 1586073 - RNA, 19 nt, Homo sapiens
  misc_RNA (1)...(19): siRNA sense strand
guuggaggccuacgaguga

SEQ ID NO: 1586074 - RNA, 19 nt, Homo sapiens
  misc_RNA (1)...(19): siRNA sense strand
gaaagcagugaagcaauuc

SEQ ID NO: 1586075 - RNA, 19 nt, Homo sapiens
  misc_RNA (1)...(19): siRNA sense strand
ugaagugggaugagaaugu

SEQ ID NO: 1586076 - RNA, 19 nt, Homo sapiens
  misc_RNA (1)...(19): siRNA sense strand
ccgaggagaaggcauugua

SEQ ID NO: 1586077 - RNA, 19 nt, Homo sapiens
  misc_RNA (1)...(19): siRNA sense strand
ccauguggagcauccguua

SEQ ID NO: 1586078 - RNA, 19 nt, Homo sapiens
  misc_RNA (1)...(19): siRNA sense strand
cauuguauaugggacacua

SEQ ID NO: 1586079 - RNA, 19 nt, Homo sapiens
  misc_RNA (1)...(19): siRNA sense strand
ucagaaagcagugaagcaa

SEQ ID NO: 1586080 - RNA, 19 nt, Homo sapiens
  misc_RNA (1)...(19): siRNA sense strand
augagaaugugaccgguuu

SEQ ID NO: 1586081 - RNA, 19 nt, Homo sapiens
  misc_RNA (1)...(19): siRNA sense strand
cuggucacauucuuccaua

SEQ ID NO: 1586082 - RNA, 19 nt, Homo sapiens
  misc_RNA (1)...(19): siRNA sense strand
cagugaagcaauuccauga

SEQ ID NO: 1586083 - RNA, 19 nt, Homo sapiens
  misc_RNA (1)...(19): siRNA sense strand
aggagaaggcauuguauau

SEQ ID NO: 1586084 - RNA, 19 nt, Homo sapiens
  misc_RNA (1)...(19): siRNA sense strand
gagugaagugggaugagaa

SEQ ID NO: 1586085 - RNA, 19 nt, Homo sapiens
  misc_RNA (1)...(19): siRNA sense strand
gaaugugaccgguuuugaa

SEQ ID NO: 1586086 - RNA, 19 nt, Homo sapiens
  misc_RNA (1)...(19): siRNA sense strand
ccaaccuggucacauucuu

SEQ ID NO: 1586087 - RNA, 19 nt, Homo sapiens
  misc_RNA (1)...(19): siRNA sense strand
caaccuggucacauucuuc

SEQ ID NO: 1586088 - RNA, 19 nt, Homo sapiens
  misc_RNA (1)...(19): siRNA sense strand
cgaggagaaggcauuguau

SEQ ID NO: 1586089 - RNA, 19 nt, Homo sapiens
  misc_RNA (1)...(19): siRNA sense strand
ccagagauuuuguggacuu

SEQ ID NO: 1586090 - RNA, 19 nt, Homo sapiens
  misc_RNA (1)...(19): siRNA sense strand
gggaacccaccaagaccaa

SEQ ID NO: 1586091 - RNA, 19 nt, Homo sapiens
  misc_RNA (1)...(19): siRNA sense strand
cagaaagcagugaagcaau

SEQ ID NO: 1586092 - RNA, 19 nt, Homo sapiens
  misc_RNA (1)...(19): siRNA sense strand
agaacgugguggacuccuu

SEQ ID NO: 1586093 - RNA, 19 nt, Homo sapiens
  misc_RNA (1)...(19): siRNA sense strand
gagagcagcaguagcauua

SEQ ID NO: 1586094 - RNA, 19 nt, Homo sapiens
  misc_RNA (1)...(19): siRNA sense strand
guacagccaucuucacauu

SEQ ID NO: 1586095 - RNA, 19 nt, Homo sapiens
  misc_RNA (1)...(19): siRNA sense strand
gcucugaucuuugaguaua

SEQ ID NO: 1586096 - RNA, 19 nt, Homo sapiens
  misc_RNA (1)...(19): siRNA sense strand
ccacagguguccaugcaua

SEQ ID NO: 1586097 - RNA, 19 nt, Homo sapiens
  misc_RNA (1)...(19): siRNA sense strand
gcauggcucugaucuuuga

SEQ ID NO: 1586098 - RNA, 19 nt, Homo sapiens
  misc_RNA (1)...(19): siRNA sense strand
ggacauucguuucuacaug

SEQ ID NO: 1586099 - RNA, 19 nt, Homo sapiens
  misc_RNA (1)...(19): siRNA sense strand
gcagacaauuuacaacaga

SEQ ID NO: 1586100 - RNA, 19 nt, Homo sapiens
  misc_RNA (1)...(19): siRNA sense strand
ccaaggacaucaugauuag

SEQ ID NO: 1586101 - RNA, 19 nt, Homo sapiens
  misc_RNA (1)...(19): siRNA sense strand
gccaaggacaucaugauua

SEQ ID NO: 1586102 - RNA, 19 nt, Homo sapiens
  misc_RNA (1)...(19): siRNA sense strand
gaagcuggacuaucgauga

SEQ ID NO: 1586103 - RNA, 19 nt, Homo sapiens
  misc_RNA (1)...(19): siRNA sense strand
caucauccucuauaucuua

SEQ ID NO: 1586104 - RNA, 19 nt, Homo sapiens
  misc_RNA (1)...(19): siRNA sense strand
acagugagcugaacuccuu

SEQ ID NO: 1586105 - RNA, 19 nt, Homo sapiens
  misc_RNA (1)...(19): siRNA sense strand
uaucgaugaugcaaacuuu

SEQ ID NO: 1586106 - RNA, 19 nt, Homo sapiens
  misc_RNA (1)...(19): siRNA sense strand
aaacuuugauccacuuguu

SEQ ID NO: 1586107 - RNA, 19 nt, Homo sapiens
  misc_RNA (1)...(19): siRNA sense strand
ggacauaccaagcccucua

SEQ ID NO: 1586108 - RNA, 19 nt, Homo sapiens
  misc_RNA (1)...(19): siRNA sense strand
ucagagagcugggcacugu

SEQ ID NO: 1586109 - RNA, 19 nt, Homo sapiens
  misc_RNA (1)...(19): siRNA sense strand
guuuauggcagacaauuua

SEQ ID NO: 1586110 - RNA, 19 nt, Homo sapiens
  misc_RNA (1)...(19): siRNA sense strand
gaagguacacugucagcuu

SEQ ID NO: 1586111 - RNA, 19 nt, Homo sapiens
  misc_RNA (1)...(19): siRNA sense strand
ggacaacggaccucaguca

SEQ ID NO: 1586112 - RNA, 19 nt, Homo sapiens
  misc_RNA (1)...(19): siRNA sense strand
gaagggacuacaacaguga

SEQ ID NO: 1586113 - RNA, 19 nt, Homo sapiens
  misc_RNA (1)...(19): siRNA sense strand
uagcauuacuucagagaau

SEQ ID NO: 1586114 - RNA, 19 nt, Homo sapiens
  misc_RNA (1)...(19): siRNA sense strand
cagcaucacccucaacuug

SEQ ID NO: 1586115 - RNA, 19 nt, Homo sapiens
  misc_RNA (1)...(19): siRNA sense strand
aaagaaugccggcuuguug

SEQ ID NO: 1586116 - RNA, 19 nt, Homo sapiens
  misc_RNA (1)...(19): siRNA sense strand
gcugggcacuguuuguaga

SEQ ID NO: 1586117 - RNA, 19 nt, Homo sapiens
  misc_RNA (1)...(19): siRNA sense strand
uggagaagcuggacuaucg

SEQ ID NO: 1586118 - RNA, 19 nt, Homo sapiens
  misc_RNA (1)...(19): siRNA sense strand
caugagcugugucaccauu

SEQ ID NO: 1586119 - RNA, 19 nt, Homo sapiens
  misc_RNA (1)...(19): siRNA sense strand
gagcugggcacuguuugua

SEQ ID NO: 1586120 - RNA, 19 nt, Homo sapiens
  misc_RNA (1)...(19): siRNA sense strand
acagccaucuucacauuug

SEQ ID NO: 1586121 - RNA, 19 nt, Homo sapiens
  misc_RNA (1)...(19): siRNA sense strand
ucaagcugauguacucuau

SEQ ID NO: 1586122 - RNA, 19 nt, Homo sapiens
  misc_RNA (1)...(19): siRNA sense strand
guacacugucagcuucuua

SEQ ID NO: 1586123 - RNA, 19 nt, Homo sapiens
  misc_RNA (1)...(19): siRNA sense strand
gagaucaucaucccguuug

SEQ ID NO: 1586124 - RNA, 19 nt, Homo sapiens
  misc_RNA (1)...(19): siRNA sense strand
ccacagcaguuuucuuuug

SEQ ID NO: 1586125 - RNA, 19 nt, Homo sapiens
  misc_RNA (1)...(19): siRNA sense strand
acacugggcuacaugaagu

SEQ ID NO: 1586126 - RNA, 19 nt, Homo sapiens
  misc_RNA (1)...(19): siRNA sense strand
gcauggucauccuguugaa

SEQ ID NO: 1586127 - RNA, 19 nt, Homo sapiens
  misc_RNA (1)...(19): siRNA sense strand
ucagagagcagcaguagca

SEQ ID NO: 1586128 - RNA, 19 nt, Homo sapiens
  misc_RNA (1)...(19): siRNA sense strand
gaucuuugaguauaucaug

SEQ ID NO: 1586129 - RNA, 19 nt, Homo sapiens
  misc_RNA (1)...(19): siRNA sense strand
ucaaggugcuguccgucuu

SEQ ID NO: 1586130 - RNA, 19 nt, Homo sapiens
  misc_RNA (1)...(19): siRNA sense strand
acugucagcuucuuauuag

SEQ ID NO: 1586131 - RNA, 19 nt, Homo sapiens
  misc_RNA (1)...(19): siRNA sense strand
gcagaagacuuuugugaac

SEQ ID NO: 1586132 - RNA, 19 nt, Homo sapiens
  misc_RNA (1)...(19): siRNA sense strand
cuugaaaccugcccgaaca

SEQ ID NO: 1586133 - RNA, 19 nt, Homo sapiens
  misc_RNA (1)...(19): siRNA sense strand
gacuaucgaugaugcaaac

SEQ ID NO: 1586134 - RNA, 19 nt, Homo sapiens
  misc_RNA (1)...(19): siRNA sense strand
ggacacugggcuacaugaa

SEQ ID NO: 1586135 - RNA, 19 nt, Homo sapiens
  misc_RNA (1)...(19): siRNA sense strand
uaaagaaugccggcuuguu

SEQ ID NO: 1586136 - RNA, 19 nt, Homo sapiens
  misc_RNA (1)...(19): siRNA sense strand
cacugucagcuucuuauua

SEQ ID NO: 1586137 - RNA, 19 nt, Homo sapiens
  misc_RNA (1)...(19): siRNA sense strand
ccagcaaccuacccuugau

SEQ ID NO: 1586138 - RNA, 19 nt, Homo sapiens
  misc_RNA (1)...(19): siRNA sense strand
ccacgugaccuccaacauc

SEQ ID NO: 1586139 - RNA, 19 nt, Homo sapiens
  misc_RNA (1)...(19): siRNA sense strand
ggacuaucgaugaugcaaa

SEQ ID NO: 1586140 - RNA, 19 nt, Homo sapiens
  misc_RNA (1)...(19): siRNA sense strand
cacgugaccuccaacaucu

SEQ ID NO: 1586141 - RNA, 19 nt, Homo sapiens
  misc_RNA (1)...(19): siRNA sense strand
accaagcccucuaugaguu

SEQ ID NO: 1586142 - RNA, 19 nt, Homo sapiens
  misc_RNA (1)...(19): siRNA sense strand
gcucagccuuggucugucu

SEQ ID NO: 1586143 - RNA, 19 nt, Homo sapiens
  misc_RNA (1)...(19): siRNA sense strand
cagucaagcugauguacuc

SEQ ID NO: 1586144 - RNA, 19 nt, Homo sapiens
  misc_RNA (1)...(19): siRNA sense strand
gguguauauuugggacaua

SEQ ID NO: 1586145 - RNA, 19 nt, Homo sapiens
  misc_RNA (1)...(19): siRNA sense strand
uggcucugaucuuugagua

SEQ ID NO: 1586146 - RNA, 19 nt, Homo sapiens
  misc_RNA (1)...(19): siRNA sense strand
acccucaacuugcccaauu

SEQ ID NO: 1586147 - RNA, 19 nt, Homo sapiens
  misc_RNA (1)...(19): siRNA sense strand
gccagagacugcagaagac

SEQ ID NO: 1586148 - RNA, 19 nt, Homo sapiens
  misc_RNA (1)...(19): siRNA sense strand
gaagcauccacagcaguuu

SEQ ID NO: 1586149 - RNA, 19 nt, Homo sapiens
  misc_RNA (1)...(19): siRNA sense strand
ugaagcauccacagcaguu

SEQ ID NO: 1586150 - RNA, 19 nt, Homo sapiens
  misc_RNA (1)...(19): siRNA sense strand
agagacugcagaagacuuu

SEQ ID NO: 1586151 - RNA, 19 nt, Homo sapiens
  misc_RNA (1)...(19): siRNA sense strand
uacaacagaugguggaaaa

SEQ ID NO: 1586152 - RNA, 19 nt, Homo sapiens
  misc_RNA (1)...(19): siRNA sense strand
ggcagacaauuuacaacag

SEQ ID NO: 1586153 - RNA, 19 nt, Homo sapiens
  misc_RNA (1)...(19): siRNA sense strand
guaugguucugccucucaa

SEQ ID NO: 1586154 - RNA, 19 nt, Homo sapiens
  misc_RNA (1)...(19): siRNA sense strand
ugaaggcgucgguaugguu

SEQ ID NO: 1586155 - RNA, 19 nt, Homo sapiens
  misc_RNA (1)...(19): siRNA sense strand
ucaccuaugcccuccaguu

SEQ ID NO: 1586156 - RNA, 19 nt, Homo sapiens
  misc_RNA (1)...(19): siRNA sense strand
gucagcuucuuauuaguca

SEQ ID NO: 1586157 - RNA, 19 nt, Homo sapiens
  misc_RNA (1)...(19): siRNA sense strand
gacauaccaagcccucuau

SEQ ID NO: 1586158 - RNA, 19 nt, Homo sapiens
  misc_RNA (1)...(19): siRNA sense strand
agagagcugggcacuguuu

SEQ ID NO: 1586159 - RNA, 19 nt, Homo sapiens
  misc_RNA (1)...(19): siRNA sense strand
aagcuggacuaucgaugau

SEQ ID NO: 1586160 - RNA, 19 nt, Homo sapiens
  misc_RNA (1)...(19): siRNA sense strand
ccauugucaucauccucua

SEQ ID NO: 1586161 - RNA, 19 nt, Homo sapiens
  misc_RNA (1)...(19): siRNA sense strand
uugauccacuuguugaaau

SEQ ID NO: 1586162 - RNA, 19 nt, Homo sapiens
  misc_RNA (1)...(19): siRNA sense strand
cagacaauuuacaacagau

SEQ ID NO: 1586163 - RNA, 19 nt, Homo sapiens
  misc_RNA (1)...(19): siRNA sense strand
gggcuucugcaguguuuau

SEQ ID NO: 1586164 - RNA, 19 nt, Homo sapiens
  misc_RNA (1)...(19): siRNA sense strand
cagccaucuucacauuuga

SEQ ID NO: 1586165 - RNA, 19 nt, Homo sapiens
  misc_RNA (1)...(19): siRNA sense strand
ggcaucuucuucaccuaug

SEQ ID NO: 1586166 - RNA, 19 nt, Homo sapiens
  misc_RNA (1)...(19): siRNA sense strand
acaugaaguuugggucaga

SEQ ID NO: 1586167 - RNA, 19 nt, Homo sapiens
  misc_RNA (1)...(19): siRNA sense strand
cauccucuauaucuuacug

SEQ ID NO: 1586168 - RNA, 19 nt, Homo sapiens
  misc_RNA (1)...(19): siRNA sense strand
ugauccacuuguugaaaug

SEQ ID NO: 1586169 - RNA, 19 nt, Homo sapiens
  misc_RNA (1)...(19): siRNA sense strand
aagcugauguacucuaucg

SEQ ID NO: 1586170 - RNA, 19 nt, Homo sapiens
  misc_RNA (1)...(19): siRNA sense strand
gucaucauccucuauaucu

SEQ ID NO: 1586171 - RNA, 19 nt, Homo sapiens
  misc_RNA (1)...(19): siRNA sense strand
gcaguuuucuuuuguucug

SEQ ID NO: 1586172 - RNA, 19 nt, Homo sapiens
  misc_RNA (1)...(19): siRNA sense strand
agaagacuuuugugaacua

SEQ ID NO: 1586173 - RNA, 19 nt, Homo sapiens
  misc_RNA (1)...(19): siRNA sense strand
ccacgucccagcugagauc

SEQ ID NO: 1586174 - RNA, 19 nt, Homo sapiens
  misc_RNA (1)...(19): siRNA sense strand
cugauccuguugguguuua

SEQ ID NO: 1586175 - RNA, 19 nt, Homo sapiens
  misc_RNA (1)...(19): siRNA sense strand
gcuucugcaguguuuauuu

SEQ ID NO: 1586176 - RNA, 19 nt, Homo sapiens
  misc_RNA (1)...(19): siRNA sense strand
gagaagcuggacuaucgau

SEQ ID NO: 1586177 - RNA, 19 nt, Homo sapiens
  misc_RNA (1)...(19): siRNA sense strand
ccaagcccucuaugaguug

SEQ ID NO: 1586178 - RNA, 19 nt, Homo sapiens
  misc_RNA (1)...(19): siRNA sense strand
cgcccuggcucucaucauc

SEQ ID NO: 1586179 - RNA, 19 nt, Homo sapiens
  misc_RNA (1)...(19): siRNA sense strand
cuacaacagugagcugaac

SEQ ID NO: 1586180 - RNA, 19 nt, Homo sapiens
  misc_RNA (1)...(19): siRNA sense strand
agccagagacugcagaaga

SEQ ID NO: 1586181 - RNA, 19 nt, Homo sapiens
  misc_RNA (1)...(19): siRNA sense strand
ugagaucaucaucccguuu

SEQ ID NO: 1586182 - RNA, 19 nt, Homo sapiens
  misc_RNA (1)...(19): siRNA sense strand
cgucccagcugagaucauc

SEQ ID NO: 1586183 - RNA, 19 nt, Homo sapiens
  misc_RNA (1)...(19): siRNA sense strand
ccuaugcccuccaguucca

SEQ ID NO: 1586184 - RNA, 19 nt, Homo sapiens
  misc_RNA (1)...(19): siRNA sense strand
ucaucauccucuauaucuu

SEQ ID NO: 1586185 - RNA, 19 nt, Homo sapiens
  misc_RNA (1)...(19): siRNA sense strand
gguaugguucugccucuca

SEQ ID NO: 1586186 - RNA, 19 nt, Homo sapiens
  misc_RNA (1)...(19): siRNA sense strand
gguacacugucagcuucuu

SEQ ID NO: 1586187 - RNA, 19 nt, Homo sapiens
  misc_RNA (1)...(19): siRNA sense strand
auggagaggccacgaugua

SEQ ID NO: 1586188 - RNA, 19 nt, Homo sapiens
  misc_RNA (1)...(19): siRNA sense strand
uauggcagacaauuuacaa

SEQ ID NO: 1586189 - RNA, 19 nt, Homo sapiens
  misc_RNA (1)...(19): siRNA sense strand
gagagaagcuguuccagaa

SEQ ID NO: 1586190 - RNA, 19 nt, Homo sapiens
  misc_RNA (1)...(19): siRNA sense strand
gaaggaagaggacaugauu

SEQ ID NO: 1586191 - RNA, 19 nt, Homo sapiens
  misc_RNA (1)...(19): siRNA sense strand
ccaaaggucaugcucauuu

SEQ ID NO: 1586192 - RNA, 19 nt, Homo sapiens
  misc_RNA (1)...(19): siRNA sense strand
agaggaagcugaacgucua

SEQ ID NO: 1586193 - RNA, 19 nt, Homo sapiens
  misc_RNA (1)...(19): siRNA sense strand
cgaagcugcuggacuuuga

SEQ ID NO: 1586194 - RNA, 19 nt, Homo sapiens
  misc_RNA (1)...(19): siRNA sense strand
caaaggucaugcucauuuc

SEQ ID NO: 1586195 - RNA, 19 nt, Homo sapiens
  misc_RNA (1)...(19): siRNA sense strand
ggacccucaugacuccuua

SEQ ID NO: 1586196 - RNA, 19 nt, Homo sapiens
  misc_RNA (1)...(19): siRNA sense strand
gcaaacaccugcgcauggu

SEQ ID NO: 1586197 - RNA, 19 nt, Homo sapiens
  misc_RNA (1)...(19): siRNA sense strand
gaacgucauccacaucaug

SEQ ID NO: 1586198 - RNA, 19 nt, Homo sapiens
  misc_RNA (1)...(19): siRNA sense strand
caucaugggcugcuacauu

SEQ ID NO: 1586199 - RNA, 19 nt, Homo sapiens
  misc_RNA (1)...(19): siRNA sense strand
gaagaggacaugauucacu

SEQ ID NO: 1586200 - RNA, 19 nt, Homo sapiens
  misc_RNA (1)...(19): siRNA sense strand
acucgaagcugcuggacuu

SEQ ID NO: 1586201 - RNA, 19 nt, Homo sapiens
  misc_RNA (1)...(19): siRNA sense strand
gcccaaggcugaguacauc

SEQ ID NO: 1586202 - RNA, 19 nt, Homo sapiens
  misc_RNA (1)...(19): siRNA sense strand
aagaggacaugauucacuu

SEQ ID NO: 1586203 - RNA, 19 nt, Homo sapiens
  misc_RNA (1)...(19): siRNA sense strand
ccucaugacuccuuauagg

SEQ ID NO: 1586204 - RNA, 19 nt, Homo sapiens
  misc_RNA (1)...(19): siRNA sense strand
caccaaaggucaugcucau

SEQ ID NO: 1586205 - RNA, 19 nt, Homo sapiens
  misc_RNA (1)...(19): siRNA sense strand
agacagcaaccacaacuau

SEQ ID NO: 1586206 - RNA, 19 nt, Homo sapiens
  misc_RNA (1)...(19): siRNA sense strand
gccggaaacgggagaauga

SEQ ID NO: 1586207 - RNA, 19 nt, Homo sapiens
  misc_RNA (1)...(19): siRNA sense strand
ggacugggacacugagaag

SEQ ID NO: 1586208 - RNA, 19 nt, Homo sapiens
  misc_RNA (1)...(19): siRNA sense strand
gaugaucgagacguacuuu

SEQ ID NO: 1586209 - RNA, 19 nt, Homo sapiens
  misc_RNA (1)...(19): siRNA sense strand
ggagaaggaagaggacaug

SEQ ID NO: 1586210 - RNA, 19 nt, Homo sapiens
  misc_RNA (1)...(19): siRNA sense strand
ccaaaguggagaaggaaga

SEQ ID NO: 1586211 - RNA, 19 nt, Homo sapiens
  misc_RNA (1)...(19): siRNA sense strand
uugaggagauagagaggaa

SEQ ID NO: 1586212 - RNA, 19 nt, Homo sapiens
  misc_RNA (1)...(19): siRNA sense strand
ccacaagggagccaagauc

SEQ ID NO: 1586213 - RNA, 19 nt, Homo sapiens
  misc_RNA (1)...(19): siRNA sense strand
gccaagaucuggaaaaugc

SEQ ID NO: 1586214 - RNA, 19 nt, Homo sapiens
  misc_RNA (1)...(19): siRNA sense strand
gcguugaccgugugucuga

SEQ ID NO: 1586215 - RNA, 19 nt, Homo sapiens
  misc_RNA (1)...(19): siRNA sense strand
ugaucgagacguacuuuga

SEQ ID NO: 1586216 - RNA, 19 nt, Homo sapiens
  misc_RNA (1)...(19): siRNA sense strand
gagccaagaucuggaaaau

SEQ ID NO: 1586217 - RNA, 19 nt, Homo sapiens
  misc_RNA (1)...(19): siRNA sense strand
caacuaugcaagcgguguu

SEQ ID NO: 1586218 - RNA, 19 nt, Homo sapiens
  misc_RNA (1)...(19): siRNA sense strand
gguuguaucgccuguggaa

SEQ ID NO: 1586219 - RNA, 19 nt, Homo sapiens
  misc_RNA (1)...(19): siRNA sense strand
cgagacguacuuugacuuc

SEQ ID NO: 1586220 - RNA, 19 nt, Homo sapiens
  misc_RNA (1)...(19): siRNA sense strand
gggugaaggcccagacguu

SEQ ID NO: 1586221 - RNA, 19 nt, Homo sapiens
  misc_RNA (1)...(19): siRNA sense strand
gaaccucaggacccucaug

SEQ ID NO: 1586222 - RNA, 19 nt, Homo sapiens
  misc_RNA (1)...(19): siRNA sense strand
gagaaggaagaggacauga

SEQ ID NO: 1586223 - RNA, 19 nt, Homo sapiens
  misc_RNA (1)...(19): siRNA sense strand
ucuaucuccucaagaacaa

SEQ ID NO: 1586224 - RNA, 19 nt, Homo sapiens
  misc_RNA (1)...(19): siRNA sense strand
gacagcaaccacaacuaug

SEQ ID NO: 1586225 - RNA, 19 nt, Homo sapiens
  misc_RNA (1)...(19): siRNA sense strand
ccaugaaagccgacacuuc

SEQ ID NO: 1586226 - RNA, 19 nt, Homo sapiens
  misc_RNA (1)...(19): siRNA sense strand
aggaagaggacaugauuca

SEQ ID NO: 1586227 - RNA, 19 nt, Homo sapiens
  misc_RNA (1)...(19): siRNA sense strand
aucaugggcugcuacauuc

SEQ ID NO: 1586228 - RNA, 19 nt, Homo sapiens
  misc_RNA (1)...(19): siRNA sense strand
cggaaacgggagaaugauu

SEQ ID NO: 1586229 - RNA, 19 nt, Homo sapiens
  misc_RNA (1)...(19): siRNA sense strand
gcccaagggaagcagauga

SEQ ID NO: 1586230 - RNA, 19 nt, Homo sapiens
  misc_RNA (1)...(19): siRNA sense strand
acaccucuaucuccucaag

SEQ ID NO: 1586231 - RNA, 19 nt, Homo sapiens
  misc_RNA (1)...(19): siRNA sense strand
agcagaugaucgagacgua

SEQ ID NO: 1586232 - RNA, 19 nt, Homo sapiens
  misc_RNA (1)...(19): siRNA sense strand
cuuauagggucaccuucga

SEQ ID NO: 1586233 - RNA, 19 nt, Homo sapiens
  misc_RNA (1)...(19): siRNA sense strand
agauagagaggaagcugaa

SEQ ID NO: 1586234 - RNA, 19 nt, Homo sapiens
  misc_RNA (1)...(19): siRNA sense strand
aaugauuccgcgucuguaa

SEQ ID NO: 1586235 - RNA, 19 nt, Homo sapiens
  misc_RNA (1)...(19): siRNA sense strand
gcugaacgucuaccacaag

SEQ ID NO: 1586236 - RNA, 19 nt, Homo sapiens
  misc_RNA (1)...(19): siRNA sense strand
gaucgagacguacuuugac

SEQ ID NO: 1586237 - RNA, 19 nt, Homo sapiens
  misc_RNA (1)...(19): siRNA sense strand
ccaauggagagaagcuguu

SEQ ID NO: 1586238 - RNA, 19 nt, Homo sapiens
  misc_RNA (1)...(19): siRNA sense strand
uugccaaaguggagaagga

SEQ ID NO: 1586239 - RNA, 19 nt, Homo sapiens
  misc_RNA (1)...(19): siRNA sense strand
ugagccgccugaugagcaa

SEQ ID NO: 1586240 - RNA, 19 nt, Homo sapiens
  misc_RNA (1)...(19): siRNA sense strand
gagagaagcuguuccagaa

SEQ ID NO: 1586241 - RNA, 19 nt, Homo sapiens
  misc_RNA (1)...(19): siRNA sense strand
gcaagaagcuggagaggau

SEQ ID NO: 1586242 - RNA, 19 nt, Homo sapiens
  misc_RNA (1)...(19): siRNA sense strand
gaaggaagaggacaugauu

SEQ ID NO: 1586243 - RNA, 19 nt, Homo sapiens
  misc_RNA (1)...(19): siRNA sense strand
ccaaaggucaugcucauuu

SEQ ID NO: 1586244 - RNA, 19 nt, Homo sapiens
  misc_RNA (1)...(19): siRNA sense strand
agaggaagcugaacgucua

SEQ ID NO: 1586245 - RNA, 19 nt, Homo sapiens
  misc_RNA (1)...(19): siRNA sense strand
cgaagcugcuggacuuuga

SEQ ID NO: 1586246 - RNA, 19 nt, Homo sapiens
  misc_RNA (1)...(19): siRNA sense strand
caaaggucaugcucauuuc

SEQ ID NO: 1586247 - RNA, 19 nt, Homo sapiens
  misc_RNA (1)...(19): siRNA sense strand
ggacccucaugacuccuua

SEQ ID NO: 1586248 - RNA, 19 nt, Homo sapiens
  misc_RNA (1)...(19): siRNA sense strand
gcaaacaccugcgcauggu

SEQ ID NO: 1586249 - RNA, 19 nt, Homo sapiens
  misc_RNA (1)...(19): siRNA sense strand
gaacgucauccacaucaug

SEQ ID NO: 1586250 - RNA, 19 nt, Homo sapiens
  misc_RNA (1)...(19): siRNA sense strand
caucaugggcugcuacauu

SEQ ID NO: 1586251 - RNA, 19 nt, Homo sapiens
  misc_RNA (1)...(19): siRNA sense strand
gaagaggacaugauucacu

SEQ ID NO: 1586252 - RNA, 19 nt, Homo sapiens
  misc_RNA (1)...(19): siRNA sense strand
acucgaagcugcuggacuu

SEQ ID NO: 1586253 - RNA, 19 nt, Homo sapiens
  misc_RNA (1)...(19): siRNA sense strand
gcccaaggcugaguacauc

SEQ ID NO: 1586254 - RNA, 19 nt, Homo sapiens
  misc_RNA (1)...(19): siRNA sense strand
aagaggacaugauucacuu

SEQ ID NO: 1586255 - RNA, 19 nt, Homo sapiens
  misc_RNA (1)...(19): siRNA sense strand
ccucaugacuccuuauagg

SEQ ID NO: 1586256 - RNA, 19 nt, Homo sapiens
  misc_RNA (1)...(19): siRNA sense strand
caccaaaggucaugcucau

SEQ ID NO: 1586257 - RNA, 19 nt, Homo sapiens
  misc_RNA (1)...(19): siRNA sense strand
agacagcaaccacaacuau

SEQ ID NO: 1586258 - RNA, 19 nt, Homo sapiens
  misc_RNA (1)...(19): siRNA sense strand
gccggaaacgggagaauga

SEQ ID NO: 1586259 - RNA, 19 nt, Homo sapiens
  misc_RNA (1)...(19): siRNA sense strand
ggacugggacacugagaag

SEQ ID NO: 1586260 - RNA, 19 nt, Homo sapiens
  misc_RNA (1)...(19): siRNA sense strand
gaugaucgagacguacuuu

SEQ ID NO: 1586261 - RNA, 19 nt, Homo sapiens
  misc_RNA (1)...(19): siRNA sense strand
ggagaaggaagaggacaug

SEQ ID NO: 1586262 - RNA, 19 nt, Homo sapiens
  misc_RNA (1)...(19): siRNA sense strand
ccaaaguggagaaggaaga

SEQ ID NO: 1586263 - RNA, 19 nt, Homo sapiens
  misc_RNA (1)...(19): siRNA sense strand
uugaggagauagagaggaa

SEQ ID NO: 1586264 - RNA, 19 nt, Homo sapiens
  misc_RNA (1)...(19): siRNA sense strand
ccacaagggagccaagauc

SEQ ID NO: 1586265 - RNA, 19 nt, Homo sapiens
  misc_RNA (1)...(19): siRNA sense strand
gccaagaucuggaaaaugc

SEQ ID NO: 1586266 - RNA, 19 nt, Homo sapiens
  misc_RNA (1)...(19): siRNA sense strand
gagccaagaucuggaaaau

SEQ ID NO: 1586267 - RNA, 19 nt, Homo sapiens
  misc_RNA (1)...(19): siRNA sense strand
ugaucgagacguacuuuga

SEQ ID NO: 1586268 - RNA, 19 nt, Homo sapiens
  misc_RNA (1)...(19): siRNA sense strand
gcguugaccgugugucuga

SEQ ID NO: 1586269 - RNA, 19 nt, Homo sapiens
  misc_RNA (1)...(19): siRNA sense strand
caacuaugcaagcgguguu

SEQ ID NO: 1586270 - RNA, 19 nt, Homo sapiens
  misc_RNA (1)...(19): siRNA sense strand
gguuguaucgccuguggaa

SEQ ID NO: 1586271 - RNA, 19 nt, Homo sapiens
  misc_RNA (1)...(19): siRNA sense strand
cgagacguacuuugacuuc

SEQ ID NO: 1586272 - RNA, 19 nt, Homo sapiens
  misc_RNA (1)...(19): siRNA sense strand
gggugaaggcccagacguu

SEQ ID NO: 1586273 - RNA, 19 nt, Homo sapiens
  misc_RNA (1)...(19): siRNA sense strand
gacagcaaccacaacuaug

SEQ ID NO: 1586274 - RNA, 19 nt, Homo sapiens
  misc_RNA (1)...(19): siRNA sense strand
gaaccucaggacccucaug

SEQ ID NO: 1586275 - RNA, 19 nt, Homo sapiens
  misc_RNA (1)...(19): siRNA sense strand
gagaaggaagaggacauga

SEQ ID NO: 1586276 - RNA, 19 nt, Homo sapiens
  misc_RNA (1)...(19): siRNA sense strand
ucuaucuccucaagaacaa

SEQ ID NO: 1586277 - RNA, 19 nt, Homo sapiens
  misc_RNA (1)...(19): siRNA sense strand
ccaugaaagccgacacuuc

SEQ ID NO: 1586278 - RNA, 19 nt, Homo sapiens
  misc_RNA (1)...(19): siRNA sense strand
aggaagaggacaugauuca

SEQ ID NO: 1586279 - RNA, 19 nt, Homo sapiens
  misc_RNA (1)...(19): siRNA sense strand
cggaaacgggagaaugauu

SEQ ID NO: 1586280 - RNA, 19 nt, Homo sapiens
  misc_RNA (1)...(19): siRNA sense strand
gcccaagggaagcagauga

SEQ ID NO: 1586281 - RNA, 19 nt, Homo sapiens
  misc_RNA (1)...(19): siRNA sense strand
aucaugggcugcuacauuc

SEQ ID NO: 1586282 - RNA, 19 nt, Homo sapiens
  misc_RNA (1)...(19): siRNA sense strand
acaccucuaucuccucaag

SEQ ID NO: 1586283 - RNA, 19 nt, Homo sapiens
  misc_RNA (1)...(19): siRNA sense strand
agcagaugaucgagacgua

SEQ ID NO: 1586284 - RNA, 19 nt, Homo sapiens
  misc_RNA (1)...(19): siRNA sense strand
cuuauagggucaccuucga

SEQ ID NO: 1586285 - RNA, 19 nt, Homo sapiens
  misc_RNA (1)...(19): siRNA sense strand
agauagagaggaagcugaa

SEQ ID NO: 1586286 - RNA, 19 nt, Homo sapiens
  misc_RNA (1)...(19): siRNA sense strand
aaugauuccgcgucuguaa

SEQ ID NO: 1586287 - RNA, 19 nt, Homo sapiens
  misc_RNA (1)...(19): siRNA sense strand
gcugaacgucuaccacaag

SEQ ID NO: 1586288 - RNA, 19 nt, Homo sapiens
  misc_RNA (1)...(19): siRNA sense strand
gaucgagacguacuuugac

SEQ ID NO: 1586289 - RNA, 19 nt, Homo sapiens
  misc_RNA (1)...(19): siRNA sense strand
ccaauggagagaagcuguu

SEQ ID NO: 1586290 - RNA, 19 nt, Homo sapiens
  misc_RNA (1)...(19): siRNA sense strand
uugccaaaguggagaagga

SEQ ID NO: 1586291 - RNA, 19 nt, Homo sapiens
  misc_RNA (1)...(19): siRNA sense strand
ugagccgccugaugagcaa

SEQ ID NO: 1586292 - RNA, 19 nt, Homo sapiens
  misc_RNA (1)...(19): siRNA sense strand
gcacgcagcaagccauaua

SEQ ID NO: 1586293 - RNA, 19 nt, Homo sapiens
  misc_RNA (1)...(19): siRNA sense strand
uggcggagaucaacgagua

SEQ ID NO: 1586294 - RNA, 19 nt, Homo sapiens
  misc_RNA (1)...(19): siRNA sense strand
gaucaacgaguaccucaug

SEQ ID NO: 1586295 - RNA, 19 nt, Homo sapiens
  misc_RNA (1)...(19): siRNA sense strand
gcaaggacaacuacuggau

SEQ ID NO: 1586296 - RNA, 19 nt, Homo sapiens
  misc_RNA (1)...(19): siRNA sense strand
gccacaaccuuucgcucaa

SEQ ID NO: 1586297 - RNA, 19 nt, Homo sapiens
  misc_RNA (1)...(19): siRNA sense strand
gcuugacgcuggcggagau

SEQ ID NO: 1586298 - RNA, 19 nt, Homo sapiens
  misc_RNA (1)...(19): siRNA sense strand
gcaacuccgugcgccacaa

SEQ ID NO: 1586299 - RNA, 19 nt, Homo sapiens
  misc_RNA (1)...(19): siRNA sense strand
gggacaagcagggcaguga

SEQ ID NO: 1586300 - RNA, 19 nt, Homo sapiens
  misc_RNA (1)...(19): siRNA sense strand
ccacaaccuuucgcucaac

SEQ ID NO: 1586301 - RNA, 19 nt, Homo sapiens
  misc_RNA (1)...(19): siRNA sense strand
gagaaacucugcaaacaua

SEQ ID NO: 1586302 - RNA, 19 nt, Homo sapiens
  misc_RNA (1)...(19): siRNA sense strand
gaacaucccuccucugaac

SEQ ID NO: 1586303 - RNA, 19 nt, Homo sapiens
  misc_RNA (1)...(19): siRNA sense strand
ugaacaaucuccaauggua

SEQ ID NO: 1586304 - RNA, 19 nt, Homo sapiens
  misc_RNA (1)...(19): siRNA sense strand
ucaaagacguggauugguu

SEQ ID NO: 1586305 - RNA, 19 nt, Homo sapiens
  misc_RNA (1)...(19): siRNA sense strand
gauacaaucucauggauac

SEQ ID NO: 1586306 - RNA, 19 nt, Homo sapiens
  misc_RNA (1)...(19): siRNA sense strand
cuauaaacauggcuacauu

SEQ ID NO: 1586307 - RNA, 19 nt, Homo sapiens
  misc_RNA (1)...(19): siRNA sense strand
aaacauggcuacauugcau

SEQ ID NO: 1586308 - RNA, 19 nt, Homo sapiens
  misc_RNA (1)...(19): siRNA sense strand
gaaacaggcucuggacaac

SEQ ID NO: 1586309 - RNA, 19 nt, Homo sapiens
  misc_RNA (1)...(19): siRNA sense strand
gcaggaucaugcucuucua

SEQ ID NO: 1586310 - RNA, 19 nt, Homo sapiens
  misc_RNA (1)...(19): siRNA sense strand
uggagucucugaucaaaga

SEQ ID NO: 1586311 - RNA, 19 nt, Homo sapiens
  misc_RNA (1)...(19): siRNA sense strand
cagugacaauugauaauga

SEQ ID NO: 1586312 - RNA, 19 nt, Homo sapiens
  misc_RNA (1)...(19): siRNA sense strand
ggauacaaucucauggaua

SEQ ID NO: 1586313 - RNA, 19 nt, Homo sapiens
  misc_RNA (1)...(19): siRNA sense strand
guacaacccucuggagucu

SEQ ID NO: 1586314 - RNA, 19 nt, Homo sapiens
  misc_RNA (1)...(19): siRNA sense strand
gagacagugacaauugaua

SEQ ID NO: 1586315 - RNA, 19 nt, Homo sapiens
  misc_RNA (1)...(19): siRNA sense strand
ccgaagagccugcuuuauc

SEQ ID NO: 1586316 - RNA, 19 nt, Homo sapiens
  misc_RNA (1)...(19): siRNA sense strand
gggauacaaucucauggau

SEQ ID NO: 1586317 - RNA, 19 nt, Homo sapiens
  misc_RNA (1)...(19): siRNA sense strand
cgaagagccugcuuuaucc

SEQ ID NO: 1586318 - RNA, 19 nt, Homo sapiens
  misc_RNA (1)...(19): siRNA sense strand
gaucaaagacguggauugg

SEQ ID NO: 1586319 - RNA, 19 nt, Homo sapiens
  misc_RNA (1)...(19): siRNA sense strand
aaugguacaucuaugagaa

SEQ ID NO: 1586320 - RNA, 19 nt, Homo sapiens
  misc_RNA (1)...(19): siRNA sense strand
guacaucuaugagaaacag

SEQ ID NO: 1586321 - RNA, 19 nt, Homo sapiens
  misc_RNA (1)...(19): siRNA sense strand
caggagacagugacaauug

SEQ ID NO: 1586322 - RNA, 19 nt, Homo sapiens
  misc_RNA (1)...(19): siRNA sense strand
acaccugggucaaguacaa

SEQ ID NO: 1586323 - RNA, 19 nt, Homo sapiens
  misc_RNA (1)...(19): siRNA sense strand
agacagugacaauugauaa

SEQ ID NO: 1586324 - RNA, 19 nt, Homo sapiens
  misc_RNA (1)...(19): siRNA sense strand
gaccaucuuugggauacaa

SEQ ID NO: 1586325 - RNA, 19 nt, Homo sapiens
  misc_RNA (1)...(19): siRNA sense strand
ggucacccauugagaaacu

SEQ ID NO: 1586326 - RNA, 19 nt, Homo sapiens
  misc_RNA (1)...(19): siRNA sense strand
gaaacucugcaaacauauc

SEQ ID NO: 1586327 - RNA, 19 nt, Homo sapiens
  misc_RNA (1)...(19): siRNA sense strand
ggaucaugcucuucuacca

SEQ ID NO: 1586328 - RNA, 19 nt, Homo sapiens
  misc_RNA (1)...(19): siRNA sense strand
ggaagugguugaaaacaca

SEQ ID NO: 1586329 - RNA, 19 nt, Homo sapiens
  misc_RNA (1)...(19): siRNA sense strand
gagccugcuuuauccugaa

SEQ ID NO: 1586330 - RNA, 19 nt, Homo sapiens
  misc_RNA (1)...(19): siRNA sense strand
aggagacagugacaauuga

SEQ ID NO: 1586331 - RNA, 19 nt, Homo sapiens
  misc_RNA (1)...(19): siRNA sense strand
cugggcaucuugggaauuu

SEQ ID NO: 1586332 - RNA, 19 nt, Homo sapiens
  misc_RNA (1)...(19): siRNA sense strand
agaaacaggcucuggacaa

SEQ ID NO: 1586333 - RNA, 19 nt, Homo sapiens
  misc_RNA (1)...(19): siRNA sense strand
ucucauggauacgagguuu

SEQ ID NO: 1586334 - RNA, 19 nt, Homo sapiens
  misc_RNA (1)...(19): siRNA sense strand
ccucuggagucucugauca

SEQ ID NO: 1586335 - RNA, 19 nt, Homo sapiens
  misc_RNA (1)...(19): siRNA sense strand
gcaacaaugguggcaaugu

SEQ ID NO: 1586336 - RNA, 19 nt, Homo sapiens
  misc_RNA (1)...(19): siRNA sense strand
gcaauguucaggagacagu

SEQ ID NO: 1586337 - RNA, 19 nt, Homo sapiens
  misc_RNA (1)...(19): siRNA sense strand
gcuggaggcugugcaaagg

SEQ ID NO: 1586338 - RNA, 19 nt, Homo sapiens
  misc_RNA (1)...(19): siRNA sense strand
caaauacaccugggucaag

SEQ ID NO: 1586339 - RNA, 19 nt, Homo sapiens
  misc_RNA (1)...(19): siRNA sense strand
gcuuuauccugaagaugga

SEQ ID NO: 1586340 - RNA, 19 nt, Homo sapiens
  misc_RNA (1)...(19): siRNA sense strand
uugagaaacucugcaaaca

SEQ ID NO: 1586341 - RNA, 19 nt, Homo sapiens
  misc_RNA (1)...(19): siRNA sense strand
aaauacaccugggucaagu

SEQ ID NO: 1586342 - RNA, 19 nt, Homo sapiens
  misc_RNA (1)...(19): siRNA sense strand
ucugaacaaucuccaaugg

SEQ ID NO: 1586343 - RNA, 19 nt, Homo sapiens
  misc_RNA (1)...(19): siRNA sense strand
caucagcccaggcaacaau

SEQ ID NO: 1586344 - RNA, 19 nt, Homo sapiens
  misc_RNA (1)...(19): siRNA sense strand
ucuggagucucugaucaaa

SEQ ID NO: 1586345 - RNA, 19 nt, Homo sapiens
  misc_RNA (1)...(19): siRNA sense strand
gacagugacaauugauaau

SEQ ID NO: 1586346 - RNA, 19 nt, Homo sapiens
  misc_RNA (1)...(19): siRNA sense strand
acauaucccuuuguauaag

SEQ ID NO: 1586347 - RNA, 19 nt, Homo sapiens
  misc_RNA (1)...(19): siRNA sense strand
uauaaacauggcuacauug

SEQ ID NO: 1586348 - RNA, 19 nt, Homo sapiens
  misc_RNA (1)...(19): siRNA sense strand
ucccgaagagccugcuuua

SEQ ID NO: 1586349 - RNA, 19 nt, Homo sapiens
  misc_RNA (1)...(19): siRNA sense strand
ggagacagugacaauugau

SEQ ID NO: 1586350 - RNA, 19 nt, Homo sapiens
  misc_RNA (1)...(19): siRNA sense strand
ugagaaacucugcaaacau

SEQ ID NO: 1586351 - RNA, 19 nt, Homo sapiens
  misc_RNA (1)...(19): siRNA sense strand
gcugaccaucuuugggaua

SEQ ID NO: 1586352 - RNA, 19 nt, Homo sapiens
  misc_RNA (1)...(19): siRNA sense strand
aaaauaccgccaucauuaa

SEQ ID NO: 1586353 - RNA, 19 nt, Homo sapiens
  misc_RNA (1)...(19): siRNA sense strand
caaugguacaucuaugaga

SEQ ID NO: 1586354 - RNA, 19 nt, Homo sapiens
  misc_RNA (1)...(19): siRNA sense strand
aggcaacaaugguggcaau

SEQ ID NO: 1586355 - RNA, 19 nt, Homo sapiens
  misc_RNA (1)...(19): siRNA sense strand
cuugggaauuucaaucugu

SEQ ID NO: 1586356 - RNA, 19 nt, Homo sapiens
  misc_RNA (1)...(19): siRNA sense strand
gggcaucuugggaauuuca

SEQ ID NO: 1586357 - RNA, 19 nt, Homo sapiens
  misc_RNA (1)...(19): siRNA sense strand
aacaggcucuggacaacau

SEQ ID NO: 1586358 - RNA, 19 nt, Homo sapiens
  misc_RNA (1)...(19): siRNA sense strand
gcucuucuaccacaauuuu

SEQ ID NO: 1586359 - RNA, 19 nt, Homo sapiens
  misc_RNA (1)...(19): siRNA sense strand
uccaaugguacaucuauga

SEQ ID NO: 1586360 - RNA, 19 nt, Homo sapiens
  misc_RNA (1)...(19): siRNA sense strand
ggaaagccauggaauuugu

SEQ ID NO: 1586361 - RNA, 19 nt, Homo sapiens
  misc_RNA (1)...(19): siRNA sense strand
ggacagauccuggguguuc

SEQ ID NO: 1586362 - RNA, 19 nt, Homo sapiens
  misc_RNA (1)...(19): siRNA sense strand
ggaugugacugagagcaau

SEQ ID NO: 1586363 - RNA, 19 nt, Homo sapiens
  misc_RNA (1)...(19): siRNA sense strand
ccauggaauuuguggaugu

SEQ ID NO: 1586364 - RNA, 19 nt, Homo sapiens
  misc_RNA (1)...(19): siRNA sense strand
gggaaagccauggaauuug

SEQ ID NO: 1586365 - RNA, 19 nt, Homo sapiens
  misc_RNA (1)...(19): siRNA sense strand
gaaccugcucuuccucugu

SEQ ID NO: 1586366 - RNA, 19 nt, Homo sapiens
  misc_RNA (1)...(19): siRNA sense strand
ccgccaagcucgaguccau

SEQ ID NO: 1586367 - RNA, 19 nt, Homo sapiens
  misc_RNA (1)...(19): siRNA sense strand
ggggaaagccauggaauuu

SEQ ID NO: 1586368 - RNA, 19 nt, Homo sapiens
  misc_RNA (1)...(19): siRNA sense strand
gaaagccauggaauuugug

SEQ ID NO: 1586369 - RNA, 19 nt, Homo sapiens
  misc_RNA (1)...(19): siRNA sense strand
aguccuuccuccacuguuu

SEQ ID NO: 1586370 - RNA, 19 nt, Homo sapiens
  misc_RNA (1)...(19): siRNA sense strand
gcaagacuuccgccucaag

SEQ ID NO: 1586371 - RNA, 19 nt, Homo sapiens
  misc_RNA (1)...(19): siRNA sense strand
guaccaugcccuccugauc

SEQ ID NO: 1586372 - RNA, 19 nt, Homo sapiens
  misc_RNA (1)...(19): siRNA sense strand
cauggaauuuguggaugug

SEQ ID NO: 1586373 - RNA, 19 nt, Homo sapiens
  misc_RNA (1)...(19): siRNA sense strand
cgacagcuacagccugaca

SEQ ID NO: 1586374 - RNA, 19 nt, Homo sapiens
  misc_RNA (1)...(19): siRNA sense strand
gcacauaaaugguguauau

SEQ ID NO: 1586375 - RNA, 19 nt, Homo sapiens
  misc_RNA (1)...(19): siRNA sense strand
gaaggaagcuuaucuaaca

SEQ ID NO: 1586376 - RNA, 19 nt, Homo sapiens
  misc_RNA (1)...(19): siRNA sense strand
gaagagagaucagcauuaa

SEQ ID NO: 1586377 - RNA, 19 nt, Homo sapiens
  misc_RNA (1)...(19): siRNA sense strand
gauaaugacuucuguguau

SEQ ID NO: 1586378 - RNA, 19 nt, Homo sapiens
  misc_RNA (1)...(19): siRNA sense strand
gaacaaggaccuaaacaaa

SEQ ID NO: 1586379 - RNA, 19 nt, Homo sapiens
  misc_RNA (1)...(19): siRNA sense strand
gcauaaaguucaacaguau

SEQ ID NO: 1586380 - RNA, 19 nt, Homo sapiens
  misc_RNA (1)...(19): siRNA sense strand
gaaaguuacagcacgauua

SEQ ID NO: 1586381 - RNA, 19 nt, Homo sapiens
  misc_RNA (1)...(19): siRNA sense strand
gaagauugguuuucgauua

SEQ ID NO: 1586382 - RNA, 19 nt, Homo sapiens
  misc_RNA (1)...(19): siRNA sense strand
gagauguucuucugcauuu

SEQ ID NO: 1586383 - RNA, 19 nt, Homo sapiens
  misc_RNA (1)...(19): siRNA sense strand
ggacagcccugcguugaaa

SEQ ID NO: 1586384 - RNA, 19 nt, Homo sapiens
  misc_RNA (1)...(19): siRNA sense strand
ccacagaaauuuacagcaa

SEQ ID NO: 1586385 - RNA, 19 nt, Homo sapiens
  misc_RNA (1)...(19): siRNA sense strand
ggaagaagcacaggaaauu

SEQ ID NO: 1586386 - RNA, 19 nt, Homo sapiens
  misc_RNA (1)...(19): siRNA sense strand
ccaccacgguuacauuaua

SEQ ID NO: 1586387 - RNA, 19 nt, Homo sapiens
  misc_RNA (1)...(19): siRNA sense strand
gcggagauaugcaacaauu

SEQ ID NO: 1586388 - RNA, 19 nt, Homo sapiens
  misc_RNA (1)...(19): siRNA sense strand
gacgagagcucuucagcaa

SEQ ID NO: 1586389 - RNA, 19 nt, Homo sapiens
  misc_RNA (1)...(19): siRNA sense strand
gaagaugauaggcaaauaa

SEQ ID NO: 1586390 - RNA, 19 nt, Homo sapiens
  misc_RNA (1)...(19): siRNA sense strand
ggaagagagaucagcauua

SEQ ID NO: 1586391 - RNA, 19 nt, Homo sapiens
  misc_RNA (1)...(19): siRNA sense strand
caaaagcccuugucaguuu

SEQ ID NO: 1586392 - RNA, 19 nt, Homo sapiens
  misc_RNA (1)...(19): siRNA sense strand
gcagaucagccaacagaua

SEQ ID NO: 1586393 - RNA, 19 nt, Homo sapiens
  misc_RNA (1)...(19): siRNA sense strand
gcagauguuucacaauuca

SEQ ID NO: 1586394 - RNA, 19 nt, Homo sapiens
  misc_RNA (1)...(19): siRNA sense strand
uaagggaaaugaacacaga

SEQ ID NO: 1586395 - RNA, 19 nt, Homo sapiens
  misc_RNA (1)...(19): siRNA sense strand
acaaauagaugcuguggau

SEQ ID NO: 1586396 - RNA, 19 nt, Homo sapiens
  misc_RNA (1)...(19): siRNA sense strand
caagaaaguuaacaagagu

SEQ ID NO: 1586397 - RNA, 19 nt, Homo sapiens
  misc_RNA (1)...(19): siRNA sense strand
caaauaacaccaacagaga

SEQ ID NO: 1586398 - RNA, 19 nt, Homo sapiens
  misc_RNA (1)...(19): siRNA sense strand
ucaguugcuuucagaauaa

SEQ ID NO: 1586399 - RNA, 19 nt, Homo sapiens
  misc_RNA (1)...(19): siRNA sense strand
gaaauuuacagcaacaaug

SEQ ID NO: 1586400 - RNA, 19 nt, Homo sapiens
  misc_RNA (1)...(19): siRNA sense strand
gauaagaaagcuucacaga

SEQ ID NO: 1586401 - RNA, 19 nt, Homo sapiens
  misc_RNA (1)...(19): siRNA sense strand
ccacggagauguucuucug

SEQ ID NO: 1586402 - RNA, 19 nt, Homo sapiens
  misc_RNA (1)...(19): siRNA sense strand
gacuuaauuuccaggcuua

SEQ ID NO: 1586403 - RNA, 19 nt, Homo sapiens
  misc_RNA (1)...(19): siRNA sense strand
ccucuccagucaccaauua

SEQ ID NO: 1586404 - RNA, 19 nt, Homo sapiens
  misc_RNA (1)...(19): siRNA sense strand
acuaugaaguucucaguaa

SEQ ID NO: 1586405 - RNA, 19 nt, Homo sapiens
  misc_RNA (1)...(19): siRNA sense strand
aaaggaaaguugcagaugu

SEQ ID NO: 1586406 - RNA, 19 nt, Homo sapiens
  misc_RNA (1)...(19): siRNA sense strand
gcuuacagcuauuuuguua

SEQ ID NO: 1586407 - RNA, 19 nt, Homo sapiens
  misc_RNA (1)...(19): siRNA sense strand
acaaggaccuaaacaaagu

SEQ ID NO: 1586408 - RNA, 19 nt, Homo sapiens
  misc_RNA (1)...(19): siRNA sense strand
guuauuggaacgaaaguua

SEQ ID NO: 1586409 - RNA, 19 nt, Homo sapiens
  misc_RNA (1)...(19): siRNA sense strand
ugaagaugauaggcaaaua

SEQ ID NO: 1586410 - RNA, 19 nt, Homo sapiens
  misc_RNA (1)...(19): siRNA sense strand
ggagauaugcaacaauugu

SEQ ID NO: 1586411 - RNA, 19 nt, Homo sapiens
  misc_RNA (1)...(19): siRNA sense strand
gaaauuaagggaaaugaac

SEQ ID NO: 1586412 - RNA, 19 nt, Homo sapiens
  misc_RNA (1)...(19): siRNA sense strand
ccagaggguugcaaugguu

SEQ ID NO: 1586413 - RNA, 19 nt, Homo sapiens
  misc_RNA (1)...(19): siRNA sense strand
gaauucaaaucacuuacag

SEQ ID NO: 1586414 - RNA, 19 nt, Homo sapiens
  misc_RNA (1)...(19): siRNA sense strand
gcucugacacugaaacauu

SEQ ID NO: 1586415 - RNA, 19 nt, Homo sapiens
  misc_RNA (1)...(19): siRNA sense strand
uugcagauguuucacaauu

SEQ ID NO: 1586416 - RNA, 19 nt, Homo sapiens
  misc_RNA (1)...(19): siRNA sense strand
uggcggagcucgaccaguu

SEQ ID NO: 1586417 - RNA, 19 nt, Homo sapiens
  misc_RNA (1)...(19): siRNA sense strand
aaacuuacaugccuuugca

SEQ ID NO: 1586418 - RNA, 19 nt, Homo sapiens
  misc_RNA (1)...(19): siRNA sense strand
gaagaagcacaggaaauug

SEQ ID NO: 1586419 - RNA, 19 nt, Homo sapiens
  misc_RNA (1)...(19): siRNA sense strand
uugaacagcugaacaagga

SEQ ID NO: 1586420 - RNA, 19 nt, Homo sapiens
  misc_RNA (1)...(19): siRNA sense strand
ucuaacacguggaaugaaa

SEQ ID NO: 1586421 - RNA, 19 nt, Homo sapiens
  misc_RNA (1)...(19): siRNA sense strand
acaagaaaguuaacaagag

SEQ ID NO: 1586422 - RNA, 19 nt, Homo sapiens
  misc_RNA (1)...(19): siRNA sense strand
ugacuucuguguaugucua

SEQ ID NO: 1586423 - RNA, 19 nt, Homo sapiens
  misc_RNA (1)...(19): siRNA sense strand
uaccaucccugacuaugaa

SEQ ID NO: 1586424 - RNA, 19 nt, Homo sapiens
  misc_RNA (1)...(19): siRNA sense strand
ugcauaaaguucaacagua

SEQ ID NO: 1586425 - RNA, 19 nt, Homo sapiens
  misc_RNA (1)...(19): siRNA sense strand
caaaucacuuacagacuca

SEQ ID NO: 1586426 - RNA, 19 nt, Homo sapiens
  misc_RNA (1)...(19): siRNA sense strand
uacaagcucugcuguggaa

SEQ ID NO: 1586427 - RNA, 19 nt, Homo sapiens
  misc_RNA (1)...(19): siRNA sense strand
gaaggaggagaccugaauu

SEQ ID NO: 1586428 - RNA, 19 nt, Homo sapiens
  misc_RNA (1)...(19): siRNA sense strand
caauuguucuggagcuuga

SEQ ID NO: 1586429 - RNA, 19 nt, Homo sapiens
  misc_RNA (1)...(19): siRNA sense strand
aaggaaaguugcagauguu

SEQ ID NO: 1586430 - RNA, 19 nt, Homo sapiens
  misc_RNA (1)...(19): siRNA sense strand
gcaugcaaauuccucaaca

SEQ ID NO: 1586431 - RNA, 19 nt, Homo sapiens
  misc_RNA (1)...(19): siRNA sense strand
gaaauuguucggcaugcaa

SEQ ID NO: 1586432 - RNA, 19 nt, Homo sapiens
  misc_RNA (1)...(19): siRNA sense strand
caagugaccagauuaucaa

SEQ ID NO: 1586433 - RNA, 19 nt, Homo sapiens
  misc_RNA (1)...(19): siRNA sense strand
ggagauguucuucugcauu

SEQ ID NO: 1586434 - RNA, 19 nt, Homo sapiens
  misc_RNA (1)...(19): siRNA sense strand
ccaagugaccagauuauca

SEQ ID NO: 1586435 - RNA, 19 nt, Homo sapiens
  misc_RNA (1)...(19): siRNA sense strand
acagcggccuucucgauuu

SEQ ID NO: 1586436 - RNA, 19 nt, Homo sapiens
  misc_RNA (1)...(19): siRNA sense strand
ggaaaugaacacagaagca

SEQ ID NO: 1586437 - RNA, 19 nt, Homo sapiens
  misc_RNA (1)...(19): siRNA sense strand
gauaucaagaguacaauag

SEQ ID NO: 1586438 - RNA, 19 nt, Homo sapiens
  misc_RNA (1)...(19): siRNA sense strand
cgagagcucuucagcaaaa

SEQ ID NO: 1586439 - RNA, 19 nt, Homo sapiens
  misc_RNA (1)...(19): siRNA sense strand
ucacuuacagacucauuaa

SEQ ID NO: 1586440 - RNA, 19 nt, Homo sapiens
  misc_RNA (1)...(19): siRNA sense strand
gaucagccaacagauauga

SEQ ID NO: 1586441 - RNA, 19 nt, Homo sapiens
  misc_RNA (1)...(19): siRNA sense strand
gaauuucagcggagauaug

SEQ ID NO: 1586442 - RNA, 19 nt, Homo sapiens
  misc_RNA (1)...(19): siRNA sense strand
gcccaucagcauugaauuu

SEQ ID NO: 1586443 - RNA, 19 nt, Homo sapiens
  misc_RNA (1)...(19): siRNA sense strand
aaagaaggaagcuuaucua

SEQ ID NO: 1586444 - RNA, 19 nt, Homo sapiens
  misc_RNA (1)...(19): siRNA sense strand
cagaucagccaacagauau

SEQ ID NO: 1586445 - RNA, 19 nt, Homo sapiens
  misc_RNA (1)...(19): siRNA sense strand
aauaucaguugcuuucaga

SEQ ID NO: 1586446 - RNA, 19 nt, Homo sapiens
  misc_RNA (1)...(19): siRNA sense strand
gcaaugguuccacagaaau

SEQ ID NO: 1586447 - RNA, 19 nt, Homo sapiens
  misc_RNA (1)...(19): siRNA sense strand
gauaggacagggcuuggaa

SEQ ID NO: 1586448 - RNA, 19 nt, Homo sapiens
  misc_RNA (1)...(19): siRNA sense strand
ggaaaggcaggaauacaag

SEQ ID NO: 1586449 - RNA, 19 nt, Homo sapiens
  misc_RNA (1)...(19): siRNA sense strand
gcucuuacaacaaaggaaa

SEQ ID NO: 1586450 - RNA, 19 nt, Homo sapiens
  misc_RNA (1)...(19): siRNA sense strand
gaauuucuuauccaaguga

SEQ ID NO: 1586451 - RNA, 19 nt, Homo sapiens
  misc_RNA (1)...(19): siRNA sense strand
cagcggagauaugcaacaa

SEQ ID NO: 1586452 - RNA, 19 nt, Homo sapiens
  misc_RNA (1)...(19): siRNA sense strand
ggacagucgccguggagaa

SEQ ID NO: 1586453 - RNA, 19 nt, Homo sapiens
  misc_RNA (1)...(19): siRNA sense strand
cucugacacugaaacauua

SEQ ID NO: 1586454 - RNA, 19 nt, Homo sapiens
  misc_RNA (1)...(19): siRNA sense strand
guucaacaguauugcuaug

SEQ ID NO: 1586455 - RNA, 19 nt, Homo sapiens
  misc_RNA (1)...(19): siRNA sense strand
gagccagaugggaaacuua

SEQ ID NO: 1586456 - RNA, 19 nt, Homo sapiens
  misc_RNA (1)...(19): siRNA sense strand
ugcaaugguuccacagaaa

SEQ ID NO: 1586457 - RNA, 19 nt, Homo sapiens
  misc_RNA (1)...(19): siRNA sense strand
agaccugaauuccuuugaa

SEQ ID NO: 1586458 - RNA, 19 nt, Homo sapiens
  misc_RNA (1)...(19): siRNA sense strand
acgagugguucuauucaaa

SEQ ID NO: 1586459 - RNA, 19 nt, Homo sapiens
  misc_RNA (1)...(19): siRNA sense strand
aucaguugcuuucagaaua

SEQ ID NO: 1586460 - RNA, 19 nt, Homo sapiens
  misc_RNA (1)...(19): siRNA sense strand
ggaaauuguucggcaugca

SEQ ID NO: 1586461 - RNA, 19 nt, Homo sapiens
  misc_RNA (1)...(19): siRNA sense strand
caaugucaacaccagauaa

SEQ ID NO: 1586462 - RNA, 19 nt, Homo sapiens
  misc_RNA (1)...(19): siRNA sense strand
uaacaccaacagagacuga

SEQ ID NO: 1586463 - RNA, 19 nt, Homo sapiens
  misc_RNA (1)...(19): siRNA sense strand
aagaaggaagcuuaucuaa

SEQ ID NO: 1586464 - RNA, 19 nt, Homo sapiens
  misc_RNA (1)...(19): siRNA sense strand
gucaacaccagauaagaaa

SEQ ID NO: 1586465 - RNA, 19 nt, Homo sapiens
  misc_RNA (1)...(19): siRNA sense strand
ugaacaaggaccuaaacaa

SEQ ID NO: 1586466 - RNA, 19 nt, Homo sapiens
  misc_RNA (1)...(19): siRNA sense strand
aaacagcggccuucucgau

SEQ ID NO: 1586467 - RNA, 19 nt, Homo sapiens
  misc_RNA (1)...(19): siRNA sense strand
uaucuaacacguggaauga

SEQ ID NO: 1586468 - RNA, 19 nt, Homo sapiens
  misc_RNA (1)...(19): siRNA sense strand
caaaggaaaguugcagaug

SEQ ID NO: 1586469 - RNA, 19 nt, Homo sapiens
  misc_RNA (1)...(19): siRNA sense strand
acagaaauuuacagcaaca

SEQ ID NO: 1586470 - RNA, 19 nt, Homo sapiens
  misc_RNA (1)...(19): siRNA sense strand
gaggaagaagcacaggaaa

SEQ ID NO: 1586471 - RNA, 19 nt, Homo sapiens
  misc_RNA (1)...(19): siRNA sense strand
cuaugaaguucucaguaau

SEQ ID NO: 1586472 - RNA, 19 nt, Homo sapiens
  misc_RNA (1)...(19): siRNA sense strand
ucuaauaucaguugcuuuc

SEQ ID NO: 1586473 - RNA, 19 nt, Homo sapiens
  misc_RNA (1)...(19): siRNA sense strand
gggaaacuuacaugccuuu

SEQ ID NO: 1586474 - RNA, 19 nt, Homo sapiens
  misc_RNA (1)...(19): siRNA sense strand
cggaggagcucuaccagua

SEQ ID NO: 1586475 - RNA, 19 nt, Homo sapiens
  misc_RNA (1)...(19): siRNA sense strand
guggaccgcuacuuccuua

SEQ ID NO: 1586476 - RNA, 19 nt, Homo sapiens
  misc_RNA (1)...(19): siRNA sense strand
ggagguggaugaguuguuc

SEQ ID NO: 1586477 - RNA, 19 nt, Homo sapiens
  misc_RNA (1)...(19): siRNA sense strand
gcuacuuccuuauggcuaa

SEQ ID NO: 1586478 - RNA, 19 nt, Homo sapiens
  misc_RNA (1)...(19): siRNA sense strand
gcaagacuaccuccuguuc

SEQ ID NO: 1586479 - RNA, 19 nt, Homo sapiens
  misc_RNA (1)...(19): siRNA sense strand
gcugcaaggucaacgaugu

SEQ ID NO: 1586480 - RNA, 19 nt, Homo sapiens
  misc_RNA (1)...(19): siRNA sense strand
ucugggagaugcucaaguu

SEQ ID NO: 1586481 - RNA, 19 nt, Homo sapiens
  misc_RNA (1)...(19): siRNA sense strand
uggaugaguuguuccuuga

SEQ ID NO: 1586482 - RNA, 19 nt, Homo sapiens
  misc_RNA (1)...(19): siRNA sense strand
gggcuggacuucgagaaug

SEQ ID NO: 1586483 - RNA, 19 nt, Homo sapiens
  misc_RNA (1)...(19): siRNA sense strand
ggaccgcuacuuccuuaug

SEQ ID NO: 1586484 - RNA, 19 nt, Homo sapiens
  misc_RNA (1)...(19): siRNA sense strand
ggcuggacuucgagaauga

SEQ ID NO: 1586485 - RNA, 19 nt, Homo sapiens
  misc_RNA (1)...(19): siRNA sense strand
cggugcagcucugucauuu

SEQ ID NO: 1586486 - RNA, 19 nt, Homo sapiens
  misc_RNA (1)...(19): siRNA sense strand
gaccgcuacuuccuuaugg

SEQ ID NO: 1586487 - RNA, 19 nt, Homo sapiens
  misc_RNA (1)...(19): siRNA sense strand
gcagaucucccuggacuac

SEQ ID NO: 1586488 - RNA, 19 nt, Homo sapiens
  misc_RNA (1)...(19): siRNA sense strand
gugcaccaauguuguccuu

SEQ ID NO: 1586489 - RNA, 19 nt, Homo sapiens
  misc_RNA (1)...(19): siRNA sense strand
gcuggcagugcaugacaua

SEQ ID NO: 1586490 - RNA, 19 nt, Homo sapiens
  misc_RNA (1)...(19): siRNA sense strand
gugcagcucugucauuucc

SEQ ID NO: 1586491 - RNA, 19 nt, Homo sapiens
  misc_RNA (1)...(19): siRNA sense strand
ggcagugcaugacauagca

SEQ ID NO: 1586492 - RNA, 19 nt, Homo sapiens
  misc_RNA (1)...(19): siRNA sense strand
gaaggucggccugcagauc

SEQ ID NO: 1586493 - RNA, 19 nt, Homo sapiens
  misc_RNA (1)...(19): siRNA sense strand
gcagaggcacgggagaaga

SEQ ID NO: 1586494 - RNA, 19 nt, Homo sapiens
  misc_RNA (1)...(19): siRNA sense strand
gcucugucauuuccacucu

SEQ ID NO: 1586495 - RNA, 19 nt, Homo sapiens
  misc_RNA (1)...(19): siRNA sense strand
gugcaugacauagcagaaa

SEQ ID NO: 1586496 - RNA, 19 nt, Homo sapiens
  misc_RNA (1)...(19): siRNA sense strand
ccaggagguggaugaguug

SEQ ID NO: 1586497 - RNA, 19 nt, Homo sapiens
  misc_RNA (1)...(19): siRNA sense strand
ugggagaugcucaaguuug

SEQ ID NO: 1586498 - RNA, 19 nt, Homo sapiens
  misc_RNA (1)...(19): siRNA sense strand
cgugcucacugccgacuuc

SEQ ID NO: 1586499 - RNA, 19 nt, Homo sapiens
  misc_RNA (1)...(19): siRNA sense strand
gaccggugcagcucuguca

SEQ ID NO: 1586500 - RNA, 19 nt, Homo sapiens
  misc_RNA (1)...(19): siRNA sense strand
gaaaugaaguuaaccaaac

SEQ ID NO: 1586501 - RNA, 19 nt, Homo sapiens
  misc_RNA (1)...(19): siRNA sense strand
guauauggcugucagaaug

SEQ ID NO: 1586502 - RNA, 19 nt, Homo sapiens
  misc_RNA (1)...(19): siRNA sense strand
ggaagcaguggaaauguua

SEQ ID NO: 1586503 - RNA, 19 nt, Homo sapiens
  misc_RNA (1)...(19): siRNA sense strand
uuaaagaccuucuacaaac

SEQ ID NO: 1586504 - RNA, 19 nt, Homo sapiens
  misc_RNA (1)...(19): siRNA sense strand
ggagaccauuucaguguau

SEQ ID NO: 1586505 - RNA, 19 nt, Homo sapiens
  misc_RNA (1)...(19): siRNA sense strand
guuaaagaccuucuacaaa

SEQ ID NO: 1586506 - RNA, 19 nt, Homo sapiens
  misc_RNA (1)...(19): siRNA sense strand
gggagaccauuucagugua

SEQ ID NO: 1586507 - RNA, 19 nt, Homo sapiens
  misc_RNA (1)...(19): siRNA sense strand
gagucccucugaaguauuu

SEQ ID NO: 1586508 - RNA, 19 nt, Homo sapiens
  misc_RNA (1)...(19): siRNA sense strand
gguuguggcucuguucuaa

SEQ ID NO: 1586509 - RNA, 19 nt, Homo sapiens
  misc_RNA (1)...(19): siRNA sense strand
uaaagaccuucuacaaaca

SEQ ID NO: 1586510 - RNA, 19 nt, Homo sapiens
  misc_RNA (1)...(19): siRNA sense strand
gaaguuaaccaaaccaaaa

SEQ ID NO: 1586511 - RNA, 19 nt, Homo sapiens
  misc_RNA (1)...(19): siRNA sense strand
gcaguggaaauguuaaaga

SEQ ID NO: 1586512 - RNA, 19 nt, Homo sapiens
  misc_RNA (1)...(19): siRNA sense strand
aaaucccgcugguuguaua

SEQ ID NO: 1586513 - RNA, 19 nt, Homo sapiens
  misc_RNA (1)...(19): siRNA sense strand
gcaccaaaaucgaaaguuc

SEQ ID NO: 1586514 - RNA, 19 nt, Homo sapiens
  misc_RNA (1)...(19): siRNA sense strand
guggagccgugcauuaugu

SEQ ID NO: 1586515 - RNA, 19 nt, Homo sapiens
  misc_RNA (1)...(19): siRNA sense strand
aaaggaaugucagaaaucu

SEQ ID NO: 1586516 - RNA, 19 nt, Homo sapiens
  misc_RNA (1)...(19): siRNA sense strand
gagaaaugaaguuaaccaa

SEQ ID NO: 1586517 - RNA, 19 nt, Homo sapiens
  misc_RNA (1)...(19): siRNA sense strand
ugaaguauuugaacacacu

SEQ ID NO: 1586518 - RNA, 19 nt, Homo sapiens
  misc_RNA (1)...(19): siRNA sense strand
guggcucuguucuaaauau

SEQ ID NO: 1586519 - RNA, 19 nt, Homo sapiens
  misc_RNA (1)...(19): siRNA sense strand
gaaaaucccgcugguugua

SEQ ID NO: 1586520 - RNA, 19 nt, Homo sapiens
  misc_RNA (1)...(19): siRNA sense strand
gaagcaguggaaauguuaa

SEQ ID NO: 1586521 - RNA, 19 nt, Homo sapiens
  misc_RNA (1)...(19): siRNA sense strand
ccucugaaguauuugaaca

SEQ ID NO: 1586522 - RNA, 19 nt, Homo sapiens
  misc_RNA (1)...(19): siRNA sense strand
ggucuacaacaaugaaguu

SEQ ID NO: 1586523 - RNA, 19 nt, Homo sapiens
  misc_RNA (1)...(19): siRNA sense strand
ugaggaagcaguggaaaug

SEQ ID NO: 1586524 - RNA, 19 nt, Homo sapiens
  misc_RNA (1)...(19): siRNA sense strand
aggaagcaguggaaauguu

SEQ ID NO: 1586525 - RNA, 19 nt, Homo sapiens
  misc_RNA (1)...(19): siRNA sense strand
cgauuggugucgucaaagu

SEQ ID NO: 1586526 - RNA, 19 nt, Homo sapiens
  misc_RNA (1)...(19): siRNA sense strand
ggagaaaugaaguuaacca

SEQ ID NO: 1586527 - RNA, 19 nt, Homo sapiens
  misc_RNA (1)...(19): siRNA sense strand
aaugaacgauuuggugguu

SEQ ID NO: 1586528 - RNA, 19 nt, Homo sapiens
  misc_RNA (1)...(19): siRNA sense strand
ugaacgauuuggugguugu

SEQ ID NO: 1586529 - RNA, 19 nt, Homo sapiens
  misc_RNA (1)...(19): siRNA sense strand
gcucuguucuaaauauugc

SEQ ID NO: 1586530 - RNA, 19 nt, Homo sapiens
  misc_RNA (1)...(19): siRNA sense strand
uguuaaagaccuucuacaa

SEQ ID NO: 1586531 - RNA, 19 nt, Homo sapiens
  misc_RNA (1)...(19): siRNA sense strand
gcugucagaaugaacgauu

SEQ ID NO: 1586532 - RNA, 19 nt, Homo sapiens
  misc_RNA (1)...(19): siRNA sense strand
ggaaugucagaaaucuuga

SEQ ID NO: 1586533 - RNA, 19 nt, Homo sapiens
  misc_RNA (1)...(19): siRNA sense strand
aggaaugucagaaaucuug

SEQ ID NO: 1586534 - RNA, 19 nt, Homo sapiens
  misc_RNA (1)...(19): siRNA sense strand
ugaaguuaaccaaaccaaa

SEQ ID NO: 1586535 - RNA, 19 nt, Homo sapiens
  misc_RNA (1)...(19): siRNA sense strand
caguggaaauguuaaagac

SEQ ID NO: 1586536 - RNA, 19 nt, Homo sapiens
  misc_RNA (1)...(19): siRNA sense strand
gaucagguccucgauuggu

SEQ ID NO: 1586537 - RNA, 19 nt, Homo sapiens
  misc_RNA (1)...(19): siRNA sense strand
gcugcucuccgccugauga

SEQ ID NO: 1586538 - RNA, 19 nt, Homo sapiens
  misc_RNA (1)...(19): siRNA sense strand
uauugccucugcugaccua

SEQ ID NO: 1586539 - RNA, 19 nt, Homo sapiens
  misc_RNA (1)...(19): siRNA sense strand
aaacacugggagaccauuu

SEQ ID NO: 1586540 - RNA, 19 nt, Homo sapiens
  misc_RNA (1)...(19): siRNA sense strand
uauauggcugucagaauga

SEQ ID NO: 1586541 - RNA, 19 nt, Homo sapiens
  misc_RNA (1)...(19): siRNA sense strand
caaaugcaccaaaaucgaa

SEQ ID NO: 1586542 - RNA, 19 nt, Homo sapiens
  misc_RNA (1)...(19): siRNA sense strand
gaggaagcaguggaaaugu

SEQ ID NO: 1586543 - RNA, 19 nt, Homo sapiens
  misc_RNA (1)...(19): siRNA sense strand
uggcucuguucuaaauauu

SEQ ID NO: 1586544 - RNA, 19 nt, Homo sapiens
  misc_RNA (1)...(19): siRNA sense strand
aaagaccuucuacaaacaa

SEQ ID NO: 1586545 - RNA, 19 nt, Homo sapiens
  misc_RNA (1)...(19): siRNA sense strand
uuguggcucuguucuaaau

SEQ ID NO: 1586546 - RNA, 19 nt, Homo sapiens
  misc_RNA (1)...(19): siRNA sense strand
cucgauuggugucgucaaa

SEQ ID NO: 1586547 - RNA, 19 nt, Homo sapiens
  misc_RNA (1)...(19): siRNA sense strand
ugggagaccauuucagugu

SEQ ID NO: 1586548 - RNA, 19 nt, Homo sapiens
  misc_RNA (1)...(19): siRNA sense strand
uacucgacaugcagaaaug

SEQ ID NO: 1586549 - RNA, 19 nt, Homo sapiens
  misc_RNA (1)...(19): siRNA sense strand
ccacagcccugaagagaaa

SEQ ID NO: 1586550 - RNA, 19 nt, Homo sapiens
  misc_RNA (1)...(19): siRNA sense strand
gaaggaagaugaugaugca

SEQ ID NO: 1586551 - RNA, 19 nt, Homo sapiens
  misc_RNA (1)...(19): siRNA sense strand
gcacaaagaauagaagauu

SEQ ID NO: 1586552 - RNA, 19 nt, Homo sapiens
  misc_RNA (1)...(19): siRNA sense strand
ggaagaugaugaugcaugu

SEQ ID NO: 1586553 - RNA, 19 nt, Homo sapiens
  misc_RNA (1)...(19): siRNA sense strand
guucuucccugccugcuua

SEQ ID NO: 1586554 - RNA, 19 nt, Homo sapiens
  misc_RNA (1)...(19): siRNA sense strand
uggaaaggcuccuggguaa

SEQ ID NO: 1586555 - RNA, 19 nt, Homo sapiens
  misc_RNA (1)...(19): siRNA sense strand
ggaauagcuugcaggagaa

SEQ ID NO: 1586556 - RNA, 19 nt, Homo sapiens
  misc_RNA (1)...(19): siRNA sense strand
gaaaggcuccuggguaaau

SEQ ID NO: 1586557 - RNA, 19 nt, Homo sapiens
  misc_RNA (1)...(19): siRNA sense strand
caggugaacuugagagaau

SEQ ID NO: 1586558 - RNA, 19 nt, Homo sapiens
  misc_RNA (1)...(19): siRNA sense strand
gcuauaggcugcugucaac

SEQ ID NO: 1586559 - RNA, 19 nt, Homo sapiens
  misc_RNA (1)...(19): siRNA sense strand
caaccuauguuacuaagac

SEQ ID NO: 1586560 - RNA, 19 nt, Homo sapiens
  misc_RNA (1)...(19): siRNA sense strand
uauuugaacugaaggaaga

SEQ ID NO: 1586561 - RNA, 19 nt, Homo sapiens
  misc_RNA (1)...(19): siRNA sense strand
gacacgguauuuauuugaa

SEQ ID NO: 1586562 - RNA, 19 nt, Homo sapiens
  misc_RNA (1)...(19): siRNA sense strand
ggacaggaugcacaaagaa

SEQ ID NO: 1586563 - RNA, 19 nt, Homo sapiens
  misc_RNA (1)...(19): siRNA sense strand
gaacuugagagaauuagag

SEQ ID NO: 1586564 - RNA, 19 nt, Homo sapiens
  misc_RNA (1)...(19): siRNA sense strand
cuaagacacgguauuuauu

SEQ ID NO: 1586565 - RNA, 19 nt, Homo sapiens
  misc_RNA (1)...(19): siRNA sense strand
ggugaacuugagagaauua

SEQ ID NO: 1586566 - RNA, 19 nt, Homo sapiens
  misc_RNA (1)...(19): siRNA sense strand
uuacuaagacacgguauuu

SEQ ID NO: 1586567 - RNA, 19 nt, Homo sapiens
  misc_RNA (1)...(19): siRNA sense strand
gaacugaaggaagaugaug

SEQ ID NO: 1586568 - RNA, 19 nt, Homo sapiens
  misc_RNA (1)...(19): siRNA sense strand
gaagauucugugcugauug

SEQ ID NO: 1586569 - RNA, 19 nt, Homo sapiens
  misc_RNA (1)...(19): siRNA sense strand
gauagcuccuuuuccauaa

SEQ ID NO: 1586570 - RNA, 19 nt, Homo sapiens
  misc_RNA (1)...(19): siRNA sense strand
gcaacagaaugggacuuuc

SEQ ID NO: 1586571 - RNA, 19 nt, Homo sapiens
  misc_RNA (1)...(19): siRNA sense strand
aagaugaugaugcauguaa

SEQ ID NO: 1586572 - RNA, 19 nt, Homo sapiens
  misc_RNA (1)...(19): siRNA sense strand
gcagcaggaagcaugguuu

SEQ ID NO: 1586573 - RNA, 19 nt, Homo sapiens
  misc_RNA (1)...(19): siRNA sense strand
acaggaugcacaaagaaua

SEQ ID NO: 1586574 - RNA, 19 nt, Homo sapiens
  misc_RNA (1)...(19): siRNA sense strand
aagacacgguauuuauuug

SEQ ID NO: 1586575 - RNA, 19 nt, Homo sapiens
  misc_RNA (1)...(19): siRNA sense strand
aaccugaaauggagacaga

SEQ ID NO: 1586576 - RNA, 19 nt, Homo sapiens
  misc_RNA (1)...(19): siRNA sense strand
ggauagcuccuuuuccaua

SEQ ID NO: 1586577 - RNA, 19 nt, Homo sapiens
  misc_RNA (1)...(19): siRNA sense strand
uggacaggaugcacaaaga

SEQ ID NO: 1586578 - RNA, 19 nt, Homo sapiens
  misc_RNA (1)...(19): siRNA sense strand
ggguaaauuuggacaggau

SEQ ID NO: 1586579 - RNA, 19 nt, Homo sapiens
  misc_RNA (1)...(19): siRNA sense strand
agacuucagcacaucaaua

SEQ ID NO: 1586580 - RNA, 19 nt, Homo sapiens
  misc_RNA (1)...(19): siRNA sense strand
gcuccuggguaaauuugga

SEQ ID NO: 1586581 - RNA, 19 nt, Homo sapiens
  misc_RNA (1)...(19): siRNA sense strand
gugugugcccuuccaauaa

SEQ ID NO: 1586582 - RNA, 19 nt, Homo sapiens
  misc_RNA (1)...(19): siRNA sense strand
gaagaugaugaugcaugua

SEQ ID NO: 1586583 - RNA, 19 nt, Homo sapiens
  misc_RNA (1)...(19): siRNA sense strand
acuaagacacgguauuuau

SEQ ID NO: 1586584 - RNA, 19 nt, Homo sapiens
  misc_RNA (1)...(19): siRNA sense strand
ggaaaggcuccuggguaaa

SEQ ID NO: 1586585 - RNA, 19 nt, Homo sapiens
  misc_RNA (1)...(19): siRNA sense strand
aaaggcuccuggguaaauu

SEQ ID NO: 1586586 - RNA, 19 nt, Homo sapiens
  misc_RNA (1)...(19): siRNA sense strand
cgugugugcccuuccaaua

SEQ ID NO: 1586587 - RNA, 19 nt, Homo sapiens
  misc_RNA (1)...(19): siRNA sense strand
ugugugcccuuccaauaau

SEQ ID NO: 1586588 - RNA, 19 nt, Homo sapiens
  misc_RNA (1)...(19): siRNA sense strand
agaugaugaugcauguaaa

SEQ ID NO: 1586589 - RNA, 19 nt, Homo sapiens
  misc_RNA (1)...(19): siRNA sense strand
gugugcccuuccaauaaua

SEQ ID NO: 1586590 - RNA, 19 nt, Homo sapiens
  misc_RNA (1)...(19): siRNA sense strand
cuucuccgcuggcaugaug

SEQ ID NO: 1586591 - RNA, 19 nt, Homo sapiens
  misc_RNA (1)...(19): siRNA sense strand
gacaggaugcacaaagaau

SEQ ID NO: 1586592 - RNA, 19 nt, Homo sapiens
  misc_RNA (1)...(19): siRNA sense strand
guccacggcucaagcucuu

SEQ ID NO: 1586593 - RNA, 19 nt, Homo sapiens
  misc_RNA (1)...(19): siRNA sense strand
cccaccaacugauuaagga

SEQ ID NO: 1586594 - RNA, 19 nt, Homo sapiens
  misc_RNA (1)...(19): siRNA sense strand
gaauagcuugcaggagaaa

SEQ ID NO: 1586595 - RNA, 19 nt, Homo sapiens
  misc_RNA (1)...(19): siRNA sense strand
agacacgguauuuauuuga

SEQ ID NO: 1586596 - RNA, 19 nt, Homo sapiens
  misc_RNA (1)...(19): siRNA sense strand
ggaugcacaaagaauagaa

SEQ ID NO: 1586597 - RNA, 19 nt, Homo sapiens
  misc_RNA (1)...(19): siRNA sense strand
aaggcacucuuucaacuca

SEQ ID NO: 1586598 - RNA, 19 nt, Homo sapiens
  misc_RNA (1)...(19): siRNA sense strand
aagauucugugcugauugg

SEQ ID NO: 1586599 - RNA, 19 nt, Homo sapiens
  misc_RNA (1)...(19): siRNA sense strand
ugucaaccuauguuacuaa

SEQ ID NO: 1586600 - RNA, 19 nt, Homo sapiens
  misc_RNA (1)...(19): siRNA sense strand
ccuauacucagcaacagaa

SEQ ID NO: 1586601 - RNA, 19 nt, Homo sapiens
  misc_RNA (1)...(19): siRNA sense strand
gacuucagcacaucaauac

SEQ ID NO: 1586602 - RNA, 19 nt, Homo sapiens
  misc_RNA (1)...(19): siRNA sense strand
cagcaggaagcaugguuug

SEQ ID NO: 1586603 - RNA, 19 nt, Homo sapiens
  misc_RNA (1)...(19): siRNA sense strand
caggaugcacaaagaauag

SEQ ID NO: 1586604 - RNA, 19 nt, Homo sapiens
  misc_RNA (1)...(19): siRNA sense strand
caucucccaccaacugauu

SEQ ID NO: 1586605 - RNA, 19 nt, Homo sapiens
  misc_RNA (1)...(19): siRNA sense strand
ggcacucuuucaacucaau

SEQ ID NO: 1586606 - RNA, 19 nt, Homo sapiens
  misc_RNA (1)...(19): siRNA sense strand
uagucuggcuccucugcuu

SEQ ID NO: 1586607 - RNA, 19 nt, Homo sapiens
  misc_RNA (1)...(19): siRNA sense strand
uacacaaaccugaaaugga

SEQ ID NO: 1586608 - RNA, 19 nt, Homo sapiens
  misc_RNA (1)...(19): siRNA sense strand
ggaucuaggucuggauagc

SEQ ID NO: 1586609 - RNA, 19 nt, Homo sapiens
  misc_RNA (1)...(19): siRNA sense strand
gcugucaaccuauguuacu

SEQ ID NO: 1586610 - RNA, 19 nt, Homo sapiens
  misc_RNA (1)...(19): siRNA sense strand
gauuaaggaguggguggaa

SEQ ID NO: 1586611 - RNA, 19 nt, Homo sapiens
  misc_RNA (1)...(19): siRNA sense strand
caacagaaugggacuuucc

SEQ ID NO: 1586612 - RNA, 19 nt, Homo sapiens
  misc_RNA (1)...(19): siRNA sense strand
gccacagcccugaagagaa

SEQ ID NO: 1586613 - RNA, 19 nt, Homo sapiens
  misc_RNA (1)...(19): siRNA sense strand
ccacagauccaggugaacu

SEQ ID NO: 1586614 - RNA, 19 nt, Homo sapiens
  misc_RNA (1)...(19): siRNA sense strand
caaggggucuuucauugag

SEQ ID NO: 1586615 - RNA, 19 nt, Homo sapiens
  misc_RNA (1)...(19): siRNA sense strand
uacuaagacacgguauuua

SEQ ID NO: 1586616 - RNA, 19 nt, Homo sapiens
  misc_RNA (1)...(19): siRNA sense strand
gagauuagaccguauauau

SEQ ID NO: 1586617 - RNA, 19 nt, Homo sapiens
  misc_RNA (1)...(19): siRNA sense strand
cuacagcucuuccaaauau

SEQ ID NO: 1586618 - RNA, 19 nt, Homo sapiens
  misc_RNA (1)...(19): siRNA sense strand
ccaaggaacuuaagcaaag

SEQ ID NO: 1586619 - RNA, 19 nt, Homo sapiens
  misc_RNA (1)...(19): siRNA sense strand
gaucaugccuaauccacaa

SEQ ID NO: 1586620 - RNA, 19 nt, Homo sapiens
  misc_RNA (1)...(19): siRNA sense strand
gaccguauauaucuaaaug

SEQ ID NO: 1586621 - RNA, 19 nt, Homo sapiens
  misc_RNA (1)...(19): siRNA sense strand
gcaaugcaaggaaaucuaa

SEQ ID NO: 1586622 - RNA, 19 nt, Homo sapiens
  misc_RNA (1)...(19): siRNA sense strand
ucagcaaccugcagucauu

SEQ ID NO: 1586623 - RNA, 19 nt, Homo sapiens
  misc_RNA (1)...(19): siRNA sense strand
gaacaggaacuuucaacca

SEQ ID NO: 1586624 - RNA, 19 nt, Homo sapiens
  misc_RNA (1)...(19): siRNA sense strand
ccuaauccacaacuaaaua

SEQ ID NO: 1586625 - RNA, 19 nt, Homo sapiens
  misc_RNA (1)...(19): siRNA sense strand
gcacagcaaaggcaaggaa

SEQ ID NO: 1586626 - RNA, 19 nt, Homo sapiens
  misc_RNA (1)...(19): siRNA sense strand
gauuagaccguauauaucu

SEQ ID NO: 1586627 - RNA, 19 nt, Homo sapiens
  misc_RNA (1)...(19): siRNA sense strand
gacaucaucucgcaaugca

SEQ ID NO: 1586628 - RNA, 19 nt, Homo sapiens
  misc_RNA (1)...(19): siRNA sense strand
ggcggaagaugaugagcuu

SEQ ID NO: 1586629 - RNA, 19 nt, Homo sapiens
  misc_RNA (1)...(19): siRNA sense strand
ggacuuccagcacagcaaa

SEQ ID NO: 1586630 - RNA, 19 nt, Homo sapiens
  misc_RNA (1)...(19): siRNA sense strand
cugcugaggucaccauugu

SEQ ID NO: 1586631 - RNA, 19 nt, Homo sapiens
  misc_RNA (1)...(19): siRNA sense strand
caaauaugccacugaccuu

SEQ ID NO: 1586632 - RNA, 19 nt, Homo sapiens
  misc_RNA (1)...(19): siRNA sense strand
cagcucaucuggacaucau

SEQ ID NO: 1586633 - RNA, 19 nt, Homo sapiens
  misc_RNA (1)...(19): siRNA sense strand
ucagagauuagaccguaua

SEQ ID NO: 1586634 - RNA, 19 nt, Homo sapiens
  misc_RNA (1)...(19): siRNA sense strand
ucuaaaugcugggaucaug

SEQ ID NO: 1586635 - RNA, 19 nt, Homo sapiens
  misc_RNA (1)...(19): siRNA sense strand
gcugggaucaugccuaauc

SEQ ID NO: 1586636 - RNA, 19 nt, Homo sapiens
  misc_RNA (1)...(19): siRNA sense strand
cccuacagcucuuccaaau

SEQ ID NO: 1586637 - RNA, 19 nt, Homo sapiens
  misc_RNA (1)...(19): siRNA sense strand
augcugggaucaugccuaa

SEQ ID NO: 1586638 - RNA, 19 nt, Homo sapiens
  misc_RNA (1)...(19): siRNA sense strand
cuaaauaucaaagcacuuc

SEQ ID NO: 1586639 - RNA, 19 nt, Homo sapiens
  misc_RNA (1)...(19): siRNA sense strand
gaauaugagcaaggcagaa

SEQ ID NO: 1586640 - RNA, 19 nt, Homo sapiens
  misc_RNA (1)...(19): siRNA sense strand
uguuuggcgugcaggaaua

SEQ ID NO: 1586641 - RNA, 19 nt, Homo sapiens
  misc_RNA (1)...(19): siRNA sense strand
gagccucuccucugucaca

SEQ ID NO: 1586642 - RNA, 19 nt, Homo sapiens
  misc_RNA (1)...(19): siRNA sense strand
caaccugcagucauucuuc

SEQ ID NO: 1586643 - RNA, 19 nt, Homo sapiens
  misc_RNA (1)...(19): siRNA sense strand
caauccaucucagcucauc

SEQ ID NO: 1586644 - RNA, 19 nt, Homo sapiens
  misc_RNA (1)...(19): siRNA sense strand
ccuacagcucuuccaaaua

SEQ ID NO: 1586645 - RNA, 19 nt, Homo sapiens
  misc_RNA (1)...(19): siRNA sense strand
ccacaacuaaauaucaaag

SEQ ID NO: 1586646 - RNA, 19 nt, Homo sapiens
  misc_RNA (1)...(19): siRNA sense strand
ggacaucaucucgcaaugc

SEQ ID NO: 1586647 - RNA, 19 nt, Homo sapiens
  misc_RNA (1)...(19): siRNA sense strand
gcuuugaacaggaacuuuc

SEQ ID NO: 1586648 - RNA, 19 nt, Homo sapiens
  misc_RNA (1)...(19): siRNA sense strand
gcaaccugcagucauucuu

SEQ ID NO: 1586649 - RNA, 19 nt, Homo sapiens
  misc_RNA (1)...(19): siRNA sense strand
gagcuucaucuguguuugg

SEQ ID NO: 1586650 - RNA, 19 nt, Homo sapiens
  misc_RNA (1)...(19): siRNA sense strand
aaauaugccacugaccuuu

SEQ ID NO: 1586651 - RNA, 19 nt, Homo sapiens
  misc_RNA (1)...(19): siRNA sense strand
ccguauauaucuaaaugcu

SEQ ID NO: 1586652 - RNA, 19 nt, Homo sapiens
  misc_RNA (1)...(19): siRNA sense strand
gacuucaggagguguuuga

SEQ ID NO: 1586653 - RNA, 19 nt, Homo sapiens
  misc_RNA (1)...(19): siRNA sense strand
aaggaacccuacagcucuu

SEQ ID NO: 1586654 - RNA, 19 nt, Homo sapiens
  misc_RNA (1)...(19): siRNA sense strand
gagauuagaccguauauau

SEQ ID NO: 1586655 - RNA, 19 nt, Homo sapiens
  misc_RNA (1)...(19): siRNA sense strand
cuacagcucuuccaaauau

SEQ ID NO: 1586656 - RNA, 19 nt, Homo sapiens
  misc_RNA (1)...(19): siRNA sense strand
gaagauggaccuagaugaa

SEQ ID NO: 1586657 - RNA, 19 nt, Homo sapiens
  misc_RNA (1)...(19): siRNA sense strand
ccaaggaacuuaagcaaag

SEQ ID NO: 1586658 - RNA, 19 nt, Homo sapiens
  misc_RNA (1)...(19): siRNA sense strand
gaucaugccuaauccacaa

SEQ ID NO: 1586659 - RNA, 19 nt, Homo sapiens
  misc_RNA (1)...(19): siRNA sense strand
gaccguauauaucuaaaug

SEQ ID NO: 1586660 - RNA, 19 nt, Homo sapiens
  misc_RNA (1)...(19): siRNA sense strand
gcaaugcaaggaaaucuaa

SEQ ID NO: 1586661 - RNA, 19 nt, Homo sapiens
  misc_RNA (1)...(19): siRNA sense strand
ggaccuagaugaagacacu

SEQ ID NO: 1586662 - RNA, 19 nt, Homo sapiens
  misc_RNA (1)...(19): siRNA sense strand
ucagcaaccugcagucauu

SEQ ID NO: 1586663 - RNA, 19 nt, Homo sapiens
  misc_RNA (1)...(19): siRNA sense strand
gaacaggaacuuucaacca

SEQ ID NO: 1586664 - RNA, 19 nt, Homo sapiens
  misc_RNA (1)...(19): siRNA sense strand
ccuaauccacaacuaaaua

SEQ ID NO: 1586665 - RNA, 19 nt, Homo sapiens
  misc_RNA (1)...(19): siRNA sense strand
gcacagcaaaggcaaggaa

SEQ ID NO: 1586666 - RNA, 19 nt, Homo sapiens
  misc_RNA (1)...(19): siRNA sense strand
gauuagaccguauauaucu

SEQ ID NO: 1586667 - RNA, 19 nt, Homo sapiens
  misc_RNA (1)...(19): siRNA sense strand
gacaucaucucgcaaugca

SEQ ID NO: 1586668 - RNA, 19 nt, Homo sapiens
  misc_RNA (1)...(19): siRNA sense strand
ggcggaagaugaugagcuu

SEQ ID NO: 1586669 - RNA, 19 nt, Homo sapiens
  misc_RNA (1)...(19): siRNA sense strand
ggacuuccagcacagcaaa

SEQ ID NO: 1586670 - RNA, 19 nt, Homo sapiens
  misc_RNA (1)...(19): siRNA sense strand
gcacauuagggucacuauu

SEQ ID NO: 1586671 - RNA, 19 nt, Homo sapiens
  misc_RNA (1)...(19): siRNA sense strand
gaacuggaaaagcacauua

SEQ ID NO: 1586672 - RNA, 19 nt, Homo sapiens
  misc_RNA (1)...(19): siRNA sense strand
agauggaccuagaugaaga

SEQ ID NO: 1586673 - RNA, 19 nt, Homo sapiens
  misc_RNA (1)...(19): siRNA sense strand
gaugaagacacugcugaaa

SEQ ID NO: 1586674 - RNA, 19 nt, Homo sapiens
  misc_RNA (1)...(19): siRNA sense strand
cugcugaggucaccauugu

SEQ ID NO: 1586675 - RNA, 19 nt, Homo sapiens
  misc_RNA (1)...(19): siRNA sense strand
caaauaugccacugaccuu

SEQ ID NO: 1586676 - RNA, 19 nt, Homo sapiens
  misc_RNA (1)...(19): siRNA sense strand
cagcucaucuggacaucau

SEQ ID NO: 1586677 - RNA, 19 nt, Homo sapiens
  misc_RNA (1)...(19): siRNA sense strand
ucagagauuagaccguaua

SEQ ID NO: 1586678 - RNA, 19 nt, Homo sapiens
  misc_RNA (1)...(19): siRNA sense strand
acauuagggucacuauuca

SEQ ID NO: 1586679 - RNA, 19 nt, Homo sapiens
  misc_RNA (1)...(19): siRNA sense strand
cccagaagauggaccuaga

SEQ ID NO: 1586680 - RNA, 19 nt, Homo sapiens
  misc_RNA (1)...(19): siRNA sense strand
cacauuagggucacuauuc

SEQ ID NO: 1586681 - RNA, 19 nt, Homo sapiens
  misc_RNA (1)...(19): siRNA sense strand
ucuaaaugcugggaucaug

SEQ ID NO: 1586682 - RNA, 19 nt, Homo sapiens
  misc_RNA (1)...(19): siRNA sense strand
gaaucugucaauccucuga

SEQ ID NO: 1586683 - RNA, 19 nt, Homo sapiens
  misc_RNA (1)...(19): siRNA sense strand
gcugggaucaugccuaauc

SEQ ID NO: 1586684 - RNA, 19 nt, Homo sapiens
  misc_RNA (1)...(19): siRNA sense strand
cccuacagcucuuccaaau

SEQ ID NO: 1586685 - RNA, 19 nt, Homo sapiens
  misc_RNA (1)...(19): siRNA sense strand
augcugggaucaugccuaa

SEQ ID NO: 1586686 - RNA, 19 nt, Homo sapiens
  misc_RNA (1)...(19): siRNA sense strand
caguggcucaugccuauaa

SEQ ID NO: 1586687 - RNA, 19 nt, Homo sapiens
  misc_RNA (1)...(19): siRNA sense strand
cucaguggcucaugccuau

SEQ ID NO: 1586688 - RNA, 19 nt, Homo sapiens
  misc_RNA (1)...(19): siRNA sense strand
cuaaauaucaaagcacuuc

SEQ ID NO: 1586689 - RNA, 19 nt, Homo sapiens
  misc_RNA (1)...(19): siRNA sense strand
gaauaugagcaaggcagaa

SEQ ID NO: 1586690 - RNA, 19 nt, Homo sapiens
  misc_RNA (1)...(19): siRNA sense strand
uguuuggcgugcaggaaua

SEQ ID NO: 1586691 - RNA, 19 nt, Homo sapiens
  misc_RNA (1)...(19): siRNA sense strand
gagccucuccucugucaca

SEQ ID NO: 1586692 - RNA, 19 nt, Homo sapiens
  misc_RNA (1)...(19): siRNA sense strand
cagaagauggaccuagaug

SEQ ID NO: 1586693 - RNA, 19 nt, Homo sapiens
  misc_RNA (1)...(19): siRNA sense strand
caaccugcagucauucuuc

SEQ ID NO: 1586694 - RNA, 19 nt, Homo sapiens
  misc_RNA (1)...(19): siRNA sense strand
caauccaucucagcucauc

SEQ ID NO: 1586695 - RNA, 19 nt, Homo sapiens
  misc_RNA (1)...(19): siRNA sense strand
ccuacagcucuuccaaaua

SEQ ID NO: 1586696 - RNA, 19 nt, Homo sapiens
  misc_RNA (1)...(19): siRNA sense strand
ccacaacuaaauaucaaag

SEQ ID NO: 1586697 - RNA, 19 nt, Homo sapiens
  misc_RNA (1)...(19): siRNA sense strand
ggacaucaucucgcaaugc

SEQ ID NO: 1586698 - RNA, 19 nt, Homo sapiens
  misc_RNA (1)...(19): siRNA sense strand
gcuuugaacaggaacuuuc

SEQ ID NO: 1586699 - RNA, 19 nt, Homo sapiens
  misc_RNA (1)...(19): siRNA sense strand
aaauaugccacugaccuuu

SEQ ID NO: 1586700 - RNA, 19 nt, Homo sapiens
  misc_RNA (1)...(19): siRNA sense strand
gcaaccugcagucauucuu

SEQ ID NO: 1586701 - RNA, 19 nt, Homo sapiens
  misc_RNA (1)...(19): siRNA sense strand
gagcuucaucuguguuugg

SEQ ID NO: 1586702 - RNA, 19 nt, Homo sapiens
  misc_RNA (1)...(19): siRNA sense strand
agaagauggaccuagauga

SEQ ID NO: 1586703 - RNA, 19 nt, Homo sapiens
  misc_RNA (1)...(19): siRNA sense strand
ccguauauaucuaaaugcu

SEQ ID NO: 1586704 - RNA, 19 nt, Homo sapiens
  misc_RNA (1)...(19): siRNA sense strand
gacuucaggagguguuuga

SEQ ID NO: 1586705 - RNA, 19 nt, Homo sapiens
  misc_RNA (1)...(19): siRNA sense strand
aaggaacccuacagcucuu

SEQ ID NO: 1586706 - RNA, 19 nt, Homo sapiens
  misc_RNA (1)...(19): siRNA sense strand
caaggaagaugccugugua

SEQ ID NO: 1586707 - RNA, 19 nt, Homo sapiens
  misc_RNA (1)...(19): siRNA sense strand
ggacaugagugagguguuu

SEQ ID NO: 1586708 - RNA, 19 nt, Homo sapiens
  misc_RNA (1)...(19): siRNA sense strand
gauaaaguguauugggaaa

SEQ ID NO: 1586709 - RNA, 19 nt, Homo sapiens
  misc_RNA (1)...(19): siRNA sense strand
guacugaaauacaucauca

SEQ ID NO: 1586710 - RNA, 19 nt, Homo sapiens
  misc_RNA (1)...(19): siRNA sense strand
gcuuaucgauguaauagaa

SEQ ID NO: 1586711 - RNA, 19 nt, Homo sapiens
  misc_RNA (1)...(19): siRNA sense strand
gucaaaguauuaccuauga

SEQ ID NO: 1586712 - RNA, 19 nt, Homo sapiens
  misc_RNA (1)...(19): siRNA sense strand
ggaugcaucuuuaucuuca

SEQ ID NO: 1586713 - RNA, 19 nt, Homo sapiens
  misc_RNA (1)...(19): siRNA sense strand
cagaaaugcuggcagaaug

SEQ ID NO: 1586714 - RNA, 19 nt, Homo sapiens
  misc_RNA (1)...(19): siRNA sense strand
caacaaggguuucuuugac

SEQ ID NO: 1586715 - RNA, 19 nt, Homo sapiens
  misc_RNA (1)...(19): siRNA sense strand
ggagugaagauaacuuaaa

SEQ ID NO: 1586716 - RNA, 19 nt, Homo sapiens
  misc_RNA (1)...(19): siRNA sense strand
aagggaagcugaugcugua

SEQ ID NO: 1586717 - RNA, 19 nt, Homo sapiens
  misc_RNA (1)...(19): siRNA sense strand
ucaaggagguagacaagga

SEQ ID NO: 1586718 - RNA, 19 nt, Homo sapiens
  misc_RNA (1)...(19): siRNA sense strand
gaaagcagaguucauccaa

SEQ ID NO: 1586719 - RNA, 19 nt, Homo sapiens
  misc_RNA (1)...(19): siRNA sense strand
aagcagaguucauccaaga

SEQ ID NO: 1586720 - RNA, 19 nt, Homo sapiens
  misc_RNA (1)...(19): siRNA sense strand
agauggcacucuuugauuu

SEQ ID NO: 1586721 - RNA, 19 nt, Homo sapiens
  misc_RNA (1)...(19): siRNA sense strand
caucaugagugguccaaga

SEQ ID NO: 1586722 - RNA, 19 nt, Homo sapiens
  misc_RNA (1)...(19): siRNA sense strand
uagaaggcaucaaagaguu

SEQ ID NO: 1586723 - RNA, 19 nt, Homo sapiens
  misc_RNA (1)...(19): siRNA sense strand
ggagguagacaaggaauug

SEQ ID NO: 1586724 - RNA, 19 nt, Homo sapiens
  misc_RNA (1)...(19): siRNA sense strand
gagugaagauaacuuaaac

SEQ ID NO: 1586725 - RNA, 19 nt, Homo sapiens
  misc_RNA (1)...(19): siRNA sense strand
gacacccauucuucuguua

SEQ ID NO: 1586726 - RNA, 19 nt, Homo sapiens
  misc_RNA (1)...(19): siRNA sense strand
acaaauugcuguggauuca

SEQ ID NO: 1586727 - RNA, 19 nt, Homo sapiens
  misc_RNA (1)...(19): siRNA sense strand
gauacaaauugcuguggau

SEQ ID NO: 1586728 - RNA, 19 nt, Homo sapiens
  misc_RNA (1)...(19): siRNA sense strand
gaacacagagccaaaauuc

SEQ ID NO: 1586729 - RNA, 19 nt, Homo sapiens
  misc_RNA (1)...(19): siRNA sense strand
uaaaguguauugggaaagu

SEQ ID NO: 1586730 - RNA, 19 nt, Homo sapiens
  misc_RNA (1)...(19): siRNA sense strand
gcaaggaagaugccugugu

SEQ ID NO: 1586731 - RNA, 19 nt, Homo sapiens
  misc_RNA (1)...(19): siRNA sense strand
ccaaaauucuuaucaccua

SEQ ID NO: 1586732 - RNA, 19 nt, Homo sapiens
  misc_RNA (1)...(19): siRNA sense strand
ucuuugggaugcaucuuua

SEQ ID NO: 1586733 - RNA, 19 nt, Homo sapiens
  misc_RNA (1)...(19): siRNA sense strand
gagccauccuucccugaga

SEQ ID NO: 1586734 - RNA, 19 nt, Homo sapiens
  misc_RNA (1)...(19): siRNA sense strand
caggagugaagauaacuua

SEQ ID NO: 1586735 - RNA, 19 nt, Homo sapiens
  misc_RNA (1)...(19): siRNA sense strand
auucagaccucgcaaggaa

SEQ ID NO: 1586736 - RNA, 19 nt, Homo sapiens
  misc_RNA (1)...(19): siRNA sense strand
aagcagcccuuggacauga

SEQ ID NO: 1586737 - RNA, 19 nt, Homo sapiens
  misc_RNA (1)...(19): siRNA sense strand
agacaacaaggguuucuuu

SEQ ID NO: 1586738 - RNA, 19 nt, Homo sapiens
  misc_RNA (1)...(19): siRNA sense strand
ugacacccauucuucuguu

SEQ ID NO: 1586739 - RNA, 19 nt, Homo sapiens
  misc_RNA (1)...(19): siRNA sense strand
ugacaggagugaagauaac

SEQ ID NO: 1586740 - RNA, 19 nt, Homo sapiens
  misc_RNA (1)...(19): siRNA sense strand
ggucaaaguauuaccuaug

SEQ ID NO: 1586741 - RNA, 19 nt, Homo sapiens
  misc_RNA (1)...(19): siRNA sense strand
cagucucuguuucuugaua

SEQ ID NO: 1586742 - RNA, 19 nt, Homo sapiens
  misc_RNA (1)...(19): siRNA sense strand
aaauugcuguggauucaga

SEQ ID NO: 1586743 - RNA, 19 nt, Homo sapiens
  misc_RNA (1)...(19): siRNA sense strand
caaagaguuuccagcuucu

SEQ ID NO: 1586744 - RNA, 19 nt, Homo sapiens
  misc_RNA (1)...(19): siRNA sense strand
gguagacaaggaauugaaa

SEQ ID NO: 1586745 - RNA, 19 nt, Homo sapiens
  misc_RNA (1)...(19): siRNA sense strand
gcacuuacggcagaaacuu

SEQ ID NO: 1586746 - RNA, 19 nt, Homo sapiens
  misc_RNA (1)...(19): siRNA sense strand
gagcaggaaagcagaguuc

SEQ ID NO: 1586747 - RNA, 19 nt, Homo sapiens
  misc_RNA (1)...(19): siRNA sense strand
acaacaaggguuucuuuga

SEQ ID NO: 1586748 - RNA, 19 nt, Homo sapiens
  misc_RNA (1)...(19): siRNA sense strand
cuuaucaccuauaucaaug

SEQ ID NO: 1586749 - RNA, 19 nt, Homo sapiens
  misc_RNA (1)...(19): siRNA sense strand
gagagcaacauuaggaucu

SEQ ID NO: 1586750 - RNA, 19 nt, Homo sapiens
  misc_RNA (1)...(19): siRNA sense strand
gacaacaaggguuucuuug

SEQ ID NO: 1586751 - RNA, 19 nt, Homo sapiens
  misc_RNA (1)...(19): siRNA sense strand
ccuccuggcugagcaaaga

SEQ ID NO: 1586752 - RNA, 19 nt, Homo sapiens
  misc_RNA (1)...(19): siRNA sense strand
gcucauaaacugguucauc

SEQ ID NO: 1586753 - RNA, 19 nt, Homo sapiens
  misc_RNA (1)...(19): siRNA sense strand
uugaaaagcuuaucgaugu

SEQ ID NO: 1586754 - RNA, 19 nt, Homo sapiens
  misc_RNA (1)...(19): siRNA sense strand
guuuccagcuucugcaguu

SEQ ID NO: 1586755 - RNA, 19 nt, Homo sapiens
  misc_RNA (1)...(19): siRNA sense strand
ccagggagagcaacauuag

SEQ ID NO: 1586756 - RNA, 19 nt, Homo sapiens
  misc_RNA (1)...(19): siRNA sense strand
ggaaagucaaggagguaga

SEQ ID NO: 1586757 - RNA, 19 nt, Homo sapiens
  misc_RNA (1)...(19): siRNA sense strand
aagcaugacccaaggcauu

SEQ ID NO: 1586758 - RNA, 19 nt, Homo sapiens
  misc_RNA (1)...(19): siRNA sense strand
ccaagguucugcggcucua

SEQ ID NO: 1586759 - RNA, 19 nt, Homo sapiens
  misc_RNA (1)...(19): siRNA sense strand
cucauaaacugguucaucu

SEQ ID NO: 1586760 - RNA, 19 nt, Homo sapiens
  misc_RNA (1)...(19): siRNA sense strand
gcaucuuuaucuucagcaa

SEQ ID NO: 1586761 - RNA, 19 nt, Homo sapiens
  misc_RNA (1)...(19): siRNA sense strand
agagcaacauuaggaucua

SEQ ID NO: 1586762 - RNA, 19 nt, Homo sapiens
  misc_RNA (1)...(19): siRNA sense strand
gagcaacauuaggaucuac

SEQ ID NO: 1586763 - RNA, 19 nt, Homo sapiens
  misc_RNA (1)...(19): siRNA sense strand
gaaaagcuuaucgauguaa

SEQ ID NO: 1586764 - RNA, 19 nt, Homo sapiens
  misc_RNA (1)...(19): siRNA sense strand
caaggagguagacaaggaa

SEQ ID NO: 1586765 - RNA, 19 nt, Homo sapiens
  misc_RNA (1)...(19): siRNA sense strand
aacaaggguuucuuugaca

SEQ ID NO: 1586766 - RNA, 19 nt, Homo sapiens
  misc_RNA (1)...(19): siRNA sense strand
gcggcucuagcacacauua

SEQ ID NO: 1586767 - RNA, 19 nt, Homo sapiens
  misc_RNA (1)...(19): siRNA sense strand
ucgcuuagauacaaauugc

SEQ ID NO: 1586768 - RNA, 19 nt, Homo sapiens
  misc_RNA (1)...(19): siRNA sense strand
ugggaugcaucuuuaucuu

SEQ ID NO: 1586769 - RNA, 19 nt, Homo sapiens
  misc_RNA (1)...(19): siRNA sense strand
ggaaagcagaguucaucca

SEQ ID NO: 1586770 - RNA, 19 nt, Homo sapiens
  misc_RNA (1)...(19): siRNA sense strand
gggaugcaucuuuaucuuc

SEQ ID NO: 1586771 - RNA, 19 nt, Homo sapiens
  misc_RNA (1)...(19): siRNA sense strand
gggucaaaguauuaccuau

SEQ ID NO: 1586772 - RNA, 19 nt, Homo sapiens
  misc_RNA (1)...(19): siRNA sense strand
uucagucucuguuucuuga

SEQ ID NO: 1586773 - RNA, 19 nt, Homo sapiens
  misc_RNA (1)...(19): siRNA sense strand
gccaaaaugugaugaccaa

SEQ ID NO: 1586774 - RNA, 19 nt, Homo sapiens
  misc_RNA (1)...(19): siRNA sense strand
caggaaagcagaguucauc

SEQ ID NO: 1586775 - RNA, 19 nt, Homo sapiens
  misc_RNA (1)...(19): siRNA sense strand
ugaaaagcuuaucgaugua

SEQ ID NO: 1586776 - RNA, 19 nt, Homo sapiens
  misc_RNA (1)...(19): siRNA sense strand
gcaguugcugaaacagaaa

SEQ ID NO: 1586777 - RNA, 19 nt, Homo sapiens
  misc_RNA (1)...(19): siRNA sense strand
gcaggaaagcagaguucau

SEQ ID NO: 1586778 - RNA, 19 nt, Homo sapiens
  misc_RNA (1)...(19): siRNA sense strand
agucucuguuucuugauaa

SEQ ID NO: 1586779 - RNA, 19 nt, Homo sapiens
  misc_RNA (1)...(19): siRNA sense strand
gaaggcaucaaagaguuuc

SEQ ID NO: 1586780 - RNA, 19 nt, Homo sapiens
  misc_RNA (1)...(19): siRNA sense strand
uuagaaggcaucaaagagu

SEQ ID NO: 1586781 - RNA, 19 nt, Homo sapiens
  misc_RNA (1)...(19): siRNA sense strand
uuauagacaacaaggguuu

SEQ ID NO: 1586782 - RNA, 19 nt, Homo sapiens
  misc_RNA (1)...(19): siRNA sense strand
guuagaaggcaucaaagag

SEQ ID NO: 1586783 - RNA, 19 nt, Homo sapiens
  misc_RNA (1)...(19): siRNA sense strand
agaauggauugaggccaaa

SEQ ID NO: 1586784 - RNA, 19 nt, Homo sapiens
  misc_RNA (1)...(19): siRNA sense strand
agaaggcaucaaagaguuu

SEQ ID NO: 1586785 - RNA, 19 nt, Homo sapiens
  misc_RNA (1)...(19): siRNA sense strand
ccacucugcagcccaaugu

SEQ ID NO: 1586786 - RNA, 19 nt, Homo sapiens
  misc_RNA (1)...(19): siRNA sense strand
cuucuucagucucuguuuc

SEQ ID NO: 1586787 - RNA, 19 nt, Homo sapiens
  misc_RNA (1)...(19): siRNA sense strand
ccaaggacccggagaaacc

SEQ ID NO: 1586788 - RNA, 19 nt, Homo sapiens
  misc_RNA (1)...(19): siRNA sense strand
gagguagacaaggaauuga

SEQ ID NO: 1586789 - RNA, 19 nt, Homo sapiens
  misc_RNA (1)...(19): siRNA sense strand
ucagaccucgcaaggaaga

SEQ ID NO: 1586790 - RNA, 19 nt, Homo sapiens
  misc_RNA (1)...(19): siRNA sense strand
gcacacggggucaaaguau

SEQ ID NO: 1586791 - RNA, 19 nt, Homo sapiens
  misc_RNA (1)...(19): siRNA sense strand
uaucaccuauaucaaugca

SEQ ID NO: 1586792 - RNA, 19 nt, Homo sapiens
  misc_RNA (1)...(19): siRNA sense strand
aauagaacacagagccaaa

SEQ ID NO: 1586793 - RNA, 19 nt, Homo sapiens
  misc_RNA (1)...(19): siRNA sense strand
gaaagucaaggagguagac

SEQ ID NO: 1586794 - RNA, 19 nt, Homo sapiens
  misc_RNA (1)...(19): siRNA sense strand
acacagagccaaaauucuu

SEQ ID NO: 1586795 - RNA, 19 nt, Homo sapiens
  misc_RNA (1)...(19): siRNA sense strand
gagagcgacccuggagguu

SEQ ID NO: 1586796 - RNA, 19 nt, Homo sapiens
  misc_RNA (1)...(19): siRNA sense strand
gaacaugauggauuucuua

SEQ ID NO: 1586797 - RNA, 19 nt, Homo sapiens
  misc_RNA (1)...(19): siRNA sense strand
ugaagaagguucccaagaa

SEQ ID NO: 1586798 - RNA, 19 nt, Homo sapiens
  misc_RNA (1)...(19): siRNA sense strand
gaagaagguucccaagaag

SEQ ID NO: 1586799 - RNA, 19 nt, Homo sapiens
  misc_RNA (1)...(19): siRNA sense strand
gggcaggccuugcagaaug

SEQ ID NO: 1586800 - RNA, 19 nt, Homo sapiens
  misc_RNA (1)...(19): siRNA sense strand
ggucagggcucacccagau

SEQ ID NO: 1586801 - RNA, 19 nt, Homo sapiens
  misc_RNA (1)...(19): siRNA sense strand
ggaacaugauggauuucuu

SEQ ID NO: 1586802 - RNA, 19 nt, Homo sapiens
  misc_RNA (1)...(19): siRNA sense strand
aagcauaucuuaggcagaa

SEQ ID NO: 1586803 - RNA, 19 nt, Homo sapiens
  misc_RNA (1)...(19): siRNA sense strand
uaaagguuguggccagaaa

SEQ ID NO: 1586804 - RNA, 19 nt, Homo sapiens
  misc_RNA (1)...(19): siRNA sense strand
gaagguucccaagaaguua

SEQ ID NO: 1586805 - RNA, 19 nt, Homo sapiens
  misc_RNA (1)...(19): siRNA sense strand
aagggaacaugauggauuu

SEQ ID NO: 1586806 - RNA, 19 nt, Homo sapiens
  misc_RNA (1)...(19): siRNA sense strand
ggaagaggagcacuuugaa

SEQ ID NO: 1586807 - RNA, 19 nt, Homo sapiens
  misc_RNA (1)...(19): siRNA sense strand
caagggaacaugauggauu

SEQ ID NO: 1586808 - RNA, 19 nt, Homo sapiens
  misc_RNA (1)...(19): siRNA sense strand
ggacauugaagaagaggaa

SEQ ID NO: 1586809 - RNA, 19 nt, Homo sapiens
  misc_RNA (1)...(19): siRNA sense strand
caaggaguauuugauugaa

SEQ ID NO: 1586810 - RNA, 19 nt, Homo sapiens
  misc_RNA (1)...(19): siRNA sense strand
gcacuucuccagcgaccua

SEQ ID NO: 1586811 - RNA, 19 nt, Homo sapiens
  misc_RNA (1)...(19): siRNA sense strand
ccaagaaguuagaggagau

SEQ ID NO: 1586812 - RNA, 19 nt, Homo sapiens
  misc_RNA (1)...(19): siRNA sense strand
ugauggauuucuuagcuuu

SEQ ID NO: 1586813 - RNA, 19 nt, Homo sapiens
  misc_RNA (1)...(19): siRNA sense strand
ccagcgaccuaacaaauac

SEQ ID NO: 1586814 - RNA, 19 nt, Homo sapiens
  misc_RNA (1)...(19): siRNA sense strand
ccauuacaagcauaucuua

SEQ ID NO: 1586815 - RNA, 19 nt, Homo sapiens
  misc_RNA (1)...(19): siRNA sense strand
uaucuuaggcagaaugauu

SEQ ID NO: 1586816 - RNA, 19 nt, Homo sapiens
  misc_RNA (1)...(19): siRNA sense strand
ggaagcagugccuggacua

SEQ ID NO: 1586817 - RNA, 19 nt, Homo sapiens
  misc_RNA (1)...(19): siRNA sense strand
caugauggauuucuuagcu

SEQ ID NO: 1586818 - RNA, 19 nt, Homo sapiens
  misc_RNA (1)...(19): siRNA sense strand
cgaccuaacaaauacauau

SEQ ID NO: 1586819 - RNA, 19 nt, Homo sapiens
  misc_RNA (1)...(19): siRNA sense strand
ggaacacgggaaugaagaa

SEQ ID NO: 1586820 - RNA, 19 nt, Homo sapiens
  misc_RNA (1)...(19): siRNA sense strand
gaagaggagcacuuugaag

SEQ ID NO: 1586821 - RNA, 19 nt, Homo sapiens
  misc_RNA (1)...(19): siRNA sense strand
acacgggaaugaagaaggu

SEQ ID NO: 1586822 - RNA, 19 nt, Homo sapiens
  misc_RNA (1)...(19): siRNA sense strand
ccgcagaucagcagcauca

SEQ ID NO: 1586823 - RNA, 19 nt, Homo sapiens
  misc_RNA (1)...(19): siRNA sense strand
ggauuggaaugcacuucuc

SEQ ID NO: 1586824 - RNA, 19 nt, Homo sapiens
  misc_RNA (1)...(19): siRNA sense strand
agaagguucccaagaaguu

SEQ ID NO: 1586825 - RNA, 19 nt, Homo sapiens
  misc_RNA (1)...(19): siRNA sense strand
caucaccacggcuaacuug

SEQ ID NO: 1586826 - RNA, 19 nt, Homo sapiens
  misc_RNA (1)...(19): siRNA sense strand
gggaacacgggaaugaaga

SEQ ID NO: 1586827 - RNA, 19 nt, Homo sapiens
  misc_RNA (1)...(19): siRNA sense strand
gcagaucagcagcaucauc

SEQ ID NO: 1586828 - RNA, 19 nt, Homo sapiens
  misc_RNA (1)...(19): siRNA sense strand
ggcaggccuugcagaaugu

SEQ ID NO: 1586829 - RNA, 19 nt, Homo sapiens
  misc_RNA (1)...(19): siRNA sense strand
gaccuaacaaauacauaug

SEQ ID NO: 1586830 - RNA, 19 nt, Homo sapiens
  misc_RNA (1)...(19): siRNA sense strand
ggacuccuguugccauagc

SEQ ID NO: 1586831 - RNA, 19 nt, Homo sapiens
  misc_RNA (1)...(19): siRNA sense strand
aggaagaggagcacuuuga

SEQ ID NO: 1586832 - RNA, 19 nt, Homo sapiens
  misc_RNA (1)...(19): siRNA sense strand
ccaccacuguacugucugu

SEQ ID NO: 1586833 - RNA, 19 nt, Homo sapiens
  misc_RNA (1)...(19): siRNA sense strand
uccagcgaccuaacaaaua

SEQ ID NO: 1586834 - RNA, 19 nt, Homo sapiens
  misc_RNA (1)...(19): siRNA sense strand
gaagcagugccuggacuau

SEQ ID NO: 1586835 - RNA, 19 nt, Homo sapiens
  misc_RNA (1)...(19): siRNA sense strand
ugggacuccuguugccaua

SEQ ID NO: 1586836 - RNA, 19 nt, Homo sapiens
  misc_RNA (1)...(19): siRNA sense strand
ucaaggagagacuguaugg

SEQ ID NO: 1586837 - RNA, 19 nt, Homo sapiens
  misc_RNA (1)...(19): siRNA sense strand
ggagaugcaggcucugaag

SEQ ID NO: 1586838 - RNA, 19 nt, Homo sapiens
  misc_RNA (1)...(19): siRNA sense strand
agcagugccuggacuauca

SEQ ID NO: 1586839 - RNA, 19 nt, Homo sapiens
  misc_RNA (1)...(19): siRNA sense strand
gcauaucuuaggcagaaug

SEQ ID NO: 1586840 - RNA, 19 nt, Homo sapiens
  misc_RNA (1)...(19): siRNA sense strand
ugauuuggacauugaagaa

SEQ ID NO: 1586841 - RNA, 19 nt, Homo sapiens
  misc_RNA (1)...(19): siRNA sense strand
agaggaagaggagcacuuu

SEQ ID NO: 1586842 - RNA, 19 nt, Homo sapiens
  misc_RNA (1)...(19): siRNA sense strand
caagaaguuagaggagauu

SEQ ID NO: 1586843 - RNA, 19 nt, Homo sapiens
  misc_RNA (1)...(19): siRNA sense strand
gaacacgggaaugaagaag

SEQ ID NO: 1586844 - RNA, 19 nt, Homo sapiens
  misc_RNA (1)...(19): siRNA sense strand
cauuaaugaugagguaaag

SEQ ID NO: 1586845 - RNA, 19 nt, Homo sapiens
  misc_RNA (1)...(19): siRNA sense strand
ccggagauggcacagauga

SEQ ID NO: 1586846 - RNA, 19 nt, Homo sapiens
  misc_RNA (1)...(19): siRNA sense strand
uggcacagaugaggaagca

SEQ ID NO: 1586847 - RNA, 19 nt, Homo sapiens
  misc_RNA (1)...(19): siRNA sense strand
ggucuucaaggaguauuug

SEQ ID NO: 1586848 - RNA, 19 nt, Homo sapiens
  misc_RNA (1)...(19): siRNA sense strand
gcacccaccacuguacugu

SEQ ID NO: 1586849 - RNA, 19 nt, Homo sapiens
  misc_RNA (1)...(19): siRNA sense strand
gaggaagaggagcacuuug

SEQ ID NO: 1586850 - RNA, 19 nt, Homo sapiens
  misc_RNA (1)...(19): siRNA sense strand
cuccggagauggcacagau

SEQ ID NO: 1586851 - RNA, 19 nt, Homo sapiens
  misc_RNA (1)...(19): siRNA sense strand
gaccauuacaagcauaucu

SEQ ID NO: 1586852 - RNA, 19 nt, Homo sapiens
  misc_RNA (1)...(19): siRNA sense strand
gaacaugauggauuucuua

SEQ ID NO: 1586853 - RNA, 19 nt, Homo sapiens
  misc_RNA (1)...(19): siRNA sense strand
ugaagaagguucccaagaa

SEQ ID NO: 1586854 - RNA, 19 nt, Homo sapiens
  misc_RNA (1)...(19): siRNA sense strand
gaagaagguucccaagaag

SEQ ID NO: 1586855 - RNA, 19 nt, Homo sapiens
  misc_RNA (1)...(19): siRNA sense strand
gggcaggccuugcagaaug

SEQ ID NO: 1586856 - RNA, 19 nt, Homo sapiens
  misc_RNA (1)...(19): siRNA sense strand
ggucagggcucacccagau

SEQ ID NO: 1586857 - RNA, 19 nt, Homo sapiens
  misc_RNA (1)...(19): siRNA sense strand
ggaacaugauggauuucuu

SEQ ID NO: 1586858 - RNA, 19 nt, Homo sapiens
  misc_RNA (1)...(19): siRNA sense strand
aagcauaucuuaggcagaa

SEQ ID NO: 1586859 - RNA, 19 nt, Homo sapiens
  misc_RNA (1)...(19): siRNA sense strand
uaaagguuguggccagaaa

SEQ ID NO: 1586860 - RNA, 19 nt, Homo sapiens
  misc_RNA (1)...(19): siRNA sense strand
gaagguucccaagaaguua

SEQ ID NO: 1586861 - RNA, 19 nt, Homo sapiens
  misc_RNA (1)...(19): siRNA sense strand
aagggaacaugauggauuu

SEQ ID NO: 1586862 - RNA, 19 nt, Homo sapiens
  misc_RNA (1)...(19): siRNA sense strand
ggaagaggagcacuuugaa

SEQ ID NO: 1586863 - RNA, 19 nt, Homo sapiens
  misc_RNA (1)...(19): siRNA sense strand
caagggaacaugauggauu

SEQ ID NO: 1586864 - RNA, 19 nt, Homo sapiens
  misc_RNA (1)...(19): siRNA sense strand
ggacauugaagaagaggaa

SEQ ID NO: 1586865 - RNA, 19 nt, Homo sapiens
  misc_RNA (1)...(19): siRNA sense strand
caaggaguauuugauugaa

SEQ ID NO: 1586866 - RNA, 19 nt, Homo sapiens
  misc_RNA (1)...(19): siRNA sense strand
gcacuucuccagcgaccua

SEQ ID NO: 1586867 - RNA, 19 nt, Homo sapiens
  misc_RNA (1)...(19): siRNA sense strand
ccaagaaguuagaggagau

SEQ ID NO: 1586868 - RNA, 19 nt, Homo sapiens
  misc_RNA (1)...(19): siRNA sense strand
ugauggauuucuuagcuuu

SEQ ID NO: 1586869 - RNA, 19 nt, Homo sapiens
  misc_RNA (1)...(19): siRNA sense strand
ccagcgaccuaacaaauac

SEQ ID NO: 1586870 - RNA, 19 nt, Homo sapiens
  misc_RNA (1)...(19): siRNA sense strand
ccauuacaagcauaucuua

SEQ ID NO: 1586871 - RNA, 19 nt, Homo sapiens
  misc_RNA (1)...(19): siRNA sense strand
uaucuuaggcagaaugauu

SEQ ID NO: 1586872 - RNA, 19 nt, Homo sapiens
  misc_RNA (1)...(19): siRNA sense strand
ggaagcagugccuggacua

SEQ ID NO: 1586873 - RNA, 19 nt, Homo sapiens
  misc_RNA (1)...(19): siRNA sense strand
caugauggauuucuuagcu

SEQ ID NO: 1586874 - RNA, 19 nt, Homo sapiens
  misc_RNA (1)...(19): siRNA sense strand
cgaccuaacaaauacauau

SEQ ID NO: 1586875 - RNA, 19 nt, Homo sapiens
  misc_RNA (1)...(19): siRNA sense strand
ggaacacgggaaugaagaa

SEQ ID NO: 1586876 - RNA, 19 nt, Homo sapiens
  misc_RNA (1)...(19): siRNA sense strand
gaagaggagcacuuugaag

SEQ ID NO: 1586877 - RNA, 19 nt, Homo sapiens
  misc_RNA (1)...(19): siRNA sense strand
acacgggaaugaagaaggu

SEQ ID NO: 1586878 - RNA, 19 nt, Homo sapiens
  misc_RNA (1)...(19): siRNA sense strand
caucaccacggcuaacuug

SEQ ID NO: 1586879 - RNA, 19 nt, Homo sapiens
  misc_RNA (1)...(19): siRNA sense strand
ggauuggaaugcacuucuc

SEQ ID NO: 1586880 - RNA, 19 nt, Homo sapiens
  misc_RNA (1)...(19): siRNA sense strand
agaagguucccaagaaguu

SEQ ID NO: 1586881 - RNA, 19 nt, Homo sapiens
  misc_RNA (1)...(19): siRNA sense strand
gggaacacgggaaugaaga

SEQ ID NO: 1586882 - RNA, 19 nt, Homo sapiens
  misc_RNA (1)...(19): siRNA sense strand
gcagaucagcagcaucauc

SEQ ID NO: 1586883 - RNA, 19 nt, Homo sapiens
  misc_RNA (1)...(19): siRNA sense strand
ccgcagaucagcagcauca

SEQ ID NO: 1586884 - RNA, 19 nt, Homo sapiens
  misc_RNA (1)...(19): siRNA sense strand
ggcaggccuugcagaaugu

SEQ ID NO: 1586885 - RNA, 19 nt, Homo sapiens
  misc_RNA (1)...(19): siRNA sense strand
gaccuaacaaauacauaug

SEQ ID NO: 1586886 - RNA, 19 nt, Homo sapiens
  misc_RNA (1)...(19): siRNA sense strand
ggacuccuguugccauagc

SEQ ID NO: 1586887 - RNA, 19 nt, Homo sapiens
  misc_RNA (1)...(19): siRNA sense strand
aggaagaggagcacuuuga

SEQ ID NO: 1586888 - RNA, 19 nt, Homo sapiens
  misc_RNA (1)...(19): siRNA sense strand
ccaccacuguacugucugu

SEQ ID NO: 1586889 - RNA, 19 nt, Homo sapiens
  misc_RNA (1)...(19): siRNA sense strand
uccagcgaccuaacaaaua

SEQ ID NO: 1586890 - RNA, 19 nt, Homo sapiens
  misc_RNA (1)...(19): siRNA sense strand
agcauuuccugaagacgua

SEQ ID NO: 1586891 - RNA, 19 nt, Homo sapiens
  misc_RNA (1)...(19): siRNA sense strand
ugggacuccuguugccaua

SEQ ID NO: 1586892 - RNA, 19 nt, Homo sapiens
  misc_RNA (1)...(19): siRNA sense strand
ucaaggagagacuguaugg

SEQ ID NO: 1586893 - RNA, 19 nt, Homo sapiens
  misc_RNA (1)...(19): siRNA sense strand
ggagaugcaggcucugaag

SEQ ID NO: 1586894 - RNA, 19 nt, Homo sapiens
  misc_RNA (1)...(19): siRNA sense strand
agcagugccuggacuauca

SEQ ID NO: 1586895 - RNA, 19 nt, Homo sapiens
  misc_RNA (1)...(19): siRNA sense strand
gaagcagugccuggacuau

SEQ ID NO: 1586896 - RNA, 19 nt, Homo sapiens
  misc_RNA (1)...(19): siRNA sense strand
gcauaucuuaggcagaaug

SEQ ID NO: 1586897 - RNA, 19 nt, Homo sapiens
  misc_RNA (1)...(19): siRNA sense strand
ugauuuggacauugaagaa

SEQ ID NO: 1586898 - RNA, 19 nt, Homo sapiens
  misc_RNA (1)...(19): siRNA sense strand
agaggaagaggagcacuuu

SEQ ID NO: 1586899 - RNA, 19 nt, Homo sapiens
  misc_RNA (1)...(19): siRNA sense strand
caagaaguuagaggagauu

SEQ ID NO: 1586900 - RNA, 19 nt, Homo sapiens
  misc_RNA (1)...(19): siRNA sense strand
gaacacgggaaugaagaag

SEQ ID NO: 1586901 - RNA, 19 nt, Homo sapiens
  misc_RNA (1)...(19): siRNA sense strand
cauuaaugaugagguaaag

SEQ ID NO: 1586902 - RNA, 19 nt, Homo sapiens
  misc_RNA (1)...(19): siRNA sense strand
gggagcauuuccugaagac

SEQ ID NO: 1586903 - RNA, 19 nt, Homo sapiens
  misc_RNA (1)...(19): siRNA sense strand
ccggagauggcacagauga

SEQ ID NO: 1586904 - RNA, 19 nt, Homo sapiens
  misc_RNA (1)...(19): siRNA sense strand
uggcacagaugaggaagca

SEQ ID NO: 1586905 - RNA, 19 nt, Homo sapiens
  misc_RNA (1)...(19): siRNA sense strand
ggucuucaaggaguauuug

SEQ ID NO: 1586906 - RNA, 19 nt, Homo sapiens
  misc_RNA (1)...(19): siRNA sense strand
gcacccaccacuguacugu

SEQ ID NO: 1586907 - RNA, 19 nt, Homo sapiens
  misc_RNA (1)...(19): siRNA sense strand
gaggaagaggagcacuuug

SEQ ID NO: 1586908 - RNA, 19 nt, Homo sapiens
  misc_RNA (1)...(19): siRNA sense strand
cuccggagauggcacagau

SEQ ID NO: 1586909 - RNA, 19 nt, Homo sapiens
  misc_RNA (1)...(19): siRNA sense strand
cugaagacguagucaugca

SEQ ID NO: 1586910 - RNA, 19 nt, Homo sapiens
  misc_RNA (1)...(19): siRNA sense strand
gaccauuacaagcauaucu

SEQ ID NO: 1586911 - RNA, 19 nt, Homo sapiens
  misc_RNA (1)...(19): siRNA sense strand
cagcaugaccuccacauua

SEQ ID NO: 1586912 - RNA, 19 nt, Homo sapiens
  misc_RNA (1)...(19): siRNA sense strand
ggagccaccuuccaucaga

SEQ ID NO: 1586913 - RNA, 19 nt, Homo sapiens
  misc_RNA (1)...(19): siRNA sense strand
ccacaacucuccuuauggu

SEQ ID NO: 1586914 - RNA, 19 nt, Homo sapiens
  misc_RNA (1)...(19): siRNA sense strand
gacuuuagcaggagcuuua

SEQ ID NO: 1586915 - RNA, 19 nt, Homo sapiens
  misc_RNA (1)...(19): siRNA sense strand
caccacaacucuccuuaug

SEQ ID NO: 1586916 - RNA, 19 nt, Homo sapiens
  misc_RNA (1)...(19): siRNA sense strand
gagacuugcugcccacugu

SEQ ID NO: 1586917 - RNA, 19 nt, Homo sapiens
  misc_RNA (1)...(19): siRNA sense strand
ggaagagacacagcuauca

SEQ ID NO: 1586918 - RNA, 19 nt, Homo sapiens
  misc_RNA (1)...(19): siRNA sense strand
ggacgcaggcgacuaugug

SEQ ID NO: 1586919 - RNA, 19 nt, Homo sapiens
  misc_RNA (1)...(19): siRNA sense strand
ugaagcaucauaugaaugu

SEQ ID NO: 1586920 - RNA, 19 nt, Homo sapiens
  misc_RNA (1)...(19): siRNA sense strand
ccguggagcuagaggauga

SEQ ID NO: 1586921 - RNA, 19 nt, Homo sapiens
  misc_RNA (1)...(19): siRNA sense strand
ugugacaucuuuccaaugg

SEQ ID NO: 1586922 - RNA, 19 nt, Homo sapiens
  misc_RNA (1)...(19): siRNA sense strand
gaugauggagccaccuuug

SEQ ID NO: 1586923 - RNA, 19 nt, Homo sapiens
  misc_RNA (1)...(19): siRNA sense strand
aaaagaaccugaugcgaau

SEQ ID NO: 1586924 - RNA, 19 nt, Homo sapiens
  misc_RNA (1)...(19): siRNA sense strand
ggccgauucugcaggcaaa

SEQ ID NO: 1586925 - RNA, 19 nt, Homo sapiens
  misc_RNA (1)...(19): siRNA sense strand
guccugggaucuccaacuu

SEQ ID NO: 1586926 - RNA, 19 nt, Homo sapiens
  misc_RNA (1)...(19): siRNA sense strand
gaucuccaacuugccauaa

SEQ ID NO: 1586927 - RNA, 19 nt, Homo sapiens
  misc_RNA (1)...(19): siRNA sense strand
ggagcuagaggaugaagca

SEQ ID NO: 1586928 - RNA, 19 nt, Homo sapiens
  misc_RNA (1)...(19): siRNA sense strand
cgaggacgcaggcgacuau

SEQ ID NO: 1586929 - RNA, 19 nt, Homo sapiens
  misc_RNA (1)...(19): siRNA sense strand
ggagggagagaaggucauu

SEQ ID NO: 1586930 - RNA, 19 nt, Homo sapiens
  misc_RNA (1)...(19): siRNA sense strand
cgugugacaucuuuccaau

SEQ ID NO: 1586931 - RNA, 19 nt, Homo sapiens
  misc_RNA (1)...(19): siRNA sense strand
agcaugaccuccacauuag

SEQ ID NO: 1586932 - RNA, 19 nt, Homo sapiens
  misc_RNA (1)...(19): siRNA sense strand
caacucuccuuauggucau

SEQ ID NO: 1586933 - RNA, 19 nt, Homo sapiens
  misc_RNA (1)...(19): siRNA sense strand
gaggcucggcugacuguga

SEQ ID NO: 1586934 - RNA, 19 nt, Homo sapiens
  misc_RNA (1)...(19): siRNA sense strand
ccacagugaucugguucug

SEQ ID NO: 1586935 - RNA, 19 nt, Homo sapiens
  misc_RNA (1)...(19): siRNA sense strand
gaagagacacagcuaucac

SEQ ID NO: 1586936 - RNA, 19 nt, Homo sapiens
  misc_RNA (1)...(19): siRNA sense strand
gagaugggguccuguugga

SEQ ID NO: 1586937 - RNA, 19 nt, Homo sapiens
  misc_RNA (1)...(19): siRNA sense strand
ggucuggucuugggaugag

SEQ ID NO: 1586938 - RNA, 19 nt, Homo sapiens
  misc_RNA (1)...(19): siRNA sense strand
aagggacucuggagaccaa

SEQ ID NO: 1586939 - RNA, 19 nt, Homo sapiens
  misc_RNA (1)...(19): siRNA sense strand
cacgagguccugaagaaga

SEQ ID NO: 1586940 - RNA, 19 nt, Homo sapiens
  misc_RNA (1)...(19): siRNA sense strand
ggaucuccaacuugccaua

SEQ ID NO: 1586941 - RNA, 19 nt, Homo sapiens
  misc_RNA (1)...(19): siRNA sense strand
gaggugacucugucugcuu

SEQ ID NO: 1586942 - RNA, 19 nt, Homo sapiens
  misc_RNA (1)...(19): siRNA sense strand
ggacucuggagaccaagga

SEQ ID NO: 1586943 - RNA, 19 nt, Homo sapiens
  misc_RNA (1)...(19): siRNA sense strand
ggagccacacugcgucuuc

SEQ ID NO: 1586944 - RNA, 19 nt, Homo sapiens
  misc_RNA (1)...(19): siRNA sense strand
gaaugucaggcuacacaag

SEQ ID NO: 1586945 - RNA, 19 nt, Homo sapiens
  misc_RNA (1)...(19): siRNA sense strand
gcugcccacugugcggaua

SEQ ID NO: 1586946 - RNA, 19 nt, Homo sapiens
  misc_RNA (1)...(19): siRNA sense strand
gagcugaggcugggcuauc

SEQ ID NO: 1586947 - RNA, 19 nt, Homo sapiens
  misc_RNA (1)...(19): siRNA sense strand
aggcucggcugacugugaa

SEQ ID NO: 1586948 - RNA, 19 nt, Homo sapiens
  misc_RNA (1)...(19): siRNA sense strand
ccaccacaacucuccuuau

SEQ ID NO: 1586949 - RNA, 19 nt, Homo sapiens
  misc_RNA (1)...(19): siRNA sense strand
guccuccucuucugcuuca

SEQ ID NO: 1586950 - RNA, 19 nt, Homo sapiens
  misc_RNA (1)...(19): siRNA sense strand
ggaagaguccugggaucuc

SEQ ID NO: 1586951 - RNA, 19 nt, Homo sapiens
  misc_RNA (1)...(19): siRNA sense strand
gauggagccaccuuugucu

SEQ ID NO: 1586952 - RNA, 19 nt, Homo sapiens
  misc_RNA (1)...(19): siRNA sense strand
acaggaagagacacagcua

SEQ ID NO: 1586953 - RNA, 19 nt, Homo sapiens
  misc_RNA (1)...(19): siRNA sense strand
ucaguggagagcaccuuaa

SEQ ID NO: 1586954 - RNA, 19 nt, Homo sapiens
  misc_RNA (1)...(19): siRNA sense strand
gccaccacaacucuccuua

SEQ ID NO: 1586955 - RNA, 19 nt, Homo sapiens
  misc_RNA (1)...(19): siRNA sense strand
gagagaaggucauuuuccu

SEQ ID NO: 1586956 - RNA, 19 nt, Homo sapiens
  misc_RNA (1)...(19): siRNA sense strand
gcagagaaguuugggaaga

SEQ ID NO: 1586957 - RNA, 19 nt, Homo sapiens
  misc_RNA (1)...(19): siRNA sense strand
cuaaagcaaugcacuaauc

SEQ ID NO: 1586958 - RNA, 19 nt, Homo sapiens
  misc_RNA (1)...(19): siRNA sense strand
gaaccgcccuggcuuugca

SEQ ID NO: 1586959 - RNA, 19 nt, Homo sapiens
  misc_RNA (1)...(19): siRNA sense strand
gcaaugcacuaauccaaaa

SEQ ID NO: 1586960 - RNA, 19 nt, Homo sapiens
  misc_RNA (1)...(19): siRNA sense strand
ggagaaccgcccuggcuuu

SEQ ID NO: 1586961 - RNA, 19 nt, Homo sapiens
  misc_RNA (1)...(19): siRNA sense strand
ggagaagcacggaaacgaa

SEQ ID NO: 1586962 - RNA, 19 nt, Homo sapiens
  misc_RNA (1)...(19): siRNA sense strand
gaugugacaaucagaaaug

SEQ ID NO: 1586963 - RNA, 19 nt, Homo sapiens
  misc_RNA (1)...(19): siRNA sense strand
gcacggaaacgaagucucu

SEQ ID NO: 1586964 - RNA, 19 nt, Homo sapiens
  misc_RNA (1)...(19): siRNA sense strand
ggugggagguggagaagca

SEQ ID NO: 1586965 - RNA, 19 nt, Homo sapiens
  misc_RNA (1)...(19): siRNA sense strand
cagagaaguuugggaagau

SEQ ID NO: 1586966 - RNA, 19 nt, Homo sapiens
  misc_RNA (1)...(19): siRNA sense strand
guccagacauauccagaug

SEQ ID NO: 1586967 - RNA, 19 nt, Homo sapiens
  misc_RNA (1)...(19): siRNA sense strand
gagaaccgcccuggcuuug

SEQ ID NO: 1586968 - RNA, 19 nt, Homo sapiens
  misc_RNA (1)...(19): siRNA sense strand
gggaagaugcugauuucau

SEQ ID NO: 1586969 - RNA, 19 nt, Homo sapiens
  misc_RNA (1)...(19): siRNA sense strand
uuucaucuguccaguccua

SEQ ID NO: 1586970 - RNA, 19 nt, Homo sapiens
  misc_RNA (1)...(19): siRNA sense strand
ucaaccagcagagaaguuu

SEQ ID NO: 1586971 - RNA, 19 nt, Homo sapiens
  misc_RNA (1)...(19): siRNA sense strand
uugggaagaugcugauuuc

SEQ ID NO: 1586972 - RNA, 19 nt, Homo sapiens
  misc_RNA (1)...(19): siRNA sense strand
caaggugggagguggagaa

SEQ ID NO: 1586973 - RNA, 19 nt, Homo sapiens
  misc_RNA (1)...(19): siRNA sense strand
ccagaugugacaaucagaa

SEQ ID NO: 1586974 - RNA, 19 nt, Homo sapiens
  misc_RNA (1)...(19): siRNA sense strand
uguuugugcugcagugaaa

SEQ ID NO: 1586975 - RNA, 19 nt, Homo sapiens
  misc_RNA (1)...(19): siRNA sense strand
ccaccucccucuguuugug

SEQ ID NO: 1586976 - RNA, 19 nt, Homo sapiens
  misc_RNA (1)...(19): siRNA sense strand
guccaguccuaaagcaaug

SEQ ID NO: 1586977 - RNA, 19 nt, Homo sapiens
  misc_RNA (1)...(19): siRNA sense strand
cauauccagaugucccuua

SEQ ID NO: 1586978 - RNA, 19 nt, Homo sapiens
  misc_RNA (1)...(19): siRNA sense strand
gugacaaucagaaaugugu

SEQ ID NO: 1586979 - RNA, 19 nt, Homo sapiens
  misc_RNA (1)...(19): siRNA sense strand
cagaugugacaaucagaaa

SEQ ID NO: 1586980 - RNA, 19 nt, Homo sapiens
  misc_RNA (1)...(19): siRNA sense strand
cacccacccucccagaugu

SEQ ID NO: 1586981 - RNA, 19 nt, Homo sapiens
  misc_RNA (1)...(19): siRNA sense strand
agagaaguuugggaagaug

SEQ ID NO: 1586982 - RNA, 19 nt, Homo sapiens
  misc_RNA (1)...(19): siRNA sense strand
gaagcacggaaacgaaguc

SEQ ID NO: 1586983 - RNA, 19 nt, Homo sapiens
  misc_RNA (1)...(19): siRNA sense strand
aagcaaugcacuaauccaa

SEQ ID NO: 1586984 - RNA, 19 nt, Homo sapiens
  misc_RNA (1)...(19): siRNA sense strand
agcaacagcucggcaaucu

SEQ ID NO: 1586985 - RNA, 19 nt, Homo sapiens
  misc_RNA (1)...(19): siRNA sense strand
guccuaaagcaaugcacua

SEQ ID NO: 1586986 - RNA, 19 nt, Homo sapiens
  misc_RNA (1)...(19): siRNA sense strand
ggaucuuucuuaggaauua

SEQ ID NO: 1586987 - RNA, 19 nt, Homo sapiens
  misc_RNA (1)...(19): siRNA sense strand
gaagacgucgcucugguuu

SEQ ID NO: 1586988 - RNA, 19 nt, Homo sapiens
  misc_RNA (1)...(19): siRNA sense strand
gagaauagaaggcaaaugc

SEQ ID NO: 1586989 - RNA, 19 nt, Homo sapiens
  misc_RNA (1)...(19): siRNA sense strand
gcagcgaucguguuuauca

SEQ ID NO: 1586990 - RNA, 19 nt, Homo sapiens
  misc_RNA (1)...(19): siRNA sense strand
caucguggacggcguauuu

SEQ ID NO: 1586991 - RNA, 19 nt, Homo sapiens
  misc_RNA (1)...(19): siRNA sense strand
uggcagcgaucguguuuau

SEQ ID NO: 1586992 - RNA, 19 nt, Homo sapiens
  misc_RNA (1)...(19): siRNA sense strand
gcugguguccguccucaua

SEQ ID NO: 1586993 - RNA, 19 nt, Homo sapiens
  misc_RNA (1)...(19): siRNA sense strand
gcgaucguguuuaucaguu

SEQ ID NO: 1586994 - RNA, 19 nt, Homo sapiens
  misc_RNA (1)...(19): siRNA sense strand
gcaucaacuugguggagaa

SEQ ID NO: 1586995 - RNA, 19 nt, Homo sapiens
  misc_RNA (1)...(19): siRNA sense strand
gcucugggccucugcaguu

SEQ ID NO: 1586996 - RNA, 19 nt, Homo sapiens
  misc_RNA (1)...(19): siRNA sense strand
uuacugcugugaccucuau

SEQ ID NO: 1586997 - RNA, 19 nt, Homo sapiens
  misc_RNA (1)...(19): siRNA sense strand
agacgucgcucugguuugu

SEQ ID NO: 1586998 - RNA, 19 nt, Homo sapiens
  misc_RNA (1)...(19): siRNA sense strand
ucaacuugguggagaauag

SEQ ID NO: 1586999 - RNA, 19 nt, Homo sapiens
  misc_RNA (1)...(19): siRNA sense strand
gcaagugccagcugaaggu

SEQ ID NO: 1587000 - RNA, 19 nt, Homo sapiens
  misc_RNA (1)...(19): siRNA sense strand
cuuuggaucuuucuuagga

SEQ ID NO: 1587001 - RNA, 19 nt, Homo sapiens
  misc_RNA (1)...(19): siRNA sense strand
cuacgcacccaccuacuuu

SEQ ID NO: 1587002 - RNA, 19 nt, Homo sapiens
  misc_RNA (1)...(19): siRNA sense strand
gguggcagcgaucguguuu

SEQ ID NO: 1587003 - RNA, 19 nt, Homo sapiens
  misc_RNA (1)...(19): siRNA sense strand
cgaucguguuuaucaguuu

SEQ ID NO: 1587004 - RNA, 19 nt, Homo sapiens
  misc_RNA (1)...(19): siRNA sense strand
cggcuuuggaucuuucuua

SEQ ID NO: 1587005 - RNA, 19 nt, Homo sapiens
  misc_RNA (1)...(19): siRNA sense strand
ccaccaggacggagaaugu

SEQ ID NO: 1587006 - RNA, 19 nt, Homo sapiens
  misc_RNA (1)...(19): siRNA sense strand
ggaauuauuggcaucaacu

SEQ ID NO: 1587007 - RNA, 19 nt, Homo sapiens
  misc_RNA (1)...(19): siRNA sense strand
caccacagacccucuacaa

SEQ ID NO: 1587008 - RNA, 19 nt, Homo sapiens
  misc_RNA (1)...(19): siRNA sense strand
gaauuauuggcaucaacuu

SEQ ID NO: 1587009 - RNA, 19 nt, Homo sapiens
  misc_RNA (1)...(19): siRNA sense strand
ugucccagcuggccuaugg

SEQ ID NO: 1587010 - RNA, 19 nt, Homo sapiens
  misc_RNA (1)...(19): siRNA sense strand
ugcagccgcuucccaguug

SEQ ID NO: 1587011 - RNA, 19 nt, Homo sapiens
  misc_RNA (1)...(19): siRNA sense strand
gcuacgcacccaccuacuu

SEQ ID NO: 1587012 - RNA, 19 nt, Homo sapiens
  misc_RNA (1)...(19): siRNA sense strand
ggcuuuggaucuuucuuag

SEQ ID NO: 1587013 - RNA, 19 nt, Homo sapiens
  misc_RNA (1)...(19): siRNA sense strand
gaucguguuuaucaguuuu

SEQ ID NO: 1587014 - RNA, 19 nt, Homo sapiens
  misc_RNA (1)...(19): siRNA sense strand
caacuugguggagaauaga

SEQ ID NO: 1587015 - RNA, 19 nt, Homo sapiens
  misc_RNA (1)...(19): siRNA sense strand
agggaucauucucggcuuu

SEQ ID NO: 1587016 - RNA, 19 nt, Homo sapiens
  misc_RNA (1)...(19): siRNA sense strand
gaucauucucggcuuugga

SEQ ID NO: 1587017 - RNA, 19 nt, Homo sapiens
  misc_RNA (1)...(19): siRNA sense strand
agaagacgucgcucugguu

SEQ ID NO: 1587018 - RNA, 19 nt, Homo sapiens
  misc_RNA (1)...(19): siRNA sense strand
gaagaugccaguuuuacuc

SEQ ID NO: 1587019 - RNA, 19 nt, Homo sapiens
  misc_RNA (1)...(19): siRNA sense strand
cuacuacccagggaucauu

SEQ ID NO: 1587020 - RNA, 19 nt, Homo sapiens
  misc_RNA (1)...(19): siRNA sense strand
cacgggaagaugccaguuu

SEQ ID NO: 1587021 - RNA, 19 nt, Homo sapiens
  misc_RNA (1)...(19): siRNA sense strand
gagaucaccucuauaauuu

SEQ ID NO: 1587022 - RNA, 19 nt, Homo sapiens
  misc_RNA (1)...(19): siRNA sense strand
gcaagaaacucccagagaa

SEQ ID NO: 1587023 - RNA, 19 nt, Homo sapiens
  misc_RNA (1)...(19): siRNA sense strand
gaaccgagaucaccucuau

SEQ ID NO: 1587024 - RNA, 19 nt, Homo sapiens
  misc_RNA (1)...(19): siRNA sense strand
caagugaacugcgugguaa

SEQ ID NO: 1587025 - RNA, 19 nt, Homo sapiens
  misc_RNA (1)...(19): siRNA sense strand
cgagaucaccucuauaauu

SEQ ID NO: 1587026 - RNA, 19 nt, Homo sapiens
  misc_RNA (1)...(19): siRNA sense strand
ccagucagauccagccuuu

SEQ ID NO: 1587027 - RNA, 19 nt, Homo sapiens
  misc_RNA (1)...(19): siRNA sense strand
gcaagugaacugcguggua

SEQ ID NO: 1587028 - RNA, 19 nt, Homo sapiens
  misc_RNA (1)...(19): siRNA sense strand
aguaaggccuugcaaguga

SEQ ID NO: 1587029 - RNA, 19 nt, Homo sapiens
  misc_RNA (1)...(19): siRNA sense strand
gcaccuggccuaucucauc

SEQ ID NO: 1587030 - RNA, 19 nt, Homo sapiens
  misc_RNA (1)...(19): siRNA sense strand
guaaggccuugcaagugaa

SEQ ID NO: 1587031 - RNA, 19 nt, Homo sapiens
  misc_RNA (1)...(19): siRNA sense strand
caagaaacucccagagaau

SEQ ID NO: 1587032 - RNA, 19 nt, Homo sapiens
  misc_RNA (1)...(19): siRNA sense strand
cagcugagacgucuguauu

SEQ ID NO: 1587033 - RNA, 19 nt, Homo sapiens
  misc_RNA (1)...(19): siRNA sense strand
aagaaacucccagagaaua

SEQ ID NO: 1587034 - RNA, 19 nt, Homo sapiens
  misc_RNA (1)...(19): siRNA sense strand
gaucaccucuauaauuucc

SEQ ID NO: 1587035 - RNA, 19 nt, Homo sapiens
  misc_RNA (1)...(19): siRNA sense strand
ugaacugcgugguaaggaa

SEQ ID NO: 1587036 - RNA, 19 nt, Homo sapiens
  misc_RNA (1)...(19): siRNA sense strand
ucucagugcuguugguuca

SEQ ID NO: 1587037 - RNA, 19 nt, Homo sapiens
  misc_RNA (1)...(19): siRNA sense strand
agaaacucccagagaauaa

SEQ ID NO: 1587038 - RNA, 19 nt, Homo sapiens
  misc_RNA (1)...(19): siRNA sense strand
gcugagacgucuguauugg

SEQ ID NO: 1587039 - RNA, 19 nt, Homo sapiens
  misc_RNA (1)...(19): siRNA sense strand
caccuggccuaucucauca

SEQ ID NO: 1587040 - RNA, 19 nt, Homo sapiens
  misc_RNA (1)...(19): siRNA sense strand
accgagaucaccucuauaa

SEQ ID NO: 1587041 - RNA, 19 nt, Homo sapiens
  misc_RNA (1)...(19): siRNA sense strand
ucaguaaggccuugcaagu

SEQ ID NO: 1587042 - RNA, 19 nt, Homo sapiens
  misc_RNA (1)...(19): siRNA sense strand
ucagugcuguugguucaga

SEQ ID NO: 1587043 - RNA, 19 nt, Homo sapiens
  misc_RNA (1)...(19): siRNA sense strand
uaacuggcaggcccaccua

SEQ ID NO: 1587044 - RNA, 19 nt, Homo sapiens
  misc_RNA (1)...(19): siRNA sense strand
ccguauggcuggugcuaca

SEQ ID NO: 1587045 - RNA, 19 nt, Homo sapiens
  misc_RNA (1)...(19): siRNA sense strand
ccuggcaccuggccuaucu

SEQ ID NO: 1587046 - RNA, 19 nt, Homo sapiens
  misc_RNA (1)...(19): siRNA sense strand
ggcccuuccuccagucaga

SEQ ID NO: 1587047 - RNA, 19 nt, Homo sapiens
  misc_RNA (1)...(19): siRNA sense strand
agaucaaccucuucaacca

SEQ ID NO: 1587048 - RNA, 19 nt, Homo sapiens
  misc_RNA (1)...(19): siRNA sense strand
auaauuuccugcuccucaa

SEQ ID NO: 1587049 - RNA, 19 nt, Homo sapiens
  misc_RNA (1)...(19): siRNA sense strand
caggaggucucagggucuu

SEQ ID NO: 1587050 - RNA, 19 nt, Homo sapiens
  misc_RNA (1)...(19): siRNA sense strand
guugguggccuugcucuug

SEQ ID NO: 1587051 - RNA, 19 nt, Homo sapiens
  misc_RNA (1)...(19): siRNA sense strand
ccuggagggugugucagaa

SEQ ID NO: 1587052 - RNA, 19 nt, Homo sapiens
  misc_RNA (1)...(19): siRNA sense strand
caguaaggccuugcaagug

SEQ ID NO: 1587053 - RNA, 19 nt, Homo sapiens
  misc_RNA (1)...(19): siRNA sense strand
ggaacaaccuagaagcuuu

SEQ ID NO: 1587054 - RNA, 19 nt, Homo sapiens
  misc_RNA (1)...(19): siRNA sense strand
ugaaaccucuccuaagaaa

SEQ ID NO: 1587055 - RNA, 19 nt, Homo sapiens
  misc_RNA (1)...(19): siRNA sense strand
cagagacccugcagaagua

SEQ ID NO: 1587056 - RNA, 19 nt, Homo sapiens
  misc_RNA (1)...(19): siRNA sense strand
gaaauucuuugccuguaga

SEQ ID NO: 1587057 - RNA, 19 nt, Homo sapiens
  misc_RNA (1)...(19): siRNA sense strand
gaugggcgcuuguucaaug

SEQ ID NO: 1587058 - RNA, 19 nt, Homo sapiens
  misc_RNA (1)...(19): siRNA sense strand
gauuaucccucuucucaga

SEQ ID NO: 1587059 - RNA, 19 nt, Homo sapiens
  misc_RNA (1)...(19): siRNA sense strand
ccaccucacuugaagcuuu

SEQ ID NO: 1587060 - RNA, 19 nt, Homo sapiens
  misc_RNA (1)...(19): siRNA sense strand
ggaaauucuuugccuguag

SEQ ID NO: 1587061 - RNA, 19 nt, Homo sapiens
  misc_RNA (1)...(19): siRNA sense strand
ggacaaauacagguucuug

SEQ ID NO: 1587062 - RNA, 19 nt, Homo sapiens
  misc_RNA (1)...(19): siRNA sense strand
uuugaaaccucuccuaaga

SEQ ID NO: 1587063 - RNA, 19 nt, Homo sapiens
  misc_RNA (1)...(19): siRNA sense strand
caaacuggaugccaaggau

SEQ ID NO: 1587064 - RNA, 19 nt, Homo sapiens
  misc_RNA (1)...(19): siRNA sense strand
gaacaaccuagaagcuuug

SEQ ID NO: 1587065 - RNA, 19 nt, Homo sapiens
  misc_RNA (1)...(19): siRNA sense strand
ugauggcccucacguauga

SEQ ID NO: 1587066 - RNA, 19 nt, Homo sapiens
  misc_RNA (1)...(19): siRNA sense strand
caaauugccuucccaacac

SEQ ID NO: 1587067 - RNA, 19 nt, Homo sapiens
  misc_RNA (1)...(19): siRNA sense strand
gaggacaucaugaagcaaa

SEQ ID NO: 1587068 - RNA, 19 nt, Homo sapiens
  misc_RNA (1)...(19): siRNA sense strand
ggaaaugugacagcugaaa

SEQ ID NO: 1587069 - RNA, 19 nt, Homo sapiens
  misc_RNA (1)...(19): siRNA sense strand
gaaguggcucuacggguuu

SEQ ID NO: 1587070 - RNA, 19 nt, Homo sapiens
  misc_RNA (1)...(19): siRNA sense strand
gaccuugaguucauuagca

SEQ ID NO: 1587071 - RNA, 19 nt, Homo sapiens
  misc_RNA (1)...(19): siRNA sense strand
ccaagcggcauucaaauuc

SEQ ID NO: 1587072 - RNA, 19 nt, Homo sapiens
  misc_RNA (1)...(19): siRNA sense strand
uauccaagcggcauucaaa

SEQ ID NO: 1587073 - RNA, 19 nt, Homo sapiens
  misc_RNA (1)...(19): siRNA sense strand
ccaagccucugcaagucaa

SEQ ID NO: 1587074 - RNA, 19 nt, Homo sapiens
  misc_RNA (1)...(19): siRNA sense strand
ccucagagacccugcagaa

SEQ ID NO: 1587075 - RNA, 19 nt, Homo sapiens
  misc_RNA (1)...(19): siRNA sense strand
aguggaagcugaaguccuu

SEQ ID NO: 1587076 - RNA, 19 nt, Homo sapiens
  misc_RNA (1)...(19): siRNA sense strand
gcuacugcaugcugaagug

SEQ ID NO: 1587077 - RNA, 19 nt, Homo sapiens
  misc_RNA (1)...(19): siRNA sense strand
ccgauuaucccucuucuca

SEQ ID NO: 1587078 - RNA, 19 nt, Homo sapiens
  misc_RNA (1)...(19): siRNA sense strand
ccagggcauucucuaugaa

SEQ ID NO: 1587079 - RNA, 19 nt, Homo sapiens
  misc_RNA (1)...(19): siRNA sense strand
ugacaguucugagucugaa

SEQ ID NO: 1587080 - RNA, 19 nt, Homo sapiens
  misc_RNA (1)...(19): siRNA sense strand
uuucugccauggacaaauu

SEQ ID NO: 1587081 - RNA, 19 nt, Homo sapiens
  misc_RNA (1)...(19): siRNA sense strand
ucagagacccugcagaagu

SEQ ID NO: 1587082 - RNA, 19 nt, Homo sapiens
  misc_RNA (1)...(19): siRNA sense strand
caaccagggcauucucuau

SEQ ID NO: 1587083 - RNA, 19 nt, Homo sapiens
  misc_RNA (1)...(19): siRNA sense strand
acacugaggacaucaugaa

SEQ ID NO: 1587084 - RNA, 19 nt, Homo sapiens
  misc_RNA (1)...(19): siRNA sense strand
caagcggcauucaaauucu

SEQ ID NO: 1587085 - RNA, 19 nt, Homo sapiens
  misc_RNA (1)...(19): siRNA sense strand
aaaccucuccuaagaaagu

SEQ ID NO: 1587086 - RNA, 19 nt, Homo sapiens
  misc_RNA (1)...(19): siRNA sense strand
acaaauugccuucccaaca

SEQ ID NO: 1587087 - RNA, 19 nt, Homo sapiens
  misc_RNA (1)...(19): siRNA sense strand
cgucaccucuccccgauua

SEQ ID NO: 1587088 - RNA, 19 nt, Homo sapiens
  misc_RNA (1)...(19): siRNA sense strand
uggaaauucuuugccugua

SEQ ID NO: 1587089 - RNA, 19 nt, Homo sapiens
  misc_RNA (1)...(19): siRNA sense strand
ugaguauguucauggaaau

SEQ ID NO: 1587090 - RNA, 19 nt, Homo sapiens
  misc_RNA (1)...(19): siRNA sense strand
cugcauggguuucgguguu

SEQ ID NO: 1587091 - RNA, 19 nt, Homo sapiens
  misc_RNA (1)...(19): siRNA sense strand
gcaaaaguucucacucaaa

SEQ ID NO: 1587092 - RNA, 19 nt, Homo sapiens
  misc_RNA (1)...(19): siRNA sense strand
cagggacagugcugacaga

SEQ ID NO: 1587093 - RNA, 19 nt, Homo sapiens
  misc_RNA (1)...(19): siRNA sense strand
guguucaccaggacaaaua

SEQ ID NO: 1587094 - RNA, 19 nt, Homo sapiens
  misc_RNA (1)...(19): siRNA sense strand
caagucaacaaguggaaga

SEQ ID NO: 1587095 - RNA, 19 nt, Homo sapiens
  misc_RNA (1)...(19): siRNA sense strand
caacacugaggacaucaug

SEQ ID NO: 1587096 - RNA, 19 nt, Homo sapiens
  misc_RNA (1)...(19): siRNA sense strand
acagaaguuuguugauaag

SEQ ID NO: 1587097 - RNA, 19 nt, Homo sapiens
  misc_RNA (1)...(19): siRNA sense strand
acaaguggaagaagcugua

SEQ ID NO: 1587098 - RNA, 19 nt, Homo sapiens
  misc_RNA (1)...(19): siRNA sense strand
gcugaggaacaaccuagaa

SEQ ID NO: 1587099 - RNA, 19 nt, Homo sapiens
  misc_RNA (1)...(19): siRNA sense strand
ucaaagagagggcugaacu

SEQ ID NO: 1587100 - RNA, 19 nt, Homo sapiens
  misc_RNA (1)...(19): siRNA sense strand
gaaaugugacagcugaaaa

SEQ ID NO: 1587101 - RNA, 19 nt, Homo sapiens
  misc_RNA (1)...(19): siRNA sense strand
caaaaguucucacucaaac

SEQ ID NO: 1587102 - RNA, 19 nt, Homo sapiens
  misc_RNA (1)...(19): siRNA sense strand
ccucagaagaccagcugua

SEQ ID NO: 1587103 - RNA, 19 nt, Homo sapiens
  misc_RNA (1)...(19): siRNA sense strand
aagcuuugcugcaggaucu

SEQ ID NO: 1587104 - RNA, 19 nt, Homo sapiens
  misc_RNA (1)...(19): siRNA sense strand
ucccagaccuuugucaauc

SEQ ID NO: 1587105 - RNA, 19 nt, Homo sapiens
  misc_RNA (1)...(19): siRNA sense strand
cugaggacaucaugaagca

SEQ ID NO: 1587106 - RNA, 19 nt, Homo sapiens
  misc_RNA (1)...(19): siRNA sense strand
guauguucauggaaaugug

SEQ ID NO: 1587107 - RNA, 19 nt, Homo sapiens
  misc_RNA (1)...(19): siRNA sense strand
ccaugagaaugaguauguu

SEQ ID NO: 1587108 - RNA, 19 nt, Homo sapiens
  misc_RNA (1)...(19): siRNA sense strand
accagggcauucucuauga

SEQ ID NO: 1587109 - RNA, 19 nt, Homo sapiens
  misc_RNA (1)...(19): siRNA sense strand
auacagguucuugguguua

SEQ ID NO: 1587110 - RNA, 19 nt, Homo sapiens
  misc_RNA (1)...(19): siRNA sense strand
caccucacuugaagcuuug

SEQ ID NO: 1587111 - RNA, 19 nt, Homo sapiens
  misc_RNA (1)...(19): siRNA sense strand
cuucucagauggugacagu

SEQ ID NO: 1587112 - RNA, 19 nt, Homo sapiens
  misc_RNA (1)...(19): siRNA sense strand
aagcaaaaguucucacuca

SEQ ID NO: 1587113 - RNA, 19 nt, Homo sapiens
  misc_RNA (1)...(19): siRNA sense strand
ccucagaagaccaggaaga

SEQ ID NO: 1587114 - RNA, 19 nt, Homo sapiens
  misc_RNA (1)...(19): siRNA sense strand
guucugagucugaagauac

SEQ ID NO: 1587115 - RNA, 19 nt, Homo sapiens
  misc_RNA (1)...(19): siRNA sense strand
gauggugacaguucugagu

SEQ ID NO: 1587116 - RNA, 19 nt, Homo sapiens
  misc_RNA (1)...(19): siRNA sense strand
ggacaaccagggcauucuc

SEQ ID NO: 1587117 - RNA, 19 nt, Homo sapiens
  misc_RNA (1)...(19): siRNA sense strand
uccaagcggcauucaaauu

SEQ ID NO: 1587118 - RNA, 19 nt, Homo sapiens
  misc_RNA (1)...(19): siRNA sense strand
aaaagcagcccucagaaga

SEQ ID NO: 1587119 - RNA, 19 nt, Homo sapiens
  misc_RNA (1)...(19): siRNA sense strand
cugcgugugucuccauaug

SEQ ID NO: 1587120 - RNA, 19 nt, Homo sapiens
  misc_RNA (1)...(19): siRNA sense strand
gaggaacaaccuagaagcu

SEQ ID NO: 1587121 - RNA, 19 nt, Homo sapiens
  misc_RNA (1)...(19): siRNA sense strand
ccuacgccaugcugaggaa

SEQ ID NO: 1587122 - RNA, 19 nt, Homo sapiens
  misc_RNA (1)...(19): siRNA sense strand
uggcuucgccuuccgcuau

SEQ ID NO: 1587123 - RNA, 19 nt, Homo sapiens
  misc_RNA (1)...(19): siRNA sense strand
acaaauacagguucuuggu

SEQ ID NO: 1587124 - RNA, 19 nt, Homo sapiens
  misc_RNA (1)...(19): siRNA sense strand
ucucagauggugacaguuc

SEQ ID NO: 1587125 - RNA, 19 nt, Homo sapiens
  misc_RNA (1)...(19): siRNA sense strand
aauacagguucuugguguu

SEQ ID NO: 1587126 - RNA, 19 nt, Homo sapiens
  misc_RNA (1)...(19): siRNA sense strand
gacaguggaagcugaaguc

SEQ ID NO: 1587127 - RNA, 19 nt, Homo sapiens
  misc_RNA (1)...(19): siRNA sense strand
uccaugagaaugaguaugu

SEQ ID NO: 1587128 - RNA, 19 nt, Homo sapiens
  misc_RNA (1)...(19): siRNA sense strand
caaagagagggcugaacuc

SEQ ID NO: 1587129 - RNA, 19 nt, Homo sapiens
  misc_RNA (1)...(19): siRNA sense strand
caggacaaauacagguucu

SEQ ID NO: 1587130 - RNA, 19 nt, Homo sapiens
  misc_RNA (1)...(19): siRNA sense strand
ccgccaagccucugcaagu

SEQ ID NO: 1587131 - RNA, 19 nt, Homo sapiens
  misc_RNA (1)...(19): siRNA sense strand
gcucaaagagagggcugaa

SEQ ID NO: 1587132 - RNA, 19 nt, Homo sapiens
  misc_RNA (1)...(19): siRNA sense strand
gaugggaccuggccaguga

SEQ ID NO: 1587133 - RNA, 19 nt, Homo sapiens
  misc_RNA (1)...(19): siRNA sense strand
gaggaggacuucuacuaca

SEQ ID NO: 1587134 - RNA, 19 nt, Homo sapiens
  misc_RNA (1)...(19): siRNA sense strand
gcagcccacuuucuguuug

SEQ ID NO: 1587135 - RNA, 19 nt, Homo sapiens
  misc_RNA (1)...(19): siRNA sense strand
gugaggaggacuucuacua

SEQ ID NO: 1587136 - RNA, 19 nt, Homo sapiens
  misc_RNA (1)...(19): siRNA sense strand
caccagcccucuccuucug

SEQ ID NO: 1587137 - RNA, 19 nt, Homo sapiens
  misc_RNA (1)...(19): siRNA sense strand
cgucggcgaugcagagaca

SEQ ID NO: 1587138 - RNA, 19 nt, Homo sapiens
  misc_RNA (1)...(19): siRNA sense strand
agaagugccggaaggugua

SEQ ID NO: 1587139 - RNA, 19 nt, Homo sapiens
  misc_RNA (1)...(19): siRNA sense strand
ggaggacuucuacuacaca

SEQ ID NO: 1587140 - RNA, 19 nt, Homo sapiens
  misc_RNA (1)...(19): siRNA sense strand
cgaggcagcccacuuucug

SEQ ID NO: 1587141 - RNA, 19 nt, Homo sapiens
  misc_RNA (1)...(19): siRNA sense strand
ggcagcccacuuucuguuu

SEQ ID NO: 1587142 - RNA, 19 nt, Homo sapiens
  misc_RNA (1)...(19): siRNA sense strand
gggagcccacccugagaaa

SEQ ID NO: 1587143 - RNA, 19 nt, Homo sapiens
  misc_RNA (1)...(19): siRNA sense strand
ggcagagccugagcagagu

SEQ ID NO: 1587144 - RNA, 19 nt, Homo sapiens
  misc_RNA (1)...(19): siRNA sense strand
ugaggaggacuucuacuac

SEQ ID NO: 1587145 - RNA, 19 nt, Homo sapiens
  misc_RNA (1)...(19): siRNA sense strand
cuacacagagcuggauguu

SEQ ID NO: 1587146 - RNA, 19 nt, Homo sapiens
  misc_RNA (1)...(19): siRNA sense strand
gaagugccggaagguguau

SEQ ID NO: 1587147 - RNA, 19 nt, Homo sapiens
  misc_RNA (1)...(19): siRNA sense strand
gcccaguucuugccuguug

SEQ ID NO: 1587148 - RNA, 19 nt, Homo sapiens
  misc_RNA (1)...(19): siRNA sense strand
gcuccuggcagccguugua

SEQ ID NO: 1587149 - RNA, 19 nt, Homo sapiens
  misc_RNA (1)...(19): siRNA sense strand
gcuccugccucacgacaac

SEQ ID NO: 1587150 - RNA, 19 nt, Homo sapiens
  misc_RNA (1)...(19): siRNA sense strand
gaaaggagaucggguuguu

SEQ ID NO: 1587151 - RNA, 19 nt, Homo sapiens
  misc_RNA (1)...(19): siRNA sense strand
gagaucggguuguugguua

SEQ ID NO: 1587152 - RNA, 19 nt, Homo sapiens
  misc_RNA (1)...(19): siRNA sense strand
ggaaaucuauaacauugug

SEQ ID NO: 1587153 - RNA, 19 nt, Homo sapiens
  misc_RNA (1)...(19): siRNA sense strand
caaagagaaugacagaguu

SEQ ID NO: 1587154 - RNA, 19 nt, Homo sapiens
  misc_RNA (1)...(19): siRNA sense strand
gcaagaaguggcuuuguuu

SEQ ID NO: 1587155 - RNA, 19 nt, Homo sapiens
  misc_RNA (1)...(19): siRNA sense strand
ggagaguuaugaugacuug

SEQ ID NO: 1587156 - RNA, 19 nt, Homo sapiens
  misc_RNA (1)...(19): siRNA sense strand
gcacaaagagaaugacaga

SEQ ID NO: 1587157 - RNA, 19 nt, Homo sapiens
  misc_RNA (1)...(19): siRNA sense strand
gaaggcguauuucuccaaa

SEQ ID NO: 1587158 - RNA, 19 nt, Homo sapiens
  misc_RNA (1)...(19): siRNA sense strand
gagcggccauggucuugua

SEQ ID NO: 1587159 - RNA, 19 nt, Homo sapiens
  misc_RNA (1)...(19): siRNA sense strand
gaaaaugggugugaagaaa

SEQ ID NO: 1587160 - RNA, 19 nt, Homo sapiens
  misc_RNA (1)...(19): siRNA sense strand
gcaaagagcacaaccacau

SEQ ID NO: 1587161 - RNA, 19 nt, Homo sapiens
  misc_RNA (1)...(19): siRNA sense strand
cgaaaggaaucgcagaugu

SEQ ID NO: 1587162 - RNA, 19 nt, Homo sapiens
  misc_RNA (1)...(19): siRNA sense strand
gccuggcgcuggagaguua

SEQ ID NO: 1587163 - RNA, 19 nt, Homo sapiens
  misc_RNA (1)...(19): siRNA sense strand
ggcaagaaguggcuuuguu

SEQ ID NO: 1587164 - RNA, 19 nt, Homo sapiens
  misc_RNA (1)...(19): siRNA sense strand
gcaaagaggaaauugugaa

SEQ ID NO: 1587165 - RNA, 19 nt, Homo sapiens
  misc_RNA (1)...(19): siRNA sense strand
uaugaugacuuguaccauu

SEQ ID NO: 1587166 - RNA, 19 nt, Homo sapiens
  misc_RNA (1)...(19): siRNA sense strand
gcucggaaaucuauaacau

SEQ ID NO: 1587167 - RNA, 19 nt, Homo sapiens
  misc_RNA (1)...(19): siRNA sense strand
ucggaaaucuauaacauug

SEQ ID NO: 1587168 - RNA, 19 nt, Homo sapiens
  misc_RNA (1)...(19): siRNA sense strand
gcagucggcucaacuaugc

SEQ ID NO: 1587169 - RNA, 19 nt, Homo sapiens
  misc_RNA (1)...(19): siRNA sense strand
gagagaacauagaccuuuc

SEQ ID NO: 1587170 - RNA, 19 nt, Homo sapiens
  misc_RNA (1)...(19): siRNA sense strand
gaagaaagugguggugauu

SEQ ID NO: 1587171 - RNA, 19 nt, Homo sapiens
  misc_RNA (1)...(19): siRNA sense strand
ugacagaguugcccuuuac

SEQ ID NO: 1587172 - RNA, 19 nt, Homo sapiens
  misc_RNA (1)...(19): siRNA sense strand
gaaguugccgucaaacaga

SEQ ID NO: 1587173 - RNA, 19 nt, Homo sapiens
  misc_RNA (1)...(19): siRNA sense strand
uggaggcuguugucuauaa

SEQ ID NO: 1587174 - RNA, 19 nt, Homo sapiens
  misc_RNA (1)...(19): siRNA sense strand
gacaucaucuccugcuuca

SEQ ID NO: 1587175 - RNA, 19 nt, Homo sapiens
  misc_RNA (1)...(19): siRNA sense strand
gagcacaaccacauggaaa

SEQ ID NO: 1587176 - RNA, 19 nt, Homo sapiens
  misc_RNA (1)...(19): siRNA sense strand
aggcaucacuguccuggua

SEQ ID NO: 1587177 - RNA, 19 nt, Homo sapiens
  misc_RNA (1)...(19): siRNA sense strand
ugucagugcuggaagagaa

SEQ ID NO: 1587178 - RNA, 19 nt, Homo sapiens
  misc_RNA (1)...(19): siRNA sense strand
gaaaggaaucgcagauguc

SEQ ID NO: 1587179 - RNA, 19 nt, Homo sapiens
  misc_RNA (1)...(19): siRNA sense strand
ccgagacccuggaucugua

SEQ ID NO: 1587180 - RNA, 19 nt, Homo sapiens
  misc_RNA (1)...(19): siRNA sense strand
gcagcucggaaaucuauaa

SEQ ID NO: 1587181 - RNA, 19 nt, Homo sapiens
  misc_RNA (1)...(19): siRNA sense strand
ggacacaucgaaaggaauc

SEQ ID NO: 1587182 - RNA, 19 nt, Homo sapiens
  misc_RNA (1)...(19): siRNA sense strand
ccaagggcaucccguauac

SEQ ID NO: 1587183 - RNA, 19 nt, Homo sapiens
  misc_RNA (1)...(19): siRNA sense strand
caucaucuccugcuucaug

SEQ ID NO: 1587184 - RNA, 19 nt, Homo sapiens
  misc_RNA (1)...(19): siRNA sense strand
uguggaggcuguugucuau

SEQ ID NO: 1587185 - RNA, 19 nt, Homo sapiens
  misc_RNA (1)...(19): siRNA sense strand
ggacuucggugugaauggu

SEQ ID NO: 1587186 - RNA, 19 nt, Homo sapiens
  misc_RNA (1)...(19): siRNA sense strand
ugugggagccugacaguaa

SEQ ID NO: 1587187 - RNA, 19 nt, Homo sapiens
  misc_RNA (1)...(19): siRNA sense strand
gaugagaacggcaacaagu

SEQ ID NO: 1587188 - RNA, 19 nt, Homo sapiens
  misc_RNA (1)...(19): siRNA sense strand
ugaagaaagugguggugau

SEQ ID NO: 1587189 - RNA, 19 nt, Homo sapiens
  misc_RNA (1)...(19): siRNA sense strand
uugaagagcugaggcaaga

SEQ ID NO: 1587190 - RNA, 19 nt, Homo sapiens
  misc_RNA (1)...(19): siRNA sense strand
gaaggugacuuuugaagag

SEQ ID NO: 1587191 - RNA, 19 nt, Homo sapiens
  misc_RNA (1)...(19): siRNA sense strand
cagaguugcccuuuacauu

SEQ ID NO: 1587192 - RNA, 19 nt, Homo sapiens
  misc_RNA (1)...(19): siRNA sense strand
guaagaagaacacgcagau

SEQ ID NO: 1587193 - RNA, 19 nt, Homo sapiens
  misc_RNA (1)...(19): siRNA sense strand
gcccagagcuacgaguaug

SEQ ID NO: 1587194 - RNA, 19 nt, Homo sapiens
  misc_RNA (1)...(19): siRNA sense strand
ggaaggcaaagaggaaauu

SEQ ID NO: 1587195 - RNA, 19 nt, Homo sapiens
  misc_RNA (1)...(19): siRNA sense strand
guggacacaucgaaaggaa

SEQ ID NO: 1587196 - RNA, 19 nt, Homo sapiens
  misc_RNA (1)...(19): siRNA sense strand
ucuauaacauuguggaauc

SEQ ID NO: 1587197 - RNA, 19 nt, Homo sapiens
  misc_RNA (1)...(19): siRNA sense strand
uuaaaggccuaccagacuu

SEQ ID NO: 1587198 - RNA, 19 nt, Homo sapiens
  misc_RNA (1)...(19): siRNA sense strand
caaagcucaucuucucugu

SEQ ID NO: 1587199 - RNA, 19 nt, Homo sapiens
  misc_RNA (1)...(19): siRNA sense strand
aaacagaucaucgcuggaa

SEQ ID NO: 1587200 - RNA, 19 nt, Homo sapiens
  misc_RNA (1)...(19): siRNA sense strand
gagcugguguguacuaagc

SEQ ID NO: 1587201 - RNA, 19 nt, Homo sapiens
  misc_RNA (1)...(19): siRNA sense strand
ucucacguguguaugauga

SEQ ID NO: 1587202 - RNA, 19 nt, Homo sapiens
  misc_RNA (1)...(19): siRNA sense strand
ggaaguugccgucaaacag

SEQ ID NO: 1587203 - RNA, 19 nt, Homo sapiens
  misc_RNA (1)...(19): siRNA sense strand
cagccugacuugguuaaga

SEQ ID NO: 1587204 - RNA, 19 nt, Homo sapiens
  misc_RNA (1)...(19): siRNA sense strand
ucggguuguugguuauuua

SEQ ID NO: 1587205 - RNA, 19 nt, Homo sapiens
  misc_RNA (1)...(19): siRNA sense strand
caagaaguggcuuuguuug

SEQ ID NO: 1587206 - RNA, 19 nt, Homo sapiens
  misc_RNA (1)...(19): siRNA sense strand
aagaggaaauugugaaggu

SEQ ID NO: 1587207 - RNA, 19 nt, Homo sapiens
  misc_RNA (1)...(19): siRNA sense strand
uuucaaagauuccaaacag

SEQ ID NO: 1587208 - RNA, 19 nt, Homo sapiens
  misc_RNA (1)...(19): siRNA sense strand
cuaccagacuugaagaaag

SEQ ID NO: 1587209 - RNA, 19 nt, Homo sapiens
  misc_RNA (1)...(19): siRNA sense strand
ggaggcuguugucuauaau

SEQ ID NO: 1587210 - RNA, 19 nt, Homo sapiens
  misc_RNA (1)...(19): siRNA sense strand
acaaagagaaugacagagu

SEQ ID NO: 1587211 - RNA, 19 nt, Homo sapiens
  misc_RNA (1)...(19): siRNA sense strand
gaagagcugaggcaagaag

SEQ ID NO: 1587212 - RNA, 19 nt, Homo sapiens
  misc_RNA (1)...(19): siRNA sense strand
agaguugcccuuuacauug

SEQ ID NO: 1587213 - RNA, 19 nt, Homo sapiens
  misc_RNA (1)...(19): siRNA sense strand
ggaaggcguauuucuccaa

SEQ ID NO: 1587214 - RNA, 19 nt, Homo sapiens
  misc_RNA (1)...(19): siRNA sense strand
gcgagcugguguguacuaa

SEQ ID NO: 1587215 - RNA, 19 nt, Homo sapiens
  misc_RNA (1)...(19): siRNA sense strand
caaagauuccaaacagugu

SEQ ID NO: 1587216 - RNA, 19 nt, Homo sapiens
  misc_RNA (1)...(19): siRNA sense strand
ggaccgguuuucucaaauu

SEQ ID NO: 1587217 - RNA, 19 nt, Homo sapiens
  misc_RNA (1)...(19): siRNA sense strand
agaaguggcuuuguuugca

SEQ ID NO: 1587218 - RNA, 19 nt, Homo sapiens
  misc_RNA (1)...(19): siRNA sense strand
gaguugcccuuuacauugc

SEQ ID NO: 1587219 - RNA, 19 nt, Homo sapiens
  misc_RNA (1)...(19): siRNA sense strand
gaguuaugaugacuuguac

SEQ ID NO: 1587220 - RNA, 19 nt, Homo sapiens
  misc_RNA (1)...(19): siRNA sense strand
agaguuaugaugacuugua

SEQ ID NO: 1587221 - RNA, 19 nt, Homo sapiens
  misc_RNA (1)...(19): siRNA sense strand
guuauuuacccaacaguga

SEQ ID NO: 1587222 - RNA, 19 nt, Homo sapiens
  misc_RNA (1)...(19): siRNA sense strand
ggagaucggguuguugguu

SEQ ID NO: 1587223 - RNA, 19 nt, Homo sapiens
  misc_RNA (1)...(19): siRNA sense strand
gaaggcaaagaggaaauug

SEQ ID NO: 1587224 - RNA, 19 nt, Homo sapiens
  misc_RNA (1)...(19): siRNA sense strand
gagccugacaguaagaaga

SEQ ID NO: 1587225 - RNA, 19 nt, Homo sapiens
  misc_RNA (1)...(19): siRNA sense strand
agagagaacauagaccuuu

SEQ ID NO: 1587226 - RNA, 19 nt, Homo sapiens
  misc_RNA (1)...(19): siRNA sense strand
caaagagcacaaccacaug

SEQ ID NO: 1587227 - RNA, 19 nt, Homo sapiens
  misc_RNA (1)...(19): siRNA sense strand
acaguguguuucuggauga

SEQ ID NO: 1587228 - RNA, 19 nt, Homo sapiens
  misc_RNA (1)...(19): siRNA sense strand
aguggaaguugccgucaaa

SEQ ID NO: 1587229 - RNA, 19 nt, Homo sapiens
  misc_RNA (1)...(19): siRNA sense strand
ggcgacuacugcagaauca

SEQ ID NO: 1587230 - RNA, 19 nt, Homo sapiens
  misc_RNA (1)...(19): siRNA sense strand
aagugguggugauuccuua

SEQ ID NO: 1587231 - RNA, 19 nt, Homo sapiens
  misc_RNA (1)...(19): siRNA sense strand
gagcuacgaguaugucuac

SEQ ID NO: 1587232 - RNA, 19 nt, Homo sapiens
  misc_RNA (1)...(19): siRNA sense strand
agccaaagcucaucuucuc

SEQ ID NO: 1587233 - RNA, 19 nt, Homo sapiens
  misc_RNA (1)...(19): siRNA sense strand
ccacacacuucuggaacga

SEQ ID NO: 1587234 - RNA, 19 nt, Homo sapiens
  misc_RNA (1)...(19): siRNA sense strand
gucuacaggugcaucaaga

SEQ ID NO: 1587235 - RNA, 19 nt, Homo sapiens
  misc_RNA (1)...(19): siRNA sense strand
gugacauccuccugugcua

SEQ ID NO: 1587236 - RNA, 19 nt, Homo sapiens
  misc_RNA (1)...(19): siRNA sense strand
cggcucaacuaugcagaaa

SEQ ID NO: 1587237 - RNA, 19 nt, Homo sapiens
  misc_RNA (1)...(19): siRNA sense strand
guuaaaggccuaccagacu

SEQ ID NO: 1587238 - RNA, 19 nt, Homo sapiens
  misc_RNA (1)...(19): siRNA sense strand
caaagaggaaauugugaag

SEQ ID NO: 1587239 - RNA, 19 nt, Homo sapiens
  misc_RNA (1)...(19): siRNA sense strand
ggaagagaaggccaugaag

SEQ ID NO: 1587240 - RNA, 19 nt, Homo sapiens
  misc_RNA (1)...(19): siRNA sense strand
gagaacauagaccuuucaa

SEQ ID NO: 1587241 - RNA, 19 nt, Homo sapiens
  misc_RNA (1)...(19): siRNA sense strand
uauguguccuccagagaga

SEQ ID NO: 1587242 - RNA, 19 nt, Homo sapiens
  misc_RNA (1)...(19): siRNA sense strand
caguggaauugucuucuca

SEQ ID NO: 1587243 - RNA, 19 nt, Homo sapiens
  misc_RNA (1)...(19): siRNA sense strand
uuucucaaauucagccaaa

SEQ ID NO: 1587244 - RNA, 19 nt, Homo sapiens
  misc_RNA (1)...(19): siRNA sense strand
cggcagcucggaaaucuau

SEQ ID NO: 1587245 - RNA, 19 nt, Homo sapiens
  misc_RNA (1)...(19): siRNA sense strand
uggaagagaaggccaugaa

SEQ ID NO: 1587246 - RNA, 19 nt, Homo sapiens
  misc_RNA (1)...(19): siRNA sense strand
gcaacaugaccagcaguga

SEQ ID NO: 1587247 - RNA, 19 nt, Homo sapiens
  misc_RNA (1)...(19): siRNA sense strand
ggaaaaugggugugaagaa

SEQ ID NO: 1587248 - RNA, 19 nt, Homo sapiens
  misc_RNA (1)...(19): siRNA sense strand
gguggugauuccuuaugug

SEQ ID NO: 1587249 - RNA, 19 nt, Homo sapiens
  misc_RNA (1)...(19): siRNA sense strand
caacggcaagaaaguggaa

SEQ ID NO: 1587250 - RNA, 19 nt, Homo sapiens
  misc_RNA (1)...(19): siRNA sense strand
ggaaggagcuggagaaaua

SEQ ID NO: 1587251 - RNA, 19 nt, Homo sapiens
  misc_RNA (1)...(19): siRNA sense strand
ggaagcagcugguccucaa

SEQ ID NO: 1587252 - RNA, 19 nt, Homo sapiens
  misc_RNA (1)...(19): siRNA sense strand
gggcugagcugauggacaa

SEQ ID NO: 1587253 - RNA, 19 nt, Homo sapiens
  misc_RNA (1)...(19): siRNA sense strand
agaaauaccugcacacagu

SEQ ID NO: 1587254 - RNA, 19 nt, Homo sapiens
  misc_RNA (1)...(19): siRNA sense strand
gaucugagcacucugaaug

SEQ ID NO: 1587255 - RNA, 19 nt, Homo sapiens
  misc_RNA (1)...(19): siRNA sense strand
gaagugggcuaucaaaucc

SEQ ID NO: 1587256 - RNA, 19 nt, Homo sapiens
  misc_RNA (1)...(19): siRNA sense strand
ucaagaaggucaagauugg

SEQ ID NO: 1587257 - RNA, 19 nt, Homo sapiens
  misc_RNA (1)...(19): siRNA sense strand
uccaggcgauccagaauua

SEQ ID NO: 1587258 - RNA, 19 nt, Homo sapiens
  misc_RNA (1)...(19): siRNA sense strand
gaagacccuacacuacuua

SEQ ID NO: 1587259 - RNA, 19 nt, Homo sapiens
  misc_RNA (1)...(19): siRNA sense strand
gcugagggcugacauaagg

SEQ ID NO: 1587260 - RNA, 19 nt, Homo sapiens
  misc_RNA (1)...(19): siRNA sense strand
gaaugaagauccugaaacc

SEQ ID NO: 1587261 - RNA, 19 nt, Homo sapiens
  misc_RNA (1)...(19): siRNA sense strand
ugaaugaagugggcuauca

SEQ ID NO: 1587262 - RNA, 19 nt, Homo sapiens
  misc_RNA (1)...(19): siRNA sense strand
ugaagacccuacacuacuu

SEQ ID NO: 1587263 - RNA, 19 nt, Homo sapiens
  misc_RNA (1)...(19): siRNA sense strand
gaccucaucuuugacuuug

SEQ ID NO: 1587264 - RNA, 19 nt, Homo sapiens
  misc_RNA (1)...(19): siRNA sense strand
aaaccuacuucucaggaaa

SEQ ID NO: 1587265 - RNA, 19 nt, Homo sapiens
  misc_RNA (1)...(19): siRNA sense strand
cuacacuacuuaaccaaug

SEQ ID NO: 1587266 - RNA, 19 nt, Homo sapiens
  misc_RNA (1)...(19): siRNA sense strand
aaacuacuuucaccacguu

SEQ ID NO: 1587267 - RNA, 19 nt, Homo sapiens
  misc_RNA (1)...(19): siRNA sense strand
gauccagaauuacaugaag

SEQ ID NO: 1587268 - RNA, 19 nt, Homo sapiens
  misc_RNA (1)...(19): siRNA sense strand
gagaaugaagauccugaaa

SEQ ID NO: 1587269 - RNA, 19 nt, Homo sapiens
  misc_RNA (1)...(19): siRNA sense strand
gaaauaugccagggacaug

SEQ ID NO: 1587270 - RNA, 19 nt, Homo sapiens
  misc_RNA (1)...(19): siRNA sense strand
ccagggacaugagaaugaa

SEQ ID NO: 1587271 - RNA, 19 nt, Homo sapiens
  misc_RNA (1)...(19): siRNA sense strand
uggccaaggugcacccuaa

SEQ ID NO: 1587272 - RNA, 19 nt, Homo sapiens
  misc_RNA (1)...(19): siRNA sense strand
cagaggaggaggacaaaga

SEQ ID NO: 1587273 - RNA, 19 nt, Homo sapiens
  misc_RNA (1)...(19): siRNA sense strand
ugaagugggcuaucaaauc

SEQ ID NO: 1587274 - RNA, 19 nt, Homo sapiens
  misc_RNA (1)...(19): siRNA sense strand
uaaggaaggagcuggagaa

SEQ ID NO: 1587275 - RNA, 19 nt, Homo sapiens
  misc_RNA (1)...(19): siRNA sense strand
gcucagaggaggaggacaa

SEQ ID NO: 1587276 - RNA, 19 nt, Homo sapiens
  misc_RNA (1)...(19): siRNA sense strand
gaaugaagugggcuaucaa

SEQ ID NO: 1587277 - RNA, 19 nt, Homo sapiens
  misc_RNA (1)...(19): siRNA sense strand
uggacaagccauugacuuu

SEQ ID NO: 1587278 - RNA, 19 nt, Homo sapiens
  misc_RNA (1)...(19): siRNA sense strand
gggcugacauaaggaagga

SEQ ID NO: 1587279 - RNA, 19 nt, Homo sapiens
  misc_RNA (1)...(19): siRNA sense strand
gccagggacaugagaauga

SEQ ID NO: 1587280 - RNA, 19 nt, Homo sapiens
  misc_RNA (1)...(19): siRNA sense strand
caagaaauaccugcacaca

SEQ ID NO: 1587281 - RNA, 19 nt, Homo sapiens
  misc_RNA (1)...(19): siRNA sense strand
uuacugcaauggccgcuau

SEQ ID NO: 1587282 - RNA, 19 nt, Homo sapiens
  misc_RNA (1)...(19): siRNA sense strand
ugagcacucugaaugaagu

SEQ ID NO: 1587283 - RNA, 19 nt, Homo sapiens
  misc_RNA (1)...(19): siRNA sense strand
ggaugcacguggccaaggu

SEQ ID NO: 1587284 - RNA, 19 nt, Homo sapiens
  misc_RNA (1)...(19): siRNA sense strand
gucaagaaggucaagauug

SEQ ID NO: 1587285 - RNA, 19 nt, Homo sapiens
  misc_RNA (1)...(19): siRNA sense strand
gaaggagcuggagaaauau

SEQ ID NO: 1587286 - RNA, 19 nt, Homo sapiens
  misc_RNA (1)...(19): siRNA sense strand
acaugaagacccuacacua

SEQ ID NO: 1587287 - RNA, 19 nt, Homo sapiens
  misc_RNA (1)...(19): siRNA sense strand
gacaagccauugacuuuuc

SEQ ID NO: 1587288 - RNA, 19 nt, Homo sapiens
  misc_RNA (1)...(19): siRNA sense strand
ucugagcacucugaaugaa

SEQ ID NO: 1587289 - RNA, 19 nt, Homo sapiens
  misc_RNA (1)...(19): siRNA sense strand
aaaagaagguggcugaucu

SEQ ID NO: 1587290 - RNA, 19 nt, Homo sapiens
  misc_RNA (1)...(19): siRNA sense strand
ugaccucaucuuugacuuu

SEQ ID NO: 1587291 - RNA, 19 nt, Homo sapiens
  misc_RNA (1)...(19): siRNA sense strand
gcugaucugagcacucuga

SEQ ID NO: 1587292 - RNA, 19 nt, Homo sapiens
  misc_RNA (1)...(19): siRNA sense strand
gaugcugagggcugacaua

SEQ ID NO: 1587293 - RNA, 19 nt, Homo sapiens
  misc_RNA (1)...(19): siRNA sense strand
caugaagacccuacacuac

SEQ ID NO: 1587294 - RNA, 19 nt, Homo sapiens
  misc_RNA (1)...(19): siRNA sense strand
ggacaagccauugacuuuu

SEQ ID NO: 1587295 - RNA, 19 nt, Homo sapiens
  misc_RNA (1)...(19): siRNA sense strand
ccucaacgucucaaagaug

SEQ ID NO: 1587296 - RNA, 19 nt, Homo sapiens
  misc_RNA (1)...(19): siRNA sense strand
ggucaagauugggcuguac

SEQ ID NO: 1587297 - RNA, 19 nt, Homo sapiens
  misc_RNA (1)...(19): siRNA sense strand
guccucaacgucucaaaga

SEQ ID NO: 1587298 - RNA, 19 nt, Homo sapiens
  misc_RNA (1)...(19): siRNA sense strand
uggcugaucugagcacucu

SEQ ID NO: 1587299 - RNA, 19 nt, Homo sapiens
  misc_RNA (1)...(19): siRNA sense strand
ggacaugagaaugaagauc

SEQ ID NO: 1587300 - RNA, 19 nt, Homo sapiens
  misc_RNA (1)...(19): siRNA sense strand
uggccgcuauggcucauug

SEQ ID NO: 1587301 - RNA, 19 nt, Homo sapiens
  misc_RNA (1)...(19): siRNA sense strand
cuacuucucaggaaacuac

SEQ ID NO: 1587302 - RNA, 19 nt, Homo sapiens
  misc_RNA (1)...(19): siRNA sense strand
aaauaugccagggacauga

SEQ ID NO: 1587303 - RNA, 19 nt, Homo sapiens
  misc_RNA (1)...(19): siRNA sense strand
gcagggcugagcugaugga

SEQ ID NO: 1587304 - RNA, 19 nt, Homo sapiens
  misc_RNA (1)...(19): siRNA sense strand
gaagguaacgcuacaaaua

SEQ ID NO: 1587305 - RNA, 19 nt, Homo sapiens
  misc_RNA (1)...(19): siRNA sense strand
gcaagggucucggauuaua

SEQ ID NO: 1587306 - RNA, 19 nt, Homo sapiens
  misc_RNA (1)...(19): siRNA sense strand
ggacauggcuguggucgaa

SEQ ID NO: 1587307 - RNA, 19 nt, Homo sapiens
  misc_RNA (1)...(19): siRNA sense strand
gaacagcaccgcuuaagga

SEQ ID NO: 1587308 - RNA, 19 nt, Homo sapiens
  misc_RNA (1)...(19): siRNA sense strand
gcagaagugcauuauauuu

SEQ ID NO: 1587309 - RNA, 19 nt, Homo sapiens
  misc_RNA (1)...(19): siRNA sense strand
guggugagccugcagauua

SEQ ID NO: 1587310 - RNA, 19 nt, Homo sapiens
  misc_RNA (1)...(19): siRNA sense strand
caaggcauacuuacuauaa

SEQ ID NO: 1587311 - RNA, 19 nt, Homo sapiens
  misc_RNA (1)...(19): siRNA sense strand
cauggacgcuauccucaua

SEQ ID NO: 1587312 - RNA, 19 nt, Homo sapiens
  misc_RNA (1)...(19): siRNA sense strand
uaauauacauggacgcuau

SEQ ID NO: 1587313 - RNA, 19 nt, Homo sapiens
  misc_RNA (1)...(19): siRNA sense strand
uugcaagggucucggauua

SEQ ID NO: 1587314 - RNA, 19 nt, Homo sapiens
  misc_RNA (1)...(19): siRNA sense strand
gauuaaauauggccguguu

SEQ ID NO: 1587315 - RNA, 19 nt, Homo sapiens
  misc_RNA (1)...(19): siRNA sense strand
cagcaccgcuuaaggaugu

SEQ ID NO: 1587316 - RNA, 19 nt, Homo sapiens
  misc_RNA (1)...(19): siRNA sense strand
gcagugagguauaaugacu

SEQ ID NO: 1587317 - RNA, 19 nt, Homo sapiens
  misc_RNA (1)...(19): siRNA sense strand
cgagagauguguaauucug

SEQ ID NO: 1587318 - RNA, 19 nt, Homo sapiens
  misc_RNA (1)...(19): siRNA sense strand
gaagauggagcuuuugaua

SEQ ID NO: 1587319 - RNA, 19 nt, Homo sapiens
  misc_RNA (1)...(19): siRNA sense strand
ugcaagcacucaaggcaua

SEQ ID NO: 1587320 - RNA, 19 nt, Homo sapiens
  misc_RNA (1)...(19): siRNA sense strand
ccucauaccaagaagauaa

SEQ ID NO: 1587321 - RNA, 19 nt, Homo sapiens
  misc_RNA (1)...(19): siRNA sense strand
gccagauccucauagcuuu

SEQ ID NO: 1587322 - RNA, 19 nt, Homo sapiens
  misc_RNA (1)...(19): siRNA sense strand
gcugugauuggaacuaaua

SEQ ID NO: 1587323 - RNA, 19 nt, Homo sapiens
  misc_RNA (1)...(19): siRNA sense strand
guaauucugagaggaguua

SEQ ID NO: 1587324 - RNA, 19 nt, Homo sapiens
  misc_RNA (1)...(19): siRNA sense strand
cagcugugauuggaacuaa

SEQ ID NO: 1587325 - RNA, 19 nt, Homo sapiens
  misc_RNA (1)...(19): siRNA sense strand
gaacaaaagaagaagguaa

SEQ ID NO: 1587326 - RNA, 19 nt, Homo sapiens
  misc_RNA (1)...(19): siRNA sense strand
gcguggcgcuguuguuugu

SEQ ID NO: 1587327 - RNA, 19 nt, Homo sapiens
  misc_RNA (1)...(19): siRNA sense strand
ggccagauccucauagcuu

SEQ ID NO: 1587328 - RNA, 19 nt, Homo sapiens
  misc_RNA (1)...(19): siRNA sense strand
gguaacgcuacaaauauuu

SEQ ID NO: 1587329 - RNA, 19 nt, Homo sapiens
  misc_RNA (1)...(19): siRNA sense strand
gcuacuuaccagaauauaa

SEQ ID NO: 1587330 - RNA, 19 nt, Homo sapiens
  misc_RNA (1)...(19): siRNA sense strand
cagaagugcauuauauuuc

SEQ ID NO: 1587331 - RNA, 19 nt, Homo sapiens
  misc_RNA (1)...(19): siRNA sense strand
gacuauauucagccuauuu

SEQ ID NO: 1587332 - RNA, 19 nt, Homo sapiens
  misc_RNA (1)...(19): siRNA sense strand
acucaaggcauacuuacua

SEQ ID NO: 1587333 - RNA, 19 nt, Homo sapiens
  misc_RNA (1)...(19): siRNA sense strand
agaagaagguaacgcuaca

SEQ ID NO: 1587334 - RNA, 19 nt, Homo sapiens
  misc_RNA (1)...(19): siRNA sense strand
ugacagagcauuucuucca

SEQ ID NO: 1587335 - RNA, 19 nt, Homo sapiens
  misc_RNA (1)...(19): siRNA sense strand
gggccauccuucuaccaaa

SEQ ID NO: 1587336 - RNA, 19 nt, Homo sapiens
  misc_RNA (1)...(19): siRNA sense strand
gaagugcauuauauuucuc

SEQ ID NO: 1587337 - RNA, 19 nt, Homo sapiens
  misc_RNA (1)...(19): siRNA sense strand
gacgcuagcgauccuuuaa

SEQ ID NO: 1587338 - RNA, 19 nt, Homo sapiens
  misc_RNA (1)...(19): siRNA sense strand
gcaaaggauuguggaacag

SEQ ID NO: 1587339 - RNA, 19 nt, Homo sapiens
  misc_RNA (1)...(19): siRNA sense strand
agguaacgcuacaaauauu

SEQ ID NO: 1587340 - RNA, 19 nt, Homo sapiens
  misc_RNA (1)...(19): siRNA sense strand
guggacagcugugauugga

SEQ ID NO: 1587341 - RNA, 19 nt, Homo sapiens
  misc_RNA (1)...(19): siRNA sense strand
aaauauggccguguucuug

SEQ ID NO: 1587342 - RNA, 19 nt, Homo sapiens
  misc_RNA (1)...(19): siRNA sense strand
ccagauccucauagcuuua

SEQ ID NO: 1587343 - RNA, 19 nt, Homo sapiens
  misc_RNA (1)...(19): siRNA sense strand
gaccauuaaugugcuacuu

SEQ ID NO: 1587344 - RNA, 19 nt, Homo sapiens
  misc_RNA (1)...(19): siRNA sense strand
gcucucacuuauacucaga

SEQ ID NO: 1587345 - RNA, 19 nt, Homo sapiens
  misc_RNA (1)...(19): siRNA sense strand
uggugagccugcagauuaa

SEQ ID NO: 1587346 - RNA, 19 nt, Homo sapiens
  misc_RNA (1)...(19): siRNA sense strand
gacagagcauuucuuccau

SEQ ID NO: 1587347 - RNA, 19 nt, Homo sapiens
  misc_RNA (1)...(19): siRNA sense strand
ccauuaaugugcuacuuac

SEQ ID NO: 1587348 - RNA, 19 nt, Homo sapiens
  misc_RNA (1)...(19): siRNA sense strand
gcaaucauuauucauccaa

SEQ ID NO: 1587349 - RNA, 19 nt, Homo sapiens
  misc_RNA (1)...(19): siRNA sense strand
gcuauccucauaccaagaa

SEQ ID NO: 1587350 - RNA, 19 nt, Homo sapiens
  misc_RNA (1)...(19): siRNA sense strand
gagagauguguaauucuga

SEQ ID NO: 1587351 - RNA, 19 nt, Homo sapiens
  misc_RNA (1)...(19): siRNA sense strand
gcuuaaggauguguugcaa

SEQ ID NO: 1587352 - RNA, 19 nt, Homo sapiens
  misc_RNA (1)...(19): siRNA sense strand
gcugacagagcauuucuuc

SEQ ID NO: 1587353 - RNA, 19 nt, Homo sapiens
  misc_RNA (1)...(19): siRNA sense strand
uuuacaagaugcagaagug

SEQ ID NO: 1587354 - RNA, 19 nt, Homo sapiens
  misc_RNA (1)...(19): siRNA sense strand
gccugcagauuaaauaugg

SEQ ID NO: 1587355 - RNA, 19 nt, Homo sapiens
  misc_RNA (1)...(19): siRNA sense strand
aagguaacgcuacaaauau

SEQ ID NO: 1587356 - RNA, 19 nt, Homo sapiens
  misc_RNA (1)...(19): siRNA sense strand
uaaagacgcuagcgauccu

SEQ ID NO: 1587357 - RNA, 19 nt, Homo sapiens
  misc_RNA (1)...(19): siRNA sense strand
uaaauauggccguguucuu

SEQ ID NO: 1587358 - RNA, 19 nt, Homo sapiens
  misc_RNA (1)...(19): siRNA sense strand
ugcaaaggauuguggaaca

SEQ ID NO: 1587359 - RNA, 19 nt, Homo sapiens
  misc_RNA (1)...(19): siRNA sense strand
cauuauucauccaaacuuc

SEQ ID NO: 1587360 - RNA, 19 nt, Homo sapiens
  misc_RNA (1)...(19): siRNA sense strand
cgcuagcgauccuuuaaug

SEQ ID NO: 1587361 - RNA, 19 nt, Homo sapiens
  misc_RNA (1)...(19): siRNA sense strand
ugaugaagauggagcuuuu

SEQ ID NO: 1587362 - RNA, 19 nt, Homo sapiens
  misc_RNA (1)...(19): siRNA sense strand
cuuacuagcaacaacauaa

SEQ ID NO: 1587363 - RNA, 19 nt, Homo sapiens
  misc_RNA (1)...(19): siRNA sense strand
gccguguucuuguucaugu

SEQ ID NO: 1587364 - RNA, 19 nt, Homo sapiens
  misc_RNA (1)...(19): siRNA sense strand
ucaaggcauacuuacuaua

SEQ ID NO: 1587365 - RNA, 19 nt, Homo sapiens
  misc_RNA (1)...(19): siRNA sense strand
cucgagagauguguaauuc

SEQ ID NO: 1587366 - RNA, 19 nt, Homo sapiens
  misc_RNA (1)...(19): siRNA sense strand
aagcagugagguauaauga

SEQ ID NO: 1587367 - RNA, 19 nt, Homo sapiens
  misc_RNA (1)...(19): siRNA sense strand
cagccuauuugccuaccuu

SEQ ID NO: 1587368 - RNA, 19 nt, Homo sapiens
  misc_RNA (1)...(19): siRNA sense strand
ugagccugcagauuaaaua

SEQ ID NO: 1587369 - RNA, 19 nt, Homo sapiens
  misc_RNA (1)...(19): siRNA sense strand
gaagaagguaacgcuacaa

SEQ ID NO: 1587370 - RNA, 19 nt, Homo sapiens
  misc_RNA (1)...(19): siRNA sense strand
gagccugcagauuaaauau

SEQ ID NO: 1587371 - RNA, 19 nt, Homo sapiens
  misc_RNA (1)...(19): siRNA sense strand
gacgcuauccucauaccaa

SEQ ID NO: 1587372 - RNA, 19 nt, Homo sapiens
  misc_RNA (1)...(19): siRNA sense strand
ggggagcucucacuuauac

SEQ ID NO: 1587373 - RNA, 19 nt, Homo sapiens
  misc_RNA (1)...(19): siRNA sense strand
gcacucaaggcauacuuac

SEQ ID NO: 1587374 - RNA, 19 nt, Homo sapiens
  misc_RNA (1)...(19): siRNA sense strand
ugugcuacuuaccagaaua

SEQ ID NO: 1587375 - RNA, 19 nt, Homo sapiens
  misc_RNA (1)...(19): siRNA sense strand
gggaagaacaaaagaagaa

SEQ ID NO: 1587376 - RNA, 19 nt, Homo sapiens
  misc_RNA (1)...(19): siRNA sense strand
agugagguauaaugacuau

SEQ ID NO: 1587377 - RNA, 19 nt, Homo sapiens
  misc_RNA (1)...(19): siRNA sense strand
guggggagcucucacuuau

SEQ ID NO: 1587378 - RNA, 19 nt, Homo sapiens
  misc_RNA (1)...(19): siRNA sense strand
gcugcccacugcacuaaag

SEQ ID NO: 1587379 - RNA, 19 nt, Homo sapiens
  misc_RNA (1)...(19): siRNA sense strand
uuugucaucuuacuagcaa

SEQ ID NO: 1587380 - RNA, 19 nt, Homo sapiens
  misc_RNA (1)...(19): siRNA sense strand
ggaacagcaccgcuuaagg

SEQ ID NO: 1587381 - RNA, 19 nt, Homo sapiens
  misc_RNA (1)...(19): siRNA sense strand
aagaagguaacgcuacaaa

SEQ ID NO: 1587382 - RNA, 19 nt, Homo sapiens
  misc_RNA (1)...(19): siRNA sense strand
cuagcgauccuuuaaugug

SEQ ID NO: 1587383 - RNA, 19 nt, Homo sapiens
  misc_RNA (1)...(19): siRNA sense strand
gggcgcaugcaaaggauug

SEQ ID NO: 1587384 - RNA, 19 nt, Homo sapiens
  misc_RNA (1)...(19): siRNA sense strand
cucaaggcauacuuacuau

SEQ ID NO: 1587385 - RNA, 19 nt, Homo sapiens
  misc_RNA (1)...(19): siRNA sense strand
acauggcuguggucgaaga

SEQ ID NO: 1587386 - RNA, 19 nt, Homo sapiens
  misc_RNA (1)...(19): siRNA sense strand
cagcugcccacugcacuaa

SEQ ID NO: 1587387 - RNA, 19 nt, Homo sapiens
  misc_RNA (1)...(19): siRNA sense strand
ggaacccuagugagagaga

SEQ ID NO: 1587388 - RNA, 19 nt, Homo sapiens
  misc_RNA (1)...(19): siRNA sense strand
gagcucucacuuauacuca

SEQ ID NO: 1587389 - RNA, 19 nt, Homo sapiens
  misc_RNA (1)...(19): siRNA sense strand
accauuaaugugcuacuua

SEQ ID NO: 1587390 - RNA, 19 nt, Homo sapiens
  misc_RNA (1)...(19): siRNA sense strand
ugacuauauucagccuauu

SEQ ID NO: 1587391 - RNA, 19 nt, Homo sapiens
  misc_RNA (1)...(19): siRNA sense strand
ggagcucucacuuauacuc

SEQ ID NO: 1587392 - RNA, 19 nt, Homo sapiens
  misc_RNA (1)...(19): siRNA sense strand
gcuagcgauccuuuaaugu

SEQ ID NO: 1587393 - RNA, 19 nt, Homo sapiens
  misc_RNA (1)...(19): siRNA sense strand
uguggaacagcaccgcuua

SEQ ID NO: 1587394 - RNA, 19 nt, Homo sapiens
  misc_RNA (1)...(19): siRNA sense strand
augacuauauucagccuau

SEQ ID NO: 1587395 - RNA, 19 nt, Homo sapiens
  misc_RNA (1)...(19): siRNA sense strand
gugcuacuuaccagaauau

SEQ ID NO: 1587396 - RNA, 19 nt, Homo sapiens
  misc_RNA (1)...(19): siRNA sense strand
gugaugaagauggagcuuu

SEQ ID NO: 1587397 - RNA, 19 nt, Homo sapiens
  misc_RNA (1)...(19): siRNA sense strand
gaacagauccuacuuugua

SEQ ID NO: 1587398 - RNA, 19 nt, Homo sapiens
  misc_RNA (1)...(19): siRNA sense strand
guugguaucuccuuuauua

SEQ ID NO: 1587399 - RNA, 19 nt, Homo sapiens
  misc_RNA (1)...(19): siRNA sense strand
uauaauaggucucagcuua

SEQ ID NO: 1587400 - RNA, 19 nt, Homo sapiens
  misc_RNA (1)...(19): siRNA sense strand
gauguaugcucucuacuua

SEQ ID NO: 1587401 - RNA, 19 nt, Homo sapiens
  misc_RNA (1)...(19): siRNA sense strand
gacacagucuucuuuauua

SEQ ID NO: 1587402 - RNA, 19 nt, Homo sapiens
  misc_RNA (1)...(19): siRNA sense strand
gaacauggcuagcaggaau

SEQ ID NO: 1587403 - RNA, 19 nt, Homo sapiens
  misc_RNA (1)...(19): siRNA sense strand
gaaggaaacuguuacucuu

SEQ ID NO: 1587404 - RNA, 19 nt, Homo sapiens
  misc_RNA (1)...(19): siRNA sense strand
uaaggaaucugccaaagaa

SEQ ID NO: 1587405 - RNA, 19 nt, Homo sapiens
  misc_RNA (1)...(19): siRNA sense strand
ggagaaagaccagaaauaa

SEQ ID NO: 1587406 - RNA, 19 nt, Homo sapiens
  misc_RNA (1)...(19): siRNA sense strand
ugaaagagguguuuacgaa

SEQ ID NO: 1587407 - RNA, 19 nt, Homo sapiens
  misc_RNA (1)...(19): siRNA sense strand
gcaaauggccacaugguuu

SEQ ID NO: 1587408 - RNA, 19 nt, Homo sapiens
  misc_RNA (1)...(19): siRNA sense strand
gaacuuauugcuagcauuu

SEQ ID NO: 1587409 - RNA, 19 nt, Homo sapiens
  misc_RNA (1)...(19): siRNA sense strand
ugaagaaggugacaagcua

SEQ ID NO: 1587410 - RNA, 19 nt, Homo sapiens
  misc_RNA (1)...(19): siRNA sense strand
gcacuuacaggcuauuuaa

SEQ ID NO: 1587411 - RNA, 19 nt, Homo sapiens
  misc_RNA (1)...(19): siRNA sense strand
gcuguaggguuaaagauuu

SEQ ID NO: 1587412 - RNA, 19 nt, Homo sapiens
  misc_RNA (1)...(19): siRNA sense strand
ugacaagguuuaugaaguu

SEQ ID NO: 1587413 - RNA, 19 nt, Homo sapiens
  misc_RNA (1)...(19): siRNA sense strand
gaacggaaauucugguuuu

SEQ ID NO: 1587414 - RNA, 19 nt, Homo sapiens
  misc_RNA (1)...(19): siRNA sense strand
ugacaaguuugccucuuua

SEQ ID NO: 1587415 - RNA, 19 nt, Homo sapiens
  misc_RNA (1)...(19): siRNA sense strand
gaauccagcuuuguuggua

SEQ ID NO: 1587416 - RNA, 19 nt, Homo sapiens
  misc_RNA (1)...(19): siRNA sense strand
ugaauuggcuccucuguca

SEQ ID NO: 1587417 - RNA, 19 nt, Homo sapiens
  misc_RNA (1)...(19): siRNA sense strand
caacaagaauugaauacuc

SEQ ID NO: 1587418 - RNA, 19 nt, Homo sapiens
  misc_RNA (1)...(19): siRNA sense strand
ggccgugccuacuauaaua

SEQ ID NO: 1587419 - RNA, 19 nt, Homo sapiens
  misc_RNA (1)...(19): siRNA sense strand
gaacuuuggaugacacuuu

SEQ ID NO: 1587420 - RNA, 19 nt, Homo sapiens
  misc_RNA (1)...(19): siRNA sense strand
gacuaaauaugaccaagaa

SEQ ID NO: 1587421 - RNA, 19 nt, Homo sapiens
  misc_RNA (1)...(19): siRNA sense strand
ccaaauugcugcacuuaca

SEQ ID NO: 1587422 - RNA, 19 nt, Homo sapiens
  misc_RNA (1)...(19): siRNA sense strand
gauggauggugacaaguuu

SEQ ID NO: 1587423 - RNA, 19 nt, Homo sapiens
  misc_RNA (1)...(19): siRNA sense strand
uaauggaacuacaggaauu

SEQ ID NO: 1587424 - RNA, 19 nt, Homo sapiens
  misc_RNA (1)...(19): siRNA sense strand
gaacugacacacaauaaca

SEQ ID NO: 1587425 - RNA, 19 nt, Homo sapiens
  misc_RNA (1)...(19): siRNA sense strand
ggaauucuaugacccagau

SEQ ID NO: 1587426 - RNA, 19 nt, Homo sapiens
  misc_RNA (1)...(19): siRNA sense strand
guagauacaacaagaauug

SEQ ID NO: 1587427 - RNA, 19 nt, Homo sapiens
  misc_RNA (1)...(19): siRNA sense strand
ggagcaaagugacaagguu

SEQ ID NO: 1587428 - RNA, 19 nt, Homo sapiens
  misc_RNA (1)...(19): siRNA sense strand
ggucucagcuuauggaaag

SEQ ID NO: 1587429 - RNA, 19 nt, Homo sapiens
  misc_RNA (1)...(19): siRNA sense strand
gaagaaggaccaccuguag

SEQ ID NO: 1587430 - RNA, 19 nt, Homo sapiens
  misc_RNA (1)...(19): siRNA sense strand
guuacaaguuggcuuauga

SEQ ID NO: 1587431 - RNA, 19 nt, Homo sapiens
  misc_RNA (1)...(19): siRNA sense strand
gaucugcugaggauauuua

SEQ ID NO: 1587432 - RNA, 19 nt, Homo sapiens
  misc_RNA (1)...(19): siRNA sense strand
gcaggaaugcuuacuguug

SEQ ID NO: 1587433 - RNA, 19 nt, Homo sapiens
  misc_RNA (1)...(19): siRNA sense strand
gaacuguacacccaauauu

SEQ ID NO: 1587434 - RNA, 19 nt, Homo sapiens
  misc_RNA (1)...(19): siRNA sense strand
ccagauuaaugacagaauu

SEQ ID NO: 1587435 - RNA, 19 nt, Homo sapiens
  misc_RNA (1)...(19): siRNA sense strand
gcugaaauuccuugaagua

SEQ ID NO: 1587436 - RNA, 19 nt, Homo sapiens
  misc_RNA (1)...(19): siRNA sense strand
uaacuauucuccauaugug

SEQ ID NO: 1587437 - RNA, 19 nt, Homo sapiens
  misc_RNA (1)...(19): siRNA sense strand
gugacaaguuugccucuuu

SEQ ID NO: 1587438 - RNA, 19 nt, Homo sapiens
  misc_RNA (1)...(19): siRNA sense strand
gcagggaguccacaguuaa

SEQ ID NO: 1587439 - RNA, 19 nt, Homo sapiens
  misc_RNA (1)...(19): siRNA sense strand
gagccaguguauuucuaua

SEQ ID NO: 1587440 - RNA, 19 nt, Homo sapiens
  misc_RNA (1)...(19): siRNA sense strand
caaguggcuucgauuaaga

SEQ ID NO: 1587441 - RNA, 19 nt, Homo sapiens
  misc_RNA (1)...(19): siRNA sense strand
gccaguguauuucuauauu

SEQ ID NO: 1587442 - RNA, 19 nt, Homo sapiens
  misc_RNA (1)...(19): siRNA sense strand
uuaggaggauuaaugguaa

SEQ ID NO: 1587443 - RNA, 19 nt, Homo sapiens
  misc_RNA (1)...(19): siRNA sense strand
gaugagugcuucaacuuac

SEQ ID NO: 1587444 - RNA, 19 nt, Homo sapiens
  misc_RNA (1)...(19): siRNA sense strand
gagaaagaccagaaauaau

SEQ ID NO: 1587445 - RNA, 19 nt, Homo sapiens
  misc_RNA (1)...(19): siRNA sense strand
guaagucccugaaggaaac

SEQ ID NO: 1587446 - RNA, 19 nt, Homo sapiens
  misc_RNA (1)...(19): siRNA sense strand
cagcaaaugucucuguauc

SEQ ID NO: 1587447 - RNA, 19 nt, Homo sapiens
  misc_RNA (1)...(19): siRNA sense strand
gaagaaggugacaagcuaa

SEQ ID NO: 1587448 - RNA, 19 nt, Homo sapiens
  misc_RNA (1)...(19): siRNA sense strand
ggaacuacaggaauucuau

SEQ ID NO: 1587449 - RNA, 19 nt, Homo sapiens
  misc_RNA (1)...(19): siRNA sense strand
ggaaacuguuacucuugaa

SEQ ID NO: 1587450 - RNA, 19 nt, Homo sapiens
  misc_RNA (1)...(19): siRNA sense strand
ugaaagagcuccaaaacau

SEQ ID NO: 1587451 - RNA, 19 nt, Homo sapiens
  misc_RNA (1)...(19): siRNA sense strand
augagaggcuguaggguua

SEQ ID NO: 1587452 - RNA, 19 nt, Homo sapiens
  misc_RNA (1)...(19): siRNA sense strand
ccagauacaguggaacuua

SEQ ID NO: 1587453 - RNA, 19 nt, Homo sapiens
  misc_RNA (1)...(19): siRNA sense strand
ugacacagucuucuuuauu

SEQ ID NO: 1587454 - RNA, 19 nt, Homo sapiens
  misc_RNA (1)...(19): siRNA sense strand
gagcaaagugacaagguuu

SEQ ID NO: 1587455 - RNA, 19 nt, Homo sapiens
  misc_RNA (1)...(19): siRNA sense strand
caggguagauacaacaaga

SEQ ID NO: 1587456 - RNA, 19 nt, Homo sapiens
  misc_RNA (1)...(19): siRNA sense strand
uggaacagauccuacuuug

SEQ ID NO: 1587457 - RNA, 19 nt, Homo sapiens
  misc_RNA (1)...(19): siRNA sense strand
caaguuugccucuuuacaa

SEQ ID NO: 1587458 - RNA, 19 nt, Homo sapiens
  misc_RNA (1)...(19): siRNA sense strand
ggacuaaauaugaccaaga

SEQ ID NO: 1587459 - RNA, 19 nt, Homo sapiens
  misc_RNA (1)...(19): siRNA sense strand
gguguguacucugacaaua

SEQ ID NO: 1587460 - RNA, 19 nt, Homo sapiens
  misc_RNA (1)...(19): siRNA sense strand
gcauggccgugccuacuau

SEQ ID NO: 1587461 - RNA, 19 nt, Homo sapiens
  misc_RNA (1)...(19): siRNA sense strand
gugacagugccauuuauua

SEQ ID NO: 1587462 - RNA, 19 nt, Homo sapiens
  misc_RNA (1)...(19): siRNA sense strand
uaauaggucucagcuuaug

SEQ ID NO: 1587463 - RNA, 19 nt, Homo sapiens
  misc_RNA (1)...(19): siRNA sense strand
gaagaaaggaaguuuugua

SEQ ID NO: 1587464 - RNA, 19 nt, Homo sapiens
  misc_RNA (1)...(19): siRNA sense strand
aaacugggcacuaccauau

SEQ ID NO: 1587465 - RNA, 19 nt, Homo sapiens
  misc_RNA (1)...(19): siRNA sense strand
ccaguguauuucuauauug

SEQ ID NO: 1587466 - RNA, 19 nt, Homo sapiens
  misc_RNA (1)...(19): siRNA sense strand
uuauugagccaguguauuu

SEQ ID NO: 1587467 - RNA, 19 nt, Homo sapiens
  misc_RNA (1)...(19): siRNA sense strand
gcuucaacuuacacauuua

SEQ ID NO: 1587468 - RNA, 19 nt, Homo sapiens
  misc_RNA (1)...(19): siRNA sense strand
cgaagaaggaccaccugua

SEQ ID NO: 1587469 - RNA, 19 nt, Homo sapiens
  misc_RNA (1)...(19): siRNA sense strand
cagauacaguggaacuuau

SEQ ID NO: 1587470 - RNA, 19 nt, Homo sapiens
  misc_RNA (1)...(19): siRNA sense strand
gacaagguuuaugaaguuu

SEQ ID NO: 1587471 - RNA, 19 nt, Homo sapiens
  misc_RNA (1)...(19): siRNA sense strand
aaagugacaagguuuauga

SEQ ID NO: 1587472 - RNA, 19 nt, Homo sapiens
  misc_RNA (1)...(19): siRNA sense strand
gugacaagguuuaugaagu

SEQ ID NO: 1587473 - RNA, 19 nt, Homo sapiens
  misc_RNA (1)...(19): siRNA sense strand
cugcugaggauauuuauaa

SEQ ID NO: 1587474 - RNA, 19 nt, Homo sapiens
  misc_RNA (1)...(19): siRNA sense strand
caauauuguuggcucuuau

SEQ ID NO: 1587475 - RNA, 19 nt, Homo sapiens
  misc_RNA (1)...(19): siRNA sense strand
ucaaguggcuucgauuaag

SEQ ID NO: 1587476 - RNA, 19 nt, Homo sapiens
  misc_RNA (1)...(19): siRNA sense strand
gguaucuccuuuauuaagu

SEQ ID NO: 1587477 - RNA, 19 nt, Homo sapiens
  misc_RNA (1)...(19): siRNA sense strand
ggaacuuauugcuagcauu

SEQ ID NO: 1587478 - RNA, 19 nt, Homo sapiens
  misc_RNA (1)...(19): siRNA sense strand
ucacuagaguauacuggaa

SEQ ID NO: 1587479 - RNA, 19 nt, Homo sapiens
  misc_RNA (1)...(19): siRNA sense strand
gaaaggaaguuuuguagcu

SEQ ID NO: 1587480 - RNA, 19 nt, Homo sapiens
  misc_RNA (1)...(19): siRNA sense strand
cuacauauuuucccucuuu

SEQ ID NO: 1587481 - RNA, 19 nt, Homo sapiens
  misc_RNA (1)...(19): siRNA sense strand
aagccaaagucuucagaaa

SEQ ID NO: 1587482 - RNA, 19 nt, Homo sapiens
  misc_RNA (1)...(19): siRNA sense strand
uagccacuaucuccuguuu

SEQ ID NO: 1587483 - RNA, 19 nt, Homo sapiens
  misc_RNA (1)...(19): siRNA sense strand
guuugccucuuuacaauga

SEQ ID NO: 1587484 - RNA, 19 nt, Homo sapiens
  misc_RNA (1)...(19): siRNA sense strand
guagagcugcgccaaagaa

SEQ ID NO: 1587485 - RNA, 19 nt, Homo sapiens
  misc_RNA (1)...(19): siRNA sense strand
gauugacacagucuucuuu

SEQ ID NO: 1587486 - RNA, 19 nt, Homo sapiens
  misc_RNA (1)...(19): siRNA sense strand
caaggaauauauguuacug

SEQ ID NO: 1587487 - RNA, 19 nt, Homo sapiens
  misc_RNA (1)...(19): siRNA sense strand
aaagcgaucugcugaggau

SEQ ID NO: 1587488 - RNA, 19 nt, Homo sapiens
  misc_RNA (1)...(19): siRNA sense strand
auagaaggcuugaaguaca

SEQ ID NO: 1587489 - RNA, 19 nt, Homo sapiens
  misc_RNA (1)...(19): siRNA sense strand
gucaugaggucaaaauuaa

SEQ ID NO: 1587490 - RNA, 19 nt, Homo sapiens
  misc_RNA (1)...(19): siRNA sense strand
gagaggcuguaggguuaaa

SEQ ID NO: 1587491 - RNA, 19 nt, Homo sapiens
  misc_RNA (1)...(19): siRNA sense strand
uaagaacuguacacccaau

SEQ ID NO: 1587492 - RNA, 19 nt, Homo sapiens
  misc_RNA (1)...(19): siRNA sense strand
gguaagucccugaaggaaa

SEQ ID NO: 1587493 - RNA, 19 nt, Homo sapiens
  misc_RNA (1)...(19): siRNA sense strand
gcgaucugcugaggauauu

SEQ ID NO: 1587494 - RNA, 19 nt, Homo sapiens
  misc_RNA (1)...(19): siRNA sense strand
ggauggauggugacaaguu

SEQ ID NO: 1587495 - RNA, 19 nt, Homo sapiens
  misc_RNA (1)...(19): siRNA sense strand
ugcagggaguccacaguua

SEQ ID NO: 1587496 - RNA, 19 nt, Homo sapiens
  misc_RNA (1)...(19): siRNA sense strand
uggagaaagaccagaaaua

SEQ ID NO: 1587497 - RNA, 19 nt, Homo sapiens
  misc_RNA (1)...(19): siRNA sense strand
ggacagggcuuuccuucuu

SEQ ID NO: 1587498 - RNA, 19 nt, Homo sapiens
  misc_RNA (1)...(19): siRNA sense strand
agaaugagcugaucacaaa

SEQ ID NO: 1587499 - RNA, 19 nt, Homo sapiens
  misc_RNA (1)...(19): siRNA sense strand
ucaaacagauuucaacaga

SEQ ID NO: 1587500 - RNA, 19 nt, Homo sapiens
  misc_RNA (1)...(19): siRNA sense strand
gaaaucggcuuuagaaucc

SEQ ID NO: 1587501 - RNA, 19 nt, Homo sapiens
  misc_RNA (1)...(19): siRNA sense strand
cguaugagcugcacuguga

SEQ ID NO: 1587502 - RNA, 19 nt, Homo sapiens
  misc_RNA (1)...(19): siRNA sense strand
gagaagcuguaucaagaaa

SEQ ID NO: 1587503 - RNA, 19 nt, Homo sapiens
  misc_RNA (1)...(19): siRNA sense strand
cagagcagaucuuaaacua

SEQ ID NO: 1587504 - RNA, 19 nt, Homo sapiens
  misc_RNA (1)...(19): siRNA sense strand
gaagagagaggacauauac

SEQ ID NO: 1587505 - RNA, 19 nt, Homo sapiens
  misc_RNA (1)...(19): siRNA sense strand
gagcagaucuuaaacuacu

SEQ ID NO: 1587506 - RNA, 19 nt, Homo sapiens
  misc_RNA (1)...(19): siRNA sense strand
aagagaagcuguaucaaga

SEQ ID NO: 1587507 - RNA, 19 nt, Homo sapiens
  misc_RNA (1)...(19): siRNA sense strand
gaagaucugucccuuagag

SEQ ID NO: 1587508 - RNA, 19 nt, Homo sapiens
  misc_RNA (1)...(19): siRNA sense strand
gaacauugccggaaacaca

SEQ ID NO: 1587509 - RNA, 19 nt, Homo sapiens
  misc_RNA (1)...(19): siRNA sense strand
guacaagcuucgagauuug

SEQ ID NO: 1587510 - RNA, 19 nt, Homo sapiens
  misc_RNA (1)...(19): siRNA sense strand
uaagauaucuguacaagcu

SEQ ID NO: 1587511 - RNA, 19 nt, Homo sapiens
  misc_RNA (1)...(19): siRNA sense strand
caaagagucuccaguugau

SEQ ID NO: 1587512 - RNA, 19 nt, Homo sapiens
  misc_RNA (1)...(19): siRNA sense strand
gaagcuguaucaagaaauc

SEQ ID NO: 1587513 - RNA, 19 nt, Homo sapiens
  misc_RNA (1)...(19): siRNA sense strand
ccaaugaagugcagcaguu

SEQ ID NO: 1587514 - RNA, 19 nt, Homo sapiens
  misc_RNA (1)...(19): siRNA sense strand
ggaaaucggcuuuagaauc

SEQ ID NO: 1587515 - RNA, 19 nt, Homo sapiens
  misc_RNA (1)...(19): siRNA sense strand
gaaaagcacuaugggguua

SEQ ID NO: 1587516 - RNA, 19 nt, Homo sapiens
  misc_RNA (1)...(19): siRNA sense strand
uagagaaccugcuggacua

SEQ ID NO: 1587517 - RNA, 19 nt, Homo sapiens
  misc_RNA (1)...(19): siRNA sense strand
gagagaggacauauacaua

SEQ ID NO: 1587518 - RNA, 19 nt, Homo sapiens
  misc_RNA (1)...(19): siRNA sense strand
gaacggaccacguauacga

SEQ ID NO: 1587519 - RNA, 19 nt, Homo sapiens
  misc_RNA (1)...(19): siRNA sense strand
gaucuuaaacuacuacaga

SEQ ID NO: 1587520 - RNA, 19 nt, Homo sapiens
  misc_RNA (1)...(19): siRNA sense strand
gaaccaucaucaugcaaga

SEQ ID NO: 1587521 - RNA, 19 nt, Homo sapiens
  misc_RNA (1)...(19): siRNA sense strand
gcagaggagacgaacaaua

SEQ ID NO: 1587522 - RNA, 19 nt, Homo sapiens
  misc_RNA (1)...(19): siRNA sense strand
agcaagagcuuaaagagaa

SEQ ID NO: 1587523 - RNA, 19 nt, Homo sapiens
  misc_RNA (1)...(19): siRNA sense strand
ggacaguuacuauguuuau

SEQ ID NO: 1587524 - RNA, 19 nt, Homo sapiens
  misc_RNA (1)...(19): siRNA sense strand
aaacagauuucaacagaag

SEQ ID NO: 1587525 - RNA, 19 nt, Homo sapiens
  misc_RNA (1)...(19): siRNA sense strand
gcaauuuccauauguuuga

SEQ ID NO: 1587526 - RNA, 19 nt, Homo sapiens
  misc_RNA (1)...(19): siRNA sense strand
ggagaagguugagcugcua

SEQ ID NO: 1587527 - RNA, 19 nt, Homo sapiens
  misc_RNA (1)...(19): siRNA sense strand
ccacguauacgacugcaua

SEQ ID NO: 1587528 - RNA, 19 nt, Homo sapiens
  misc_RNA (1)...(19): siRNA sense strand
uaaagcgacuaauagcauu

SEQ ID NO: 1587529 - RNA, 19 nt, Homo sapiens
  misc_RNA (1)...(19): siRNA sense strand
ucagcaaguuuaagagaaa

SEQ ID NO: 1587530 - RNA, 19 nt, Homo sapiens
  misc_RNA (1)...(19): siRNA sense strand
gagaggacauauacauaag

SEQ ID NO: 1587531 - RNA, 19 nt, Homo sapiens
  misc_RNA (1)...(19): siRNA sense strand
ccaaagagucuccaguuga

SEQ ID NO: 1587532 - RNA, 19 nt, Homo sapiens
  misc_RNA (1)...(19): siRNA sense strand
ccauggagcugaccaacga

SEQ ID NO: 1587533 - RNA, 19 nt, Homo sapiens
  misc_RNA (1)...(19): siRNA sense strand
gggcuuuccuucuuuccua

SEQ ID NO: 1587534 - RNA, 19 nt, Homo sapiens
  misc_RNA (1)...(19): siRNA sense strand
uguacaagcuucgagauuu

SEQ ID NO: 1587535 - RNA, 19 nt, Homo sapiens
  misc_RNA (1)...(19): siRNA sense strand
gaggacauauacauaagau

SEQ ID NO: 1587536 - RNA, 19 nt, Homo sapiens
  misc_RNA (1)...(19): siRNA sense strand
gagggacaguuacuauguu

SEQ ID NO: 1587537 - RNA, 19 nt, Homo sapiens
  misc_RNA (1)...(19): siRNA sense strand
gccaaagagucuccaguug

SEQ ID NO: 1587538 - RNA, 19 nt, Homo sapiens
  misc_RNA (1)...(19): siRNA sense strand
caaacagauuucaacagaa

SEQ ID NO: 1587539 - RNA, 19 nt, Homo sapiens
  misc_RNA (1)...(19): siRNA sense strand
ggauugaacggaccacgua

SEQ ID NO: 1587540 - RNA, 19 nt, Homo sapiens
  misc_RNA (1)...(19): siRNA sense strand
gacagggcuuuccuucuuu

SEQ ID NO: 1587541 - RNA, 19 nt, Homo sapiens
  misc_RNA (1)...(19): siRNA sense strand
cuacagagccaaugaagug

SEQ ID NO: 1587542 - RNA, 19 nt, Homo sapiens
  misc_RNA (1)...(19): siRNA sense strand
uuaaagagaagcuguauca

SEQ ID NO: 1587543 - RNA, 19 nt, Homo sapiens
  misc_RNA (1)...(19): siRNA sense strand
cuacaaggauaaaccuguu

SEQ ID NO: 1587544 - RNA, 19 nt, Homo sapiens
  misc_RNA (1)...(19): siRNA sense strand
ccaucaagcugagcaaaga

SEQ ID NO: 1587545 - RNA, 19 nt, Homo sapiens
  misc_RNA (1)...(19): siRNA sense strand
gaucaguccucuggagaau

SEQ ID NO: 1587546 - RNA, 19 nt, Homo sapiens
  misc_RNA (1)...(19): siRNA sense strand
gagcaagucccaggucauu

SEQ ID NO: 1587547 - RNA, 19 nt, Homo sapiens
  misc_RNA (1)...(19): siRNA sense strand
ccuagaacauugccggaaa

SEQ ID NO: 1587548 - RNA, 19 nt, Homo sapiens
  misc_RNA (1)...(19): siRNA sense strand
gaucagcaaguuuaagaga

SEQ ID NO: 1587549 - RNA, 19 nt, Homo sapiens
  misc_RNA (1)...(19): siRNA sense strand
cauaagauaucuguacaag

SEQ ID NO: 1587550 - RNA, 19 nt, Homo sapiens
  misc_RNA (1)...(19): siRNA sense strand
agagaggacauauacauaa

SEQ ID NO: 1587551 - RNA, 19 nt, Homo sapiens
  misc_RNA (1)...(19): siRNA sense strand
ggauccagacaaugaauuu

SEQ ID NO: 1587552 - RNA, 19 nt, Homo sapiens
  misc_RNA (1)...(19): siRNA sense strand
gagaaugagcugaucacaa

SEQ ID NO: 1587553 - RNA, 19 nt, Homo sapiens
  misc_RNA (1)...(19): siRNA sense strand
caugagcgguugucuucuu

SEQ ID NO: 1587554 - RNA, 19 nt, Homo sapiens
  misc_RNA (1)...(19): siRNA sense strand
uaucauauuucgacaaagg

SEQ ID NO: 1587555 - RNA, 19 nt, Homo sapiens
  misc_RNA (1)...(19): siRNA sense strand
auacaagguucuucuggaa

SEQ ID NO: 1587556 - RNA, 19 nt, Homo sapiens
  misc_RNA (1)...(19): siRNA sense strand
gggcagaggagacgaacaa

SEQ ID NO: 1587557 - RNA, 19 nt, Homo sapiens
  misc_RNA (1)...(19): siRNA sense strand
ccaggucauugcagagaaa

SEQ ID NO: 1587558 - RNA, 19 nt, Homo sapiens
  misc_RNA (1)...(19): siRNA sense strand
ugaacgugcugaacuuuua

SEQ ID NO: 1587559 - RNA, 19 nt, Homo sapiens
  misc_RNA (1)...(19): siRNA sense strand
gcaagagcuuaaagagaag

SEQ ID NO: 1587560 - RNA, 19 nt, Homo sapiens
  misc_RNA (1)...(19): siRNA sense strand
gacaaugaauuugcuacga

SEQ ID NO: 1587561 - RNA, 19 nt, Homo sapiens
  misc_RNA (1)...(19): siRNA sense strand
cggagaagaugaccaguac

SEQ ID NO: 1587562 - RNA, 19 nt, Homo sapiens
  misc_RNA (1)...(19): siRNA sense strand
gaaccggaucagcaaguuu

SEQ ID NO: 1587563 - RNA, 19 nt, Homo sapiens
  misc_RNA (1)...(19): siRNA sense strand
gcugcuaaagcgacuaaua

SEQ ID NO: 1587564 - RNA, 19 nt, Homo sapiens
  misc_RNA (1)...(19): siRNA sense strand
gaagucaaacagauuucaa

SEQ ID NO: 1587565 - RNA, 19 nt, Homo sapiens
  misc_RNA (1)...(19): siRNA sense strand
gcggagaagaugaccagua

SEQ ID NO: 1587566 - RNA, 19 nt, Homo sapiens
  misc_RNA (1)...(19): siRNA sense strand
acaaugaauuugcuacgau

SEQ ID NO: 1587567 - RNA, 19 nt, Homo sapiens
  misc_RNA (1)...(19): siRNA sense strand
ccgcccagcuacaaggaua

SEQ ID NO: 1587568 - RNA, 19 nt, Homo sapiens
  misc_RNA (1)...(19): siRNA sense strand
cagaggagacgaacaauac

SEQ ID NO: 1587569 - RNA, 19 nt, Homo sapiens
  misc_RNA (1)...(19): siRNA sense strand
uugaagaucugucccuuag

SEQ ID NO: 1587570 - RNA, 19 nt, Homo sapiens
  misc_RNA (1)...(19): siRNA sense strand
gaacucaaggagaaaguag

SEQ ID NO: 1587571 - RNA, 19 nt, Homo sapiens
  misc_RNA (1)...(19): siRNA sense strand
ugaaguagagcuccggaaa

SEQ ID NO: 1587572 - RNA, 19 nt, Homo sapiens
  misc_RNA (1)...(19): siRNA sense strand
aaacugcuccuagaacauu

SEQ ID NO: 1587573 - RNA, 19 nt, Homo sapiens
  misc_RNA (1)...(19): siRNA sense strand
gaguucaauuucaguggaa

SEQ ID NO: 1587574 - RNA, 19 nt, Homo sapiens
  misc_RNA (1)...(19): siRNA sense strand
ugaauacuuugcuguugga

SEQ ID NO: 1587575 - RNA, 19 nt, Homo sapiens
  misc_RNA (1)...(19): siRNA sense strand
ggccaaagagucuccaguu

SEQ ID NO: 1587576 - RNA, 19 nt, Homo sapiens
  misc_RNA (1)...(19): siRNA sense strand
ggaacucaaggagaaagua

SEQ ID NO: 1587577 - RNA, 19 nt, Homo sapiens
  misc_RNA (1)...(19): siRNA sense strand
aaggaaaucggcuuuagaa

SEQ ID NO: 1587578 - RNA, 19 nt, Homo sapiens
  misc_RNA (1)...(19): siRNA sense strand
cagcaagagcuuaaagaga

SEQ ID NO: 1587579 - RNA, 19 nt, Homo sapiens
  misc_RNA (1)...(19): siRNA sense strand
gaaguagagcuccggaaag

SEQ ID NO: 1587580 - RNA, 19 nt, Homo sapiens
  misc_RNA (1)...(19): siRNA sense strand
gaucugauggcucaaucuu

SEQ ID NO: 1587581 - RNA, 19 nt, Homo sapiens
  misc_RNA (1)...(19): siRNA sense strand
cugcggagguuguccauca

SEQ ID NO: 1587582 - RNA, 19 nt, Homo sapiens
  misc_RNA (1)...(19): siRNA sense strand
gcaccgagacugugagaac

SEQ ID NO: 1587583 - RNA, 19 nt, Homo sapiens
  misc_RNA (1)...(19): siRNA sense strand
auaaucggcuaucaccauu

SEQ ID NO: 1587584 - RNA, 19 nt, Homo sapiens
  misc_RNA (1)...(19): siRNA sense strand
ccagaacccgauuugauga

SEQ ID NO: 1587585 - RNA, 19 nt, Homo sapiens
  misc_RNA (1)...(19): siRNA sense strand
aagaguuggcugagacuua

SEQ ID NO: 1587586 - RNA, 19 nt, Homo sapiens
  misc_RNA (1)...(19): siRNA sense strand
aaagagaagcuguaucaag

SEQ ID NO: 1587587 - RNA, 19 nt, Homo sapiens
  misc_RNA (1)...(19): siRNA sense strand
gacuauagaaccaucauca

SEQ ID NO: 1587588 - RNA, 19 nt, Homo sapiens
  misc_RNA (1)...(19): siRNA sense strand
gaaggcagccagaggaacu

SEQ ID NO: 1587589 - RNA, 19 nt, Homo sapiens
  misc_RNA (1)...(19): siRNA sense strand
gagcugcuaaagcgacuaa

SEQ ID NO: 1587590 - RNA, 19 nt, Homo sapiens
  misc_RNA (1)...(19): siRNA sense strand
agaagagagaggacauaua

SEQ ID NO: 1587591 - RNA, 19 nt, Homo sapiens
  misc_RNA (1)...(19): siRNA sense strand
auacuuugcuguuggauac

SEQ ID NO: 1587592 - RNA, 19 nt, Homo sapiens
  misc_RNA (1)...(19): siRNA sense strand
aaccggaucagcaaguuua

SEQ ID NO: 1587593 - RNA, 19 nt, Homo sapiens
  misc_RNA (1)...(19): siRNA sense strand
gagaggagaacagcgagaa

SEQ ID NO: 1587594 - RNA, 19 nt, Homo sapiens
  misc_RNA (1)...(19): siRNA sense strand
gaggagacgaacaauacaa

SEQ ID NO: 1587595 - RNA, 19 nt, Homo sapiens
  misc_RNA (1)...(19): siRNA sense strand
gcuacgauguggauugaac

SEQ ID NO: 1587596 - RNA, 19 nt, Homo sapiens
  misc_RNA (1)...(19): siRNA sense strand
gagaagaugaccaguacca

SEQ ID NO: 1587597 - RNA, 19 nt, Homo sapiens
  misc_RNA (1)...(19): siRNA sense strand
gaugaaaguucuugaguuu

SEQ ID NO: 1587598 - RNA, 19 nt, Homo sapiens
  misc_RNA (1)...(19): siRNA sense strand
gaggagggcuggaagauuu

SEQ ID NO: 1587599 - RNA, 19 nt, Homo sapiens
  misc_RNA (1)...(19): siRNA sense strand
gguauuaucuucacaaaug

SEQ ID NO: 1587600 - RNA, 19 nt, Homo sapiens
  misc_RNA (1)...(19): siRNA sense strand
ugaaagagcccauuacaaa

SEQ ID NO: 1587601 - RNA, 19 nt, Homo sapiens
  misc_RNA (1)...(19): siRNA sense strand
gcagauaugcugagaaaug

SEQ ID NO: 1587602 - RNA, 19 nt, Homo sapiens
  misc_RNA (1)...(19): siRNA sense strand
gaggaagucuggaaagugu

SEQ ID NO: 1587603 - RNA, 19 nt, Homo sapiens
  misc_RNA (1)...(19): siRNA sense strand
gaauugagcacuucauguu

SEQ ID NO: 1587604 - RNA, 19 nt, Homo sapiens
  misc_RNA (1)...(19): siRNA sense strand
gaagaaaggccaauaugca

SEQ ID NO: 1587605 - RNA, 19 nt, Homo sapiens
  misc_RNA (1)...(19): siRNA sense strand
ggaagcuccuuaccaaaga

SEQ ID NO: 1587606 - RNA, 19 nt, Homo sapiens
  misc_RNA (1)...(19): siRNA sense strand
ugaaggaaguggagccuaa

SEQ ID NO: 1587607 - RNA, 19 nt, Homo sapiens
  misc_RNA (1)...(19): siRNA sense strand
gauagaugcucuggacauu

SEQ ID NO: 1587608 - RNA, 19 nt, Homo sapiens
  misc_RNA (1)...(19): siRNA sense strand
gaucuaggcugugaugcaa

SEQ ID NO: 1587609 - RNA, 19 nt, Homo sapiens
  misc_RNA (1)...(19): siRNA sense strand
gaaacaggcgugcccaaga

SEQ ID NO: 1587610 - RNA, 19 nt, Homo sapiens
  misc_RNA (1)...(19): siRNA sense strand
gauaugcugagaaauguaa

SEQ ID NO: 1587611 - RNA, 19 nt, Homo sapiens
  misc_RNA (1)...(19): siRNA sense strand
gaucuagaagccacugaua

SEQ ID NO: 1587612 - RNA, 19 nt, Homo sapiens
  misc_RNA (1)...(19): siRNA sense strand
ugagaaauguaacccaaau

SEQ ID NO: 1587613 - RNA, 19 nt, Homo sapiens
  misc_RNA (1)...(19): siRNA sense strand
gaaagagcccauuacaaag

SEQ ID NO: 1587614 - RNA, 19 nt, Homo sapiens
  misc_RNA (1)...(19): siRNA sense strand
aggcagauaugcugagaaa

SEQ ID NO: 1587615 - RNA, 19 nt, Homo sapiens
  misc_RNA (1)...(19): siRNA sense strand
ugauacagcucccagugaa

SEQ ID NO: 1587616 - RNA, 19 nt, Homo sapiens
  misc_RNA (1)...(19): siRNA sense strand
gagcugauccuuggucuug

SEQ ID NO: 1587617 - RNA, 19 nt, Homo sapiens
  misc_RNA (1)...(19): siRNA sense strand
cacaagacaucccgaagga

SEQ ID NO: 1587618 - RNA, 19 nt, Homo sapiens
  misc_RNA (1)...(19): siRNA sense strand
gcuggaagauuugauagau

SEQ ID NO: 1587619 - RNA, 19 nt, Homo sapiens
  misc_RNA (1)...(19): siRNA sense strand
uacagaggcuuuacaagau

SEQ ID NO: 1587620 - RNA, 19 nt, Homo sapiens
  misc_RNA (1)...(19): siRNA sense strand
ccagaggcccuguagauga

SEQ ID NO: 1587621 - RNA, 19 nt, Homo sapiens
  misc_RNA (1)...(19): siRNA sense strand
ggugcacguuccaagguua

SEQ ID NO: 1587622 - RNA, 19 nt, Homo sapiens
  misc_RNA (1)...(19): siRNA sense strand
ggaagucuggaaaguguuu

SEQ ID NO: 1587623 - RNA, 19 nt, Homo sapiens
  misc_RNA (1)...(19): siRNA sense strand
gaaggauguuucccagagu

SEQ ID NO: 1587624 - RNA, 19 nt, Homo sapiens
  misc_RNA (1)...(19): siRNA sense strand
augcaaagcugagugauga

SEQ ID NO: 1587625 - RNA, 19 nt, Homo sapiens
  misc_RNA (1)...(19): siRNA sense strand
cagauaugcugagaaaugu

SEQ ID NO: 1587626 - RNA, 19 nt, Homo sapiens
  misc_RNA (1)...(19): siRNA sense strand
gcaaagcugagugaugaaa

SEQ ID NO: 1587627 - RNA, 19 nt, Homo sapiens
  misc_RNA (1)...(19): siRNA sense strand
auacagaggcuuuacaaga

SEQ ID NO: 1587628 - RNA, 19 nt, Homo sapiens
  misc_RNA (1)...(19): siRNA sense strand
ggaagaaaggccaauaugc

SEQ ID NO: 1587629 - RNA, 19 nt, Homo sapiens
  misc_RNA (1)...(19): siRNA sense strand
agaugaaaguucuugaguu

SEQ ID NO: 1587630 - RNA, 19 nt, Homo sapiens
  misc_RNA (1)...(19): siRNA sense strand
gaaaccagcaagaugaaag

SEQ ID NO: 1587631 - RNA, 19 nt, Homo sapiens
  misc_RNA (1)...(19): siRNA sense strand
acaaguaccaaaugaaaga

SEQ ID NO: 1587632 - RNA, 19 nt, Homo sapiens
  misc_RNA (1)...(19): siRNA sense strand
ggaauugagcacuucaugu

SEQ ID NO: 1587633 - RNA, 19 nt, Homo sapiens
  misc_RNA (1)...(19): siRNA sense strand
ggaaguggagccuaauaag

SEQ ID NO: 1587634 - RNA, 19 nt, Homo sapiens
  misc_RNA (1)...(19): siRNA sense strand
gaagcuccuuaccaaagau

SEQ ID NO: 1587635 - RNA, 19 nt, Homo sapiens
  misc_RNA (1)...(19): siRNA sense strand
ccagcaagaugaaaguucu

SEQ ID NO: 1587636 - RNA, 19 nt, Homo sapiens
  misc_RNA (1)...(19): siRNA sense strand
gaaauguaacccaaauguc

SEQ ID NO: 1587637 - RNA, 19 nt, Homo sapiens
  misc_RNA (1)...(19): siRNA sense strand
uaacccaaauguccaagag

SEQ ID NO: 1587638 - RNA, 19 nt, Homo sapiens
  misc_RNA (1)...(19): siRNA sense strand
ucccagaguucacuugaug

SEQ ID NO: 1587639 - RNA, 19 nt, Homo sapiens
  misc_RNA (1)...(19): siRNA sense strand
ugacuguccuggguauuau

SEQ ID NO: 1587640 - RNA, 19 nt, Homo sapiens
  misc_RNA (1)...(19): siRNA sense strand
caagagccaguucccugua

SEQ ID NO: 1587641 - RNA, 19 nt, Homo sapiens
  misc_RNA (1)...(19): siRNA sense strand
uagaugcucuggacauuuu

SEQ ID NO: 1587642 - RNA, 19 nt, Homo sapiens
  misc_RNA (1)...(19): siRNA sense strand
cagaggcuuuacaagauga

SEQ ID NO: 1587643 - RNA, 19 nt, Homo sapiens
  misc_RNA (1)...(19): siRNA sense strand
guauacagaggcuuuacaa

SEQ ID NO: 1587644 - RNA, 19 nt, Homo sapiens
  misc_RNA (1)...(19): siRNA sense strand
gugcauuacuugcuguaca

SEQ ID NO: 1587645 - RNA, 19 nt, Homo sapiens
  misc_RNA (1)...(19): siRNA sense strand
acagaggcuuuacaagaug

SEQ ID NO: 1587646 - RNA, 19 nt, Homo sapiens
  misc_RNA (1)...(19): siRNA sense strand
ggaggaagucuggaaagug

SEQ ID NO: 1587647 - RNA, 19 nt, Homo sapiens
  misc_RNA (1)...(19): siRNA sense strand
aaagcugagugaugaaaca

SEQ ID NO: 1587648 - RNA, 19 nt, Homo sapiens
  misc_RNA (1)...(19): siRNA sense strand
aagagccaguucccuguaa

SEQ ID NO: 1587649 - RNA, 19 nt, Homo sapiens
  misc_RNA (1)...(19): siRNA sense strand
aaacaggcgugcccaagac

SEQ ID NO: 1587650 - RNA, 19 nt, Homo sapiens
  misc_RNA (1)...(19): siRNA sense strand
ugacggaauugagcacuuc

SEQ ID NO: 1587651 - RNA, 19 nt, Homo sapiens
  misc_RNA (1)...(19): siRNA sense strand
cccuguagaugagaaagua

SEQ ID NO: 1587652 - RNA, 19 nt, Homo sapiens
  misc_RNA (1)...(19): siRNA sense strand
cccaagagcccaugcugaa

SEQ ID NO: 1587653 - RNA, 19 nt, Homo sapiens
  misc_RNA (1)...(19): siRNA sense strand
gaaguggagccuaauaagc

SEQ ID NO: 1587654 - RNA, 19 nt, Homo sapiens
  misc_RNA (1)...(19): siRNA sense strand
agaaauguaacccaaaugu

SEQ ID NO: 1587655 - RNA, 19 nt, Homo sapiens
  misc_RNA (1)...(19): siRNA sense strand
cagaggcccuguagaugag

SEQ ID NO: 1587656 - RNA, 19 nt, Homo sapiens
  misc_RNA (1)...(19): siRNA sense strand
gggguuauaugacggaauu

SEQ ID NO: 1587657 - RNA, 19 nt, Homo sapiens
  misc_RNA (1)...(19): siRNA sense strand
gaugcaaagcugagugaug

SEQ ID NO: 1587658 - RNA, 19 nt, Homo sapiens
  misc_RNA (1)...(19): siRNA sense strand
uagaagaggaggaagaauc

SEQ ID NO: 1587659 - RNA, 19 nt, Homo sapiens
  misc_RNA (1)...(19): siRNA sense strand
aaaauuaccuggaguacca

SEQ ID NO: 1587660 - RNA, 19 nt, Homo sapiens
  misc_RNA (1)...(19): siRNA sense strand
cagcaaguccucccaacug

SEQ ID NO: 1587661 - RNA, 19 nt, Homo sapiens
  misc_RNA (1)...(19): siRNA sense strand
gcaagugcccaacagugau

SEQ ID NO: 1587662 - RNA, 19 nt, Homo sapiens
  misc_RNA (1)...(19): siRNA sense strand
ccaauaugcacacaagauc

SEQ ID NO: 1587663 - RNA, 19 nt, Homo sapiens
  misc_RNA (1)...(19): siRNA sense strand
aaaggcagauaugcugaga

SEQ ID NO: 1587664 - RNA, 19 nt, Homo sapiens
  misc_RNA (1)...(19): siRNA sense strand
gaaggagucaacgaccaaa

SEQ ID NO: 1587665 - RNA, 19 nt, Homo sapiens
  misc_RNA (1)...(19): siRNA sense strand
auugagcacuucauguuug

SEQ ID NO: 1587666 - RNA, 19 nt, Homo sapiens
  misc_RNA (1)...(19): siRNA sense strand
gagaaauguaacccaaaug

SEQ ID NO: 1587667 - RNA, 19 nt, Homo sapiens
  misc_RNA (1)...(19): siRNA sense strand
gccaauaugcacacaagau

SEQ ID NO: 1587668 - RNA, 19 nt, Homo sapiens
  misc_RNA (1)...(19): siRNA sense strand
ggagucaacgaccaaaugg

SEQ ID NO: 1587669 - RNA, 19 nt, Homo sapiens
  misc_RNA (1)...(19): siRNA sense strand
gaaggaaguggagccuaau

SEQ ID NO: 1587670 - RNA, 19 nt, Homo sapiens
  misc_RNA (1)...(19): siRNA sense strand
gaagucuggaaaguguuua

SEQ ID NO: 1587671 - RNA, 19 nt, Homo sapiens
  misc_RNA (1)...(19): siRNA sense strand
aagacuggccugcugauga

SEQ ID NO: 1587672 - RNA, 19 nt, Homo sapiens
  misc_RNA (1)...(19): siRNA sense strand
cgaaggagucaacgaccaa

SEQ ID NO: 1587673 - RNA, 19 nt, Homo sapiens
  misc_RNA (1)...(19): siRNA sense strand
aagguuaaguccagcaagu

SEQ ID NO: 1587674 - RNA, 19 nt, Homo sapiens
  misc_RNA (1)...(19): siRNA sense strand
ugaauucucaaacugguau

SEQ ID NO: 1587675 - RNA, 19 nt, Homo sapiens
  misc_RNA (1)...(19): siRNA sense strand
ccaagagcccaugcugaaa

SEQ ID NO: 1587676 - RNA, 19 nt, Homo sapiens
  misc_RNA (1)...(19): siRNA sense strand
gauccuccacgcuaucaau

SEQ ID NO: 1587677 - RNA, 19 nt, Homo sapiens
  misc_RNA (1)...(19): siRNA sense strand
ugaugacuguccuggguau

SEQ ID NO: 1587678 - RNA, 19 nt, Homo sapiens
  misc_RNA (1)...(19): siRNA sense strand
ugcauuacuugcuguacaa

SEQ ID NO: 1587679 - RNA, 19 nt, Homo sapiens
  misc_RNA (1)...(19): siRNA sense strand
uauauuggugcauuacuug

SEQ ID NO: 1587680 - RNA, 19 nt, Homo sapiens
  misc_RNA (1)...(19): siRNA sense strand
aauaugcacacaagaucua

SEQ ID NO: 1587681 - RNA, 19 nt, Homo sapiens
  misc_RNA (1)...(19): siRNA sense strand
agucaacgaccaaauggaa

SEQ ID NO: 1587682 - RNA, 19 nt, Homo sapiens
  misc_RNA (1)...(19): siRNA sense strand
auacagcucccagugaauu

SEQ ID NO: 1587683 - RNA, 19 nt, Homo sapiens
  misc_RNA (1)...(19): siRNA sense strand
caagagcccaugcugaaac

SEQ ID NO: 1587684 - RNA, 19 nt, Homo sapiens
  misc_RNA (1)...(19): siRNA sense strand
guauuaucuucacaaaugg

SEQ ID NO: 1587685 - RNA, 19 nt, Homo sapiens
  misc_RNA (1)...(19): siRNA sense strand
uggguauuaucuucacaaa

SEQ ID NO: 1587686 - RNA, 19 nt, Homo sapiens
  misc_RNA (1)...(19): siRNA sense strand
aaggauguuucccagaguu

SEQ ID NO: 1587687 - RNA, 19 nt, Homo sapiens
  misc_RNA (1)...(19): siRNA sense strand
aaagagcccauuacaaagg

SEQ ID NO: 1587688 - RNA, 19 nt, Homo sapiens
  misc_RNA (1)...(19): siRNA sense strand
ucaacgaccaaauggaaga

SEQ ID NO: 1587689 - RNA, 19 nt, Homo sapiens
  misc_RNA (1)...(19): siRNA sense strand
ccuaauaagcacaucuaug

SEQ ID NO: 1587690 - RNA, 19 nt, Homo sapiens
  misc_RNA (1)...(19): siRNA sense strand
gucuugaccugaaggaagu

SEQ ID NO: 1587691 - RNA, 19 nt, Homo sapiens
  misc_RNA (1)...(19): siRNA sense strand
aggaaguggagccuaauaa

SEQ ID NO: 1587692 - RNA, 19 nt, Homo sapiens
  misc_RNA (1)...(19): siRNA sense strand
uggaagaaaggccaauaug

SEQ ID NO: 1587693 - RNA, 19 nt, Homo sapiens
  misc_RNA (1)...(19): siRNA sense strand
gguuauaugacggaauuga

SEQ ID NO: 1587694 - RNA, 19 nt, Homo sapiens
  misc_RNA (1)...(19): siRNA sense strand
agacuggccugcugaugac

SEQ ID NO: 1587695 - RNA, 19 nt, Homo sapiens
  misc_RNA (1)...(19): siRNA sense strand
cuggaagauuugauagaug

SEQ ID NO: 1587696 - RNA, 19 nt, Homo sapiens
  misc_RNA (1)...(19): siRNA sense strand
cgaggagggcuggaagauu

SEQ ID NO: 1587697 - RNA, 19 nt, Homo sapiens
  misc_RNA (1)...(19): siRNA sense strand
ggaagaacauggcaacauu

SEQ ID NO: 1587698 - RNA, 19 nt, Homo sapiens
  misc_RNA (1)...(19): siRNA sense strand
gaagagacauuccaauauc

SEQ ID NO: 1587699 - RNA, 19 nt, Homo sapiens
  misc_RNA (1)...(19): siRNA sense strand
gaacaggaacugggauuua

SEQ ID NO: 1587700 - RNA, 19 nt, Homo sapiens
  misc_RNA (1)...(19): siRNA sense strand
gaagaacauggcaacauuu

SEQ ID NO: 1587701 - RNA, 19 nt, Homo sapiens
  misc_RNA (1)...(19): siRNA sense strand
caaacuaguuguauaucug

SEQ ID NO: 1587702 - RNA, 19 nt, Homo sapiens
  misc_RNA (1)...(19): siRNA sense strand
guuaucagauccuugaaga

SEQ ID NO: 1587703 - RNA, 19 nt, Homo sapiens
  misc_RNA (1)...(19): siRNA sense strand
ggaugaaacagaagaaaug

SEQ ID NO: 1587704 - RNA, 19 nt, Homo sapiens
  misc_RNA (1)...(19): siRNA sense strand
ggagaaaccauuaguguac

SEQ ID NO: 1587705 - RNA, 19 nt, Homo sapiens
  misc_RNA (1)...(19): siRNA sense strand
cgaccacucuggauuacaa

SEQ ID NO: 1587706 - RNA, 19 nt, Homo sapiens
  misc_RNA (1)...(19): siRNA sense strand
acaagaaaguuaucagauc

SEQ ID NO: 1587707 - RNA, 19 nt, Homo sapiens
  misc_RNA (1)...(19): siRNA sense strand
ucaggucccucaaagauuc

SEQ ID NO: 1587708 - RNA, 19 nt, Homo sapiens
  misc_RNA (1)...(19): siRNA sense strand
ugaagagacauuccaauau

SEQ ID NO: 1587709 - RNA, 19 nt, Homo sapiens
  misc_RNA (1)...(19): siRNA sense strand
gaugucaggucccucaaag

SEQ ID NO: 1587710 - RNA, 19 nt, Homo sapiens
  misc_RNA (1)...(19): siRNA sense strand
aacaggaacugggauuuaa

SEQ ID NO: 1587711 - RNA, 19 nt, Homo sapiens
  misc_RNA (1)...(19): siRNA sense strand
caaauuuacaggaggauga

SEQ ID NO: 1587712 - RNA, 19 nt, Homo sapiens
  misc_RNA (1)...(19): siRNA sense strand
acaggaggaugaaacagaa

SEQ ID NO: 1587713 - RNA, 19 nt, Homo sapiens
  misc_RNA (1)...(19): siRNA sense strand
ugaaacagaagaaauggaa

SEQ ID NO: 1587714 - RNA, 19 nt, Homo sapiens
  misc_RNA (1)...(19): siRNA sense strand
gaaauacuaacgcuucagu

SEQ ID NO: 1587715 - RNA, 19 nt, Homo sapiens
  misc_RNA (1)...(19): siRNA sense strand
gaagaagaaaucaauuguc

SEQ ID NO: 1587716 - RNA, 19 nt, Homo sapiens
  misc_RNA (1)...(19): siRNA sense strand
aaaguuaucagauccuuga

SEQ ID NO: 1587717 - RNA, 19 nt, Homo sapiens
  misc_RNA (1)...(19): siRNA sense strand
cacucuggauuacaaauuu

SEQ ID NO: 1587718 - RNA, 19 nt, Homo sapiens
  misc_RNA (1)...(19): siRNA sense strand
uaacagaugaggaagaaca

SEQ ID NO: 1587719 - RNA, 19 nt, Homo sapiens
  misc_RNA (1)...(19): siRNA sense strand
uugaagagacauuccaaua

SEQ ID NO: 1587720 - RNA, 19 nt, Homo sapiens
  misc_RNA (1)...(19): siRNA sense strand
aaacguacccacaggaaga

SEQ ID NO: 1587721 - RNA, 19 nt, Homo sapiens
  misc_RNA (1)...(19): siRNA sense strand
aaacagugaaguugagaaa

SEQ ID NO: 1587722 - RNA, 19 nt, Homo sapiens
  misc_RNA (1)...(19): siRNA sense strand
gaauccuauuugcugcuua

SEQ ID NO: 1587723 - RNA, 19 nt, Homo sapiens
  misc_RNA (1)...(19): siRNA sense strand
aagauuccuuggaccauuu

SEQ ID NO: 1587724 - RNA, 19 nt, Homo sapiens
  misc_RNA (1)...(19): siRNA sense strand
gcuaaauauugaacaugga

SEQ ID NO: 1587725 - RNA, 19 nt, Homo sapiens
  misc_RNA (1)...(19): siRNA sense strand
ugcagaagaugguaagguu

SEQ ID NO: 1587726 - RNA, 19 nt, Homo sapiens
  misc_RNA (1)...(19): siRNA sense strand
ccaaggggcugaugauguu

SEQ ID NO: 1587727 - RNA, 19 nt, Homo sapiens
  misc_RNA (1)...(19): siRNA sense strand
ugaugggaguuaaguguga

SEQ ID NO: 1587728 - RNA, 19 nt, Homo sapiens
  misc_RNA (1)...(19): siRNA sense strand
gcccgaccacucuggauua

SEQ ID NO: 1587729 - RNA, 19 nt, Homo sapiens
  misc_RNA (1)...(19): siRNA sense strand
uaucagauccuugaagaga

SEQ ID NO: 1587730 - RNA, 19 nt, Homo sapiens
  misc_RNA (1)...(19): siRNA sense strand
aaagauuccuuggaccauu

SEQ ID NO: 1587731 - RNA, 19 nt, Homo sapiens
  misc_RNA (1)...(19): siRNA sense strand
aguaacagaugaggaagaa

SEQ ID NO: 1587732 - RNA, 19 nt, Homo sapiens
  misc_RNA (1)...(19): siRNA sense strand
gcugaucaaacuaguugua

SEQ ID NO: 1587733 - RNA, 19 nt, Homo sapiens
  misc_RNA (1)...(19): siRNA sense strand
ugguaagguucgaaucuuu

SEQ ID NO: 1587734 - RNA, 19 nt, Homo sapiens
  misc_RNA (1)...(19): siRNA sense strand
auuaguagcugaucaaacu

SEQ ID NO: 1587735 - RNA, 19 nt, Homo sapiens
  misc_RNA (1)...(19): siRNA sense strand
gcagagggcggagaucuca

SEQ ID NO: 1587736 - RNA, 19 nt, Homo sapiens
  misc_RNA (1)...(19): siRNA sense strand
uguuaccagugucuuauuu

SEQ ID NO: 1587737 - RNA, 19 nt, Homo sapiens
  misc_RNA (1)...(19): siRNA sense strand
gaaauggaaggcccacagu

SEQ ID NO: 1587738 - RNA, 19 nt, Homo sapiens
  misc_RNA (1)...(19): siRNA sense strand
gugaugcuguggagucuuc

SEQ ID NO: 1587739 - RNA, 19 nt, Homo sapiens
  misc_RNA (1)...(19): siRNA sense strand
ggaacuccauuaggacaca

SEQ ID NO: 1587740 - RNA, 19 nt, Homo sapiens
  misc_RNA (1)...(19): siRNA sense strand
aaacagaagagucccacaa

SEQ ID NO: 1587741 - RNA, 19 nt, Homo sapiens
  misc_RNA (1)...(19): siRNA sense strand
cugaugauguuaccagugu

SEQ ID NO: 1587742 - RNA, 19 nt, Homo sapiens
  misc_RNA (1)...(19): siRNA sense strand
gaugggaguuaagugugaa

SEQ ID NO: 1587743 - RNA, 19 nt, Homo sapiens
  misc_RNA (1)...(19): siRNA sense strand
gagaaaccauuaguguacu

SEQ ID NO: 1587744 - RNA, 19 nt, Homo sapiens
  misc_RNA (1)...(19): siRNA sense strand
ggacgggugggcauucuuc

SEQ ID NO: 1587745 - RNA, 19 nt, Homo sapiens
  misc_RNA (1)...(19): siRNA sense strand
uagcugaucaaacuaguug

SEQ ID NO: 1587746 - RNA, 19 nt, Homo sapiens
  misc_RNA (1)...(19): siRNA sense strand
caagcaggguggaaauacu

SEQ ID NO: 1587747 - RNA, 19 nt, Homo sapiens
  misc_RNA (1)...(19): siRNA sense strand
gauuuaagggccacacuuc

SEQ ID NO: 1587748 - RNA, 19 nt, Homo sapiens
  misc_RNA (1)...(19): siRNA sense strand
ucagauccuugaagagaca

SEQ ID NO: 1587749 - RNA, 19 nt, Homo sapiens
  misc_RNA (1)...(19): siRNA sense strand
cauguggacuggauaugca

SEQ ID NO: 1587750 - RNA, 19 nt, Homo sapiens
  misc_RNA (1)...(19): siRNA sense strand
gaacauggcaacauuuuac

SEQ ID NO: 1587751 - RNA, 19 nt, Homo sapiens
  misc_RNA (1)...(19): siRNA sense strand
gauguuaccagugucuuau

SEQ ID NO: 1587752 - RNA, 19 nt, Homo sapiens
  misc_RNA (1)...(19): siRNA sense strand
gcucuaugccucacaugga

SEQ ID NO: 1587753 - RNA, 19 nt, Homo sapiens
  misc_RNA (1)...(19): siRNA sense strand
ggaugcaaacagugaaguu

SEQ ID NO: 1587754 - RNA, 19 nt, Homo sapiens
  misc_RNA (1)...(19): siRNA sense strand
guugugggaugcaaacagu

SEQ ID NO: 1587755 - RNA, 19 nt, Homo sapiens
  misc_RNA (1)...(19): siRNA sense strand
gaugguaagguucgaaucu

SEQ ID NO: 1587756 - RNA, 19 nt, Homo sapiens
  misc_RNA (1)...(19): siRNA sense strand
ccacucuggauuacaaauu

SEQ ID NO: 1587757 - RNA, 19 nt, Homo sapiens
  misc_RNA (1)...(19): siRNA sense strand
uggagaaaccauuagugua

SEQ ID NO: 1587758 - RNA, 19 nt, Homo sapiens
  misc_RNA (1)...(19): siRNA sense strand
ggugucauguggacuggau

SEQ ID NO: 1587759 - RNA, 19 nt, Homo sapiens
  misc_RNA (1)...(19): siRNA sense strand
gcaaacagugaaguugaga

SEQ ID NO: 1587760 - RNA, 19 nt, Homo sapiens
  misc_RNA (1)...(19): siRNA sense strand
gaugcaaacagugaaguug

SEQ ID NO: 1587761 - RNA, 19 nt, Homo sapiens
  misc_RNA (1)...(19): siRNA sense strand
gaggaugaaacagaagaaa

SEQ ID NO: 1587762 - RNA, 19 nt, Homo sapiens
  misc_RNA (1)...(19): siRNA sense strand
ggaggaugaaacagaagaa

SEQ ID NO: 1587763 - RNA, 19 nt, Homo sapiens
  misc_RNA (1)...(19): siRNA sense strand
gaagaugguaagguucgaa

SEQ ID NO: 1587764 - RNA, 19 nt, Homo sapiens
  misc_RNA (1)...(19): siRNA sense strand
ugauguuaccagugucuua

SEQ ID NO: 1587765 - RNA, 19 nt, Homo sapiens
  misc_RNA (1)...(19): siRNA sense strand
ggugaugggaguuaagugu

SEQ ID NO: 1587766 - RNA, 19 nt, Homo sapiens
  misc_RNA (1)...(19): siRNA sense strand
ggaugucaggucccucaaa

SEQ ID NO: 1587767 - RNA, 19 nt, Homo sapiens
  misc_RNA (1)...(19): siRNA sense strand
caagcucuaugccucacau

SEQ ID NO: 1587768 - RNA, 19 nt, Homo sapiens
  misc_RNA (1)...(19): siRNA sense strand
ggauuuaagggccacacuu

SEQ ID NO: 1587769 - RNA, 19 nt, Homo sapiens
  misc_RNA (1)...(19): siRNA sense strand
gguaagguucgaaucuuuc

SEQ ID NO: 1587770 - RNA, 19 nt, Homo sapiens
  misc_RNA (1)...(19): siRNA sense strand
ccauuaguguacuggaugu

SEQ ID NO: 1587771 - RNA, 19 nt, Homo sapiens
  misc_RNA (1)...(19): siRNA sense strand
ugucaggucccucaaagau

SEQ ID NO: 1587772 - RNA, 19 nt, Homo sapiens
  misc_RNA (1)...(19): siRNA sense strand
aagcaggguggaaauacua

SEQ ID NO: 1587773 - RNA, 19 nt, Homo sapiens
  misc_RNA (1)...(19): siRNA sense strand
aagagacauuccaauaucu

SEQ ID NO: 1587774 - RNA, 19 nt, Homo sapiens
  misc_RNA (1)...(19): siRNA sense strand
agaaaguuaucagauccuu

SEQ ID NO: 1587775 - RNA, 19 nt, Homo sapiens
  misc_RNA (1)...(19): siRNA sense strand
gacuggauaugcaggugau

SEQ ID NO: 1587776 - RNA, 19 nt, Homo sapiens
  misc_RNA (1)...(19): siRNA sense strand
guauaccccuuaaaugaau

SEQ ID NO: 1587777 - RNA, 19 nt, Homo sapiens
  misc_RNA (1)...(19): siRNA sense strand
acgcuucaguaacagauga

SEQ ID NO: 1587778 - RNA, 19 nt, Homo sapiens
  misc_RNA (1)...(19): siRNA sense strand
uggaaauacuaacgcuuca

SEQ ID NO: 1587779 - RNA, 19 nt, Homo sapiens
  misc_RNA (1)...(19): siRNA sense strand
gagcagagggcggagaucu

SEQ ID NO: 1587780 - RNA, 19 nt, Homo sapiens
  misc_RNA (1)...(19): siRNA sense strand
ccuguccucugccugaaug

SEQ ID NO: 1587781 - RNA, 19 nt, Homo sapiens
  misc_RNA (1)...(19): siRNA sense strand
aacagaagagucccacaaa

SEQ ID NO: 1587782 - RNA, 19 nt, Homo sapiens
  misc_RNA (1)...(19): siRNA sense strand
gaugggaagaucacguugu

SEQ ID NO: 1587783 - RNA, 19 nt, Homo sapiens
  misc_RNA (1)...(19): siRNA sense strand
caccuggucagcucuuaaa

SEQ ID NO: 1587784 - RNA, 19 nt, Homo sapiens
  misc_RNA (1)...(19): siRNA sense strand
uacaggaggaugaaacaga

SEQ ID NO: 1587785 - RNA, 19 nt, Homo sapiens
  misc_RNA (1)...(19): siRNA sense strand
gaugaaacagaagaaaugg

SEQ ID NO: 1587786 - RNA, 19 nt, Homo sapiens
  misc_RNA (1)...(19): siRNA sense strand
acagaagagucccacaaaa

SEQ ID NO: 1587787 - RNA, 19 nt, Homo sapiens
  misc_RNA (1)...(19): siRNA sense strand
caaacagugaaguugagaa

SEQ ID NO: 1587788 - RNA, 19 nt, Homo sapiens
  misc_RNA (1)...(19): siRNA sense strand
ggcuucgugugguaauauu

SEQ ID NO: 1587789 - RNA, 19 nt, Homo sapiens
  misc_RNA (1)...(19): siRNA sense strand
cucagagccuggugucaug

SEQ ID NO: 1587790 - RNA, 19 nt, Homo sapiens
  misc_RNA (1)...(19): siRNA sense strand
ugaacaggaacugggauuu

SEQ ID NO: 1587791 - RNA, 19 nt, Homo sapiens
  misc_RNA (1)...(19): siRNA sense strand
aguuaagugugaacaggaa

SEQ ID NO: 1587792 - RNA, 19 nt, Homo sapiens
  misc_RNA (1)...(19): siRNA sense strand
ucuguggcuucguguggua

SEQ ID NO: 1587793 - RNA, 19 nt, Homo sapiens
  misc_RNA (1)...(19): siRNA sense strand
guggcuucgugugguaaua

SEQ ID NO: 1587794 - RNA, 19 nt, Homo sapiens
  misc_RNA (1)...(19): siRNA sense strand
agaaaccauuaguguacug

SEQ ID NO: 1587795 - RNA, 19 nt, Homo sapiens
  misc_RNA (1)...(19): siRNA sense strand
gcugcuuacuggagggaau

SEQ ID NO: 1587796 - RNA, 19 nt, Homo sapiens
  misc_RNA (1)...(19): siRNA sense strand
gugaacaggaacugggauu

SEQ ID NO: 1587797 - RNA, 19 nt, Homo sapiens
  misc_RNA (1)...(19): siRNA sense strand
ggaggucuaucuucaauuu

SEQ ID NO: 1587798 - RNA, 19 nt, Homo sapiens
  misc_RNA (1)...(19): siRNA sense strand
aaagagcugugcagaauuu

SEQ ID NO: 1587799 - RNA, 19 nt, Homo sapiens
  misc_RNA (1)...(19): siRNA sense strand
gcgcagaucauaugcauuu

SEQ ID NO: 1587800 - RNA, 19 nt, Homo sapiens
  misc_RNA (1)...(19): siRNA sense strand
cuaaagagcugugcagaau

SEQ ID NO: 1587801 - RNA, 19 nt, Homo sapiens
  misc_RNA (1)...(19): siRNA sense strand
gaacaucaucucuaacguu

SEQ ID NO: 1587802 - RNA, 19 nt, Homo sapiens
  misc_RNA (1)...(19): siRNA sense strand
ucacuuaccggcucuauga

SEQ ID NO: 1587803 - RNA, 19 nt, Homo sapiens
  misc_RNA (1)...(19): siRNA sense strand
gcugaggucuaaggacaua

SEQ ID NO: 1587804 - RNA, 19 nt, Homo sapiens
  misc_RNA (1)...(19): siRNA sense strand
cagaauuuguggaggagua

SEQ ID NO: 1587805 - RNA, 19 nt, Homo sapiens
  misc_RNA (1)...(19): siRNA sense strand
gaaaggugaaggacuguga

SEQ ID NO: 1587806 - RNA, 19 nt, Homo sapiens
  misc_RNA (1)...(19): siRNA sense strand
cagaucauaugcauuugaa

SEQ ID NO: 1587807 - RNA, 19 nt, Homo sapiens
  misc_RNA (1)...(19): siRNA sense strand
caaguuugcugaggcugua

SEQ ID NO: 1587808 - RNA, 19 nt, Homo sapiens
  misc_RNA (1)...(19): siRNA sense strand
gccuggagcucccaucuga

SEQ ID NO: 1587809 - RNA, 19 nt, Homo sapiens
  misc_RNA (1)...(19): siRNA sense strand
ggacagcggccuucaugga

SEQ ID NO: 1587810 - RNA, 19 nt, Homo sapiens
  misc_RNA (1)...(19): siRNA sense strand
gugcaaggccuauuucaga

SEQ ID NO: 1587811 - RNA, 19 nt, Homo sapiens
  misc_RNA (1)...(19): siRNA sense strand
gccaugagacuaagcguaa

SEQ ID NO: 1587812 - RNA, 19 nt, Homo sapiens
  misc_RNA (1)...(19): siRNA sense strand
caaggccuauuucagagaa

SEQ ID NO: 1587813 - RNA, 19 nt, Homo sapiens
  misc_RNA (1)...(19): siRNA sense strand
gaacccagaccuguacuga

SEQ ID NO: 1587814 - RNA, 19 nt, Homo sapiens
  misc_RNA (1)...(19): siRNA sense strand
aacaucaucucuaacguuu

SEQ ID NO: 1587815 - RNA, 19 nt, Homo sapiens
  misc_RNA (1)...(19): siRNA sense strand
ggaacucccugucccaaac

SEQ ID NO: 1587816 - RNA, 19 nt, Homo sapiens
  misc_RNA (1)...(19): siRNA sense strand
gcucuggccaugagacuaa

SEQ ID NO: 1587817 - RNA, 19 nt, Homo sapiens
  misc_RNA (1)...(19): siRNA sense strand
gcagaucauaugcauuuga

SEQ ID NO: 1587818 - RNA, 19 nt, Homo sapiens
  misc_RNA (1)...(19): siRNA sense strand
gguagucuuuccuuugaug

SEQ ID NO: 1587819 - RNA, 19 nt, Homo sapiens
  misc_RNA (1)...(19): siRNA sense strand
ggaaguggaggucuaucuu

SEQ ID NO: 1587820 - RNA, 19 nt, Homo sapiens
  misc_RNA (1)...(19): siRNA sense strand
gagacuaagcguaaacuuc

SEQ ID NO: 1587821 - RNA, 19 nt, Homo sapiens
  misc_RNA (1)...(19): siRNA sense strand
caugaucucugcccauucu

SEQ ID NO: 1587822 - RNA, 19 nt, Homo sapiens
  misc_RNA (1)...(19): siRNA sense strand
gaagaagggcagcgcaaag

SEQ ID NO: 1587823 - RNA, 19 nt, Homo sapiens
  misc_RNA (1)...(19): siRNA sense strand
caagaugcccagugcaaug

SEQ ID NO: 1587824 - RNA, 19 nt, Homo sapiens
  misc_RNA (1)...(19): siRNA sense strand
gcuaaagagcugugcagaa

SEQ ID NO: 1587825 - RNA, 19 nt, Homo sapiens
  misc_RNA (1)...(19): siRNA sense strand
ggcaggaauuggagucaga

SEQ ID NO: 1587826 - RNA, 19 nt, Homo sapiens
  misc_RNA (1)...(19): siRNA sense strand
gaucauaugcauuugaaac

SEQ ID NO: 1587827 - RNA, 19 nt, Homo sapiens
  misc_RNA (1)...(19): siRNA sense strand
guggaggucuaucuucaau

SEQ ID NO: 1587828 - RNA, 19 nt, Homo sapiens
  misc_RNA (1)...(19): siRNA sense strand
acacauggccucauucagu

SEQ ID NO: 1587829 - RNA, 19 nt, Homo sapiens
  misc_RNA (1)...(19): siRNA sense strand
ggacucaagcagcucagaa

SEQ ID NO: 1587830 - RNA, 19 nt, Homo sapiens
  misc_RNA (1)...(19): siRNA sense strand
guacacauggccucauuca

SEQ ID NO: 1587831 - RNA, 19 nt, Homo sapiens
  misc_RNA (1)...(19): siRNA sense strand
gagcuucucgauccucuug

SEQ ID NO: 1587832 - RNA, 19 nt, Homo sapiens
  misc_RNA (1)...(19): siRNA sense strand
cagcgcagaucauaugcau

SEQ ID NO: 1587833 - RNA, 19 nt, Homo sapiens
  misc_RNA (1)...(19): siRNA sense strand
cauaugcauuugaaacaca

SEQ ID NO: 1587834 - RNA, 19 nt, Homo sapiens
  misc_RNA (1)...(19): siRNA sense strand
gagugccuaugaugaccua

SEQ ID NO: 1587835 - RNA, 19 nt, Homo sapiens
  misc_RNA (1)...(19): siRNA sense strand
gucaggaaguggaggucua

SEQ ID NO: 1587836 - RNA, 19 nt, Homo sapiens
  misc_RNA (1)...(19): siRNA sense strand
ucaccucuauccucagugu

SEQ ID NO: 1587837 - RNA, 19 nt, Homo sapiens
  misc_RNA (1)...(19): siRNA sense strand
gcaaggccuauuucagaga

SEQ ID NO: 1587838 - RNA, 19 nt, Homo sapiens
  misc_RNA (1)...(19): siRNA sense strand
caucaccucuauccucagu

SEQ ID NO: 1587839 - RNA, 19 nt, Homo sapiens
  misc_RNA (1)...(19): siRNA sense strand
gaggucuaucuucaauuua

SEQ ID NO: 1587840 - RNA, 19 nt, Homo sapiens
  misc_RNA (1)...(19): siRNA sense strand
ggacuccuucuccuuccua

SEQ ID NO: 1587841 - RNA, 19 nt, Homo sapiens
  misc_RNA (1)...(19): siRNA sense strand
gagcugugcagaauuugug

SEQ ID NO: 1587842 - RNA, 19 nt, Homo sapiens
  misc_RNA (1)...(19): siRNA sense strand
gcaauguguagcaagauuc

SEQ ID NO: 1587843 - RNA, 19 nt, Homo sapiens
  misc_RNA (1)...(19): siRNA sense strand
ccggcucuaugacaaguuu

SEQ ID NO: 1587844 - RNA, 19 nt, Homo sapiens
  misc_RNA (1)...(19): siRNA sense strand
uaaagagcugugcagaauu

SEQ ID NO: 1587845 - RNA, 19 nt, Homo sapiens
  misc_RNA (1)...(19): siRNA sense strand
gggguagucuuuccuuuga

SEQ ID NO: 1587846 - RNA, 19 nt, Homo sapiens
  misc_RNA (1)...(19): siRNA sense strand
ggaagaggcagagggaagu

SEQ ID NO: 1587847 - RNA, 19 nt, Homo sapiens
  misc_RNA (1)...(19): siRNA sense strand
gggagaggcagcaggaugu

SEQ ID NO: 1587848 - RNA, 19 nt, Homo sapiens
  misc_RNA (1)...(19): siRNA sense strand
caucaucucuaacguuucc

SEQ ID NO: 1587849 - RNA, 19 nt, Homo sapiens
  misc_RNA (1)...(19): siRNA sense strand
ggaucccggagucgucuua

SEQ ID NO: 1587850 - RNA, 19 nt, Homo sapiens
  misc_RNA (1)...(19): siRNA sense strand
ggaggcaggcuagacauca

SEQ ID NO: 1587851 - RNA, 19 nt, Homo sapiens
  misc_RNA (1)...(19): siRNA sense strand
uugcagagcacaagaggaa

SEQ ID NO: 1587852 - RNA, 19 nt, Homo sapiens
  misc_RNA (1)...(19): siRNA sense strand
gcagaaaggaaagaagaag

SEQ ID NO: 1587853 - RNA, 19 nt, Homo sapiens
  misc_RNA (1)...(19): siRNA sense strand
ccucucagcgcagaucaua

SEQ ID NO: 1587854 - RNA, 19 nt, Homo sapiens
  misc_RNA (1)...(19): siRNA sense strand
ugcaauguguagcaagauu

SEQ ID NO: 1587855 - RNA, 19 nt, Homo sapiens
  misc_RNA (1)...(19): siRNA sense strand
gaaaauggggaggaaguuu

SEQ ID NO: 1587856 - RNA, 19 nt, Homo sapiens
  misc_RNA (1)...(19): siRNA sense strand
gcaaguccagccucaaguc

SEQ ID NO: 1587857 - RNA, 19 nt, Homo sapiens
  misc_RNA (1)...(19): siRNA sense strand
ucaccugccuagcauacug

SEQ ID NO: 1587858 - RNA, 19 nt, Homo sapiens
  misc_RNA (1)...(19): siRNA sense strand
cggcagaaaggaaagaaga

SEQ ID NO: 1587859 - RNA, 19 nt, Homo sapiens
  misc_RNA (1)...(19): siRNA sense strand
ucucagcgcagaucauaug

SEQ ID NO: 1587860 - RNA, 19 nt, Homo sapiens
  misc_RNA (1)...(19): siRNA sense strand
gccaagaugcccagugcaa

SEQ ID NO: 1587861 - RNA, 19 nt, Homo sapiens
  misc_RNA (1)...(19): siRNA sense strand
gcaggcaugcugggaaguu

SEQ ID NO: 1587862 - RNA, 19 nt, Homo sapiens
  misc_RNA (1)...(19): siRNA sense strand
acacguggaccagcucuuu

SEQ ID NO: 1587863 - RNA, 19 nt, Homo sapiens
  misc_RNA (1)...(19): siRNA sense strand
guacugaggguggggauua

SEQ ID NO: 1587864 - RNA, 19 nt, Homo sapiens
  misc_RNA (1)...(19): siRNA sense strand
ugagugcccugcucuacag

SEQ ID NO: 1587865 - RNA, 19 nt, Homo sapiens
  misc_RNA (1)...(19): siRNA sense strand
aaguggaggucuaucuuca

SEQ ID NO: 1587866 - RNA, 19 nt, Homo sapiens
  misc_RNA (1)...(19): siRNA sense strand
cauacuaucaucgagauug

SEQ ID NO: 1587867 - RNA, 19 nt, Homo sapiens
  misc_RNA (1)...(19): siRNA sense strand
ccagugcaauguguagcaa

SEQ ID NO: 1587868 - RNA, 19 nt, Homo sapiens
  misc_RNA (1)...(19): siRNA sense strand
ccagaagcuucggcaggaa

SEQ ID NO: 1587869 - RNA, 19 nt, Homo sapiens
  misc_RNA (1)...(19): siRNA sense strand
gauguuuaccuccaagaca

SEQ ID NO: 1587870 - RNA, 19 nt, Homo sapiens
  misc_RNA (1)...(19): siRNA sense strand
ccaugagacuaagcguaaa

SEQ ID NO: 1587871 - RNA, 19 nt, Homo sapiens
  misc_RNA (1)...(19): siRNA sense strand
cggauccccugcucacuua

SEQ ID NO: 1587872 - RNA, 19 nt, Homo sapiens
  misc_RNA (1)...(19): siRNA sense strand
gaugcccagugcaaugugu

SEQ ID NO: 1587873 - RNA, 19 nt, Homo sapiens
  misc_RNA (1)...(19): siRNA sense strand
ggcuagacaucagggaaga

SEQ ID NO: 1587874 - RNA, 19 nt, Homo sapiens
  misc_RNA (1)...(19): siRNA sense strand
ggaggaaaauggggaggaa

SEQ ID NO: 1587875 - RNA, 19 nt, Homo sapiens
  misc_RNA (1)...(19): siRNA sense strand
gaugaaaaguuggaagcaa

SEQ ID NO: 1587876 - RNA, 19 nt, Homo sapiens
  misc_RNA (1)...(19): siRNA sense strand
gcugaggacagggaggaua

SEQ ID NO: 1587877 - RNA, 19 nt, Homo sapiens
  misc_RNA (1)...(19): siRNA sense strand
ugguacacauggccucauu

SEQ ID NO: 1587878 - RNA, 19 nt, Homo sapiens
  misc_RNA (1)...(19): siRNA sense strand
gcccuaccauacuaucauc

SEQ ID NO: 1587879 - RNA, 19 nt, Homo sapiens
  misc_RNA (1)...(19): siRNA sense strand
ggcagaaaggaaagaagaa

SEQ ID NO: 1587880 - RNA, 19 nt, Homo sapiens
  misc_RNA (1)...(19): siRNA sense strand
gagauugcagagcacaaga

SEQ ID NO: 1587881 - RNA, 19 nt, Homo sapiens
  misc_RNA (1)...(19): siRNA sense strand
cggcgaacccagaccugua

SEQ ID NO: 1587882 - RNA, 19 nt, Homo sapiens
  misc_RNA (1)...(19): siRNA sense strand
gcuucucgauccucuugga

SEQ ID NO: 1587883 - RNA, 19 nt, Homo sapiens
  misc_RNA (1)...(19): siRNA sense strand
gaccugcgucgggauguuu

SEQ ID NO: 1587884 - RNA, 19 nt, Homo sapiens
  misc_RNA (1)...(19): siRNA sense strand
caaccucccgcuacacauc

SEQ ID NO: 1587885 - RNA, 19 nt, Homo sapiens
  misc_RNA (1)...(19): siRNA sense strand
gcacuggguggcacaaacu

SEQ ID NO: 1587886 - RNA, 19 nt, Homo sapiens
  misc_RNA (1)...(19): siRNA sense strand
ggucuuugaaggucaggaa

SEQ ID NO: 1587887 - RNA, 19 nt, Homo sapiens
  misc_RNA (1)...(19): siRNA sense strand
cauuugaaacacaggcuaa

SEQ ID NO: 1587888 - RNA, 19 nt, Homo sapiens
  misc_RNA (1)...(19): siRNA sense strand
cccagaaccuccccuugua

SEQ ID NO: 1587889 - RNA, 19 nt, Homo sapiens
  misc_RNA (1)...(19): siRNA sense strand
caauguguagcaagauuca

SEQ ID NO: 1587890 - RNA, 19 nt, Homo sapiens
  misc_RNA (1)...(19): siRNA sense strand
gaggcaggcuagacaucag

SEQ ID NO: 1587891 - RNA, 19 nt, Homo sapiens
  misc_RNA (1)...(19): siRNA sense strand
caggcaugcugggaaguug

SEQ ID NO: 1587892 - RNA, 19 nt, Homo sapiens
  misc_RNA (1)...(19): siRNA sense strand
aggucuaucuucaauuuag

SEQ ID NO: 1587893 - RNA, 19 nt, Homo sapiens
  misc_RNA (1)...(19): siRNA sense strand
ccccgaacaucaucucuaa

SEQ ID NO: 1587894 - RNA, 19 nt, Homo sapiens
  misc_RNA (1)...(19): siRNA sense strand
agcaugaucucugcccauu

SEQ ID NO: 1587895 - RNA, 19 nt, Homo sapiens
  misc_RNA (1)...(19): siRNA sense strand
gaagcaaguccagccucaa

SEQ ID NO: 1587896 - RNA, 19 nt, Homo sapiens
  misc_RNA (1)...(19): siRNA sense strand
agugcaauguguagcaaga

SEQ ID NO: 1587897 - RNA, 19 nt, Homo sapiens
  misc_RNA (1)...(19): siRNA sense strand
gcaaccaccugauguuaga

SEQ ID NO: 1587898 - RNA, 19 nt, Homo sapiens
  misc_RNA (1)...(19): siRNA sense strand
cacaguggcugcaagguua

SEQ ID NO: 1587899 - RNA, 19 nt, Homo sapiens
  misc_RNA (1)...(19): siRNA sense strand
ccaaugcccuccuggaaau

SEQ ID NO: 1587900 - RNA, 19 nt, Homo sapiens
  misc_RNA (1)...(19): siRNA sense strand
gcugaagucuaaauugaau

SEQ ID NO: 1587901 - RNA, 19 nt, Homo sapiens
  misc_RNA (1)...(19): siRNA sense strand
ucauugagcucuggaagaa

SEQ ID NO: 1587902 - RNA, 19 nt, Homo sapiens
  misc_RNA (1)...(19): siRNA sense strand
uugaaugucuuaacacuga

SEQ ID NO: 1587903 - RNA, 19 nt, Homo sapiens
  misc_RNA (1)...(19): siRNA sense strand
ccacaccgcugaugaagac

SEQ ID NO: 1587904 - RNA, 19 nt, Homo sapiens
  misc_RNA (1)...(19): siRNA sense strand
gaauuggaauccgaugaug

SEQ ID NO: 1587905 - RNA, 19 nt, Homo sapiens
  misc_RNA (1)...(19): siRNA sense strand
caacagcuccuccgaagag

SEQ ID NO: 1587906 - RNA, 19 nt, Homo sapiens
  misc_RNA (1)...(19): siRNA sense strand
ggaauuggaauccgaugau

SEQ ID NO: 1587907 - RNA, 19 nt, Homo sapiens
  misc_RNA (1)...(19): siRNA sense strand
augcugaagucuaaauuga

SEQ ID NO: 1587908 - RNA, 19 nt, Homo sapiens
  misc_RNA (1)...(19): siRNA sense strand
ggacuuccagccuccgaaa

SEQ ID NO: 1587909 - RNA, 19 nt, Homo sapiens
  misc_RNA (1)...(19): siRNA sense strand
gaagagucgaggacauguu

SEQ ID NO: 1587910 - RNA, 19 nt, Homo sapiens
  misc_RNA (1)...(19): siRNA sense strand
ucaaugaugaccuguccua

SEQ ID NO: 1587911 - RNA, 19 nt, Homo sapiens
  misc_RNA (1)...(19): siRNA sense strand
gccaaugcccuccuggaaa

SEQ ID NO: 1587912 - RNA, 19 nt, Homo sapiens
  misc_RNA (1)...(19): siRNA sense strand
cagaaaagccagucauuga

SEQ ID NO: 1587913 - RNA, 19 nt, Homo sapiens
  misc_RNA (1)...(19): siRNA sense strand
cgaccacaccgcugaugaa

SEQ ID NO: 1587914 - RNA, 19 nt, Homo sapiens
  misc_RNA (1)...(19): siRNA sense strand
caagcucgaggccaagaaa

SEQ ID NO: 1587915 - RNA, 19 nt, Homo sapiens
  misc_RNA (1)...(19): siRNA sense strand
ggccaaugcccuccuggaa

SEQ ID NO: 1587916 - RNA, 19 nt, Homo sapiens
  misc_RNA (1)...(19): siRNA sense strand
ucacaguggcugcaagguu

SEQ ID NO: 1587917 - RNA, 19 nt, Homo sapiens
  misc_RNA (1)...(19): siRNA sense strand
gaagacaaggacucacagu

SEQ ID NO: 1587918 - RNA, 19 nt, Homo sapiens
  misc_RNA (1)...(19): siRNA sense strand
uuaccuaccugggcaaagu

SEQ ID NO: 1587919 - RNA, 19 nt, Homo sapiens
  misc_RNA (1)...(19): siRNA sense strand
ccacagugcacauggauac

SEQ ID NO: 1587920 - RNA, 19 nt, Homo sapiens
  misc_RNA (1)...(19): siRNA sense strand
uggcaaccaccugauguua

SEQ ID NO: 1587921 - RNA, 19 nt, Homo sapiens
  misc_RNA (1)...(19): siRNA sense strand
gaaugucuuaacacugaaa

SEQ ID NO: 1587922 - RNA, 19 nt, Homo sapiens
  misc_RNA (1)...(19): siRNA sense strand
ugauggaggccuucaggaa

SEQ ID NO: 1587923 - RNA, 19 nt, Homo sapiens
  misc_RNA (1)...(19): siRNA sense strand
ccugccaaccuuuacauuu

SEQ ID NO: 1587924 - RNA, 19 nt, Homo sapiens
  misc_RNA (1)...(19): siRNA sense strand
gcaacagcuccuccgaaga

SEQ ID NO: 1587925 - RNA, 19 nt, Homo sapiens
  misc_RNA (1)...(19): siRNA sense strand
gggcggauccacagcaaca

SEQ ID NO: 1587926 - RNA, 19 nt, Homo sapiens
  misc_RNA (1)...(19): siRNA sense strand
ugaccuguccuaccagaug

SEQ ID NO: 1587927 - RNA, 19 nt, Homo sapiens
  misc_RNA (1)...(19): siRNA sense strand
caaguuuggcuccaucauc

SEQ ID NO: 1587928 - RNA, 19 nt, Homo sapiens
  misc_RNA (1)...(19): siRNA sense strand
aaguuuggcuccaucaucu

SEQ ID NO: 1587929 - RNA, 19 nt, Homo sapiens
  misc_RNA (1)...(19): siRNA sense strand
uccaucaucucgaccacaa

SEQ ID NO: 1587930 - RNA, 19 nt, Homo sapiens
  misc_RNA (1)...(19): siRNA sense strand
cugccaaccuuuacauuuu

SEQ ID NO: 1587931 - RNA, 19 nt, Homo sapiens
  misc_RNA (1)...(19): siRNA sense strand
caccugauguuagaagagu

SEQ ID NO: 1587932 - RNA, 19 nt, Homo sapiens
  misc_RNA (1)...(19): siRNA sense strand
gaagacuuuccacaguaug

SEQ ID NO: 1587933 - RNA, 19 nt, Homo sapiens
  misc_RNA (1)...(19): siRNA sense strand
uuagaagagucgaggacau

SEQ ID NO: 1587934 - RNA, 19 nt, Homo sapiens
  misc_RNA (1)...(19): siRNA sense strand
uagaagagucgaggacaug

SEQ ID NO: 1587935 - RNA, 19 nt, Homo sapiens
  misc_RNA (1)...(19): siRNA sense strand
gcaagcucgaggccaagaa

SEQ ID NO: 1587936 - RNA, 19 nt, Homo sapiens
  misc_RNA (1)...(19): siRNA sense strand
ugaaugucuuaacacugaa

SEQ ID NO: 1587937 - RNA, 19 nt, Homo sapiens
  misc_RNA (1)...(19): siRNA sense strand
cagugcacauggauaccuu

SEQ ID NO: 1587938 - RNA, 19 nt, Homo sapiens
  misc_RNA (1)...(19): siRNA sense strand
caugcugaagucuaaauug

SEQ ID NO: 1587939 - RNA, 19 nt, Homo sapiens
  misc_RNA (1)...(19): siRNA sense strand
augaugaccuguccuacca

SEQ ID NO: 1587940 - RNA, 19 nt, Homo sapiens
  misc_RNA (1)...(19): siRNA sense strand
ggcaaccaccugauguuag

SEQ ID NO: 1587941 - RNA, 19 nt, Homo sapiens
  misc_RNA (1)...(19): siRNA sense strand
ucgaggacauguucuucuc

SEQ ID NO: 1587942 - RNA, 19 nt, Homo sapiens
  misc_RNA (1)...(19): siRNA sense strand
gcacaagggcgacgucagu

SEQ ID NO: 1587943 - RNA, 19 nt, Homo sapiens
  misc_RNA (1)...(19): siRNA sense strand
cgacccggcugaccaagau

SEQ ID NO: 1587944 - RNA, 19 nt, Homo sapiens
  misc_RNA (1)...(19): siRNA sense strand
caagggcgacgucaguuuc

SEQ ID NO: 1587945 - RNA, 19 nt, Homo sapiens
  misc_RNA (1)...(19): siRNA sense strand
acaagggcgacgucaguuu

SEQ ID NO: 1587946 - RNA, 19 nt, Homo sapiens
  misc_RNA (1)...(19): siRNA sense strand
gaugagaccucuauuaaua

SEQ ID NO: 1587947 - RNA, 19 nt, Homo sapiens
  misc_RNA (1)...(19): siRNA sense strand
caaagaagguggaguguuu

SEQ ID NO: 1587948 - RNA, 19 nt, Homo sapiens
  misc_RNA (1)...(19): siRNA sense strand
ucagagagaugcagaguua

SEQ ID NO: 1587949 - RNA, 19 nt, Homo sapiens
  misc_RNA (1)...(19): siRNA sense strand
gaaaggagcauaauuguag

SEQ ID NO: 1587950 - RNA, 19 nt, Homo sapiens
  misc_RNA (1)...(19): siRNA sense strand
ggaaugacacugaagauuu

SEQ ID NO: 1587951 - RNA, 19 nt, Homo sapiens
  misc_RNA (1)...(19): siRNA sense strand
gcacgaaccuccugauaca

SEQ ID NO: 1587952 - RNA, 19 nt, Homo sapiens
  misc_RNA (1)...(19): siRNA sense strand
uaagacaggugaugaagaa

SEQ ID NO: 1587953 - RNA, 19 nt, Homo sapiens
  misc_RNA (1)...(19): siRNA sense strand
gauaguggauuuaagaaug

SEQ ID NO: 1587954 - RNA, 19 nt, Homo sapiens
  misc_RNA (1)...(19): siRNA sense strand
gaaugacacugaagauuuc

SEQ ID NO: 1587955 - RNA, 19 nt, Homo sapiens
  misc_RNA (1)...(19): siRNA sense strand
gaaccacugcucaaaguua

SEQ ID NO: 1587956 - RNA, 19 nt, Homo sapiens
  misc_RNA (1)...(19): siRNA sense strand
auagagagcuugucagauu

SEQ ID NO: 1587957 - RNA, 19 nt, Homo sapiens
  misc_RNA (1)...(19): siRNA sense strand
uaguacagguuucaucuua

SEQ ID NO: 1587958 - RNA, 19 nt, Homo sapiens
  misc_RNA (1)...(19): siRNA sense strand
uaggugacauuaccaauaa

SEQ ID NO: 1587959 - RNA, 19 nt, Homo sapiens
  misc_RNA (1)...(19): siRNA sense strand
gcaagaagccagagagaga

SEQ ID NO: 1587960 - RNA, 19 nt, Homo sapiens
  misc_RNA (1)...(19): siRNA sense strand
gauagggaaucaucaucua

SEQ ID NO: 1587961 - RNA, 19 nt, Homo sapiens
  misc_RNA (1)...(19): siRNA sense strand
caacaaagcaugcaaacau

SEQ ID NO: 1587962 - RNA, 19 nt, Homo sapiens
  misc_RNA (1)...(19): siRNA sense strand
gaucaaacuugcguagauu

SEQ ID NO: 1587963 - RNA, 19 nt, Homo sapiens
  misc_RNA (1)...(19): siRNA sense strand
gaggagagcugggagucua

SEQ ID NO: 1587964 - RNA, 19 nt, Homo sapiens
  misc_RNA (1)...(19): siRNA sense strand
ggccugacauggcacuuua

SEQ ID NO: 1587965 - RNA, 19 nt, Homo sapiens
  misc_RNA (1)...(19): siRNA sense strand
gagcauaauuguagagaag

SEQ ID NO: 1587966 - RNA, 19 nt, Homo sapiens
  misc_RNA (1)...(19): siRNA sense strand
gagaaccacugcucaaagu

SEQ ID NO: 1587967 - RNA, 19 nt, Homo sapiens
  misc_RNA (1)...(19): siRNA sense strand
aaacauccaucgaaccaaa

SEQ ID NO: 1587968 - RNA, 19 nt, Homo sapiens
  misc_RNA (1)...(19): siRNA sense strand
gaacucaguauguuaaaug

SEQ ID NO: 1587969 - RNA, 19 nt, Homo sapiens
  misc_RNA (1)...(19): siRNA sense strand
ggagauacuauaugaguuu

SEQ ID NO: 1587970 - RNA, 19 nt, Homo sapiens
  misc_RNA (1)...(19): siRNA sense strand
guacagguuucaucuuaga

SEQ ID NO: 1587971 - RNA, 19 nt, Homo sapiens
  misc_RNA (1)...(19): siRNA sense strand
gauauugaccucagugauu

SEQ ID NO: 1587972 - RNA, 19 nt, Homo sapiens
  misc_RNA (1)...(19): siRNA sense strand
gaaaguugauagagagcuu

SEQ ID NO: 1587973 - RNA, 19 nt, Homo sapiens
  misc_RNA (1)...(19): siRNA sense strand
caauaaagcauguaugaug

SEQ ID NO: 1587974 - RNA, 19 nt, Homo sapiens
  misc_RNA (1)...(19): siRNA sense strand
gagcacaaaugacacuguu

SEQ ID NO: 1587975 - RNA, 19 nt, Homo sapiens
  misc_RNA (1)...(19): siRNA sense strand
gaagaaagcugugguucac

SEQ ID NO: 1587976 - RNA, 19 nt, Homo sapiens
  misc_RNA (1)...(19): siRNA sense strand
acauagagauaguggauuu

SEQ ID NO: 1587977 - RNA, 19 nt, Homo sapiens
  misc_RNA (1)...(19): siRNA sense strand
ggaauucugugacuucagu

SEQ ID NO: 1587978 - RNA, 19 nt, Homo sapiens
  misc_RNA (1)...(19): siRNA sense strand
gcucgaagacuaaauauca

SEQ ID NO: 1587979 - RNA, 19 nt, Homo sapiens
  misc_RNA (1)...(19): siRNA sense strand
ugauagcccuuauguaguu

SEQ ID NO: 1587980 - RNA, 19 nt, Homo sapiens
  misc_RNA (1)...(19): siRNA sense strand
gagaaugugagaagaauga

SEQ ID NO: 1587981 - RNA, 19 nt, Homo sapiens
  misc_RNA (1)...(19): siRNA sense strand
aagcagagcucaagaaacu

SEQ ID NO: 1587982 - RNA, 19 nt, Homo sapiens
  misc_RNA (1)...(19): siRNA sense strand
ccacaugucauugaaauuu

SEQ ID NO: 1587983 - RNA, 19 nt, Homo sapiens
  misc_RNA (1)...(19): siRNA sense strand
ggaaucaucaucuauggaa

SEQ ID NO: 1587984 - RNA, 19 nt, Homo sapiens
  misc_RNA (1)...(19): siRNA sense strand
gaaccuagaucugauuacu

SEQ ID NO: 1587985 - RNA, 19 nt, Homo sapiens
  misc_RNA (1)...(19): siRNA sense strand
gacaggugaugaagaagaa

SEQ ID NO: 1587986 - RNA, 19 nt, Homo sapiens
  misc_RNA (1)...(19): siRNA sense strand
gcugaugagaccucuauua

SEQ ID NO: 1587987 - RNA, 19 nt, Homo sapiens
  misc_RNA (1)...(19): siRNA sense strand
guaggugacauuaccaaua

SEQ ID NO: 1587988 - RNA, 19 nt, Homo sapiens
  misc_RNA (1)...(19): siRNA sense strand
caugaaaccugagaauaug

SEQ ID NO: 1587989 - RNA, 19 nt, Homo sapiens
  misc_RNA (1)...(19): siRNA sense strand
gacaggacaugagaggaua

SEQ ID NO: 1587990 - RNA, 19 nt, Homo sapiens
  misc_RNA (1)...(19): siRNA sense strand
aaagauugcugguaguaau

SEQ ID NO: 1587991 - RNA, 19 nt, Homo sapiens
  misc_RNA (1)...(19): siRNA sense strand
ccaagaauuucguacugaa

SEQ ID NO: 1587992 - RNA, 19 nt, Homo sapiens
  misc_RNA (1)...(19): siRNA sense strand
ucaaaguuaucagggaaua

SEQ ID NO: 1587993 - RNA, 19 nt, Homo sapiens
  misc_RNA (1)...(19): siRNA sense strand
caugagaggauacuucuuu

SEQ ID NO: 1587994 - RNA, 19 nt, Homo sapiens
  misc_RNA (1)...(19): siRNA sense strand
gagcugggagucuauguuu

SEQ ID NO: 1587995 - RNA, 19 nt, Homo sapiens
  misc_RNA (1)...(19): siRNA sense strand
gauagaaaggagcauaauu

SEQ ID NO: 1587996 - RNA, 19 nt, Homo sapiens
  misc_RNA (1)...(19): siRNA sense strand
ucaugaaguuccugauauu

SEQ ID NO: 1587997 - RNA, 19 nt, Homo sapiens
  misc_RNA (1)...(19): siRNA sense strand
gaguauagaauuuggugua

SEQ ID NO: 1587998 - RNA, 19 nt, Homo sapiens
  misc_RNA (1)...(19): siRNA sense strand
aaacagaagagcaagauga

SEQ ID NO: 1587999 - RNA, 19 nt, Homo sapiens
  misc_RNA (1)...(19): siRNA sense strand
acacgaaguuucucaaagu

SEQ ID NO: 1588000 - RNA, 19 nt, Homo sapiens
  misc_RNA (1)...(19): siRNA sense strand
gcauaauuguagagaagaa

SEQ ID NO: 1588001 - RNA, 19 nt, Homo sapiens
  misc_RNA (1)...(19): siRNA sense strand
gaagguggaguguuuggaa

SEQ ID NO: 1588002 - RNA, 19 nt, Homo sapiens
  misc_RNA (1)...(19): siRNA sense strand
cgugaugcguuggguauua

SEQ ID NO: 1588003 - RNA, 19 nt, Homo sapiens
  misc_RNA (1)...(19): siRNA sense strand
gaagaagaaagcugugguu

SEQ ID NO: 1588004 - RNA, 19 nt, Homo sapiens
  misc_RNA (1)...(19): siRNA sense strand
agauugugcuuccuccuua

SEQ ID NO: 1588005 - RNA, 19 nt, Homo sapiens
  misc_RNA (1)...(19): siRNA sense strand
gcacaaaugacacuguuag

SEQ ID NO: 1588006 - RNA, 19 nt, Homo sapiens
  misc_RNA (1)...(19): siRNA sense strand
caugaaacacauagagaua

SEQ ID NO: 1588007 - RNA, 19 nt, Homo sapiens
  misc_RNA (1)...(19): siRNA sense strand
caucaucuauggaaacauc

SEQ ID NO: 1588008 - RNA, 19 nt, Homo sapiens
  misc_RNA (1)...(19): siRNA sense strand
guugauagcccuuauguag

SEQ ID NO: 1588009 - RNA, 19 nt, Homo sapiens
  misc_RNA (1)...(19): siRNA sense strand
acaggaaaguugauagaga

SEQ ID NO: 1588010 - RNA, 19 nt, Homo sapiens
  misc_RNA (1)...(19): siRNA sense strand
ccucagugauugugaauuc

SEQ ID NO: 1588011 - RNA, 19 nt, Homo sapiens
  misc_RNA (1)...(19): siRNA sense strand
ggauucugaugcacauaaa

SEQ ID NO: 1588012 - RNA, 19 nt, Homo sapiens
  misc_RNA (1)...(19): siRNA sense strand
gcugggagucuauguuuaa

SEQ ID NO: 1588013 - RNA, 19 nt, Homo sapiens
  misc_RNA (1)...(19): siRNA sense strand
ggacaugagaggauacuuc

SEQ ID NO: 1588014 - RNA, 19 nt, Homo sapiens
  misc_RNA (1)...(19): siRNA sense strand
uuaaauggguggaugauac

SEQ ID NO: 1588015 - RNA, 19 nt, Homo sapiens
  misc_RNA (1)...(19): siRNA sense strand
ucaugaaaccugagaauau

SEQ ID NO: 1588016 - RNA, 19 nt, Homo sapiens
  misc_RNA (1)...(19): siRNA sense strand
gaggcucgaagacuaaaua

SEQ ID NO: 1588017 - RNA, 19 nt, Homo sapiens
  misc_RNA (1)...(19): siRNA sense strand
gggagucuauguuuaacga

SEQ ID NO: 1588018 - RNA, 19 nt, Homo sapiens
  misc_RNA (1)...(19): siRNA sense strand
cagcuguccuugcucauga

SEQ ID NO: 1588019 - RNA, 19 nt, Homo sapiens
  misc_RNA (1)...(19): siRNA sense strand
gggaagcauuugaagacaa

SEQ ID NO: 1588020 - RNA, 19 nt, Homo sapiens
  misc_RNA (1)...(19): siRNA sense strand
gaaucaucaucuauggaaa

SEQ ID NO: 1588021 - RNA, 19 nt, Homo sapiens
  misc_RNA (1)...(19): siRNA sense strand
ggagcauaauuguagagaa

SEQ ID NO: 1588022 - RNA, 19 nt, Homo sapiens
  misc_RNA (1)...(19): siRNA sense strand
gagaagcagagcucaagaa

SEQ ID NO: 1588023 - RNA, 19 nt, Homo sapiens
  misc_RNA (1)...(19): siRNA sense strand
guagugaucauguaacugu

SEQ ID NO: 1588024 - RNA, 19 nt, Homo sapiens
  misc_RNA (1)...(19): siRNA sense strand
ugucagagagcacaaauga

SEQ ID NO: 1588025 - RNA, 19 nt, Homo sapiens
  misc_RNA (1)...(19): siRNA sense strand
ggugguauagccaauagua

SEQ ID NO: 1588026 - RNA, 19 nt, Homo sapiens
  misc_RNA (1)...(19): siRNA sense strand
cagauggugucuuugauca

SEQ ID NO: 1588027 - RNA, 19 nt, Homo sapiens
  misc_RNA (1)...(19): siRNA sense strand
uauaugaguuuccuagagu

SEQ ID NO: 1588028 - RNA, 19 nt, Homo sapiens
  misc_RNA (1)...(19): siRNA sense strand
guacaacaaagcaugcaaa

SEQ ID NO: 1588029 - RNA, 19 nt, Homo sapiens
  misc_RNA (1)...(19): siRNA sense strand
gccagaagguuagucauca

SEQ ID NO: 1588030 - RNA, 19 nt, Homo sapiens
  misc_RNA (1)...(19): siRNA sense strand
gcauugaccuggguaguac

SEQ ID NO: 1588031 - RNA, 19 nt, Homo sapiens
  misc_RNA (1)...(19): siRNA sense strand
gauggacacuacagguaug

SEQ ID NO: 1588032 - RNA, 19 nt, Homo sapiens
  misc_RNA (1)...(19): siRNA sense strand
ucagagagcacaaaugaca

SEQ ID NO: 1588033 - RNA, 19 nt, Homo sapiens
  misc_RNA (1)...(19): siRNA sense strand
ggaaacauccaucgaacca

SEQ ID NO: 1588034 - RNA, 19 nt, Homo sapiens
  misc_RNA (1)...(19): siRNA sense strand
cugaugagaccucuauuaa

SEQ ID NO: 1588035 - RNA, 19 nt, Homo sapiens
  misc_RNA (1)...(19): siRNA sense strand
auagaaaggagcauaauug

SEQ ID NO: 1588036 - RNA, 19 nt, Homo sapiens
  misc_RNA (1)...(19): siRNA sense strand
gcagcaagaaucagagaga

SEQ ID NO: 1588037 - RNA, 19 nt, Homo sapiens
  misc_RNA (1)...(19): siRNA sense strand
cuaacucuguggugaaaga

SEQ ID NO: 1588038 - RNA, 19 nt, Homo sapiens
  misc_RNA (1)...(19): siRNA sense strand
gguauguccuguagugauc

SEQ ID NO: 1588039 - RNA, 19 nt, Homo sapiens
  misc_RNA (1)...(19): siRNA sense strand
ugaaacacauagagauagu

SEQ ID NO: 1588040 - RNA, 19 nt, Homo sapiens
  misc_RNA (1)...(19): siRNA sense strand
ugaucaaacuugcguagau

SEQ ID NO: 1588041 - RNA, 19 nt, Homo sapiens
  misc_RNA (1)...(19): siRNA sense strand
gugaugcguuggguauuaa

SEQ ID NO: 1588042 - RNA, 19 nt, Homo sapiens
  misc_RNA (1)...(19): siRNA sense strand
ugaauucccacaugucauu

SEQ ID NO: 1588043 - RNA, 19 nt, Homo sapiens
  misc_RNA (1)...(19): siRNA sense strand
acuaagaacugccgaagag

SEQ ID NO: 1588044 - RNA, 19 nt, Homo sapiens
  misc_RNA (1)...(19): siRNA sense strand
gggaauuacugccauugag

SEQ ID NO: 1588045 - RNA, 19 nt, Homo sapiens
  misc_RNA (1)...(19): siRNA sense strand
ggauccacgucuucuacaa

SEQ ID NO: 1588046 - RNA, 19 nt, Homo sapiens
  misc_RNA (1)...(19): siRNA sense strand
gcagcuaggugcaaagaug

SEQ ID NO: 1588047 - RNA, 19 nt, Homo sapiens
  misc_RNA (1)...(19): siRNA sense strand
gccaugggcuucggaggua

SEQ ID NO: 1588048 - RNA, 19 nt, Homo sapiens
  misc_RNA (1)...(19): siRNA sense strand
ggaggaacauggccuacag

SEQ ID NO: 1588049 - RNA, 19 nt, Homo sapiens
  misc_RNA (1)...(19): siRNA sense strand
gaaggaacagccagagcuu

SEQ ID NO: 1588050 - RNA, 19 nt, Homo sapiens
  misc_RNA (1)...(19): siRNA sense strand
gagagucagggucgagauu

SEQ ID NO: 1588051 - RNA, 19 nt, Homo sapiens
  misc_RNA (1)...(19): siRNA sense strand
ccugacaccuucaacucaa

SEQ ID NO: 1588052 - RNA, 19 nt, Homo sapiens
  misc_RNA (1)...(19): siRNA sense strand
gcaugcagccucccacucu

SEQ ID NO: 1588053 - RNA, 19 nt, Homo sapiens
  misc_RNA (1)...(19): siRNA sense strand
gagcagcuaggugcaaaga

SEQ ID NO: 1588054 - RNA, 19 nt, Homo sapiens
  misc_RNA (1)...(19): siRNA sense strand
gguauucgggccugagaga

SEQ ID NO: 1588055 - RNA, 19 nt, Homo sapiens
  misc_RNA (1)...(19): siRNA sense strand
gaacagccagagcuuccau

SEQ ID NO: 1588056 - RNA, 19 nt, Homo sapiens
  misc_RNA (1)...(19): siRNA sense strand
cggagcagcuaggugcaaa

SEQ ID NO: 1588057 - RNA, 19 nt, Homo sapiens
  misc_RNA (1)...(19): siRNA sense strand
cagcuaggugcaaagauga

SEQ ID NO: 1588058 - RNA, 19 nt, Homo sapiens
  misc_RNA (1)...(19): siRNA sense strand
gagucagggucgagauugg

SEQ ID NO: 1588059 - RNA, 19 nt, Homo sapiens
  misc_RNA (1)...(19): siRNA sense strand
gcaccacggagaggauuuc

SEQ ID NO: 1588060 - RNA, 19 nt, Homo sapiens
  misc_RNA (1)...(19): siRNA sense strand
gagguauucgggccugaga

SEQ ID NO: 1588061 - RNA, 19 nt, Homo sapiens
  misc_RNA (1)...(19): siRNA sense strand
ccaaggagcugugugauua

SEQ ID NO: 1588062 - RNA, 19 nt, Homo sapiens
  misc_RNA (1)...(19): siRNA sense strand
ggagcugugugauuacuuu

SEQ ID NO: 1588063 - RNA, 19 nt, Homo sapiens
  misc_RNA (1)...(19): siRNA sense strand
ucagauggcuucaccuuug

SEQ ID NO: 1588064 - RNA, 19 nt, Homo sapiens
  misc_RNA (1)...(19): siRNA sense strand
gcagauggcguccuuaaug

SEQ ID NO: 1588065 - RNA, 19 nt, Homo sapiens
  misc_RNA (1)...(19): siRNA sense strand
agaaagaacuggaggaucu

SEQ ID NO: 1588066 - RNA, 19 nt, Homo sapiens
  misc_RNA (1)...(19): siRNA sense strand
ggaauuccagcucuucuuu

SEQ ID NO: 1588067 - RNA, 19 nt, Homo sapiens
  misc_RNA (1)...(19): siRNA sense strand
gcaaagcacugugguucga

SEQ ID NO: 1588068 - RNA, 19 nt, Homo sapiens
  misc_RNA (1)...(19): siRNA sense strand
cagauggcguccuuaauga

SEQ ID NO: 1588069 - RNA, 19 nt, Homo sapiens
  misc_RNA (1)...(19): siRNA sense strand
ggagcaacguggaccaguu

SEQ ID NO: 1588070 - RNA, 19 nt, Homo sapiens
  misc_RNA (1)...(19): siRNA sense strand
gcucauggcuauggaacaa

SEQ ID NO: 1588071 - RNA, 19 nt, Homo sapiens
  misc_RNA (1)...(19): siRNA sense strand
ccacaugggugacuaugag

SEQ ID NO: 1588072 - RNA, 19 nt, Homo sapiens
  misc_RNA (1)...(19): siRNA sense strand
gaaucacucuguccugaag

SEQ ID NO: 1588073 - RNA, 19 nt, Homo sapiens
  misc_RNA (1)...(19): siRNA sense strand
gagcaacguggaccaguuu

SEQ ID NO: 1588074 - RNA, 19 nt, Homo sapiens
  misc_RNA (1)...(19): siRNA sense strand
ugaaggagacggccaauca

SEQ ID NO: 1588075 - RNA, 19 nt, Homo sapiens
  misc_RNA (1)...(19): siRNA sense strand
cagcagcgccugucagaug

SEQ ID NO: 1588076 - RNA, 19 nt, Homo sapiens
  misc_RNA (1)...(19): siRNA sense strand
ccacggaggaugcaaagga

SEQ ID NO: 1588077 - RNA, 19 nt, Homo sapiens
  misc_RNA (1)...(19): siRNA sense strand
ggagacggccaaucagauc

SEQ ID NO: 1588078 - RNA, 19 nt, Homo sapiens
  misc_RNA (1)...(19): siRNA sense strand
cgacagaaccacaucaaac

SEQ ID NO: 1588079 - RNA, 19 nt, Homo sapiens
  misc_RNA (1)...(19): siRNA sense strand
gcugugugauuacuuugug

SEQ ID NO: 1588080 - RNA, 19 nt, Homo sapiens
  misc_RNA (1)...(19): siRNA sense strand
ggaucucuuucacacgauu

SEQ ID NO: 1588081 - RNA, 19 nt, Homo sapiens
  misc_RNA (1)...(19): siRNA sense strand
agacagaggaggcguggaa

SEQ ID NO: 1588082 - RNA, 19 nt, Homo sapiens
  misc_RNA (1)...(19): siRNA sense strand
ccaaccauguggacaccaa

SEQ ID NO: 1588083 - RNA, 19 nt, Homo sapiens
  misc_RNA (1)...(19): siRNA sense strand
gauggcguccuuaaugaga

SEQ ID NO: 1588084 - RNA, 19 nt, Homo sapiens
  misc_RNA (1)...(19): siRNA sense strand
aaaggaagagggucuggaa

SEQ ID NO: 1588085 - RNA, 19 nt, Homo sapiens
  misc_RNA (1)...(19): siRNA sense strand
ccagccagcuccgacagaa

SEQ ID NO: 1588086 - RNA, 19 nt, Homo sapiens
  misc_RNA (1)...(19): siRNA sense strand
gaacuggaggaucucuuuc

SEQ ID NO: 1588087 - RNA, 19 nt, Homo sapiens
  misc_RNA (1)...(19): siRNA sense strand
cacggaggaugcaaaggaa

SEQ ID NO: 1588088 - RNA, 19 nt, Homo sapiens
  misc_RNA (1)...(19): siRNA sense strand
gaauuccagcucuucuuug

SEQ ID NO: 1588089 - RNA, 19 nt, Homo sapiens
  misc_RNA (1)...(19): siRNA sense strand
gccauggguuauaccaaga

SEQ ID NO: 1588090 - RNA, 19 nt, Homo sapiens
  misc_RNA (1)...(19): siRNA sense strand
ggcaagacccuuccaucug

SEQ ID NO: 1588091 - RNA, 19 nt, Homo sapiens
  misc_RNA (1)...(19): siRNA sense strand
cagauggcuucaccuuugu

SEQ ID NO: 1588092 - RNA, 19 nt, Homo sapiens
  misc_RNA (1)...(19): siRNA sense strand
ugacaacaccaaccaugug

SEQ ID NO: 1588093 - RNA, 19 nt, Homo sapiens
  misc_RNA (1)...(19): siRNA sense strand
gaacugcuuccacaucacu

SEQ ID NO: 1588094 - RNA, 19 nt, Homo sapiens
  misc_RNA (1)...(19): siRNA sense strand
accacaagcucauggcuau

SEQ ID NO: 1588095 - RNA, 19 nt, Homo sapiens
  misc_RNA (1)...(19): siRNA sense strand
agaacuggaggaucucuuu

SEQ ID NO: 1588096 - RNA, 19 nt, Homo sapiens
  misc_RNA (1)...(19): siRNA sense strand
ugaaggccauggguuauac

SEQ ID NO: 1588097 - RNA, 19 nt, Homo sapiens
  misc_RNA (1)...(19): siRNA sense strand
caacguggaccaguuugug

SEQ ID NO: 1588098 - RNA, 19 nt, Homo sapiens
  misc_RNA (1)...(19): siRNA sense strand
cuggagaccuugaaucacu

SEQ ID NO: 1588099 - RNA, 19 nt, Homo sapiens
  misc_RNA (1)...(19): siRNA sense strand
ggaggaauuccagcucuuc

SEQ ID NO: 1588100 - RNA, 19 nt, Homo sapiens
  misc_RNA (1)...(19): siRNA sense strand
gguggaggccaucgaggaa

SEQ ID NO: 1588101 - RNA, 19 nt, Homo sapiens
  misc_RNA (1)...(19): siRNA sense strand
augggaagcuguccuugga

SEQ ID NO: 1588102 - RNA, 19 nt, Homo sapiens
  misc_RNA (1)...(19): siRNA sense strand
ggaccacuggcgugaggaa

SEQ ID NO: 1588103 - RNA, 19 nt, Homo sapiens
  misc_RNA (1)...(19): siRNA sense strand
ccacuggcgugaggaacug

SEQ ID NO: 1588104 - RNA, 19 nt, Homo sapiens
  misc_RNA (1)...(19): siRNA sense strand
ggaccacaugggugacuau

SEQ ID NO: 1588105 - RNA, 19 nt, Homo sapiens
  misc_RNA (1)...(19): siRNA sense strand
cuucaccuuugucaucuau

SEQ ID NO: 1588106 - RNA, 19 nt, Homo sapiens
  misc_RNA (1)...(19): siRNA sense strand
gaaggagacggccaaucag

SEQ ID NO: 1588107 - RNA, 19 nt, Homo sapiens
  misc_RNA (1)...(19): siRNA sense strand
gccgucauccuggacauuu

SEQ ID NO: 1588108 - RNA, 19 nt, Homo sapiens
  misc_RNA (1)...(19): siRNA sense strand
gcaacguggaccaguuugu

SEQ ID NO: 1588109 - RNA, 19 nt, Homo sapiens
  misc_RNA (1)...(19): siRNA sense strand
uggcguccuuaaugagaaa

SEQ ID NO: 1588110 - RNA, 19 nt, Homo sapiens
  misc_RNA (1)...(19): siRNA sense strand
gcuucaccuuugucaucua

SEQ ID NO: 1588111 - RNA, 19 nt, Homo sapiens
  misc_RNA (1)...(19): siRNA sense strand
cagcucuucuuugcagaug

SEQ ID NO: 1588112 - RNA, 19 nt, Homo sapiens
  misc_RNA (1)...(19): siRNA sense strand
cugaaggccauggguuaua

SEQ ID NO: 1588113 - RNA, 19 nt, Homo sapiens
  misc_RNA (1)...(19): siRNA sense strand
uugggaggcuggagagcaa

SEQ ID NO: 1588114 - RNA, 19 nt, Homo sapiens
  misc_RNA (1)...(19): siRNA sense strand
uucacacgauugacucuga

SEQ ID NO: 1588115 - RNA, 19 nt, Homo sapiens
  misc_RNA (1)...(19): siRNA sense strand
gaacaugguuucauuggau

SEQ ID NO: 1588116 - RNA, 19 nt, Homo sapiens
  misc_RNA (1)...(19): siRNA sense strand
acaacacgcugcccgauua

SEQ ID NO: 1588117 - RNA, 19 nt, Homo sapiens
  misc_RNA (1)...(19): siRNA sense strand
caagaugucuggagaagau

SEQ ID NO: 1588118 - RNA, 19 nt, Homo sapiens
  misc_RNA (1)...(19): siRNA sense strand
ccaggaagcuugagaguag

SEQ ID NO: 1588119 - RNA, 19 nt, Homo sapiens
  misc_RNA (1)...(19): siRNA sense strand
gagaggcccuucgcuauga

SEQ ID NO: 1588120 - RNA, 19 nt, Homo sapiens
  misc_RNA (1)...(19): siRNA sense strand
ugagggaccugcccaaaga

SEQ ID NO: 1588121 - RNA, 19 nt, Homo sapiens
  misc_RNA (1)...(19): siRNA sense strand
aagcagacccuacaagaua

SEQ ID NO: 1588122 - RNA, 19 nt, Homo sapiens
  misc_RNA (1)...(19): siRNA sense strand
gcugaugccucacuacuag

SEQ ID NO: 1588123 - RNA, 19 nt, Homo sapiens
  misc_RNA (1)...(19): siRNA sense strand
uagagaaagcucccaguua

SEQ ID NO: 1588124 - RNA, 19 nt, Homo sapiens
  misc_RNA (1)...(19): siRNA sense strand
gcaagaaggccaccaagca

SEQ ID NO: 1588125 - RNA, 19 nt, Homo sapiens
  misc_RNA (1)...(19): siRNA sense strand
ugcaggagcucuuccauga

SEQ ID NO: 1588126 - RNA, 19 nt, Homo sapiens
  misc_RNA (1)...(19): siRNA sense strand
agagaaagcucccaguuac

SEQ ID NO: 1588127 - RNA, 19 nt, Homo sapiens
  misc_RNA (1)...(19): siRNA sense strand
gggaacauauggagagcaa

SEQ ID NO: 1588128 - RNA, 19 nt, Homo sapiens
  misc_RNA (1)...(19): siRNA sense strand
gaacaagaugucuggagaa

SEQ ID NO: 1588129 - RNA, 19 nt, Homo sapiens
  misc_RNA (1)...(19): siRNA sense strand
gaccugggaugguguguuc

SEQ ID NO: 1588130 - RNA, 19 nt, Homo sapiens
  misc_RNA (1)...(19): siRNA sense strand
gcaggugucaaauggauaa

SEQ ID NO: 1588131 - RNA, 19 nt, Homo sapiens
  misc_RNA (1)...(19): siRNA sense strand
gcaggugccauguauauca

SEQ ID NO: 1588132 - RNA, 19 nt, Homo sapiens
  misc_RNA (1)...(19): siRNA sense strand
ucaacuucaugcugacaua

SEQ ID NO: 1588133 - RNA, 19 nt, Homo sapiens
  misc_RNA (1)...(19): siRNA sense strand
guacaucgucuucgucuuc

SEQ ID NO: 1588134 - RNA, 19 nt, Homo sapiens
  misc_RNA (1)...(19): siRNA sense strand
cccagaacaugguuucauu

SEQ ID NO: 1588135 - RNA, 19 nt, Homo sapiens
  misc_RNA (1)...(19): siRNA sense strand
gcuguugggucccuucuca

SEQ ID NO: 1588136 - RNA, 19 nt, Homo sapiens
  misc_RNA (1)...(19): siRNA sense strand
ccaucgggcugcucuaugu

SEQ ID NO: 1588137 - RNA, 19 nt, Homo sapiens
  misc_RNA (1)...(19): siRNA sense strand
ccaggagaaugcagacuuc

SEQ ID NO: 1588138 - RNA, 19 nt, Homo sapiens
  misc_RNA (1)...(19): siRNA sense strand
gaacugcuacagaacaaca

SEQ ID NO: 1588139 - RNA, 19 nt, Homo sapiens
  misc_RNA (1)...(19): siRNA sense strand
cacccgaacugcuacagaa

SEQ ID NO: 1588140 - RNA, 19 nt, Homo sapiens
  misc_RNA (1)...(19): siRNA sense strand
gcaguggacuacucuuacu

SEQ ID NO: 1588141 - RNA, 19 nt, Homo sapiens
  misc_RNA (1)...(19): siRNA sense strand
uggcuaagguugacaugga

SEQ ID NO: 1588142 - RNA, 19 nt, Homo sapiens
  misc_RNA (1)...(19): siRNA sense strand
gaacauauggagagcaacu

SEQ ID NO: 1588143 - RNA, 19 nt, Homo sapiens
  misc_RNA (1)...(19): siRNA sense strand
ccaagcagacccuacaaga

SEQ ID NO: 1588144 - RNA, 19 nt, Homo sapiens
  misc_RNA (1)...(19): siRNA sense strand
agacccagcuguucaugug

SEQ ID NO: 1588145 - RNA, 19 nt, Homo sapiens
  misc_RNA (1)...(19): siRNA sense strand
ggaucagccuccaacuuca

SEQ ID NO: 1588146 - RNA, 19 nt, Homo sapiens
  misc_RNA (1)...(19): siRNA sense strand
gcauguuccugguguccuu

SEQ ID NO: 1588147 - RNA, 19 nt, Homo sapiens
  misc_RNA (1)...(19): siRNA sense strand
uugcugccaucguguauuu

SEQ ID NO: 1588148 - RNA, 19 nt, Homo sapiens
  misc_RNA (1)...(19): siRNA sense strand
cagaaagucagaagaggaa

SEQ ID NO: 1588149 - RNA, 19 nt, Homo sapiens
  misc_RNA (1)...(19): siRNA sense strand
ggagggcacgcuacuggaa

SEQ ID NO: 1588150 - RNA, 19 nt, Homo sapiens
  misc_RNA (1)...(19): siRNA sense strand
ggaauucaccaaggacaug

SEQ ID NO: 1588151 - RNA, 19 nt, Homo sapiens
  misc_RNA (1)...(19): siRNA sense strand
gguggcgucuacuccauga

SEQ ID NO: 1588152 - RNA, 19 nt, Homo sapiens
  misc_RNA (1)...(19): siRNA sense strand
gaaguccaggcuccaagaa

SEQ ID NO: 1588153 - RNA, 19 nt, Homo sapiens
  misc_RNA (1)...(19): siRNA sense strand
gugggagccugugcuguuu

SEQ ID NO: 1588154 - RNA, 19 nt, Homo sapiens
  misc_RNA (1)...(19): siRNA sense strand
ccucgcaggugucaaaugg

SEQ ID NO: 1588155 - RNA, 19 nt, Homo sapiens
  misc_RNA (1)...(19): siRNA sense strand
gggcugcucuauguguuug

SEQ ID NO: 1588156 - RNA, 19 nt, Homo sapiens
  misc_RNA (1)...(19): siRNA sense strand
uguauacccugguuaacau

SEQ ID NO: 1588157 - RNA, 19 nt, Homo sapiens
  misc_RNA (1)...(19): siRNA sense strand
guuggcaucucgugguuuc

SEQ ID NO: 1588158 - RNA, 19 nt, Homo sapiens
  misc_RNA (1)...(19): siRNA sense strand
guucacauccugcaugauc

SEQ ID NO: 1588159 - RNA, 19 nt, Homo sapiens
  misc_RNA (1)...(19): siRNA sense strand
ucaaauccccuccuucuuu

SEQ ID NO: 1588160 - RNA, 19 nt, Homo sapiens
  misc_RNA (1)...(19): siRNA sense strand
aacaugguuucauuggaua

SEQ ID NO: 1588161 - RNA, 19 nt, Homo sapiens
  misc_RNA (1)...(19): siRNA sense strand
caagcagacccuacaagau

SEQ ID NO: 1588162 - RNA, 19 nt, Homo sapiens
  misc_RNA (1)...(19): siRNA sense strand
ccgaacugcuacagaacaa

SEQ ID NO: 1588163 - RNA, 19 nt, Homo sapiens
  misc_RNA (1)...(19): siRNA sense strand
ggaagacccagcuguucau

SEQ ID NO: 1588164 - RNA, 19 nt, Homo sapiens
  misc_RNA (1)...(19): siRNA sense strand
guguucacauccugcauga

SEQ ID NO: 1588165 - RNA, 19 nt, Homo sapiens
  misc_RNA (1)...(19): siRNA sense strand
gguggaagacccagcuguu

SEQ ID NO: 1588166 - RNA, 19 nt, Homo sapiens
  misc_RNA (1)...(19): siRNA sense strand
cgagaggcccuucgcuaug

SEQ ID NO: 1588167 - RNA, 19 nt, Homo sapiens
  misc_RNA (1)...(19): siRNA sense strand
ggacccagaacaugguuuc

SEQ ID NO: 1588168 - RNA, 19 nt, Homo sapiens
  misc_RNA (1)...(19): siRNA sense strand
ggucccuucucaucauguu

SEQ ID NO: 1588169 - RNA, 19 nt, Homo sapiens
  misc_RNA (1)...(19): siRNA sense strand
gugcgaggaauuucaguug

SEQ ID NO: 1588170 - RNA, 19 nt, Homo sapiens
  misc_RNA (1)...(19): siRNA sense strand
ccucaugggcuuccuguuc

SEQ ID NO: 1588171 - RNA, 19 nt, Homo sapiens
  misc_RNA (1)...(19): siRNA sense strand
agaacaugguuucauugga

SEQ ID NO: 1588172 - RNA, 19 nt, Homo sapiens
  misc_RNA (1)...(19): siRNA sense strand
ccagaacaugguuucauug

SEQ ID NO: 1588173 - RNA, 19 nt, Homo sapiens
  misc_RNA (1)...(19): siRNA sense strand
ucgcaggugucaaauggau

SEQ ID NO: 1588174 - RNA, 19 nt, Homo sapiens
  misc_RNA (1)...(19): siRNA sense strand
ucaccaaggacauggauca

SEQ ID NO: 1588175 - RNA, 19 nt, Homo sapiens
  misc_RNA (1)...(19): siRNA sense strand
gcauugcccaggagaaagu

SEQ ID NO: 1588176 - RNA, 19 nt, Homo sapiens
  misc_RNA (1)...(19): siRNA sense strand
gugcauugcccaggagaaa

SEQ ID NO: 1588177 - RNA, 19 nt, Homo sapiens
  misc_RNA (1)...(19): siRNA sense strand
ucgcuaugacuuccugaua

SEQ ID NO: 1588178 - RNA, 19 nt, Homo sapiens
  misc_RNA (1)...(19): siRNA sense strand
caucgucaccaucaacuuc

SEQ ID NO: 1588179 - RNA, 19 nt, Homo sapiens
  misc_RNA (1)...(19): siRNA sense strand
gaaccgggagcagcugaug

SEQ ID NO: 1588180 - RNA, 19 nt, Homo sapiens
  misc_RNA (1)...(19): siRNA sense strand
cauccugcaugaucaacau

SEQ ID NO: 1588181 - RNA, 19 nt, Homo sapiens
  misc_RNA (1)...(19): siRNA sense strand
caaauccccuccuucuuuc

SEQ ID NO: 1588182 - RNA, 19 nt, Homo sapiens
  misc_RNA (1)...(19): siRNA sense strand
ccaccaagcagacccuaca

SEQ ID NO: 1588183 - RNA, 19 nt, Homo sapiens
  misc_RNA (1)...(19): siRNA sense strand
ccaucugccugaccagcuu

SEQ ID NO: 1588184 - RNA, 19 nt, Homo sapiens
  misc_RNA (1)...(19): siRNA sense strand
gcacgcuacuggaauucac

SEQ ID NO: 1588185 - RNA, 19 nt, Homo sapiens
  misc_RNA (1)...(19): siRNA sense strand
uguugcaggugccauguau

SEQ ID NO: 1588186 - RNA, 19 nt, Homo sapiens
  misc_RNA (1)...(19): siRNA sense strand
gauccacuucuuucuauac

SEQ ID NO: 1588187 - RNA, 19 nt, Homo sapiens
  misc_RNA (1)...(19): siRNA sense strand
agauccacuucuuucuaua

SEQ ID NO: 1588188 - RNA, 19 nt, Homo sapiens
  misc_RNA (1)...(19): siRNA sense strand
ccugagcugugcaaccaau

SEQ ID NO: 1588189 - RNA, 19 nt, Homo sapiens
  misc_RNA (1)...(19): siRNA sense strand
ggaccugcccaaagagucu

SEQ ID NO: 1588190 - RNA, 19 nt, Homo sapiens
  misc_RNA (1)...(19): siRNA sense strand
gggaaggggccaaacaaaa

SEQ ID NO: 1588191 - RNA, 19 nt, Homo sapiens
  misc_RNA (1)...(19): siRNA sense strand
gaagacccagcuguucaug

SEQ ID NO: 1588192 - RNA, 19 nt, Homo sapiens
  misc_RNA (1)...(19): siRNA sense strand
uggccuugcugggcauuaa

SEQ ID NO: 1588193 - RNA, 19 nt, Homo sapiens
  misc_RNA (1)...(19): siRNA sense strand
gggagccugugcuguuugg

SEQ ID NO: 1588194 - RNA, 19 nt, Homo sapiens
  misc_RNA (1)...(19): siRNA sense strand
cuucucaucauguuuguga

SEQ ID NO: 1588195 - RNA, 19 nt, Homo sapiens
  misc_RNA (1)...(19): siRNA sense strand
aguccaggcuccaagaaca

SEQ ID NO: 1588196 - RNA, 19 nt, Homo sapiens
  misc_RNA (1)...(19): siRNA sense strand
gcuggaacaagcagacuuc

SEQ ID NO: 1588197 - RNA, 19 nt, Homo sapiens
  misc_RNA (1)...(19): siRNA sense strand
gaaagucagaagaggaaaa

SEQ ID NO: 1588198 - RNA, 19 nt, Homo sapiens
  misc_RNA (1)...(19): siRNA sense strand
uuagagaaagcucccaguu

SEQ ID NO: 1588199 - RNA, 19 nt, Homo sapiens
  misc_RNA (1)...(19): siRNA sense strand
uugcaguggacuacucuua

SEQ ID NO: 1588200 - RNA, 19 nt, Homo sapiens
  misc_RNA (1)...(19): siRNA sense strand
ucucgugguuucuguacau

SEQ ID NO: 1588201 - RNA, 19 nt, Homo sapiens
  misc_RNA (1)...(19): siRNA sense strand
acaagcagacuuccaagag

SEQ ID NO: 1588202 - RNA, 19 nt, Homo sapiens
  misc_RNA (1)...(19): siRNA sense strand
uaacaggaccccagaaagu

SEQ ID NO: 1588203 - RNA, 19 nt, Homo sapiens
  misc_RNA (1)...(19): siRNA sense strand
caugggaggacuuuaugga

SEQ ID NO: 1588204 - RNA, 19 nt, Homo sapiens
  misc_RNA (1)...(19): siRNA sense strand
ucgagaggcccuucgcuau

SEQ ID NO: 1588205 - RNA, 19 nt, Homo sapiens
  misc_RNA (1)...(19): siRNA sense strand
ccugauagcggaaaaggua

SEQ ID NO: 1588206 - RNA, 19 nt, Homo sapiens
  misc_RNA (1)...(19): siRNA sense strand
ggaaaagguaucccucaug

SEQ ID NO: 1588207 - RNA, 19 nt, Homo sapiens
  misc_RNA (1)...(19): siRNA sense strand
ugugggagccugugcuguu

SEQ ID NO: 1588208 - RNA, 19 nt, Homo sapiens
  misc_RNA (1)...(19): siRNA sense strand
guguauacccugguuaaca

SEQ ID NO: 1588209 - RNA, 19 nt, Homo sapiens
  misc_RNA (1)...(19): siRNA sense strand
cuggcuggcuggugggaaa

SEQ ID NO: 1588210 - RNA, 19 nt, Homo sapiens
  misc_RNA (1)...(19): siRNA sense strand
uaucaccggcuuugcugaa

SEQ ID NO: 1588211 - RNA, 19 nt, Homo sapiens
  misc_RNA (1)...(19): siRNA sense strand
uugcaggugccauguauau

SEQ ID NO: 1588212 - RNA, 19 nt, Homo sapiens
  misc_RNA (1)...(19): siRNA sense strand
ugaaguccaggcuccaaga

SEQ ID NO: 1588213 - RNA, 19 nt, Homo sapiens
  misc_RNA (1)...(19): siRNA sense strand
aacaagaugucuggagaag

SEQ ID NO: 1588214 - RNA, 19 nt, Homo sapiens
  misc_RNA (1)...(19): siRNA sense strand
gcuccaagaacaagauguc

SEQ ID NO: 1588215 - RNA, 19 nt, Homo sapiens
  misc_RNA (1)...(19): siRNA sense strand
ccgaugcgcuggccauguu

SEQ ID NO: 1588216 - RNA, 19 nt, Homo sapiens
  misc_RNA (1)...(19): siRNA sense strand
gaaaccaacauucccaaca

SEQ ID NO: 1588217 - RNA, 19 nt, Homo sapiens
  misc_RNA (1)...(19): siRNA sense strand
aaaccaacauucccaacag

SEQ ID NO: 1588218 - RNA, 19 nt, Homo sapiens
  misc_RNA (1)...(19): siRNA sense strand
ggcaccaggucaugaucaa

SEQ ID NO: 1588219 - RNA, 19 nt, Homo sapiens
  misc_RNA (1)...(19): siRNA sense strand
agaccgcgcugagcacguu

SEQ ID NO: 1588220 - RNA, 19 nt, Homo sapiens
  misc_RNA (1)...(19): siRNA sense strand
gcugagcacguucuuccaa

SEQ ID NO: 1588221 - RNA, 19 nt, Homo sapiens
  misc_RNA (1)...(19): siRNA sense strand
ggucaugaucaaccaguuc

SEQ ID NO: 1588222 - RNA, 19 nt, Homo sapiens
  misc_RNA (1)...(19): siRNA sense strand
gcaucagccuugcucuuga

SEQ ID NO: 1588223 - RNA, 19 nt, Homo sapiens
  misc_RNA (1)...(19): siRNA sense strand
ccagagaccuguacuaccu

SEQ ID NO: 1588224 - RNA, 19 nt, Homo sapiens
  misc_RNA (1)...(19): siRNA sense strand
ccuccacccuccgcuauug

SEQ ID NO: 1588225 - RNA, 19 nt, Homo sapiens
  misc_RNA (1)...(19): siRNA sense strand
ggccugcugcugcucauug

SEQ ID NO: 1588226 - RNA, 19 nt, Homo sapiens
  misc_RNA (1)...(19): siRNA sense strand
acccuccgcuauugcauga

SEQ ID NO: 1588227 - RNA, 19 nt, Homo sapiens
  misc_RNA (1)...(19): siRNA sense strand
ggacugagcuggaaaccaa

SEQ ID NO: 1588228 - RNA, 19 nt, Homo sapiens
  misc_RNA (1)...(19): siRNA sense strand
caagagccauugccugaaa

SEQ ID NO: 1588229 - RNA, 19 nt, Homo sapiens
  misc_RNA (1)...(19): siRNA sense strand
ggagaagguugaggaguuu

SEQ ID NO: 1588230 - RNA, 19 nt, Homo sapiens
  misc_RNA (1)...(19): siRNA sense strand
ggaccuggaugcagagugu

SEQ ID NO: 1588231 - RNA, 19 nt, Homo sapiens
  misc_RNA (1)...(19): siRNA sense strand
cagcacaggugaaggaugu

SEQ ID NO: 1588232 - RNA, 19 nt, Homo sapiens
  misc_RNA (1)...(19): siRNA sense strand
gcacagacauggaguucac

SEQ ID NO: 1588233 - RNA, 19 nt, Homo sapiens
  misc_RNA (1)...(19): siRNA sense strand
gauauccuacucuccuuua

SEQ ID NO: 1588234 - RNA, 19 nt, Homo sapiens
  misc_RNA (1)...(19): siRNA sense strand
ucaccgaaaugucagagaa

SEQ ID NO: 1588235 - RNA, 19 nt, Homo sapiens
  misc_RNA (1)...(19): siRNA sense strand
agucggaggucucagagua

SEQ ID NO: 1588236 - RNA, 19 nt, Homo sapiens
  misc_RNA (1)...(19): siRNA sense strand
gacauggaguucaccuuug

SEQ ID NO: 1588237 - RNA, 19 nt, Homo sapiens
  misc_RNA (1)...(19): siRNA sense strand
uggagaagguugaggaguu

SEQ ID NO: 1588238 - RNA, 19 nt, Homo sapiens
  misc_RNA (1)...(19): siRNA sense strand
gaaagaagaagggcagcaa

SEQ ID NO: 1588239 - RNA, 19 nt, Homo sapiens
  misc_RNA (1)...(19): siRNA sense strand
guugaggaguuucgaauca

SEQ ID NO: 1588240 - RNA, 19 nt, Homo sapiens
  misc_RNA (1)...(19): siRNA sense strand
gaggaacugcgcaaaguga

SEQ ID NO: 1588241 - RNA, 19 nt, Homo sapiens
  misc_RNA (1)...(19): siRNA sense strand
guccacaccugacccauuc

SEQ ID NO: 1588242 - RNA, 19 nt, Homo sapiens
  misc_RNA (1)...(19): siRNA sense strand
gcaucucuaugaggaauau

SEQ ID NO: 1588243 - RNA, 19 nt, Homo sapiens
  misc_RNA (1)...(19): siRNA sense strand
gcaaguaccaggagcugau

SEQ ID NO: 1588244 - RNA, 19 nt, Homo sapiens
  misc_RNA (1)...(19): siRNA sense strand
gccugaaacuggaggagaa

SEQ ID NO: 1588245 - RNA, 19 nt, Homo sapiens
  misc_RNA (1)...(19): siRNA sense strand
agacauggaguucaccuuu

SEQ ID NO: 1588246 - RNA, 19 nt, Homo sapiens
  misc_RNA (1)...(19): siRNA sense strand
gagcuggaaaccaaguuaa

SEQ ID NO: 1588247 - RNA, 19 nt, Homo sapiens
  misc_RNA (1)...(19): siRNA sense strand
cagagcagccgcagugaga

SEQ ID NO: 1588248 - RNA, 19 nt, Homo sapiens
  misc_RNA (1)...(19): siRNA sense strand
caaaaucaccgaaauguca

SEQ ID NO: 1588249 - RNA, 19 nt, Homo sapiens
  misc_RNA (1)...(19): siRNA sense strand
gggcaucucuaugaggaau

SEQ ID NO: 1588250 - RNA, 19 nt, Homo sapiens
  misc_RNA (1)...(19): siRNA sense strand
acaucgagaucgccaccua

SEQ ID NO: 1588251 - RNA, 19 nt, Homo sapiens
  misc_RNA (1)...(19): siRNA sense strand
gaaucagguaugaggauga

SEQ ID NO: 1588252 - RNA, 19 nt, Homo sapiens
  misc_RNA (1)...(19): siRNA sense strand
acauggaguucaccuuugu

SEQ ID NO: 1588253 - RNA, 19 nt, Homo sapiens
  misc_RNA (1)...(19): siRNA sense strand
ggaggugaaggcccaguau

SEQ ID NO: 1588254 - RNA, 19 nt, Homo sapiens
  misc_RNA (1)...(19): siRNA sense strand
uggaggaggccgaggcaua

SEQ ID NO: 1588255 - RNA, 19 nt, Homo sapiens
  misc_RNA (1)...(19): siRNA sense strand
ggaguucaccuuuguucag

SEQ ID NO: 1588256 - RNA, 19 nt, Homo sapiens
  misc_RNA (1)...(19): siRNA sense strand
ucaaugugcgcauccagaa

SEQ ID NO: 1588257 - RNA, 19 nt, Homo sapiens
  misc_RNA (1)...(19): siRNA sense strand
ggaggaacugcgcaaagug

SEQ ID NO: 1588258 - RNA, 19 nt, Homo sapiens
  misc_RNA (1)...(19): siRNA sense strand
cagauauccuacucuccuu

SEQ ID NO: 1588259 - RNA, 19 nt, Homo sapiens
  misc_RNA (1)...(19): siRNA sense strand
ggagagcuucguggaguug

SEQ ID NO: 1588260 - RNA, 19 nt, Homo sapiens
  misc_RNA (1)...(19): siRNA sense strand
gaaacuggaggagaacauc

SEQ ID NO: 1588261 - RNA, 19 nt, Homo sapiens
  misc_RNA (1)...(19): siRNA sense strand
ugagcuggaaaccaaguua

SEQ ID NO: 1588262 - RNA, 19 nt, Homo sapiens
  misc_RNA (1)...(19): siRNA sense strand
aaagaagaagggcagcaaa

SEQ ID NO: 1588263 - RNA, 19 nt, Homo sapiens
  misc_RNA (1)...(19): siRNA sense strand
ucuaugagcaggagcugaa

SEQ ID NO: 1588264 - RNA, 19 nt, Homo sapiens
  misc_RNA (1)...(19): siRNA sense strand
ggccaggacucagccaucu

SEQ ID NO: 1588265 - RNA, 19 nt, Homo sapiens
  misc_RNA (1)...(19): siRNA sense strand
ggaggagaacaucaagaca

SEQ ID NO: 1588266 - RNA, 19 nt, Homo sapiens
  misc_RNA (1)...(19): siRNA sense strand
cgaaaugucagagaaguac

SEQ ID NO: 1588267 - RNA, 19 nt, Homo sapiens
  misc_RNA (1)...(19): siRNA sense strand
ccaggacucagccaucuuc

SEQ ID NO: 1588268 - RNA, 19 nt, Homo sapiens
  misc_RNA (1)...(19): siRNA sense strand
ccgaaaugucagagaagua

SEQ ID NO: 1588269 - RNA, 19 nt, Homo sapiens
  misc_RNA (1)...(19): siRNA sense strand
cgaccucgggcaucucuau

SEQ ID NO: 1588270 - RNA, 19 nt, Homo sapiens
  misc_RNA (1)...(19): siRNA sense strand
aggaggaacugcgcaaagu

SEQ ID NO: 1588271 - RNA, 19 nt, Homo sapiens
  misc_RNA (1)...(19): siRNA sense strand
gagcagccgcagugagauc

SEQ ID NO: 1588272 - RNA, 19 nt, Homo sapiens
  misc_RNA (1)...(19): siRNA sense strand
gguaugaggaugagaucuc

SEQ ID NO: 1588273 - RNA, 19 nt, Homo sapiens
  misc_RNA (1)...(19): siRNA sense strand
gcaggagucggaggucuca

SEQ ID NO: 1588274 - RNA, 19 nt, Homo sapiens
  misc_RNA (1)...(19): siRNA sense strand
gaucaaaaucaccgaaaug

SEQ ID NO: 1588275 - RNA, 19 nt, Homo sapiens
  misc_RNA (1)...(19): siRNA sense strand
gaggugaaggcccaguaug

SEQ ID NO: 1588276 - RNA, 19 nt, Homo sapiens
  misc_RNA (1)...(19): siRNA sense strand
gcgcacagacauggaguuc

SEQ ID NO: 1588277 - RNA, 19 nt, Homo sapiens
  misc_RNA (1)...(19): siRNA sense strand
ccucuuucccuccagauau

SEQ ID NO: 1588278 - RNA, 19 nt, Homo sapiens
  misc_RNA (1)...(19): siRNA sense strand
gaguuucgaaucagguaug

SEQ ID NO: 1588279 - RNA, 19 nt, Homo sapiens
  misc_RNA (1)...(19): siRNA sense strand
gaagagacaugcgauggua

SEQ ID NO: 1588280 - RNA, 19 nt, Homo sapiens
  misc_RNA (1)...(19): siRNA sense strand
aaagagcccuggaauauga

SEQ ID NO: 1588281 - RNA, 19 nt, Homo sapiens
  misc_RNA (1)...(19): siRNA sense strand
acaaauaccuagaauguga

SEQ ID NO: 1588282 - RNA, 19 nt, Homo sapiens
  misc_RNA (1)...(19): siRNA sense strand
gcacauaagguaauucauu

SEQ ID NO: 1588283 - RNA, 19 nt, Homo sapiens
  misc_RNA (1)...(19): siRNA sense strand
gaagucauauugagaagau

SEQ ID NO: 1588284 - RNA, 19 nt, Homo sapiens
  misc_RNA (1)...(19): siRNA sense strand
agagaaaccuuacaaaugu

SEQ ID NO: 1588285 - RNA, 19 nt, Homo sapiens
  misc_RNA (1)...(19): siRNA sense strand
cuacaaaugugaacaaugu

SEQ ID NO: 1588286 - RNA, 19 nt, Homo sapiens
  misc_RNA (1)...(19): siRNA sense strand
cuacaaaugugaagaaugu

SEQ ID NO: 1588287 - RNA, 19 nt, Homo sapiens
  misc_RNA (1)...(19): siRNA sense strand
cuacaaaugugaagaaugu

SEQ ID NO: 1588288 - RNA, 19 nt, Homo sapiens
  misc_RNA (1)...(19): siRNA sense strand
cuacaaaugugaacaaugu

SEQ ID NO: 1588289 - RNA, 19 nt, Homo sapiens
  misc_RNA (1)...(19): siRNA sense strand
cuacaaaugugaagaaugu

SEQ ID NO: 1588290 - RNA, 19 nt, Homo sapiens
  misc_RNA (1)...(19): siRNA sense strand
gagagaaaccuuacaaaug

SEQ ID NO: 1588291 - RNA, 19 nt, Homo sapiens
  misc_RNA (1)...(19): siRNA sense strand
cuacaaaugugaagaaugu

SEQ ID NO: 1588292 - RNA, 19 nt, Homo sapiens
  misc_RNA (1)...(19): siRNA sense strand
gagagaaacccuacaaaug

SEQ ID NO: 1588293 - RNA, 19 nt, Homo sapiens
  misc_RNA (1)...(19): siRNA sense strand
gagagaaacccuacaaaug

SEQ ID NO: 1588294 - RNA, 19 nt, Homo sapiens
  misc_RNA (1)...(19): siRNA sense strand
gagagaaacccuacaaaug

SEQ ID NO: 1588295 - RNA, 19 nt, Homo sapiens
  misc_RNA (1)...(19): siRNA sense strand
gagagaaacccuacaaaug

SEQ ID NO: 1588296 - RNA, 19 nt, Homo sapiens
  misc_RNA (1)...(19): siRNA sense strand
gagagaaacccuacaaaug

SEQ ID NO: 1588297 - RNA, 19 nt, Homo sapiens
  misc_RNA (1)...(19): siRNA sense strand
gagagaaacccuacaaaug

SEQ ID NO: 1588298 - RNA, 19 nt, Homo sapiens
  misc_RNA (1)...(19): siRNA sense strand
cuacagaugugaagaaugu

SEQ ID NO: 1588299 - RNA, 19 nt, Homo sapiens
  misc_RNA (1)...(19): siRNA sense strand
cuacagaugugaagaaugu

SEQ ID NO: 1588300 - RNA, 19 nt, Homo sapiens
  misc_RNA (1)...(19): siRNA sense strand
acaccuaacucaacauaaa

SEQ ID NO: 1588301 - RNA, 19 nt, Homo sapiens
  misc_RNA (1)...(19): siRNA sense strand
gcacaaagaauguuaugau

SEQ ID NO: 1588302 - RNA, 19 nt, Homo sapiens
  misc_RNA (1)...(19): siRNA sense strand
ucucauaccuuacuaaaca

SEQ ID NO: 1588303 - RNA, 19 nt, Homo sapiens
  misc_RNA (1)...(19): siRNA sense strand
ucucaaaccuuacuaaaca

SEQ ID NO: 1588304 - RNA, 19 nt, Homo sapiens
  misc_RNA (1)...(19): siRNA sense strand
ggauguggccauagaauuu

SEQ ID NO: 1588305 - RNA, 19 nt, Homo sapiens
  misc_RNA (1)...(19): siRNA sense strand
gagaaacccuacaaaugug

SEQ ID NO: 1588306 - RNA, 19 nt, Homo sapiens
  misc_RNA (1)...(19): siRNA sense strand
gagaaacccuacaaaugug

SEQ ID NO: 1588307 - RNA, 19 nt, Homo sapiens
  misc_RNA (1)...(19): siRNA sense strand
gagaaacccuacaaaugug

SEQ ID NO: 1588308 - RNA, 19 nt, Homo sapiens
  misc_RNA (1)...(19): siRNA sense strand
gagaaacccuacaaaugug

SEQ ID NO: 1588309 - RNA, 19 nt, Homo sapiens
  misc_RNA (1)...(19): siRNA sense strand
gagaaacccuacaaaugug

SEQ ID NO: 1588310 - RNA, 19 nt, Homo sapiens
  misc_RNA (1)...(19): siRNA sense strand
gagaaacccuacaaaugug

SEQ ID NO: 1588311 - RNA, 19 nt, Homo sapiens
  misc_RNA (1)...(19): siRNA sense strand
gaaaagagcccuggaauau

SEQ ID NO: 1588312 - RNA, 19 nt, Homo sapiens
  misc_RNA (1)...(19): siRNA sense strand
gauaagacauacuggaaag

SEQ ID NO: 1588313 - RNA, 19 nt, Homo sapiens
  misc_RNA (1)...(19): siRNA sense strand
gaaaagugauguuagagaa

SEQ ID NO: 1588314 - RNA, 19 nt, Homo sapiens
  misc_RNA (1)...(19): siRNA sense strand
ggagagaaaccuuacaaau

SEQ ID NO: 1588315 - RNA, 19 nt, Homo sapiens
  misc_RNA (1)...(19): siRNA sense strand
ccaguuacauauucucauu

SEQ ID NO: 1588316 - RNA, 19 nt, Homo sapiens
  misc_RNA (1)...(19): siRNA sense strand
acaggaaucuucuggugua

SEQ ID NO: 1588317 - RNA, 19 nt, Homo sapiens
  misc_RNA (1)...(19): siRNA sense strand
gagaaacccuacagaugug

SEQ ID NO: 1588318 - RNA, 19 nt, Homo sapiens
  misc_RNA (1)...(19): siRNA sense strand
gagagaaacccuacagaug

SEQ ID NO: 1588319 - RNA, 19 nt, Homo sapiens
  misc_RNA (1)...(19): siRNA sense strand
gagaaacccuacagaugug

SEQ ID NO: 1588320 - RNA, 19 nt, Homo sapiens
  misc_RNA (1)...(19): siRNA sense strand
gagagaaacccuacagaug

SEQ ID NO: 1588321 - RNA, 19 nt, Homo sapiens
  misc_RNA (1)...(19): siRNA sense strand
gagaagauauggaaaaugu

SEQ ID NO: 1588322 - RNA, 19 nt, Homo sapiens
  misc_RNA (1)...(19): siRNA sense strand
ggagagaaacccuacaaau

SEQ ID NO: 1588323 - RNA, 19 nt, Homo sapiens
  misc_RNA (1)...(19): siRNA sense strand
ggagagaaacccuacaaau

SEQ ID NO: 1588324 - RNA, 19 nt, Homo sapiens
  misc_RNA (1)...(19): siRNA sense strand
ggagagaaacccuacaaau

SEQ ID NO: 1588325 - RNA, 19 nt, Homo sapiens
  misc_RNA (1)...(19): siRNA sense strand
ggagagaaacccuacaaau

SEQ ID NO: 1588326 - RNA, 19 nt, Homo sapiens
  misc_RNA (1)...(19): siRNA sense strand
ggagagaaacccuacaaau

SEQ ID NO: 1588327 - RNA, 19 nt, Homo sapiens
  misc_RNA (1)...(19): siRNA sense strand
ggagagaaacccuacaaau

SEQ ID NO: 1588328 - RNA, 19 nt, Homo sapiens
  misc_RNA (1)...(19): siRNA sense strand
ggaaaauucuuaccaaugu

SEQ ID NO: 1588329 - RNA, 19 nt, Homo sapiens
  misc_RNA (1)...(19): siRNA sense strand
gacaugcgaugguagauca

SEQ ID NO: 1588330 - RNA, 19 nt, Homo sapiens
  misc_RNA (1)...(19): siRNA sense strand
cagcaggauuuguauagaa

SEQ ID NO: 1588331 - RNA, 19 nt, Homo sapiens
  misc_RNA (1)...(19): siRNA sense strand
aagcaguccucaacccuua

SEQ ID NO: 1588332 - RNA, 19 nt, Homo sapiens
  misc_RNA (1)...(19): siRNA sense strand
agacacagaagaauucaua

SEQ ID NO: 1588333 - RNA, 19 nt, Homo sapiens
  misc_RNA (1)...(19): siRNA sense strand
ugaagaaugugguaaaguc

SEQ ID NO: 1588334 - RNA, 19 nt, Homo sapiens
  misc_RNA (1)...(19): siRNA sense strand
caagaagucauauugagaa

SEQ ID NO: 1588335 - RNA, 19 nt, Homo sapiens
  misc_RNA (1)...(19): siRNA sense strand
aaccaauucucaaaccuua

SEQ ID NO: 1588336 - RNA, 19 nt, Homo sapiens
  misc_RNA (1)...(19): siRNA sense strand
gaaguguggaugaguguaa

SEQ ID NO: 1588337 - RNA, 19 nt, Homo sapiens
  misc_RNA (1)...(19): siRNA sense strand
gagagaaacccuacaacug

SEQ ID NO: 1588338 - RNA, 19 nt, Homo sapiens
  misc_RNA (1)...(19): siRNA sense strand
gcaaagcuuuuaaccaauu

SEQ ID NO: 1588339 - RNA, 19 nt, Homo sapiens
  misc_RNA (1)...(19): siRNA sense strand
cuacaacugugaagaauac

SEQ ID NO: 1588340 - RNA, 19 nt, Homo sapiens
  misc_RNA (1)...(19): siRNA sense strand
agagaaacccuacaaaugu

SEQ ID NO: 1588341 - RNA, 19 nt, Homo sapiens
  misc_RNA (1)...(19): siRNA sense strand
agagaaacccuacaaaugu

SEQ ID NO: 1588342 - RNA, 19 nt, Homo sapiens
  misc_RNA (1)...(19): siRNA sense strand
agagaaacccuacaaaugu

SEQ ID NO: 1588343 - RNA, 19 nt, Homo sapiens
  misc_RNA (1)...(19): siRNA sense strand
cacauaagguaauucauuc

SEQ ID NO: 1588344 - RNA, 19 nt, Homo sapiens
  misc_RNA (1)...(19): siRNA sense strand
agagaaacccuacaaaugu

SEQ ID NO: 1588345 - RNA, 19 nt, Homo sapiens
  misc_RNA (1)...(19): siRNA sense strand
agagaaacccuacaaaugu

SEQ ID NO: 1588346 - RNA, 19 nt, Homo sapiens
  misc_RNA (1)...(19): siRNA sense strand
agagaaacccuacaaaugu

SEQ ID NO: 1588347 - RNA, 19 nt, Homo sapiens
  misc_RNA (1)...(19): siRNA sense strand
gaucaccugucuagagcaa

SEQ ID NO: 1588348 - RNA, 19 nt, Homo sapiens
  misc_RNA (1)...(19): siRNA sense strand
cuucaacucuuacuaaaca

SEQ ID NO: 1588349 - RNA, 19 nt, Homo sapiens
  misc_RNA (1)...(19): siRNA sense strand
cacaaagaauguuaugaug

SEQ ID NO: 1588350 - RNA, 19 nt, Homo sapiens
  misc_RNA (1)...(19): siRNA sense strand
ccugaagucuggaguguau

SEQ ID NO: 1588351 - RNA, 19 nt, Homo sapiens
  misc_RNA (1)...(19): siRNA sense strand
uaccgauucucauaccuua

SEQ ID NO: 1588352 - RNA, 19 nt, Homo sapiens
  misc_RNA (1)...(19): siRNA sense strand
ggagagaaacccuacagau

SEQ ID NO: 1588353 - RNA, 19 nt, Homo sapiens
  misc_RNA (1)...(19): siRNA sense strand
ggagagaaacccuacagau

SEQ ID NO: 1588354 - RNA, 19 nt, Homo sapiens
  misc_RNA (1)...(19): siRNA sense strand
aguguaaucugcacaaaga

SEQ ID NO: 1588355 - RNA, 19 nt, Homo sapiens
  misc_RNA (1)...(19): siRNA sense strand
aaccaguccucaaaccuua

SEQ ID NO: 1588356 - RNA, 19 nt, Homo sapiens
  misc_RNA (1)...(19): siRNA sense strand
aaccaauccucaacccuua

SEQ ID NO: 1588357 - RNA, 19 nt, Homo sapiens
  misc_RNA (1)...(19): siRNA sense strand
uuaccaaugugaagaaugu

SEQ ID NO: 1588358 - RNA, 19 nt, Homo sapiens
  misc_RNA (1)...(19): siRNA sense strand
ccucaacccuuacuacaca

SEQ ID NO: 1588359 - RNA, 19 nt, Homo sapiens
  misc_RNA (1)...(19): siRNA sense strand
gagaaaccuuacaaaugug

SEQ ID NO: 1588360 - RNA, 19 nt, Homo sapiens
  misc_RNA (1)...(19): siRNA sense strand
ccucaacccuuacuacaca

SEQ ID NO: 1588361 - RNA, 19 nt, Homo sapiens
  misc_RNA (1)...(19): siRNA sense strand
ccucacaccuuacuacaca

SEQ ID NO: 1588362 - RNA, 19 nt, Homo sapiens
  misc_RNA (1)...(19): siRNA sense strand
ccucacaccuuacuacaca

SEQ ID NO: 1588363 - RNA, 19 nt, Homo sapiens
  misc_RNA (1)...(19): siRNA sense strand
ggaaaagagcccuggaaua

SEQ ID NO: 1588364 - RNA, 19 nt, Homo sapiens
  misc_RNA (1)...(19): siRNA sense strand
gaagaauacggcaaagcuu

SEQ ID NO: 1588365 - RNA, 19 nt, Homo sapiens
  misc_RNA (1)...(19): siRNA sense strand
ccucgacccuuacuaaaca

SEQ ID NO: 1588366 - RNA, 19 nt, Homo sapiens
  misc_RNA (1)...(19): siRNA sense strand
uacccagagugaaauauuu

SEQ ID NO: 1588367 - RNA, 19 nt, Homo sapiens
  misc_RNA (1)...(19): siRNA sense strand
ugacaacuacccagaguga

SEQ ID NO: 1588368 - RNA, 19 nt, Homo sapiens
  misc_RNA (1)...(19): siRNA sense strand
ggaaucuucugguguacuc

SEQ ID NO: 1588369 - RNA, 19 nt, Homo sapiens
  misc_RNA (1)...(19): siRNA sense strand
ucucaacccuuacuagaca

SEQ ID NO: 1588370 - RNA, 19 nt, Homo sapiens
  misc_RNA (1)...(19): siRNA sense strand
agagaaacccuacaacugu

SEQ ID NO: 1588371 - RNA, 19 nt, Homo sapiens
  misc_RNA (1)...(19): siRNA sense strand
gacccuuacuaaacauaaa

SEQ ID NO: 1588372 - RNA, 19 nt, Homo sapiens
  misc_RNA (1)...(19): siRNA sense strand
agagaaacccuacagaugu

SEQ ID NO: 1588373 - RNA, 19 nt, Homo sapiens
  misc_RNA (1)...(19): siRNA sense strand
agagaaacccuacagaugu

SEQ ID NO: 1588374 - RNA, 19 nt, Homo sapiens
  misc_RNA (1)...(19): siRNA sense strand
ccaagaagucauauugaga

SEQ ID NO: 1588375 - RNA, 19 nt, Homo sapiens
  misc_RNA (1)...(19): siRNA sense strand
guaauucauucuggagaga

SEQ ID NO: 1588376 - RNA, 19 nt, Homo sapiens
  misc_RNA (1)...(19): siRNA sense strand
gaacaauguggcaaagcuu

SEQ ID NO: 1588377 - RNA, 19 nt, Homo sapiens
  misc_RNA (1)...(19): siRNA sense strand
gaacaauguggcaaagcuu

SEQ ID NO: 1588378 - RNA, 19 nt, Homo sapiens
  misc_RNA (1)...(19): siRNA sense strand
ggagagaaacccuacaacu

SEQ ID NO: 1588379 - RNA, 19 nt, Homo sapiens
  misc_RNA (1)...(19): siRNA sense strand
ggacuacuccuauuucuuc

SEQ ID NO: 1588380 - RNA, 19 nt, Homo sapiens
  misc_RNA (1)...(19): siRNA sense strand
ggagucaauuuccaagaug

SEQ ID NO: 1588381 - RNA, 19 nt, Homo sapiens
  misc_RNA (1)...(19): siRNA sense strand
caagagaacagaaggaugu

SEQ ID NO: 1588382 - RNA, 19 nt, Homo sapiens
  misc_RNA (1)...(19): siRNA sense strand
gaagacaguaggcucaugu

SEQ ID NO: 1588383 - RNA, 19 nt, Homo sapiens
  misc_RNA (1)...(19): siRNA sense strand
ggaggaccacgucaagaaa

SEQ ID NO: 1588384 - RNA, 19 nt, Homo sapiens
  misc_RNA (1)...(19): siRNA sense strand
ggaagacaguaggcucaug

SEQ ID NO: 1588385 - RNA, 19 nt, Homo sapiens
  misc_RNA (1)...(19): siRNA sense strand
ggaaauccaggaagacagu

SEQ ID NO: 1588386 - RNA, 19 nt, Homo sapiens
  misc_RNA (1)...(19): siRNA sense strand
cuacuccuauuucuucuuc

SEQ ID NO: 1588387 - RNA, 19 nt, Homo sapiens
  misc_RNA (1)...(19): siRNA sense strand
gcagaaggccuuguuugag

SEQ ID NO: 1588388 - RNA, 19 nt, Homo sapiens
  misc_RNA (1)...(19): siRNA sense strand
cggagucaauuuccaagau

SEQ ID NO: 1588389 - RNA, 19 nt, Homo sapiens
  misc_RNA (1)...(19): siRNA sense strand
caggauggaugaaaauuau

SEQ ID NO: 1588390 - RNA, 19 nt, Homo sapiens
  misc_RNA (1)...(19): siRNA sense strand
ggaggaggaccacgucaag

SEQ ID NO: 1588391 - RNA, 19 nt, Homo sapiens
  misc_RNA (1)...(19): siRNA sense strand
gaaauccaggaagacagua

SEQ ID NO: 1588392 - RNA, 19 nt, Homo sapiens
  misc_RNA (1)...(19): siRNA sense strand
gugcagaaggccuuguuug

SEQ ID NO: 1588393 - RNA, 19 nt, Homo sapiens
  misc_RNA (1)...(19): siRNA sense strand
ugcagaaggccuuguuuga

SEQ ID NO: 1588394 - RNA, 19 nt, Homo sapiens
  misc_RNA (1)...(19): siRNA sense strand
ucacggagucaauuuccaa

SEQ ID NO: 1588395 - RNA, 19 nt, Homo sapiens
  misc_RNA (1)...(19): siRNA sense strand
gggagcgagugaagaaggu

SEQ ID NO: 1588396 - RNA, 19 nt, Homo sapiens
  misc_RNA (1)...(19): siRNA sense strand
uggcgacuuucuccaguga

SEQ ID NO: 1588397 - RNA, 19 nt, Homo sapiens
  misc_RNA (1)...(19): siRNA sense strand
ucaccggccugggcuacuu

SEQ ID NO: 1588398 - RNA, 19 nt, Homo sapiens
  misc_RNA (1)...(19): siRNA sense strand
cgaaccagaaacucaguga

SEQ ID NO: 1588399 - RNA, 19 nt, Homo sapiens
  misc_RNA (1)...(19): siRNA sense strand
gaggaggaccacgucaaga

SEQ ID NO: 1588400 - RNA, 19 nt, Homo sapiens
  misc_RNA (1)...(19): siRNA sense strand
gagugaagaaggucaagag

SEQ ID NO: 1588401 - RNA, 19 nt, Homo sapiens
  misc_RNA (1)...(19): siRNA sense strand
aggaggaccacgucaagaa

SEQ ID NO: 1588402 - RNA, 19 nt, Homo sapiens
  misc_RNA (1)...(19): siRNA sense strand
ucccagacacucaagagaa

SEQ ID NO: 1588403 - RNA, 19 nt, Homo sapiens
  misc_RNA (1)...(19): siRNA sense strand
gcgacuuucuccagugacu

SEQ ID NO: 1588404 - RNA, 19 nt, Homo sapiens
  misc_RNA (1)...(19): siRNA sense strand
gcagaucccuggaggcuuu

SEQ ID NO: 1588405 - RNA, 19 nt, Homo sapiens
  misc_RNA (1)...(19): siRNA sense strand
gaagauggcucugcagauc

SEQ ID NO: 1588406 - RNA, 19 nt, Homo sapiens
  misc_RNA (1)...(19): siRNA sense strand
gaacaacuauaaggacuuc

SEQ ID NO: 1588407 - RNA, 19 nt, Homo sapiens
  misc_RNA (1)...(19): siRNA sense strand
ggagacagccgguguugug

SEQ ID NO: 1588408 - RNA, 19 nt, Homo sapiens
  misc_RNA (1)...(19): siRNA sense strand
ccagagacuuucccaagga

SEQ ID NO: 1588409 - RNA, 19 nt, Homo sapiens
  misc_RNA (1)...(19): siRNA sense strand
ccaccucccucauuaggaa

SEQ ID NO: 1588410 - RNA, 19 nt, Homo sapiens
  misc_RNA (1)...(19): siRNA sense strand
gagacuuucccaaggauuu

SEQ ID NO: 1588411 - RNA, 19 nt, Homo sapiens
  misc_RNA (1)...(19): siRNA sense strand
guguccaccucccucauua

SEQ ID NO: 1588412 - RNA, 19 nt, Homo sapiens
  misc_RNA (1)...(19): siRNA sense strand
caacuauaaggacuucuug

SEQ ID NO: 1588413 - RNA, 19 nt, Homo sapiens
  misc_RNA (1)...(19): siRNA sense strand
ucuauaaccgcgaggagua

SEQ ID NO: 1588414 - RNA, 19 nt, Homo sapiens
  misc_RNA (1)...(19): siRNA sense strand
ggaagauggcucugcagau

SEQ ID NO: 1588415 - RNA, 19 nt, Homo sapiens
  misc_RNA (1)...(19): siRNA sense strand
ggacuggaacaacuauaag

SEQ ID NO: 1588416 - RNA, 19 nt, Homo sapiens
  misc_RNA (1)...(19): siRNA sense strand
ggauuucuugguccaguuu

SEQ ID NO: 1588417 - RNA, 19 nt, Homo sapiens
  misc_RNA (1)...(19): siRNA sense strand
ggaacaacuauaaggacuu

SEQ ID NO: 1588418 - RNA, 19 nt, Homo sapiens
  misc_RNA (1)...(19): siRNA sense strand
caacuacgaggcggagcua

SEQ ID NO: 1588419 - RNA, 19 nt, Homo sapiens
  misc_RNA (1)...(19): siRNA sense strand
ggaggagacagccgguguu

SEQ ID NO: 1588420 - RNA, 19 nt, Homo sapiens
  misc_RNA (1)...(19): siRNA sense strand
gaggagacagccgguguug

SEQ ID NO: 1588421 - RNA, 19 nt, Homo sapiens
  misc_RNA (1)...(19): siRNA sense strand
cagagacuuucccaaggau

SEQ ID NO: 1588422 - RNA, 19 nt, Homo sapiens
  misc_RNA (1)...(19): siRNA sense strand
uuaagggcaugugcuacuu

SEQ ID NO: 1588423 - RNA, 19 nt, Homo sapiens
  misc_RNA (1)...(19): siRNA sense strand
gaggacuggaacaacuaua

SEQ ID NO: 1588424 - RNA, 19 nt, Homo sapiens
  misc_RNA (1)...(19): siRNA sense strand
ggcugaggccagagacuuu

SEQ ID NO: 1588425 - RNA, 19 nt, Homo sapiens
  misc_RNA (1)...(19): siRNA sense strand
aggacuggaacaacuauaa

SEQ ID NO: 1588426 - RNA, 19 nt, Homo sapiens
  misc_RNA (1)...(19): siRNA sense strand
cagcugaggaugagcauua

SEQ ID NO: 1588427 - RNA, 19 nt, Homo sapiens
  misc_RNA (1)...(19): siRNA sense strand
aggacgagguguucuauaa

SEQ ID NO: 1588428 - RNA, 19 nt, Homo sapiens
  misc_RNA (1)...(19): siRNA sense strand
ucaaggaccacaucacaaa

SEQ ID NO: 1588429 - RNA, 19 nt, Homo sapiens
  misc_RNA (1)...(19): siRNA sense strand
ucacaagugcccacaagaa

SEQ ID NO: 1588430 - RNA, 19 nt, Homo sapiens
  misc_RNA (1)...(19): siRNA sense strand
caccguggcuccagacugu

SEQ ID NO: 1588431 - RNA, 19 nt, Homo sapiens
  misc_RNA (1)...(19): siRNA sense strand
gcuccagacugugucauug

SEQ ID NO: 1588432 - RNA, 19 nt, Homo sapiens
  misc_RNA (1)...(19): siRNA sense strand
cgagaccuguucacaagug

SEQ ID NO: 1588433 - RNA, 19 nt, Homo sapiens
  misc_RNA (1)...(19): siRNA sense strand
gacgagguguucuauaacu

SEQ ID NO: 1588434 - RNA, 19 nt, Homo sapiens
  misc_RNA (1)...(19): siRNA sense strand
ggacaaacagauggauuuc

SEQ ID NO: 1588435 - RNA, 19 nt, Homo sapiens
  misc_RNA (1)...(19): siRNA sense strand
guucacaagugcccacaag

SEQ ID NO: 1588436 - RNA, 19 nt, Homo sapiens
  misc_RNA (1)...(19): siRNA sense strand
gcaaggacaaacagaugga

SEQ ID NO: 1588437 - RNA, 19 nt, Homo sapiens
  misc_RNA (1)...(19): siRNA sense strand
caucaaggaccacaucaca

SEQ ID NO: 1588438 - RNA, 19 nt, Homo sapiens
  misc_RNA (1)...(19): siRNA sense strand
gaggacgagguguucuaua

SEQ ID NO: 1588439 - RNA, 19 nt, Homo sapiens
  misc_RNA (1)...(19): siRNA sense strand
cgcgagaccuguucacaag

SEQ ID NO: 1588440 - RNA, 19 nt, Homo sapiens
  misc_RNA (1)...(19): siRNA sense strand
gagcaucaaggaccacauc

SEQ ID NO: 1588441 - RNA, 19 nt, Homo sapiens
  misc_RNA (1)...(19): siRNA sense strand
ggaggacgagguguucuau

SEQ ID NO: 1588442 - RNA, 19 nt, Homo sapiens
  misc_RNA (1)...(19): siRNA sense strand
cgagguguucuauaacuga

SEQ ID NO: 1588443 - RNA, 19 nt, Homo sapiens
  misc_RNA (1)...(19): siRNA sense strand
ggaggaggacgagguguuc

SEQ ID NO: 1588444 - RNA, 19 nt, Homo sapiens
  misc_RNA (1)...(19): siRNA sense strand
caagugcccacaagaacug

SEQ ID NO: 1588445 - RNA, 19 nt, Homo sapiens
  misc_RNA (1)...(19): siRNA sense strand
gggaggaggacgagguguu

SEQ ID NO: 1588446 - RNA, 19 nt, Homo sapiens
  misc_RNA (1)...(19): siRNA sense strand
aggacaaacagauggauuu

SEQ ID NO: 1588447 - RNA, 19 nt, Homo sapiens
  misc_RNA (1)...(19): siRNA sense strand
ggacgagguguucuauaac

SEQ ID NO: 1588448 - RNA, 19 nt, Homo sapiens
  misc_RNA (1)...(19): siRNA sense strand
uggagagcaucuaccuuca

SEQ ID NO: 1588449 - RNA, 19 nt, Homo sapiens
  misc_RNA (1)...(19): siRNA sense strand
gccgagcaguuugccauca

SEQ ID NO: 1588450 - RNA, 19 nt, Homo sapiens
  misc_RNA (1)...(19): siRNA sense strand
cuacagacuuucuucuuug

SEQ ID NO: 1588451 - RNA, 19 nt, Homo sapiens
  misc_RNA (1)...(19): siRNA sense strand
ccuacagacuuucuucuuu

SEQ ID NO: 1588452 - RNA, 19 nt, Homo sapiens
  misc_RNA (1)...(19): siRNA sense strand
gggcucagcuacucugguu

SEQ ID NO: 1588453 - RNA, 19 nt, Homo sapiens
  misc_RNA (1)...(19): siRNA sense strand
caucuugauugcuuacaaa

SEQ ID NO: 1588454 - RNA, 19 nt, Homo sapiens
  misc_RNA (1)...(19): siRNA sense strand
cagaguaucccuuaucaga

SEQ ID NO: 1588455 - RNA, 19 nt, Homo sapiens
  misc_RNA (1)...(19): siRNA sense strand
gaggcagucuguucugguu

SEQ ID NO: 1588456 - RNA, 19 nt, Homo sapiens
  misc_RNA (1)...(19): siRNA sense strand
cauaaaggcaucacaagug

SEQ ID NO: 1588457 - RNA, 19 nt, Homo sapiens
  misc_RNA (1)...(19): siRNA sense strand
gaguaucccuuaucagaac

SEQ ID NO: 1588458 - RNA, 19 nt, Homo sapiens
  misc_RNA (1)...(19): siRNA sense strand
acacauggguugucuucug

SEQ ID NO: 1588459 - RNA, 19 nt, Homo sapiens
  misc_RNA (1)...(19): siRNA sense strand
gcauaaaggcaucacaagu

SEQ ID NO: 1588460 - RNA, 19 nt, Homo sapiens
  misc_RNA (1)...(19): siRNA sense strand
uagcgucucucaccaucuu

SEQ ID NO: 1588461 - RNA, 19 nt, Homo sapiens
  misc_RNA (1)...(19): siRNA sense strand
ucaccaucuugauugcuua

SEQ ID NO: 1588462 - RNA, 19 nt, Homo sapiens
  misc_RNA (1)...(19): siRNA sense strand
ggccucagaguaucccuua

SEQ ID NO: 1588463 - RNA, 19 nt, Homo sapiens
  misc_RNA (1)...(19): siRNA sense strand
uggcuugccuggcugauuc

SEQ ID NO: 1588464 - RNA, 19 nt, Homo sapiens
  misc_RNA (1)...(19): siRNA sense strand
agucaucacccucagcuuu

SEQ ID NO: 1588465 - RNA, 19 nt, Homo sapiens
  misc_RNA (1)...(19): siRNA sense strand
auaguauugugcaagcaua

SEQ ID NO: 1588466 - RNA, 19 nt, Homo sapiens
  misc_RNA (1)...(19): siRNA sense strand
ggcagucuguucugguuca

SEQ ID NO: 1588467 - RNA, 19 nt, Homo sapiens
  misc_RNA (1)...(19): siRNA sense strand
ccaucuugauugcuuacaa

SEQ ID NO: 1588468 - RNA, 19 nt, Homo sapiens
  misc_RNA (1)...(19): siRNA sense strand
uugccuggcugauucaugu

SEQ ID NO: 1588469 - RNA, 19 nt, Homo sapiens
  misc_RNA (1)...(19): siRNA sense strand
cuacacauggguugucuuc

SEQ ID NO: 1588470 - RNA, 19 nt, Homo sapiens
  misc_RNA (1)...(19): siRNA sense strand
cucagaguaucccuuauca

SEQ ID NO: 1588471 - RNA, 19 nt, Homo sapiens
  misc_RNA (1)...(19): siRNA sense strand
ccucagcuuuggcuacuac

SEQ ID NO: 1588472 - RNA, 19 nt, Homo sapiens
  misc_RNA (1)...(19): siRNA sense strand
ucucucaccaucuugauug

SEQ ID NO: 1588473 - RNA, 19 nt, Homo sapiens
  misc_RNA (1)...(19): siRNA sense strand
aagcauaaaggcaucacaa

SEQ ID NO: 1588474 - RNA, 19 nt, Homo sapiens
  misc_RNA (1)...(19): siRNA sense strand
gugggagaguccuuguaug

SEQ ID NO: 1588475 - RNA, 19 nt, Homo sapiens
  misc_RNA (1)...(19): siRNA sense strand
agaguaucccuuaucagaa

SEQ ID NO: 1588476 - RNA, 19 nt, Homo sapiens
  misc_RNA (1)...(19): siRNA sense strand
ggauagcgucucucaccau

SEQ ID NO: 1588477 - RNA, 19 nt, Homo sapiens
  misc_RNA (1)...(19): siRNA sense strand
gacuuucuucuuugggaua

SEQ ID NO: 1588478 - RNA, 19 nt, Homo sapiens
  misc_RNA (1)...(19): siRNA sense strand
gucaucacccucagcuuug

SEQ ID NO: 1588479 - RNA, 19 nt, Homo sapiens
  misc_RNA (1)...(19): siRNA sense strand
ccucagaguaucccuuauc

SEQ ID NO: 1588480 - RNA, 19 nt, Homo sapiens
  misc_RNA (1)...(19): siRNA sense strand
gaggagaacuugcuagaug

SEQ ID NO: 1588481 - RNA, 19 nt, Homo sapiens
  misc_RNA (1)...(19): siRNA sense strand
acaaggagcucucauuaug

SEQ ID NO: 1588482 - RNA, 19 nt, Homo sapiens
  misc_RNA (1)...(19): siRNA sense strand
caaaguaccugcuauugag

SEQ ID NO: 1588483 - RNA, 19 nt, Homo sapiens
  misc_RNA (1)...(19): siRNA sense strand
cgacuaccaucugcacuua

SEQ ID NO: 1588484 - RNA, 19 nt, Homo sapiens
  misc_RNA (1)...(19): siRNA sense strand
gcaacaguaccuccaauuu

SEQ ID NO: 1588485 - RNA, 19 nt, Homo sapiens
  misc_RNA (1)...(19): siRNA sense strand
cuauaguccugccuacuua

SEQ ID NO: 1588486 - RNA, 19 nt, Homo sapiens
  misc_RNA (1)...(19): siRNA sense strand
ggacuucauucaccucuca

SEQ ID NO: 1588487 - RNA, 19 nt, Homo sapiens
  misc_RNA (1)...(19): siRNA sense strand
caacaguaccuccaauuug

SEQ ID NO: 1588488 - RNA, 19 nt, Homo sapiens
  misc_RNA (1)...(19): siRNA sense strand
cuaagaagcuauccucauc

SEQ ID NO: 1588489 - RNA, 19 nt, Homo sapiens
  misc_RNA (1)...(19): siRNA sense strand
acacaaggagcucucauua

SEQ ID NO: 1588490 - RNA, 19 nt, Homo sapiens
  misc_RNA (1)...(19): siRNA sense strand
ggacuccucuccagguuuc

SEQ ID NO: 1588491 - RNA, 19 nt, Homo sapiens
  misc_RNA (1)...(19): siRNA sense strand
gagucuagcuggcgaagga

SEQ ID NO: 1588492 - RNA, 19 nt, Homo sapiens
  misc_RNA (1)...(19): siRNA sense strand
ugacagcucucccuauagu

SEQ ID NO: 1588493 - RNA, 19 nt, Homo sapiens
  misc_RNA (1)...(19): siRNA sense strand
aacaguaccuccaauuuga

SEQ ID NO: 1588494 - RNA, 19 nt, Homo sapiens
  misc_RNA (1)...(19): siRNA sense strand
ccaaaguaccugcuauuga

SEQ ID NO: 1588495 - RNA, 19 nt, Homo sapiens
  misc_RNA (1)...(19): siRNA sense strand
gcaauuucccugcagagaa

SEQ ID NO: 1588496 - RNA, 19 nt, Homo sapiens
  misc_RNA (1)...(19): siRNA sense strand
ccacucaccuuuggauuca

SEQ ID NO: 1588497 - RNA, 19 nt, Homo sapiens
  misc_RNA (1)...(19): siRNA sense strand
ggcuaaacaugcugaguga

SEQ ID NO: 1588498 - RNA, 19 nt, Homo sapiens
  misc_RNA (1)...(19): siRNA sense strand
gcagugaccggcuccaaug

SEQ ID NO: 1588499 - RNA, 19 nt, Homo sapiens
  misc_RNA (1)...(19): siRNA sense strand
auugacagcucucccuaua

SEQ ID NO: 1588500 - RNA, 19 nt, Homo sapiens
  misc_RNA (1)...(19): siRNA sense strand
caauuucccugcagagaag

SEQ ID NO: 1588501 - RNA, 19 nt, Homo sapiens
  misc_RNA (1)...(19): siRNA sense strand
ggcaugggcaacagucuua

SEQ ID NO: 1588502 - RNA, 19 nt, Homo sapiens
  misc_RNA (1)...(19): siRNA sense strand
gcgcaaauuuagugagaag

SEQ ID NO: 1588503 - RNA, 19 nt, Homo sapiens
  misc_RNA (1)...(19): siRNA sense strand
ugaagucccuggaauuaac

SEQ ID NO: 1588504 - RNA, 19 nt, Homo sapiens
  misc_RNA (1)...(19): siRNA sense strand
gcacuuaacaggacaagcu

SEQ ID NO: 1588505 - RNA, 19 nt, Homo sapiens
  misc_RNA (1)...(19): siRNA sense strand
gcaaauuuagugagaagau

SEQ ID NO: 1588506 - RNA, 19 nt, Homo sapiens
  misc_RNA (1)...(19): siRNA sense strand
cgacuggcauacacaagga

SEQ ID NO: 1588507 - RNA, 19 nt, Homo sapiens
  misc_RNA (1)...(19): siRNA sense strand
ugugaagucccuggaauua

SEQ ID NO: 1588508 - RNA, 19 nt, Homo sapiens
  misc_RNA (1)...(19): siRNA sense strand
ucgaggaggugaugaugga

SEQ ID NO: 1588509 - RNA, 19 nt, Homo sapiens
  misc_RNA (1)...(19): siRNA sense strand
gcucagggccuaacaucau

SEQ ID NO: 1588510 - RNA, 19 nt, Homo sapiens
  misc_RNA (1)...(19): siRNA sense strand
caggcaggcagucucauua

SEQ ID NO: 1588511 - RNA, 19 nt, Homo sapiens
  misc_RNA (1)...(19): siRNA sense strand
ggcuugggcuagaagauga

SEQ ID NO: 1588512 - RNA, 19 nt, Homo sapiens
  misc_RNA (1)...(19): siRNA sense strand
aagaugagcugcgcaugga

SEQ ID NO: 1588513 - RNA, 19 nt, Homo sapiens
  misc_RNA (1)...(19): siRNA sense strand
ggucucugcccaauguuaa

SEQ ID NO: 1588514 - RNA, 19 nt, Homo sapiens
  misc_RNA (1)...(19): siRNA sense strand
ggcaggcagucucauuaug

SEQ ID NO: 1588515 - RNA, 19 nt, Homo sapiens
  misc_RNA (1)...(19): siRNA sense strand
gccaugggaugcuaagaag

SEQ ID NO: 1588516 - RNA, 19 nt, Homo sapiens
  misc_RNA (1)...(19): siRNA sense strand
gcaguuguuucgacuacca

SEQ ID NO: 1588517 - RNA, 19 nt, Homo sapiens
  misc_RNA (1)...(19): siRNA sense strand
ccgcgcaaauuuagugaga

SEQ ID NO: 1588518 - RNA, 19 nt, Homo sapiens
  misc_RNA (1)...(19): siRNA sense strand
gauacacccgccacauuga

SEQ ID NO: 1588519 - RNA, 19 nt, Homo sapiens
  misc_RNA (1)...(19): siRNA sense strand
cgauacacccgccacauug

SEQ ID NO: 1588520 - RNA, 19 nt, Homo sapiens
  misc_RNA (1)...(19): siRNA sense strand
gcccaauguuaaccagauu

SEQ ID NO: 1588521 - RNA, 19 nt, Homo sapiens
  misc_RNA (1)...(19): siRNA sense strand
gcaggcagucucauuaugg

SEQ ID NO: 1588522 - RNA, 19 nt, Homo sapiens
  misc_RNA (1)...(19): siRNA sense strand
gggcaacaguaccuccaau

SEQ ID NO: 1588523 - RNA, 19 nt, Homo sapiens
  misc_RNA (1)...(19): siRNA sense strand
ugaaauggaccccaaagua

SEQ ID NO: 1588524 - RNA, 19 nt, Homo sapiens
  misc_RNA (1)...(19): siRNA sense strand
ugaccagccugccaaugug

SEQ ID NO: 1588525 - RNA, 19 nt, Homo sapiens
  misc_RNA (1)...(19): siRNA sense strand
caucggcuccacccgguua

SEQ ID NO: 1588526 - RNA, 19 nt, Homo sapiens
  misc_RNA (1)...(19): siRNA sense strand
aggagaacuugcuagauga

SEQ ID NO: 1588527 - RNA, 19 nt, Homo sapiens
  misc_RNA (1)...(19): siRNA sense strand
gggcaguuguuucgacuac

SEQ ID NO: 1588528 - RNA, 19 nt, Homo sapiens
  misc_RNA (1)...(19): siRNA sense strand
uccaauccgcgcaaauuua

SEQ ID NO: 1588529 - RNA, 19 nt, Homo sapiens
  misc_RNA (1)...(19): siRNA sense strand
ccaauccgcgcaaauuuag

SEQ ID NO: 1588530 - RNA, 19 nt, Homo sapiens
  misc_RNA (1)...(19): siRNA sense strand
gcucuuuccuccuccucuu

SEQ ID NO: 1588531 - RNA, 19 nt, Homo sapiens
  misc_RNA (1)...(19): siRNA sense strand
gaacgggugcagcgagauc

SEQ ID NO: 1588532 - RNA, 19 nt, Homo sapiens
  misc_RNA (1)...(19): siRNA sense strand
gccaaugagugacuucaac

SEQ ID NO: 1588533 - RNA, 19 nt, Homo sapiens
  misc_RNA (1)...(19): siRNA sense strand
agauugcgcugcagaagca

SEQ ID NO: 1588534 - RNA, 19 nt, Homo sapiens
  misc_RNA (1)...(19): siRNA sense strand
uaccugcuauugaggagaa

SEQ ID NO: 1588535 - RNA, 19 nt, Homo sapiens
  misc_RNA (1)...(19): siRNA sense strand
gaagauugcgcugcagaag

SEQ ID NO: 1588536 - RNA, 19 nt, Homo sapiens
  misc_RNA (1)...(19): siRNA sense strand
uauucuggauggugaaaug

SEQ ID NO: 1588537 - RNA, 19 nt, Homo sapiens
  misc_RNA (1)...(19): siRNA sense strand
gcaguccucccuaagcaau

SEQ ID NO: 1588538 - RNA, 19 nt, Homo sapiens
  misc_RNA (1)...(19): siRNA sense strand
gugaagucccuggaauuaa

SEQ ID NO: 1588539 - RNA, 19 nt, Homo sapiens
  misc_RNA (1)...(19): siRNA sense strand
gaaauggaccccaaaguac

SEQ ID NO: 1588540 - RNA, 19 nt, Homo sapiens
  misc_RNA (1)...(19): siRNA sense strand
ucaccaaccugcacuuucc

SEQ ID NO: 1588541 - RNA, 19 nt, Homo sapiens
  misc_RNA (1)...(19): siRNA sense strand
gcuaagaagcuauccucau

SEQ ID NO: 1588542 - RNA, 19 nt, Homo sapiens
  misc_RNA (1)...(19): siRNA sense strand
agaacuugcuagaugacaa

SEQ ID NO: 1588543 - RNA, 19 nt, Homo sapiens
  misc_RNA (1)...(19): siRNA sense strand
ccgauacacccgccacauu

SEQ ID NO: 1588544 - RNA, 19 nt, Homo sapiens
  misc_RNA (1)...(19): siRNA sense strand
cacaaggagcucucauuau

SEQ ID NO: 1588545 - RNA, 19 nt, Homo sapiens
  misc_RNA (1)...(19): siRNA sense strand
aaggagcucucauuauggu

SEQ ID NO: 1588546 - RNA, 19 nt, Homo sapiens
  misc_RNA (1)...(19): siRNA sense strand
ccuauaguccugccuacuu

SEQ ID NO: 1588547 - RNA, 19 nt, Homo sapiens
  misc_RNA (1)...(19): siRNA sense strand
ggcaacaguaccuccaauu

SEQ ID NO: 1588548 - RNA, 19 nt, Homo sapiens
  misc_RNA (1)...(19): siRNA sense strand
caccuugucuuccaucacu

SEQ ID NO: 1588549 - RNA, 19 nt, Homo sapiens
  misc_RNA (1)...(19): siRNA sense strand
ccaggcaggcagucucauu

SEQ ID NO: 1588550 - RNA, 19 nt, Homo sapiens
  misc_RNA (1)...(19): siRNA sense strand
gggucucugcccaauguua

SEQ ID NO: 1588551 - RNA, 19 nt, Homo sapiens
  misc_RNA (1)...(19): siRNA sense strand
ccucuuacccugcuucuac

SEQ ID NO: 1588552 - RNA, 19 nt, Homo sapiens
  misc_RNA (1)...(19): siRNA sense strand
ccuggacccugaagagaca

SEQ ID NO: 1588553 - RNA, 19 nt, Homo sapiens
  misc_RNA (1)...(19): siRNA sense strand
ccugugaagucccuggaau

SEQ ID NO: 1588554 - RNA, 19 nt, Homo sapiens
  misc_RNA (1)...(19): siRNA sense strand
acucugcccuucauacaag

SEQ ID NO: 1588555 - RNA, 19 nt, Homo sapiens
  misc_RNA (1)...(19): siRNA sense strand
gaagucccuggaauuaaca

SEQ ID NO: 1588556 - RNA, 19 nt, Homo sapiens
  misc_RNA (1)...(19): siRNA sense strand
caaggagcucucauuaugg

SEQ ID NO: 1588557 - RNA, 19 nt, Homo sapiens
  misc_RNA (1)...(19): siRNA sense strand
ucacccaccuugucuucca

SEQ ID NO: 1588558 - RNA, 19 nt, Homo sapiens
  misc_RNA (1)...(19): siRNA sense strand
caacaaugucacccaccuu

SEQ ID NO: 1588559 - RNA, 19 nt, Homo sapiens
  misc_RNA (1)...(19): siRNA sense strand
ucccugcaguccucccuaa

SEQ ID NO: 1588560 - RNA, 19 nt, Homo sapiens
  misc_RNA (1)...(19): siRNA sense strand
uggaagggcuaaacaugcu

SEQ ID NO: 1588561 - RNA, 19 nt, Homo sapiens
  misc_RNA (1)...(19): siRNA sense strand
gggcuugggcuagaagaug

SEQ ID NO: 1588562 - RNA, 19 nt, Homo sapiens
  misc_RNA (1)...(19): siRNA sense strand
cggagugccuggcuuugag

SEQ ID NO: 1588563 - RNA, 19 nt, Homo sapiens
  misc_RNA (1)...(19): siRNA sense strand
ccauacagcuccccaaguc

SEQ ID NO: 1588564 - RNA, 19 nt, Homo sapiens
  misc_RNA (1)...(19): siRNA sense strand
cugaagccaugggaugcua

SEQ ID NO: 1588565 - RNA, 19 nt, Homo sapiens
  misc_RNA (1)...(19): siRNA sense strand
gaugcaccaggacuucauu

SEQ ID NO: 1588566 - RNA, 19 nt, Homo sapiens
  misc_RNA (1)...(19): siRNA sense strand
gcucugacucugcccuuca

SEQ ID NO: 1588567 - RNA, 19 nt, Homo sapiens
  misc_RNA (1)...(19): siRNA sense strand
gggcaugggcaacagucuu

SEQ ID NO: 1588568 - RNA, 19 nt, Homo sapiens
  misc_RNA (1)...(19): siRNA sense strand
caaugucacccaccuuguc

SEQ ID NO: 1588569 - RNA, 19 nt, Homo sapiens
  misc_RNA (1)...(19): siRNA sense strand
uaccugaccucaccaaccu

SEQ ID NO: 1588570 - RNA, 19 nt, Homo sapiens
  misc_RNA (1)...(19): siRNA sense strand
auuaacaucuuuccaucuc

SEQ ID NO: 1588571 - RNA, 19 nt, Homo sapiens
  misc_RNA (1)...(19): siRNA sense strand
aagcuauccucauccucuu

SEQ ID NO: 1588572 - RNA, 19 nt, Homo sapiens
  misc_RNA (1)...(19): siRNA sense strand
cccuggaauuaacaucuuu

SEQ ID NO: 1588573 - RNA, 19 nt, Homo sapiens
  misc_RNA (1)...(19): siRNA sense strand
ucagugcuccggcucuuuc

SEQ ID NO: 1588574 - RNA, 19 nt, Homo sapiens
  misc_RNA (1)...(19): siRNA sense strand
cugcaguccucccuaagca

SEQ ID NO: 1588575 - RNA, 19 nt, Homo sapiens
  misc_RNA (1)...(19): siRNA sense strand
ggaauuaaaucacagcuaa

SEQ ID NO: 1588576 - RNA, 19 nt, Homo sapiens
  misc_RNA (1)...(19): siRNA sense strand
gagaagagccgggaauuaa

SEQ ID NO: 1588577 - RNA, 19 nt, Homo sapiens
  misc_RNA (1)...(19): siRNA sense strand
ggagaagagccgggaauua

SEQ ID NO: 1588578 - RNA, 19 nt, Homo sapiens
  misc_RNA (1)...(19): siRNA sense strand
gaugagagugccauugaua

SEQ ID NO: 1588579 - RNA, 19 nt, Homo sapiens
  misc_RNA (1)...(19): siRNA sense strand
ccagggaauugguggauuu

SEQ ID NO: 1588580 - RNA, 19 nt, Homo sapiens
  misc_RNA (1)...(19): siRNA sense strand
gagagugccauugauaaua

SEQ ID NO: 1588581 - RNA, 19 nt, Homo sapiens
  misc_RNA (1)...(19): siRNA sense strand
gaaccuuauucgaucugua

SEQ ID NO: 1588582 - RNA, 19 nt, Homo sapiens
  misc_RNA (1)...(19): siRNA sense strand
gaagagccgggaauuaaau

SEQ ID NO: 1588583 - RNA, 19 nt, Homo sapiens
  misc_RNA (1)...(19): siRNA sense strand
gaacagaccagggaauugg

SEQ ID NO: 1588584 - RNA, 19 nt, Homo sapiens
  misc_RNA (1)...(19): siRNA sense strand
ucacagcuaaugaaccuua

SEQ ID NO: 1588585 - RNA, 19 nt, Homo sapiens
  misc_RNA (1)...(19): siRNA sense strand
gggaauugguggauuugga

SEQ ID NO: 1588586 - RNA, 19 nt, Homo sapiens
  misc_RNA (1)...(19): siRNA sense strand
uaagaaccgugaugagagu

SEQ ID NO: 1588587 - RNA, 19 nt, Homo sapiens
  misc_RNA (1)...(19): siRNA sense strand
cuaaugaaccuuauucgau

SEQ ID NO: 1588588 - RNA, 19 nt, Homo sapiens
  misc_RNA (1)...(19): siRNA sense strand
agagugccauugauaauag

SEQ ID NO: 1588589 - RNA, 19 nt, Homo sapiens
  misc_RNA (1)...(19): siRNA sense strand
gugaugagagugccauuga

SEQ ID NO: 1588590 - RNA, 19 nt, Homo sapiens
  misc_RNA (1)...(19): siRNA sense strand
gggaacagaccagggaauu

SEQ ID NO: 1588591 - RNA, 19 nt, Homo sapiens
  misc_RNA (1)...(19): siRNA sense strand
ggaacagaccagggaauug

SEQ ID NO: 1588592 - RNA, 19 nt, Homo sapiens
  misc_RNA (1)...(19): siRNA sense strand
agaagagccgggaauuaaa

SEQ ID NO: 1588593 - RNA, 19 nt, Homo sapiens
  misc_RNA (1)...(19): siRNA sense strand
gcuaaugaaccuuauucga

SEQ ID NO: 1588594 - RNA, 19 nt, Homo sapiens
  misc_RNA (1)...(19): siRNA sense strand
gagcgauuccucaagaaca

SEQ ID NO: 1588595 - RNA, 19 nt, Homo sapiens
  misc_RNA (1)...(19): siRNA sense strand
gggaauuaaaucacagcua

SEQ ID NO: 1588596 - RNA, 19 nt, Homo sapiens
  misc_RNA (1)...(19): siRNA sense strand
uguaagaaccgugaugaga

SEQ ID NO: 1588597 - RNA, 19 nt, Homo sapiens
  misc_RNA (1)...(19): siRNA sense strand
aaucacagcuaaugaaccu

SEQ ID NO: 1588598 - RNA, 19 nt, Homo sapiens
  misc_RNA (1)...(19): siRNA sense strand
cagcuaaugaaccuuauuc

SEQ ID NO: 1588599 - RNA, 19 nt, Homo sapiens
  misc_RNA (1)...(19): siRNA sense strand
ugagagugccauugauaau

SEQ ID NO: 1588600 - RNA, 19 nt, Homo sapiens
  misc_RNA (1)...(19): siRNA sense strand
aaccuuauucgaucuguaa

SEQ ID NO: 1588601 - RNA, 19 nt, Homo sapiens
  misc_RNA (1)...(19): siRNA sense strand
ugaugagagugccauugau

SEQ ID NO: 1588602 - RNA, 19 nt, Homo sapiens
  misc_RNA (1)...(19): siRNA sense strand
uaaaucacagcuaaugaac

SEQ ID NO: 1588603 - RNA, 19 nt, Homo sapiens
  misc_RNA (1)...(19): siRNA sense strand
gggcugaguuaaaggagaa

SEQ ID NO: 1588604 - RNA, 19 nt, Homo sapiens
  misc_RNA (1)...(19): siRNA sense strand
ucacagaggauaccauugu

SEQ ID NO: 1588605 - RNA, 19 nt, Homo sapiens
  misc_RNA (1)...(19): siRNA sense strand
gugcaugacggaacaauag

SEQ ID NO: 1588606 - RNA, 19 nt, Homo sapiens
  misc_RNA (1)...(19): siRNA sense strand
gcaccuacuccgugucagu

SEQ ID NO: 1588607 - RNA, 19 nt, Homo sapiens
  misc_RNA (1)...(19): siRNA sense strand
auaagugcaugacggaaca

SEQ ID NO: 1588608 - RNA, 19 nt, Homo sapiens
  misc_RNA (1)...(19): siRNA sense strand
cagaggauaccauugucuu

SEQ ID NO: 1588609 - RNA, 19 nt, Homo sapiens
  misc_RNA (1)...(19): siRNA sense strand
ugaguuaaaggagaaauuc

SEQ ID NO: 1588610 - RNA, 19 nt, Homo sapiens
  misc_RNA (1)...(19): siRNA sense strand
gaguuaaaggagaaauuca

SEQ ID NO: 1588611 - RNA, 19 nt, Homo sapiens
  misc_RNA (1)...(19): siRNA sense strand
cacagaggauaccauuguc

SEQ ID NO: 1588612 - RNA, 19 nt, Homo sapiens
  misc_RNA (1)...(19): siRNA sense strand
cuucacagaggauaccauu

SEQ ID NO: 1588613 - RNA, 19 nt, Homo sapiens
  misc_RNA (1)...(19): siRNA sense strand
gcagucgccuguccacuua

SEQ ID NO: 1588614 - RNA, 19 nt, Homo sapiens
  misc_RNA (1)...(19): siRNA sense strand
gcaaacagcugaagaucuc

SEQ ID NO: 1588615 - RNA, 19 nt, Homo sapiens
  misc_RNA (1)...(19): siRNA sense strand
ccaaguuucuuacaacaau

SEQ ID NO: 1588616 - RNA, 19 nt, Homo sapiens
  misc_RNA (1)...(19): siRNA sense strand
uggauggucugaagcauuu

SEQ ID NO: 1588617 - RNA, 19 nt, Homo sapiens
  misc_RNA (1)...(19): siRNA sense strand
ugacaggaaugauuguguu

SEQ ID NO: 1588618 - RNA, 19 nt, Homo sapiens
  misc_RNA (1)...(19): siRNA sense strand
gaaacggagucucggaagu

SEQ ID NO: 1588619 - RNA, 19 nt, Homo sapiens
  misc_RNA (1)...(19): siRNA sense strand
gaaaauaccagugggaaaa

SEQ ID NO: 1588620 - RNA, 19 nt, Homo sapiens
  misc_RNA (1)...(19): siRNA sense strand
ccagugaugcccaaauuga

SEQ ID NO: 1588621 - RNA, 19 nt, Homo sapiens
  misc_RNA (1)...(19): siRNA sense strand
gagaagcuccacuacacaa

SEQ ID NO: 1588622 - RNA, 19 nt, Homo sapiens
  misc_RNA (1)...(19): siRNA sense strand
cgagguggauggucugaag

SEQ ID NO: 1588623 - RNA, 19 nt, Homo sapiens
  misc_RNA (1)...(19): siRNA sense strand
gaagaucucgcuuggucau

SEQ ID NO: 1588624 - RNA, 19 nt, Homo sapiens
  misc_RNA (1)...(19): siRNA sense strand
uccagacugugccaaguuu

SEQ ID NO: 1588625 - RNA, 19 nt, Homo sapiens
  misc_RNA (1)...(19): siRNA sense strand
gacugugccaaguuucuua

SEQ ID NO: 1588626 - RNA, 19 nt, Homo sapiens
  misc_RNA (1)...(19): siRNA sense strand
agccagugaugcccaaauu

SEQ ID NO: 1588627 - RNA, 19 nt, Homo sapiens
  misc_RNA (1)...(19): siRNA sense strand
gaucucgcuuggucaugug

SEQ ID NO: 1588628 - RNA, 19 nt, Homo sapiens
  misc_RNA (1)...(19): siRNA sense strand
gaacgggcaaacagcugaa

SEQ ID NO: 1588629 - RNA, 19 nt, Homo sapiens
  misc_RNA (1)...(19): siRNA sense strand
ggccuugcuugcuuucuuc

SEQ ID NO: 1588630 - RNA, 19 nt, Homo sapiens
  misc_RNA (1)...(19): siRNA sense strand
gcaagugaacacccugaca

SEQ ID NO: 1588631 - RNA, 19 nt, Homo sapiens
  misc_RNA (1)...(19): siRNA sense strand
gugccaaguuucuuacaac

SEQ ID NO: 1588632 - RNA, 19 nt, Homo sapiens
  misc_RNA (1)...(19): siRNA sense strand
ggaagccuggagugccuaa

SEQ ID NO: 1588633 - RNA, 19 nt, Homo sapiens
  misc_RNA (1)...(19): siRNA sense strand
gcaggauguuuuaggagaa

SEQ ID NO: 1588634 - RNA, 19 nt, Homo sapiens
  misc_RNA (1)...(19): siRNA sense strand
aaacggagucucggaagug

SEQ ID NO: 1588635 - RNA, 19 nt, Homo sapiens
  misc_RNA (1)...(19): siRNA sense strand
gacaggaaugauuguguug

SEQ ID NO: 1588636 - RNA, 19 nt, Homo sapiens
  misc_RNA (1)...(19): siRNA sense strand
cggccuugcuugcuuucuu

SEQ ID NO: 1588637 - RNA, 19 nt, Homo sapiens
  misc_RNA (1)...(19): siRNA sense strand
caaccagcaggauguuuua

SEQ ID NO: 1588638 - RNA, 19 nt, Homo sapiens
  misc_RNA (1)...(19): siRNA sense strand
guaauaagaacgggcaaac

SEQ ID NO: 1588639 - RNA, 19 nt, Homo sapiens
  misc_RNA (1)...(19): siRNA sense strand
guggauggucugaagcauu

SEQ ID NO: 1588640 - RNA, 19 nt, Homo sapiens
  misc_RNA (1)...(19): siRNA sense strand
acacaaggcagcaaaaguu

SEQ ID NO: 1588641 - RNA, 19 nt, Homo sapiens
  misc_RNA (1)...(19): siRNA sense strand
aauaagaacgggcaaacag

SEQ ID NO: 1588642 - RNA, 19 nt, Homo sapiens
  misc_RNA (1)...(19): siRNA sense strand
gggcaaacagcugaagauc

SEQ ID NO: 1588643 - RNA, 19 nt, Homo sapiens
  misc_RNA (1)...(19): siRNA sense strand
ggcaaacagcugaagaucu

SEQ ID NO: 1588644 - RNA, 19 nt, Homo sapiens
  misc_RNA (1)...(19): siRNA sense strand
gaagagggcguuacuacaa

SEQ ID NO: 1588645 - RNA, 19 nt, Homo sapiens
  misc_RNA (1)...(19): siRNA sense strand
ggagaccucuggccugaug

SEQ ID NO: 1588646 - RNA, 19 nt, Homo sapiens
  misc_RNA (1)...(19): siRNA sense strand
ggaguccgcucagaauuug

SEQ ID NO: 1588647 - RNA, 19 nt, Homo sapiens
  misc_RNA (1)...(19): siRNA sense strand
gcucagaauuugaucagau

SEQ ID NO: 1588648 - RNA, 19 nt, Homo sapiens
  misc_RNA (1)...(19): siRNA sense strand
ugaaggcgcuugaguaugc

SEQ ID NO: 1588649 - RNA, 19 nt, Homo sapiens
  misc_RNA (1)...(19): siRNA sense strand
gaccauaccugcucaucca

SEQ ID NO: 1588650 - RNA, 19 nt, Homo sapiens
  misc_RNA (1)...(19): siRNA sense strand
gcagcacgccgacaaguga

SEQ ID NO: 1588651 - RNA, 19 nt, Homo sapiens
  misc_RNA (1)...(19): siRNA sense strand
gcccagcgguguggaauga

SEQ ID NO: 1588652 - RNA, 19 nt, Homo sapiens
  misc_RNA (1)...(19): siRNA sense strand
ccaccaggccgucaugauu

SEQ ID NO: 1588653 - RNA, 19 nt, Homo sapiens
  misc_RNA (1)...(19): siRNA sense strand
caacccaaacuguguggua

SEQ ID NO: 1588654 - RNA, 19 nt, Homo sapiens
  misc_RNA (1)...(19): siRNA sense strand
ggaagagggcguuacuaca

SEQ ID NO: 1588655 - RNA, 19 nt, Homo sapiens
  misc_RNA (1)...(19): siRNA sense strand
caugaaggcgcuugaguau

SEQ ID NO: 1588656 - RNA, 19 nt, Homo sapiens
  misc_RNA (1)...(19): siRNA sense strand
gcucauaucacugggaaga

SEQ ID NO: 1588657 - RNA, 19 nt, Homo sapiens
  misc_RNA (1)...(19): siRNA sense strand
caaacugugugguaauugc

SEQ ID NO: 1588658 - RNA, 19 nt, Homo sapiens
  misc_RNA (1)...(19): siRNA sense strand
gcaccaacgagucgcagaa

SEQ ID NO: 1588659 - RNA, 19 nt, Homo sapiens
  misc_RNA (1)...(19): siRNA sense strand
cccaaacugugugguaauu

SEQ ID NO: 1588660 - RNA, 19 nt, Homo sapiens
  misc_RNA (1)...(19): siRNA sense strand
gggaagagggcguuacuac

SEQ ID NO: 1588661 - RNA, 19 nt, Homo sapiens
  misc_RNA (1)...(19): siRNA sense strand
acaugaaggcgcuugagua

SEQ ID NO: 1588662 - RNA, 19 nt, Homo sapiens
  misc_RNA (1)...(19): siRNA sense strand
gcugggauuugacaucucu

SEQ ID NO: 1588663 - RNA, 19 nt, Homo sapiens
  misc_RNA (1)...(19): siRNA sense strand
ggaaguucaggcccaguga

SEQ ID NO: 1588664 - RNA, 19 nt, Homo sapiens
  misc_RNA (1)...(19): siRNA sense strand
uuucaagucugcccugcaa

SEQ ID NO: 1588665 - RNA, 19 nt, Homo sapiens
  misc_RNA (1)...(19): siRNA sense strand
ccagcgguguggaaugaga

SEQ ID NO: 1588666 - RNA, 19 nt, Homo sapiens
  misc_RNA (1)...(19): siRNA sense strand
aacccaaacugugugguaa

SEQ ID NO: 1588667 - RNA, 19 nt, Homo sapiens
  misc_RNA (1)...(19): siRNA sense strand
agacgcaggagaaagcuuu

SEQ ID NO: 1588668 - RNA, 19 nt, Homo sapiens
  misc_RNA (1)...(19): siRNA sense strand
gacguuggucccuacauga

SEQ ID NO: 1588669 - RNA, 19 nt, Homo sapiens
  misc_RNA (1)...(19): siRNA sense strand
caccaggccgucaugauug

SEQ ID NO: 1588670 - RNA, 19 nt, Homo sapiens
  misc_RNA (1)...(19): siRNA sense strand
cgacacauccaacccaaac

SEQ ID NO: 1588671 - RNA, 19 nt, Homo sapiens
  misc_RNA (1)...(19): siRNA sense strand
cauccaacccaaacugugu

SEQ ID NO: 1588672 - RNA, 19 nt, Homo sapiens
  misc_RNA (1)...(19): siRNA sense strand
cuucagaggcugggauuug

SEQ ID NO: 1588673 - RNA, 19 nt, Homo sapiens
  misc_RNA (1)...(19): siRNA sense strand
ccaacgagucgcagaaguc

SEQ ID NO: 1588674 - RNA, 19 nt, Homo sapiens
  misc_RNA (1)...(19): siRNA sense strand
uucagaggcugggauuuga

SEQ ID NO: 1588675 - RNA, 19 nt, Homo sapiens
  misc_RNA (1)...(19): siRNA sense strand
aagagggcguuacuacaag

SEQ ID NO: 1588676 - RNA, 19 nt, Homo sapiens
  misc_RNA (1)...(19): siRNA sense strand
gcaagcgauaggaguggaa

SEQ ID NO: 1588677 - RNA, 19 nt, Homo sapiens
  misc_RNA (1)...(19): siRNA sense strand
gcuaguaugucaauaguga

SEQ ID NO: 1588678 - RNA, 19 nt, Homo sapiens
  misc_RNA (1)...(19): siRNA sense strand
aaagcgaggugucuacuuc

SEQ ID NO: 1588679 - RNA, 19 nt, Homo sapiens
  misc_RNA (1)...(19): siRNA sense strand
ggccacaucaaacacaaua

SEQ ID NO: 1588680 - RNA, 19 nt, Homo sapiens
  misc_RNA (1)...(19): siRNA sense strand
gaaggagccagagguauca

SEQ ID NO: 1588681 - RNA, 19 nt, Homo sapiens
  misc_RNA (1)...(19): siRNA sense strand
gcaaacuggacaccuucua

SEQ ID NO: 1588682 - RNA, 19 nt, Homo sapiens
  misc_RNA (1)...(19): siRNA sense strand
ucacaugcuucacuaguac

SEQ ID NO: 1588683 - RNA, 19 nt, Homo sapiens
  misc_RNA (1)...(19): siRNA sense strand
caaacuggacaccuucuau

SEQ ID NO: 1588684 - RNA, 19 nt, Homo sapiens
  misc_RNA (1)...(19): siRNA sense strand
aaacuggacaccuucuauu

SEQ ID NO: 1588685 - RNA, 19 nt, Homo sapiens
  misc_RNA (1)...(19): siRNA sense strand
gaaggccacaucaaacaca

SEQ ID NO: 1588686 - RNA, 19 nt, Homo sapiens
  misc_RNA (1)...(19): siRNA sense strand
caucaucaccgucauaugc

SEQ ID NO: 1588687 - RNA, 19 nt, Homo sapiens
  misc_RNA (1)...(19): siRNA sense strand
caaacacaauaagccaaug

SEQ ID NO: 1588688 - RNA, 19 nt, Homo sapiens
  misc_RNA (1)...(19): siRNA sense strand
caauguggguggucagcau

SEQ ID NO: 1588689 - RNA, 19 nt, Homo sapiens
  misc_RNA (1)...(19): siRNA sense strand
ugaaggagccagagguauc

SEQ ID NO: 1588690 - RNA, 19 nt, Homo sapiens
  misc_RNA (1)...(19): siRNA sense strand
cuacacagguggccaucag

SEQ ID NO: 1588691 - RNA, 19 nt, Homo sapiens
  misc_RNA (1)...(19): siRNA sense strand
ccacaucaaacacaauaag

SEQ ID NO: 1588692 - RNA, 19 nt, Homo sapiens
  misc_RNA (1)...(19): siRNA sense strand
uagugaaggccacaucaaa

SEQ ID NO: 1588693 - RNA, 19 nt, Homo sapiens
  misc_RNA (1)...(19): siRNA sense strand
gauggacgcccugcucuuc

SEQ ID NO: 1588694 - RNA, 19 nt, Homo sapiens
  misc_RNA (1)...(19): siRNA sense strand
gugaaggccacaucaaaca

SEQ ID NO: 1588695 - RNA, 19 nt, Homo sapiens
  misc_RNA (1)...(19): siRNA sense strand
ucgaugcccucaguuucua

SEQ ID NO: 1588696 - RNA, 19 nt, Homo sapiens
  misc_RNA (1)...(19): siRNA sense strand
ccaucgaugcccucaguuu

SEQ ID NO: 1588697 - RNA, 19 nt, Homo sapiens
  misc_RNA (1)...(19): siRNA sense strand
ccacuagcacuucaucaca

SEQ ID NO: 1588698 - RNA, 19 nt, Homo sapiens
  misc_RNA (1)...(19): siRNA sense strand
ccaguggcauucugauugc

SEQ ID NO: 1588699 - RNA, 19 nt, Homo sapiens
  misc_RNA (1)...(19): siRNA sense strand
gggaacacgaggcucagaa

SEQ ID NO: 1588700 - RNA, 19 nt, Homo sapiens
  misc_RNA (1)...(19): siRNA sense strand
ucaaacacaauaagccaau

SEQ ID NO: 1588701 - RNA, 19 nt, Homo sapiens
  misc_RNA (1)...(19): siRNA sense strand
ucugcaaacuggacaccuu

SEQ ID NO: 1588702 - RNA, 19 nt, Homo sapiens
  misc_RNA (1)...(19): siRNA sense strand
ggaacacgaggcucagaag

SEQ ID NO: 1588703 - RNA, 19 nt, Homo sapiens
  misc_RNA (1)...(19): siRNA sense strand
gcauucugauugccaucga

SEQ ID NO: 1588704 - RNA, 19 nt, Homo sapiens
  misc_RNA (1)...(19): siRNA sense strand
caucgaugcccucaguuuc

SEQ ID NO: 1588705 - RNA, 19 nt, Homo sapiens
  misc_RNA (1)...(19): siRNA sense strand
gguaucagcagggcagaug

SEQ ID NO: 1588706 - RNA, 19 nt, Homo sapiens
  misc_RNA (1)...(19): siRNA sense strand
aucacaugcuucacuagua

SEQ ID NO: 1588707 - RNA, 19 nt, Homo sapiens
  misc_RNA (1)...(19): siRNA sense strand
cccaguggcauucugauug

SEQ ID NO: 1588708 - RNA, 19 nt, Homo sapiens
  misc_RNA (1)...(19): siRNA sense strand
aaacacaauaagccaaugu

SEQ ID NO: 1588709 - RNA, 19 nt, Homo sapiens
  misc_RNA (1)...(19): siRNA sense strand
cauucaagaugacuguucu

SEQ ID NO: 1588710 - RNA, 19 nt, Homo sapiens
  misc_RNA (1)...(19): siRNA sense strand
ggucagcaucugcaaacug

SEQ ID NO: 1588711 - RNA, 19 nt, Homo sapiens
  misc_RNA (1)...(19): siRNA sense strand
ucacuaguacguccucauc

SEQ ID NO: 1588712 - RNA, 19 nt, Homo sapiens
  misc_RNA (1)...(19): siRNA sense strand
cacuagcacuucaucacau

SEQ ID NO: 1588713 - RNA, 19 nt, Homo sapiens
  misc_RNA (1)...(19): siRNA sense strand
gcccaguggcauucugauu

SEQ ID NO: 1588714 - RNA, 19 nt, Homo sapiens
  misc_RNA (1)...(19): siRNA sense strand
ugccaucgaugcccucagu

SEQ ID NO: 1588715 - RNA, 19 nt, Homo sapiens
  misc_RNA (1)...(19): siRNA sense strand
aacuggacaccuucuauuu

SEQ ID NO: 1588716 - RNA, 19 nt, Homo sapiens
  misc_RNA (1)...(19): siRNA sense strand
ugugaaggagccagaggua

SEQ ID NO: 1588717 - RNA, 19 nt, Homo sapiens
  misc_RNA (1)...(19): siRNA sense strand
caucacaugcuucacuagu

SEQ ID NO: 1588718 - RNA, 19 nt, Homo sapiens
  misc_RNA (1)...(19): siRNA sense strand
uucaucacaugcuucacua

SEQ ID NO: 1588719 - RNA, 19 nt, Homo sapiens
  misc_RNA (1)...(19): siRNA sense strand
ggagauggcucaagagaaa

SEQ ID NO: 1588720 - RNA, 19 nt, Homo sapiens
  misc_RNA (1)...(19): siRNA sense strand
gagacuggcugcugaguuu

SEQ ID NO: 1588721 - RNA, 19 nt, Homo sapiens
  misc_RNA (1)...(19): siRNA sense strand
gagcagauguguuuguuca

SEQ ID NO: 1588722 - RNA, 19 nt, Homo sapiens
  misc_RNA (1)...(19): siRNA sense strand
ugaaggaaaucaaagaaga

SEQ ID NO: 1588723 - RNA, 19 nt, Homo sapiens
  misc_RNA (1)...(19): siRNA sense strand
ugaaggagcagauguguuu

SEQ ID NO: 1588724 - RNA, 19 nt, Homo sapiens
  misc_RNA (1)...(19): siRNA sense strand
agagaaagauugccaagga

SEQ ID NO: 1588725 - RNA, 19 nt, Homo sapiens
  misc_RNA (1)...(19): siRNA sense strand
gaagaggaaucugaaaugg

SEQ ID NO: 1588726 - RNA, 19 nt, Homo sapiens
  misc_RNA (1)...(19): siRNA sense strand
gagaaagauugccaaggaa

SEQ ID NO: 1588727 - RNA, 19 nt, Homo sapiens
  misc_RNA (1)...(19): siRNA sense strand
ggagcuggauguccuugaa

SEQ ID NO: 1588728 - RNA, 19 nt, Homo sapiens
  misc_RNA (1)...(19): siRNA sense strand
gcaaugcccuggagaccau

SEQ ID NO: 1588729 - RNA, 19 nt, Homo sapiens
  misc_RNA (1)...(19): siRNA sense strand
ggaaaucaaagaagaggaa

SEQ ID NO: 1588730 - RNA, 19 nt, Homo sapiens
  misc_RNA (1)...(19): siRNA sense strand
caaagaagaggaaucugaa

SEQ ID NO: 1588731 - RNA, 19 nt, Homo sapiens
  misc_RNA (1)...(19): siRNA sense strand
gcaagcaccuggcccacau

SEQ ID NO: 1588732 - RNA, 19 nt, Homo sapiens
  misc_RNA (1)...(19): siRNA sense strand
ggaggaaauggaagcguua

SEQ ID NO: 1588733 - RNA, 19 nt, Homo sapiens
  misc_RNA (1)...(19): siRNA sense strand
gaagcugucuugccaacca

SEQ ID NO: 1588734 - RNA, 19 nt, Homo sapiens
  misc_RNA (1)...(19): siRNA sense strand
ucaaagaagaggaaucuga

SEQ ID NO: 1588735 - RNA, 19 nt, Homo sapiens
  misc_RNA (1)...(19): siRNA sense strand
gagccagagucaucuacuu

SEQ ID NO: 1588736 - RNA, 19 nt, Homo sapiens
  misc_RNA (1)...(19): siRNA sense strand
gcaucucccugucccaguu

SEQ ID NO: 1588737 - RNA, 19 nt, Homo sapiens
  misc_RNA (1)...(19): siRNA sense strand
ucaaggaugggcacuauga

SEQ ID NO: 1588738 - RNA, 19 nt, Homo sapiens
  misc_RNA (1)...(19): siRNA sense strand
gcaaauaccgcaccuucag

SEQ ID NO: 1588739 - RNA, 19 nt, Homo sapiens
  misc_RNA (1)...(19): siRNA sense strand
gagcagcgacgauuauugg

SEQ ID NO: 1588740 - RNA, 19 nt, Homo sapiens
  misc_RNA (1)...(19): siRNA sense strand
caucaugaccucgcuguuu

SEQ ID NO: 1588741 - RNA, 19 nt, Homo sapiens
  misc_RNA (1)...(19): siRNA sense strand
cagcagagguuggcaagca

SEQ ID NO: 1588742 - RNA, 19 nt, Homo sapiens
  misc_RNA (1)...(19): siRNA sense strand
ggauguccuugaagagaug

SEQ ID NO: 1588743 - RNA, 19 nt, Homo sapiens
  misc_RNA (1)...(19): siRNA sense strand
ggaaauggaagcguuaucu

SEQ ID NO: 1588744 - RNA, 19 nt, Homo sapiens
  misc_RNA (1)...(19): siRNA sense strand
gccgaggcaucccgaaaga

SEQ ID NO: 1588745 - RNA, 19 nt, Homo sapiens
  misc_RNA (1)...(19): siRNA sense strand
caggauacaagaugaagaa

SEQ ID NO: 1588746 - RNA, 19 nt, Homo sapiens
  misc_RNA (1)...(19): siRNA sense strand
ugauaggccuggcgacugu

SEQ ID NO: 1588747 - RNA, 19 nt, Homo sapiens
  misc_RNA (1)...(19): siRNA sense strand
ggugaucacucaggaccuu

SEQ ID NO: 1588748 - RNA, 19 nt, Homo sapiens
  misc_RNA (1)...(19): siRNA sense strand
gaaggaaaucaaagaagag

SEQ ID NO: 1588749 - RNA, 19 nt, Homo sapiens
  misc_RNA (1)...(19): siRNA sense strand
cccaggaggcccuaaagua

SEQ ID NO: 1588750 - RNA, 19 nt, Homo sapiens
  misc_RNA (1)...(19): siRNA sense strand
guggcucgcuucuggcaaa

SEQ ID NO: 1588751 - RNA, 19 nt, Homo sapiens
  misc_RNA (1)...(19): siRNA sense strand
uggagagccugaaggaaau

SEQ ID NO: 1588752 - RNA, 19 nt, Homo sapiens
  misc_RNA (1)...(19): siRNA sense strand
ugcaggagauggcucaaga

SEQ ID NO: 1588753 - RNA, 19 nt, Homo sapiens
  misc_RNA (1)...(19): siRNA sense strand
ucaguggucucgccaacau

SEQ ID NO: 1588754 - RNA, 19 nt, Homo sapiens
  misc_RNA (1)...(19): siRNA sense strand
gaagcgagugggagccauu

SEQ ID NO: 1588755 - RNA, 19 nt, Homo sapiens
  misc_RNA (1)...(19): siRNA sense strand
ugccaaccaugacugcuuu

SEQ ID NO: 1588756 - RNA, 19 nt, Homo sapiens
  misc_RNA (1)...(19): siRNA sense strand
agaagaggaaucugaaaug

SEQ ID NO: 1588757 - RNA, 19 nt, Homo sapiens
  misc_RNA (1)...(19): siRNA sense strand
cuggagagccugaaggaaa

SEQ ID NO: 1588758 - RNA, 19 nt, Homo sapiens
  misc_RNA (1)...(19): siRNA sense strand
ggagcagcgacgauuauug

SEQ ID NO: 1588759 - RNA, 19 nt, Homo sapiens
  misc_RNA (1)...(19): siRNA sense strand
gcucgcuucuggcaaauac

SEQ ID NO: 1588760 - RNA, 19 nt, Homo sapiens
  misc_RNA (1)...(19): siRNA sense strand
gagcuucucacucaaggau

SEQ ID NO: 1588761 - RNA, 19 nt, Homo sapiens
  misc_RNA (1)...(19): siRNA sense strand
gaaauggaagcguuaucuc

SEQ ID NO: 1588762 - RNA, 19 nt, Homo sapiens
  misc_RNA (1)...(19): siRNA sense strand
gagccugaaggaaaucaaa

SEQ ID NO: 1588763 - RNA, 19 nt, Homo sapiens
  misc_RNA (1)...(19): siRNA sense strand
ugaccucccugcuccaagu

SEQ ID NO: 1588764 - RNA, 19 nt, Homo sapiens
  misc_RNA (1)...(19): siRNA sense strand
gggccagaguccucguuug

SEQ ID NO: 1588765 - RNA, 19 nt, Homo sapiens
  misc_RNA (1)...(19): siRNA sense strand
ccaggaggcccuaaaguac

SEQ ID NO: 1588766 - RNA, 19 nt, Homo sapiens
  misc_RNA (1)...(19): siRNA sense strand
ggacuaugccaagcagaug

SEQ ID NO: 1588767 - RNA, 19 nt, Homo sapiens
  misc_RNA (1)...(19): siRNA sense strand
ggagacuggcugcugaguu

SEQ ID NO: 1588768 - RNA, 19 nt, Homo sapiens
  misc_RNA (1)...(19): siRNA sense strand
cgaccugucaccuugauug

SEQ ID NO: 1588769 - RNA, 19 nt, Homo sapiens
  misc_RNA (1)...(19): siRNA sense strand
acucaaggaugggcacuau

SEQ ID NO: 1588770 - RNA, 19 nt, Homo sapiens
  misc_RNA (1)...(19): siRNA sense strand
ggagggagaagccaagcau

SEQ ID NO: 1588771 - RNA, 19 nt, Homo sapiens
  misc_RNA (1)...(19): siRNA sense strand
ugauggagcucggcaaugc

SEQ ID NO: 1588772 - RNA, 19 nt, Homo sapiens
  misc_RNA (1)...(19): siRNA sense strand
ggaagccaaguaccugaug

SEQ ID NO: 1588773 - RNA, 19 nt, Homo sapiens
  misc_RNA (1)...(19): siRNA sense strand
ccacagccgugagcaguac

SEQ ID NO: 1588774 - RNA, 19 nt, Homo sapiens
  misc_RNA (1)...(19): siRNA sense strand
gggagccauugaagaguuc

SEQ ID NO: 1588775 - RNA, 19 nt, Homo sapiens
  misc_RNA (1)...(19): siRNA sense strand
ugggagccauugaagaguu

SEQ ID NO: 1588776 - RNA, 19 nt, Homo sapiens
  misc_RNA (1)...(19): siRNA sense strand
gccaaccgcuucgccuaug

SEQ ID NO: 1588777 - RNA, 19 nt, Homo sapiens
  misc_RNA (1)...(19): siRNA sense strand
aaagaagaggaaucugaaa

SEQ ID NO: 1588778 - RNA, 19 nt, Homo sapiens
  misc_RNA (1)...(19): siRNA sense strand
gaaagaaaaccggaggaaa

SEQ ID NO: 1588779 - RNA, 19 nt, Homo sapiens
  misc_RNA (1)...(19): siRNA sense strand
gcgagugggagccauugaa

SEQ ID NO: 1588780 - RNA, 19 nt, Homo sapiens
  misc_RNA (1)...(19): siRNA sense strand
gaaaucaaagaagaggaau

SEQ ID NO: 1588781 - RNA, 19 nt, Homo sapiens
  misc_RNA (1)...(19): siRNA sense strand
caggagauggcucaagaga

SEQ ID NO: 1588782 - RNA, 19 nt, Homo sapiens
  misc_RNA (1)...(19): siRNA sense strand
gacgaccugucaccuugau

SEQ ID NO: 1588783 - RNA, 19 nt, Homo sapiens
  misc_RNA (1)...(19): siRNA sense strand
cugacaggauacaagauga

SEQ ID NO: 1588784 - RNA, 19 nt, Homo sapiens
  misc_RNA (1)...(19): siRNA sense strand
aagaagaggaaucugaaau

SEQ ID NO: 1588785 - RNA, 19 nt, Homo sapiens
  misc_RNA (1)...(19): siRNA sense strand
ugacaggauacaagaugaa

SEQ ID NO: 1588786 - RNA, 19 nt, Homo sapiens
  misc_RNA (1)...(19): siRNA sense strand
aaagaaaaccggaggaaau

SEQ ID NO: 1588787 - RNA, 19 nt, Homo sapiens
  misc_RNA (1)...(19): siRNA sense strand
caaauaccgcaccuucagu

SEQ ID NO: 1588788 - RNA, 19 nt, Homo sapiens
  misc_RNA (1)...(19): siRNA sense strand
aucaugaccucgcuguuug

SEQ ID NO: 1588789 - RNA, 19 nt, Homo sapiens
  misc_RNA (1)...(19): siRNA sense strand
cgccuaugcugcccucugu

SEQ ID NO: 1588790 - RNA, 19 nt, Homo sapiens
  misc_RNA (1)...(19): siRNA sense strand
cgaggcaucccgaaagaag

SEQ ID NO: 1588791 - RNA, 19 nt, Homo sapiens
  misc_RNA (1)...(19): siRNA sense strand
uggauguccuugaagagau

SEQ ID NO: 1588792 - RNA, 19 nt, Homo sapiens
  misc_RNA (1)...(19): siRNA sense strand
gagggagaagccaagcauu

SEQ ID NO: 1588793 - RNA, 19 nt, Homo sapiens
  misc_RNA (1)...(19): siRNA sense strand
ccugaaggaaaucaaagaa

SEQ ID NO: 1588794 - RNA, 19 nt, Homo sapiens
  misc_RNA (1)...(19): siRNA sense strand
gcugcugaguuucguguac

SEQ ID NO: 1588795 - RNA, 19 nt, Homo sapiens
  misc_RNA (1)...(19): siRNA sense strand
aggagcagauguguuuguu

SEQ ID NO: 1588796 - RNA, 19 nt, Homo sapiens
  misc_RNA (1)...(19): siRNA sense strand
gagugggagccauugaaga

SEQ ID NO: 1588797 - RNA, 19 nt, Homo sapiens
  misc_RNA (1)...(19): siRNA sense strand
cggugugacuggaggucua

SEQ ID NO: 1588798 - RNA, 19 nt, Homo sapiens
  misc_RNA (1)...(19): siRNA sense strand
gaaaaccggaggaaaugga

SEQ ID NO: 1588799 - RNA, 19 nt, Homo sapiens
  misc_RNA (1)...(19): siRNA sense strand
aaucaaagaagaggaaucu

SEQ ID NO: 1588800 - RNA, 19 nt, Homo sapiens
  misc_RNA (1)...(19): siRNA sense strand
acaggaggguggagaacgu

SEQ ID NO: 1588801 - RNA, 19 nt, Homo sapiens
  misc_RNA (1)...(19): siRNA sense strand
agaaagauugccaaggaau

SEQ ID NO: 1588802 - RNA, 19 nt, Homo sapiens
  misc_RNA (1)...(19): siRNA sense strand
ugaaggaccccaucuugaa

SEQ ID NO: 1588803 - RNA, 19 nt, Homo sapiens
  misc_RNA (1)...(19): siRNA sense strand
aguguugucuggcauugug

SEQ ID NO: 1588804 - RNA, 19 nt, Homo sapiens
  misc_RNA (1)...(19): siRNA sense strand
caucucccugucccaguua

SEQ ID NO: 1588805 - RNA, 19 nt, Homo sapiens
  misc_RNA (1)...(19): siRNA sense strand
ggaacggugaucgguguga

SEQ ID NO: 1588806 - RNA, 19 nt, Homo sapiens
  misc_RNA (1)...(19): siRNA sense strand
ugcaguggcuggaguuguc

SEQ ID NO: 1588807 - RNA, 19 nt, Homo sapiens
  misc_RNA (1)...(19): siRNA sense strand
gaggcaucccgaaagaaga

SEQ ID NO: 1588808 - RNA, 19 nt, Homo sapiens
  misc_RNA (1)...(19): siRNA sense strand
ggccaaccgcuucgccuau

SEQ ID NO: 1588809 - RNA, 19 nt, Homo sapiens
  misc_RNA (1)...(19): siRNA sense strand
gaggugaaggagcagaugu

SEQ ID NO: 1588810 - RNA, 19 nt, Homo sapiens
  misc_RNA (1)...(19): siRNA sense strand
agggagaagccaagcauug

SEQ ID NO: 1588811 - RNA, 19 nt, Homo sapiens
  misc_RNA (1)...(19): siRNA sense strand
caggaggcccuaaaguaca

SEQ ID NO: 1588812 - RNA, 19 nt, Homo sapiens
  misc_RNA (1)...(19): siRNA sense strand
gaaggagcagauguguuug

SEQ ID NO: 1588813 - RNA, 19 nt, Homo sapiens
  misc_RNA (1)...(19): siRNA sense strand
ggcaaauaccgcaccuuca

SEQ ID NO: 1588814 - RNA, 19 nt, Homo sapiens
  misc_RNA (1)...(19): siRNA sense strand
gcaaugauguggacagcaa

SEQ ID NO: 1588815 - RNA, 19 nt, Homo sapiens
  misc_RNA (1)...(19): siRNA sense strand
ucacaggacuuaucucuag

SEQ ID NO: 1588816 - RNA, 19 nt, Homo sapiens
  misc_RNA (1)...(19): siRNA sense strand
gcaacgaccuggagagaca

SEQ ID NO: 1588817 - RNA, 19 nt, Homo sapiens
  misc_RNA (1)...(19): siRNA sense strand
ggugugaggacgucagaua

SEQ ID NO: 1588818 - RNA, 19 nt, Homo sapiens
  misc_RNA (1)...(19): siRNA sense strand
ggagagacaaggccuacuu

SEQ ID NO: 1588819 - RNA, 19 nt, Homo sapiens
  misc_RNA (1)...(19): siRNA sense strand
gcagaggcacuucagauca

SEQ ID NO: 1588820 - RNA, 19 nt, Homo sapiens
  misc_RNA (1)...(19): siRNA sense strand
gcugucuucuacaucuuua

SEQ ID NO: 1588821 - RNA, 19 nt, Homo sapiens
  misc_RNA (1)...(19): siRNA sense strand
gagagacaaggccuacuuu

SEQ ID NO: 1588822 - RNA, 19 nt, Homo sapiens
  misc_RNA (1)...(19): siRNA sense strand
gcuucagacuguauucuug

SEQ ID NO: 1588823 - RNA, 19 nt, Homo sapiens
  misc_RNA (1)...(19): siRNA sense strand
gaaguggucugggcuacgu

SEQ ID NO: 1588824 - RNA, 19 nt, Homo sapiens
  misc_RNA (1)...(19): siRNA sense strand
ucgaggagguacaagaaag

SEQ ID NO: 1588825 - RNA, 19 nt, Homo sapiens
  misc_RNA (1)...(19): siRNA sense strand
gugcugcgccuuugucauc

SEQ ID NO: 1588826 - RNA, 19 nt, Homo sapiens
  misc_RNA (1)...(19): siRNA sense strand
ugaccgccauggccuuugu

SEQ ID NO: 1588827 - RNA, 19 nt, Homo sapiens
  misc_RNA (1)...(19): siRNA sense strand
gagacaaggccuacuuucg

SEQ ID NO: 1588828 - RNA, 19 nt, Homo sapiens
  misc_RNA (1)...(19): siRNA sense strand
cugcuggccuccuaugugu

SEQ ID NO: 1588829 - RNA, 19 nt, Homo sapiens
  misc_RNA (1)...(19): siRNA sense strand
gagguacaagaaagucauu

SEQ ID NO: 1588830 - RNA, 19 nt, Homo sapiens
  misc_RNA (1)...(19): siRNA sense strand
ggacggcagaggcacuuca

SEQ ID NO: 1588831 - RNA, 19 nt, Homo sapiens
  misc_RNA (1)...(19): siRNA sense strand
cgcuguaccuggagagaga

SEQ ID NO: 1588832 - RNA, 19 nt, Homo sapiens
  misc_RNA (1)...(19): siRNA sense strand
cagcaacgaccuggagaga

SEQ ID NO: 1588833 - RNA, 19 nt, Homo sapiens
  misc_RNA (1)...(19): siRNA sense strand
ggagguacaagaaagucau

SEQ ID NO: 1588834 - RNA, 19 nt, Homo sapiens
  misc_RNA (1)...(19): siRNA sense strand
cgugcuggcugucuucuac

SEQ ID NO: 1588835 - RNA, 19 nt, Homo sapiens
  misc_RNA (1)...(19): siRNA sense strand
cugguuugcuucagacugu

SEQ ID NO: 1588836 - RNA, 19 nt, Homo sapiens
  misc_RNA (1)...(19): siRNA sense strand
caggacuuaucucuagugu

SEQ ID NO: 1588837 - RNA, 19 nt, Homo sapiens
  misc_RNA (1)...(19): siRNA sense strand
guacaagaaagucauucca

SEQ ID NO: 1588838 - RNA, 19 nt, Homo sapiens
  misc_RNA (1)...(19): siRNA sense strand
cagaggcacuucagaucac

SEQ ID NO: 1588839 - RNA, 19 nt, Homo sapiens
  misc_RNA (1)...(19): siRNA sense strand
ggcagaggcacuucagauc

SEQ ID NO: 1588840 - RNA, 19 nt, Homo sapiens
  misc_RNA (1)...(19): siRNA sense strand
gcuggccuccuauguguuc

SEQ ID NO: 1588841 - RNA, 19 nt, Homo sapiens
  misc_RNA (1)...(19): siRNA sense strand
cagaagcuucgaggaggua

SEQ ID NO: 1588842 - RNA, 19 nt, Homo sapiens
  misc_RNA (1)...(19): siRNA sense strand
cggcagaggcacuucagau

SEQ ID NO: 1588843 - RNA, 19 nt, Homo sapiens
  misc_RNA (1)...(19): siRNA sense strand
gaacagaugucacagaugu

SEQ ID NO: 1588844 - RNA, 19 nt, Homo sapiens
  misc_RNA (1)...(19): siRNA sense strand
gaagggaaaugcccaaguu

SEQ ID NO: 1588845 - RNA, 19 nt, Homo sapiens
  misc_RNA (1)...(19): siRNA sense strand
gaacaaagccgaugaucac

SEQ ID NO: 1588846 - RNA, 19 nt, Homo sapiens
  misc_RNA (1)...(19): siRNA sense strand
gaaaucagaaugccagaga

SEQ ID NO: 1588847 - RNA, 19 nt, Homo sapiens
  misc_RNA (1)...(19): siRNA sense strand
cugcagagccuaagacaua

SEQ ID NO: 1588848 - RNA, 19 nt, Homo sapiens
  misc_RNA (1)...(19): siRNA sense strand
guacagaagagaaaucaga

SEQ ID NO: 1588849 - RNA, 19 nt, Homo sapiens
  misc_RNA (1)...(19): siRNA sense strand
ccagagacaugaagaaacu

SEQ ID NO: 1588850 - RNA, 19 nt, Homo sapiens
  misc_RNA (1)...(19): siRNA sense strand
caaauaaugucugcuucga

SEQ ID NO: 1588851 - RNA, 19 nt, Homo sapiens
  misc_RNA (1)...(19): siRNA sense strand
gucauguaaucaccaaaua

SEQ ID NO: 1588852 - RNA, 19 nt, Homo sapiens
  misc_RNA (1)...(19): siRNA sense strand
uagaacagaugucacagau

SEQ ID NO: 1588853 - RNA, 19 nt, Homo sapiens
  misc_RNA (1)...(19): siRNA sense strand
ggaacaaagccgaugauca

SEQ ID NO: 1588854 - RNA, 19 nt, Homo sapiens
  misc_RNA (1)...(19): siRNA sense strand
uuaagcagcuguucaaagg

SEQ ID NO: 1588855 - RNA, 19 nt, Homo sapiens
  misc_RNA (1)...(19): siRNA sense strand
ggugagugcucuaccuguu

SEQ ID NO: 1588856 - RNA, 19 nt, Homo sapiens
  misc_RNA (1)...(19): siRNA sense strand
ggaaaugcccaaguucuca

SEQ ID NO: 1588857 - RNA, 19 nt, Homo sapiens
  misc_RNA (1)...(19): siRNA sense strand
aagcagcuguucaaaggaa

SEQ ID NO: 1588858 - RNA, 19 nt, Homo sapiens
  misc_RNA (1)...(19): siRNA sense strand
ggagcugccaggccacaua

SEQ ID NO: 1588859 - RNA, 19 nt, Homo sapiens
  misc_RNA (1)...(19): siRNA sense strand
gauuuaagcagcuguucaa

SEQ ID NO: 1588860 - RNA, 19 nt, Homo sapiens
  misc_RNA (1)...(19): siRNA sense strand
gagcugccaggccacauaa

SEQ ID NO: 1588861 - RNA, 19 nt, Homo sapiens
  misc_RNA (1)...(19): siRNA sense strand
cagaagagaaaucagaaug

SEQ ID NO: 1588862 - RNA, 19 nt, Homo sapiens
  misc_RNA (1)...(19): siRNA sense strand
gaccaucucugcauuuugu

SEQ ID NO: 1588863 - RNA, 19 nt, Homo sapiens
  misc_RNA (1)...(19): siRNA sense strand
ucaaaggaacuguagaaca

SEQ ID NO: 1588864 - RNA, 19 nt, Homo sapiens
  misc_RNA (1)...(19): siRNA sense strand
guagaacagaugucacaga

SEQ ID NO: 1588865 - RNA, 19 nt, Homo sapiens
  misc_RNA (1)...(19): siRNA sense strand
ugagugcucuaccuguuuc

SEQ ID NO: 1588866 - RNA, 19 nt, Homo sapiens
  misc_RNA (1)...(19): siRNA sense strand
ggucauguaaucaccaaau

SEQ ID NO: 1588867 - RNA, 19 nt, Homo sapiens
  misc_RNA (1)...(19): siRNA sense strand
cacauaagcagggaacaaa

SEQ ID NO: 1588868 - RNA, 19 nt, Homo sapiens
  misc_RNA (1)...(19): siRNA sense strand
ugugcuacaccaagauuua

SEQ ID NO: 1588869 - RNA, 19 nt, Homo sapiens
  misc_RNA (1)...(19): siRNA sense strand
acagaugucacagauguaa

SEQ ID NO: 1588870 - RNA, 19 nt, Homo sapiens
  misc_RNA (1)...(19): siRNA sense strand
ccacauaagcagggaacaa

SEQ ID NO: 1588871 - RNA, 19 nt, Homo sapiens
  misc_RNA (1)...(19): siRNA sense strand
cagaaugccagagacauga

SEQ ID NO: 1588872 - RNA, 19 nt, Homo sapiens
  misc_RNA (1)...(19): siRNA sense strand
ucuccagggucauguaauc

SEQ ID NO: 1588873 - RNA, 19 nt, Homo sapiens
  misc_RNA (1)...(19): siRNA sense strand
gugcuacaccaagauuuaa

SEQ ID NO: 1588874 - RNA, 19 nt, Homo sapiens
  misc_RNA (1)...(19): siRNA sense strand
ucagaaugccagagacaug

SEQ ID NO: 1588875 - RNA, 19 nt, Homo sapiens
  misc_RNA (1)...(19): siRNA sense strand
guaaucaccaaauaauguc

SEQ ID NO: 1588876 - RNA, 19 nt, Homo sapiens
  misc_RNA (1)...(19): siRNA sense strand
gugagugcucuaccuguuu

SEQ ID NO: 1588877 - RNA, 19 nt, Homo sapiens
  misc_RNA (1)...(19): siRNA sense strand
cuucgaccaucucugcauu

SEQ ID NO: 1588878 - RNA, 19 nt, Homo sapiens
  misc_RNA (1)...(19): siRNA sense strand
gagccuaagacauaacaag

SEQ ID NO: 1588879 - RNA, 19 nt, Homo sapiens
  misc_RNA (1)...(19): siRNA sense strand
gggaaaugcccaaguucuc

SEQ ID NO: 1588880 - RNA, 19 nt, Homo sapiens
  misc_RNA (1)...(19): siRNA sense strand
ugcagagccuaagacauaa

SEQ ID NO: 1588881 - RNA, 19 nt, Homo sapiens
  misc_RNA (1)...(19): siRNA sense strand
caccaaauaaugucugcuu

SEQ ID NO: 1588882 - RNA, 19 nt, Homo sapiens
  misc_RNA (1)...(19): siRNA sense strand
gcaccugcagagccuaaga

SEQ ID NO: 1588883 - RNA, 19 nt, Homo sapiens
  misc_RNA (1)...(19): siRNA sense strand
caagauuuaagcagcuguu

SEQ ID NO: 1588884 - RNA, 19 nt, Homo sapiens
  misc_RNA (1)...(19): siRNA sense strand
ugcucuaccuguuucugua

SEQ ID NO: 1588885 - RNA, 19 nt, Homo sapiens
  misc_RNA (1)...(19): siRNA sense strand
uacagaagagaaaucagaa

SEQ ID NO: 1588886 - RNA, 19 nt, Homo sapiens
  misc_RNA (1)...(19): siRNA sense strand
ucaacaagcuccucaagau

SEQ ID NO: 1588887 - RNA, 19 nt, Homo sapiens
  misc_RNA (1)...(19): siRNA sense strand
gcgccuaucuccucaagug

SEQ ID NO: 1588888 - RNA, 19 nt, Homo sapiens
  misc_RNA (1)...(19): siRNA sense strand
gggcacaccugucaacaag

SEQ ID NO: 1588889 - RNA, 19 nt, Homo sapiens
  misc_RNA (1)...(19): siRNA sense strand
cggcugacgugcugguaua

SEQ ID NO: 1588890 - RNA, 19 nt, Homo sapiens
  misc_RNA (1)...(19): siRNA sense strand
gccacgagcugccguuuua

SEQ ID NO: 1588891 - RNA, 19 nt, Homo sapiens
  misc_RNA (1)...(19): siRNA sense strand
gcacaccugucaacaagcu

SEQ ID NO: 1588892 - RNA, 19 nt, Homo sapiens
  misc_RNA (1)...(19): siRNA sense strand
ggaggaggagcccaucuug

SEQ ID NO: 1588893 - RNA, 19 nt, Homo sapiens
  misc_RNA (1)...(19): siRNA sense strand
caagcaggccgaacugaug

SEQ ID NO: 1588894 - RNA, 19 nt, Homo sapiens
  misc_RNA (1)...(19): siRNA sense strand
ugguauaccuagcggauga

SEQ ID NO: 1588895 - RNA, 19 nt, Homo sapiens
  misc_RNA (1)...(19): siRNA sense strand
acaagcuccucaagaucua

SEQ ID NO: 1588896 - RNA, 19 nt, Homo sapiens
  misc_RNA (1)...(19): siRNA sense strand
caacaagcuccucaagauc

SEQ ID NO: 1588897 - RNA, 19 nt, Homo sapiens
  misc_RNA (1)...(19): siRNA sense strand
ccaagcaccagcccuacaa

SEQ ID NO: 1588898 - RNA, 19 nt, Homo sapiens
  misc_RNA (1)...(19): siRNA sense strand
ggccauggaugagccuuuc

SEQ ID NO: 1588899 - RNA, 19 nt, Homo sapiens
  misc_RNA (1)...(19): siRNA sense strand
ggugggcgcaagccaguuu

SEQ ID NO: 1588900 - RNA, 19 nt, Homo sapiens
  misc_RNA (1)...(19): siRNA sense strand
gaaccugcccucgcucagu

SEQ ID NO: 1588901 - RNA, 19 nt, Homo sapiens
  misc_RNA (1)...(19): siRNA sense strand
gcgcaccacauccuucuuc

SEQ ID NO: 1588902 - RNA, 19 nt, Homo sapiens
  misc_RNA (1)...(19): siRNA sense strand
ggaaggcgugcacgucauc

SEQ ID NO: 1588903 - RNA, 19 nt, Homo sapiens
  misc_RNA (1)...(19): siRNA sense strand
gcgugcacgucaucgauag

SEQ ID NO: 1588904 - RNA, 19 nt, Homo sapiens
  misc_RNA (1)...(19): siRNA sense strand
gaggaggagcccaucuugu

SEQ ID NO: 1588905 - RNA, 19 nt, Homo sapiens
  misc_RNA (1)...(19): siRNA sense strand
gagcugcugcugcgcuuca

SEQ ID NO: 1588906 - RNA, 19 nt, Homo sapiens
  misc_RNA (1)...(19): siRNA sense strand
ggcgugcacgucaucgaua

SEQ ID NO: 1588907 - RNA, 19 nt, Homo sapiens
  misc_RNA (1)...(19): siRNA sense strand
aggaggagcccaucuugug

SEQ ID NO: 1588908 - RNA, 19 nt, Homo sapiens
  misc_RNA (1)...(19): siRNA sense strand
ccaagcaggccgaacugau

SEQ ID NO: 1588909 - RNA, 19 nt, Homo sapiens
  misc_RNA (1)...(19): siRNA sense strand
gucaacaagcuccucaaga

SEQ ID NO: 1588910 - RNA, 19 nt, Homo sapiens
  misc_RNA (1)...(19): siRNA sense strand
uccugcggcugcucuauga

SEQ ID NO: 1588911 - RNA, 19 nt, Homo sapiens
  misc_RNA (1)...(19): siRNA sense strand
uuaugggugugccuucuuc

SEQ ID NO: 1588912 - RNA, 19 nt, Homo sapiens
  misc_RNA (1)...(19): siRNA sense strand
aagcaggccgaacugauga

SEQ ID NO: 1588913 - RNA, 19 nt, Homo sapiens
  misc_RNA (1)...(19): siRNA sense strand
gaagcaagguggaugauga

SEQ ID NO: 1588914 - RNA, 19 nt, Homo sapiens
  misc_RNA (1)...(19): siRNA sense strand
ggaaagcgaguaccucauu

SEQ ID NO: 1588915 - RNA, 19 nt, Homo sapiens
  misc_RNA (1)...(19): siRNA sense strand
ugacaaggcacgcaucaua

SEQ ID NO: 1588916 - RNA, 19 nt, Homo sapiens
  misc_RNA (1)...(19): siRNA sense strand
gaaagcgaguaccucauug

SEQ ID NO: 1588917 - RNA, 19 nt, Homo sapiens
  misc_RNA (1)...(19): siRNA sense strand
ggacacacuucaagcacaa

SEQ ID NO: 1588918 - RNA, 19 nt, Homo sapiens
  misc_RNA (1)...(19): siRNA sense strand
ugagaacucugugggauaa

SEQ ID NO: 1588919 - RNA, 19 nt, Homo sapiens
  misc_RNA (1)...(19): siRNA sense strand
caacaagacccuccuggaa

SEQ ID NO: 1588920 - RNA, 19 nt, Homo sapiens
  misc_RNA (1)...(19): siRNA sense strand
acaagacccuccuggaauu

SEQ ID NO: 1588921 - RNA, 19 nt, Homo sapiens
  misc_RNA (1)...(19): siRNA sense strand
gcaugaauuucgaguggaa

SEQ ID NO: 1588922 - RNA, 19 nt, Homo sapiens
  misc_RNA (1)...(19): siRNA sense strand
gcacgcaucauaauucgaa

SEQ ID NO: 1588923 - RNA, 19 nt, Homo sapiens
  misc_RNA (1)...(19): siRNA sense strand
ggaaacgcauguucuucga

SEQ ID NO: 1588924 - RNA, 19 nt, Homo sapiens
  misc_RNA (1)...(19): siRNA sense strand
caagguggaugaugacaag

SEQ ID NO: 1588925 - RNA, 19 nt, Homo sapiens
  misc_RNA (1)...(19): siRNA sense strand
gcaucaaccuguccugcaa

SEQ ID NO: 1588926 - RNA, 19 nt, Homo sapiens
  misc_RNA (1)...(19): siRNA sense strand
gacaaggcacgcaucauaa

SEQ ID NO: 1588927 - RNA, 19 nt, Homo sapiens
  misc_RNA (1)...(19): siRNA sense strand
gccaggcccucuacgcaaa

SEQ ID NO: 1588928 - RNA, 19 nt, Homo sapiens
  misc_RNA (1)...(19): siRNA sense strand
ucacaccagucccugcaaa

SEQ ID NO: 1588929 - RNA, 19 nt, Homo sapiens
  misc_RNA (1)...(19): siRNA sense strand
guaacgacaucagcauugu

SEQ ID NO: 1588930 - RNA, 19 nt, Homo sapiens
  misc_RNA (1)...(19): siRNA sense strand
caaggcacgcaucauaauu

SEQ ID NO: 1588931 - RNA, 19 nt, Homo sapiens
  misc_RNA (1)...(19): siRNA sense strand
acacaacaccaaccucauu

SEQ ID NO: 1588932 - RNA, 19 nt, Homo sapiens
  misc_RNA (1)...(19): siRNA sense strand
ccacgucgaucaguuccuu

SEQ ID NO: 1588933 - RNA, 19 nt, Homo sapiens
  misc_RNA (1)...(19): siRNA sense strand
ucgaggagcuggacuuguc

SEQ ID NO: 1588934 - RNA, 19 nt, Homo sapiens
  misc_RNA (1)...(19): siRNA sense strand
ccaacugggcgaucuggua

SEQ ID NO: 1588935 - RNA, 19 nt, Homo sapiens
  misc_RNA (1)...(19): siRNA sense strand
gauagacagugagaacuac

SEQ ID NO: 1588936 - RNA, 19 nt, Homo sapiens
  misc_RNA (1)...(19): siRNA sense strand
ccacagacccugcggugau

SEQ ID NO: 1588937 - RNA, 19 nt, Homo sapiens
  misc_RNA (1)...(19): siRNA sense strand
gucaaggacugcggcauga

SEQ ID NO: 1588938 - RNA, 19 nt, Homo sapiens
  misc_RNA (1)...(19): siRNA sense strand
ugauagacagugagaacua

SEQ ID NO: 1588939 - RNA, 19 nt, Homo sapiens
  misc_RNA (1)...(19): siRNA sense strand
gcucugcauucagcacauu

SEQ ID NO: 1588940 - RNA, 19 nt, Homo sapiens
  misc_RNA (1)...(19): siRNA sense strand
ggaggacacacuucaagca

SEQ ID NO: 1588941 - RNA, 19 nt, Homo sapiens
  misc_RNA (1)...(19): siRNA sense strand
uggaggagcccaccguuga

SEQ ID NO: 1588942 - RNA, 19 nt, Homo sapiens
  misc_RNA (1)...(19): siRNA sense strand
gcaagguggaugaugacaa

SEQ ID NO: 1588943 - RNA, 19 nt, Homo sapiens
  misc_RNA (1)...(19): siRNA sense strand
ccacgucccagggccaaua

SEQ ID NO: 1588944 - RNA, 19 nt, Homo sapiens
  misc_RNA (1)...(19): siRNA sense strand
cacaacaccaaccucauuu

SEQ ID NO: 1588945 - RNA, 19 nt, Homo sapiens
  misc_RNA (1)...(19): siRNA sense strand
gccacacccucaagaucuu

SEQ ID NO: 1588946 - RNA, 19 nt, Homo sapiens
  misc_RNA (1)...(19): siRNA sense strand
ggacugcggcaugaauuuc

SEQ ID NO: 1588947 - RNA, 19 nt, Homo sapiens
  misc_RNA (1)...(19): siRNA sense strand
ccaaccugauagacaguga

SEQ ID NO: 1588948 - RNA, 19 nt, Homo sapiens
  misc_RNA (1)...(19): siRNA sense strand
caagacccuccuggaauuu

SEQ ID NO: 1588949 - RNA, 19 nt, Homo sapiens
  misc_RNA (1)...(19): siRNA sense strand
cacaggugcucgccaucaa

SEQ ID NO: 1588950 - RNA, 19 nt, Homo sapiens
  misc_RNA (1)...(19): siRNA sense strand
cucaaagccuucaaucaca

SEQ ID NO: 1588951 - RNA, 19 nt, Homo sapiens
  misc_RNA (1)...(19): siRNA sense strand
gcaccuggagaaccugcua

SEQ ID NO: 1588952 - RNA, 19 nt, Homo sapiens
  misc_RNA (1)...(19): siRNA sense strand
gcuggaaacgcauguucuu

SEQ ID NO: 1588953 - RNA, 19 nt, Homo sapiens
  misc_RNA (1)...(19): siRNA sense strand
caaggacugcggcaugaau

SEQ ID NO: 1588954 - RNA, 19 nt, Homo sapiens
  misc_RNA (1)...(19): siRNA sense strand
ccucauuucccucaaccua

SEQ ID NO: 1588955 - RNA, 19 nt, Homo sapiens
  misc_RNA (1)...(19): siRNA sense strand
cgacaucagcauuguugga

SEQ ID NO: 1588956 - RNA, 19 nt, Homo sapiens
  misc_RNA (1)...(19): siRNA sense strand
agacccuccuggaauuuga

SEQ ID NO: 1588957 - RNA, 19 nt, Homo sapiens
  misc_RNA (1)...(19): siRNA sense strand
caaccucauuucccucaac

SEQ ID NO: 1588958 - RNA, 19 nt, Homo sapiens
  misc_RNA (1)...(19): siRNA sense strand
caauggcccugagaacucu

SEQ ID NO: 1588959 - RNA, 19 nt, Homo sapiens
  misc_RNA (1)...(19): siRNA sense strand
ccaauggcccugagaacuc

SEQ ID NO: 1588960 - RNA, 19 nt, Homo sapiens
  misc_RNA (1)...(19): siRNA sense strand
gacuugcgccugucagaug

SEQ ID NO: 1588961 - RNA, 19 nt, Homo sapiens
  misc_RNA (1)...(19): siRNA sense strand
ugugaccgccaaccugaua

SEQ ID NO: 1588962 - RNA, 19 nt, Homo sapiens
  misc_RNA (1)...(19): siRNA sense strand
cguaacgacaucagcauug

SEQ ID NO: 1588963 - RNA, 19 nt, Homo sapiens
  misc_RNA (1)...(19): siRNA sense strand
cugccgcucugccggaauu

SEQ ID NO: 1588964 - RNA, 19 nt, Homo sapiens
  misc_RNA (1)...(19): siRNA sense strand
acaaggcacgcaucauaau

SEQ ID NO: 1588965 - RNA, 19 nt, Homo sapiens
  misc_RNA (1)...(19): siRNA sense strand
gcauucagcacauuaucag

SEQ ID NO: 1588966 - RNA, 19 nt, Homo sapiens
  misc_RNA (1)...(19): siRNA sense strand
acaccacacucaccagcau

SEQ ID NO: 1588967 - RNA, 19 nt, Homo sapiens
  misc_RNA (1)...(19): siRNA sense strand
uaacgacaucagcauuguu

SEQ ID NO: 1588968 - RNA, 19 nt, Homo sapiens
  misc_RNA (1)...(19): siRNA sense strand
gcaggguccacgucgauca

SEQ ID NO: 1588969 - RNA, 19 nt, Homo sapiens
  misc_RNA (1)...(19): siRNA sense strand
gaccugguguacgauguca

SEQ ID NO: 1588970 - RNA, 19 nt, Homo sapiens
  misc_RNA (1)...(19): siRNA sense strand
aacaagacccuccuggaau

SEQ ID NO: 1588971 - RNA, 19 nt, Homo sapiens
  misc_RNA (1)...(19): siRNA sense strand
caggauaccguaacgacau

SEQ ID NO: 1588972 - RNA, 19 nt, Homo sapiens
  misc_RNA (1)...(19): siRNA sense strand
gcccaccguugaccacuac

SEQ ID NO: 1588973 - RNA, 19 nt, Homo sapiens
  misc_RNA (1)...(19): siRNA sense strand
gccaucaacaccacacuca

SEQ ID NO: 1588974 - RNA, 19 nt, Homo sapiens
  misc_RNA (1)...(19): siRNA sense strand
ccgccacacuccugucaca

SEQ ID NO: 1588975 - RNA, 19 nt, Homo sapiens
  misc_RNA (1)...(19): siRNA sense strand
ucucaaagccuucaaucac

SEQ ID NO: 1588976 - RNA, 19 nt, Homo sapiens
  misc_RNA (1)...(19): siRNA sense strand
gcaugccacacccucaaga

SEQ ID NO: 1588977 - RNA, 19 nt, Homo sapiens
  misc_RNA (1)...(19): siRNA sense strand
gaccuaccacuggcuguga

SEQ ID NO: 1588978 - RNA, 19 nt, Homo sapiens
  misc_RNA (1)...(19): siRNA sense strand
cugagaacucugugggaua

SEQ ID NO: 1588979 - RNA, 19 nt, Homo sapiens
  misc_RNA (1)...(19): siRNA sense strand
ucagauguggcccaggaaa

SEQ ID NO: 1588980 - RNA, 19 nt, Homo sapiens
  misc_RNA (1)...(19): siRNA sense strand
gcagcgagggagagaugga

SEQ ID NO: 1588981 - RNA, 19 nt, Homo sapiens
  misc_RNA (1)...(19): siRNA sense strand
gaacagauuccacuuguga

SEQ ID NO: 1588982 - RNA, 19 nt, Homo sapiens
  misc_RNA (1)...(19): siRNA sense strand
gauagcaccuggaaccaaa

SEQ ID NO: 1588983 - RNA, 19 nt, Homo sapiens
  misc_RNA (1)...(19): siRNA sense strand
caaaagaacugaagaacaa

SEQ ID NO: 1588984 - RNA, 19 nt, Homo sapiens
  misc_RNA (1)...(19): siRNA sense strand
caggaaaacuuacacauua

SEQ ID NO: 1588985 - RNA, 19 nt, Homo sapiens
  misc_RNA (1)...(19): siRNA sense strand
caaaugcucuggagauaag

SEQ ID NO: 1588986 - RNA, 19 nt, Homo sapiens
  misc_RNA (1)...(19): siRNA sense strand
ccagauacuuuccuuucua

SEQ ID NO: 1588987 - RNA, 19 nt, Homo sapiens
  misc_RNA (1)...(19): siRNA sense strand
gauaaagaaugccaaaugc

SEQ ID NO: 1588988 - RNA, 19 nt, Homo sapiens
  misc_RNA (1)...(19): siRNA sense strand
caagaguucugugauuuga

SEQ ID NO: 1588989 - RNA, 19 nt, Homo sapiens
  misc_RNA (1)...(19): siRNA sense strand
gccaaaugcucuggagaua

SEQ ID NO: 1588990 - RNA, 19 nt, Homo sapiens
  misc_RNA (1)...(19): siRNA sense strand
agacuaccauacugauaua

SEQ ID NO: 1588991 - RNA, 19 nt, Homo sapiens
  misc_RNA (1)...(19): siRNA sense strand
guacugcuauacaugcaaa

SEQ ID NO: 1588992 - RNA, 19 nt, Homo sapiens
  misc_RNA (1)...(19): siRNA sense strand
caauugaagccauuuacua

SEQ ID NO: 1588993 - RNA, 19 nt, Homo sapiens
  misc_RNA (1)...(19): siRNA sense strand
cauguuauguuccaguuga

SEQ ID NO: 1588994 - RNA, 19 nt, Homo sapiens
  misc_RNA (1)...(19): siRNA sense strand
caaacuacuuccauagcuu

SEQ ID NO: 1588995 - RNA, 19 nt, Homo sapiens
  misc_RNA (1)...(19): siRNA sense strand
cuuagcaccugaauuugua

SEQ ID NO: 1588996 - RNA, 19 nt, Homo sapiens
  misc_RNA (1)...(19): siRNA sense strand
acucuuagcaccugaauuu

SEQ ID NO: 1588997 - RNA, 19 nt, Homo sapiens
  misc_RNA (1)...(19): siRNA sense strand
gaaauacagagggcaauau

SEQ ID NO: 1588998 - RNA, 19 nt, Homo sapiens
  misc_RNA (1)...(19): siRNA sense strand
ugaagccauuuacuacuuu

SEQ ID NO: 1588999 - RNA, 19 nt, Homo sapiens
  misc_RNA (1)...(19): siRNA sense strand
gcaccugaauuuguaaaca

SEQ ID NO: 1589000 - RNA, 19 nt, Homo sapiens
  misc_RNA (1)...(19): siRNA sense strand
gucacaaacuacuuccaua

SEQ ID NO: 1589001 - RNA, 19 nt, Homo sapiens
  misc_RNA (1)...(19): siRNA sense strand
aacaagaguucugugauuu

SEQ ID NO: 1589002 - RNA, 19 nt, Homo sapiens
  misc_RNA (1)...(19): siRNA sense strand
gagauaaggaaacaggaaa

SEQ ID NO: 1589003 - RNA, 19 nt, Homo sapiens
  misc_RNA (1)...(19): siRNA sense strand
gcaccuggaaccaaacaaa

SEQ ID NO: 1589004 - RNA, 19 nt, Homo sapiens
  misc_RNA (1)...(19): siRNA sense strand
ggaccucagucuaucucaa

SEQ ID NO: 1589005 - RNA, 19 nt, Homo sapiens
  misc_RNA (1)...(19): siRNA sense strand
ggagauaaggaaacaggaa

SEQ ID NO: 1589006 - RNA, 19 nt, Homo sapiens
  misc_RNA (1)...(19): siRNA sense strand
caaaggcacaacacugaaa

SEQ ID NO: 1589007 - RNA, 19 nt, Homo sapiens
  misc_RNA (1)...(19): siRNA sense strand
uuuagcaucucaagaaguu

SEQ ID NO: 1589008 - RNA, 19 nt, Homo sapiens
  misc_RNA (1)...(19): siRNA sense strand
ccaccuauauuucucaaac

SEQ ID NO: 1589009 - RNA, 19 nt, Homo sapiens
  misc_RNA (1)...(19): siRNA sense strand
ugauaaagaaugccaaaug

SEQ ID NO: 1589010 - RNA, 19 nt, Homo sapiens
  misc_RNA (1)...(19): siRNA sense strand
caaacgaagugaagaaaau

SEQ ID NO: 1589011 - RNA, 19 nt, Homo sapiens
  misc_RNA (1)...(19): siRNA sense strand
gcaaaggcacaacacugaa

SEQ ID NO: 1589012 - RNA, 19 nt, Homo sapiens
  misc_RNA (1)...(19): siRNA sense strand
guuacaaguugaguugaaa

SEQ ID NO: 1589013 - RNA, 19 nt, Homo sapiens
  misc_RNA (1)...(19): siRNA sense strand
gaagccauuuacuacuuuc

SEQ ID NO: 1589014 - RNA, 19 nt, Homo sapiens
  misc_RNA (1)...(19): siRNA sense strand
cuacugcuauacauguuau

SEQ ID NO: 1589015 - RNA, 19 nt, Homo sapiens
  misc_RNA (1)...(19): siRNA sense strand
gauacuuuccuuucuacaa

SEQ ID NO: 1589016 - RNA, 19 nt, Homo sapiens
  misc_RNA (1)...(19): siRNA sense strand
acaaaacagucacaaacua

SEQ ID NO: 1589017 - RNA, 19 nt, Homo sapiens
  misc_RNA (1)...(19): siRNA sense strand
agaguucugugauuugaau

SEQ ID NO: 1589018 - RNA, 19 nt, Homo sapiens
  misc_RNA (1)...(19): siRNA sense strand
cuacuuccauagcuucaga

SEQ ID NO: 1589019 - RNA, 19 nt, Homo sapiens
  misc_RNA (1)...(19): siRNA sense strand
ccaaaugcucuggagauaa

SEQ ID NO: 1589020 - RNA, 19 nt, Homo sapiens
  misc_RNA (1)...(19): siRNA sense strand
caaaaguacugcuauacau

SEQ ID NO: 1589021 - RNA, 19 nt, Homo sapiens
  misc_RNA (1)...(19): siRNA sense strand
uugugaagcuuccauugaa

SEQ ID NO: 1589022 - RNA, 19 nt, Homo sapiens
  misc_RNA (1)...(19): siRNA sense strand
ucucaauccaccuauauuu

SEQ ID NO: 1589023 - RNA, 19 nt, Homo sapiens
  misc_RNA (1)...(19): siRNA sense strand
ugaaacagauggcaaaagu

SEQ ID NO: 1589024 - RNA, 19 nt, Homo sapiens
  misc_RNA (1)...(19): siRNA sense strand
cauugaagauugacaucau

SEQ ID NO: 1589025 - RNA, 19 nt, Homo sapiens
  misc_RNA (1)...(19): siRNA sense strand
uguaccaguugauaaagaa

SEQ ID NO: 1589026 - RNA, 19 nt, Homo sapiens
  misc_RNA (1)...(19): siRNA sense strand
aaauguaccuauugaacag

SEQ ID NO: 1589027 - RNA, 19 nt, Homo sapiens
  misc_RNA (1)...(19): siRNA sense strand
uugaagccauuuacuacuu

SEQ ID NO: 1589028 - RNA, 19 nt, Homo sapiens
  misc_RNA (1)...(19): siRNA sense strand
gaaacaaaacagucacaaa

SEQ ID NO: 1589029 - RNA, 19 nt, Homo sapiens
  misc_RNA (1)...(19): siRNA sense strand
aaaugaaacagauggcaaa

SEQ ID NO: 1589030 - RNA, 19 nt, Homo sapiens
  misc_RNA (1)...(19): siRNA sense strand
caccugaauuuguaaacau

SEQ ID NO: 1589031 - RNA, 19 nt, Homo sapiens
  misc_RNA (1)...(19): siRNA sense strand
cuacaauugaagccauuua

SEQ ID NO: 1589032 - RNA, 19 nt, Homo sapiens
  misc_RNA (1)...(19): siRNA sense strand
caaguugaguugaaaacaa

SEQ ID NO: 1589033 - RNA, 19 nt, Homo sapiens
  misc_RNA (1)...(19): siRNA sense strand
gaaaaggaccaugaaguug

SEQ ID NO: 1589034 - RNA, 19 nt, Homo sapiens
  misc_RNA (1)...(19): siRNA sense strand
uagacuaccauacugauau

SEQ ID NO: 1589035 - RNA, 19 nt, Homo sapiens
  misc_RNA (1)...(19): siRNA sense strand
uugaacagauuccacuugu

SEQ ID NO: 1589036 - RNA, 19 nt, Homo sapiens
  misc_RNA (1)...(19): siRNA sense strand
agaaauacagagggcaaua

SEQ ID NO: 1589037 - RNA, 19 nt, Homo sapiens
  misc_RNA (1)...(19): siRNA sense strand
cagauacuuuccuuucuac

SEQ ID NO: 1589038 - RNA, 19 nt, Homo sapiens
  misc_RNA (1)...(19): siRNA sense strand
ucacaaacuacuuccauag

SEQ ID NO: 1589039 - RNA, 19 nt, Homo sapiens
  misc_RNA (1)...(19): siRNA sense strand
cucagucuaucucaauaaa

SEQ ID NO: 1589040 - RNA, 19 nt, Homo sapiens
  misc_RNA (1)...(19): siRNA sense strand
gccagauacuuuccuuucu

SEQ ID NO: 1589041 - RNA, 19 nt, Homo sapiens
  misc_RNA (1)...(19): siRNA sense strand
aaaggaccaugaaguugca

SEQ ID NO: 1589042 - RNA, 19 nt, Homo sapiens
  misc_RNA (1)...(19): siRNA sense strand
gaccucagucuaucucaau

SEQ ID NO: 1589043 - RNA, 19 nt, Homo sapiens
  misc_RNA (1)...(19): siRNA sense strand
cagcaaagugggagaucaa

SEQ ID NO: 1589044 - RNA, 19 nt, Homo sapiens
  misc_RNA (1)...(19): siRNA sense strand
uguuacaaguugaguugaa

SEQ ID NO: 1589045 - RNA, 19 nt, Homo sapiens
  misc_RNA (1)...(19): siRNA sense strand
gaaaauguaccuauugaac

SEQ ID NO: 1589046 - RNA, 19 nt, Homo sapiens
  misc_RNA (1)...(19): siRNA sense strand
ugaaugacagcaagugcaa

SEQ ID NO: 1589047 - RNA, 19 nt, Homo sapiens
  misc_RNA (1)...(19): siRNA sense strand
cauuuacuacuuucuggua

SEQ ID NO: 1589048 - RNA, 19 nt, Homo sapiens
  misc_RNA (1)...(19): siRNA sense strand
ugcaaaggcacaacacuga

SEQ ID NO: 1589049 - RNA, 19 nt, Homo sapiens
  misc_RNA (1)...(19): siRNA sense strand
gaucaaaaugucucaaaug

SEQ ID NO: 1589050 - RNA, 19 nt, Homo sapiens
  misc_RNA (1)...(19): siRNA sense strand
aaauacagagggcaauaug

SEQ ID NO: 1589051 - RNA, 19 nt, Homo sapiens
  misc_RNA (1)...(19): siRNA sense strand
gcaaaagaacugaagaaca

SEQ ID NO: 1589052 - RNA, 19 nt, Homo sapiens
  misc_RNA (1)...(19): siRNA sense strand
acaaacuacuuccauagcu

SEQ ID NO: 1589053 - RNA, 19 nt, Homo sapiens
  misc_RNA (1)...(19): siRNA sense strand
ucaauccaccuauauuucu

SEQ ID NO: 1589054 - RNA, 19 nt, Homo sapiens
  misc_RNA (1)...(19): siRNA sense strand
acaagaguucugugauuug

SEQ ID NO: 1589055 - RNA, 19 nt, Homo sapiens
  misc_RNA (1)...(19): siRNA sense strand
gcaaaaguacugcuauaca

SEQ ID NO: 1589056 - RNA, 19 nt, Homo sapiens
  misc_RNA (1)...(19): siRNA sense strand
uguggugguuccagaaugu

SEQ ID NO: 1589057 - RNA, 19 nt, Homo sapiens
  misc_RNA (1)...(19): siRNA sense strand
ucagcaaagugggagauca

SEQ ID NO: 1589058 - RNA, 19 nt, Homo sapiens
  misc_RNA (1)...(19): siRNA sense strand
gaaacagauggcaaaagua

SEQ ID NO: 1589059 - RNA, 19 nt, Homo sapiens
  misc_RNA (1)...(19): siRNA sense strand
ugaacagauuccacuugug

SEQ ID NO: 1589060 - RNA, 19 nt, Homo sapiens
  misc_RNA (1)...(19): siRNA sense strand
aaacagucacaaacuacuu

SEQ ID NO: 1589061 - RNA, 19 nt, Homo sapiens
  misc_RNA (1)...(19): siRNA sense strand
guucuacugcuauacaugu

SEQ ID NO: 1589062 - RNA, 19 nt, Homo sapiens
  misc_RNA (1)...(19): siRNA sense strand
ugacaucauuaaacaucca

SEQ ID NO: 1589063 - RNA, 19 nt, Homo sapiens
  misc_RNA (1)...(19): siRNA sense strand
guugauaaagaaugccaaa

SEQ ID NO: 1589064 - RNA, 19 nt, Homo sapiens
  misc_RNA (1)...(19): siRNA sense strand
aaaggaaagccagauacuu

SEQ ID NO: 1589065 - RNA, 19 nt, Homo sapiens
  misc_RNA (1)...(19): siRNA sense strand
ugacaagccaucuuuuaaa

SEQ ID NO: 1589066 - RNA, 19 nt, Homo sapiens
  misc_RNA (1)...(19): siRNA sense strand
uggcaaaaguacugcuaua

SEQ ID NO: 1589067 - RNA, 19 nt, Homo sapiens
  misc_RNA (1)...(19): siRNA sense strand
gacaagccaucuuuuaaac

SEQ ID NO: 1589068 - RNA, 19 nt, Homo sapiens
  misc_RNA (1)...(19): siRNA sense strand
ucucaaacgaagugaagaa

SEQ ID NO: 1589069 - RNA, 19 nt, Homo sapiens
  misc_RNA (1)...(19): siRNA sense strand
agaaaaggaccaugaaguu

SEQ ID NO: 1589070 - RNA, 19 nt, Homo sapiens
  misc_RNA (1)...(19): siRNA sense strand
caaagugggagaucaaaau

SEQ ID NO: 1589071 - RNA, 19 nt, Homo sapiens
  misc_RNA (1)...(19): siRNA sense strand
aaagaacugaagaacaaga

SEQ ID NO: 1589072 - RNA, 19 nt, Homo sapiens
  misc_RNA (1)...(19): siRNA sense strand
ccucagucuaucucaauaa

SEQ ID NO: 1589073 - RNA, 19 nt, Homo sapiens
  misc_RNA (1)...(19): siRNA sense strand
gaagugaagaaaauaguuc

SEQ ID NO: 1589074 - RNA, 19 nt, Homo sapiens
  misc_RNA (1)...(19): siRNA sense strand
caauccaccuauauuucuc

SEQ ID NO: 1589075 - RNA, 19 nt, Homo sapiens
  misc_RNA (1)...(19): siRNA sense strand
gggcaauaugacaaucuuu

SEQ ID NO: 1589076 - RNA, 19 nt, Homo sapiens
  misc_RNA (1)...(19): siRNA sense strand
acagagggcaauaugacaa

SEQ ID NO: 1589077 - RNA, 19 nt, Homo sapiens
  misc_RNA (1)...(19): siRNA sense strand
gaaugacagcaagugcaaa

SEQ ID NO: 1589078 - RNA, 19 nt, Homo sapiens
  misc_RNA (1)...(19): siRNA sense strand
cuugugaagcuuccauuga

SEQ ID NO: 1589079 - RNA, 19 nt, Homo sapiens
  misc_RNA (1)...(19): siRNA sense strand
uaaggaaacaggaaaacuu

SEQ ID NO: 1589080 - RNA, 19 nt, Homo sapiens
  misc_RNA (1)...(19): siRNA sense strand
ugucucaaauguggugguu

SEQ ID NO: 1589081 - RNA, 19 nt, Homo sapiens
  misc_RNA (1)...(19): siRNA sense strand
ggaaacaaguuaacaagua

SEQ ID NO: 1589082 - RNA, 19 nt, Homo sapiens
  misc_RNA (1)...(19): siRNA sense strand
gaagugaacuaaccaaaga

SEQ ID NO: 1589083 - RNA, 19 nt, Homo sapiens
  misc_RNA (1)...(19): siRNA sense strand
caaaggcgcuguggaguua

SEQ ID NO: 1589084 - RNA, 19 nt, Homo sapiens
  misc_RNA (1)...(19): siRNA sense strand
gcagaugacuuguuuaaag

SEQ ID NO: 1589085 - RNA, 19 nt, Homo sapiens
  misc_RNA (1)...(19): siRNA sense strand
gcucuaagauccucauuug

SEQ ID NO: 1589086 - RNA, 19 nt, Homo sapiens
  misc_RNA (1)...(19): siRNA sense strand
gaagauggacuuauggauu

SEQ ID NO: 1589087 - RNA, 19 nt, Homo sapiens
  misc_RNA (1)...(19): siRNA sense strand
gaacgaaagucuccccaua

SEQ ID NO: 1589088 - RNA, 19 nt, Homo sapiens
  misc_RNA (1)...(19): siRNA sense strand
gaaacaaguuaacaaguac

SEQ ID NO: 1589089 - RNA, 19 nt, Homo sapiens
  misc_RNA (1)...(19): siRNA sense strand
gcuggcagaugacuuguuu

SEQ ID NO: 1589090 - RNA, 19 nt, Homo sapiens
  misc_RNA (1)...(19): siRNA sense strand
gcucagccauggcauaguu

SEQ ID NO: 1589091 - RNA, 19 nt, Homo sapiens
  misc_RNA (1)...(19): siRNA sense strand
gaauuuaccuucacuaccu

SEQ ID NO: 1589092 - RNA, 19 nt, Homo sapiens
  misc_RNA (1)...(19): siRNA sense strand
cuaagauccucauuugauu

SEQ ID NO: 1589093 - RNA, 19 nt, Homo sapiens
  misc_RNA (1)...(19): siRNA sense strand
ugacaaauaugaacuugag

SEQ ID NO: 1589094 - RNA, 19 nt, Homo sapiens
  misc_RNA (1)...(19): siRNA sense strand
cacaaagaauguugaauca

SEQ ID NO: 1589095 - RNA, 19 nt, Homo sapiens
  misc_RNA (1)...(19): siRNA sense strand
ucagagugguguaguuauu

SEQ ID NO: 1589096 - RNA, 19 nt, Homo sapiens
  misc_RNA (1)...(19): siRNA sense strand
gguacaugcuggucaccua

SEQ ID NO: 1589097 - RNA, 19 nt, Homo sapiens
  misc_RNA (1)...(19): siRNA sense strand
uggagaagauggacuuaug

SEQ ID NO: 1589098 - RNA, 19 nt, Homo sapiens
  misc_RNA (1)...(19): siRNA sense strand
gauccucauuugauuuguu

SEQ ID NO: 1589099 - RNA, 19 nt, Homo sapiens
  misc_RNA (1)...(19): siRNA sense strand
caguauaucuuggaacgaa

SEQ ID NO: 1589100 - RNA, 19 nt, Homo sapiens
  misc_RNA (1)...(19): siRNA sense strand
aagauggacuuauggauuc

SEQ ID NO: 1589101 - RNA, 19 nt, Homo sapiens
  misc_RNA (1)...(19): siRNA sense strand
ccagauccacuuccuauug

SEQ ID NO: 1589102 - RNA, 19 nt, Homo sapiens
  misc_RNA (1)...(19): siRNA sense strand
gcuguggaguuauucuuga

SEQ ID NO: 1589103 - RNA, 19 nt, Homo sapiens
  misc_RNA (1)...(19): siRNA sense strand
gaaggaaaaucaugcaaca

SEQ ID NO: 1589104 - RNA, 19 nt, Homo sapiens
  misc_RNA (1)...(19): siRNA sense strand
gaccagauccacuuccuau

SEQ ID NO: 1589105 - RNA, 19 nt, Homo sapiens
  misc_RNA (1)...(19): siRNA sense strand
gaacuaaccaaagaaccuu

SEQ ID NO: 1589106 - RNA, 19 nt, Homo sapiens
  misc_RNA (1)...(19): siRNA sense strand
agagugguguaguuauuaa

SEQ ID NO: 1589107 - RNA, 19 nt, Homo sapiens
  misc_RNA (1)...(19): siRNA sense strand
guucagagugguguaguua

SEQ ID NO: 1589108 - RNA, 19 nt, Homo sapiens
  misc_RNA (1)...(19): siRNA sense strand
gauggaaacaaguuaacaa

SEQ ID NO: 1589109 - RNA, 19 nt, Homo sapiens
  misc_RNA (1)...(19): siRNA sense strand
gcccuuaacucaguauauc

SEQ ID NO: 1589110 - RNA, 19 nt, Homo sapiens
  misc_RNA (1)...(19): siRNA sense strand
gaucagaauuuaccuucac

SEQ ID NO: 1589111 - RNA, 19 nt, Homo sapiens
  misc_RNA (1)...(19): siRNA sense strand
gaccugggcaccucuuauu

SEQ ID NO: 1589112 - RNA, 19 nt, Homo sapiens
  misc_RNA (1)...(19): siRNA sense strand
ggaagugaacuaaccaaag

SEQ ID NO: 1589113 - RNA, 19 nt, Homo sapiens
  misc_RNA (1)...(19): siRNA sense strand
gagcguaccaacugaugaa

SEQ ID NO: 1589114 - RNA, 19 nt, Homo sapiens
  misc_RNA (1)...(19): siRNA sense strand
guuuaaaguucacaagcuu

SEQ ID NO: 1589115 - RNA, 19 nt, Homo sapiens
  misc_RNA (1)...(19): siRNA sense strand
uggcauaguugucauaaac

SEQ ID NO: 1589116 - RNA, 19 nt, Homo sapiens
  misc_RNA (1)...(19): siRNA sense strand
acacaaagaauguugaauc

SEQ ID NO: 1589117 - RNA, 19 nt, Homo sapiens
  misc_RNA (1)...(19): siRNA sense strand
ggaaaaucaugcaacauuc

SEQ ID NO: 1589118 - RNA, 19 nt, Homo sapiens
  misc_RNA (1)...(19): siRNA sense strand
ucguugggaucaaagguua

SEQ ID NO: 1589119 - RNA, 19 nt, Homo sapiens
  misc_RNA (1)...(19): siRNA sense strand
ucacagauggaaacaaguu

SEQ ID NO: 1589120 - RNA, 19 nt, Homo sapiens
  misc_RNA (1)...(19): siRNA sense strand
cagagugguguaguuauua

SEQ ID NO: 1589121 - RNA, 19 nt, Homo sapiens
  misc_RNA (1)...(19): siRNA sense strand
gagguucuccuguguagau

SEQ ID NO: 1589122 - RNA, 19 nt, Homo sapiens
  misc_RNA (1)...(19): siRNA sense strand
uggcagaugacuuguuuaa

SEQ ID NO: 1589123 - RNA, 19 nt, Homo sapiens
  misc_RNA (1)...(19): siRNA sense strand
ucuaagauccucauuugau

SEQ ID NO: 1589124 - RNA, 19 nt, Homo sapiens
  misc_RNA (1)...(19): siRNA sense strand
gagaagauggacuuaugga

SEQ ID NO: 1589125 - RNA, 19 nt, Homo sapiens
  misc_RNA (1)...(19): siRNA sense strand
ccaaaggcgcuguggaguu

SEQ ID NO: 1589126 - RNA, 19 nt, Homo sapiens
  misc_RNA (1)...(19): siRNA sense strand
uguacgaccuaacucuaaa

SEQ ID NO: 1589127 - RNA, 19 nt, Homo sapiens
  misc_RNA (1)...(19): siRNA sense strand
aagcuuaagccaaaucuga

SEQ ID NO: 1589128 - RNA, 19 nt, Homo sapiens
  misc_RNA (1)...(19): siRNA sense strand
cagauccacuuccuauugg

SEQ ID NO: 1589129 - RNA, 19 nt, Homo sapiens
  misc_RNA (1)...(19): siRNA sense strand
uucacaagcuuaagccaaa

SEQ ID NO: 1589130 - RNA, 19 nt, Homo sapiens
  misc_RNA (1)...(19): siRNA sense strand
cguaccaacugaugaaucu

SEQ ID NO: 1589131 - RNA, 19 nt, Homo sapiens
  misc_RNA (1)...(19): siRNA sense strand
gugagguucuccuguguag

SEQ ID NO: 1589132 - RNA, 19 nt, Homo sapiens
  misc_RNA (1)...(19): siRNA sense strand
guaauagacaaacuuccuu

SEQ ID NO: 1589133 - RNA, 19 nt, Homo sapiens
  misc_RNA (1)...(19): siRNA sense strand
gugagccaaugguaauaga

SEQ ID NO: 1589134 - RNA, 19 nt, Homo sapiens
  misc_RNA (1)...(19): siRNA sense strand
guacugcugguguucaaga

SEQ ID NO: 1589135 - RNA, 19 nt, Homo sapiens
  misc_RNA (1)...(19): siRNA sense strand
ucauuuauguacgaccuaa

SEQ ID NO: 1589136 - RNA, 19 nt, Homo sapiens
  misc_RNA (1)...(19): siRNA sense strand
ggaccagauccacuuccua

SEQ ID NO: 1589137 - RNA, 19 nt, Homo sapiens
  misc_RNA (1)...(19): siRNA sense strand
ggucgcuccuacuguguga

SEQ ID NO: 1589138 - RNA, 19 nt, Homo sapiens
  misc_RNA (1)...(19): siRNA sense strand
cgaccuaacucuaaaacug

SEQ ID NO: 1589139 - RNA, 19 nt, Homo sapiens
  misc_RNA (1)...(19): siRNA sense strand
uggaauagacaauuaugga

SEQ ID NO: 1589140 - RNA, 19 nt, Homo sapiens
  misc_RNA (1)...(19): siRNA sense strand
uaacucaguauaucuugga

SEQ ID NO: 1589141 - RNA, 19 nt, Homo sapiens
  misc_RNA (1)...(19): siRNA sense strand
ggagaagauggacuuaugg

SEQ ID NO: 1589142 - RNA, 19 nt, Homo sapiens
  misc_RNA (1)...(19): siRNA sense strand
gcuggucaccuacgacgaa

SEQ ID NO: 1589143 - RNA, 19 nt, Homo sapiens
  misc_RNA (1)...(19): siRNA sense strand
gugagaacacaaagaaugu

SEQ ID NO: 1589144 - RNA, 19 nt, Homo sapiens
  misc_RNA (1)...(19): siRNA sense strand
guucuccuguguagauugu

SEQ ID NO: 1589145 - RNA, 19 nt, Homo sapiens
  misc_RNA (1)...(19): siRNA sense strand
acagauggaaacaaguuaa

SEQ ID NO: 1589146 - RNA, 19 nt, Homo sapiens
  misc_RNA (1)...(19): siRNA sense strand
caacauucaugagcgaacu

SEQ ID NO: 1589147 - RNA, 19 nt, Homo sapiens
  misc_RNA (1)...(19): siRNA sense strand
gagcuccaucuuccuuuga

SEQ ID NO: 1589148 - RNA, 19 nt, Homo sapiens
  misc_RNA (1)...(19): siRNA sense strand
gagccaaugguaauagaca

SEQ ID NO: 1589149 - RNA, 19 nt, Homo sapiens
  misc_RNA (1)...(19): siRNA sense strand
gaaaaucaugcaacauuca

SEQ ID NO: 1589150 - RNA, 19 nt, Homo sapiens
  misc_RNA (1)...(19): siRNA sense strand
ggagcguaccaacugauga

SEQ ID NO: 1589151 - RNA, 19 nt, Homo sapiens
  misc_RNA (1)...(19): siRNA sense strand
cugcugguguucaagaaga

SEQ ID NO: 1589152 - RNA, 19 nt, Homo sapiens
  misc_RNA (1)...(19): siRNA sense strand
cuagggagcguaccaacug

SEQ ID NO: 1589153 - RNA, 19 nt, Homo sapiens
  misc_RNA (1)...(19): siRNA sense strand
gcaucaaggcugguuggaa

SEQ ID NO: 1589154 - RNA, 19 nt, Homo sapiens
  misc_RNA (1)...(19): siRNA sense strand
caaggcugguuggaaggaa

SEQ ID NO: 1589155 - RNA, 19 nt, Homo sapiens
  misc_RNA (1)...(19): siRNA sense strand
uagggagcguaccaacuga

SEQ ID NO: 1589156 - RNA, 19 nt, Homo sapiens
  misc_RNA (1)...(19): siRNA sense strand
ucacaagcuuaagccaaau

SEQ ID NO: 1589157 - RNA, 19 nt, Homo sapiens
  misc_RNA (1)...(19): siRNA sense strand
gccaaugguaauagacaaa

SEQ ID NO: 1589158 - RNA, 19 nt, Homo sapiens
  misc_RNA (1)...(19): siRNA sense strand
uuggccagaucagaauuua

SEQ ID NO: 1589159 - RNA, 19 nt, Homo sapiens
  misc_RNA (1)...(19): siRNA sense strand
cuucuggacugacuacucu

SEQ ID NO: 1589160 - RNA, 19 nt, Homo sapiens
  misc_RNA (1)...(19): siRNA sense strand
cacagauggaaacaaguua

SEQ ID NO: 1589161 - RNA, 19 nt, Homo sapiens
  misc_RNA (1)...(19): siRNA sense strand
ccugggcaccucuuauuug

SEQ ID NO: 1589162 - RNA, 19 nt, Homo sapiens
  misc_RNA (1)...(19): siRNA sense strand
ccucuuauuuggacauugc

SEQ ID NO: 1589163 - RNA, 19 nt, Homo sapiens
  misc_RNA (1)...(19): siRNA sense strand
agagcuccaucuuccuuug

SEQ ID NO: 1589164 - RNA, 19 nt, Homo sapiens
  misc_RNA (1)...(19): siRNA sense strand
guuauuugcccugguguug

SEQ ID NO: 1589165 - RNA, 19 nt, Homo sapiens
  misc_RNA (1)...(19): siRNA sense strand
gguaauagacaaacuuccu

SEQ ID NO: 1589166 - RNA, 19 nt, Homo sapiens
  misc_RNA (1)...(19): siRNA sense strand
uauguacgaccuaacucua

SEQ ID NO: 1589167 - RNA, 19 nt, Homo sapiens
  misc_RNA (1)...(19): siRNA sense strand
gcaacuagggagcguacca

SEQ ID NO: 1589168 - RNA, 19 nt, Homo sapiens
  misc_RNA (1)...(19): siRNA sense strand
cuugagccuucgcccuuaa

SEQ ID NO: 1589169 - RNA, 19 nt, Homo sapiens
  misc_RNA (1)...(19): siRNA sense strand
ucuccuguguagauuguga

SEQ ID NO: 1589170 - RNA, 19 nt, Homo sapiens
  misc_RNA (1)...(19): siRNA sense strand
caacuagggagcguaccaa

SEQ ID NO: 1589171 - RNA, 19 nt, Homo sapiens
  misc_RNA (1)...(19): siRNA sense strand
gacacguccgccucuauga

SEQ ID NO: 1589172 - RNA, 19 nt, Homo sapiens
  misc_RNA (1)...(19): siRNA sense strand
acacguccgccucuaugaa

SEQ ID NO: 1589173 - RNA, 19 nt, Homo sapiens
  misc_RNA (1)...(19): siRNA sense strand
aagauccucauuugauuug

SEQ ID NO: 1589174 - RNA, 19 nt, Homo sapiens
  misc_RNA (1)...(19): siRNA sense strand
uaaaacugguguuccuguu

SEQ ID NO: 1589175 - RNA, 19 nt, Homo sapiens
  misc_RNA (1)...(19): siRNA sense strand
ccauggcauaguugucaua

SEQ ID NO: 1589176 - RNA, 19 nt, Homo sapiens
  misc_RNA (1)...(19): siRNA sense strand
gcuccaucuuccuuugaau

SEQ ID NO: 1589177 - RNA, 19 nt, Homo sapiens
  misc_RNA (1)...(19): siRNA sense strand
caaugguaauagacaaacu

SEQ ID NO: 1589178 - RNA, 19 nt, Homo sapiens
  misc_RNA (1)...(19): siRNA sense strand
agacacguccgccucuaug

SEQ ID NO: 1589179 - RNA, 19 nt, Homo sapiens
  misc_RNA (1)...(19): siRNA sense strand
aaggcgcuguggaguuauu

SEQ ID NO: 1589180 - RNA, 19 nt, Homo sapiens
  misc_RNA (1)...(19): siRNA sense strand
gaacaacgcggacuucauc

SEQ ID NO: 1589181 - RNA, 19 nt, Homo sapiens
  misc_RNA (1)...(19): siRNA sense strand
gggcaaaggugaccagaag

SEQ ID NO: 1589182 - RNA, 19 nt, Homo sapiens
  misc_RNA (1)...(19): siRNA sense strand
ggacagcucggccgucauu

SEQ ID NO: 1589183 - RNA, 19 nt, Homo sapiens
  misc_RNA (1)...(19): siRNA sense strand
caucaucccuguggagauu

SEQ ID NO: 1589184 - RNA, 19 nt, Homo sapiens
  misc_RNA (1)...(19): siRNA sense strand
caaguacgcagacccagua

SEQ ID NO: 1589185 - RNA, 19 nt, Homo sapiens
  misc_RNA (1)...(19): siRNA sense strand
caauucaccugccuccuau

SEQ ID NO: 1589186 - RNA, 19 nt, Homo sapiens
  misc_RNA (1)...(19): siRNA sense strand
uagcugaccugcuggacaa

SEQ ID NO: 1589187 - RNA, 19 nt, Homo sapiens
  misc_RNA (1)...(19): siRNA sense strand
cugcuagccucgccaagua

SEQ ID NO: 1589188 - RNA, 19 nt, Homo sapiens
  misc_RNA (1)...(19): siRNA sense strand
gcucggccgucauuacuca

SEQ ID NO: 1589189 - RNA, 19 nt, Homo sapiens
  misc_RNA (1)...(19): siRNA sense strand
gaccagaagucagcagcuu

SEQ ID NO: 1589190 - RNA, 19 nt, Homo sapiens
  misc_RNA (1)...(19): siRNA sense strand
gcgaaugggcgagcucuuu

SEQ ID NO: 1589191 - RNA, 19 nt, Homo sapiens
  misc_RNA (1)...(19): siRNA sense strand
gcccaggacucagacaaga

SEQ ID NO: 1589192 - RNA, 19 nt, Homo sapiens
  misc_RNA (1)...(19): siRNA sense strand
gcaaaggugaccagaaguc

SEQ ID NO: 1589193 - RNA, 19 nt, Homo sapiens
  misc_RNA (1)...(19): siRNA sense strand
ugggcgagcucuuugaaug

SEQ ID NO: 1589194 - RNA, 19 nt, Homo sapiens
  misc_RNA (1)...(19): siRNA sense strand
acaauucaccugccuccua

SEQ ID NO: 1589195 - RNA, 19 nt, Homo sapiens
  misc_RNA (1)...(19): siRNA sense strand
uuacucagaucagcaagga

SEQ ID NO: 1589196 - RNA, 19 nt, Homo sapiens
  misc_RNA (1)...(19): siRNA sense strand
gaaugggcgagcucuuuga

SEQ ID NO: 1589197 - RNA, 19 nt, Homo sapiens
  misc_RNA (1)...(19): siRNA sense strand
ucaccugccuccuaugucu

SEQ ID NO: 1589198 - RNA, 19 nt, Homo sapiens
  misc_RNA (1)...(19): siRNA sense strand
caacgcggacuucaucauc

SEQ ID NO: 1589199 - RNA, 19 nt, Homo sapiens
  misc_RNA (1)...(19): siRNA sense strand
cgaaugggcgagcucuuug

SEQ ID NO: 1589200 - RNA, 19 nt, Homo sapiens
  misc_RNA (1)...(19): siRNA sense strand
ccaaggcccaggacucaga

SEQ ID NO: 1589201 - RNA, 19 nt, Homo sapiens
  misc_RNA (1)...(19): siRNA sense strand
ggcgagcucuuugaaugug

SEQ ID NO: 1589202 - RNA, 19 nt, Homo sapiens
  misc_RNA (1)...(19): siRNA sense strand
caccaggucuacguguuga

SEQ ID NO: 1589203 - RNA, 19 nt, Homo sapiens
  misc_RNA (1)...(19): siRNA sense strand
ccaccaggucuacguguug

SEQ ID NO: 1589204 - RNA, 19 nt, Homo sapiens
  misc_RNA (1)...(19): siRNA sense strand
gguuugacaacaugaguga

SEQ ID NO: 1589205 - RNA, 19 nt, Homo sapiens
  misc_RNA (1)...(19): siRNA sense strand
ugugugcuguucacugcua

SEQ ID NO: 1589206 - RNA, 19 nt, Homo sapiens
  misc_RNA (1)...(19): siRNA sense strand
ccucgugguuugacaacau

SEQ ID NO: 1589207 - RNA, 19 nt, Homo sapiens
  misc_RNA (1)...(19): siRNA sense strand
ucacucuucugcugugucu

SEQ ID NO: 1589208 - RNA, 19 nt, Homo sapiens
  misc_RNA (1)...(19): siRNA sense strand
gugcucauccuggacaauu

SEQ ID NO: 1589209 - RNA, 19 nt, Homo sapiens
  misc_RNA (1)...(19): siRNA sense strand
gggcgagcucuuugaaugu

SEQ ID NO: 1589210 - RNA, 19 nt, Homo sapiens
  misc_RNA (1)...(19): siRNA sense strand
guacgcagacccaguagcu

SEQ ID NO: 1589211 - RNA, 19 nt, Homo sapiens
  misc_RNA (1)...(19): siRNA sense strand
gcucauccuggacaauuca

SEQ ID NO: 1589212 - RNA, 19 nt, Homo sapiens
  misc_RNA (1)...(19): siRNA sense strand
ccaggacucagacaagauc

SEQ ID NO: 1589213 - RNA, 19 nt, Homo sapiens
  misc_RNA (1)...(19): siRNA sense strand
caagaucugcguggucauc

SEQ ID NO: 1589214 - RNA, 19 nt, Homo sapiens
  misc_RNA (1)...(19): siRNA sense strand
gaacaacgcggacuucauc

SEQ ID NO: 1589215 - RNA, 19 nt, Homo sapiens
  misc_RNA (1)...(19): siRNA sense strand
gggcaaaggugaccagaag

SEQ ID NO: 1589216 - RNA, 19 nt, Homo sapiens
  misc_RNA (1)...(19): siRNA sense strand
ggacagcucggccgucauu

SEQ ID NO: 1589217 - RNA, 19 nt, Homo sapiens
  misc_RNA (1)...(19): siRNA sense strand
caucaucccuguggagauu

SEQ ID NO: 1589218 - RNA, 19 nt, Homo sapiens
  misc_RNA (1)...(19): siRNA sense strand
caaguacgcagacccagua

SEQ ID NO: 1589219 - RNA, 19 nt, Homo sapiens
  misc_RNA (1)...(19): siRNA sense strand
caauucaccugccuccuau

SEQ ID NO: 1589220 - RNA, 19 nt, Homo sapiens
  misc_RNA (1)...(19): siRNA sense strand
uagcugaccugcuggacaa

SEQ ID NO: 1589221 - RNA, 19 nt, Homo sapiens
  misc_RNA (1)...(19): siRNA sense strand
cugcuagccucgccaagua

SEQ ID NO: 1589222 - RNA, 19 nt, Homo sapiens
  misc_RNA (1)...(19): siRNA sense strand
gcucggccgucauuacuca

SEQ ID NO: 1589223 - RNA, 19 nt, Homo sapiens
  misc_RNA (1)...(19): siRNA sense strand
gaccagaagucagcagcuu

SEQ ID NO: 1589224 - RNA, 19 nt, Homo sapiens
  misc_RNA (1)...(19): siRNA sense strand
gcgaaugggcgagcucuuu

SEQ ID NO: 1589225 - RNA, 19 nt, Homo sapiens
  misc_RNA (1)...(19): siRNA sense strand
gcccaggacucagacaaga

SEQ ID NO: 1589226 - RNA, 19 nt, Homo sapiens
  misc_RNA (1)...(19): siRNA sense strand
gcaaaggugaccagaaguc

SEQ ID NO: 1589227 - RNA, 19 nt, Homo sapiens
  misc_RNA (1)...(19): siRNA sense strand
ugggcgagcucuuugaaug

SEQ ID NO: 1589228 - RNA, 19 nt, Homo sapiens
  misc_RNA (1)...(19): siRNA sense strand
acaauucaccugccuccua

SEQ ID NO: 1589229 - RNA, 19 nt, Homo sapiens
  misc_RNA (1)...(19): siRNA sense strand
uuacucagaucagcaagga

SEQ ID NO: 1589230 - RNA, 19 nt, Homo sapiens
  misc_RNA (1)...(19): siRNA sense strand
gaaugggcgagcucuuuga

SEQ ID NO: 1589231 - RNA, 19 nt, Homo sapiens
  misc_RNA (1)...(19): siRNA sense strand
ucaccugccuccuaugucu

SEQ ID NO: 1589232 - RNA, 19 nt, Homo sapiens
  misc_RNA (1)...(19): siRNA sense strand
caacgcggacuucaucauc

SEQ ID NO: 1589233 - RNA, 19 nt, Homo sapiens
  misc_RNA (1)...(19): siRNA sense strand
cgaaugggcgagcucuuug

SEQ ID NO: 1589234 - RNA, 19 nt, Homo sapiens
  misc_RNA (1)...(19): siRNA sense strand
ccaaggcccaggacucaga

SEQ ID NO: 1589235 - RNA, 19 nt, Homo sapiens
  misc_RNA (1)...(19): siRNA sense strand
ggcgagcucuuugaaugug

SEQ ID NO: 1589236 - RNA, 19 nt, Homo sapiens
  misc_RNA (1)...(19): siRNA sense strand
caccaggucuacguguuga

SEQ ID NO: 1589237 - RNA, 19 nt, Homo sapiens
  misc_RNA (1)...(19): siRNA sense strand
ccaccaggucuacguguug

SEQ ID NO: 1589238 - RNA, 19 nt, Homo sapiens
  misc_RNA (1)...(19): siRNA sense strand
gguuugacaacaugaguga

SEQ ID NO: 1589239 - RNA, 19 nt, Homo sapiens
  misc_RNA (1)...(19): siRNA sense strand
ugugugcuguucacugcua

SEQ ID NO: 1589240 - RNA, 19 nt, Homo sapiens
  misc_RNA (1)...(19): siRNA sense strand
ccucgugguuugacaacau

SEQ ID NO: 1589241 - RNA, 19 nt, Homo sapiens
  misc_RNA (1)...(19): siRNA sense strand
ucacucuucugcugugucu

SEQ ID NO: 1589242 - RNA, 19 nt, Homo sapiens
  misc_RNA (1)...(19): siRNA sense strand
gugcucauccuggacaauu

SEQ ID NO: 1589243 - RNA, 19 nt, Homo sapiens
  misc_RNA (1)...(19): siRNA sense strand
gggcgagcucuuugaaugu

SEQ ID NO: 1589244 - RNA, 19 nt, Homo sapiens
  misc_RNA (1)...(19): siRNA sense strand
guacgcagacccaguagcu

SEQ ID NO: 1589245 - RNA, 19 nt, Homo sapiens
  misc_RNA (1)...(19): siRNA sense strand
gcucauccuggacaauuca

SEQ ID NO: 1589246 - RNA, 19 nt, Homo sapiens
  misc_RNA (1)...(19): siRNA sense strand
ccaggacucagacaagauc

SEQ ID NO: 1589247 - RNA, 19 nt, Homo sapiens
  misc_RNA (1)...(19): siRNA sense strand
caagaucugcguggucauc

SEQ ID NO: 1589248 - RNA, 19 nt, Homo sapiens
  misc_RNA (1)...(19): siRNA sense strand
cuacagaccuggcagcuuu

SEQ ID NO: 1589249 - RNA, 19 nt, Homo sapiens
  misc_RNA (1)...(19): siRNA sense strand
gagcugaacuccgucauga

SEQ ID NO: 1589250 - RNA, 19 nt, Homo sapiens
  misc_RNA (1)...(19): siRNA sense strand
gaguguagcuggugauauc

SEQ ID NO: 1589251 - RNA, 19 nt, Homo sapiens
  misc_RNA (1)...(19): siRNA sense strand
gcaaagccauccagaacuc

SEQ ID NO: 1589252 - RNA, 19 nt, Homo sapiens
  misc_RNA (1)...(19): siRNA sense strand
gaggagcucucuggucuga

SEQ ID NO: 1589253 - RNA, 19 nt, Homo sapiens
  misc_RNA (1)...(19): siRNA sense strand
acauagaacuggacaucaa

SEQ ID NO: 1589254 - RNA, 19 nt, Homo sapiens
  misc_RNA (1)...(19): siRNA sense strand
ucucuggucugaagauuga

SEQ ID NO: 1589255 - RNA, 19 nt, Homo sapiens
  misc_RNA (1)...(19): siRNA sense strand
ugacggaucgcguuuagaa

SEQ ID NO: 1589256 - RNA, 19 nt, Homo sapiens
  misc_RNA (1)...(19): siRNA sense strand
ccaauucaguucuggagau

SEQ ID NO: 1589257 - RNA, 19 nt, Homo sapiens
  misc_RNA (1)...(19): siRNA sense strand
ggagcucucuggucugaag

SEQ ID NO: 1589258 - RNA, 19 nt, Homo sapiens
  misc_RNA (1)...(19): siRNA sense strand
caucaacccuaucgugaag

SEQ ID NO: 1589259 - RNA, 19 nt, Homo sapiens
  misc_RNA (1)...(19): siRNA sense strand
ggcccuggauguuggaauu

SEQ ID NO: 1589260 - RNA, 19 nt, Homo sapiens
  misc_RNA (1)...(19): siRNA sense strand
uggaacagaugcucuucaa

SEQ ID NO: 1589261 - RNA, 19 nt, Homo sapiens
  misc_RNA (1)...(19): siRNA sense strand
ugccaaagguguugcugaa

SEQ ID NO: 1589262 - RNA, 19 nt, Homo sapiens
  misc_RNA (1)...(19): siRNA sense strand
ugaagcugcugccgggauu

SEQ ID NO: 1589263 - RNA, 19 nt, Homo sapiens
  misc_RNA (1)...(19): siRNA sense strand
cuaccaagcugcacaucuc

SEQ ID NO: 1589264 - RNA, 19 nt, Homo sapiens
  misc_RNA (1)...(19): siRNA sense strand
guacauagaacuggacauc

SEQ ID NO: 1589265 - RNA, 19 nt, Homo sapiens
  misc_RNA (1)...(19): siRNA sense strand
uaacguggcccuggauguu

SEQ ID NO: 1589266 - RNA, 19 nt, Homo sapiens
  misc_RNA (1)...(19): siRNA sense strand
gaucguagagaaugcuguu

SEQ ID NO: 1589267 - RNA, 19 nt, Homo sapiens
  misc_RNA (1)...(19): siRNA sense strand
ccaaagugggcaugcauug

SEQ ID NO: 1589268 - RNA, 19 nt, Homo sapiens
  misc_RNA (1)...(19): siRNA sense strand
ccaagaaggaccacacauc

SEQ ID NO: 1589269 - RNA, 19 nt, Homo sapiens
  misc_RNA (1)...(19): siRNA sense strand
ugaacuccgucaugacugu

SEQ ID NO: 1589270 - RNA, 19 nt, Homo sapiens
  misc_RNA (1)...(19): siRNA sense strand
uccaugugcuguucuaugu

SEQ ID NO: 1589271 - RNA, 19 nt, Homo sapiens
  misc_RNA (1)...(19): siRNA sense strand
gaucgcguuuagaagaaug

SEQ ID NO: 1589272 - RNA, 19 nt, Homo sapiens
  misc_RNA (1)...(19): siRNA sense strand
cggaucgcguuuagaagaa

SEQ ID NO: 1589273 - RNA, 19 nt, Homo sapiens
  misc_RNA (1)...(19): siRNA sense strand
guguaugcaccaaagcuua

SEQ ID NO: 1589274 - RNA, 19 nt, Homo sapiens
  misc_RNA (1)...(19): siRNA sense strand
caaagguguugcugaagcu

SEQ ID NO: 1589275 - RNA, 19 nt, Homo sapiens
  misc_RNA (1)...(19): siRNA sense strand
gcacacccauccuuauccu

SEQ ID NO: 1589276 - RNA, 19 nt, Homo sapiens
  misc_RNA (1)...(19): siRNA sense strand
gcucucuggucugaagauu

SEQ ID NO: 1589277 - RNA, 19 nt, Homo sapiens
  misc_RNA (1)...(19): siRNA sense strand
gcucuuggguccguggaau

SEQ ID NO: 1589278 - RNA, 19 nt, Homo sapiens
  misc_RNA (1)...(19): siRNA sense strand
cguagagaaugcuguugug

SEQ ID NO: 1589279 - RNA, 19 nt, Homo sapiens
  misc_RNA (1)...(19): siRNA sense strand
uguagcuggugauaucauu

SEQ ID NO: 1589280 - RNA, 19 nt, Homo sapiens
  misc_RNA (1)...(19): siRNA sense strand
ggcaguguaugcaccaaag

SEQ ID NO: 1589281 - RNA, 19 nt, Homo sapiens
  misc_RNA (1)...(19): siRNA sense strand
gggcacacccauccuuauc

SEQ ID NO: 1589282 - RNA, 19 nt, Homo sapiens
  misc_RNA (1)...(19): siRNA sense strand
ccacauugccucucaucuc

SEQ ID NO: 1589283 - RNA, 19 nt, Homo sapiens
  misc_RNA (1)...(19): siRNA sense strand
ucgcucggauugacaagga

SEQ ID NO: 1589284 - RNA, 19 nt, Homo sapiens
  misc_RNA (1)...(19): siRNA sense strand
caauucaguucuggagauc

SEQ ID NO: 1589285 - RNA, 19 nt, Homo sapiens
  misc_RNA (1)...(19): siRNA sense strand
ggaucgcguuuagaagaau

SEQ ID NO: 1589286 - RNA, 19 nt, Homo sapiens
  misc_RNA (1)...(19): siRNA sense strand
gcuguucuaugucccuaag

SEQ ID NO: 1589287 - RNA, 19 nt, Homo sapiens
  misc_RNA (1)...(19): siRNA sense strand
ucacacuccacaacaagaa

SEQ ID NO: 1589288 - RNA, 19 nt, Homo sapiens
  misc_RNA (1)...(19): siRNA sense strand
ccacuguaccucuucaaca

SEQ ID NO: 1589289 - RNA, 19 nt, Homo sapiens
  misc_RNA (1)...(19): siRNA sense strand
cuggugauaucauugacuu

SEQ ID NO: 1589290 - RNA, 19 nt, Homo sapiens
  misc_RNA (1)...(19): siRNA sense strand
ccacaucagccuguucuca

SEQ ID NO: 1589291 - RNA, 19 nt, Homo sapiens
  misc_RNA (1)...(19): siRNA sense strand
uguaugcaccaaagcuuaa

SEQ ID NO: 1589292 - RNA, 19 nt, Homo sapiens
  misc_RNA (1)...(19): siRNA sense strand
caaggaugaacucggcaaa

SEQ ID NO: 1589293 - RNA, 19 nt, Homo sapiens
  misc_RNA (1)...(19): siRNA sense strand
aauucucucuggccacauu

SEQ ID NO: 1589294 - RNA, 19 nt, Homo sapiens
  misc_RNA (1)...(19): siRNA sense strand
aacagaugcucuucaaggu

SEQ ID NO: 1589295 - RNA, 19 nt, Homo sapiens
  misc_RNA (1)...(19): siRNA sense strand
cggcaaagccauccagaac

SEQ ID NO: 1589296 - RNA, 19 nt, Homo sapiens
  misc_RNA (1)...(19): siRNA sense strand
uagcuggugauaucauuga

SEQ ID NO: 1589297 - RNA, 19 nt, Homo sapiens
  misc_RNA (1)...(19): siRNA sense strand
cauugccucucaucuccaa

SEQ ID NO: 1589298 - RNA, 19 nt, Homo sapiens
  misc_RNA (1)...(19): siRNA sense strand
gagcucacgcugccaaagg

SEQ ID NO: 1589299 - RNA, 19 nt, Homo sapiens
  misc_RNA (1)...(19): siRNA sense strand
gcugaacuccgucaugacu

SEQ ID NO: 1589300 - RNA, 19 nt, Homo sapiens
  misc_RNA (1)...(19): siRNA sense strand
caucuccaaccaguacaua

SEQ ID NO: 1589301 - RNA, 19 nt, Homo sapiens
  misc_RNA (1)...(19): siRNA sense strand
gaagaguguagcuggugau

SEQ ID NO: 1589302 - RNA, 19 nt, Homo sapiens
  misc_RNA (1)...(19): siRNA sense strand
gcaccagcaacuccuacug

SEQ ID NO: 1589303 - RNA, 19 nt, Homo sapiens
  misc_RNA (1)...(19): siRNA sense strand
ggucacacuccacaacaag

SEQ ID NO: 1589304 - RNA, 19 nt, Homo sapiens
  misc_RNA (1)...(19): siRNA sense strand
gccaacaccuucggcaaug

SEQ ID NO: 1589305 - RNA, 19 nt, Homo sapiens
  misc_RNA (1)...(19): siRNA sense strand
gccaggcccucgacuuugu

SEQ ID NO: 1589306 - RNA, 19 nt, Homo sapiens
  misc_RNA (1)...(19): siRNA sense strand
gcugugagcugggacuucu

SEQ ID NO: 1589307 - RNA, 19 nt, Homo sapiens
  misc_RNA (1)...(19): siRNA sense strand
ggcccucacuucccuguuc

SEQ ID NO: 1589308 - RNA, 19 nt, Homo sapiens
  misc_RNA (1)...(19): siRNA sense strand
gcugggauggguagaguga

SEQ ID NO: 1589309 - RNA, 19 nt, Homo sapiens
  misc_RNA (1)...(19): siRNA sense strand
cagcuucccugccauuuug

SEQ ID NO: 1589310 - RNA, 19 nt, Homo sapiens
  misc_RNA (1)...(19): siRNA sense strand
gggcugggauggguagagu

SEQ ID NO: 1589311 - RNA, 19 nt, Homo sapiens
  misc_RNA (1)...(19): siRNA sense strand
gagagagacagcccagagu

SEQ ID NO: 1589312 - RNA, 19 nt, Homo sapiens
  misc_RNA (1)...(19): siRNA sense strand
ggacgacucuuuucuacac

SEQ ID NO: 1589313 - RNA, 19 nt, Homo sapiens
  misc_RNA (1)...(19): siRNA sense strand
gagacagcccagaguggaa

SEQ ID NO: 1589314 - RNA, 19 nt, Homo sapiens
  misc_RNA (1)...(19): siRNA sense strand
gagcuucagcguggagaga

SEQ ID NO: 1589315 - RNA, 19 nt, Homo sapiens
  misc_RNA (1)...(19): siRNA sense strand
acacaguggcucacaaugg

SEQ ID NO: 1589316 - RNA, 19 nt, Homo sapiens
  misc_RNA (1)...(19): siRNA sense strand
acacacaguggcucacaau

SEQ ID NO: 1589317 - RNA, 19 nt, Homo sapiens
  misc_RNA (1)...(19): siRNA sense strand
gccaacaccuucggcaaug

SEQ ID NO: 1589318 - RNA, 19 nt, Homo sapiens
  misc_RNA (1)...(19): siRNA sense strand
gccaggcccucgacuuugu

SEQ ID NO: 1589319 - RNA, 19 nt, Homo sapiens
  misc_RNA (1)...(19): siRNA sense strand
gcugugagcugggacuucu

SEQ ID NO: 1589320 - RNA, 19 nt, Homo sapiens
  misc_RNA (1)...(19): siRNA sense strand
ggcccucacuucccuguuc

SEQ ID NO: 1589321 - RNA, 19 nt, Homo sapiens
  misc_RNA (1)...(19): siRNA sense strand
gcugggauggguagaguga

SEQ ID NO: 1589322 - RNA, 19 nt, Homo sapiens
  misc_RNA (1)...(19): siRNA sense strand
cagcuucccugccauuuug

SEQ ID NO: 1589323 - RNA, 19 nt, Homo sapiens
  misc_RNA (1)...(19): siRNA sense strand
gggcugggauggguagagu

SEQ ID NO: 1589324 - RNA, 19 nt, Homo sapiens
  misc_RNA (1)...(19): siRNA sense strand
gagagagacagcccagagu

SEQ ID NO: 1589325 - RNA, 19 nt, Homo sapiens
  misc_RNA (1)...(19): siRNA sense strand
ggacgacucuuuucuacac

SEQ ID NO: 1589326 - RNA, 19 nt, Homo sapiens
  misc_RNA (1)...(19): siRNA sense strand
gagacagcccagaguggaa

SEQ ID NO: 1589327 - RNA, 19 nt, Homo sapiens
  misc_RNA (1)...(19): siRNA sense strand
gagcuucagcguggagaga

SEQ ID NO: 1589328 - RNA, 19 nt, Homo sapiens
  misc_RNA (1)...(19): siRNA sense strand
acacaguggcucacaaugg

SEQ ID NO: 1589329 - RNA, 19 nt, Homo sapiens
  misc_RNA (1)...(19): siRNA sense strand
acacacaguggcucacaau

SEQ ID NO: 1589330 - RNA, 19 nt, Homo sapiens
  misc_RNA (1)...(19): siRNA sense strand
caaugaagaucaagaagaa

SEQ ID NO: 1589331 - RNA, 19 nt, Homo sapiens
  misc_RNA (1)...(19): siRNA sense strand
gcaaggcagcgaacacaaa

SEQ ID NO: 1589332 - RNA, 19 nt, Homo sapiens
  misc_RNA (1)...(19): siRNA sense strand
cuacaauucuuucccuuuc

SEQ ID NO: 1589333 - RNA, 19 nt, Homo sapiens
  misc_RNA (1)...(19): siRNA sense strand
cauaucccauugucugaaa

SEQ ID NO: 1589334 - RNA, 19 nt, Homo sapiens
  misc_RNA (1)...(19): siRNA sense strand
gaucggacugcccaucaua

SEQ ID NO: 1589335 - RNA, 19 nt, Homo sapiens
  misc_RNA (1)...(19): siRNA sense strand
gaagaagaaauccaacagu

SEQ ID NO: 1589336 - RNA, 19 nt, Homo sapiens
  misc_RNA (1)...(19): siRNA sense strand
ugagcuuuauccugaauuu

SEQ ID NO: 1589337 - RNA, 19 nt, Homo sapiens
  misc_RNA (1)...(19): siRNA sense strand
ccaaugaagaucaagaaga

SEQ ID NO: 1589338 - RNA, 19 nt, Homo sapiens
  misc_RNA (1)...(19): siRNA sense strand
gaauuucuucugguguuua

SEQ ID NO: 1589339 - RNA, 19 nt, Homo sapiens
  misc_RNA (1)...(19): siRNA sense strand
gaagaucaagaagaagaaa

SEQ ID NO: 1589340 - RNA, 19 nt, Homo sapiens
  misc_RNA (1)...(19): siRNA sense strand
gaacagcauacuccagcaa

SEQ ID NO: 1589341 - RNA, 19 nt, Homo sapiens
  misc_RNA (1)...(19): siRNA sense strand
ucaagaagaagaaauccaa

SEQ ID NO: 1589342 - RNA, 19 nt, Homo sapiens
  misc_RNA (1)...(19): siRNA sense strand
cuaaugcacccaaugaaga

SEQ ID NO: 1589343 - RNA, 19 nt, Homo sapiens
  misc_RNA (1)...(19): siRNA sense strand
cgacagaacgaucaaccuu

SEQ ID NO: 1589344 - RNA, 19 nt, Homo sapiens
  misc_RNA (1)...(19): siRNA sense strand
caacaacucaagcccaaca

SEQ ID NO: 1589345 - RNA, 19 nt, Homo sapiens
  misc_RNA (1)...(19): siRNA sense strand
caacagucagaacagcaua

SEQ ID NO: 1589346 - RNA, 19 nt, Homo sapiens
  misc_RNA (1)...(19): siRNA sense strand
ugaauuucuucugguguuu

SEQ ID NO: 1589347 - RNA, 19 nt, Homo sapiens
  misc_RNA (1)...(19): siRNA sense strand
caucauacuccaccucuuc

SEQ ID NO: 1589348 - RNA, 19 nt, Homo sapiens
  misc_RNA (1)...(19): siRNA sense strand
caacucuaaugcacccaau

SEQ ID NO: 1589349 - RNA, 19 nt, Homo sapiens
  misc_RNA (1)...(19): siRNA sense strand
acaauucuuucccuuucuu

SEQ ID NO: 1589350 - RNA, 19 nt, Homo sapiens
  misc_RNA (1)...(19): siRNA sense strand
ucuccacccucuacuucua

SEQ ID NO: 1589351 - RNA, 19 nt, Homo sapiens
  misc_RNA (1)...(19): siRNA sense strand
gcuuuauccugaauuucuu

SEQ ID NO: 1589352 - RNA, 19 nt, Homo sapiens
  misc_RNA (1)...(19): siRNA sense strand
cugaauuucuucugguguu

SEQ ID NO: 1589353 - RNA, 19 nt, Homo sapiens
  misc_RNA (1)...(19): siRNA sense strand
uccaugacauaucccauug

SEQ ID NO: 1589354 - RNA, 19 nt, Homo sapiens
  misc_RNA (1)...(19): siRNA sense strand
agaagaaauccaacaguca

SEQ ID NO: 1589355 - RNA, 19 nt, Homo sapiens
  misc_RNA (1)...(19): siRNA sense strand
ucaagcccaacaacucuaa

SEQ ID NO: 1589356 - RNA, 19 nt, Homo sapiens
  misc_RNA (1)...(19): siRNA sense strand
cgauugccuucacguagga

SEQ ID NO: 1589357 - RNA, 19 nt, Homo sapiens
  misc_RNA (1)...(19): siRNA sense strand
gaaauccaacagucagaac

SEQ ID NO: 1589358 - RNA, 19 nt, Homo sapiens
  misc_RNA (1)...(19): siRNA sense strand
caacucaagcccaacaacu

SEQ ID NO: 1589359 - RNA, 19 nt, Homo sapiens
  misc_RNA (1)...(19): siRNA sense strand
caaggcagcgaacacaaag

SEQ ID NO: 1589360 - RNA, 19 nt, Homo sapiens
  misc_RNA (1)...(19): siRNA sense strand
ugaagaucaagaagaagaa

SEQ ID NO: 1589361 - RNA, 19 nt, Homo sapiens
  misc_RNA (1)...(19): siRNA sense strand
caacauccagcgacagaac

SEQ ID NO: 1589362 - RNA, 19 nt, Homo sapiens
  misc_RNA (1)...(19): siRNA sense strand
gggagaacaacaacucaag

SEQ ID NO: 1589363 - RNA, 19 nt, Homo sapiens
  misc_RNA (1)...(19): siRNA sense strand
gagugagggagaacaacaa

SEQ ID NO: 1589364 - RNA, 19 nt, Homo sapiens
  misc_RNA (1)...(19): siRNA sense strand
aaagagugagggagaacaa

SEQ ID NO: 1589365 - RNA, 19 nt, Homo sapiens
  misc_RNA (1)...(19): siRNA sense strand
acucuaaugcacccaauga

SEQ ID NO: 1589366 - RNA, 19 nt, Homo sapiens
  misc_RNA (1)...(19): siRNA sense strand
ccuacaauucuuucccuuu

SEQ ID NO: 1589367 - RNA, 19 nt, Homo sapiens
  misc_RNA (1)...(19): siRNA sense strand
uaaugcacccaaugaagau

SEQ ID NO: 1589368 - RNA, 19 nt, Homo sapiens
  misc_RNA (1)...(19): siRNA sense strand
gagggagaacaacaacuca

SEQ ID NO: 1589369 - RNA, 19 nt, Homo sapiens
  misc_RNA (1)...(19): siRNA sense strand
cuucuuguacuucugcuuu

SEQ ID NO: 1589370 - RNA, 19 nt, Homo sapiens
  misc_RNA (1)...(19): siRNA sense strand
uacaacauccagcgacaga

SEQ ID NO: 1589371 - RNA, 19 nt, Homo sapiens
  misc_RNA (1)...(19): siRNA sense strand
ugaaagcccagauggaaaa

SEQ ID NO: 1589372 - RNA, 19 nt, Homo sapiens
  misc_RNA (1)...(19): siRNA sense strand
gaggacaccuuugugcaua

SEQ ID NO: 1589373 - RNA, 19 nt, Homo sapiens
  misc_RNA (1)...(19): siRNA sense strand
gcaaagggucccaacauug

SEQ ID NO: 1589374 - RNA, 19 nt, Homo sapiens
  misc_RNA (1)...(19): siRNA sense strand
ggccagaauucacauuauu

SEQ ID NO: 1589375 - RNA, 19 nt, Homo sapiens
  misc_RNA (1)...(19): siRNA sense strand
gcacuggacucuggagaug

SEQ ID NO: 1589376 - RNA, 19 nt, Homo sapiens
  misc_RNA (1)...(19): siRNA sense strand
gcuaugaccuugcggagau

SEQ ID NO: 1589377 - RNA, 19 nt, Homo sapiens
  misc_RNA (1)...(19): siRNA sense strand
gacaagugcaucuauauga

SEQ ID NO: 1589378 - RNA, 19 nt, Homo sapiens
  misc_RNA (1)...(19): siRNA sense strand
ggagggugcuggagugagu

SEQ ID NO: 1589379 - RNA, 19 nt, Homo sapiens
  misc_RNA (1)...(19): siRNA sense strand
gcuguguggugcucgauuu

SEQ ID NO: 1589380 - RNA, 19 nt, Homo sapiens
  misc_RNA (1)...(19): siRNA sense strand
ggacaagugcaucuauaug

SEQ ID NO: 1589381 - RNA, 19 nt, Homo sapiens
  misc_RNA (1)...(19): siRNA sense strand
caaagggucccaacauugu

SEQ ID NO: 1589382 - RNA, 19 nt, Homo sapiens
  misc_RNA (1)...(19): siRNA sense strand
gaacggacaagugcaucua

SEQ ID NO: 1589383 - RNA, 19 nt, Homo sapiens
  misc_RNA (1)...(19): siRNA sense strand
gggccagaauucacauuau

SEQ ID NO: 1589384 - RNA, 19 nt, Homo sapiens
  misc_RNA (1)...(19): siRNA sense strand
gagcagaaacccagagagu

SEQ ID NO: 1589385 - RNA, 19 nt, Homo sapiens
  misc_RNA (1)...(19): siRNA sense strand
ucacaucgaggaauacaga

SEQ ID NO: 1589386 - RNA, 19 nt, Homo sapiens
  misc_RNA (1)...(19): siRNA sense strand
ccagagaguggcuacauug

SEQ ID NO: 1589387 - RNA, 19 nt, Homo sapiens
  misc_RNA (1)...(19): siRNA sense strand
ccagaauucacauuauuga

SEQ ID NO: 1589388 - RNA, 19 nt, Homo sapiens
  misc_RNA (1)...(19): siRNA sense strand
gacccgcauuccaggauuu

SEQ ID NO: 1589389 - RNA, 19 nt, Homo sapiens
  misc_RNA (1)...(19): siRNA sense strand
gccgggugcugguguuuga

SEQ ID NO: 1589390 - RNA, 19 nt, Homo sapiens
  misc_RNA (1)...(19): siRNA sense strand
gcucgcaaccucacguauu

SEQ ID NO: 1589391 - RNA, 19 nt, Homo sapiens
  misc_RNA (1)...(19): siRNA sense strand
gagauucagcaguguguga

SEQ ID NO: 1589392 - RNA, 19 nt, Homo sapiens
  misc_RNA (1)...(19): siRNA sense strand
cucgcaaccucacguauuu

SEQ ID NO: 1589393 - RNA, 19 nt, Homo sapiens
  misc_RNA (1)...(19): siRNA sense strand
agcaaagggucccaacauu

SEQ ID NO: 1589394 - RNA, 19 nt, Homo sapiens
  misc_RNA (1)...(19): siRNA sense strand
ggacaccuuugugcauauc

SEQ ID NO: 1589395 - RNA, 19 nt, Homo sapiens
  misc_RNA (1)...(19): siRNA sense strand
cuacauguccagaucaaug

SEQ ID NO: 1589396 - RNA, 19 nt, Homo sapiens
  misc_RNA (1)...(19): siRNA sense strand
acggacaagugcaucuaua

SEQ ID NO: 1589397 - RNA, 19 nt, Homo sapiens
  misc_RNA (1)...(19): siRNA sense strand
gccagaauucacauuauug

SEQ ID NO: 1589398 - RNA, 19 nt, Homo sapiens
  misc_RNA (1)...(19): siRNA sense strand
gcuacaccauggucuacug

SEQ ID NO: 1589399 - RNA, 19 nt, Homo sapiens
  misc_RNA (1)...(19): siRNA sense strand
cagcaaagggucccaacau

SEQ ID NO: 1589400 - RNA, 19 nt, Homo sapiens
  misc_RNA (1)...(19): siRNA sense strand
acaagugcaucuauaugag

SEQ ID NO: 1589401 - RNA, 19 nt, Homo sapiens
  misc_RNA (1)...(19): siRNA sense strand
uacaggaaaucuacauguc

SEQ ID NO: 1589402 - RNA, 19 nt, Homo sapiens
  misc_RNA (1)...(19): siRNA sense strand
cccagagaguggcuacauu

SEQ ID NO: 1589403 - RNA, 19 nt, Homo sapiens
  misc_RNA (1)...(19): siRNA sense strand
cccuggaccuggcuucuga

SEQ ID NO: 1589404 - RNA, 19 nt, Homo sapiens
  misc_RNA (1)...(19): siRNA sense strand
ggugacggcagaugacuca

SEQ ID NO: 1589405 - RNA, 19 nt, Homo sapiens
  misc_RNA (1)...(19): siRNA sense strand
cuacaggaaaucuacaugu

SEQ ID NO: 1589406 - RNA, 19 nt, Homo sapiens
  misc_RNA (1)...(19): siRNA sense strand
ugaggccacuacaggaaau

SEQ ID NO: 1589407 - RNA, 19 nt, Homo sapiens
  misc_RNA (1)...(19): siRNA sense strand
aaagggucccaacauugua

SEQ ID NO: 1589408 - RNA, 19 nt, Homo sapiens
  misc_RNA (1)...(19): siRNA sense strand
caacuccuuugcugugacu

SEQ ID NO: 1589409 - RNA, 19 nt, Homo sapiens
  misc_RNA (1)...(19): siRNA sense strand
cagagaguggcuacauuga

SEQ ID NO: 1589410 - RNA, 19 nt, Homo sapiens
  misc_RNA (1)...(19): siRNA sense strand
ugacccgcauuccaggauu

SEQ ID NO: 1589411 - RNA, 19 nt, Homo sapiens
  misc_RNA (1)...(19): siRNA sense strand
gcggucagggccagaauuc

SEQ ID NO: 1589412 - RNA, 19 nt, Homo sapiens
  misc_RNA (1)...(19): siRNA sense strand
cggacaagugcaucuauau

SEQ ID NO: 1589413 - RNA, 19 nt, Homo sapiens
  misc_RNA (1)...(19): siRNA sense strand
ggugcucgauuuugugauu

SEQ ID NO: 1589414 - RNA, 19 nt, Homo sapiens
  misc_RNA (1)...(19): siRNA sense strand
uaugaggccacuacaggaa

SEQ ID NO: 1589415 - RNA, 19 nt, Homo sapiens
  misc_RNA (1)...(19): siRNA sense strand
gagguggaacacugucaug

SEQ ID NO: 1589416 - RNA, 19 nt, Homo sapiens
  misc_RNA (1)...(19): siRNA sense strand
ggucccaacauuguacuga

SEQ ID NO: 1589417 - RNA, 19 nt, Homo sapiens
  misc_RNA (1)...(19): siRNA sense strand
gaaacaacuuugaggauga

SEQ ID NO: 1589418 - RNA, 19 nt, Homo sapiens
  misc_RNA (1)...(19): siRNA sense strand
gcaauuggaugucuaggaa

SEQ ID NO: 1589419 - RNA, 19 nt, Homo sapiens
  misc_RNA (1)...(19): siRNA sense strand
ggaugagccaccuuuauua

SEQ ID NO: 1589420 - RNA, 19 nt, Homo sapiens
  misc_RNA (1)...(19): siRNA sense strand
ucacagcaguccuaugauu

SEQ ID NO: 1589421 - RNA, 19 nt, Homo sapiens
  misc_RNA (1)...(19): siRNA sense strand
cagcaucgaugaucaguca

SEQ ID NO: 1589422 - RNA, 19 nt, Homo sapiens
  misc_RNA (1)...(19): siRNA sense strand
gauccuacuuuccagcuuu

SEQ ID NO: 1589423 - RNA, 19 nt, Homo sapiens
  misc_RNA (1)...(19): siRNA sense strand
ggaaguggaggacccuaua

SEQ ID NO: 1589424 - RNA, 19 nt, Homo sapiens
  misc_RNA (1)...(19): siRNA sense strand
ugagccaccuuuauuagaa

SEQ ID NO: 1589425 - RNA, 19 nt, Homo sapiens
  misc_RNA (1)...(19): siRNA sense strand
gaagaguuagguaucaauu

SEQ ID NO: 1589426 - RNA, 19 nt, Homo sapiens
  misc_RNA (1)...(19): siRNA sense strand
caaacaguaugcuggcuau

SEQ ID NO: 1589427 - RNA, 19 nt, Homo sapiens
  misc_RNA (1)...(19): siRNA sense strand
caaguuacagcaucgauga

SEQ ID NO: 1589428 - RNA, 19 nt, Homo sapiens
  misc_RNA (1)...(19): siRNA sense strand
ggaaggacagcaacuuuua

SEQ ID NO: 1589429 - RNA, 19 nt, Homo sapiens
  misc_RNA (1)...(19): siRNA sense strand
ugacagguguuucauuugg

SEQ ID NO: 1589430 - RNA, 19 nt, Homo sapiens
  misc_RNA (1)...(19): siRNA sense strand
gcaguccuaugauuaugga

SEQ ID NO: 1589431 - RNA, 19 nt, Homo sapiens
  misc_RNA (1)...(19): siRNA sense strand
uagcauauccuugcgcuuu

SEQ ID NO: 1589432 - RNA, 19 nt, Homo sapiens
  misc_RNA (1)...(19): siRNA sense strand
cacagcaguccuaugauua

SEQ ID NO: 1589433 - RNA, 19 nt, Homo sapiens
  misc_RNA (1)...(19): siRNA sense strand
gaggaugagccaccuuuau

SEQ ID NO: 1589434 - RNA, 19 nt, Homo sapiens
  misc_RNA (1)...(19): siRNA sense strand
ggaggacccuauagcaaac

SEQ ID NO: 1589435 - RNA, 19 nt, Homo sapiens
  misc_RNA (1)...(19): siRNA sense strand
cagcuucaccucagccuuu

SEQ ID NO: 1589436 - RNA, 19 nt, Homo sapiens
  misc_RNA (1)...(19): siRNA sense strand
gaugagccaccuuuauuag

SEQ ID NO: 1589437 - RNA, 19 nt, Homo sapiens
  misc_RNA (1)...(19): siRNA sense strand
ccauacaccgggcagauuu

SEQ ID NO: 1589438 - RNA, 19 nt, Homo sapiens
  misc_RNA (1)...(19): siRNA sense strand
agucacagcaguccuauga

SEQ ID NO: 1589439 - RNA, 19 nt, Homo sapiens
  misc_RNA (1)...(19): siRNA sense strand
gaucagugcaauuggaugu

SEQ ID NO: 1589440 - RNA, 19 nt, Homo sapiens
  misc_RNA (1)...(19): siRNA sense strand
gacccuauagcaaacagua

SEQ ID NO: 1589441 - RNA, 19 nt, Homo sapiens
  misc_RNA (1)...(19): siRNA sense strand
auuauuggaugguguaguu

SEQ ID NO: 1589442 - RNA, 19 nt, Homo sapiens
  misc_RNA (1)...(19): siRNA sense strand
gcaaggaaugguaggaauc

SEQ ID NO: 1589443 - RNA, 19 nt, Homo sapiens
  misc_RNA (1)...(19): siRNA sense strand
uuagaagaguuagguauca

SEQ ID NO: 1589444 - RNA, 19 nt, Homo sapiens
  misc_RNA (1)...(19): siRNA sense strand
ccucagccuuucuauggaa

SEQ ID NO: 1589445 - RNA, 19 nt, Homo sapiens
  misc_RNA (1)...(19): siRNA sense strand
cagcuuugcagugauauuu

SEQ ID NO: 1589446 - RNA, 19 nt, Homo sapiens
  misc_RNA (1)...(19): siRNA sense strand
ccagccaacucaggcauau

SEQ ID NO: 1589447 - RNA, 19 nt, Homo sapiens
  misc_RNA (1)...(19): siRNA sense strand
gaguaugacagguguuuca

SEQ ID NO: 1589448 - RNA, 19 nt, Homo sapiens
  misc_RNA (1)...(19): siRNA sense strand
uagaagaguuagguaucaa

SEQ ID NO: 1589449 - RNA, 19 nt, Homo sapiens
  misc_RNA (1)...(19): siRNA sense strand
gagccaccuuuauuagaag

SEQ ID NO: 1589450 - RNA, 19 nt, Homo sapiens
  misc_RNA (1)...(19): siRNA sense strand
gaaguggaggacccuauag

SEQ ID NO: 1589451 - RNA, 19 nt, Homo sapiens
  misc_RNA (1)...(19): siRNA sense strand
gcauauccuugcgcuuugu

SEQ ID NO: 1589452 - RNA, 19 nt, Homo sapiens
  misc_RNA (1)...(19): siRNA sense strand
gggauuauuggauggugua

SEQ ID NO: 1589453 - RNA, 19 nt, Homo sapiens
  misc_RNA (1)...(19): siRNA sense strand
guccuuggauauugucuuc

SEQ ID NO: 1589454 - RNA, 19 nt, Homo sapiens
  misc_RNA (1)...(19): siRNA sense strand
aggaugagccaccuuuauu

SEQ ID NO: 1589455 - RNA, 19 nt, Homo sapiens
  misc_RNA (1)...(19): siRNA sense strand
ggcauauacuccagcuuca

SEQ ID NO: 1589456 - RNA, 19 nt, Homo sapiens
  misc_RNA (1)...(19): siRNA sense strand
guuacagcaucgaugauca

SEQ ID NO: 1589457 - RNA, 19 nt, Homo sapiens
  misc_RNA (1)...(19): siRNA sense strand
uggaggacccuauagcaaa

SEQ ID NO: 1589458 - RNA, 19 nt, Homo sapiens
  misc_RNA (1)...(19): siRNA sense strand
caaggaaugguaggaauca

SEQ ID NO: 1589459 - RNA, 19 nt, Homo sapiens
  misc_RNA (1)...(19): siRNA sense strand
cauacaccgggcagauuua

SEQ ID NO: 1589460 - RNA, 19 nt, Homo sapiens
  misc_RNA (1)...(19): siRNA sense strand
gcagugauauuuucuuugc

SEQ ID NO: 1589461 - RNA, 19 nt, Homo sapiens
  misc_RNA (1)...(19): siRNA sense strand
acagguguuucauuugguu

SEQ ID NO: 1589462 - RNA, 19 nt, Homo sapiens
  misc_RNA (1)...(19): siRNA sense strand
cagcaguccuaugauuaug

SEQ ID NO: 1589463 - RNA, 19 nt, Homo sapiens
  misc_RNA (1)...(19): siRNA sense strand
ucucacugcugggauuauu

SEQ ID NO: 1589464 - RNA, 19 nt, Homo sapiens
  misc_RNA (1)...(19): siRNA sense strand
aauuggaugucuaggaaug

SEQ ID NO: 1589465 - RNA, 19 nt, Homo sapiens
  misc_RNA (1)...(19): siRNA sense strand
caccucagccuuucuaugg

SEQ ID NO: 1589466 - RNA, 19 nt, Homo sapiens
  misc_RNA (1)...(19): siRNA sense strand
aauccaguuuggcuaugua

SEQ ID NO: 1589467 - RNA, 19 nt, Homo sapiens
  misc_RNA (1)...(19): siRNA sense strand
ggacagcaacuuuuaguag

SEQ ID NO: 1589468 - RNA, 19 nt, Homo sapiens
  misc_RNA (1)...(19): siRNA sense strand
gcuacuggcuggcaaaauc

SEQ ID NO: 1589469 - RNA, 19 nt, Homo sapiens
  misc_RNA (1)...(19): siRNA sense strand
cauucucacugcugggauu

SEQ ID NO: 1589470 - RNA, 19 nt, Homo sapiens
  misc_RNA (1)...(19): siRNA sense strand
uuccagcuuugcagugaua

SEQ ID NO: 1589471 - RNA, 19 nt, Homo sapiens
  misc_RNA (1)...(19): siRNA sense strand
cgggaucagugcaauugga

SEQ ID NO: 1589472 - RNA, 19 nt, Homo sapiens
  misc_RNA (1)...(19): siRNA sense strand
ugaggaugagccaccuuua

SEQ ID NO: 1589473 - RNA, 19 nt, Homo sapiens
  misc_RNA (1)...(19): siRNA sense strand
uggagucuuugcccugauu

SEQ ID NO: 1589474 - RNA, 19 nt, Homo sapiens
  misc_RNA (1)...(19): siRNA sense strand
acacuaacaguauuacauc

SEQ ID NO: 1589475 - RNA, 19 nt, Homo sapiens
  misc_RNA (1)...(19): siRNA sense strand
gcagcaaggcagauuuguc

SEQ ID NO: 1589476 - RNA, 19 nt, Homo sapiens
  misc_RNA (1)...(19): siRNA sense strand
gauauuuucuuugcaagga

SEQ ID NO: 1589477 - RNA, 19 nt, Homo sapiens
  misc_RNA (1)...(19): siRNA sense strand
aaacuuaaacacggauuuc

SEQ ID NO: 1589478 - RNA, 19 nt, Homo sapiens
  misc_RNA (1)...(19): siRNA sense strand
aaacaacuuugaggaugag

SEQ ID NO: 1589479 - RNA, 19 nt, Homo sapiens
  misc_RNA (1)...(19): siRNA sense strand
acagcaguccuaugauuau

SEQ ID NO: 1589480 - RNA, 19 nt, Homo sapiens
  misc_RNA (1)...(19): siRNA sense strand
gacagguguuucauuuggu

SEQ ID NO: 1589481 - RNA, 19 nt, Homo sapiens
  misc_RNA (1)...(19): siRNA sense strand
ccaguuuggcuauguauac

SEQ ID NO: 1589482 - RNA, 19 nt, Homo sapiens
  misc_RNA (1)...(19): siRNA sense strand
guggaggacccuauagcaa

SEQ ID NO: 1589483 - RNA, 19 nt, Homo sapiens
  misc_RNA (1)...(19): siRNA sense strand
uccuugcgcuuuguuauau

SEQ ID NO: 1589484 - RNA, 19 nt, Homo sapiens
  misc_RNA (1)...(19): siRNA sense strand
aacaguauuacauccguua

SEQ ID NO: 1589485 - RNA, 19 nt, Homo sapiens
  misc_RNA (1)...(19): siRNA sense strand
gucaggcuuugaaaacuua

SEQ ID NO: 1589486 - RNA, 19 nt, Homo sapiens
  misc_RNA (1)...(19): siRNA sense strand
caguauuacauccguuaaa

SEQ ID NO: 1589487 - RNA, 19 nt, Homo sapiens
  misc_RNA (1)...(19): siRNA sense strand
ugcaaggaaugguaggaau

SEQ ID NO: 1589488 - RNA, 19 nt, Homo sapiens
  misc_RNA (1)...(19): siRNA sense strand
uaugcuggcuaugacuauu

SEQ ID NO: 1589489 - RNA, 19 nt, Homo sapiens
  misc_RNA (1)...(19): siRNA sense strand
uuacauccguuaaaaguag

SEQ ID NO: 1589490 - RNA, 19 nt, Homo sapiens
  misc_RNA (1)...(19): siRNA sense strand
gccauacaccgggcagauu

SEQ ID NO: 1589491 - RNA, 19 nt, Homo sapiens
  misc_RNA (1)...(19): siRNA sense strand
agauuuaccagccaacuca

SEQ ID NO: 1589492 - RNA, 19 nt, Homo sapiens
  misc_RNA (1)...(19): siRNA sense strand
caugaaugaaacugauuug

SEQ ID NO: 1589493 - RNA, 19 nt, Homo sapiens
  misc_RNA (1)...(19): siRNA sense strand
ccagagaggagcugagaua

SEQ ID NO: 1589494 - RNA, 19 nt, Homo sapiens
  misc_RNA (1)...(19): siRNA sense strand
gugacugggugaaguguuu

SEQ ID NO: 1589495 - RNA, 19 nt, Homo sapiens
  misc_RNA (1)...(19): siRNA sense strand
caucaccccuuauuuggaa

SEQ ID NO: 1589496 - RNA, 19 nt, Homo sapiens
  misc_RNA (1)...(19): siRNA sense strand
acacaucaccccuuauuug

SEQ ID NO: 1589497 - RNA, 19 nt, Homo sapiens
  misc_RNA (1)...(19): siRNA sense strand
acucacacaucaccccuua

SEQ ID NO: 1589498 - RNA, 19 nt, Homo sapiens
  misc_RNA (1)...(19): siRNA sense strand
gccucucucucuccucuuc

SEQ ID NO: 1589499 - RNA, 19 nt, Homo sapiens
  misc_RNA (1)...(19): siRNA sense strand
uaacgaaccugaagaaguu

SEQ ID NO: 1589500 - RNA, 19 nt, Homo sapiens
  misc_RNA (1)...(19): siRNA sense strand
gaaacaguccuauucuuua

SEQ ID NO: 1589501 - RNA, 19 nt, Homo sapiens
  misc_RNA (1)...(19): siRNA sense strand
gaagaggaauggagugaga

SEQ ID NO: 1589502 - RNA, 19 nt, Homo sapiens
  misc_RNA (1)...(19): siRNA sense strand
ggaaacaguccuauucuuu

SEQ ID NO: 1589503 - RNA, 19 nt, Homo sapiens
  misc_RNA (1)...(19): siRNA sense strand
acagggagcuggaguauga

SEQ ID NO: 1589504 - RNA, 19 nt, Homo sapiens
  misc_RNA (1)...(19): siRNA sense strand
ccaagggagugaccuauuu

SEQ ID NO: 1589505 - RNA, 19 nt, Homo sapiens
  misc_RNA (1)...(19): siRNA sense strand
gaagcucgaugcuggguuu

SEQ ID NO: 1589506 - RNA, 19 nt, Homo sapiens
  misc_RNA (1)...(19): siRNA sense strand
caauaucgcuccaguguuc

SEQ ID NO: 1589507 - RNA, 19 nt, Homo sapiens
  misc_RNA (1)...(19): siRNA sense strand
gcacuggccuggugacuuc

SEQ ID NO: 1589508 - RNA, 19 nt, Homo sapiens
  misc_RNA (1)...(19): siRNA sense strand
gaaaacagcucuccaugga

SEQ ID NO: 1589509 - RNA, 19 nt, Homo sapiens
  misc_RNA (1)...(19): siRNA sense strand
gcccucagaugaaggcuua

SEQ ID NO: 1589510 - RNA, 19 nt, Homo sapiens
  misc_RNA (1)...(19): siRNA sense strand
gagaagggcacaagauuau

SEQ ID NO: 1589511 - RNA, 19 nt, Homo sapiens
  misc_RNA (1)...(19): siRNA sense strand
gaauagccaucacauugga

SEQ ID NO: 1589512 - RNA, 19 nt, Homo sapiens
  misc_RNA (1)...(19): siRNA sense strand
gagcacuccugcaaagaaa

SEQ ID NO: 1589513 - RNA, 19 nt, Homo sapiens
  misc_RNA (1)...(19): siRNA sense strand
gcagggcagugaccgagua

SEQ ID NO: 1589514 - RNA, 19 nt, Homo sapiens
  misc_RNA (1)...(19): siRNA sense strand
ccagaauccucgauacaaa

SEQ ID NO: 1589515 - RNA, 19 nt, Homo sapiens
  misc_RNA (1)...(19): siRNA sense strand
ucauagagccaccauauuu

SEQ ID NO: 1589516 - RNA, 19 nt, Homo sapiens
  misc_RNA (1)...(19): siRNA sense strand
cagaauagccaucacauug

SEQ ID NO: 1589517 - RNA, 19 nt, Homo sapiens
  misc_RNA (1)...(19): siRNA sense strand
gagcauagcaagagauguu

SEQ ID NO: 1589518 - RNA, 19 nt, Homo sapiens
  misc_RNA (1)...(19): siRNA sense strand
gaagacaccucaccaucag

SEQ ID NO: 1589519 - RNA, 19 nt, Homo sapiens
  misc_RNA (1)...(19): siRNA sense strand
gcugcgagauuguuucuga

SEQ ID NO: 1589520 - RNA, 19 nt, Homo sapiens
  misc_RNA (1)...(19): siRNA sense strand
gaggacaucugcaacaagu

SEQ ID NO: 1589521 - RNA, 19 nt, Homo sapiens
  misc_RNA (1)...(19): siRNA sense strand
ggaccagaaugggcucaua

SEQ ID NO: 1589522 - RNA, 19 nt, Homo sapiens
  misc_RNA (1)...(19): siRNA sense strand
gagauggaccuaagaguga

SEQ ID NO: 1589523 - RNA, 19 nt, Homo sapiens
  misc_RNA (1)...(19): siRNA sense strand
gcuacaagauuuacuacug

SEQ ID NO: 1589524 - RNA, 19 nt, Homo sapiens
  misc_RNA (1)...(19): siRNA sense strand
aagaugauguugcuccaua

SEQ ID NO: 1589525 - RNA, 19 nt, Homo sapiens
  misc_RNA (1)...(19): siRNA sense strand
gcagacagccagaacgaaa

SEQ ID NO: 1589526 - RNA, 19 nt, Homo sapiens
  misc_RNA (1)...(19): siRNA sense strand
ggaagacaccucaccauca

SEQ ID NO: 1589527 - RNA, 19 nt, Homo sapiens
  misc_RNA (1)...(19): siRNA sense strand
gagaccaccuuggaaugua

SEQ ID NO: 1589528 - RNA, 19 nt, Homo sapiens
  misc_RNA (1)...(19): siRNA sense strand
ggaaggugcaucugucaaa

SEQ ID NO: 1589529 - RNA, 19 nt, Homo sapiens
  misc_RNA (1)...(19): siRNA sense strand
gcacgacgcacgaguacaa

SEQ ID NO: 1589530 - RNA, 19 nt, Homo sapiens
  misc_RNA (1)...(19): siRNA sense strand
ccaaguaccuggucagcau

SEQ ID NO: 1589531 - RNA, 19 nt, Homo sapiens
  misc_RNA (1)...(19): siRNA sense strand
gaaagccaccaacgacauu

SEQ ID NO: 1589532 - RNA, 19 nt, Homo sapiens
  misc_RNA (1)...(19): siRNA sense strand
guacauuauuccaucuuug

SEQ ID NO: 1589533 - RNA, 19 nt, Homo sapiens
  misc_RNA (1)...(19): siRNA sense strand
cauccaaccuggucauuuc

SEQ ID NO: 1589534 - RNA, 19 nt, Homo sapiens
  misc_RNA (1)...(19): siRNA sense strand
ucaaggacgugcagcgauu

SEQ ID NO: 1589535 - RNA, 19 nt, Homo sapiens
  misc_RNA (1)...(19): siRNA sense strand
ggacgugcagcgauucuaa

SEQ ID NO: 1589536 - RNA, 19 nt, Homo sapiens
  misc_RNA (1)...(19): siRNA sense strand
cacuacagauuucgaauga

SEQ ID NO: 1589537 - RNA, 19 nt, Homo sapiens
  misc_RNA (1)...(19): siRNA sense strand
gauggaaacaguccuauuc

SEQ ID NO: 1589538 - RNA, 19 nt, Homo sapiens
  misc_RNA (1)...(19): siRNA sense strand
ugauugaacugccucauuc

SEQ ID NO: 1589539 - RNA, 19 nt, Homo sapiens
  misc_RNA (1)...(19): siRNA sense strand
ucgcauauaugggaaguuu

SEQ ID NO: 1589540 - RNA, 19 nt, Homo sapiens
  misc_RNA (1)...(19): siRNA sense strand
ggcagaauaagaaguauaa

SEQ ID NO: 1589541 - RNA, 19 nt, Homo sapiens
  misc_RNA (1)...(19): siRNA sense strand
uaauaaugaccgccuauaa

SEQ ID NO: 1589542 - RNA, 19 nt, Homo sapiens
  misc_RNA (1)...(19): siRNA sense strand
ucucaucucucaccaccua

SEQ ID NO: 1589543 - RNA, 19 nt, Homo sapiens
  misc_RNA (1)...(19): siRNA sense strand
caagacaagcccauucauu

SEQ ID NO: 1589544 - RNA, 19 nt, Homo sapiens
  misc_RNA (1)...(19): siRNA sense strand
gaagggcacaagauuauuc

SEQ ID NO: 1589545 - RNA, 19 nt, Homo sapiens
  misc_RNA (1)...(19): siRNA sense strand
caaggccucucaucucuca

SEQ ID NO: 1589546 - RNA, 19 nt, Homo sapiens
  misc_RNA (1)...(19): siRNA sense strand
gaaaagagaaaaccacauu

SEQ ID NO: 1589547 - RNA, 19 nt, Homo sapiens
  misc_RNA (1)...(19): siRNA sense strand
gagcuggccuuuggaguuc

SEQ ID NO: 1589548 - RNA, 19 nt, Homo sapiens
  misc_RNA (1)...(19): siRNA sense strand
gacgaugugugaacuaaca

SEQ ID NO: 1589549 - RNA, 19 nt, Homo sapiens
  misc_RNA (1)...(19): siRNA sense strand
caucauagagccaccauau

SEQ ID NO: 1589550 - RNA, 19 nt, Homo sapiens
  misc_RNA (1)...(19): siRNA sense strand
gauguuggcacaccugaaa

SEQ ID NO: 1589551 - RNA, 19 nt, Homo sapiens
  misc_RNA (1)...(19): siRNA sense strand
gaaguucaagucgcauaua

SEQ ID NO: 1589552 - RNA, 19 nt, Homo sapiens
  misc_RNA (1)...(19): siRNA sense strand
gacuacagcugcgagauug

SEQ ID NO: 1589553 - RNA, 19 nt, Homo sapiens
  misc_RNA (1)...(19): siRNA sense strand
ugaagcaagugaacauugu

SEQ ID NO: 1589554 - RNA, 19 nt, Homo sapiens
  misc_RNA (1)...(19): siRNA sense strand
agagaagggcacaagauua

SEQ ID NO: 1589555 - RNA, 19 nt, Homo sapiens
  misc_RNA (1)...(19): siRNA sense strand
ugaccacgcugcaggaugu

SEQ ID NO: 1589556 - RNA, 19 nt, Homo sapiens
  misc_RNA (1)...(19): siRNA sense strand
cuacagauuucgaaugaag

SEQ ID NO: 1589557 - RNA, 19 nt, Homo sapiens
  misc_RNA (1)...(19): siRNA sense strand
gggaugacagccauucuaa

SEQ ID NO: 1589558 - RNA, 19 nt, Homo sapiens
  misc_RNA (1)...(19): siRNA sense strand
gaugcuaccugaagaacca

SEQ ID NO: 1589559 - RNA, 19 nt, Homo sapiens
  misc_RNA (1)...(19): siRNA sense strand
gaagucggcagaugcauca

SEQ ID NO: 1589560 - RNA, 19 nt, Homo sapiens
  misc_RNA (1)...(19): siRNA sense strand
gaacauccaaggcuacaag

SEQ ID NO: 1589561 - RNA, 19 nt, Homo sapiens
  misc_RNA (1)...(19): siRNA sense strand
ggacagugacuucaguuca

SEQ ID NO: 1589562 - RNA, 19 nt, Homo sapiens
  misc_RNA (1)...(19): siRNA sense strand
ucaaguggaugcgcgauga

SEQ ID NO: 1589563 - RNA, 19 nt, Homo sapiens
  misc_RNA (1)...(19): siRNA sense strand
ccucagcaguuuaucaaug

SEQ ID NO: 1589564 - RNA, 19 nt, Homo sapiens
  misc_RNA (1)...(19): siRNA sense strand
gcauauaugggaaguuuca

SEQ ID NO: 1589565 - RNA, 19 nt, Homo sapiens
  misc_RNA (1)...(19): siRNA sense strand
gcuacaggauuaaguacug

SEQ ID NO: 1589566 - RNA, 19 nt, Homo sapiens
  misc_RNA (1)...(19): siRNA sense strand
gaaugaagcaagugaacau

SEQ ID NO: 1589567 - RNA, 19 nt, Homo sapiens
  misc_RNA (1)...(19): siRNA sense strand
cgagauuguuucugaagga

SEQ ID NO: 1589568 - RNA, 19 nt, Homo sapiens
  misc_RNA (1)...(19): siRNA sense strand
ggagcuggccuuuggaguu

SEQ ID NO: 1589569 - RNA, 19 nt, Homo sapiens
  misc_RNA (1)...(19): siRNA sense strand
cagcgaauauaaguacauu

SEQ ID NO: 1589570 - RNA, 19 nt, Homo sapiens
  misc_RNA (1)...(19): siRNA sense strand
caagcccauucauucauuu

SEQ ID NO: 1589571 - RNA, 19 nt, Homo sapiens
  misc_RNA (1)...(19): siRNA sense strand
gauacaggaucuacuacag

SEQ ID NO: 1589572 - RNA, 19 nt, Homo sapiens
  misc_RNA (1)...(19): siRNA sense strand
ucagaucucuugggaagug

SEQ ID NO: 1589573 - RNA, 19 nt, Homo sapiens
  misc_RNA (1)...(19): siRNA sense strand
gcaaagaaaaucagaaguu

SEQ ID NO: 1589574 - RNA, 19 nt, Homo sapiens
  misc_RNA (1)...(19): siRNA sense strand
gcccggaggugaacuacug

SEQ ID NO: 1589575 - RNA, 19 nt, Homo sapiens
  misc_RNA (1)...(19): siRNA sense strand
agaagaaacuguggacauc

SEQ ID NO: 1589576 - RNA, 19 nt, Homo sapiens
  misc_RNA (1)...(19): siRNA sense strand
acaagcccauucauucauu
